United States Patent Application Publication US 2005/0153317 A1 - sequence listing, part 13

SEQ ID NO: 55771 - DNA, 600 bp, Chicken  19866894309718_1
tctggccattataccaccttctgccaagttgaactatttagtagaaataagttagttaaaatacaaattttgaattcactgtactatcatcttcagcagaaacagtgagctttcaaagcactctacttaggaaacaaacaaaaaaccaaacccacaaacctcaaaaccataccagcaggaaaacagaagtactactagtacttctagtagtgtgctgtgcagagggctacctttctgacagggtgctttgatggttatgttagactgcttcccttctccttttgttgttcccccttgtarttacagacagcagacacgaggtgaggggaaaaatacaaaacaagtttattaaagtctaacataaaacacttcaggctaaatatgtacaactccctgcccaggagattataaaatcgagagttgagctatatacaaataacagaggaaatgctgtatatacatgaaagatacttcaaaaataatttaaccaaaaatcagtcattactcataattctgctgcaaggcttatcaatatcctctccaaagtcacagccctgaaatccttgatgaaggactcrtccatacttgacaacttttctt

SEQ ID NO: 55772 - DNA, 566 bp, Chicken  19866894309718_2
cttttgttgttcccccttgtarttacagacagcagacacgaggtgaggggaaaaatacaaaacaagtttattaaagtctaacataaaacacttcaggctaaatatgtacaactccctgcccaggagattataaaatcgagagttgagctatatacaaataacagaggaaatgctgtatatacatgaaagatacttcaaaaataatttaaccaaaaatcagtcattactcataattctgctgcaaggcttatcaatatcctctccaaagtcacagccctgaaatccttgatgaaggactcrtccatacttgacaacttttcttaraccatatgtttcaagaaagcttttgtactttgtgcctacggataggcacaaattcagataaatgccatacaaggagttattctaacataagtatttgaaacagccaattcagaaatgtatagttgcaaataatctattcaggtagaactgaaatactactgaaacaatgatgtttctgagataaattaagtcattttctctaaattaccaataatggattaaaattctctttttattttgca

SEQ ID NO: 55773 - DNA, 542 bp, Chicken  19866894309718_3
acagacagcagacacgaggtgaggggaaaaatacaaaacaagtttattaaagtctaacataaaacacttcaggctaaatatgtacaactccctgcccaggagattataaaatcgagagttgagctatatacaaataacagaggaaatgctgtatatacatgaaagatacttcaaaaataatttaaccaaaaatcagtcattactcataattctgctgcaaggcttatcaatatcctctccaaagtcacagccctgaaatccttgatgaaggactcrtccatacttgacaacttttcttaraccatatgtttcaagaaagcttttgtactttgtgcctacggataggcacaaattcagataaatgccatacaaggagttattctaacataagtatttgaaacagccaattcagaaatgtatagttgcaaataatctattcaggtagaactgaaatactactgaaacaatgatgtttctgagataaattaagtcattttctctaaattaccaataatggattaaaattctctttttattttgca

SEQ ID NO: 55774 - DNA, 600 bp, Chicken  19866894309721_1
attatcctctgagtctgcccatgaattcgtgtcagccacaggaaggaaaggaccgccccggcccaccgctaacacacacagaggtgagggctgatccctccaccccaaagtgagtactttcgagttgccatggaaacagatggatgggaccactcgcattttgttgctactactgcttagaagggctttgcacttcctctgttgacagcagtcccagccccagcgccaagggggccccaggatttgattggctgtaccccattgcacaccgcagctcatcacctgctcccctgcagctcytgaaggctttagccccagtaatgaggtgctttgctcctcaagctgagcagaacagccaacccagggagcagtaacgtgggtgtgccatgccaccacyacactgatggttgcagagcagcatctgcccccagcctgtttttaatcccattgacatctgccatgttcttcacctcattttatctctataatccaaatgctttgagcaccgactcaaccacctgcacaagacgcggtgcactacatcaacattattacctttatcaagcaaagttgtaatgtaatcaaaaagatatcagctcc

SEQ ID NO: 55775 - DNA, 600 bp, Chicken  19866894309721_2
ctccaccccaaagtgagtactttcgagttgccatggaaacagatggatgggaccactcgcattttgttgctactactgcttagaagggctttgcacttcctctgttgacagcagtcccagccccagcgccaagggggccccaggatttgattggctgtaccccattgcacaccgcagctcatcacctgctcccctgcagctcytgaaggctttagccccagtaatgaggtgctttgctcctcaagctgagcagaacagccaacccagggagcagtaacgtgggtgtgccatgccaccacyacactgatggttgcagagcagcatctgcccccagcctgtttttaatcccattgacatctgccatgttcttcacctcattttatctctataatccaaatgctttgagcaccgactcaaccacctgcacaagacgcggtgcactacatcaacattattacctttatcaagcaaagttgtaatgtaatcaaaaagatatcagctccatttgacaagaactattttccatgcacctctgttgattggcacttattatattatctcctttaattttttattaatcaggtcccatatcagctcttc

SEQ ID NO: 55776 - DNA, 600 bp, Chicken  19866894309732_1
cataatgagagcagcctgggctgcttgaatctgcctctccaagagcctaattgtttttaaatgtctttgctaaccacttcacatagagcccataaatctggtttggggtaactgagagccaggcttctgagctcccttttaggatgacacatttgtgtgttaattaaaaacatgcttaggaagatgtaatccttcagtctttaaatgcactgtgctgcagaagggtctgggtgcaaattatcccgagcagcagaatgacctcctgctggggctcggcaaaactaatggtccccaacaagmactgagacattttgttccttgctgtgatatatctgcccttattttgaagaagtctttggagatttgatgcttgcagccaccgtacgtacagccgtggtttgttttccatccgactcgttccatcatgattatggcgacagagaaggttgctttatttaatggtgccctatggcgtgactgcaacgatcctcaagctcctctgctatttccagaaatactcgttcctgcaaggtacattctttgaagctaaacagcaaagaaaatctgaagagggaaagatgaagggaatgggtaaatata

SEQ ID NO: 55777 - DNA, 600 bp, Chicken  19866894309734_1
gtgctgcttgttttgtttgtgtgcttcctgtagctatctcagcgacgtggatcgtatcgctaccccgggatatctaccaactcagcaagatgtgctacgggttcgagttcctacgactgggatcatagagtaccccttttgacctagagaatattatcttcaggtactgagggtgtgttcgtgttacagctgaactgagaggagagtgattcagttttgggaaggatgagtcctgcgttgctttattgtccagctgctgagctgcgaggctcgagtgggtgtgtgtgatgtgaaggagtrtgctggaaggggatggtgccacgttttatcttgaaggaaagctccaggaggaagcactgaccatcaggaagcaggacctgctgaactggaggctcgtggggctgctgagctgctggtagccccagccagtggtggggggatgtgctgtgggtggcacttggtttgaaatggattcgccttgctcgagcagctttgcttgtttgtttctccttcaaaaagaaccttccctttgtgtgtgatgccctcagagatggttttctgtgccctcgaagctcgctgtctctgcwgcagcagcaatat

SEQ ID NO: 55778 - DNA, 600 bp, Chicken  19866894309734_2
atgtgaaggagtrtgctggaaggggatggtgccacgttttatcttgaaggaaagctccaggaggaagcactgaccatcaggaagcaggacctgctgaactggaggctcgtggggctgctgagctgctggtagccccagccagtggtggggggatgtgctgtgggtggcacttggtttgaaatggattcgccttgctcgagcagctttgcttgtttgtttctccttcaaaaagaaccttccctttgtgtgtgatgccctcagagatggttttctgtgccctcgaagctcgctgtctctgcwgcagcagcaatatgtggttaagccaggaaatgagcatggcatacgagggcacagtgacatgcaaaagcaattttcctccctgcttctctgctgctggttcccatctccaccacagcactgccgttacgaaaggggaattaaataagcctgcatcccatctctgaatccattcaatgacaggtgtaccagaagtactctctctggtttgatcccctgtgaaatgggtgtaggtttttagcagagctgcggsgattggagccgctgtgttgaacttcaggtctcgccacgtaactgcagcat

SEQ ID NO: 55779 - DNA, 600 bp, Chicken  19866894309734_3
gatgccctcagagatggttttctgtgccctcgaagctcgctgtctctgcwgcagcagcaatatgtggttaagccaggaaatgagcatggcatacgagggcacagtgacatgcaaaagcaattttcctccctgcttctctgctgctggttcccatctccaccacagcactgccgttacgaaaggggaattaaataagcctgcatcccatctctgaatccattcaatgacaggtgtaccagaagtactctctctggtttgatcccctgtgaaatgggtgtaggtttttagcagagctgcggsgattggagccgctgtgttgaacttcaggtctcgccacgtaactgcagcattactgcacgggtgggactcagagctgaggagccaggctgtgtaactgctacagagcatattctaagaaggctttgtgtccaaagggtgctgtgtgaggagttcagacaccggcaggtgctgtcacaggaagcagaaaatagkttgctcgttgggcagagcagagttttgaaggacagctgtttaacaaaccagagtgcagctaaaagctcagcggtgatattcgggttctgaatgtgatgctgcactctc

SEQ ID NO: 55780 - DNA, 600 bp, Chicken  19866894309734_4
taagcctgcatcccatctctgaatccattcaatgacaggtgtaccagaagtactctctctggtttgatcccctgtgaaatgggtgtaggtttttagcagagctgcggsgattggagccgctgtgttgaacttcaggtctcgccacgtaactgcagcattactgcacgggtgggactcagagctgaggagccaggctgtgtaactgctacagagcatattctaagaaggctttgtgtccaaagggtgctgtgtgaggagttcagacaccggcaggtgctgtcacaggaagcagaaaatagkttgctcgttgggcagagcagagttttgaaggacagctgtttaacaaaccagagtgcagctaaaagctcagcggtgatattcgggttctgaatgtgatgctgcactctcgtggccgtctcttctgcttgatgtatgtctgaaatgggatgctttgtgaacttgatggctctgttagcaagcacatgttgttatatccccgtgctgggttatcctgaatggtagagtggcatttgttcactttgcgtgctgctcctctgcattcagatggagaattagagctgtttctgtgttcttctcttt

SEQ ID NO: 55781 - DNA, 599 bp, Chicken  19866894309740_1
  misc_feature (1)..(177): n is any nucleotide
nnnnnnnnnnnnnnnnnnnnnnnnnnnnnnnnnnnnnnnnnnnnnnnnnnnnnnnnnnnnnnnnnnnnnnnnnnnnnnnnnnnnnnnnnnnnnnnnnnnnnnnnnnnnnnnnnnnnnnnnnnnnnnnnnnnnnnnnnnnnnnnnnnnnnnnnnnnnnnnnnnnnnnnnnnnnnnnnnaattgactgttttcctacttagtacacgcattgctatgacgaggggagaattaaaaatgaaaccttttgtttttctcaggaggcctgtattagaagctgcactcctgaaaataaaagttggcrtggtgagaagatgagaaaagatagatagggacattttaggcttactatcctcttgatgtgtctgagaaagtttttgattgaccactgattgctttgctagtccatggggagcaagtgtagccaaaggaagctgatgcatggacagagctgccacagtgtgaaatgtgcacgtgagtggatgtggcttccttcctgtgcccgcagttaggaaatgagtagacaaatatagattttttttttccctgccaattattaagtaactcctgcctgattaaatcaaagtgttgcagtggtgacat

SEQ ID NO: 55782 - DNA, 600 bp, Chicken  19866894309742_1
caagaccttactaggaccatcacagcaatgcaagaggatgaggcaaggaaaatatggcaattcaataaatataagcttttttattacaatagaaaatagtaaaactcatgttaaaatagactcttgcttttggactgctcagaaaagcctaagcctcgcttttacgtgccagtgtctgtgagggtcctgaccccctaagtaatgagcaacacacttctgtgatcagagcctcccagctcccctccctccccagtgacagtgaaggactacagcagcagactgagccatgccctgccaggsaggcaggtaagggctctctgtggggttaagagtacaacatatgccttatccctttgtgcagtcaggctcctgtttgaagcagggagcttttgggaagctgtggataaaagaaaagggagaaagagaaagaaaagaatcatcagcagacactggcagctgttctgagacagctaggaaggcagcaaatacatctgctaggaagaccacagcatccaactgcctccagcctgctgatttgcctgagacacacygcagcccattgaacactctctggctcagctcccctcttcagtaacactt

SEQ ID NO: 55783 - DNA, 600 bp, Chicken  19866894309742_2
agtgacagtgaaggactacagcagcagactgagccatgccctgccaggsaggcaggtaagggctctctgtggggttaagagtacaacatatgccttatccctttgtgcagtcaggctcctgtttgaagcagggagcttttgggaagctgtggataaaagaaaagggagaaagagaaagaaaagaatcatcagcagacactggcagctgttctgagacagctaggaaggcagcaaatacatctgctaggaagaccacagcatccaactgcctccagcctgctgatttgcctgagacacacygcagcccattgaacactctctggctcagctcccctcttcagtaacacttcgtactatcccgaaggagactagcaaacaccaccaagttaaaattctgtgtagcttacacagcattacaaggaacatctccaaccgcctccttccacggccagcccagtgcaggtgagtgactgtgcaaagtctggaccattgtgtgctcccctcctcctcaccagaaagggtcaggggcaagactagagtagaaagcaaaggccacaggacagcaagatcaggtgggaggggacacgtttgtgcaccact

SEQ ID NO: 55784 - DNA, 600 bp, Chicken  19866894309748_1
gaaaactaaacaaacaaaaaaaccctcacaatggtgacaaagatgtaaacatttgtttatacgttctagcgggcctcagttttaacaacagtaatgttacactgcagtctatccagtaatttttttagaagagaagaaaaatatctcctgtccacaaaagaaatttgcatgaacattacaatgagaaatgatttttcttttgttttattgtaattttaatcttcattgaagataatttgtttatttttgagaactaatatgcttgtctgaaaggttagtttgttacctgatgtgctgtargccaatctcatgtacagagactagatattgattttttgcaaaactgcacagatttaagtgtttggtaatctcccacagagctagcacaccccaggacttctgcagcatttttttatgcatgtatatatatttcttgtttatcatttgaccatgatcacaatacagcctctgggttacaaccggtcagttgaagataggactaatctcctcccttcctcaagctatcatgacttggtaattaattacaagttttcttaggattctaccatcttaaaagacaaagttagccatcacaatgtg

SEQ ID NO: 55785 - DNA, 600 bp, Chicken  19866894309752_1
caaatatttgtcatcagtggtgctcattatttcaatatctgacttgcaacacatactgctctaaaacaaataataataaaatatccatttctactaacagtagactgaaaaaaaaactagctattcatgttagagaccaaagttttgtttattcttctctaagttgtctgatatttcctgggacagaaggtgggctgaacttcaaaaatatttaatatactctagctgtatacaattcaattcaaacaccttgagttacgcatgactggtgcttattttctaatggcatataaaaaaagyttacctttcccaatcttgctatgtcaygatataaagataaaggcaaggtaaagatgatggtggtaaaaagaattatgaagcgacgatcagtaagcacattttctgatccaactgaaacaaagaagcaagtaagttacttctctaagagactgacatgagaatagattagacttctgagtgcaactaacaaytacaaactttgacrccaatcacatttttatcccctttattcaagatgaataacagtgaaataaagtctaggtattaacagggaagtcatacaaagcacatgcacaatca

SEQ ID NO: 55786 - DNA, 600 bp, Chicken  19866894309752_2
tatttcaatatctgacttgcaacacatactgctctaaaacaaataataataaaatatccatttctactaacagtagactgaaaaaaaaactagctattcatgttagagaccaaagttttgtttattcttctctaagttgtctgatatttcctgggacagaaggtgggctgaacttcaaaaatatttaatatactctagctgtatacaattcaattcaaacaccttgagttacgcatgactggtgcttattttctaatggcatataaaaaaagyttacctttcccaatcttgctatgtcaygatataaagataaaggcaaggtaaagatgatggtggtaaaaagaattatgaagcgacgatcagtaagcacattttctgatccaactgaaacaaagaagcaagtaagttacttctctaagagactgacatgagaatagattagacttctgagtgcaactaacaaytacaaactttgacrccaatcacatttttatcccctttattcaagatgaataacagtgaaataaagtctaggtattaacagggaagtcatacaaagcacatgcacaatcagtatatttctgtaaatttaaacaacag

SEQ ID NO: 55787 - DNA, 600 bp, Chicken  19866894309752_3
gggctgaacttcaaaaatatttaatatactctagctgtatacaattcaattcaaacaccttgagttacgcatgactggtgcttattttctaatggcatataaaaaaagyttacctttcccaatcttgctatgtcaygatataaagataaaggcaaggtaaagatgatggtggtaaaaagaattatgaagcgacgatcagtaagcacattttctgatccaactgaaacaaagaagcaagtaagttacttctctaagagactgacatgagaatagattagacttctgagtgcaactaacaaytacaaactttgacrccaatcacatttttatcccctttattcaagatgaataacagtgaaataaagtctaggtattaacagggaagtcatacaaagcacatgcacaatcagtatatttctgtaaatttaaacaacagttcatcttatattctagtgtaatgctataatcagataataacaacaaggtggcaaagtccttggctataacaaatgagaacaagaccaaacgcagcagccatggatacagaagtgaaggaaaagagctgcttaccttcaggaggcctcaagaaggcagggatcc

SEQ ID NO: 55788 - DNA, 600 bp, Chicken  19866894309752_4
aaatatttaatatactctagctgtatacaattcaattcaaacaccttgagttacgcatgactggtgcttattttctaatggcatataaaaaaagyttacctttcccaatcttgctatgtcaygatataaagataaaggcaaggtaaagatgatggtggtaaaaagaattatgaagcgacgatcagtaagcacattttctgatccaactgaaacaaagaagcaagtaagttacttctctaagagactgacatgagaatagattagacttctgagtgcaactaacaaytacaaactttgacrccaatcacatttttatcccctttattcaagatgaataacagtgaaataaagtctaggtattaacagggaagtcatacaaagcacatgcacaatcagtatatttctgtaaatttaaacaacagttcatcttatattctagtgtaatgctataatcagataataacaacaaggtggcaaagtccttggctataacaaatgagaacaagaccaaacgcagcagccatggatacagaagtgaaggaaaagagctgcttaccttcaggaggcctcaagaaggcagggatccctagcaagataccc

SEQ ID NO: 55789 - DNA, 600 bp, Chicken  19866894309753_1
tataagtagtctcctcacttacaatacctataccattcacagcagcatgagtgcagagctaccacaaagcttttggttaggttacagattccaagccccagcaaaagtgtgtgctacagctggttttagtggtagaagtctcacaatacgagtatttgttactatcaagctcaagaaaaagcacctattcagagactttcattcacttattttgaaagggtttacaagggtggcagataagcatcagttgtgccttactactgaagacaaatgagaaattaccccatagtgtttgttgtkgttcttgttgttgttgggttttttttttttggtccaaaatgccttcaagtgcatcaagttttggtcctctccctcctgagggaaactgctgaaaagactgaatattagggatgtctccctgaaaaatcctgtcacagtaggcacttatcatgtctgaaaatgttatcagagcctgaagatgaatatttcaagctaaaattctggtttcaaagcataattatgaatacacggtcctatctatccaagatcacagttccagagaaagatgtcagtagattcaaacaacttatcaaagatgtt

SEQ ID NO: 55790 - DNA, 600 bp, Chicken  19866894309761_1
tccttggacagcagcccatggcctgcccgccaggcccagcttaggccgaagggcgcctctgtcaccgttgggcacagaagtgcttcgttacctccctcacacgggcggacccagtcagcgtgtccctcctcccagccccgcacctcccatcaaacgaacctcactggtgtcaagtttggttttccatctgaacctgtgccgctcagtaggagctcttggaaagggaatggaggtttctttgttgcctgacagctaagatgtaaccagaactactctactcttagttttgctgctaaggcrtgtgcacgtgagcttgtacacgcrcagacgtacaagtaagtaatgtcttgtgcttcagacatttcagcacaggtatcacgtgttgtaggaattgctatctccgtttgtatatygggtaaacccgatgtatccccactgagatactgagcgttttcattttagggcagccacagtgtggaatttccctggccgagcatccccatggtgctgagcaccacaactcccatcctgcgcacacaggggcatgtttgggaacccactgtctgtgggatgtgttgggggccgtggcatcagcgttgg

SEQ ID NO: 55791 - DNA, 600 bp, Chicken  19866894309761_2
gcccgccaggcccagcttaggccgaagggcgcctctgtcaccgttgggcacagaagtgcttcgttacctccctcacacgggcggacccagtcagcgtgtccctcctcccagccccgcacctcccatcaaacgaacctcactggtgtcaagtttggttttccatctgaacctgtgccgctcagtaggagctcttggaaagggaatggaggtttctttgttgcctgacagctaagatgtaaccagaactactctactcttagttttgctgctaaggcrtgtgcacgtgagcttgtacacgcrcagacgtacaagtaagtaatgtcttgtgcttcagacatttcagcacaggtatcacgtgttgtaggaattgctatctccgtttgtatatygggtaaacccgatgtatccccactgagatactgagcgttttcattttagggcagccacagtgtggaatttccctggccgagcatccccatggtgctgagcaccacaactcccatcctgcgcacacaggggcatgtttgggaacccactgtctgtgggatgtgttgggggccgtggcatcagcgttgggctcaccccaggcggtgccgtgcc

SEQ ID NO: 55792 - DNA, 600 bp, Chicken  19866894309761_3
gtcagcgtgtccctcctcccagccccgcacctcccatcaaacgaacctcactggtgtcaagtttggttttccatctgaacctgtgccgctcagtaggagctcttggaaagggaatggaggtttctttgttgcctgacagctaagatgtaaccagaactactctactcttagttttgctgctaaggcrtgtgcacgtgagcttgtacacgcrcagacgtacaagtaagtaatgtcttgtgcttcagacatttcagcacaggtatcacgtgttgtaggaattgctatctccgtttgtatatygggtaaacccgatgtatccccactgagatactgagcgttttcattttagggcagccacagtgtggaatttccctggccgagcatccccatggtgctgagcaccacaactcccatcctgcgcacacaggggcatgtttgggaacccactgtctgtgggatgtgttgggggccgtggcatcagcgttgggctcaccccaggcggtgccgtgccagcagcagcacagacgtgggagtcctgatttcctggactgaccctgaagccaggcctggctgtaggcagaatttcaccctatgtcagac

SEQ ID NO: 55793 - DNA, 600 bp, Chicken  19866894309761_4
gggcatgtttgggaacccactgtctgtgggatgtgttgggggccgtggcatcagcgttgggctcaccccaggcggtgccgtgccagcagcagcacagacgtgggagtcctgatttcctggactgaccctgaagccaggcctggctgtaggcagaatttcaccctatgtcagaccccgagggactctgaagtgttcaccgtgctaaggaacctgctggtttcatcaggttcttccagagccagttagtcccacgagccctcatagtagggaaggcagcagaagagcttgccgtgaataccractttggttgctagctacaactttgccctcctttctccttgcattgaaacaccacaacgcacaatgtcattggatgcaaaagcactttatttaaccctcctctcttgttttatttttgtcccgtcagagttcgtaaggaggaagcccctcaggaaggaagtgtccgaggcctacaggaaactgaagagcacggtagacaaatgcctgtccctgagcagctactcggaagtgaacctcggcaaactcttctccgtcagcatgggaagatccgtgggagagcccagcagtgaaagacagtga

SEQ ID NO: 55794 - DNA, 600 bp, Chicken  19866894309765_1
gcgattgtcacgctgcacgcaggcactgccctgcccaggagaaggtctgacaaagctttgtctatctccagtgccccagctgtgccgctggcagagcagcccagacatttggtgccctttccaatggctgggatggatgggagccttgcgctggctttgtgagcttgaagataagttcaaaatgatttgcctgctgacctgcagaaggctgtggcaggactgagggctgcagctgaacctcagccttctgctgatctcctgtctgcagcctgtccagcttggctgggagccagtagctgygaataggccctgctgtgagccactgactgtttgcttttcacgtcctatttctggaggcagaagttgaaggaagagcaagagcaaaggttttaaattcaactctgcggtctctgctgcatactggctgaggtttgccagcattgcccaggcgtgatgctttagcaccgttgctcrtagtctgcagtctaggataagacttctgaggacagtctcaccccaaccctacgtccctacttgctaaataagctgaagctggagttacagctgtttggtttatcgttgcagtctataggacgagac

SEQ ID NO: 55795 - DNA, 600 bp, Chicken  19866894309765_2
gttcaaaatgatttgcctgctgacctgcagaaggctgtggcaggactgagggctgcagctgaacctcagccttctgctgatctcctgtctgcagcctgtccagcttggctgggagccagtagctgygaataggccctgctgtgagccactgactgtttgcttttcacgtcctatttctggaggcagaagttgaaggaagagcaagagcaaaggttttaaattcaactctgcggtctctgctgcatactggctgaggtttgccagcattgcccaggcgtgatgctttagcaccgttgctcrtagtctgcagtctaggataagacttctgaggacagtctcaccccaaccctacgtccctacttgctaaataagctgaagctggagttacagctgtttggtttatcgttgcagtctataggacgagacccacgtttgtggtctgagagaaatggcacgtactgaactgaaaaacccaaacttgttgctatatttcaaagcatgcagtgaagcctgtcaagtttctgcgtgcctattgcttctatctgagctataggcagaaagggaagagattccccaagtgccctgtgaggtgcaactgta

SEQ ID NO: 55796 - DNA, 438 bp, Chicken  19866894309765_3
ggaactctgccacttgtaatagaagctgtgttaggtctcccccctccaactacaggacagatatattggtctagacaactgaaaaatagtggtatattgggaggctgcgttttcattatgtaaatggagctctgcaggaggattaattgattattcagttactgtggatctgtctttggatgtcctggcaagatgagagaacctgatggaagctctccagtgatgctatattgtagtacaaaggagtccttgagcatcacctcctccactccagacagtgcacagcacgtgcacgttgcrtattgctctcccaatgggaggacttgcatcctagggtggtgtagctgtctacatgccttgtgcctggtctgtgtcacggcacaggcaatagagacttgttgggaaagcctgaagacaacttactgcagcctacagagt

SEQ ID NO: 55797 - DNA, 600 bp, Chicken  19866894309772_1
ttccgcccacctgggccagctctcccccccacccgaagcccaccacatggagagcgtggatcacttgaaccaaaccgacctttggacggacgttgaccgcaatgagtttgaccagtatttgaacatgagcaggactcgtcccgaagcctcgggactgccttatcatgtctccctgtccaaagtgactcctaggagcatctcctgcgaggagagcagcttgatatccgccctgtccgacgccagcagcgccgtctactacagcccatgcatcaccggctaggctcgcgcgtgcgcccaacrcaacaagccaacgagcagccatcctcctccaaatgcgagctccgtaatatgtagagtatctcattaaatgcatcgctttctttcttaaaaaaaaaaaaaagaaaaaaaaagaaaaaaaataagccagaaaaacacaacccaaccatgctgaactcaccgatataccgtatcactatataacacatagacgccttcccaaagccaaaggttaaccacgcgctagcccgcctgcccgctgcagctcccatcgctccatcctctggggagcattttttaggcaactgcagtgaatcctgcctg

SEQ ID NO: 55798 - DNA, 600 bp, Chicken  19866894309776_1
tgctctgcaactgccatctgctgtgtgcatctccttcagtagataagttctttcactcctttatttggctttactgctcttgctttacttttaaactgcttcccagatcagctgggtgtatgatagcagtccgtctgagatacatgatcatattttggcatctttcaagatactttgggagatttctgctttgtctttaatgaagcaaaataaggacattacttgccagttaacaaaggatttagcctttgggttacacacacagtacaggagggagcagtcactctttccctgcctcayttcacaagcttcttgtattcatgaattaaattttctgcttcccactgatgaagctgctctccccagtktgttcccttgctttggtcaggtccagtcttggattcctaccagcacttgcactgatcatggtagctgaaggcagtaactgcttcaccaaaggaaatattcagaaaaggaaagtcattttactcctatttaaaattgtcctcgtccacctctctgagcccttgctccatcctggaagtttctgctctcccagatgtggctgaaaacaaaccttctgttatggccacatcctag

SEQ ID NO: 55799 - DNA, 600 bp, Chicken  19866894309776_2
ctttactgctcttgctttacttttaaactgcttcccagatcagctgggtgtatgatagcagtccgtctgagatacatgatcatattttggcatctttcaagatactttgggagatttctgctttgtctttaatgaagcaaaataaggacattacttgccagttaacaaaggatttagcctttgggttacacacacagtacaggagggagcagtcactctttccctgcctcayttcacaagcttcttgtattcatgaattaaattttctgcttcccactgatgaagctgctctccccagtktgttcccttgctttggtcaggtccagtcttggattcctaccagcacttgcactgatcatggtagctgaaggcagtaactgcttcaccaaaggaaatattcagaaaaggaaagtcattttactcctatttaaaattgtcctcgtccacctctctgagcccttgctccatcctggaagtttctgctctcccagatgtggctgaaaacaaaccttctgttatggccacatcctagctgaagggctggaaagcactgttttccaaatggattactgcatactggcaaatccaattaactgtgta

SEQ ID NO: 55800 - DNA, 600 bp, Chicken  19866894309789_1
cagcagaggaataccgagaggagtgttctccttcaggttgcatacgcacaaaccctgaatcattgctgtgcgcactgtgcaacagatgtttgccagcctggattttcctcttttagccactctaagaagccagggagattaattaaagccagagttgccgtaggtgaattgctcttcacatgtttacatgggctatctcactgttcctgtttatatcttcatcagttgtttacataggattggatgattaaatcaacactctgtaaatggcttctgctttcacttgtttatgtttacttsyaatttttaggataacagcagaaataatgagaaacagtggggaacaggaaaccgattgagattgatcgttttgtgcagtcagcttgtgatgacctttggggaaagtgggtatttaatttttactgatgtygtaaaggcacagacaaagtcctgacctttctgatccagggtgaccactatgagcatcccactgagaattaattacaattgcctggagctgctccaagaagcctttattagagtactataaatgtggtaaaagtgatcagtatgtctgggagaagctattccacatgcctg

SEQ ID NO: 55801 - DNA, 600 bp, Chicken  19866894309789_2
agcagaggaataccgagaggagtgttctccttcaggttgcatacgcacaaaccctgaatcattgctgtgcgcactgtgcaacagatgtttgccagcctggattttcctcttttagccactctaagaagccagggagattaattaaagccagagttgccgtaggtgaattgctcttcacatgtttacatgggctatctcactgttcctgtttatatcttcatcagttgtttacataggattggatgattaaatcaacactctgtaaatggcttctgctttcacttgtttatgtttacttsyaatttttaggataacagcagaaataatgagaaacagtggggaacaggaaaccgattgagattgatcgttttgtgcagtcagcttgtgatgacctttggggaaagtgggtatttaatttttactgatgtygtaaaggcacagacaaagtcctgacctttctgatccagggtgaccactatgagcatcccactgagaattaattacaattgcctggagctgctccaagaagcctttattagagtactataaatgtggtaaaagtgatcagtatgtctgggagaagctattccacatgcctgc

SEQ ID NO: 55802 - DNA, 600 bp, Chicken  19866894309789_3
cagggagattaattaaagccagagttgccgtaggtgaattgctcttcacatgtttacatgggctatctcactgttcctgtttatatcttcatcagttgtttacataggattggatgattaaatcaacactctgtaaatggcttctgctttcacttgtttatgtttacttsyaatttttaggataacagcagaaataatgagaaacagtggggaacaggaaaccgattgagattgatcgttttgtgcagtcagcttgtgatgacctttggggaaagtgggtatttaatttttactgatgtygtaaaggcacagacaaagtcctgacctttctgatccagggtgaccactatgagcatcccactgagaattaattacaattgcctggagctgctccaagaagcctttattagagtactataaatgtggtaaaagtgatcagtatgtctgggagaagctattccacatgcctgctgtgatatctaaaagaagctcagacttgtcagcttgttgttttgttttgctgttcattaacaagactgaaactggaaagacagcattagaactccagggcaagtgtttcctatcattctactcttcaca

SEQ ID NO: 55803 - DNA, 600 bp, Chicken  19866894309790_1
acttggcttttaacagtgtgaactcactacagctttttgacttttgatgtatttactcttgaaccaatgctgctttgcattattttcctggtatatgggagcccacttggtggctagatgaaggtcttgattctttactataaaattaatgctcttccaatctgatttcatgtgcttttgtgttgctgaactgtagtcagttgaaaatttcctgtatgtttctactttattttgcaccagtgttttcaatagagttctgtcatccttcaaaactgtgtttaccagtgttaggatacacawgtwgtgattttatttttctctttttacccatggtgttttcaagattattcctctttgtataaccagagcttaatcctaatttggcacagttttggtattgtgattctacatgatattcactaaggtgacagaaagatagatgtatgcaatcataaaacggatagttcatatggaattcactataaataatgcttttaatgtgattgttgatgtggaattactgtaagaattcaatatttgaaataatggaaaaatgcttgctttagaaagtgtatggtgttgaatgaatacttcagttaa

SEQ ID NO: 55804 - DNA, 600 bp, Chicken  19866894309790_2
tggcttttaacagtgtgaactcactacagctttttgacttttgatgtatttactcttgaaccaatgctgctttgcattattttcctggtatatgggagcccacttggtggctagatgaaggtcttgattctttactataaaattaatgctcttccaatctgatttcatgtgcttttgtgttgctgaactgtagtcagttgaaaatttcctgtatgtttctactttattttgcaccagtgttttcaatagagttctgtcatccttcaaaactgtgtttaccagtgttaggatacacawgtwgtgattttatttttctctttttacccatggtgttttcaagattattcctctttgtataaccagagcttaatcctaatttggcacagttttggtattgtgattctacatgatattcactaaggtgacagaaagatagatgtatgcaatcataaaacggatagttcatatggaattcactataaataatgcttttaatgtgattgttgatgtggaattactgtaagaattcaatatttgaaataatggaaaaatgcttgctttagaaagtgtatggtgttgaatgaatacttcagttaacaa

SEQ ID NO: 55805 - DNA, 600 bp, Chicken  19866894309792_1
ggggccatgcagacagcagctggcagtcaggacgtgctgaacgtgttctgcctggctcttccaagcccagccgatggagcaaccccttgggggcaacctgggggaactcagagcggggccgtacctgcgtggagcacaggatcagccactcctggtcctcctccaggcccggctccctcctgcgcaccgagatctggcagcacgccgcctggtcctcgttgaactctgacttctcagcattgataaccctgcaggtgcaaacactccagctgaggggtgaagcactgcccagccaacgcrggattgagcccctggccttccttccagccccacgctcgcttgctcccttctcaaagccaaggatctcttggctgggaatctaaacatcacgtccttcacggcagtgggaaaaagcttcacctgggatacggtgagttatggggaaagagctgtgatggggcacccctgcctccatcagcccatgcttgcagccaaggcagctgtgccagggcggtgccagggctccttctgcccttaacgccgggcccttctctccctgcacagctcacctcctgcgcgtttcaatcccattgaagccag

SEQ ID NO: 55806 - DNA, 599 bp, Chicken  19866894309796_1
  misc_feature (1)..(166): n is any nucleotide
nnnnnnnnnnnnnnnnnnnnnnnnnnnnnnnnnnnnnnnnnnnnnnnnnnnnnnnnnnnnnnnnnnnnnnnnnnnnnnnnnnnnnnnnnnnnnnnnnnnnnnnnnnnnnnnnnnnnnnnnnnnnnnnnnnnnnnnnnnnnnnnnnnnnnnnnnnnnnnnnnnnnnnatttttatatatgcaataataagtgtatgagcagcaaatgtctctcaagcatcaaagggatctcaccaacttcccagaaaacctgtattcaaaagacttttcatgcggccgtctgtggaattctagaagttccytaacatttgaaaactgcagtggttgcagaagactgctgaaatgctaacgtagacagcagcaagcagaaagtttgctaaagacattgaaacccctccattctaagcaagggaagacaatgcaatactgcgtgtttcagaaaattatttttatggcttctctcagcagccaacacatcaattcagctatcccacacatacacctctaaataacagagcaaataatatgcttgcacctacaaatctgaaggaggggtatcttcagcttttcttcaaaaacacagttcttctaatatacatgc

SEQ ID NO: 55807 - DNA, 599 bp, Chicken  19866894309799_1
  misc_feature (1)..(67): n is any nucleotide
nnnnnnnnnnnnnnnnnnnnnnnnnnnnnnnnnnnnnnnnnnnnnnnnnnnnnnnnnnnnnnnnnnncaaatgaagtggccatggggggaaaaggttttagcattagagagaaagttttaatcttaaaagaaagactttatttcattttttttgttgttgttgttttaaacctttatccttaatgaaaatcagtcaaatttgaaagtgagctgttgtttataaacagtgtgctaatactgggactttcaaagctctggttttgattgtttttttttctcttggtgttattgggcttgttwtatcaaggagaacacacttcaccagttaatctacattagtaattaggtggatcttcaataacattcaaactctttcccttatttctatcgttagtccaaaaaaaaaggctctcaaaatgtaacattattcaagtgcagataaatctttgcaagcagaaactggagaggtcactgggtttctggcaggataaaatttccctgtggtatcattcagccagttatcagagaggcatctctgtagaatgtcagtgtttaattgaggcaatcgtttgaaaccacctgtctgccccattcaaggt

SEQ ID NO: 55808 - DNA, 600 bp, Chicken  19866894309799_2
cattagtaattaggtggatcttcaataacattcaaactctttcccttatttctatcgttagtccaaaaaaaaaggctctcaaaatgtaacattattcaagtgcagataaatctttgcaagcagaaactggagaggtcactgggtttctggcaggataaaatttccctgtggtatcattcagccagttatcagagaggcatctctgtagaatgtcagtgtttaattgaggcaatcgtttgaaaccacctgtctgccccattcaaggtcatacgcagacttgttcagtcagctctttcaccstttggtaaatcagtgaggatggtttcttcttgcatttaagcataaaatatcaaagtatttattacagccttcaaccacttccagctccggtacgcatgctgactgatcccaacaatagatggcgatgcacggtgcaggatgcaaggaagggagctctcatctctcctgcaggcccacagaccttgcacatcaccttttccttggggcagtggtgtcagaacataggtcggggcctgctgctgctgcwgagcatttttcagactgccacaccttgggtttttgttgagttagattctagag

SEQ ID NO: 55809 - DNA, 600 bp, Chicken  19866894309799_3
tgtctgccccattcaaggtcatacgcagacttgttcagtcagctctttcaccstttggtaaatcagtgaggatggtttcttcttgcatttaagcataaaatatcaaagtatttattacagccttcaaccacttccagctccggtacgcatgctgactgatcccaacaatagatggcgatgcacggtgcaggatgcaaggaagggagctctcatctctcctgcaggcccacagaccttgcacatcaccttttccttggggcagtggtgtcagaacataggtcggggcctgctgctgctgcwgagcatttttcagactgccacaccttgggtttttgttgagttagattctagagttgtcagaagtgctgctgctcagcagtctgagcagaaaggacttgtattaaaaaaaataaatcgtgttgtctcagctttgaggagagaagtagataaagaatcttttctagaggtgttcaagacarctattaygagaatatatgaacacattgtagtctcctcctggaaactgaaaattatgaaagcagcacatctggaatcatgacacagcatccagctgtctgtccccatstacacatgagatag

SEQ ID NO: 55810 - DNA, 600 bp, Chicken  19866894309799_4
gcacggtgcaggatgcaaggaagggagctctcatctctcctgcaggcccacagaccttgcacatcaccttttccttggggcagtggtgtcagaacataggtcggggcctgctgctgctgcwgagcatttttcagactgccacaccttgggtttttgttgagttagattctagagttgtcagaagtgctgctgctcagcagtctgagcagaaaggacttgtattaaaaaaaataaatcgtgttgtctcagctttgaggagagaagtagataaagaatcttttctagaggtgttcaagacarctattaygagaatatatgaacacattgtagtctcctcctggaaactgaaaattatgaaagcagcacatctggaatcatgacacagcatccagctgtctgtccccatstacacatgagatagcatgccttcagttgtgcacatagcttgctaggagtgacgtgggttgtgctcttgggctgctttgctgttgcatgctgctgaccgttctgcagtttaagttttataagtgatacaatatttttctcttttctcattgggccagggtggcaagtgtgcatttggttatgctggaagttatt

SEQ ID NO: 55811 - DNA, 600 bp, Chicken  19866894309799_5
gcaggatgcaaggaagggagctctcatctctcctgcaggcccacagaccttgcacatcaccttttccttggggcagtggtgtcagaacataggtcggggcctgctgctgctgcwgagcatttttcagactgccacaccttgggtttttgttgagttagattctagagttgtcagaagtgctgctgctcagcagtctgagcagaaaggacttgtattaaaaaaaataaatcgtgttgtctcagctttgaggagagaagtagataaagaatcttttctagaggtgttcaagacarctattaygagaatatatgaacacattgtagtctcctcctggaaactgaaaattatgaaagcagcacatctggaatcatgacacagcatccagctgtctgtccccatstacacatgagatagcatgccttcagttgtgcacatagcttgctaggagtgacgtgggttgtgctcttgggctgctttgctgttgcatgctgctgaccgttctgcagtttaagttttataagtgatacaatatttttctcttttctcattgggccagggtggcaagtgtgcatttggttatgctggaagttattgaagcat

SEQ ID NO: 55812 - DNA, 539 bp, Chicken  19866894309799_6
ctgctgctgctgcwgagcatttttcagactgccacaccttgggtttttgttgagttagattctagagttgtcagaagtgctgctgctcagcagtctgagcagaaaggacttgtattaaaaaaaataaatcgtgttgtctcagctttgaggagagaagtagataaagaatcttttctagaggtgttcaagacarctattaygagaatatatgaacacattgtagtctcctcctggaaactgaaaattatgaaagcagcacatctggaatcatgacacagcatccagctgtctgtccccatstacacatgagatagcatgccttcagttgtgcacatagcttgctaggagtgacgtgggttgtgctcttgggctgctttgctgttgcatgctgctgaccgttctgcagtttaagttttataagtgatacaatatttttctcttttctcattgggccagggtggcaagtgtgcatttggttatgctggaagttattgaagcatctcacaggggttttcttctgactgataattgcaatttca

SEQ ID NO: 55813 - DNA, 599 bp, Chicken  19866894309803_1
  misc_feature (1)..(172): n is any nucleotide
nnnnnnnnnnnnnnnnnnnnnnnnnnnnnnnnnnnnnnnnnnnnnnnnnnnnnnnnnnnnnnnnnnnnnnnnnnnnnnnnnnnnnnnnnnnnnnnnnnnnnnnnnnnnnnnnnnnnnnnnnnnnnnnnnnnnnnnnnnnnnnnnnnnnnnnnnnnnnnnnnnnnnnnnnnnnctttacagtcctctacgtcttactgtggagttagaggagagacctgcacaaagacctgttctgtcatgttttgatttcttttaagtggtgatcccacagtgtctctgagcttgaccacccttattgtyaaagcgttcttcccttactgaaatttttcctgttacagctggtgttgattgccctttgtgcttctgttgaacgtctccaaaaagtttctgactctgtcttctctttaactgtctaaaaatagttgaaaagtgctattaaattgtttcctggcctttacttaaggcaacaaggacatctctctyggcttctctgtgtatatcacatgttccagtccctcyaatcatggccatccactgggctctccagtacattggtgtcttccttcttctgggagcccatcagtctagattyggtatca

SEQ ID NO: 55814 - DNA, 600 bp, Chicken  19866894309803_2
tctacgtcttactgtggagttagaggagagacctgcacaaagacctgttctgtcatgttttgatttcttttaagtggtgatcccacagtgtctctgagcttgaccacccttattgtyaaagcgttcttcccttactgaaatttttcctgttacagctggtgttgattgccctttgtgcttctgttgaacgtctccaaaaagtttctgactctgtcttctctttaactgtctaaaaatagttgaaaagtgctattaaattgtttcctggcctttacttaaggcaacaaggacatctctctyggcttctctgtgtatatcacatgttccagtccctcyaatcatggccatccactgggctctccagtacattggtgtcttccttcttctgggagcccatcagtctagattyggtatcaacagtactgaattgaagataataattactttccttaatgtactgactgtgctttaagtaacacaaaccaatagacattttgtattcattgctgcaaggtcacactggtgactcaygtttgacttagacctctggtgcttttctacaagactttttttctagtctattagtacctggcctgtatt

SEQ ID NO: 55815 - DNA, 600 bp, Chicken  19866894309803_3
acaaagacctgttctgtcatgttttgatttcttttaagtggtgatcccacagtgtctctgagcttgaccacccttattgtyaaagcgttcttcccttactgaaatttttcctgttacagctggtgttgattgccctttgtgcttctgttgaacgtctccaaaaagtttctgactctgtcttctctttaactgtctaaaaatagttgaaaagtgctattaaattgtttcctggcctttacttaaggcaacaaggacatctctctyggcttctctgtgtatatcacatgttccagtccctcyaatcatggccatccactgggctctccagtacattggtgtcttccttcttctgggagcccatcagtctagattyggtatcaacagtactgaattgaagataataattactttccttaatgtactgactgtgctttaagtaacacaaaccaatagacattttgtattcattgctgcaaggtcacactggtgactcaygtttgacttagacctctggtgcttttctacaagactttttttctagtctattagtacctggcctgtattgtcagtattgttccatgccaggcactggactttaca

SEQ ID NO: 55816 - DNA, 600 bp, Chicken  19866894309803_4
ttattgtyaaagcgttcttcccttactgaaatttttcctgttacagctggtgttgattgccctttgtgcttctgttgaacgtctccaaaaagtttctgactctgtcttctctttaactgtctaaaaatagttgaaaagtgctattaaattgtttcctggcctttacttaaggcaacaaggacatctctctyggcttctctgtgtatatcacatgttccagtccctcyaatcatggccatccactgggctctccagtacattggtgtcttccttcttctgggagcccatcagtctagattyggtatcaacagtactgaattgaagataataattactttccttaatgtactgactgtgctttaagtaacacaaaccaatagacattttgtattcattgctgcaaggtcacactggtgactcaygtttgacttagacctctggtgcttttctacaagactttttttctagtctattagtacctggcctgtattgtcagtattgttccatgccaggcactggactttacatttgccttgctgaacttcgtgtggttcatgtgaggtcatttctctaggttggtcctcagtgaaaaccttacca

SEQ ID NO: 55817 - DNA, 600 bp, Chicken  19866894309803_5
aaaaatagttgaaaagtgctattaaattgtttcctggcctttacttaaggcaacaaggacatctctctyggcttctctgtgtatatcacatgttccagtccctcyaatcatggccatccactgggctctccagtacattggtgtcttccttcttctgggagcccatcagtctagattyggtatcaacagtactgaattgaagataataattactttccttaatgtactgactgtgctttaagtaacacaaaccaatagacattttgtattcattgctgcaaggtcacactggtgactcaygtttgacttagacctctggtgcttttctacaagactttttttctagtctattagtacctggcctgtattgtcagtattgttccatgccaggcactggactttacatttgccttgctgaacttcgtgtggttcatgtgaggtcatttctctaggttggtcctcagtgaaaaccttaccagtctgagaaagaacactaccagaaagtttgaggcttttctcatcattcaggttgcggatgaaaatgttagttagatttaataaaatataatctggggataagaacctgttgaaaataaaaag

SEQ ID NO: 55818 - DNA, 577 bp, Chicken  19866894309804_1
agttcttttttattatacctacaaataagtgcaaaatatactgcaaaattaatagcactctgaagtaactgcttaagggcaagtagtttgtaatgtcttaaaaatctctattcaagtttgaaatgtctctgtaatgtaattttgtccatttatgttatgaaatcccgataacagtaaaagctgagtgcactaatgaaaccacgaaccaatgctctttcattgtttctcatgctggctctgtcactacaataagcaccacatgctgggttatcttctcttccgaagtcccacttagtcagktttttggaggaagactatatacccaaaatccaggtgtgagttgtaaccatatcccatctccatactgaattgacatttcaacagatctaaatcccatttgcctgttttctgtaggagcaatgatgaccaggagaccagatctcagaaacatgaagcttttgaaaaagggtttctcacaggaatgaattgaagcacactgctatgtcatagaaagcctcatgttatcgaagacagacacgataggaaggagatgtgtgaaaacagcttatacaggatt

SEQ ID NO: 55819 - DNA, 600 bp, Chicken  19866894309809_1
actccttgttgctcagctcgccgttccctgcaaggagaggaacgcattaggaacacacggagccaccggcagcaccccaggaacagccagcccagccccaacgggagctgtatccaaggagccgctttcctctgcattgcaccttgataccaatctgggcgagggagctctgtcaaagtactgaggagtgagcggcagtctcccccgtgccagcagtaacgcttacaaacaccaatgcggttataaaccacagagttcagtgctgcgtttccatcactgcctccctcacagagtgagggrtcaccaacagttcttccccgcacagatagctttgctatctgactatctaacagctcctcctacaaggggatgcccatgcagaacgtccgggtacccttcggttcactgcagtctgagcgtctgctttgaggatgtgattgggaaatgacactgaagcgcagaggaaaacagaacagccgcagcactgagcggtgcacggcagcaggtggagctgaaacccagaggaagtgcagccaagaggcagagccagagatggcacatttctgtgtccctgtttaaatcagcaaacagcagcctggc

SEQ ID NO: 55820 - DNA, 600 bp, Chicken  19866894309814_1
tttaaacatatagatgaggaaatatttgtaatatgtttgttccattctttgttttgtatttttttttctcctcaaatatttggagagacaattctttggtctgaggtccactcctcctatcaattgcttagataataaaataaatacagtagtatcactgatgtcactacaaaatttggtgtcttgtatgtcttgagcatatgtgtgaggactaggtgcaagtacaaatttggcattcttattgttgggtacagcatgtgcattactggcaatgcttcatctacttcttagtcaaagcarattgtagtgagaagaatatggaaaaagtggatgatggaaataacaacacttcaaaaatttgttctctcagtttcaaagtttggttccgtttttggaaatgaggtatggtatcactttcaaatgttttatttcaagtaagcatgtcaggcataatattaacaaagtgaaaaagccattgtcatcttacctaaaaaagcctgtacattcatagtatgagcttctgatatggatgtttcttcaaagatcgtattctttctttctttatttatttttttgtcagttgatcatttcctgcttttt

SEQ ID NO: 55821 - DNA, 600 bp, Chicken  19866894309821_1
ctgaccacatggaatggaccgtgagtcccttcctaaagcactgcagtttatagtcaggcttattaaagtgaagcttaagccattttgattcatgacaacatccactgtgcaaaatgcgatggtcaagaggcaactcaaaagctgtttggccactgcagctacaagggcagcagcttttgggagatggcagagtagacagcaagggagcaagagaccacttctgcagcacgattttaatctgacagtgaatgtgtgggaagatccttaaagcctcccaaagaacagtgaaaattattatakttgttcccctgtaaatgtaatgattcctttccccttgtgcccacccagattctagctctgattacaagaatggtgttgaaagcttaggccatcttcagctgtttcttgaattttccaataactttctggtatgaaatctaaagcagggatagaagcattgtctgtcatatttagctgcactgaaattgtgcgacattaaagcacaggaaaacaaaatcttgaaagctgataatccctgcacttcactggccacagaaaagccaggttaatctcaaaatattgatgccgtttctggtactg

SEQ ID NO: 55822 - DNA, 584 bp, Chicken  19866894309822_1
taaaagcaaaacaaaacttaggaatgacttttgtctgtgtgcagctagtaagggcctgcttcagataatcatctctcactgtttgttttacttttgactttggggacctaagttttagtgatatacatttttctacaacccattcttggctctatatcaaaaccacgcagggcaattaacacgggtctgtcagacaaacagtggagcaatgcgccatcctgcagaaaggttgcttcagttcctccaatccctgaattataaatgaagatttctatgaattgagaagactgctagctctaratggtaattatttcaagtcagtctgccatataactttcctaacggtgttgctgcaggatagggatcaaccctaggaaaataattattggaatatcagacatgagttttgtcgcctgttctctttcatgggcaatgacatcgccagtggagaaagaggtttgctctggagctgccatggcccgctcagagctaagaggggtgtgtggcacagggcctggcagggcttccagcacagacgccctcatctggtgcccagcatgatctcgaaaactgcgtgcaggcag

SEQ ID NO: 55823 - DNA, 600 bp, Chicken  19866894309825_1
atataataatgggagttgactgagtaagttattagctttctcacctttgaaatcagggacaattgacctaagtagaaggtactacttatttaaaaaataaactgcacctacctaagcatcaatatagattaaattagcaaaaaaaaatgttttttcagaagatcccttgacatttctgtacacttcaaagggtcacttctatcgtactgtgtctgattggacatacagacattttatagtttcacttgctaatgagacaggagatggcttttatagaaatccatcaatatccaaaggcaragatctctcctgattcagaatgtcattttcactctgtacaggtcaacagagtaatggagtcccaggacatcactatgaaaattaatggaaaagtatgacaccggaatgagactttcaaataattaaaaagctgaaatagtgattatcagagtaagtgcaccttccaccatccaggcaaccatgtatgcccatttgagtgcaggacttttcataacgtgtcatgactgacagcttattcttttccattttcacattttgaagaaatattttctaaatatgagacacttctaccacaaaaat

SEQ ID NO: 55824 - DNA, 506 bp, Chicken  19866894309825_2
tatgacaccggaatgagactttcaaataattaaaaagctgaaatagtgattatcagagtaagtgcaccttccaccatccaggcaaccatgtatgcccatttgagtgcaggacttttcataacgtgtcatgactgacagcttattcttttccattttcacattttgaagaaatattttctaaatatgagacacttctaccacaaaaatatactttttacctcttggttctgttacatttgcttgtgcccttcccaccactgagactcttcaggctattgtgatttacagttaaacaaccgkgtagtaatgctggctctattttaagaattccataagaaacatctctatttagttttcattacgaaagcaagtgctcagagagagctcaacatcacagaagcaggaactgcaggaaatttttaatggtacattttggtagaaggtcctctccatctccttcacctccagctacctctgatagtctagaacccaagggcagctcccaa

SEQ ID NO: 55825 - DNA, 600 bp, Chicken  19866894309827_1
gattgcattcgtacaatgcaactatctgtacagtttcttgctgtgccatcattggctgaaacttattaataccaaagtccacgggcatactttgtgtataaatgctaataactcaagaaaaagttgtaacttggcagctatattttaagcaaaaacaatagcatggaggtaaatatatatatatataaattatatataaaaattatataaactatatttatgtattatagtttgtgtatatatctaattatataaactatatacatttaaaaatatagaaatatataatgtatagaaatkaatgttaaaacctgaacaaataaagagaagtcgctttaaaaartactgtaggaatttcccttattaaagacaaagtaacataagcagagaatgagtgaatgatagctcagttctgtcagcacagtcgcataaaaaggattgttttccacatgccatttggaaagggaattacagcttctgccttcatattctctcaggaactcctgcactggaagataaagtctcagaaggtcagactggtccccagaacacatctcctccctttgaatgaaagtttctattgaatctcagcacttaagc

SEQ ID NO: 55826 - DNA, 600 bp, Chicken  19866894309827_2
tgccatcattggctgaaacttattaataccaaagtccacgggcatactttgtgtataaatgctaataactcaagaaaaagttgtaacttggcagctatattttaagcaaaaacaatagcatggaggtaaatatatatatatataaattatatataaaaattatataaactatatttatgtattatagtttgtgtatatatctaattatataaactatatacatttaaaaatatagaaatatataatgtatagaaatkaatgttaaaacctgaacaaataaagagaagtcgctttaaaaartactgtaggaatttcccttattaaagacaaagtaacataagcagagaatgagtgaatgatagctcagttctgtcagcacagtcgcataaaaaggattgttttccacatgccatttggaaagggaattacagcttctgccttcatattctctcaggaactcctgcactggaagataaagtctcagaaggtcagactggtccccagaacacatctcctccctttgaatgaaagtttctattgaatctcagcacttaagctgagatttcaaaaaacttggggcttctattcatttcttagaaa

SEQ ID NO: 55827 - DNA, 599 bp, Chicken  19866894309829_1
  misc_feature (1)..(65): n is any nucleotide
nnnnnnnnnnnnnnnnnnnnnnnnnnnnnnnnnnnnnnnnnnnnnnnnnnnnnnnnnnnnnnnnnctccccagttcaatctgactttggttcaatgtacagcctaaatcttaaaggcacaacctctccattaaaataaggccaaaggcatagttttacaccgtgctgaactttaaggtttaccttcgattattataatctcttccctcacatcatctgatttataaagtagaaaaatgagaaaacagtgaacaaacaacccataagcttttcgggataaaccatatggtctactgttccracagacaaaatgaaattttaaacacacaacagggttgtttaatgccatattccactgggtaaaattggatacagaaggctggatttctccatcccaggttccctcttcaaaccactaactgttcatgtgcagctgataagtacagtatctctgaaactccctttataacccagtgcatacattgaaaagaatcactggagtgcatttttttcmcagtaaaatgtgtgaagaaccccatttctgaggacagaaatgwattctgtcatagagttttgaataaaaaattattgagatcttct

SEQ ID NO: 55828 - DNA, 589 bp, Chicken  19866894309829_2
atctgatttataaagtagaaaaatgagaaaacagtgaacaaacaacccataagcttttcgggataaaccatatggtctactgttccracagacaaaatgaaattttaaacacacaacagggttgtttaatgccatattccactgggtaaaattggatacagaaggctggatttctccatcccaggttccctcttcaaaccactaactgttcatgtgcagctgataagtacagtatctctgaaactccctttataacccagtgcatacattgaaaagaatcactggagtgcatttttttcmcagtaaaatgtgtgaagaaccccatttctgaggacagaaatgwattctgtcatagagttttgaataaaaaattattgagatcttcttygatcatgatgggaaagcctcacctgggactttttggttcatatggcaagatgttgctgcaaaatatatatgtacatctgcattacaaagaatgtccttgttactgagaaagactgtctatatactaacacaaccagacaaagataaacacaagccgcattcatttttgattatcaaatgcttgcaagtttaaataaccaga

SEQ ID NO: 55829 - DNA, 546 bp, Chicken  19866894309829_3
aacccataagcttttcgggataaaccatatggtctactgttccracagacaaaatgaaattttaaacacacaacagggttgtttaatgccatattccactgggtaaaattggatacagaaggctggatttctccatcccaggttccctcttcaaaccactaactgttcatgtgcagctgataagtacagtatctctgaaactccctttataacccagtgcatacattgaaaagaatcactggagtgcatttttttcmcagtaaaatgtgtgaagaaccccatttctgaggacagaaatgwattctgtcatagagttttgaataaaaaattattgagatcttcttygatcatgatgggaaagcctcacctgggactttttggttcatatggcaagatgttgctgcaaaatatatatgtacatctgcattacaaagaatgtccttgttactgagaaagactgtctatatactaacacaaccagacaaagataaacacaagccgcattcatttttgattatcaaatgcttgcaagtttaaataaccaga

SEQ ID NO: 55830 - DNA, 501 bp, Chicken  19866894309829_4
cagacaaaatgaaattttaaacacacaacagggttgtttaatgccatattccactgggtaaaattggatacagaaggctggatttctccatcccaggttccctcttcaaaccactaactgttcatgtgcagctgataagtacagtatctctgaaactccctttataacccagtgcatacattgaaaagaatcactggagtgcatttttttcmcagtaaaatgtgtgaagaaccccatttctgaggacagaaatgwattctgtcatagagttttgaataaaaaattattgagatcttcttygatcatgatgggaaagcctcacctgggactttttggttcatatggcaagatgttgctgcaaaatatatatgtacatctgcattacaaagaatgtccttgttactgagaaagactgtctatatactaacacaaccagacaaagataaacacaagccgcattcatttttgattatcaaatgcttgcaagtttaaataaccaga

SEQ ID NO: 55831 - DNA, 599 bp, Chicken  19866894309853_1
  misc_feature (1)..(120): n is any nucleotide
nnnnnnnnnnnnnnnnnnnnnnnnnnnnnnnnnnnnnnnnnnnnnnnnnnnnnnnnnnnnnnnnnnnnnnnnnnnnnnnnnnnnnnnnnnnnnnnnnnnnnnnnnnnnnnnnnnnnnnnnggttatttatggaaatgcttgatatgagaattggctttgcagtctcaaggtaaaagatttgcgtgacttttgtaaagctgcagctggccgctgccttgagcttcttctttatgtgctctgggaagagcgggctccatggtgctgcttcgctgactcgtttctttgttgccgttcctgagktttttttttttttctgggtttgttcttttgtggaggagagatgcacggctctgggggcagtgctggcagatggaggcagggcggccacaggggtgcggtggccaagcagacccagcggtgaggtctgggcttccctgccctgctgcaggatgcccgtaccgccagctctgggcagggtctgctccacgtgccgtgcatcggaagcccgctgcacaagcacctgtgctgtcaggtaccccgctgcatcagtgggattcctgtccctcgcrcctcrtggggtgaagcagaygcgttctgtg

SEQ ID NO: 55832 - DNA, 600 bp, Chicken  19866894309853_2
ctgactcgtttctttgttgccgttcctgagktttttttttttttctgggtttgttcttttgtggaggagagatgcacggctctgggggcagtgctggcagatggaggcagggcggccacaggggtgcggtggccaagcagacccagcggtgaggtctgggcttccctgccctgctgcaggatgcccgtaccgccagctctgggcagggtctgctccacgtgccgtgcatcggaagcccgctgcacaagcacctgtgctgtcaggtaccccgctgcatcagtgggattcctgtccctcgcrcctcrtggggtgaagcagaygcgttctgtgctcaggtgactcgtgctggccacggcctgacatgggcttttgttttttgttttttgttttttttttttgaatgcaatctgaacggttccgaacgcttttgctcttagcagatttctatctgggtttgtgaaaaggatctgtttacgtcagtgggtgacactgaaacacaactcctccggggctgtttgtttgaacaccagaaatgagggaaaaaggtaccagtgcttttgctttaattagactccagccgctgaggagcggtccggggtt

SEQ ID NO: 55833 - DNA, 600 bp, Chicken  19866894309853_3
tcgtttctttgttgccgttcctgagktttttttttttttctgggtttgttcttttgtggaggagagatgcacggctctgggggcagtgctggcagatggaggcagggcggccacaggggtgcggtggccaagcagacccagcggtgaggtctgggcttccctgccctgctgcaggatgcccgtaccgccagctctgggcagggtctgctccacgtgccgtgcatcggaagcccgctgcacaagcacctgtgctgtcaggtaccccgctgcatcagtgggattcctgtccctcgcrcctcrtggggtgaagcagaygcgttctgtgctcaggtgactcgtgctggccacggcctgacatgggcttttgttttttgttttttgttttttttttttgaatgcaatctgaacggttccgaacgcttttgctcttagcagatttctatctgggtttgtgaaaaggatctgtttacgtcagtgggtgacactgaaacacaactcctccggggctgtttgtttgaacaccagaaatgagggaaaaaggtaccagtgcttttgctttaattagactccagccgctgaggagcggtccggggttgagta

SEQ ID NO: 55834 - DNA, 600 bp, Chicken  19866894309853_4
cgttcctgagktttttttttttttctgggtttgttcttttgtggaggagagatgcacggctctgggggcagtgctggcagatggaggcagggcggccacaggggtgcggtggccaagcagacccagcggtgaggtctgggcttccctgccctgctgcaggatgcccgtaccgccagctctgggcagggtctgctccacgtgccgtgcatcggaagcccgctgcacaagcacctgtgctgtcaggtaccccgctgcatcagtgggattcctgtccctcgcrcctcrtggggtgaagcagaygcgttctgtgctcaggtgactcgtgctggccacggcctgacatgggcttttgttttttgttttttgttttttttttttgaatgcaatctgaacggttccgaacgcttttgctcttagcagatttctatctgggtttgtgaaaaggatctgtttacgtcagtgggtgacactgaaacacaactcctccggggctgtttgtttgaacaccagaaatgagggaaaaaggtaccagtgcttttgctttaattagactccagccgctgaggagcggtccggggttgagtaacctgaggccggcgc

SEQ ID NO: 55835 - DNA, 600 bp, Chicken  19866894309856_1
accccagctttccctattctgatgctgtccttggcaccacatctaattttgaatgcttctctcactgaagaaggaaatgtgatcttgccagttatgaagcatgctgcacactttcctttgcagtgaaatcaaactgcgtttcgcatacgttgagaggtctccccatatttacctggattatttcctgaagggtaagggggtccagaaaagctggtccctcctcaagaaggaagtattaaaggtgcaggtgcagtctatcgccacaagctgcaagatgagcccacaggaaagagtaacggygtggatgaacagggagcttttcctgaggctccaggagaaaaaaawaaagaatctttctcctgtggaagaagggacaggaaattcagggagagtacaaagaagttgttaggatatgcaaggagataattagaagggcaaaagccgagcttgaactcaacttgaccattggggtaaaagagaacaaaaaacttttctacaaatatattaacagtaggaggaagaccgaggagaatctctaacctttagtggatgtggatgggaacgtgaccactggggaaaaggaaaaggctgaggttatca

SEQ ID NO: 55836 - DNA, 600 bp, Chicken  19866894309856_2
attttgaatgcttctctcactgaagaaggaaatgtgatcttgccagttatgaagcatgctgcacactttcctttgcagtgaaatcaaactgcgtttcgcatacgttgagaggtctccccatatttacctggattatttcctgaagggtaagggggtccagaaaagctggtccctcctcaagaaggaagtattaaaggtgcaggtgcagtctatcgccacaagctgcaagatgagcccacaggaaagagtaacggygtggatgaacagggagcttttcctgaggctccaggagaaaaaaawaaagaatctttctcctgtggaagaagggacaggaaattcagggagagtacaaagaagttgttaggatatgcaaggagataattagaagggcaaaagccgagcttgaactcaacttgaccattggggtaaaagagaacaaaaaacttttctacaaatatattaacagtaggaggaagaccgaggagaatctctaacctttagtggatgtggatgggaacgtgaccactggggaaaaggaaaaggctgaggttatcaatggcttctttacatctgtctttacaagtcagatcagttatcctt

SEQ ID NO: 55837 - DNA, 600 bp, Chicken  19866894309856_3
agtcaactcggagaggtcccagaagactggagacttgccagtgtgactcccatctacaagaaatgtcataaggaggatctgggaactacaggccggtcagcctgacttcagtgccagggtaggttatggagcagactgtcttgaggaagaccacatagcatgtgcaggacaaccttgggatcaggacaagcaagcatgggtttgtgaagggcagatcctgactgaccagcctgatctccttctatgttctagtgacctgcctggtggatgaggtaaaggctgtaggcatagtctacctakrcttcagcaaagccttttacattctcttggagaagctggcagcccatgggcttggacaggaacactctttgctgggtaaagagctggctggatgaccaggcccagaaggtggtgatgaatggaatcaaatccagctggtgacctgtcatgagtggtgttccccaggggtttgtactggggcctgtcctgtttaatatctttagtgatgacctgggtgagggcattgagtgcatcctcagtaaatttgcagatgacaccaagttgggaggaagtatccatctgcctgggtgtaagaaggcc

SEQ ID NO: 55838 - DNA, 600 bp, Chicken  19866894309856_4
gtcaactcggagaggtcccagaagactggagacttgccagtgtgactcccatctacaagaaatgtcataaggaggatctgggaactacaggccggtcagcctgacttcagtgccagggtaggttatggagcagactgtcttgaggaagaccacatagcatgtgcaggacaaccttgggatcaggacaagcaagcatgggtttgtgaagggcagatcctgactgaccagcctgatctccttctatgttctagtgacctgcctggtggatgaggtaaaggctgtaggcatagtctacctakrcttcagcaaagccttttacattctcttggagaagctggcagcccatgggcttggacaggaacactctttgctgggtaaagagctggctggatgaccaggcccagaaggtggtgatgaatggaatcaaatccagctggtgacctgtcatgagtggtgttccccaggggtttgtactggggcctgtcctgtttaatatctttagtgatgacctgggtgagggcattgagtgcatcctcagtaaatttgcagatgacaccaagttgggaggaagtatccatctgcctgggtgtaagaaggcca

SEQ ID NO: 55839 - DNA, 600 bp, Chicken  19866894309862_1
tggagctgaattctcccatgcagaaaaaaatggcgacagtgatgtgaaagacaagccatgttctggacagccatccagattttatgggagcatagcatgcagactcttgttcattggtggcaaaaatgcataactaatggtagtgactatgttgaaagttagtgttttgtagctgaggatgtgtgctatcaagtgatgttattttgctctttgtatctattgtactgtatatcccttggaaataaatatataagcaggtattattttcagagtgacccatgcactagcccagtgtagtayaggccaagtgagtcagatgagaattctacattgttctaccaacctctattctgagatttcttttacattataacagcaggcaacagcagattagtggcttataccctgaaattragttttttcatgtgtatgtacatttctgctcagaaacactgtagggagagtataaagaaacaatgtctctgtgggtttttttgtttgtttgtttttcctgggatttattcaattcaagctgctttatttgtttcttcatatatgtgaacatgcttaccttggataaagctaaaaaacagtgagcta

SEQ ID NO: 55840 - DNA, 600 bp, Chicken  19866894309862_2
tggtggcaaaaatgcataactaatggtagtgactatgttgaaagttagtgttttgtagctgaggatgtgtgctatcaagtgatgttattttgctctttgtatctattgtactgtatatcccttggaaataaatatataagcaggtattattttcagagtgacccatgcactagcccagtgtagtayaggccaagtgagtcagatgagaattctacattgttctaccaacctctattctgagatttcttttacattataacagcaggcaacagcagattagtggcttataccctgaaattragttttttcatgtgtatgtacatttctgctcagaaacactgtagggagagtataaagaaacaatgtctctgtgggtttttttgtttgtttgtttttcctgggatttattcaattcaagctgctttatttgtttcttcatatatgtgaacatgcttaccttggataaagctaaaaaacagtgagctatcatagaatcactaaggggtggaaaagacccacaggatcatccagtccaaccattctcccttcaccaatgggtcccgctaaaccatgtccctcaacacaacatccaaaactgga

SEQ ID NO: 55841 - DNA, 599 bp, Chicken  19866894309869_1
  misc_feature (1)..(108): n is any nucleotide
nnnnnnnnnnnnnnnnnnnnnnnnnnnnnnnnnnnnnnnnnnnnnnnnnnnnnnnnnnnnnnnnnnnnnnnnnnnnnnnnnnnnnnnnnnnnnnnnnnnnnnnnnnnntatcacatcaatgtaagtgctatgagctcatgattcacacagaccacatacaaataatactaaccaacctcaatgcaatgtaaaaaaaatgcacacaatctcacagtggtgtaaatgttagtagattcattaaacttcaaagcctcctccgaattctcagacctgtctgaagttcctttgaattcaattaayatttcattctattatgtccaaccccttgcagcctcgctcatcaaaatgctctatgccwtgcccttgaactgcaggcrtcaatttggtgttgaggcaacaaaggaagtgatgggatgagaagtgggatgaattagtttgaggtaaaagataaatacctattaatgtttcagaagttacctggggactttacccatggtaattcattatcctggaactggcgcagcctgagctaaaccaaaggtttagtttcgttttataaggcttatcaatatcagaatagatctttgaatcttcaccta

SEQ ID NO: 55842 - DNA, 599 bp, Chicken  19866894309869_2
  misc_feature (1)..(50): n is any nucleotide
nnnnnnnnnnnnnnnnnnnnnnnnnnnnnnnnnnnnnnnnnnnnnnnnnntatcacatcaatgtaagtgctatgagctcatgattcacacagaccacatacaaataatactaaccaacctcaatgcaatgtaaaaaaaatgcacacaatctcacagtggtgtaaatgttagtagattcattaaacttcaaagcctcctccgaattctcagacctgtctgaagttcctttgaattcaattaayatttcattctattatgtccaaccccttgcagcctcgctcatcaaaatgctctatgccwtgcccttgaactgcaggcrtcaatttggtgttgaggcaacaaaggaagtgatgggatgagaagtgggatgaattagtttgaggtaaaagataaatacctattaatgtttcagaagttacctggggactttacccatggtaattcattatcctggaactggcgcagcctgagctaaaccaaaggtttagtttcgttttataaggcttatcaatatcagaatagatctttgaatcttcacctaggagacattatttgcatgtcatcacataattataagacacacttacttctctgctctc

SEQ ID NO: 55843 - DNA, 599 bp, Chicken  19866894309869_3
  misc_feature (1)..(31): n is any nucleotide
nnnnnnnnnnnnnnnnnnnnnnnnnnnnnnntatcacatcaatgtaagtgctatgagctcatgattcacacagaccacatacaaataatactaaccaacctcaatgcaatgtaaaaaaaatgcacacaatctcacagtggtgtaaatgttagtagattcattaaacttcaaagcctcctccgaattctcagacctgtctgaagttcctttgaattcaattaayatttcattctattatgtccaaccccttgcagcctcgctcatcaaaatgctctatgccwtgcccttgaactgcaggcrtcaatttggtgttgaggcaacaaaggaagtgatgggatgagaagtgggatgaattagtttgaggtaaaagataaatacctattaatgtttcagaagttacctggggactttacccatggtaattcattatcctggaactggcgcagcctgagctaaaccaaaggtttagtttcgttttataaggcttatcaatatcagaatagatctttgaatcttcacctaggagacattatttgcatgtcatcacataattataagacacacttacttctctgctctctttggtgaatactgaaatt

SEQ ID NO: 55844 - DNA, 600 bp, Chicken  19866894309869_4
attagtttgaggtaaaagataaatacctattaatgtttcagaagttacctggggactttacccatggtaattcattatcctggaactggcgcagcctgagctaaaccaaaggtttagtttcgttttataaggcttatcaatatcagaatagatctttgaatcttcacctaggagacattatttgcatgtcatcacataattataagacacacttacttctctgctctctttggtgaatactgaaattatggaaattctaggatcaatgacaaaaatcagtggttttaaaaaacacccggraagctgaaakacttcrtgtagatagaaaaygggaagcaagataattaggtcatgtccttcctgacatttattttagcaagcagagaatcagacggtgttctttcctttgtacgtaattcagaaggtgaaaacatatattcatactgtacttagctgatggaatttaactgctgaaatagatattcccatctatttgacattcagtgcaagagcaaatttctcaacgcactcattaacataccaactgaaaacgtgaagatgtcattatcagtagagatgtgttcttgtacataaggacaa

SEQ ID NO: 55845 - DNA, 600 bp, Chicken  19866894309869_5
ggtaaaagataaatacctattaatgtttcagaagttacctggggactttacccatggtaattcattatcctggaactggcgcagcctgagctaaaccaaaggtttagtttcgttttataaggcttatcaatatcagaatagatctttgaatcttcacctaggagacattatttgcatgtcatcacataattataagacacacttacttctctgctctctttggtgaatactgaaattatggaaattctaggatcaatgacaaaaatcagtggttttaaaaaacacccggraagctgaaakacttcrtgtagatagaaaaygggaagcaagataattaggtcatgtccttcctgacatttattttagcaagcagagaatcagacggtgttctttcctttgtacgtaattcagaaggtgaaaacatatattcatactgtacttagctgatggaatttaactgctgaaatagatattcccatctatttgacattcagtgcaagagcaaatttctcaacgcactcattaacataccaactgaaaacgtgaagatgtcattatcagtagagatgtgttcttgtacataaggacaagcgtccagca

SEQ ID NO: 55846 - DNA, 600 bp, Chicken  19866894309869_6
agataaatacctattaatgtttcagaagttacctggggactttacccatggtaattcattatcctggaactggcgcagcctgagctaaaccaaaggtttagtttcgttttataaggcttatcaatatcagaatagatctttgaatcttcacctaggagacattatttgcatgtcatcacataattataagacacacttacttctctgctctctttggtgaatactgaaattatggaaattctaggatcaatgacaaaaatcagtggttttaaaaaacacccggraagctgaaakacttcrtgtagatagaaaaygggaagcaagataattaggtcatgtccttcctgacatttattttagcaagcagagaatcagacggtgttctttcctttgtacgtaattcagaaggtgaaaacatatattcatactgtacttagctgatggaatttaactgctgaaatagatattcccatctatttgacattcagtgcaagagcaaatttctcaacgcactcattaacataccaactgaaaacgtgaagatgtcattatcagtagagatgtgttcttgtacataaggacaagcgtccagcacacagg

SEQ ID NO: 55847 - DNA, 600 bp, Chicken  19866894309869_7
taatgtttcagaagttacctggggactttacccatggtaattcattatcctggaactggcgcagcctgagctaaaccaaaggtttagtttcgttttataaggcttatcaatatcagaatagatctttgaatcttcacctaggagacattatttgcatgtcatcacataattataagacacacttacttctctgctctctttggtgaatactgaaattatggaaattctaggatcaatgacaaaaatcagtggttttaaaaaacacccggraagctgaaakacttcrtgtagatagaaaaygggaagcaagataattaggtcatgtccttcctgacatttattttagcaagcagagaatcagacggtgttctttcctttgtacgtaattcagaaggtgaaaacatatattcatactgtacttagctgatggaatttaactgctgaaatagatattcccatctatttgacattcagtgcaagagcaaatttctcaacgcactcattaacataccaactgaaaacgtgaagatgtcattatcagtagagatgtgttcttgtacataaggacaagcgtccagcacacaggttgatgagccctgc

SEQ ID NO: 55848 - DNA, 600 bp, Chicken  19866894309870_1
gtcccagctctgctgcagaagctccagggcagtgggctgggagcctcccaatgggacacatccagttgggattgccagtggttgggattgccagcagtttgggattaccaatggttgagactgccaatggttgggatggccaatggttgggatggccaatgacttgggactgccaatggttgggatggccagtggttggaatggccaatggcttgggatggccaatggcctgggactgccatcgggctggttccatggttcatcacccacagcagctcctccagcaggaaccagtggtgyygggaaggagctggagatggatttgctaygatggcctaagccctgccctctccacttcattcgtcatcggcgtcactgggcacagggacagctgtggggactgrggcctctcagctgggggaaggaagcttgaacagagagcagggggaagttcaaagcatgtcagcgcttgggataaagccattccacctcaatgacctcctgcaagaggatttgattcttgctgttttcattctgaaatcccttcaaagcaaaatctgatactagcaaagaattaaatagagcagcgcatacccacac

SEQ ID NO: 55849 - DNA, 600 bp, Chicken  19866894309870_2
tcccagctctgctgcagaagctccagggcagtgggctgggagcctcccaatgggacacatccagttgggattgccagtggttgggattgccagcagtttgggattaccaatggttgagactgccaatggttgggatggccaatggttgggatggccaatgacttgggactgccaatggttgggatggccagtggttggaatggccaatggcttgggatggccaatggcctgggactgccatcgggctggttccatggttcatcacccacagcagctcctccagcaggaaccagtggtgyygggaaggagctggagatggatttgctaygatggcctaagccctgccctctccacttcattcgtcatcggcgtcactgggcacagggacagctgtggggactgrggcctctcagctgggggaaggaagcttgaacagagagcagggggaagttcaaagcatgtcagcgcttgggataaagccattccacctcaatgacctcctgcaagaggatttgattcttgctgttttcattctgaaatcccttcaaagcaaaatctgatactagcaaagaattaaatagagcagcgcatacccacaca

SEQ ID NO: 55850 - DNA, 600 bp, Chicken  19866894309870_3
cagtgggctgggagcctcccaatgggacacatccagttgggattgccagtggttgggattgccagcagtttgggattaccaatggttgagactgccaatggttgggatggccaatggttgggatggccaatgacttgggactgccaatggttgggatggccagtggttggaatggccaatggcttgggatggccaatggcctgggactgccatcgggctggttccatggttcatcacccacagcagctcctccagcaggaaccagtggtgyygggaaggagctggagatggatttgctaygatggcctaagccctgccctctccacttcattcgtcatcggcgtcactgggcacagggacagctgtggggactgrggcctctcagctgggggaaggaagcttgaacagagagcagggggaagttcaaagcatgtcagcgcttgggataaagccattccacctcaatgacctcctgcaagaggatttgattcttgctgttttcattctgaaatcccttcaaagcaaaatctgatactagcaaagaattaaatagagcagcgcatacccacacagattgcacaagaaaacaacgttaaaaat

SEQ ID NO: 55851 - DNA, 600 bp, Chicken  19866894309870_4
ttaccaatggttgagactgccaatggttgggatggccaatggttgggatggccaatgacttgggactgccaatggttgggatggccagtggttggaatggccaatggcttgggatggccaatggcctgggactgccatcgggctggttccatggttcatcacccacagcagctcctccagcaggaaccagtggtgyygggaaggagctggagatggatttgctaygatggcctaagccctgccctctccacttcattcgtcatcggcgtcactgggcacagggacagctgtggggactgrggcctctcagctgggggaaggaagcttgaacagagagcagggggaagttcaaagcatgtcagcgcttgggataaagccattccacctcaatgacctcctgcaagaggatttgattcttgctgttttcattctgaaatcccttcaaagcaaaatctgatactagcaaagaattaaatagagcagcgcatacccacacagattgcacaagaaaacaacgttaaaaatagaaacagcgagaacaaaaatgaatgcagaagaaaagttcaagagtggaaatcctgagggtcctctcattctgta

SEQ ID NO: 55852 - DNA, 600 bp, Chicken  19866894309870_5
ttaaatagagcagcgcatacccacacagattgcacaagaaaacaacgttaaaaatagaaacagcgagaacaaaaatgaatgcagaagaaaagttcaagagtggaaatcctgagggtcctctcattctgtagttccctcctaacctcaggtatgtggtggcaccggggttaggcagcaggctgcatgctgtgatcctgggatgagagttaagagcccagaacttcagatcagcacccggcaaacccaactgcaaacacgctgtgagctcacagcactgctgtaggaattggaccgtggttyggggatttagtgaggtgtctagagcaaatgtcagccctgggcagctggatggggctgagacaagcaaagctctgcctcaaatcatgtgctaagagcgactcatcatcctgccacgaatgtcattccaaaggaataagaagccaccgctggcatctgacaaggcatcgtgctgtgcaccgagatgaggcggctgctaatatccatactgagcaggtacctctggaggaaaatgttgagataatgaagtgcttctgacaccttaagggatcctgggagtcccagcagcgttccctgagggaa

SEQ ID NO: 55853 - DNA, 600 bp, Chicken  19866894309871_1
tagaaatcagtggggaacgaaagtccagaattgatcagttgaaaagaggggagcccagtcgcagcacatcttcaggtaagaatataatttttagtgagtctggactgctattctctgcggaagtgcaaaggtacaaatcccaaattgttcttgtatggctgtatgctctcttaatttgtaatcagtatgaagggagagggaagttctctgccattcatagtaaaactagagtgaatcaagattcctggaagcgttactgtgtttgaaaagttgatcctcagtgggcattattaccacttygttcatatcaaaacgttcagtcagatttggcagtttgtgctgtctggaggataaagtaatttctaggacaaatgaaactgaaagagaaaatccttctgctaacagaacagtgaactagttttattgaaaaaaaaaatgtttttaatgaattatcaacattcattttcatgtggaaattccgagatctatgcaaaatgtcccttcattctgggaaagggatccattttgatctcaggagctgtttttgctgaggtaaatctgtcatgattcttcataggggtacttttattgcatatggat

SEQ ID NO: 55854 - DNA, 600 bp, Chicken  19866894309874_1
gaatggtaacattaaggcatctggtagtgacagagtatccttctgttagatactaacctgttctaatagctctgcagcttttggtttggcaaaattaactcatttgaatttgtgagattgtacttgaatatcacatcaataagttgctgagctatctgatggttaatgtggcactacaaagatccgagtagagagagctggtgctttggcgtattattgtgtattttcagatgtgtgttgctccatttttgaaagtgttgcaatgctctctgatacagcttgtcagtaataatgagctcygtttatattcctgtactttaagtagaaacttaagctaagaacttgatattttttaacagcttatattttaattaatgttttctgaagttagatgtcttttcctttttttttttcagacttttttttctcattcaagtgtatttgtgcttgtgaaggagaacaaatcattcctaaatgcacccagctagtcagtgtttgatcacaacaaaaataatgtcaggatgtacacaaaaggcctgcatttaagtggctgattttgtgtatatcaagtttagaatatacagctgagtaatttaaccg

SEQ ID NO: 55855 - DNA, 600 bp, Chicken  19866894309875_1
gtctaggacagaaatttcttgtctttccaagtgctgtgttaccaaaggttcattctggctctttgcatttatctgaagtttagaactactatagacacctcttttaacagaagcagctctgagaactcattttgctccaccaaagacaggctttgcctttttgtagttgcccagcaaaatcccaataacagtgttttaaatgactgttcatagaatcatagacttcctcagcttggaaaagaccttgaagatcatcaagttcaaccacaacctaaccataccaacccaactctatcaacyctccactaaatcatggcactgagcaccacatccaaatggtttttaaacatattcagggatggtgactcaaccacctccctggggagcctattccagtgcttaacaaccccttctgtaaagaaggttttcctggtatccaacctaaacacaacttgaagccatttccccttgtccttgttccatttttcactgcaaagctttcactcagtctagaaaaaaaaatagtatctcctgtatttacatattgtcaaaggctaacacagggaaactaatggattacgtcttccttcagttatataa

SEQ ID NO: 55856 - DNA, 599 bp, Chicken  19866894309883_1
  misc_feature (1)..(47): n is any nucleotide
nnnnnnnnnnnnnnnnnnnnnnnnnnnnnnnnnnnnnnnnnnnnnnnttaaaggaagcttcttgtttaatggtgttgcgtcctactctagctgaaaacctctttgagtatttgtggtaatatatgtggggtgttttttaagctcttcccaattttagaattctctttgaatttccttgatttttgcgtttttatgtttgcaatcacaacacaaatgggagatgttttgaaatgtaaatgagaaataaaagattgcacaataatagcttcaaaagcactttgctatctttcacatttgctrttaagttcttgctgaaagacctctgctgcagaaatctttggatgttgaagcacccatgaattatcagaattacgtatacagccaggagcttcacgaccacctatatttattttgtccatctacaaatgaatcaggtgtgagscacrctacaaccaaataacttcttatttataaatttttaaaagagacatacgagattctcagtctaccttttgaacacatacctaagattcataccagtcccataaacaacatttatagaaacctttctgtgtagtacatcttattatgcaacacaa

SEQ ID NO: 55857 - DNA, 600 bp, Chicken  19866894309883_2
tcttcccaattttagaattctctttgaatttccttgatttttgcgtttttatgtttgcaatcacaacacaaatgggagatgttttgaaatgtaaatgagaaataaaagattgcacaataatagcttcaaaagcactttgctatctttcacatttgctrttaagttcttgctgaaagacctctgctgcagaaatctttggatgttgaagcacccatgaattatcagaattacgtatacagccaggagcttcacgaccacctatatttattttgtccatctacaaatgaatcaggtgtgagscacrctacaaccaaataacttcttatttataaatttttaaaagagacatacgagattctcagtctaccttttgaacacatacctaagattcataccagtcccataaacaacatttatagaaacctttctgtgtagtacatcttattatgcaacacaactggtttttcgttctgaattttctgactccttaactgcaattgatgtaaaactctgttgcacctgatggaaatcatgtaagttccaacaattctgatgtaagagcctgtacaaatctgtgtggcatggacagctaaataaaac

SEQ ID NO: 55858 - DNA, 600 bp, Chicken  19866894309883_3
cccaattttagaattctctttgaatttccttgatttttgcgtttttatgtttgcaatcacaacacaaatgggagatgttttgaaatgtaaatgagaaataaaagattgcacaataatagcttcaaaagcactttgctatctttcacatttgctrttaagttcttgctgaaagacctctgctgcagaaatctttggatgttgaagcacccatgaattatcagaattacgtatacagccaggagcttcacgaccacctatatttattttgtccatctacaaatgaatcaggtgtgagscacrctacaaccaaataacttcttatttataaatttttaaaagagacatacgagattctcagtctaccttttgaacacatacctaagattcataccagtcccataaacaacatttatagaaacctttctgtgtagtacatcttattatgcaacacaactggtttttcgttctgaattttctgactccttaactgcaattgatgtaaaactctgttgcacctgatggaaatcatgtaagttccaacaattctgatgtaagagcctgtacaaatctgtgtggcatggacagctaaataaaaccccg

SEQ ID NO: 55859 - DNA, 599 bp, Chicken  19866894309885_1
  misc_feature (1)..(117): n is any nucleotide
nnnnnnnnnnnnnnnnnnnnnnnnnnnnnnnnnnnnnnnnnnnnnnnnnnnnnnnnnnnnnnnnnnnnnnnnnnnnnnnnnnnnnnnnnnnnnnnnnnnnnnnnnnnnnnnnnnnnntgattcgagggaagaaccctctaaatctaatcatctaaaccacctcccctgctttctaattagaaaatcagcatggtcacgagctcttaatctgctcgttatttccttcccctggctagtgtccacagcatttgtaactgctcttcaaatgttagcagatgtgattggaagcatggtttgttyctcactacacctgttaagtatcttggatgaaggaagaacaatacgttgtctttcagtagttccatgctgtaccccatggctatttagtcatgtcacagagagccatgtaagtkttcaaaaaccagatggctgyaaacctctgtaaaatctgcatgtattccagtgtcaaaggtagcaccttttttgaaaagttaattaatacctgtgattttgcaggaaattaaatgcaggaagcattccttcagaccttkctcctgactggatgtctggaactacagtaattgccttgtatcaggaat

SEQ ID NO: 55860 - DNA, 599 bp, Chicken  19866894309885_2
  misc_feature (1)..(4): n is any nucleotide
nnnntgattcgagggaagaaccctctaaatctaatcatctaaaccacctcccctgctttctaattagaaaatcagcatggtcacgagctcttaatctgctcgttatttccttcccctggctagtgtccacagcatttgtaactgctcttcaaatgttagcagatgtgattggaagcatggtttgttyctcactacacctgttaagtatcttggatgaaggaagaacaatacgttgtctttcagtagttccatgctgtaccccatggctatttagtcatgtcacagagagccatgtaagtkttcaaaaaccagatggctgyaaacctctgtaaaatctgcatgtattccagtgtcaaaggtagcaccttttttgaaaagttaattaatacctgtgattttgcaggaaattaaatgcaggaagcattccttcagaccttkctcctgactggatgtctggaactacagtaattgccttgtatcaggaatgtcatttttcatttctagcaggtcttgttgaaccagacagattcttaaattgctattcattctctgctctgtagtgaagcaaacctttcagttcagcttttcgtacatggaag

SEQ ID NO: 55861 - DNA, 600 bp, Chicken  19866894309885_3
ccctctaaatctaatcatctaaaccacctcccctgctttctaattagaaaatcagcatggtcacgagctcttaatctgctcgttatttccttcccctggctagtgtccacagcatttgtaactgctcttcaaatgttagcagatgtgattggaagcatggtttgttyctcactacacctgttaagtatcttggatgaaggaagaacaatacgttgtctttcagtagttccatgctgtaccccatggctatttagtcatgtcacagagagccatgtaagtkttcaaaaaccagatggctgyaaacctctgtaaaatctgcatgtattccagtgtcaaaggtagcaccttttttgaaaagttaattaatacctgtgattttgcaggaaattaaatgcaggaagcattccttcagaccttkctcctgactggatgtctggaactacagtaattgccttgtatcaggaatgtcatttttcatttctagcaggtcttgttgaaccagacagattcttaaattgctattcattctctgctctgtagtgaagcaaacctttcagttcagcttttcgtacatggaagcatgaattctgaagatagcca

SEQ ID NO: 55862 - DNA, 600 bp, Chicken  19866894309885_4
taactgctcttcaaatgttagcagatgtgattggaagcatggtttgttyctcactacacctgttaagtatcttggatgaaggaagaacaatacgttgtctttcagtagttccatgctgtaccccatggctatttagtcatgtcacagagagccatgtaagtkttcaaaaaccagatggctgyaaacctctgtaaaatctgcatgtattccagtgtcaaaggtagcaccttttttgaaaagttaattaatacctgtgattttgcaggaaattaaatgcaggaagcattccttcagaccttkctcctgactggatgtctggaactacagtaattgccttgtatcaggaatgtcatttttcatttctagcaggtcttgttgaaccagacagattcttaaattgctattcattctctgctctgtagtgaagcaaacctttcagttcagcttttcgtacatggaagcatgaattctgaagatagccaacatgtactctataaaggtgcgtgctgtgcaaagctcttgcagctgtgtaacctcatcgaaggattattgcccagtaatagcagactgctgtttgtctttctgactgatctcaccaga

SEQ ID NO: 55863 - DNA, 600 bp, Chicken  19866894309888_1
agacagttcttaatcagtttttaacagtctaaaatagtgctgaaaatatcatttagccttgcaagatctacttcttctcactgaattgagcccatcccattatatcattgtagttgatggctagagtactgaatttactgagttatgtaaatataaatatataacagagttatgtaaaaaaatattttgaattattttgattattttgcaagaacaaaagttgcaagagcagaaaaacacactcttccataattattttcatcctatcactgatggtagcaggaatgaattagcttacamatgcaaattcccatgtattggtgaaatagttttttgctgctccaagatcttaggagcatggatctgagttttcttcatttattaatttttttaacaatgcatttttatagtgcaatataattcccaaaatcggagacctgtaatttgcatgacatgagacctatttttaaattcccaagccaagttaatataacacctcctttttaaacttgtcaagctttgattcctttcactctagtaaattttaagtgactcaatccaaatggcagagcttaacaagacctatgaactctttcaata

SEQ ID NO: 55864 - DNA, 600 bp, Chicken  19866894309892_1
gagatctgcatgtcggcttggtttcttttaaatatgttttaacatcaaaaagtagtattgctacattactacaataaaacaatcatctgatgaaatttatgcaatataacagaatgataagcctcgtaaaatctggaatacatgcaaacttgcagctgggcagcaagcagtgttctgctctatgtagtagtcaaagctttacattctcttgcctacgttctccaggatggggaaggtgctgaatcaaccagatgtgttggctgagttagtgaatacaaatgtaaacacagaaacatggaraaaaaaaaaaaaaaagaatttataatctggaaaggtatgtattctacagtagtagtaagcagtgaaattatagttacctctgccatttacacagaagaatcaagaggataaataccattagaagtagtgtcatcaaacaacttaaaagaattactgtgtttgactgggtttttatttcatcatcacatgaatctaggaataatcagaagaaagcaagtgaaaattttattgtttgctctaacagcaaatattcctaaccattctagaacactgacttctcttattaacaaaaaagtaaaa

SEQ ID NO: 55865 - DNA, 600 bp, Chicken  19866894309903_1
atgattctatgacttaataccttgtaaaaatggtggagaacaaaaaatgaaaaataaatggctaaaacaatattttataatgtaatgaagtaaaataccaatctatttgattatttatttattttaattctacattggtatattggggcatatattgaggaagaaaagactttcatatattgacacagaattgcttagtgaaatactgttcaaaacaccagaaaattagaaagacatagtctgcttgtttaccacaagacaatattattcaacatgtcagcatctttaatcttcaccttkggttttaaagatatgaagattggccagtaaattttactactgcttaaggctagacccaaataacaagctgtaaaataattttgagacgcagatttgtttggcttcaggttttccgcagaagtgttctgctaaaaatggaaattcacaacaattttgaaccttctgggatttagttttctcctcacatactgaacagcaatgcaaaataggaggaacacttctggagctcactattaggttaggtttcagcagattcctgagcactatcctaagcatatatgtagttttgttcagagagta

SEQ ID NO: 55866 - DNA, 600 bp, Chicken  19866894309903_2
gaacagcaatgcaaaataggaggaacacttctggagctcactattaggttaggtttcagcagattcctgagcactatcctaagcatatatgtagttttgttcagagagtatgcttaaagttaataatgggtttagcatctttctaaaacaaaacccacatttttctgttctttgagtgctggaaaatgataacatcagcctgctcaaacactgcttcgatcacacacctgcattcctggacagcatctctgtatttctaccaggtcacctgttgctatttccaccttctgtatacctctyttacatcttttaatttattcagaagcttcttgctcatctatgcaggccatttgtcaggacaattcttaaacttcaatgaggtgtcagctagttgtccttgacccctctttttgctgggcctgtctcttgtgggattattccaggcaggctgtcttctttttagaaattaagggttgtgagcagtgacatctttgcctggtaggagtgaggctgttaaactacatataaggagaacatatggaaataaattctagtcctgatgaagtgaaaggcaaaactttctgctaactttattatatc

SEQ ID NO: 55867 - DNA, 600 bp, Chicken  19866894309920_1
catcttatatagtaagatgcttacatttctgccctagcacatcacactacaaagcaaaatacaggtttatacatacagctggtttcttaaagcagccctaagggtgatgagtcacatctgtagtaaaagttaatggttgtaattatggctcagcctccgaatccaaagcagttggaccacatgaaaatgtctttctactttagctatgaacctacaagtcggtggttccacaccccctttagatttttccactacatgatagagaacaaagaccttacacacatggaatcaagaccacaraacttcagcgtaaacataagctgtatctggttttgcttagcagtcccatggaagtgtttctgttacattatagacaaattactatcttacaggtcctcaaagtttccccacagatataactgtatgctgcattctttatttccttttgaaataaaggattaatgaatatactgttgaagagctgtcatgctatacagggcatgtaaatatttgcatattgttagtgcacagacacatacaactttttacacatttacagagaattgcagtgtaatgcagtatttgttcaggcagctgatg

SEQ ID NO: 55868 - DNA, 600 bp, Chicken  19866894309925_1
catcaaaaataaaacatgttgttttttagattataaatttggaattgattgtttcatggtcctgctggcagactgcctggagaaaaaggcagtgagtatgcaaggagatatgatttctggtgatgtaaaagctgtataggaatgaaaaagctagtaacttgagccacattcctgggatgaagctaaactgaacaatgcttggctaatgctctgctcaatttctctgttcagtattagtagtataggactactgcaatacatagagctccccatgaagactgaaaaacagcatttcacagwactgctaactccagttaataactttgtactatgatgtgaagggccattaccaagcagaattcctggctgatgggatgttgctgtgaccagcaggataaagaaactcagagatctgcttcttttccctcatctaatatatcatgttttgctttatctcctcattaaaaaacactttctaaagcccaaaaagtttggggcatgtcaaaattttctcttttttcctcctctcttcttctctcctctcttatgttcatgcttttcttattggataaacccctgggctccatctttactgaaaaa

SEQ ID NO: 55869 - DNA, 600 bp, Chicken  19866894309928_1
tgaagcagtctctttgtaagatgtaagcctgaaccaatgaagtcaacagagcaaggtattggctctagcaccaatatgcctgcatctcaagcgtctcctgcagaaactgtccctcagccatgacatagcagctctgtgctgtaggcccaattcttcctccaaatctgtctttccaaacctggctctagacagagagttgcctttttggtacagagaagtattgatatcaataagtatttagggcattggtctcattcctaataaagttaaaactctacattacagcttgaaagcaagaaygtatgtcaaatgcttacttttgctatgtatacttagttatttcaaaggcatttttacatactcccttcagttcagaagatcctttgaaaattcatttggatgaatgctgctcttttccgtggagatttggctaaccgttttttgttaaagcaattttgttgagcatggtaatgcaatcagtatcccaggaggctcatccttcacaagattcctgcctgcacttctacctgcaaagttatatcatggccgtcttcacagataacaaagtactgaaactggaatgcacaaagcagcacaata

SEQ ID NO: 55870 - DNA, 600 bp, Chicken  19866894309930_1
acaggctccaaggtacaatacctggtctcattatttgccattgtttgcactgttcacctaacttaggtatgccagcccccagaactccaggcactttgactgcattggtctaagcagctggaagaaaactcctccacgtgtactcaccacccagatattggagcgtgcctgcagctctgcattcaccctgaaccctccgaagtcagaatccacctccagaccagcagacttggctaattccacgttaggctccagcccaactgcagccacaatgtgatcggtctccacctgtaggagaayttgtaacagttattctgtttctctcagtggccctgcaaacattcccactcccagcatttagattcacctttcggccatctttcagtttaatcaccagccgatttccagagacagagacagacttgaccacagcattaggcataacattaacgccctctggaaacaaaaaggaaatgtaactgcttgcacagggacaggtggacttcaggtgaagcaggaggaggagcgctggagcacagcttcacctcttctgactttctctgtggtccagttgctcagataytcgggtaagactttgcc

SEQ ID NO: 55871 - DNA, 600 bp, Chicken  19866894309930_2
tccacctgtaggagaayttgtaacagttattctgtttctctcagtggccctgcaaacattcccactcccagcatttagattcacctttcggccatctttcagtttaatcaccagccgatttccagagacagagacagacttgaccacagcattaggcataacattaacgccctctggaaacaaaaaggaaatgtaactgcttgcacagggacaggtggacttcaggtgaagcaggaggaggagcgctggagcacagcttcacctcttctgactttctctgtggtccagttgctcagataytcgggtaagactttgcccatattgccattctctgggaacagctgaatcacctccaggtttctggtttgtgctgaaaggaaagcaaagagcaratctgtgcaaaaatccagcagatgaggaataaaaaggtggtttktaatgtcaggctgactgcattcaaygcctgtcacttcygtaaaggtgccagctgaagcaagctgcctgctggagcacacttacctcttcttcccagagcacaggccagctcactgccaagaaaaccaccaccaataattgtgatggacttgacttgtcttgaaa

SEQ ID NO: 55872 - DNA, 600 bp, Chicken  19866894309930_3
catctttcagtttaatcaccagccgatttccagagacagagacagacttgaccacagcattaggcataacattaacgccctctggaaacaaaaaggaaatgtaactgcttgcacagggacaggtggacttcaggtgaagcaggaggaggagcgctggagcacagcttcacctcttctgactttctctgtggtccagttgctcagataytcgggtaagactttgcccatattgccattctctgggaacagctgaatcacctccaggtttctggtttgtgctgaaaggaaagcaaagagcaratctgtgcaaaaatccagcagatgaggaataaaaaggtggtttktaatgtcaggctgactgcattcaaygcctgtcacttcygtaaaggtgccagctgaagcaagctgcctgctggagcacacttacctcttcttcccagagcacaggccagctcactgccaagaaaaccaccaccaataattgtgatggacttgacttgtcttgaaatcttctccagatttttgaagtcctcaatctgaaagaagatttattcccatttcaaacaggaatggcagtgggagaaattctgcaatttctcc

SEQ ID NO: 55873 - DNA, 600 bp, Chicken  19866894309930_4
gacttgaccacagcattaggcataacattaacgccctctggaaacaaaaaggaaatgtaactgcttgcacagggacaggtggacttcaggtgaagcaggaggaggagcgctggagcacagcttcacctcttctgactttctctgtggtccagttgctcagataytcgggtaagactttgcccatattgccattctctgggaacagctgaatcacctccaggtttctggtttgtgctgaaaggaaagcaaagagcaratctgtgcaaaaatccagcagatgaggaataaaaaggtggtttktaatgtcaggctgactgcattcaaygcctgtcacttcygtaaaggtgccagctgaagcaagctgcctgctggagcacacttacctcttcttcccagagcacaggccagctcactgccaagaaaaccaccaccaataattgtgatggacttgacttgtcttgaaatcttctccagatttttgaagtcctcaatctgaaagaagatttattcccatttcaaacaggaatggcagtgggagaaattctgcaatttctccctttgaagtaagagtaactctttccttgacttcgaatgggagat

SEQ ID NO: 55874 - DNA, 600 bp, Chicken  19866894309930_5
cattaacgccctctggaaacaaaaaggaaatgtaactgcttgcacagggacaggtggacttcaggtgaagcaggaggaggagcgctggagcacagcttcacctcttctgactttctctgtggtccagttgctcagataytcgggtaagactttgcccatattgccattctctgggaacagctgaatcacctccaggtttctggtttgtgctgaaaggaaagcaaagagcaratctgtgcaaaaatccagcagatgaggaataaaaaggtggtttktaatgtcaggctgactgcattcaaygcctgtcacttcygtaaaggtgccagctgaagcaagctgcctgctggagcacacttacctcttcttcccagagcacaggccagctcactgccaagaaaaccaccaccaataattgtgatggacttgacttgtcttgaaatcttctccagatttttgaagtcctcaatctgaaagaagatttattcccatttcaaacaggaatggcagtgggagaaattctgcaatttctccctttgaagtaagagtaactctttccttgacttcgaatgggagatgtgtttctcttcctcctcttcctct

SEQ ID NO: 55875 - DNA, 600 bp, Chicken  19866894309930_6
tggaaacaaaaaggaaatgtaactgcttgcacagggacaggtggacttcaggtgaagcaggaggaggagcgctggagcacagcttcacctcttctgactttctctgtggtccagttgctcagataytcgggtaagactttgcccatattgccattctctgggaacagctgaatcacctccaggtttctggtttgtgctgaaaggaaagcaaagagcaratctgtgcaaaaatccagcagatgaggaataaaaaggtggtttktaatgtcaggctgactgcattcaaygcctgtcacttcygtaaaggtgccagctgaagcaagctgcctgctggagcacacttacctcttcttcccagagcacaggccagctcactgccaagaaaaccaccaccaataattgtgatggacttgacttgtcttgaaatcttctccagatttttgaagtcctcaatctgaaagaagatttattcccatttcaaacaggaatggcagtgggagaaattctgcaatttctccctttgaagtaagagtaactctttccttgacttcgaatgggagatgtgtttctcttcctcctcttcctctattgtacagaaag

SEQ ID NO: 55876 - DNA, 600 bp, Chicken  19866894309937_1
tatttgatctcatctttgtctatttttgctcttgctgaatgaagcttattggactcttgagacccaagtgcacactgcatggctgggatcaggctgtgtataaaggggcactgtccctcaggcatgagctcctcagccacacaggaagtatttagttttatatttgaaggctggctgaggttcactaatggctgttaatccactggctcctttgacttcatcctatgccaggccctgtccaacacctgaagccttggggtttctgcttgcttcacataaacattcaaaaatacataggarcaggagcctgtgctgcaggtggggtgtgcaggagcagaatgstttgaaggaggggctatgacagctatgtttttcttccttaaataatgaaaagttaaatgtcttttcagacaacgaaggggcaaaccattctgaaggaagagggkcccaacccaaaggggcttcagtgtataagcaggggatggtaggacaaaataagggtgggctgagaagcactggtgccatcagcatcattctggtgccccatgaaaccagatgcgagcctgaaagcaaagcctgtgagcactgtcccagcaagca

SEQ ID NO: 55877 - DNA, 600 bp, Chicken  19866894309937_2
agcttattggactcttgagacccaagtgcacactgcatggctgggatcaggctgtgtataaaggggcactgtccctcaggcatgagctcctcagccacacaggaagtatttagttttatatttgaaggctggctgaggttcactaatggctgttaatccactggctcctttgacttcatcctatgccaggccctgtccaacacctgaagccttggggtttctgcttgcttcacataaacattcaaaaatacataggarcaggagcctgtgctgcaggtggggtgtgcaggagcagaatgstttgaaggaggggctatgacagctatgtttttcttccttaaataatgaaaagttaaatgtcttttcagacaacgaaggggcaaaccattctgaaggaagagggkcccaacccaaaggggcttcagtgtataagcaggggatggtaggacaaaataagggtgggctgagaagcactggtgccatcagcatcattctggtgccccatgaaaccagatgcgagcctgaaagcaaagcctgtgagcactgtcccagcaagcaggagcatgcatccatgtaaattaagagactaattatgagcaa

SEQ ID NO: 55878 - DNA, 600 bp, Chicken  19866894309937_3
agtatttagttttatatttgaaggctggctgaggttcactaatggctgttaatccactggctcctttgacttcatcctatgccaggccctgtccaacacctgaagccttggggtttctgcttgcttcacataaacattcaaaaatacataggarcaggagcctgtgctgcaggtggggtgtgcaggagcagaatgstttgaaggaggggctatgacagctatgtttttcttccttaaataatgaaaagttaaatgtcttttcagacaacgaaggggcaaaccattctgaaggaagagggkcccaacccaaaggggcttcagtgtataagcaggggatggtaggacaaaataagggtgggctgagaagcactggtgccatcagcatcattctggtgccccatgaaaccagatgcgagcctgaaagcaaagcctgtgagcactgtcccagcaagcaggagcatgcatccatgtaaattaagagactaattatgagcaatgtctccaaaagatgttttaataattggatctccttttgacattctattagcacaccttcatcactgtatttccttcccacagagaaaaaaaaaaactataatt

SEQ ID NO: 55879 - DNA, 599 bp, Chicken  19866894309938_1
  misc_feature (1)..(5): n is any nucleotide
nnnnnttttcctctccattgctagtgatttgcacaggtgctgctgttggtgaagcttttatataaatattattattccaaacatatgcctgcaaaatatcattacgattactcttagagtaaaccctatttcctttctatgccacatttagcaacctatttacatttactcccagtgacaaaaattgtcctttaaatttgcatgttcaaacttcattgatacttaaatatgaattactaatacaaatcaagagtaataaactgaatttaagatgagatgccaggaaaaaaaaaaaaaaamaaaaacaaaaatgcaaccctaagaacagttgttttaaatgaccttattattgcatcaagaaaaccttgccattaattttcctttgagatacaagtttattttaggagttgtttttttcactcatttgtccctcaaagaaaactgagaatattttggtaaaacattgataagagtctcagtgttgctaacagatctccaaagataatgcatttctgagtaaaatgtccttgttttttcccttagcgactgaacagcacagttgtattccagagcttctctctgagatgcagcaatttatt

SEQ ID NO: 55880 - DNA, 600 bp, Chicken  19866894309941_1
gcagtggatagggaaaggacaagtgaaagaataactctgctgcgctgctgagctcagtcagtctgatgaggtgatttacagaaggggatggagctgttgaaggggaagcatgtataatatgtgtgatacctgaacttagcaggattgctggcagctatagttcttcactgctggaaaatacttaaatcctgagcaagttcacataagtctaacttactttttcctagtcttgattataatgcttctgccacagaacagctggttatatgtggtcttctagagaggcctcgagctggtctwactgggagtgtcttatgttgagactgagatgtatcagcagatccacatactaaagtcttattcttcttcacaagaaagattcaacatcatcatcagtgagaacaactccrttctatattgccaaagggccctcaagaactctgctctgagaatgaaaaataactgtgaatgtgcagattaggactctgtgcataaataatctgtcagacacaggttaaagctcagctgacagtaaggaagattgtttgagagattgaaacataactgagatctggtttctcctcaccctggactccttcc

SEQ ID NO: 55881 - DNA, 600 bp, Chicken  19866894309941_2
tgtataatatgtgtgatacctgaacttagcaggattgctggcagctatagttcttcactgctggaaaatacttaaatcctgagcaagttcacataagtctaacttactttttcctagtcttgattataatgcttctgccacagaacagctggttatatgtggtcttctagagaggcctcgagctggtctwactgggagtgtcttatgttgagactgagatgtatcagcagatccacatactaaagtcttattcttcttcacaagaaagattcaacatcatcatcagtgagaacaactccrttctatattgccaaagggccctcaagaactctgctctgagaatgaaaaataactgtgaatgtgcagattaggactctgtgcataaataatctgtcagacacaggttaaagctcagctgacagtaaggaagattgtttgagagattgaaacataactgagatctggtttctcctcaccctggactccttccagtcaatagcaggagatggattgtctgaattaccttctggaggtgccctcttgctagccattgattacaaagtgagtttaaggccatgatattccagtctttagggaacg

SEQ ID NO: 55882 - DNA, 600 bp, Chicken  19866894309948_1
tcaaactggaacttaatgatttggagatgatgcaaacacacaccagtccttacaatagtgttcacacgatagacaagaatgggaccatttcaatccaacttctactattcttagcatgaaaaagactaataagttttcttgccaatggtacactggtgagaagatgggggagctttacatattgtttctaaatgacttccatgtccttggtgtcttctcccatacactctgtcagtttcagagtgttcaagaatttagctagtttcttgtaggattgagccctacagaaaaagtatattkagttttccccttggggatgactttggttaaaaagaggcaggtagaaaaagtgttataaaccagctgttgttgcagattttcagggctgaaaacatttcaaaccataaacactgtaagaaaatggagttgcccttgtcccatttctcattcctgtcacagcctgaacaaataaatgtggtgccatcttccattcctgttacaattggcggtgctgggatgggaatggactcatcttgtgccattgtcagttctcatttctgtctttggatgctgagttatcgcagcactgcaacagcagcg

SEQ ID NO: 55883 - DNA, 600 bp, Chicken  19866894309948_2
agagatagtaataagaacagaaaagcgcattataaaatataactcattttatgactatcttgattttttttataaaaccagacaaagaataaaggatcaatttttagggtaaaaactaaccttaaagtacagataaaaattcctagcagtcattgccatatcaatgacagcagcatcatgagaaaacacataagtgacaggttatagtctgcaaacaaatgaagtcaggaagtataattctcatagactactgtataatgtcttctttaattccactttatatggtactccttggttcayaaagcacaatactgaagcaggktattcaggcaactactaaacttaaagcaaaacttttcgtgcatgctcaatttcatttgtcaaagtgaaattacaagcaaaatatgatttcttggtttttgacatggaaagcaaaaggaagattggaaacattagaaattcatgtacaaaccgtgtgataaaagctttagkcatgacatgtctcttcctgcccacaactcagctccatcagagatactcaggtttaataaatgatggcaaatgggacttaagtctggtgccaatcattttcttgttttt

SEQ ID NO: 55884 - DNA, 600 bp, Chicken  19866894309948_3
aagcgcattataaaatataactcattttatgactatcttgattttttttataaaaccagacaaagaataaaggatcaatttttagggtaaaaactaaccttaaagtacagataaaaattcctagcagtcattgccatatcaatgacagcagcatcatgagaaaacacataagtgacaggttatagtctgcaaacaaatgaagtcaggaagtataattctcatagactactgtataatgtcttctttaattccactttatatggtactccttggttcayaaagcacaatactgaagcaggktattcaggcaactactaaacttaaagcaaaacttttcgtgcatgctcaatttcatttgtcaaagtgaaattacaagcaaaatatgatttcttggtttttgacatggaaagcaaaaggaagattggaaacattagaaattcatgtacaaaccgtgtgataaaagctttagkcatgacatgtctcttcctgcccacaactcagctccatcagagatactcaggtttaataaatgatggcaaatgggacttaagtctggtgccaatcattttcttgtttttgaaacaggagttcaggttgtgt

SEQ ID NO: 55885 - DNA, 600 bp, Chicken  19866894309948_4
agtgacaggttatagtctgcaaacaaatgaagtcaggaagtataattctcatagactactgtataatgtcttctttaattccactttatatggtactccttggttcayaaagcacaatactgaagcaggktattcaggcaactactaaacttaaagcaaaacttttcgtgcatgctcaatttcatttgtcaaagtgaaattacaagcaaaatatgatttcttggtttttgacatggaaagcaaaaggaagattggaaacattagaaattcatgtacaaaccgtgtgataaaagctttagkcatgacatgtctcttcctgcccacaactcagctccatcagagatactcaggtttaataaatgatggcaaatgggacttaagtctggtgccaatcattttcttgtttttgaaacaggagttcaggttgtgtatttggcttatttgtctctgaaacacaacagagctagtccccagtctgtacccttgcaaggtttctctcaaggcccagatggaaggaaagcagcattgcaaaaggaatgcagaagtagtatttttgccatgcttttgctactttattacctcccacttccaggcaacata

SEQ ID NO: 55886 - DNA, 599 bp, Chicken  19866894309964_1
  misc_feature (1)..(25): n is any nucleotide
nnnnnnnnnnnnnnnnnnnnnnnnnggttcagctctgtcagaaaagctgtgtctcagaatttctcaatactgaagatgtgcagaataaattacaaagggcaggtttatccactaatattcatatttcaaaagtaatactgccgcttaaaaacgcttgcagcatgcacgagtgtacatgtatgcacatacacacatacagactttcagaagtggttccaaaaaggcagaaacactgtccaacaactttccataaaaacagtgatgattcttatgcgtttatattgcataaagaaaccatcrcattctgtagcctgatctatagctgccataaggttctatgtgccgatgccttccctggagactcatgaaattttcatatctcaattttgttcagaaatgttttaatttctactgcatttttaggattatggactgcctcaacaccacggaagaattcatccccaagatccattgcagtgcactttttaatacagagtctgctatgttaacactgttccttacacagctgaaactgagctgtctataaccacactcaggtaacacaggcctcttcaatcaacatcccttcrcttcacata

SEQ ID NO: 55887 - DNA, 535 bp, Chicken  19866894309964_2
gaaaccatcrcattctgtagcctgatctatagctgccataaggttctatgtgccgatgccttccctggagactcatgaaattttcatatctcaattttgttcagaaatgttttaatttctactgcatttttaggattatggactgcctcaacaccacggaagaattcatccccaagatccattgcagtgcactttttaatacagagtctgctatgttaacactgttccttacacagctgaaactgagctgtctataaccacactcaggtaacacaggcctcttcaatcaacatcccttcrcttcacataaaagctaccagtcggggcgggggctgatggttaccagcccagcagggtattaagtatacctggacaggagttgtgtcatcagctgtgttgctgatgtactgatgcagttctgctcttctggcaaaacagagagcagagtattcatttctggtgagtattgacatgctccagagcagtaaagtacttacatacagggtttaagtcacaatggtaattgctgaactgg

SEQ ID NO: 55888 - DNA, 600 bp, Chicken  19866894309965_1
gcctttccctcatccagcaggcagattacttgattatagaaggagatcaggacctgtctttcatgaacccatgctggctgggcctgatcctctgattgtcccacacatgttgtgtgatctccctcaaggtgttctgctccataatcttccctggcaccggggtcagactgacaagcctgtagttccctggatcctctttatgaccctttttgtagatgggagtcacgctggcaagccttcagttctctgagacctctccagttgaccaggaatgctgacagatggtgaaaagcagcttgrcaattatctctgtcagctctcttagcagccttgggtggatcctgaggatgcagcctggtgtgctattggccttccaggctgtagaagcacactgctggcacatgtccagctttttgtctatcatggcctccaagcccttctctgtaagtctgcgctcagtgagttctcacagtattaggcatatctgacacatgttgatcataagccagccaaggacaggaggaaactcctttgccataattctggtttctcaggctcttgcattagttttctctcagtgttgcttcactgaatgacact

SEQ ID NO: 55889 - DNA, 600 bp, Chicken  19866894309973_1
atagtgacaagtaggttcatgtaacatacgaaagtatgtattcccataaggagactcttctgtgagactgcatgaaagagtaagaaattacagatgtaataatatcccaataaagattccagatttacaaggatttatctatttgtggaccaaattctatatcaaacataaggcattttacaaaatggaaaaaggtaggcaagaaattcattcctcacttaaagaaagtaactacttcatgaaaactatctctgctcaccagcaaccgtgcagttaaagtagctgatactgagtactagwkaacttctgagaaaacatctgtgtagatttatctcctggtcaagtctaaggtacacaaatttcsaattattttaaactttccatttgctagagaaggcgtgtctaattcacaatatatcatgtatatagtatatatttagatacatagtctaaatgtagatacacagtctaaatatatagttagcactgtaaataatgcctcctatttatttgcatggaaactacaacaggtaaaacagcacaaaaatactagttgacagcaaattctcagctacacaacactatatcccagcacagtca

SEQ ID NO: 55890 - DNA, 600 bp, Chicken  19866894309973_2
tagtgacaagtaggttcatgtaacatacgaaagtatgtattcccataaggagactcttctgtgagactgcatgaaagagtaagaaattacagatgtaataatatcccaataaagattccagatttacaaggatttatctatttgtggaccaaattctatatcaaacataaggcattttacaaaatggaaaaaggtaggcaagaaattcattcctcacttaaagaaagtaactacttcatgaaaactatctctgctcaccagcaaccgtgcagttaaagtagctgatactgagtactagwkaacttctgagaaaacatctgtgtagatttatctcctggtcaagtctaaggtacacaaatttcsaattattttaaactttccatttgctagagaaggcgtgtctaattcacaatatatcatgtatatagtatatatttagatacatagtctaaatgtagatacacagtctaaatatatagttagcactgtaaataatgcctcctatttatttgcatggaaactacaacaggtaaaacagcacaaaaatactagttgacagcaaattctcagctacacaacactatatcccagcacagtcac

SEQ ID NO: 55891 - DNA, 600 bp, Chicken  19866894309973_3
agactgcatgaaagagtaagaaattacagatgtaataatatcccaataaagattccagatttacaaggatttatctatttgtggaccaaattctatatcaaacataaggcattttacaaaatggaaaaaggtaggcaagaaattcattcctcacttaaagaaagtaactacttcatgaaaactatctctgctcaccagcaaccgtgcagttaaagtagctgatactgagtactagwkaacttctgagaaaacatctgtgtagatttatctcctggtcaagtctaaggtacacaaatttcsaattattttaaactttccatttgctagagaaggcgtgtctaattcacaatatatcatgtatatagtatatatttagatacatagtctaaatgtagatacacagtctaaatatatagttagcactgtaaataatgcctcctatttatttgcatggaaactacaacaggtaaaacagcacaaaaatactagttgacagcaaattctcagctacacaacactatatcccagcacagtcaccaccattagctatgcatttttgacagtgatgagcaagatcccgcatgccactctaggaaaaat

SEQ ID NO: 55892 - DNA, 600 bp, Chicken  19866894309974_1
ctaccctatgtttattccattaatttccatcagaaattatctaatagagactgccaatgaaaggaagttggttcactgattccaaaatgttgaacaggaaatcccaagctgtggaaagtcaaggttgctggggcagaggtctggagctctgtgatgaaagctgctggcttgaccagtttgggcaccagagtttattcccagcggactggaagccctttggtcccagcctcaactcctgctctttgcacctggcaccccagggctgagcctggaagtgttgggctcagtcaaaactccccstgggactgcaagtgaacattcctgacagattgtagcttcatgcggggaagcacggaaagtacaagttaaacaaaaggctttccttggaatatctgctgtgacccaacagagccaatattatttgttagtgcaactgatggttttctcagtttttgtagttgctaaaataacagctacaggagccaaaggacagtcgtttctttaggatacgctttatgccattgttcctaaagcaatttttttgaatgtcttgctcaagataaattaaaaataatgataatgaatttgaatttgaactga

SEQ ID NO: 55893 - DNA, 600 bp, Chicken  19866894309977_1
cgagcgatggcttatgtacccagtaacaaagacagctgatcaaataaggaaaacagctatcagcaagtagtttgctgggttagtaactgtgcttcaagatggacagcctgtaccccacgcaggggttgttttcgcctagatggtgcacatgtggtgtatgtacgtacctggaaaggatatcctgggtacttggtcaaggctggtctgttatgatttaaatttctttatcagccagtgttgtttaatagcagcagtgagtagcaaggcattgagtcagccaggctgcggggcttaagctgygctctcctccccatgygttgggactcygtgcctgagctgcagtttgctcatcagtcatcccatgggctatagaccacatggcatggaggagcacaggcagaagaagcacaggacgtggcacccagcgttccagcgtgctgtgcctgatgtggcctgctccccagatgcagcctgatgccttggctccttcctttgccacgtgacccagtaggccagatggggcccctttcccttgtcccaacataacctcctgtctgacacgtgagatgttatttttcatctgagtttttgcagacagag

SEQ ID NO: 55894 - DNA, 600 bp, Chicken  19866894309977_2
tacccagtaacaaagacagctgatcaaataaggaaaacagctatcagcaagtagtttgctgggttagtaactgtgcttcaagatggacagcctgtaccccacgcaggggttgttttcgcctagatggtgcacatgtggtgtatgtacgtacctggaaaggatatcctgggtacttggtcaaggctggtctgttatgatttaaatttctttatcagccagtgttgtttaatagcagcagtgagtagcaaggcattgagtcagccaggctgcggggcttaagctgygctctcctccccatgygttgggactcygtgcctgagctgcagtttgctcatcagtcatcccatgggctatagaccacatggcatggaggagcacaggcagaagaagcacaggacgtggcacccagcgttccagcgtgctgtgcctgatgtggcctgctccccagatgcagcctgatgccttggctccttcctttgccacgtgacccagtaggccagatggggcccctttcccttgtcccaacataacctcctgtctgacacgtgagatgttatttttcatctgagtttttgcagacagagctcgaaatgttgatat

SEQ ID NO: 55895 - DNA, 600 bp, Chicken  19866894309977_3
aaagacagctgatcaaataaggaaaacagctatcagcaagtagtttgctgggttagtaactgtgcttcaagatggacagcctgtaccccacgcaggggttgttttcgcctagatggtgcacatgtggtgtatgtacgtacctggaaaggatatcctgggtacttggtcaaggctggtctgttatgatttaaatttctttatcagccagtgttgtttaatagcagcagtgagtagcaaggcattgagtcagccaggctgcggggcttaagctgygctctcctccccatgygttgggactcygtgcctgagctgcagtttgctcatcagtcatcccatgggctatagaccacatggcatggaggagcacaggcagaagaagcacaggacgtggcacccagcgttccagcgtgctgtgcctgatgtggcctgctccccagatgcagcctgatgccttggctccttcctttgccacgtgacccagtaggccagatggggcccctttcccttgtcccaacataacctcctgtctgacacgtgagatgttatttttcatctgagtttttgcagacagagctcgaaatgttgatattctaatcttgg

SEQ ID NO: 55896 - DNA, 600 bp, Chicken  19866894309982_1
gctgcttttttaacaaggccatttgttgcaccatggtccattataaaccaagcacataactactgtggtcatatatatgcagctgaaaagagtaggatataaatgatatctagtttaaccaccagtagaaatacaggctaattactgttccttttaatacaacttaaatttcccctctatccagttttggaaccaatcctactattttaatgcctcaatcacctttcataccttcacagaagaataacaattaatacatggcttatcccttgtgtagtgcttgtcagtccatttctactrttaggtacctctactcctaccttttaaaaccttcattctgttctgtgatactgcccaagagaggtaacaggatgttagccagtaaaattcatcctagccacccctaacacatctaccaagtacgagacctgtgccatcttttactgtgttcttccctgaaaataaaaacacaaacaacaaccttaaacrtttgatcagtaaaacyaccaatacatactaaaaaaacacaaagaaaaacatgactcatcctgccttaacccagtacgagttcttgtacctcagtttccactggctgcccca

SEQ ID NO: 55897 - DNA, 600 bp, Chicken  19866894309982_2
gaaccaatcctactattttaatgcctcaatcacctttcataccttcacagaagaataacaattaatacatggcttatcccttgtgtagtgcttgtcagtccatttctactrttaggtacctctactcctaccttttaaaaccttcattctgttctgtgatactgcccaagagaggtaacaggatgttagccagtaaaattcatcctagccacccctaacacatctaccaagtacgagacctgtgccatcttttactgtgttcttccctgaaaataaaaacacaaacaacaaccttaaacrtttgatcagtaaaacyaccaatacatactaaaaaaacacaaagaaaaacatgactcatcctgccttaacccagtacgagttcttgtacctcagtttccactggctgccccaggcaattcccctcttaggactcagagcccttcttcagggccaacagcaaaacatgtctgaacctggatcagacctgcagtggggtcagcgggtggtgttacatctcaccatcacagcagtgggttctgactggttttgtctggaaagggcttttacagtatgggcagtagggttattatttagctgagt

SEQ ID NO: 55898 - DNA, 600 bp, Chicken  19866894309982_3
tttaatgcctcaatcacctttcataccttcacagaagaataacaattaatacatggcttatcccttgtgtagtgcttgtcagtccatttctactrttaggtacctctactcctaccttttaaaaccttcattctgttctgtgatactgcccaagagaggtaacaggatgttagccagtaaaattcatcctagccacccctaacacatctaccaagtacgagacctgtgccatcttttactgtgttcttccctgaaaataaaaacacaaacaacaaccttaaacrtttgatcagtaaaacyaccaatacatactaaaaaaacacaaagaaaaacatgactcatcctgccttaacccagtacgagttcttgtacctcagtttccactggctgccccaggcaattcccctcttaggactcagagcccttcttcagggccaacagcaaaacatgtctgaacctggatcagacctgcagtggggtcagcgggtggtgttacatctcaccatcacagcagtgggttctgactggttttgtctggaaagggcttttacagtatgggcagtagggttattatttagctgagtggtattgtagagtcat

SEQ ID NO: 55899 - DNA, 599 bp, Chicken  19866894309987_1
  misc_feature (1)..(28): n is any nucleotide
nnnnnnnnnnnnnnnnnnnnnnnnnnnnaaattgataacacggagtgcatttaaaagcattgtatctttaagatgtaattactcctattgtgtgttacacgttacttattctgatctagtgctaagcttcccagtactcaagagatgcagacttagtggagcgtatccagcaaagccccagtatgattaaaggactatagtaccgcttgcaagagtagagagtgggagagcttggtttgttgtgcctgcaatagaaaagattctgaggtcatcgtcatcatttataactatctgatggawgggaataaagagaacaaagctagataaactcttctcagcgatgcccagtgtcaggactggaggaaaatgaaacacaggagcttctctctctgaatattgggaagtttttgttggttttttgttttttttttttttttcttttttacagtgaagttgaacacaagaggctgctcagagaggtcatggagtcgccatcctcttagatattcaaaatctgattggagctagccctggccaccttgttctagatgaccatgctcagaaagactgaactaattcccagaagtgctgctggaacc

SEQ ID NO: 55900 - DNA, 600 bp, Chicken  19866894309990_1
aactactcagccactctattttcctgccttccttctatatttcttacttataggcacagaatactcttgtactctaagaaaagtctccttaaagagtcgccagctctgctccattcttttatccctgacttgttcctttgtccctaaggaaagcttcccagaggatctctcccactaatttcttaaacagtcagaagtttgctcttctgaagttcaagatcttgactttgctctttgccagtccataatccttgagatcatgaactcaaccagagcatgactgctacaacgcagactgcytccagttttaagctctttaatggtctctgcattggtgagcaccaggtccagtaacacttctggatggtttgtctaatacttggaccaggaagttatcctcagtgcactccaggagtctgctggattgcttacaacccactgtatttctttcccagcagacaaatagatggttgaaaactttcatcagggtgagagcctgagggtgtgatgcctcttgtagctgaagcaagaaggyctcatcaacaatctccccttgatcaggcagcctgtagtagacaccaaccaccagatgtcctttat

SEQ ID NO: 55901 - DNA, 600 bp, Chicken  19866894309990_2
tgccagtccataatccttgagatcatgaactcaaccagagcatgactgctacaacgcagactgcytccagttttaagctctttaatggtctctgcattggtgagcaccaggtccagtaacacttctggatggtttgtctaatacttggaccaggaagttatcctcagtgcactccaggagtctgctggattgcttacaacccactgtatttctttcccagcagacaaatagatggttgaaaactttcatcagggtgagagcctgagggtgtgatgcctcttgtagctgaagcaagaaggyctcatcaacaatctccccttgatcaggcagcctgtagtagacaccaaccaccagatgtcctttattagtccaatctctaattttaactcacaagcttttagcctgatcatgactgtttctcatggacagctctttgcaacctatctatttcttaacaaagagaacaacatttctgccccttcttccctgcctgtttcttctaaaaagcttgtagcccttggtacaagtgttccagttgtgtgactcatcccatcatgtttccttgatagtgattacgtgacacatttcttattacaccat

SEQ ID NO: 55902 - DNA, 511 bp, Chicken  19866894309991_1
cgattggaataaacaagaaacgttactctcaggcctcttgccaacagtggccaactctctcacttagcccctctttttttccttttctcttctgtggtgtggaggagtgtgtgctccgctacagcctttgccccagctgggtgacccctcttggtgtgtttggtgcttgggactgtggaggaaaccctgatgtggtttggaaataggttgtgtgccctccctgctttggaaccaaactcaaataagccttcgctcaaagataaaccatcacaggtttgccatttaatgttgcttcttctrttcttggatattgaaaggaatgagtttagaggactctaatgggaaaggagtgtgtaccatctgtttcaatccaaagatgaaataaagctccaaggagaaatgatggttatcacaccaatctactgctgcaaaagttgtgctgatgaaatgaacaaaaatcaatgttgggtatttttcaaaagatatgaagatattgttagttacagataga

SEQ ID NO: 55903 - DNA, 600 bp, Chicken  19866894309997_1
atgggttttgcagctttgtctctgaatgactgataacagcagtcctggatgttctgcagctcatatagcaccgtgttcatgttactccattcctgctctgaaataactctgtggttgtgatgcagcttggatgtaaacgttacataggaactgcatgtgagccacatgaggcttaggatctgcaagctgaccagtattgtgtagaagcagattacacttaaattgtccaatttctattggtgtaaatgcatcaatattttgaaaatcaaaccagcaaaggcccaaccaagtgtctccatrcygtctgtaaatagctgcatgggcaaaaggagttgcaattctacttctggagtcctggatattgaaatctagagtattatgcaacttggcaacttcctttttttaatcttgttagacaagtatgttttgtgctttgygttccttgtaaaatttctaggtgagttttacaaagaaaactccatggtgttttcaaatgaaaacaaggaatattcagaaaccttttcaaagtgatttttaagtaggctggagtaggaagatcagcttggtcttgtagccaggtgaaaaattggccatcatatc

SEQ ID NO: 55904 - DNA, 600 bp, Chicken  19866894309997_2
gggttttgcagctttgtctctgaatgactgataacagcagtcctggatgttctgcagctcatatagcaccgtgttcatgttactccattcctgctctgaaataactctgtggttgtgatgcagcttggatgtaaacgttacataggaactgcatgtgagccacatgaggcttaggatctgcaagctgaccagtattgtgtagaagcagattacacttaaattgtccaatttctattggtgtaaatgcatcaatattttgaaaatcaaaccagcaaaggcccaaccaagtgtctccatrcygtctgtaaatagctgcatgggcaaaaggagttgcaattctacttctggagtcctggatattgaaatctagagtattatgcaacttggcaacttcctttttttaatcttgttagacaagtatgttttgtgctttgygttccttgtaaaatttctaggtgagttttacaaagaaaactccatggtgttttcaaatgaaaacaaggaatattcagaaaccttttcaaagtgatttttaagtaggctggagtaggaagatcagcttggtcttgtagccaggtgaaaaattggccatcatatctt

SEQ ID NO: 55905 - DNA, 600 bp, Chicken  19866894309997_3
cgttacataggaactgcatgtgagccacatgaggcttaggatctgcaagctgaccagtattgtgtagaagcagattacacttaaattgtccaatttctattggtgtaaatgcatcaatattttgaaaatcaaaccagcaaaggcccaaccaagtgtctccatrcygtctgtaaatagctgcatgggcaaaaggagttgcaattctacttctggagtcctggatattgaaatctagagtattatgcaacttggcaacttcctttttttaatcttgttagacaagtatgttttgtgctttgygttccttgtaaaatttctaggtgagttttacaaagaaaactccatggtgttttcaaatgaaaacaaggaatattcagaaaccttttcaaagtgatttttaagtaggctggagtaggaagatcagcttggtcttgtagccaggtgaaaaattggccatcatatctttttttagctttttaaattcccttttcctaaagcaggatctcctgattcttattctcctgaaaggttactgtactctgctaatataacacaaaattcttttacttaaggtagaggacagcattaaagtgtatacag

SEQ ID NO: 55906 - DNA, 600 bp, Chicken  19866894310002_1
gtctgctgagaaaaataaaatccatatatgaaatctaatagcacaggtagatctggggggattaacaatatgaaggagaacattgtcaagcatataatgatattttgtggtatgtttgctacagctaatgcttataattgcattttgcagtttaattctagtagccaaaggctcaatgcacaaggcaaataaaagacaggataattggcgtgcccaagtgcctctcttcaacataaatcaggcaggcagcaaacatgaattgggcatggagatcactctgttgcagtgtaattctctcargattttgccaaaattaatttcacacagcaggatggaaaaacaggctcgggaagtgcatcccgaatgtcaagagggactgaagccacrgtatccccttccacatcggcatctcacaccagtgtgagaaagctcatagcaggcaggtgaaggaggaatagggatcgggcagagccatcttgctgggtgtacttttctcttcccarcgtttgtcagaaattgctggggaatttgcattaagacagctcctgccttgattagagctgttttctgaggccagcagccctgcacctcctgcagaag

SEQ ID NO: 55907 - DNA, 600 bp, Chicken  19866894310002_2
aagcatataatgatattttgtggtatgtttgctacagctaatgcttataattgcattttgcagtttaattctagtagccaaaggctcaatgcacaaggcaaataaaagacaggataattggcgtgcccaagtgcctctcttcaacataaatcaggcaggcagcaaacatgaattgggcatggagatcactctgttgcagtgtaattctctcargattttgccaaaattaatttcacacagcaggatggaaaaacaggctcgggaagtgcatcccgaatgtcaagagggactgaagccacrgtatccccttccacatcggcatctcacaccagtgtgagaaagctcatagcaggcaggtgaaggaggaatagggatcgggcagagccatcttgctgggtgtacttttctcttcccarcgtttgtcagaaattgctggggaatttgcattaagacagctcctgccttgattagagctgttttctgaggccagcagccctgcacctcctgcagaagggaaccatcgcacaatttccactggtgctgcacagcactgtgtgcacacaggaactgcaaggtaacgatttggagtgttaaatcyct

SEQ ID NO: 55908 - DNA, 600 bp, Chicken  19866894310002_3
attggcgtgcccaagtgcctctcttcaacataaatcaggcaggcagcaaacatgaattgggcatggagatcactctgttgcagtgtaattctctcargattttgccaaaattaatttcacacagcaggatggaaaaacaggctcgggaagtgcatcccgaatgtcaagagggactgaagccacrgtatccccttccacatcggcatctcacaccagtgtgagaaagctcatagcaggcaggtgaaggaggaatagggatcgggcagagccatcttgctgggtgtacttttctcttcccarcgtttgtcagaaattgctggggaatttgcattaagacagctcctgccttgattagagctgttttctgaggccagcagccctgcacctcctgcagaagggaaccatcgcacaatttccactggtgctgcacagcactgtgtgcacacaggaactgcaaggtaacgatttggagtgttaaatcyctatggttaagattgtctccatgggtttaaacatacatatgcgttgccacggttttgttcctaaatccatgcaagatgcaaggtgaaataaacaaaaagatacatatttttccttgag

SEQ ID NO: 55909 - DNA, 600 bp, Chicken  19866894310002_4
crgtatccccttccacatcggcatctcacaccagtgtgagaaagctcatagcaggcaggtgaaggaggaatagggatcgggcagagccatcttgctgggtgtacttttctcttcccarcgtttgtcagaaattgctggggaatttgcattaagacagctcctgccttgattagagctgttttctgaggccagcagccctgcacctcctgcagaagggaaccatcgcacaatttccactggtgctgcacagcactgtgtgcacacaggaactgcaaggtaacgatttggagtgttaaatcyctatggttaagattgtctccatgggtttaaacatacatatgcgttgccacggttttgttcctaaatccatgcaagatgcaaggtgaaataaacaaaaagatacatatttttccttgagcccgggtggtttttttcccctcctactagatctgcacttataaccagagtaaatagctttgaaactgctgatgttcatggagacagagcaatctgctcatctgcctgagtcctgtgtatgaaggcaaagtaaccaggtatttatcaacgctgcaaagcttccagggcttctttgggaaagcc

SEQ ID NO: 55910 - DNA, 600 bp, Chicken  19866894310002_5
tgtgtcagcacacaggtgtgctctgcagtgacagcgctcctccaacagctctctccctccaccagctcccaaagggagtgatgtttctcaccagcccgaaggcagtccctttagctgggtgtgtctctgagcacaaagcacgcttctgcctcgcttctgtggctctgcaggggttgtctgtgaagtggggtctttgtgcatgtgcctgctgatgcctccagtgcacagacatctttgctcccccgtacatttaacttacagtcttcagattagcgttaccgtgagcactgctttacagtsaaaaygtggtgttgtaagggatgaaatccagctgttccatgtttatccagtgtcagggatttcacaacacttggtgtgcaagttatgactcggtttttacagctgccaggagcacagcccaagcagcaagctgtgttccctcygctcagagcactctcaacacggagcagtgttgcagggaagcgcattgccatggccgggaataaaatcttcagacataaatattttgcttttggaaaagtggatttcacaaacagataacrcataccttaaaaatgctcctcggggcacacaaatgtt

SEQ ID NO: 55911 - DNA, 600 bp, Chicken  19866894310002_6
cagcacacaggtgtgctctgcagtgacagcgctcctccaacagctctctccctccaccagctcccaaagggagtgatgtttctcaccagcccgaaggcagtccctttagctgggtgtgtctctgagcacaaagcacgcttctgcctcgcttctgtggctctgcaggggttgtctgtgaagtggggtctttgtgcatgtgcctgctgatgcctccagtgcacagacatctttgctcccccgtacatttaacttacagtcttcagattagcgttaccgtgagcactgctttacagtsaaaaygtggtgttgtaagggatgaaatccagctgttccatgtttatccagtgtcagggatttcacaacacttggtgtgcaagttatgactcggtttttacagctgccaggagcacagcccaagcagcaagctgtgttccctcygctcagagcactctcaacacggagcagtgttgcagggaagcgcattgccatggccgggaataaaatcttcagacataaatattttgcttttggaaaagtggatttcacaaacagataacrcataccttaaaaatgctcctcggggcacacaaatgttcattt

SEQ ID NO: 55912 - DNA, 600 bp, Chicken  19866894310002_7
ttctgcctcgcttctgtggctctgcaggggttgtctgtgaagtggggtctttgtgcatgtgcctgctgatgcctccagtgcacagacatctttgctcccccgtacatttaacttacagtcttcagattagcgttaccgtgagcactgctttacagtsaaaaygtggtgttgtaagggatgaaatccagctgttccatgtttatccagtgtcagggatttcacaacacttggtgtgcaagttatgactcggtttttacagctgccaggagcacagcccaagcagcaagctgtgttccctcygctcagagcactctcaacacggagcagtgttgcagggaagcgcattgccatggccgggaataaaatcttcagacataaatattttgcttttggaaaagtggatttcacaaacagataacrcataccttaaaaatgctcctcggggcacacaaatgttcatttcctggaaacattcagctgtgctgccggcccagagaagcacgatgctgaccaccagctgaccttgcactgatgctgtctgcttcaggataaagcacagatacttctgcagctacacagaaccggtgaccctgttggatg

SEQ ID NO: 55913 - DNA, 600 bp, Chicken  19866894310002_8
ttcagattagcgttaccgtgagcactgctttacagtsaaaaygtggtgttgtaagggatgaaatccagctgttccatgtttatccagtgtcagggatttcacaacacttggtgtgcaagttatgactcggtttttacagctgccaggagcacagcccaagcagcaagctgtgttccctcygctcagagcactctcaacacggagcagtgttgcagggaagcgcattgccatggccgggaataaaatcttcagacataaatattttgcttttggaaaagtggatttcacaaacagataacrcataccttaaaaatgctcctcggggcacacaaatgttcatttcctggaaacattcagctgtgctgccggcccagagaagcacgatgctgaccaccagctgaccttgcactgatgctgtctgcttcaggataaagcacagatacttctgcagctacacagaaccggtgaccctgttggatgaatacagtgtcttaagcagaacacaacctaaggcctttgtctcgagataatgctttcttgcattagacatttctgtccggaaaacacatctcaatccaggtcacctggaacttcaaccct

SEQ ID NO: 55914 - DNA, 600 bp, Chicken  19866894310002_9
accaaacaccgagctgcctttatctgaaatatattgtctgtgttaaggaacttcaataccagatgtcttacgtgcaagacagacagccggttcaactacagcagtactccaacagggatgaatatcatcatgggggggattgcaaagcacattaagggggaaatgggtgctgagatttcttcctcctggtggtcccctggaagacagagacacgctgtggtaggagggctgaatgttgtggctgaagtcagagaaaaaccaggcagagaggagcccagggagcactctggagcattgggrttgcaggtcagtccccacagcacatacctccatcaggtggacatagtttggtgtctgaagaaacaacagcgagatcaaatatccattagaatgatttcttctctttccatgcattccatcatgagcggtgacaggagctgtagggctcgagaatgtcaacccataggacatctcacacctgggctgcccttaaggagggaagggacgggcccagtaacacacacacttcagtggacgtagagcactgctaatctacatcaggacttacaccagggctcctatctaccccggtcctgctct

SEQ ID NO: 55915 - DNA, 600 bp, Chicken  19866894310016_1
ttataggcaaagcattaatatgggtaggaggactaatggtttttcaacataatttattgataaatgggttaactacatttagacatcttttcttcttaaattaagttggtcccttgtctggagtagcccaagttgtttacccacaatggcagtgcaattccctgtgtctaatggtctcattaccacctccttgcctggtaatatttaaggcatttctttcctatgtgtagcatccaaaaaaaaaaaaaaaagtctttctctattatgaacttaccctttctatccctttctttacagacrattgtatttaggtcaatggatagtgtttatttggtgtatatgtagtataaataaaattcacactatatttatccaagccactacagttcatgacctacactcacatacagacacttgctatatacagatactacaagatctgaattttcttcactggtttggttgcatcaactgtcagatgcacaaaaacctactgagaagagcagggcaagttacacgcaactcccacctcagctctaggtcccggcttacactgtctgggtctgaaagcagtctggggatgacaaagacaaggtctga

SEQ ID NO: 55916 - DNA, 600 bp, Chicken  19866894310019_1
caggtttctctgtgtggggatgcgtatgtgttcagtctgctgaacaaagcaagctatcttcctgtcaaaatgtaatgaagtactggtattttcactcgacaatgatcattatactttcttccgaccaataaaaatgctgaatattacttttctagtaactgtccaccgtacaggtagaatggtcactcagaaaaataaccaactcttatttttttcttttactgtattcagtgaaatgtggttgtttcgttttttacatctcagactagagagatgattgaaatagtgttatttattttygaatggaaaataagaagcctttaaaaaaatagaaaaatgtgttgaatggtgtttacaacttaaactttaagaaattgaacagtgtatttgttgaagtttttcatacagtgcacccttccatttattcataacttccatttattcacgaaacatttacaatttaaatagctgaagtgaaaaataacgtgcctggaatgaattgaacaggaataatttaaagccatttgagaatggaaaatgaaagttcccatcttaaataatgctagtgtctgggtggagtggagtggtgaggcagggaat

SEQ ID NO: 55917 - DNA, 600 bp, Chicken  19866894310027_1
tctaataatgcctatttttacatctactagatgccaaccatctgagctaatagaatataattggaagactagatttagtcattttctttattattaggtcttgatgtacttctgtcaactccaaaatactcattacatgtaattagggagaagattagagtgctgttaagatgcagaataatgatgcagctcaacaagggccggtggaaaaaacaacccacttaggaaaatgtctcaaaagtgctgaacagaagagggcatttaaaaaactggggaagatgagagctggtgctaaataayaaaaatgagactttgaagcgggagagagttgatatgcggaatcaaagcatttgatgtctatacctccctctaaaatgaatcccttgtgtttatttagatggttgaagtaacatcagtgagataattcccaaagaaccaccctctgtgtctttttcataaactccccaccctaaatggcataattaatttcacagttgtatagagaaataataaaaaaaaaatccatcctttgggaaataggtggtaatttctatctgatagaaattgtgattagacacagcatataaaactttctgataa

SEQ ID NO: 55918 - DNA, 600 bp, Chicken  19866894310027_2
acaacccacttaggaaaatgtctcaaaagtgctgaacagaagagggcatttaaaaaactggggaagatgagagctggtgctaaataayaaaaatgagactttgaagcgggagagagttgatatgcggaatcaaagcatttgatgtctatacctccctctaaaatgaatcccttgtgtttatttagatggttgaagtaacatcagtgagataattcccaaagaaccaccctctgtgtctttttcataaactccccaccctaaatggcataattaatttcacagttgtatagagaaataatyaaaaaaaaatccatcctttgggaaataggtggtaatttctatctgatagaaattgtgattagacacagcatataaaactttctgataatttattctccagaaattgccatattatacctaccagggggctggtgatatgaaacttaacaagctgatatttcactctgatttccttgagcgtggtccaatttattaaatcaaaattgtagattagctttaatatgaaataagatttttgtatttcagagtaatgtatgtcagaactcaaggaagagataatggcacagctaatagaaatta

SEQ ID NO: 55919 - DNA, 600 bp, Chicken  19866894310027_3
attaaatcaaaattgtagattagctttaatatgaaataagatttttgtatttcagagtaatgtatgtcagaactcaaggaagagataatggcacagctaatagaaattaagctgtaagtagagctgaaaggcagataaagaagcaagagaagatttctgaaatttctgaaagtttctgtgaaattgtggataaaagacaaggagacaccgagagaggctgcatctgcagcaccgcatcacgcagcgcgtcacagggtgctgccaacatgggcatccatttctagttccatcatcaactcyccatatgacggtagatggattatttcagaactgcatccccttttccatcagatacaccttgaatagcagaagagctgcttaaagccagatgcaggatccctgccacacggtccatcctattgcagcacagcggccccagatcaccacagatgatgctcccagcacactgctagcagagcctgcatatgtttttttgtttggttggtcacttggggctattttgggaggtctgtgtgtttgctcatccctcagcagcacgcagctgggcaggagaactggggacagaggggtccaggaatg

SEQ ID NO: 55920 - DNA, 600 bp, Chicken  19866894310037_1
aagcatcctgggctctcctgggtttcacagcaccccgaggctctgagagcccagttgaagtaggtgtctcccattggtatggggaaaaacgggagaaccctcaagagctcagtctcagctacatcaatccactcatccttcccacttcaaagcatctcagcctcaccagggaccatgctggatatcctgacagagcgcactggtgaagcaggccctgcggcagcgaaggaagttgcagtctctctctgtttcttaggtgggaatggcaattgcttgcttgcctcatctgaaagctcaccrtagttcctgctaagtgcagagcttgtgcatgcagtgcagggctaggggctgtggcgaatgcatcatcaccatttttggctattcataaatatgttctcccatcctcatcatctaccccaattagatagcagactttgccaggacagtctctgtgaacaggagagatccaaatctctccaggcagaaaccactttaaaagaggccctatgcaaccacgctacttgggactcaccaaaatatggtgccagaagaaagagcataactctcttgagatgatctgcatgtttgtttgttttctgt

SEQ ID NO: 55921 - DNA, 599 bp, Chicken  19866894310040_1
  misc_feature (1)..(110): n is any nucleotide
nnnnnnnnnnnnnnnnnnnnnnnnnnnnnnnnnnnnnnnnnnnnnnnnnnnnnnnnnnnnnnnnnnnnnnnnnnnnnnnnnnnnnnnnnnnnnnnnnnnnnnnnnnnnnnacgacggaggtgagatgtgaaggatcagtggggtctgtccctccatcctgctgggctgggctgtgtcttcaggcagctgctgctgctacgtggggtcctcctgctctgtcccctgaccctgcctggcccatctgccatggtttgtgatgtaaaaaccctccctcagggaaaatcctcatggagtagagtkgaaaagggagatccttggtgatctcatagctgctgaccatttgattgccctgctaggtgctgcaggaccagatgatgaccacgatggaggggatgacttgcctgtggaccctgagaacaacatggaagtgactccagctgccaatgagcacattgagccacagcgggtagggcaggcaggrttcagtagggccctggagcctggctgccctgctgctcactgcctgacrctcctcctgtgtctgccagagtgtgccccaggtgaaaggttacgtgctgcggcagcgagcccctgytgag

SEQ ID NO: 55922 - DNA, 600 bp, Chicken  19866894310040_2
ggcagctgctgctgctacgtggggtcctcctgctctgtcccctgaccctgcctggcccatctgccatggtttgtgatgtaaaaaccctccctcagggaaaatcctcatggagtagagtkgaaaagggagatccttggtgatctcatagctgctgaccatttgattgccctgctaggtgctgcaggaccagatgatgaccacgatggaggggatgacttgcctgtggaccctgagaacaacatggaagtgactccagctgccaatgagcacattgagccacagcgggtagggcaggcaggrttcagtagggccctggagcctggctgccctgctgctcactgcctgacrctcctcctgtgtctgccagagtgtgccccaggtgaaaggttacgtgctgcggcagcgagcccctgytgaggaccttcagccycacatcaaggtagggggggcacagagcaaaagcaaatcatagaatcacggrggtgggaaaagacctcaaagacagataagtccaactgtcaacccatcaccacgatgcactctaaaccatrtccccaagtgctgcatcttcatgtttcttcactgcctccaggggtgggg

SEQ ID NO: 55923 - DNA, 600 bp, Chicken  19866894310040_3
tgcctggcccatctgccatggtttgtgatgtaaaaaccctccctcagggaaaatcctcatggagtagagtkgaaaagggagatccttggtgatctcatagctgctgaccatttgattgccctgctaggtgctgcaggaccagatgatgaccacgatggaggggatgacttgcctgtggaccctgagaacaacatggaagtgactccagctgccaatgagcacattgagccacagcgggtagggcaggcaggrttcagtagggccctggagcctggctgccctgctgctcactgcctgacrctcctcctgtgtctgccagagtgtgccccaggtgaaaggttacgtgctgcggcagcgagcccctgytgaggaccttcagccycacatcaaggtagggggggcacagagcaaaagcaaatcatagaatcacggrggtgggaaaagacctcaaagacagataagtccaactgtcaacccatcaccacgatgcactctaaaccatrtccccaagtgctgcatcttcatgtttcttcactgcctccaggggtggggacttcaccactgccctgggcagtagcctgaccactcatttggaggatt

SEQ ID NO: 55924 - DNA, 600 bp, Chicken  19866894310040_4
gagtkgaaaagggagatccttggtgatctcatagctgctgaccatttgattgccctgctaggtgctgcaggaccagatgatgaccacgatggaggggatgacttgcctgtggaccctgagaacaacatggaagtgactccagctgccaatgagcacattgagccacagcgggtagggcaggcaggrttcagtagggccctggagcctggctgccctgctgctcactgcctgacrctcctcctgtgtctgccagagtgtgccccaggtgaaaggttacgtgctgcggcagcgagcccctgytgaggaccttcagccycacatcaaggtagggggggcacagagcaaaagcaaatcatagaatcacggrggtgggaaaagacctcaaagacagataagtccaactgtcaacccatcaccacgatgcactctaaaccatrtccccaagtgctgcatcttcatgtttcttcactgcctccaggggtggggacttcaccactgccctgggcagtagcctgaccactcatttggaggatttttttcctaatacacaccctgaccctctggtgcaacacaagaccttcacctcttgtcctttcaaag

SEQ ID NO: 55925 - DNA, 600 bp, Chicken  19866894310040_5
tccttggtgatctcatagctgctgaccatttgattgccctgctaggtgctgcaggaccagatgatgaccacgatggaggggatgacttgcctgtggaccctgagaacaacatggaagtgactccagctgccaatgagcacattgagccacagcgggtagggcaggcaggrttcagtagggccctggagcctggctgccctgctgctcactgcctgacrctcctcctgtgtctgccagagtgtgccccaggtgaaaggttacgtgctgcggcagcgagcccctgytgaggaccttcagccycacatcaaggtagggggggcacagagcaaaagcaaatcatagaatcacggrggtgggaaaagacctcaaagacagataagtccaactgtcaacccatcaccacgatgcactctaaaccatrtccccaagtgctgcatcttcatgtttcttcactgcctccaggggtggggacttcaccactgccctgggcagtagcctgaccactcatttggaggatttttttcctaatacacaccctgaccctctggtgcaacacaagaccttcacctcttgtcctttcaaagcctggacgctgtggga

SEQ ID NO: 55926 - DNA, 600 bp, Chicken  19866894310040_6
caggaccagatgatgaccacgatggaggggatgacttgcctgtggaccctgagaacaacatggaagtgactccagctgccaatgagcacattgagccacagcgggtagggcaggcaggrttcagtagggccctggagcctggctgccctgctgctcactgcctgacrctcctcctgtgtctgccagagtgtgccccaggtgaaaggttacgtgctgcggcagcgagcccctgytgaggaccttcagccycacatcaaggtagggggggcacagagcaaaagcaaatcatagaatcacggrggtgggaaaagacctcaaagacagataagtccaactgtcaacccatcaccacgatgcactctaaaccatrtccccaagtgctgcatcttcatgtttcttcactgcctccaggggtggggacttcaccactgccctgggcagtagcctgaccactcatttggaggatttttttcctaatacacaccctgaccctctggtgcaacacaagaccttcacctcttgtcctttcaaagcctggacgctgtgggaagcgctctgcactgcacttagtgctgcaccaatacccatggaagggtttgc

SEQ ID NO: 55927 - DNA, 582 bp, Chicken  19866894310040_7
tccagctgccaatgagcacattgagccacagcgggtagggcaggcaggrttcagtagggccctggagcctggctgccctgctgctcactgcctgacrctcctcctgtgtctgccagagtgtgccccaggtgaaaggttacgtgctgcggcagcgagcccctgytgaggaccttcagccycacatcaaggtagggggggcacagagcaaaagcaaatcatagaatcacggrggtgggaaaagacctcaaagacagataagtccaactgtcaacccatcaccacgatgcactctaaaccatrtccccaagtgctgcatcttcatgtttcttcactgcctccaggggtggggacttcaccactgccctgggcagtagcctgaccactcatttggaggatttttttcctaatacacaccctgaccctctggtgcaacacaagaccttcacctcttgtcctttcaaagcctggacgctgtgggaagcgctctgcactgcacttagtgctgcaccaatacccatggaagggtttgcagagctgcagtgtgccccacagtgctctgccagcgctcatacacactcgctt

SEQ ID NO: 55928 - DNA, 600 bp, Chicken  19866894310047_1
tccgaacacctggctgagaactggcaaccttcagaagtgtcaaactcaagagctcctgcagcaatcccggcagcctacctgtccacaacgagattgccgtcgttggtcctcaccgccgtccacatgtcccagtactctgcctgtgagggctgtgtgtatggcccaaagacagctccaagcctgaaaagatgcaaaataaaccacgtttcaaaccttggagcatcgaaaccattattcaaattcaggagcaaacctctgctgggacaccacctgggatttatctctttgccatatacccartatgtaaatccctgcactcatccttctccacatcccccacccatgaatgggtggaacccagcatcacagagcccaactcaccctctggagaagaagaagaagttcatcaacctcgtgatgatgggggacagcaagcccccatccttgagaacctaagacagaaggaaaaagtaggtggcaccactctgtagggcacagaagggtgattctggtgtgcttttcctgcaggcagcagctcaccttctgtatgaatctggggtagtacgtttcggggaaaattcctggaaggatcacagagaa

SEQ ID NO: 55929 - DNA, 600 bp, Chicken  19866894310060_1
tccgttaaggaacagcactaattcatggccaacaattgtatcacttttgatcatggatttactgcgattcccaaaagaacaataaattctaaagatctgaacaagacagcacatccaggcacgaatatagaatttcaaattttgactttcctgaaagcctgctcaaatggcagatcacagcctcaagtcagagcattttaaggataatcttagggacattctctcttttctattaaaaaaaaatactgaaggaaaagtccacattcaaggatgatgagagctaaaacactggaacaaaawataatgaatctgccttgtggtcaatgctgttcccaaatctataccttccatttaaccagaagaacatcccacgttctgggactagattgattcagcaggcacatgagaaaagaaatgtgaaataaagatttaagaggaaggagatgaacaatcattctttaccacttcactcaaaaatgttcggttttgccatctctctctccccacatcacacggtacccagaaagctcggttcggatgtcctaaatttcacgctaacgccccagtgctgagtatttcctattacgctggctctgactc

SEQ ID NO: 55930 - DNA, 599 bp, Chicken  19866894310064_1
  misc_feature (1)..(134): n is any nucleotide
nnnnnnnnnnnnnnnnnnnnnnnnnnnnnnnnnnnnnnnnnnnnnnnnnnnnnnnnnnnnnnnnnnnnnnnnnnnnnnnnnnnnnnnnnnnnnnnnnnnnnnnnnnnnnnnnnnnnnnnnnnnnnnnnnnnnnncacacgggggagtctcaaaaccaccatgaatgtcaggaggagctccactcaccttccaccatactgcaatgtgctaggatcgccacacaaacacatatttatatgttagcttaataaaatggctgttttataacctgcagtctcatgggcttgccatcaggtatgygtgctcgtgggggaagaatcccaaattagctggctggtatcgctaacacagcgcagggaggtattagcagcagcacattgttgtgagtgtgcagaatcaactcagagacacagtartatataaaatacatatgtacaaatacacacaaaccaagcatatttaaaaagccaatgcaataataaagcttcttccaatgcagaggaatgggaattgctttgtttattaccaccagtgcccctgtgaatcacagcccatagagctggagccacagctctaattcctcagcaaagtcccatact

SEQ ID NO: 55931 - DNA, 599 bp, Chicken  19866894310064_2
  misc_feature (1)..(18): n is any nucleotide
nnnnnnnnnnnnnnnnnncacacgggggagtctcaaaaccaccatgaatgtcaggaggagctccactcaccttccaccatactgcaatgtgctaggatcgccacacaaacacatatttatatgttagcttaataaaatggctgttttataacctgcagtctcatgggcttgccatcaggtatgygtgctcgtgggggaagaatcccaaattagctggctggtatcgctaacacagcgcagggaggtattagcagcagcacattgttgtgagtgtgcagaatcaactcagagacacagtartatataaaatacatatgtacaaatacacacaaaccaagcatatttaaaaagccaatgcaataataaagcttcttccaatgcagaggaatgggaattgctttgtttattaccaccagtgcccctgtgaatcacagcccatagagctggagccacagctctaattcctcagcaaagtcccatactgagacaggcaaaatgttatacaaggcaagaattccaacaaatgagaatatttgcttgactatatcaaagcaacattttaggatacagtcccagtgcttcctttcaaccaaagcctt

SEQ ID NO: 55932 - DNA, 599 bp, Chicken  19866894310073_1
  misc_feature (1)..(168): n is any nucleotide
nnnnnnnnnnnnnnnnnnnnnnnnnnnnnnnnnnnnnnnnnnnnnnnnnnnnnnnnnnnnnnnnnnnnnnnnnnnnnnnnnnnnnnnnnnnnnnnnnnnnnnnnnnnnnnnnnnnnnnnnnnnnnnnnnnnnnnnnnnnnnnnnnnnnnnnnnnnnnnnnnnnnnnnnttaatataatatgttaatggcattttaaagtgcatggattgctgaattcttactagttatttgctttatttttgctgatcaatactgtttacctaattatttcccctggaaaatatgcgaaaagtaaatttyctctaacttcaatgttgtgtattgtaactcttaagaatggtagcataatataagttcatttaatgtgagatttttttcagtctgcatgcaattaaggatgagatgtttcttagacaaacactgcaacaccggttactagcacttagatacacatctcctggtgaaacagtaagtagagacacagcaactggattgttttcttaattgttatgtttttattgaaagttgtgctgacctttctaatataacaagtcatagaagccagcctatagtgaaaagtcaaacaaatttgatagcaa

SEQ ID NO: 55933 - DNA, 600 bp, Chicken  19866894310083_1
gagaatttcctccatgcatcattgggagccctactggtgttctgcagccaggtctggcagcacagagaaagctgcctgcacacagcacagctcgtgcaaggcctgcctgtcccactgcccagccctactccctcctcctggccttagtcacagggggaagcagccacttacccaaccttgctgctagctcagtctctccacctctttgcatacctcctttggtgcacatccttggtgccagcccaaacagacgggagatgtaaatgggcacagctattcatgccaaaacgtaaacccccrgggagctgcagagcaggcaaggaagtcacatatgcaaaggtggctccacagggagcctgggcagcacccagcttcaacacatctcccccaggcctgggtctggtctggcaccgactggcagatcactgatcacagaagatgtatgacaacaaaatttcctgctgagaaatgtcacaactatattttatttgcaatctcaacagagcacagcataccctatgctgagtgcggtgtcgggctgcccgccaccagctgaccctacctctgtcctgctggagacgaattgtcaamagactcttt

SEQ ID NO: 55934 - DNA, 600 bp, Chicken  19866894310083_2
aaacccccrgggagctgcagagcaggcaaggaagtcacatatgcaaaggtggctccacagggagcctgggcagcacccagcttcaacacatctcccccaggcctgggtctggtctggcaccgactggcagatcactgatcacagaagatgtatgacaacaaaatttcctgctgagaaatgtcacaactatattttatttgcaatctcaacagagcacagcataccctatgctgagtgcggtgtcgggctgcccgccaccagctgaccctacctctgtcctgctggagacgaattgtcaamagactctttcagagggacaccctcagctgctgtgtgttctgtcacctgaacaaagctatctaaagaataaagcagtgcatgctgctgctgttctcccacgcagctttcccccagttccaatgccagagctctccccagcagttcatttgcctgtgcttttcagcctgcccaacacctgcactacttttgccatcagcatctctcggaagtggtcccccattaggaagtagaacacggggttaatggcactgttgaggaaggcgatgggccgggtgacgatgtaggcagtgttgatggcgc

SEQ ID NO: 55935 - DNA, 600 bp, Chicken  19866894310095_1
tggtctgacactagtgctcagacagggccacctacagccaattacccaggatgacatttagatggcttgatgttcctgacagtagtctttagttttggtattaattttgaattgaacatttctcagttaaaagctaaactaaatgaaaaacaaatttaaaatcatatgaactgttagtgaagcttgcatggttcatcaccaaaaccatgtgattttcttctgctgaataagtgtttgctatatgaacaagtaaatattaccatcctgtgtgaataggataattttataataaatttcacsgttagtttttgacatcactgaaacacaggacagccaataatccttcttcatcttttcatctctattcagctccttcagtcctctgtgtttaaaactgtcagtttccctttccacattgttacgtcccagaaaagaggtcacataatatctgaagagagtacttcctaggcaaaaaactaaaactgtcaagaaggtcttagttaaccacatgttagaacacacccaatgtgaaaaaaatctttgagtaatttattttctaaaaatggaggaatttcccattgattttatgtaaaattcagt

SEQ ID NO: 55936 - DNA, 599 bp, Chicken  19866894310098_1
  misc_feature (1)..(159): n is any nucleotide
nnnnnnnnnnnnnnnnnnnnnnnnnnnnnnnnnnnnnnnnnnnnnnnnnnnnnnnnnnnnnnnnnnnnnnnnnnnnnnnnnnnnnnnnnnnnnnnnnnnnnnnnnnnnnnnnnnnnnnnnnnnnnnnnnnnnnnnnnnnnnnnnnnnnnnnnnnnnnnngaattctgaaatttccagttaatacttgaaagtgttttgaagagtgcactgaccacgtttgccaggtttctttgtccctgaaggacaaatgtctcgcagaagcatggttcatgctttctctccccccataatggccacaawagctttccaggagatgtcatttcctgctttaaggtgaaaccaaaccaaaatacacaataacayscagaaagcctaggttttaaaatatgctttttgtttgtcctcaaaggggacagaattggagatcaagaacaacagtgtgattccttgcacgctgcagaaccacgcatgcagtgaacaggaggagggcacagcacttgcacagccagggcactcccagcacatgaacctctgagtgccaggagtgtccrggaagagagcagtctgcatgatgtaacccaacccacatgaatggaagt

SEQ ID NO: 55937 - DNA, 599 bp, Chicken  19866894310098_2
  misc_feature (1)..(96): n is any nucleotide
nnnnnnnnnnnnnnnnnnnnnnnnnnnnnnnnnnnnnnnnnnnnnnnnnnnnnnnnnnnnnnnnnnnnnnnnnnnnnnnnnnnnnnnnnnnnnnnngaattctgaaatttccagttaatacttgaaagtgttttgaagagtgcactgaccacgtttgccaggtttctttgtccctgaaggacaaatgtctcgcagaagcatggttcatgctttctctccccccataatggccacaawagctttccaggagatgtcatttcctgctttaaggtgaaaccaaaccaaaatacacaataacayscagaaagcctaggttttaaaatatgctttttgtttgtcctcaaaggggacagaattggagatcaagaacaacagtgtgattccttgcacgctgcagaaccacgcatgcagtgaacaggaggagggcacagcacttgcacagccagggcactcccagcacatgaacctctgagtgccaggagtgtccrggaagagagcagtctgcatgatgtaacccaacccacatgaatggaagtcggcaccttcagagccctaatcacaagatccggtcacagaccaaccatagtcattaactgaga

SEQ ID NO: 55938 - DNA, 599 bp, Chicken  19866894310098_3
  misc_feature (1)..(95): n is any nucleotide
nnnnnnnnnnnnnnnnnnnnnnnnnnnnnnnnnnnnnnnnnnnnnnnnnnnnnnnnnnnnnnnnnnnnnnnnnnnnnnnnnnnnnnnnnnnnnnngaattctgaaatttccagttaatacttgaaagtgttttgaagagtgcactgaccacgtttgccaggtttctttgtccctgaaggacaaatgtctcgcagaagcatggttcatgctttctctccccccataatggccacaawagctttccaggagatgtcatttcctgctttaaggtgaaaccaaaccaaaatacacaataacayscagaaagcctaggttttaaaatatgctttttgtttgtcctcaaaggggacagaattggagatcaagaacaacagtgtgattccttgcacgctgcagaaccacgcatgcagtgaacaggaggagggcacagcacttgcacagccagggcactcccagcacatgaacctctgagtgccaggagtgtccrggaagagagcagtctgcatgatgtaacccaacccacatgaatggaagtcggcaccttcagagccctaatcacaagatccggtcacagaccaaccatagtcattaactgagag

SEQ ID NO: 55939 - DNA, 592 bp, Chicken  19866894310098_4
ctcgcagaagcatggttcatgctttctctccccccataatggccacaawagctttccaggagatgtcatttcctgctttaaggtgaaaccaaaccaaaatacacaataacayscagaaagcctaggttttaaaatatgctttttgtttgtcctcaaaggggacagaattggagatcaagaacaacagtgtgattccttgcacgctgcagaaccacgcatgcagtgaacaggaggagggcacagcacttgcacagccagggcactcccagcacatgaacctctgagtgccaggagtgtccrggaagagagcagtctgcatgatgtaacccaacccacatgaatggaagtcggcaccttcagagccctaatcacaagatccggtcacagaccaaccatagtcattaactgagagagcactgatgacagcggccatcaggcactgcctcactgcaggtttgtaagtctgtgccatttctgagctatgttatcaaagttagcccattttcttctgtctctgtgctgcagctggttaattttttacactggaagaacttagaatggatggtgcctagaaaccagcttttaaaaacat

SEQ ID NO: 55940 - DNA, 599 bp, Chicken  19866894310104_1
  misc_feature (1)..(210): n is any nucleotide
nnnnnnnnnnnnnnnnnnnnnnnnnnnnnnnnnnnnnnnnnnnnnnnnnnnnnnnnnnnnnnnnnnnnnnnnnnnnnnnnnnnnnnnnnnnnnnnnnnnnnnnnnnnnnnnnnnnnnnnnnnnnnnnnnnnnnnnnnnnnnnnnnnnnnnnnnnnnnnnnnnnnnnnnnnnnnnnnnnnnnnnnnnnnnnnnnnnnnnnnnnnnnnnnnncaagcagagaacctgaattcatttaggtccacgtggtgtggacaaggctgcggggtacaaatctagccacaccacctgaaagatgctgtrtgtaatttatcctacttgttaaaaaggaaaacaataagttactagaggtgaaatagggccttaagaagcaagagataaagatgttgatacaaggttcagcacaggaaggctgcaatttaagatccagttccctaaacgtgaggacgatgcaatgataacagtaacagaaraagkggaaggagctgtggatgaagaagggccaaagaaaaaataaagagttttgtttgtaataaaatgtrgcaattacttgatgaagcctgaagttctgccaggaaaacacagaaaaatcacacaaatca

SEQ ID NO: 55941 - DNA, 599 bp, Chicken  19866894310104_2
  misc_feature (1)..(40): n is any nucleotide
nnnnnnnnnnnnnnnnnnnnnnnnnnnnnnnnnnnnnnnncaagcagagaacctgaattcatttaggtccacgtggtgtggacaaggctgcggggtacaaatctagccacaccacctgaaagatgctgtrtgtaatttatcctacttgttaaaaaggaaaacaataagttactagaggtgaaatagggccttaagaagcaagagataaagatgttgatacaaggttcagcacaggaaggctgcaatttaagatccagttccctaaacgtgaggacgatgcaatgataacagtaacagaaraagkggaaggagctgtggatgaagaagggccaaagaaaaaataaagagttttgtttgtaataaaatgtrgcaattacttgatgaagcctgaagttctgccaggaaaacacagaaaaatcacacaaatcaatgggagcagctgatattctaataaatcactactaaagtacatggtgccccgtgatttgttccatgtcgagggaggaattctgaatgatgggtatttccatagccttgaggttcccaggagtcgaaagaacagacactgacataacacagtgatctgaggcaaacttaca

SEQ ID NO: 55942 - DNA, 599 bp, Chicken  19866894310104_3
  misc_feature (1)..(36): n is any nucleotide
nnnnnnnnnnnnnnnnnnnnnnnnnnnnnnnnnnnncaagcagagaacctgaattcatttaggtccacgtggtgtggacaaggctgcggggtacaaatctagccacaccacctgaaagatgctgtrtgtaatttatcctacttgttaaaaaggaaaacaataagttactagaggtgaaatagggccttaagaagcaagagataaagatgttgatacaaggttcagcacaggaaggctgcaatttaagatccagttccctaaacgtgaggacgatgcaatgataacagtaacagaaraagkggaaggagctgtggatgaagaagggccaaagaaaaaataaagagttttgtttgtaataaaatgtrgcaattacttgatgaagcctgaagttctgccaggaaaacacagaaaaatcacacaaatcaatgggagcagctgatattctaataaatcactactaaagtacatggtgccccgtgatttgttccatgtcgagggaggaattctgaatgatgggtatttccatagccttgaggttcccaggagtcgaaagaacagacactgacataacacagtgatctgaggcaaacttacagaac

SEQ ID NO: 55943 - DNA, 600 bp, Chicken  19866894310104_4
cacgtggtgtggacaaggctgcggggtacaaatctagccacaccacctgaaagatgctgtrtgtaatttatcctacttgttaaaaaggaaaacaataagttactagaggtgaaatagggccttaagaagcaagagataaagatgttgatacaaggttcagcacaggaaggctgcaatttaagatccagttccctaaacgtgaggacgatgcaatgataacagtaacagaaraagkggaaggagctgtggatgaagaagggccaaagaaaaaataaagagttttgtttgtaataaaatgtrgcaattacttgatgaagcctgaagttctgccaggaaaacacagaaaaatcacacaaatcaatgggagcagctgatattctaataaatcactactaaagtacatggtgccccgtgatttgttccatgtcgagggaggaattctgaatgatgggtatttccatagccttgaggttcccaggagtcgaaagaacagacactgacataacacagtgatctgaggcaaacttacagaacgttatcttcacaaaagccaccaccaggatgaaagaagcccaggaagtcccactcctggagtaaaac

SEQ ID NO: 55944 - DNA, 600 bp, Chicken  19866894310104_5
aggaattctgaatgatgggtatttccatagccttgaggttcccaggagtcgaaagaacagacactgacataacacagtgatctgaggcaaacttacagaacgttatcttcacaaaagccaccaccaggatgaaagaagcccaggaagtcccactcctggagtaaaacaaagaatggaaaacaagcacaaagcatttcattccccgttccttttcagtaggcatggtaagttctcaactaagcagttgttttttgctgcaaaggctgtatgaaggaagctcaaacaccaaaaaaaaacacsccatatttaggattttaatgtragasagcgcaaagatatagtttgttaataaggaaaactacagcggatatcaagctatgaaaaagcagtgaataaataccagctacagaacacagcagtgctgttattgctgtttcattaacgtcctcccgtcgtgcatttgttctgcaggagaaccaccatacaaaagggaaaaccaaagcaggaaaagccagcagagaacaaaagccactgagggcagcttggtttattatttgcataatttgttatctggggaagaacgagaagttctgttcgatg

SEQ ID NO: 55945 - DNA, 600 bp, Chicken  19866894310104_6
ttccatagccttgaggttcccaggagtcgaaagaacagacactgacataacacagtgatctgaggcaaacttacagaacgttatcttcacaaaagccaccaccaggatgaaagaagcccaggaagtcccactcctggagtaaaacaaagaatggaaaacaagcacaaagcatttcattccccgttccttttcagtaggcatggtaagttctcaactaagcagttgttttttgctgcaaaggctgtatgaaggaagctcaaacaccaaaaaaaaacacsccatatttaggattttaatgtragasagcgcaaagatatagtttgttaataaggaaaactacagcggatatcaagctatgaaaaagcagtgaataaataccagctacagaacacagcagtgctgttattgctgtttcattaacgtcctcccgtcgtgcatttgttctgcaggagaaccaccatacaaaagggaaaaccaaagcaggaaaagccagcagagaacaaaagccactgagggcagcttggtttattatttgcataatttgttatctggggaagaacgagaagttctgttcgatgtcaaatgaaaagggttgaggag

SEQ ID NO: 55946 - DNA, 600 bp, Chicken  19866894310104_7
atagccttgaggttcccaggagtcgaaagaacagacactgacataacacagtgatctgaggcaaacttacagaacgttatcttcacaaaagccaccaccaggatgaaagaagcccaggaagtcccactcctggagtaaaacaaagaatggaaaacaagcacaaagcatttcattccccgttccttttcagtaggcatggtaagttctcaactaagcagttgttttttgctgcaaaggctgtatgaaggaagctcaaacaccaaaaaaaaacacsccatatttaggattttaatgtragasagcgcaaagatatagtttgttaataaggaaaactacagcggatatcaagctatgaaaaagcagtgaataaataccagctacagaacacagcagtgctgttattgctgtttcattaacgtcctcccgtcgtgcatttgttctgcaggagaaccaccatacaaaagggaaaaccaaagcaggaaaagccagcagagaacaaaagccactgagggcagcttggtttattatttgcataatttgttatctggggaagaacgagaagttctgttcgatgtcaaatgaaaagggttgaggaggtca

SEQ ID NO: 55947 - DNA, 600 bp, Chicken  19866894310112_1
gctactgggtctcggagcaaagcaaaaacctctcatgcatcagcaaacagctccactcgctgctggagcaggtcaactctctgaagtctgagctggcagagtcaaagaaggagaaggatgagctgcggaaacaggtgaaggactttgctcggctgcttcaggcggagaaggagatccaagcacagcagaggaaggaggccgagcagagcctggaagtaaagaacaaagagcgtttggaggctgtagccaggctggagcaggacaagaatgacctgcggagaggtacagtgctgtcccctkcacscccttccagctctgggggtatttgcagaaggaggcagcctgaagtcaaattttggttccaccaccacaaacagggctttggccactagttttagtaggtcctgcatcagtggtgagcaaatgctccctgtagggtcactgcatagttttcagatgtcttacatggctgagacaagggcacaagctgtgccgtgggtttacccagccatagaaatctcctttttatccatgcattgacagcagctcctggagtagatgaaggctgctgcactggcatcactgcctttcctgatgccc

SEQ ID NO: 55948 - DNA, 600 bp, Chicken  19866894310112_2
ctgggtctcggagcaaagcaaaaacctctcatgcatcagcaaacagctccactcgctgctggagcaggtcaactctctgaagtctgagctggcagagtcaaagaaggagaaggatgagctgcggaaacaggtgaaggactttgctcggctgcttcaggcggagaaggagatccaagcacagcagaggaaggaggccgagcagagcctggaagtaaagaacaaagagcgtttggaggctgtagccaggctggagcaggacaagaatgacctgcggagaggtacagtgctgtcccctkcacscccttccagctctgggggtatttgcagaaggaggcagcctgaagtcaaattttggttccaccaccacaaacagggctttggccactagttttagtaggtcctgcatcagtggtgagcaaatgctccctgtagggtcactgcatagttttcagatgtcttacatggctgagacaagggcacaagctgtgccgtgggtttacccagccatagaaatctcctttttatccatgcattgacagcagctcctggagtagatgaaggctgctgcactggcatcactgcctttcctgatgccctcac

SEQ ID NO: 55949 - DNA, 600 bp, Chicken  19866894310114_1
ccatatttctcacagggaactctgactgtagagctcaaatgaaccctgaacaaagctttactttgacaagtctgaataattcagttggcttaggttttttcttctgatggaaaatatgatcttagggtcaaaatctttcatttagaagtgttccaatgcatgaaaggtttttatttttatttatttattttcctgccagaaagcctctatttttcagtcttttgcttatgactgaggaataaatgtttatctgaatttttgaggattttagcagctctggaataactctcacagaataasttattattattattattattattattttcaaataagtaactgtggctaatatctgtattgagtagtggagaaattttagaagccataagttatcagttattcctgaagttcatgagcagacaagatcctactgtagacaacctagaaaacatggaagttccttaatttttgtagaaaatcaaaattttcaatttgagtcaaataagcgtaaggatttttgcaggatccacatttcctggtatttactggtatttttaattttccttgcggattgagagacaaggtcttccaacccctcag

SEQ ID NO: 55950 - DNA, 600 bp, Chicken  19866894310114_2; identical to SEQ ID NO: 55949

SEQ ID NO: 55951 - DNA, 600 bp, Chicken  19866894310114_3; identical to SEQ ID NO: 55949

SEQ ID NO: 55952 - DNA, 599 bp, Chicken  19866894310116_1
  misc_feature (1)..(211): n is any nucleotide
nnnnnnnnnnnnnnnnnnnnnnnnnnnnnnnnnnnnnnnnnnnnnnnnnnnnnnnnnnnnnnnnnnnnnnnnnnnnnnnnnnnnnnnnnnnnnnnnnnnnnnnnnnnnnnnnnnnnnnnnnnnnnnnnnnnnnnnnnnnnnnnnnnnnnnnnnnnnnnnnnnnnnnnnnnnnnnnnnnnnnnnnnnnnnnnnnnnnnnnnnnnnnnnnnnncctctctaaagttctgatgacaatttttaccctgtctatttgagatctcataagagaccttcaagaacagttatgttttcagtccattkagtcaattattttgacttcccttcagcttgtgttatagactacttgaagtcctgtcttcaagctagtgggaccatgggagaagtgggtggtagctattcctttccactgcacagctctgaaatccgagcatctccttccttgcctgctttactcaggttgtttgcttttttgttgttgttttaacaaatattagctgttcaactactgttgttcaagctggatacaagtgtgatagatctacacttctaacattcttggctttcttcctcagcagtaggatctggttcatataatgaag

SEQ ID NO: 55953 - DNA, 599 bp, Chicken  19866894310121_1
  misc_feature (1)..(63): n is any nucleotide
nnnnnnnnnnnnnnnnnnnnnnnnnnnnnnnnnnnnnnnnnnnnnnnnnnnnnnnnnnnnnnncttgcttagcaacaccacaaacaagatcctcactgtagtaacaggtagtaactagggacttccttcacagtgacaacagataacagactgacaaacatggaaaccccaccaccgctgttacttctcagagagggtgaccaacttcaacaggacaaacacaaatatgacttgctcccaatctacaggaacactgaaacattgcagttacctgtctggccattattacttagctagcaycacctagatggttttcccttccccattccttagctctagaagatgacaaagcataggggataaaaatgcatcatcaaatgtgtgagaatctctctacagcagatcaagtgagctatcacccaaaaacatctccaggaaatgagggaagtagcatactactttgagaaccttttctcagtacagaaatacgaatgtcacaagcagacatgcttctcctacctccaagagacagcatgtggtacggagcaatacatgttagaaattcttactgaacaatatttcggagtatttgctgcagt

SEQ ID NO: 55954 - DNA, 600 bp, Chicken  19866894310121_2
tgaagaggaagaagaaaatgtggaaaggatgagagaacataaggaacagcaggagaagaaagatgcagaaggaaataaatcatcaaaacatttataaccctagactgcctcacatgggagcacaggaagaaaaaaaaagagaccattcgtctacagaatgtttgcttattacctcttgggaggggctgagatataagagttgacaccattatatgtatgtgcagttaaccttaacatacgctatttctttgtatatttgcagtcttacacatgctcacaagtatcctgtgctgactaaaygtggccagcttcccttagtattgtaaagagaataattcctatataaaatgattacagatctttgcattaaagtatacgacgatactgacatttggcaatggctctgtctagctccagtaactatactgcacactccctctgtattcccaaccatcaagtatatttcctaacacacttgagaaagtaatttaatagctgggctaaactacaactaaacttttagctctatttaaaactgcaaaaacaatgtgttctttctctcgggagagctacactaccatttggtcagacagcaacaca

SEQ ID NO: 55955 - DNA, 600 bp, Chicken  19866894310123_1
aggatgaccctttgagaaatgttttgaataatcagtagagagcatgtaatggtcgttcttagggaagatatgcaactgagaatatttgtagggttgtctaattgatttcttttttgatctttaacataatctgtttcatacagacttcttagtgattcatgtcccattataaacttggaattatgaggtctaagtggagcgtattgactgcttagggcagacaggagcagccttgatgtctcacggagaggaagccatgttccattgttttttcctctgggaaattagtaaaaatagcayatgggaaacaaaacttaatatgaacgtgtaattgctgaagcactggccaaattgtagggaaatttactgcaaaattcactgttttctgtttgttcccacaggattacctcctgaaactgtccctgtaactgatgtgtcacacagtgagtcagttgaagaaagtcctttccgtcccccttgccattctttttccaccgtcttcgatgaggacaagccaatagccagcagtggaacttacaacttggacttcgataacattgagctggttgattctctccatgccttaggaccgagctctcc

SEQ ID NO: 55956 - DNA, 600 bp, Chicken  19866894310123_2
tgcaaaattcactgttttctgtttgttcccacaggattacctcctgaaactgtccctgtaactgatgtgtcacacagtgagtcagttgaagaaagtcctttccgtcccccttgccattctttttccaccgtcttcgatgaggacaagccaatagccagcagtggaacttacaacttggacttcgataacattgagctggttgattctctccatgccttaggaccgagctctccagaattgaagaatcgtgaccccaaagcgaatgttcgaagaaaatctaccgattcagtgccagtttcyaaatctacgttatctcggtctctcagcttgcaagctagtgattttgatggagcatcctaccttggcaacagcgagacactagcgccagcagcagatacttatggtactggttcaagcagtgcttccagtacccttaagcgaacaaagaaatccaggccagcttccataaaaaagaagcagccagcaaaaaaatccctggatgctccgccagtgaaggaaacgccacaagagcctcctgaccttggccaagcagcttctgcaggtgaggagaaaccagcacctgaagcaaaagctgactca

SEQ ID NO: 55957 - DNA, 600 bp, Chicken  19866894310125_1
acccttgcacatgcagataatatcctcctgcacagggacctgaacgcaagaacaaagttattccagcactccgatacgctacagttacaagcactctttgaaaacaagggatgtgacaaaatcttgcatgttctttgccattaatacaagataaacttggaagtctctctccagagtaactgatgtctctctgtgtgttttctttccacagaaaccacataggaagcaactctgaaaaatgctctgtttgcactgtgtcagtatggagggcctactctcagcccaagctctaaacccttmattactaatcaaattatcaataattattattgatatctattattattcatatttattatcaataataacatttcttatggatacatttctacaaataaaaagattcccggtttaagctgtgatgacaaatacctttataaaggcagcaaagcttttcacagtagaagggctctaacatttctttatttatccattttaaatcaattgcatcatagctctttcacactgtgtgtgtacttaaatctttaaccaagggttagccgtttctgtccttaccacaaaaaagcaagtcaggcagga

SEQ ID NO: 55958 - DNA, 600 bp, Chicken  19866894310126_1
aactcccccggggctgcgggtgcaggatgtggtttggggctggcataacgcagcacccactctgctgcaaatctcagtggcccgtctgtccctccatctgtctgtcccttctcagctctgtgggaaccccagtggggctgagctgtgccactctgacactggctgaggtttgtcccctgtgtaatggaacagctaaaccatggtttaccagaagggacagatctcacccatacaccgtgaggctcaaggtggaaacaaaaaagccagcatggggaaatccccagtatgtggatgggctgygcttgaaggatttgcttttgctctgcatggccttggccctgctgctgaagctgtgccactgctgtcattgctgtgccatcaacgtgccaccaccatcattgctgtgccattgccatcatcgccacaccaccaccatcaccaccttgacatcacagtgccactgccatcactgctgtgccactgctctcattgccatgctaccacgatcattaccatgccatcaccatcatcactatgccactgccaccattgctatgacactgctgctgtcgccacgccatcaccatgtcactgccatca

SEQ ID NO: 55959 - DNA, 600 bp, Chicken  19866894310127_1
taacagccttctgcttctggtggcaaatgtgccaaactctctgcgtctgactagccaaaatgtgacctcaaaggaaataaaatgatccctgcctttttgcatgcaagcctttacagtgagtgttcagccctaacaaccccaaacgcttactttcctggccagtgaaatctgcagtgcccaaacagggtaattctctgcagaatctcttcccaacctcttttatctcccagttccctctgaagggcttttgccatcattgcatctgcttggaattaattctaaaaccaaatttttatcctrgcaggagtgacaggttgtatcatttcttgtcctttcctattatttgtccttagtttactgcwgaaagaaaacctccatattattcttatgtttgtgtcaccatgattttccctaactgaatttacatttgactggggaatgctacagcccagcaatttgctgtgcatttgccagttagtggaacaagaaatctcagtggaggaaaacccagcaagtgtcttaataggcagtagagaaaatgaagcaaattactgtagagaagcagatagggagagcaaacctgacacagcctgggaagca

SEQ ID NO: 55960 - DNA, 600 bp, Chicken  19866894310127_2
tgacctcaaaggaaataaaatgatccctgcctttttgcatgcaagcctttacagtgagtgttcagccctaacaaccccaaacgcttactttcctggccagtgaaatctgcagtgcccaaacagggtaattctctgcagaatctcttcccaacctcttttatctcccagttccctctgaagggcttttgccatcattgcatctgcttggaattaattctaaaaccaaatttttatcctrgcaggagtgacaggttgtatcatttcttgtcctttcctattatttgtccttagtttactgcwgaaagaaaacctccatattattcttatgtttgtgtcaccatgattttccctaactgaatttacatttgactggggaatgctacagcccagcaatttgctgtgcatttgccagttagtggaacaagaaatctcagtggaggaaaacccagcaagtgtcttaataggcagtagagaaaatgaagcaaattactgtagagaagcagatagggagagcaaacctgacacagcctgggaagcagcacttttcactctgggaccttctcctggctatgacaaccatgctgtctaattgttaacctt

SEQ ID NO: 55961 - DNA, 600 bp, Chicken  19866894310133_1
tgatcttccaagggtccctctcaactcaaatgattttgtgattctatgactttaaaattatggtataagaaaactacgggtatgtgacacgttggtgtttgctgtaagcccatggaggagatgttgctaaatctctgaccaagacccatggcaacactgccagggaacaattggcttctgaatcagtattatggtccgtgggagcggatctgggaaagcctcgtgaaggctgcatagccaaaaccgaataatcacatttggttctaactaagctcctgctgaatcacagtcgaaagaaayttgtggaaccaatttttggttgtttttcagctgtagatctgaggcttagtcatatctaatccaaacaacagatactaagggttgtgttgtaccttctgtagacaatttactttgagtaaaaacaaaaaggactgttgtatctgattatgtggcaataacagtttggcacagatttagttagacrtttttctgtacaagtaggagccttatggcagtggagacttaaaggagtggaaagccatgaacagtgagagattatggcagcatctttttaaaggccagcagtcttagcacctgcag

SEQ ID NO: 55962 - DNA, 573 bp, Chicken  19866894310133_2
agtattatggtccgtgggagcggatctgggaaagcctcgtgaaggctgcatagccaaaaccgaataatcacatttggttctaactaagctcctgctgaatcacagtcgaaagaaayttgtggaaccaatttttggttgtttttcagctgtagatctgaggcttagtcatatctaatccaaacaacagatactaagggttgtgttgtaccttctgtagacaatttactttgagtaaaaacaaaaaggactgttgtatctgattatgtggcaataacagtttggcacagatttagttagacrtttttctgtacaagtaggagccttatggcagtggagacttaaaggagtggaaagccatgaacagtgagagattatggcagcatctttttaaaggccagcagtcttagcacctgcaggtaacagtaaggtgccaggagagccactgtcaccaaaggcacaaagagagagcrccgggctgccggggatctgttaccaggccgatgttgtgctgccttaaatgtgtgctttgaaataaaaaccaagaaagagctgttagctcttgctgattacgtg

SEQ ID NO: 55963 - DNA, 403 bp, Chicken  19866894310133_3
tctaatccaaacaacagatactaagggttgtgttgtaccttctgtagacaatttactttgagtaaaaacaaaaaggactgttgtatctgattatgtggcaataacagtttggcacagatttagttagacrtttttctgtacaagtaggagccttatggcagtggagacttaaaggagtggaaagccatgaacagtgagagattatggcagcatctttttaaaggccagcagtcttagcacctgcaggtaacagtaaggtgccaggagagccactgtcaccaaaggcacaaagagagagcrccgggctgccggggatctgttaccaggccgatgttgtgctgccttaaatgtgtgctttgaaataaaaaccaagaaagagctgttagctcttgctgattacgtg

SEQ ID NO: 55964 - DNA, 600 bp, Chicken  19866894310135_1
gaaaaaacagtagggttaacgaactcttgatccaaacatcttagcaaatttttaagaccaagcatgagctggggatgtctcagactgatgtctgtgatataaacagaaaaagaggaggagtatgggtcataacagtttcatgcctgacatgaaagacattgcctctaagatgaaaaagcctgaagaggaacattctagactgcattcttcctaatatgtgtagtatttaatgatgggctggcagaaatcagaatactacgtataatctaatgctgatgtggtggatttacctgcagattkccccctgcccttgaggataacctttgcttcacttcattcacacagtgttcttttgtaagacatkaagctctttccatgcatagtaggatgcctatgttcctagcatttggttcaagtttactcagcatccagatgatgacatagatgtaaactaagaggtggtgtaactatatgaaaacagctgaacatgtttttgcaagcagcaaatcctttgattttgttttatccaagaacagaactattcccaccagcaagcaaggtacttggctattttttttttttcgaaaacacaccaaagct

SEQ ID NO: 55965 - DNA, 560 bp, Chicken  19866894310135_2
tgagctggggatgtctcagactgatgtctgtgatataaacagaaaaagaggaggagtatgggtcataacagtttcatgcctgacatgaaagacattgcctctaagatgaaaaagcctgaagaggaacattctagactgcattcttcctaatatgtgtagtatttaatgatgggctggcagaaatcagaatactacgtataatctaatgctgatgtggtggatttacctgcagattkccccctgcccttgaggataacctttgcttcacttcattcacacagtgttcttttgtaagacatkaagctctttccatgcatagtaggatgcctatgttcctagcatttggttcaagtttactcagcatccagatgatgacatagatgtaaactaagaggtggtgtaactatatgaaaacagctgaacatgtttttgcaagcagcaaatcctttgattttgttttatccaagaacagaactattcccaccagcaagcaaggtacttggctattttttttttttcgaaaacacaccaaagctattcctcaaaacagcaccaggaat

SEQ ID NO: 55966 - DNA, 600 bp, Chicken  19866894310150_1
gttggtgctgctgccaagacagcttttagggaaggccatgaatgaatcacagaacccacagaattgtaggggttggaagggacctctggagatcattcagtccaaccctctgctaaagtagattgcctagaatagtttacacagaagagcattaaggtgaattctagatatctccagaggagcagactcctcaacctctctcagcagcttgttccagtgctctgtctaatgttttctcatcttcagatggaactgcccatgttccagtttctgtctgttgcccattaacctggcactggrcaccactggaaagaggctggcctcatgcacttgacacctgccctttagatatttataagcactgacaagcattaagccaatatggaagatgagtgagggttctcagctcactgatgtcaatggraagctctctactccatccagctctgttagtaggttttggaaagctgctgcagtcataataggcaactgtataaacaatgtctcaaaggagaaggacacaggtagcaccaggcagcttgatcacgcattttcctcctctcacccactggctgtttgtcatctctgcatctgatgcat

SEQ ID NO: 55967 - DNA, 600 bp, Chicken  19866894310150_2
gcctagaatagtttacacagaagagcattaaggtgaattctagatatctccagaggagcagactcctcaacctctctcagcagcttgttccagtgctctgtctaatgttttctcatcttcagatggaactgcccatgttccagtttctgtctgttgcccattaacctggcactggrcaccactggaaagaggctggcctcatgcacttgacacctgccctttagatatttataagcactgacaagcattaagccaatatggaagatgagtgagggttctcagctcactgatgtcaatggraagctctctactccatccagctctgttagtaggttttggaaagctgctgcagtcataataggcaactgtataaacaatgtctcaaaggagaaggacacaggtagcaccaggcagcttgatcacgcattttcctcctctcacccactggctgtttgtcatctctgcatctgatgcatctgctgaaattactctctaaaggtctctgctaacaggtcctaagcaccataacacgattgcatgcagcaagaagaatcctgctgtcaaatccagtcatcctttgaacagcacagctcccctccc

SEQ ID NO: 55968 - DNA, 600 bp, Chicken  19866894310151_1
taagctgatttgagtaaaacaagagcaactgtgtgggatttaacttgaatgtgagatctcagatttccattgtgcaaactgtctttgagtacgctggtaggctaagagacatgctgagatcttaggggaatattttaagcacaatcttgaagtaattgaattaaatcactcctccacacatcaagttttcacaaggagagctaacaataaatacacaaataatatctatgtaaaggtttcattaagatcacttacagttagagttagattttttggggggtcatctccaaacaacatcarttttctagagcaagcctttccaacttcttgatgaccagaayggcaaattctgcctgaatggcacacatactttaccatattgcataccaccttgtggcagcaagaattgtccctgggaccacaactcagcctggaggctaccagaaaacagccgtgagttgtaagaagctgaggggcttcaaccccctctgatttttctgtcacatgagatcttgattctgcttgaccagaagtgtgccagcagaaaaatcgcacccttacagaaggtccagctgaaagtttctcataggagatacaaac

SEQ ID NO: 55969 - DNA, 600 bp, Chicken  19866894310151_2
aacttgaatgtgagatctcagatttccattgtgcaaactgtctttgagtacgctggtaggctaagagacatgctgagatcttaggggaatattttaagcacaatcttgaagtaattgaattaaatcactcctccacacatcaagttttcacaaggagagctaacaataaatacacaaataatatctatgtaaaggtttcattaagatcacttacagttagagttagattttttggggggtcatctccaaacaacatcarttttctagagcaagcctttccaacttcttgatgaccagaayggcaaattctgcctgaatggcacacatactttaccatattgcataccaccttgtggcagcaagaattgtccctgggaccacaactcagcctggaggctaccagaaaacagccgtgagttgtaagaagctgaggggcttcaaccccctctgatttttctgtcacatgagatcttgattctgcttgaccagaagtgtgccagcagaaaaatcgcacccttacagaaggtccagctgaaagtttctcataggagatacaaacaggagagattctaattaagctccttctttgtcctcccttcc

SEQ ID NO: 55970 - DNA, 600 bp, Chicken  19866894310154_1
aagcattttaatttcttgtttattttcatatccacattttcatggtggatattgtatgttttggaaacagataatacttattggcttacatcacaagatctctgaagaaaagtatttgctagtatttatttttcatgaaattgtaagatttttttccactgtaataacttaggagagatttggagcatatgctcagaatctgaaaatagatttttactagcttttctgcattggatgaagagaggttgagtttggtaaacagattaacagtatgtcaagataacatcattttctgttacraattttgaatggagttatatagcaaagtagggtgatttttgcttccaaaattaattcctttgttcagtgttattggcacacatagcaaaatgtctcaatgtctcaagaaaatrcactagtatacataggttctatttccttgaatctgatttcacagaaaattcatggaatgctctttaattctcagtattactgagaatcattttgggggctaaagggtactgtcttctcatcagagacagaagaggtgcttgcagcttagccggtgacctgaaattgatagtggtttgatttaatact

SEQ ID NO: 55971 - DNA, 600 bp, Chicken  19866894310154_2
atttgctagtatttatttttcatgaaattgtaagatttttttccactgtaataacttaggagagatttggagcatatgctcagaatctgaaaatagatttttactagcttttctgcattggatgaagagaggttgagtttggtaaacagattaacagtatgtcaagataacatcattttctgttacraattttgaatggagttatatagcaaagtagggtgatttttgcttccaaaattaattcctttgttcagtgttattggcacacatagcaaaatgtctcaatgtctcaagaaaatrcactagtatacataggttctatttccttgaatctgatttcacagaaaattcatggaatgctctttaattctcagtattactgagaatcattttgggggctaaagggtactgtcttctcatcagagacagaagaggtgcttgcagcttagccggtgacctgaaattgatagtggtttgatttaatactgaccaaaataatgggcatattgctgtggtggctgtaggggcagtaacatctggcagaagaagggctttgcaacatgggaataatagaaattgtcagaggccttccaacagtat

SEQ ID NO: 55972 - DNA, 600 bp, Chicken  19866894310155_1
gtggccagctgtcctggctgtgtcccctcccaccttcttgtgcaaccccagccttctcactggaatgagaaaaagaaaataagaaaccaaaaatctcaccgtagtgaaaacactgttcacacttgcatgttttcaacactgttgaaatccagtacacagcactacttgggctgctgtgcataaaatcatctgcatcccagccatacccagcccgtgtcttcatatatgtttctagcacaggtcccttttcttagtctccctccctgttgcttagggattttatcttattttatgttttgrcacattggttgaattattaatgttgttagttacatcttgttcattcagcatrtagtacagaatagctaatgttttttcatcaaaaattcagagctttattatttttttttacaaaaatactaaccagcaagggtctgtcattgcatgtattattccaactgacggaatggtgtaacttcaactggaaggtatttttccctttgtagctagaactacatccatttcagtatttcagctatgaagggcaatgtcttcattaacataatgtatcaacagggacaactggaatacagtacacgt

SEQ ID NO: 55973 - DNA, 600 bp, Chicken  19866894310155_2
cttctcactggaatgagaaaaagaaaataagaaaccaaaaatctcaccgtagtgaaaacactgttcacacttgcatgttttcaacactgttgaaatccagtacacagcactacttgggctgctgtgcataaaatcatctgcatcccagccatacccagcccgtgtcttcatatatgtttctagcacaggtcccttttcttagtctccctccctgttgcttagggattttatcttattttatgttttgrcacattggttgaattattaatgttgttagttacatcttgttcattcagcatrtagtacagaatagctaatgttttttcatcaaaaattcagagctttattatttttttttacaaaaatactaaccagcaagggtctgtcattgcatgtattattccaactgacggaatggtgtaacttcaactggaaggtatttttccctttgtagctagaactacatccatttcagtatttcagctatgaagggcaatgtcttcattaacataatgtatcaacagggacaactggaatacagtacacgttatgatagagactcatcacctaattcaaccaggtgtccattgtttatttcaa

SEQ ID NO: 55974 - DNA, 600 bp, Chicken  19866894310155_3
ggtctgtcattgcatgtattattccaactgacggaatggtgtaacttcaactggaaggtatttttccctttgtagctagaactacatccatttcagtatttcagctatgaagggcaatgtcttcattaacataatgtatcaacagggacaactggaatacagtacacgttatgatagagactcatcacctaattcaaccaggtgtccattgtttatttcaagtggaagttaattagatttgactccaattactctgacagaagtttgacagaggaatgtttgctgattaatgaaacaackatattcttcagtctaaacgagtcctttatatccatcagtaacatattccaagaatagacagtttaaaataastaaatgcagaacccagtcttagaatctggcagtgatggatagggctggtaggtttttaatccttacatamacaaaagggagaactttatttactatttttgccttccctgtagtgtgcccaaattcttttagtaagactttgttatatacagctgtggttcaaaaagtgcagtgcctgctgaagggatgcaccagtcagtgcagtgctggaggaagagagtggtgatg

SEQ ID NO: 55975 - DNA, 600 bp, Chicken  19866894310155_4
tagctagaactacatccatttcagtatttcagctatgaagggcaatgtcttcattaacataatgtatcaacagggacaactggaatacagtacacgttatgatagagactcatcacctaattcaaccaggtgtccattgtttatttcaagtggaagttaattagatttgactccaattactctgacagaagtttgacagaggaatgtttgctgattaatgaaacaackatattcttcagtctaaacgagtcctttatatccatcagtaacatattccaagaatagacagtttaaaataastaaatgcagaacccagtcttagaatctggcagtgatggatagggctggtaggtttttaatccttacatamacaaaagggagaactttatttactatttttgccttccctgtagtgtgcccaaattcttttagtaagactttgttatatacagctgtggttcaaaaagtgcagtgcctgctgaagggatgcaccagtcagtgcagtgctggaggaagagagtggtgatgcagtgccaaacactgctgctgaaggagggacacagacagtgaaggggaataaatacatttgaagaccacaaa

SEQ ID NO: 55976 - DNA, 547 bp, Chicken  19866894310155_5
cagggacaactggaatacagtacacgttatgatagagactcatcacctaattcaaccaggtgtccattgtttatttcaagtggaagttaattagatttgactccaattactctgacagaagtttgacagaggaatgtttgctgattaatgaaacaackatattcttcagtctaaacgagtcctttatatccatcagtaacatattccaagaatagacagtttaaaataastaaatgcagaacccagtcttagaatctggcagtgatggatagggctggtaggtttttaatccttacatamacaaaagggagaactttatttactatttttgccttccctgtagtgtgcccaaattcttttagtaagactttgttatatacagctgtggttcaaaaagtgcagtgcctgctgaagggatgcaccagtcagtgcagtgctggaggaagagagtggtgatgcagtgccaaacactgctgctgaaggagggacacagacagtgaaggggaataaatacatttgaagaccacaaaatataggagacaaattt

SEQ ID NO: 55977 - DNA, 600 bp, Chicken  19866894310159_1
agaacaggggtgggaacttgtaactggatttttttggccttttgtagctggcaggagaaggctgagcaagagtagatgttggctgagatgtcagcaaaaacagtgatgtcttatttagatatctcaggctccacttgcagttggctgggaccactggataaagatgactaaattttgctaatgaatagatagtgaagaaaaccatcaatcctgaaaaaaatctaccagggagaaatagaaaattacaccatgcacatgaagtagaattgatcgggtgtatatgcttccagctgtgacatrctgcaaaactgttcaggaactgcatwggattgcctagcaatggattacctgtcaaatttacaggctcacatgaatgaagacagaaacactttacagaactgggtgaactatagatcaaaggatgaataaaccttttgaaagaaataacaaatttactaactacaagaatgaggacagaatttcatccaattggtttctctcttacatagtgtgtggaattttgttaaaatagaactttgtttgcatttcctcagaccattatcttaaagctattgcagaagcttttgaaattcctctctg

SEQ ID NO: 55978 - DNA, 600 bp, Chicken  19866894310159_2
gatttttttggccttttgtagctggcaggagaaggctgagcaagagtagatgttggctgagatgtcagcaaaaacagtgatgtcttatttagatatctcaggctccacttgcagttggctgggaccactggataaagatgactaaattttgctaatgaatagatagtgaagaaaaccatcaatcctgaaaaaaatctaccagggagaaatagaaaattacaccatgcacatgaagtagaattgatcgggtgtatatgcttccagctgtgacatrctgcaaaactgttcaggaactgcatwggattgcctagcaatggattacctgtcaaatttacaggctcacatgaatgaagacagaaacactttacagaactgggtgaactatagatcaaaggatgaataaaccttttgaaagaaataacaaatttactaactacaagaatgaggacagaatttcatccaattggtttctctcttacatagtgtgtggaattttgttaaaatagaactttgtttgcatttcctcagaccattatcttaaagctattgcagaagcttttgaaattcctctctgaagtagcactaaaagcatcataaatg

SEQ ID NO: 55979 - DNA, 600 bp, Chicken  19866894310168_1
aagcaaacactgtgtaacccctttggaaattctagggaaatgtatggaatgatacaaaaactgtgaatagtactatacttacttaaggagaaaaggcaacaatataaggttaactatcatgggtgagaatgaagacagtctcaattttcacaatctatattaaaacaccaatcatcttcccatcctcattctgaactagagttactttccaggttccttaggggttagaggatctaccgcagccaggaaattcgtcaggacattacaataaatatccctatgtatctccttattcagtawaacacacataatgtgatgaaaaatcctgtccatgaaacctcagtatagttgtggactgctggacaccatggaccaggcatgagaagtatctgagggggatgaagcagcaacgtaggaagaaagacctcattccccagagcagaaatttctgttgcccatcgttcttactgtagtatcacagaagttgtactgaacccaaatcttcagagctttctcttcaaaacactgaccataagccacctcttgcacttttttatcactgatgtcaaaaggggttcaaagctttgcacrcccttgatg

SEQ ID NO: 55980 - DNA, 569 bp, Chicken  19866894310168_2
attcagtawaacacacataatgtgatgaaaaatcctgtccatgaaacctcagtatagttgtggactgctggacaccatggaccaggcatgagaagtatctgagggggatgaagcagcaacgtaggaagaaagacctcattccccagagcagaaatttctgttgcccatcgttcttactgtagtatcacagaagttgtactgaacccaaatcttcagagctttctcttcaaaacactgaccataagccacctcttgcacttttttatcactgatgtcaaaaggggttcaaagctttgcacrcccttgatgcaacaaaatccagctttgctagcactccctcaagatcttaggccaccctarggatgtgatatctactaatgagtagagttattcacaagtgagatgcagccaatgcaagggaaggatgtaccaattcccctacatcctgaggggcattatcttgaatgtcatttttctgctgtaaaaacaccacagaccacacttcaggtaggagggttaatcaggctgcggtactgcatggaagtcaccgtgctgggagcaggctacca

SEQ ID NO: 55981 - DNA, 509 bp, Chicken  19866894310168_3
tggactgctggacaccatggaccaggcatgagaagtatctgagggggatgaagcagcaacgtaggaagaaagacctcattccccagagcagaaatttctgttgcccatcgttcttactgtagtatcacagaagttgtactgaacccaaatcttcagagctttctcttcaaaacactgaccataagccacctcttgcacttttttatcactgatgtcaaaaggggttcaaagctttgcacrcccttgatgcaacaaaatccagctttgctagcactccctcaagatcttaggccaccctarggatgtgatatctactaatgagtagagttattcacaagtgagatgcagccaatgcaagggaaggatgtaccaattcccctacatcctgaggggcattatcttgaatgtcatttttctgctgtaaaaacaccacagaccacacttcaggtaggagggttaatcaggctgcggtactgcatggaagtcaccgtgctgggagcaggctacca

SEQ ID NO: 55982 - DNA, 599 bp, Chicken  19866894310169_1
  misc_feature (1)..(38): n is any nucleotide
nnnnnnnnnnnnnnnnnnnnnnnnnnnnnnnnnnnnnntacacttaaattgaaaagtgctctgcttgaactttcttttacagagttgtcaggagcttgtttcagtcagtctctgtttgtccttgtagtccagggctgttttgccctctggtctgagtgaagttggacaatgaaggaatgctcttggtcatctgatgggtagtcatgtagttctgcagagtttttcccatgctcttcttcacctccctttctccagcttttctcccttgtggttccatccaagctttaattttacaataaygagacttctaaatttttgcttgcatactatttgataccagaagttgggcagcttagcaaagatgtgcctgctgacctcctttaacagttcaaagatttcagcactttctctttttgtggtagggtctagaagggattgtcatagttgtggcattggttcccagaatattcatccatgatttatggctagtcacaggccctctcaaacacgcctggtgtgacagtagcttcccatttgggttaaatgagagtgcagttaaatagccttttgtttaggtgagacaatagtctctgaaagat

SEQ ID NO: 55983 - DNA, 599 bp, Chicken  19866894310172_1
  misc_feature (1)..(16): n is any nucleotide
nnnnnnnnnnnnnnnntttgaaaaatgctctgcttgaagtgcaggagcaaagactgatctgtcaagagactctcctatttcagacgcttggtagctatgcttttccccactgaaaaccagtcctgatctttctaactgaatggtaaagaatgctgttagaaccactgcctgcaaggaccatgggtttgagtgtctactgcttgtatctgcatggaatatatttcttttacccttctaattaaaagtcaatgtggaagcaagagatgcggatttgctttgataaagactctaacagtaagmgttgctctgcaaagacccctcagtgtctttgtttccagccctgtgaattaaaaaagccaaagcttgctttttaatagccttactaaaaggcagctttyatgcctatgaagtcccaggagaccttcaggtgtgaacgacctgatccctgctggcaagtgctgcctttctacattattttaactgttcagagtgctggaaatagaatgagaaatccaagaaaacgattgcaaggaacttcagtactgcctttcgtctcagaagttcctgaagtatctgtrgctcctgagtcaatcatcttt

SEQ ID NO: 55984 - DNA, 600 bp, Chicken  19866894310172_2
gcttttccccactgaaaaccagtcctgatctttctaactgaatggtaaagaatgctgttagaaccactgcctgcaaggaccatgggtttgagtgtctactgcttgtatctgcatggaatatatttcttttacccttctaattaaaagtcaatgtggaagcaagagatgcggatttgctttgataaagactctaacagtaagmgttgctctgcaaagacccctcagtgtctttgtttccagccctgtgaattaaaaaagccaaagcttgctttttaatagccttactaaaaggcagctttyatgcctatgaagtcccaggagaccttcaggtgtgaacgacctgatccctgctggcaagtgctgcctttctacattattttaactgttcagagtgctggaaatagaatgagaaatccaagaaaacgattgcaaggaacttcagtactgcctttcgtctcagaagttcctgaagtatctgtrgctcctgagtcaatcatctttctgctctgctggccacagaaagcaccatctgtagtagcagataaaacccagctgctcgcttttctgcccagctaattaaaaagtgccatgacctccccg

SEQ ID NO: 55985 - DNA, 600 bp, Chicken  19866894310172_3
gataaagactctaacagtaagmgttgctctgcaaagacccctcagtgtctttgtttccagccctgtgaattaaaaaagccaaagcttgctttttaatagccttactaaaaggcagctttyatgcctatgaagtcccaggagaccttcaggtgtgaacgacctgatccctgctggcaagtgctgcctttctacattattttaactgttcagagtgctggaaatagaatgagaaatccaagaaaacgattgcaaggaacttcagtactgcctttcgtctcagaagttcctgaagtatctgtrgctcctgagtcaatcatctttctgctctgctggccacagaaagcaccatctgtagtagcagataaaacccagctgctcgcttttctgcccagctaattaaaaagtgccatgacctccccggtgctaattgcatcctattagtggaacggaggaaaggagtccagcagggttgcctgatatttgagctctcagctttctgacaccattttaagtgatttttattttattctgactgtgtgattccagaactgagacggctgcagactgtatgtctcacactcattttctgatctgcaggtg

SEQ ID NO: 55986 - DNA, 600 bp, Chicken  19866894310179_1
tgacttgatcagcagtgatcatgtagctgttgctaagtatagtagctatagggagtggagagagactgactttcctgtctgctatttgaaacagcagtaattttccctccttcaaaatatatttttagaggtttacaaataaaagtgaaatggcatagcttctaagtagacgtagtgcaaaagaggcactgtgagatttcatgttgagatttgtagttttattttaaaatatcttttaatgtaatatctgcagtgtgtttgagtaagcattccattgtaccctgttatttctatcattgytacatccagattcagtttgccctagtgcttgaaatatcccttgtatcttagtcagatgcttttcgtaagttggattttcttctggttttggactgtctaaaactttaacacctcactccctactacgggttgaaggagttgaaggcagccttttcacttttctagagtgatttcatttttctacatattgacttcagataaacaagtgttctactgtatgttcttagcatcagattttcttgatttgaatctggaaataacttgacagttgggctgatttgagttgaagctgaatgctgc

SEQ ID NO: 55987 - DNA, 600 bp, Chicken  19866894310179_2
ataaacaagtgttctactgtatgttcttagcatcagattttcttgatttgaatctggaaataacttgacagttgggctgatttgagttgaagctgaatgctgctgtggataaccatgaagctttgtcccagttcagaagtattctgccactacagaatatttgaagcacacgataaacttaagttcacaatgagattggcagcaccgtagtagaaaaaggcgtagtaagaagtttgctgttatttggatttttttgaattgaaataattgaaacaaaacaaccacaacacacaaacacayaccctccccaaaacaacttaggaagtctgatctctcttacgtatgtaattaagtaaataaatcaatcaggagttgcaagaccagaagtgctattaattatggcatttctgccttacatttctcagtagctggtactgctgacaaaataaatctgtatttcatttattccttgagctgccaatagaggggagttactgagtagctaacagtgacatccaacatgctcttctgactgtgcttgctatgctgtgtactttttgcaaccattttcctatgtgtgtgttggagatcagagcttca

SEQ ID NO: 55988 - DNA, 600 bp, Chicken  19866894310184_1
tctatgaatttgtattctaaaatataatgatttagtactaagggcaagtttaatgggaacatgtgtgtaaacttttgccttgtctggaaactttccaaggaatatagcagtaaagacggtttttagattgttttaatgcctctgcaaagacatgagcagttatgtagctgctgtaggtcctcagctgataacaagcactaatgaagtggcttttcatgcagttttattgagattatttatgcaaatacagtgcagtgtttattgcaatagcaattatttacaattctcagttggtaaacraaagcattaccattcatctctggtgccttggtaccttgtagtaagcctgctcagttttccctgccataactggctgggtgtgctcccggcttttgttcctcatttccaacagcctcacaggttttgtctgctcgtatcacagaggcacaggaagggcttgctcttgatgaaccactcatcctgtttttagattaaaaaaaaaaaaaaaaaaaaagkactgtggaaaaacacatatattgtcagtcccacagtcctgtttcatgaaaggatttctaagagtggtcaggtacactgtgggca

SEQ ID NO: 55989 - DNA, 600 bp, Chicken  19866894310184_2
tgcagttttattgagattatttatgcaaatacagtgcagtgtttattgcaatagcaattatttacaattctcagttggtaaacraaagcattaccattcatctctggtgccttggtaccttgtagtaagcctgctcagttttccctgccataactggctgggtgtgctcccggcttttgttcctcatttccaacagcctcacaggttttgtctgctcgtatcacagaggcacaggaagggcttgctcttgatgaaccactcatcctgtttttagattaaaaaaaaaaaaaaaaaaaaagkactgtggaaaaacacatatattgtcagtcccacagtcctgtttcatgaaaggatttctaagagtggtcaggtacactgtgggcaggaagaattacacatgtccctttctagatacccttgcggagccttcagtgcattctcttaaatttttggtgtagaaagtcttttgactgtatcatgtagaggctcactctgtcaacccttacccaagctttctgtcctctgtcctttaactgggcctgtcctgtctggggaaagacgtctctttaccccataactaccatgttcaggctcaactta

SEQ ID NO: 55990 - DNA, 500 bp, Chicken  19866894310188_1
tgcagtggagaaggtaggaacgtggggaatgaacttaggccaggctggtatggtaccagcaagagctgccagtgtatctcctcctaaattgcatagtacggtcatgctcatcacagcgtattacccaacttccctatgtctgatttctttcctttctgagatggtgaccgaatgctgtacatgatattcagggtgcaatcccacccctgaattatggaggattcagcactgtttttgtgtccctttgtcccattcctgctgtgttctgacatcgcggttgggttttctggcacagctgcrgagcgagctgagctcagcattcagctgttcctattgccatttcaattcctttcttcgcctaacacagttatttcgtaaatctgaaagatatgtgaataatgtgcagtttcctcctctttagaggtattatttgcatttacccgcattgaataacttattatcacgttgtctatttgcttaaatctcactcaagcttctcc

SEQ ID NO: 55991 - DNA, 600 bp, Chicken  19866894310190_1
gatgaagaacaggaagagtaaaatttcatcaaaaacctgatgaacagcttgaaagctaagaatggcaactactgccatcgaaccatcctgatgcgttagttgcacaaaaacaagtttgcatgtcccactagttgtatggtttttctgctctctttttaatatgttttaagaaaaacattaaaaattagaagctttgttgtttatatgcattaactatattttatgtgttttacaaggattgatctgaaagtaatgcctcctattttattatgttggcatacgatatcagaaatggatgtyagtagtatggcagtagaggtttgaccttcctgccaaaattccattatattttgttgctatgtgacagatggcagcagagaggtggtctgacaaaatggcatctgacatggaagtgtgtataaagcagaggtgtggaagtgaattcttctgtgctgaaaaaattgcacccactgacattcactgatgcttgctaaacacttatggagggcaaacagtggatgtgagcacagtaaagtggtggatgttgcatttgatcagcggcgacagcaggttatctcttctggtgcagactgtcatgag

SEQ ID NO: 55992 - DNA, 600 bp, Chicken  19866894310190_2
ttccattgaaagcagctactcagcttacttctcctcacctcattttatgtggtgtcaccagcttttataatctcttatactagttctccattttgttgtatatcaagctcacctcctcaaaaaaattacacaagagtggggcaatatctgccttattttcttccagccttagccccacctcagtgcttctcactcactttccgtactgttcctcagcacaatatacctctcagtataggactgcatttcctctgtgaggaagattagccttcttaaacacattagtactgaagttatctrctgtattactgctatttctgcactctgctcattacagaagacaactctcttcttcctactccaatgcactgaccatccttctcatacaccatctccatgaaatcatctcaaaagctggaaaaagcagctattagctgacttacaagatcactgatggaggaagacagcttaacaattagacaaatcgtatagctaggaatgccactgaaatgtagtagtggtgaactaattagtgctatggaaaaccagctatgtacttgaaagtcggagtgaaagggtcatgaacagccttttaaactg

SEQ ID NO: 55993 - DNA, 600 bp, Chicken  19866894310196_1
tgtaagcaatctggtaagtttaaggtttagcctgcccaaggcacgcttcctccaaagccaggtagctggcttatggcctggcccttggaggcttatttccccacagtcgtggttcaaagatgcaatggtacactggttccataggttacctaatcaccacacagaactatttgttattccaaaatacaatttattagaaacagaactgagaggaatgttttgaactatcttggcttctaacctacccagatgaaccagagctctcgagagttattctgagtgttcttcaaatagaatggyaaaataatttgagccttaagaggagtgtcagttacatgcattctggggggaacacgtcttttttctacctaccaaaagaaaaggaatagtcagaggaaaatttgaccggtcttcataattttcagagtcagggttcagtcaagtacctgaaggctaatgtttatctggcatttacatgtctcctataattcagcagatcagggaccagtgaaattctctcacataaaaattttctctcataaaaaagctctcygacttcagacagtggccaaaacccagcaaagccagcttttcatatga

SEQ ID NO: 55994 - DNA, 600 bp, Chicken  19866894310196_2
accagagctctcgagagttattctgagtgttcttcaaatagaatggyaaaataatttgagccttaagaggagtgtcagttacatgcattctggggggaacacgtcttttttctacctaccaaaagaaaaggaatagtcagaggaaaatttgaccggtcttcataattttcagagtcagggttcagtcaagtacctgaaggctaatgtttatctggcatttacatgtctcctataattcagcagatcagggaccagtgaaattctctcacataaaaattttctctcataaaaaagctctcygacttcagacagtggccaaaacccagcaaagccagcttttcatatgaaattctggcattaytggtcctggtcaaaagaggaaacatgaagtgtaaaaaaagatctctaacaattttatgtatttcaggtagagtctgtctttgaaacagtgacttgttctagaaaaattccgtctgatgactcttgccaaatcctagggtatttcttccggatggatggaattgagttgctcctgaagcttttctgtgtctttgacaagagagaaacatcgaggttaaatctggttctaaatattttcac

SEQ ID NO: 55995 - DNA, 600 bp, Chicken  19866894310196_3
cttaagaggagtgtcagttacatgcattctggggggaacacgtcttttttctacctaccaaaagaaaaggaatagtcagaggaaaatttgaccggtcttcataattttcagagtcagggttcagtcaagtacctgaaggctaatgtttatctggcatttacatgtctcctataattcagcagatcagggaccagtgaaattctctcacataaaaattttctctcataaaaaagctctcygacttcagacagtggccaaaacccagcaaagccagcttttcatatgaaattctggcattaytggtcctggtcaaaagaggaaacatgaagtgtaaaaaaagatctctaacaattttatgtatttcaggtagagtctgtctttgaaacagtgacttgttctagaaaaattccgtctgatgactcttgccaaatcctagggtatttcttccggatggatggaattgagttgctcctgaagcttttctgtgtctttgacaagagagaaacatcgaggttaaatctggttctaaatattttcactatagctgttacagcttttttgttccttcacagtttgcatctgtttttgaacagacttcag

SEQ ID NO: 55996 - DNA, 599 bp, Chicken  19866894310200_1
  misc_feature (1)..(65): n is any nucleotide
nnnnnnnnnnnnnnnnnnnnnnnnnnnnnnnnnnnnnnnnnnnnnnnnnnnnnnnnnnnnnnnnnctgtctagaacaaattaatacaatctatatcggtacagctctctgaaaccaatagaattttttttttaaattatatatgtaaagtatcagcacatttaaaggaacagagctctctctacatctttcaattgcttcctctatgatagcagcattacttagttttctgcagaatgaaagtcagttctctggcactctccacataacattaaaagagatgaaaatccacaaaccaccrggtcaagatattactttgctttgtatggaaggctaatgtattgtgaacattcatttccacaaaatcagtaggaggatataaaaataaaattaaaaagtatgtgagaagtcttattttgtaaattcggtttataaagaaagaccatgagaagagtaaaattcagaagaaaaattgtggcagaaaagtaggcawagcaatagacactgttagaagagcagtatataatattgatgagaagccaataaatggcactgaagaggttagcaagcatggyagtatacaaggtatccaagggagac

SEQ ID NO: 55997 - DNA, 600 bp, Chicken  19866894310200_2
attgcttcctctatgatagcagcattacttagttttctgcagaatgaaagtcagttctctggcactctccacataacattaaaagagatgaaaatccacaaaccaccrggtcaagatattactttgctttgtatggaaggctaatgtattgtgaacattcatttccacaaaatcagtaggaggatataaaaataaaattaaaaagtatgtgagaagtcttattttgtaaattcggtttataaagaaagaccatgagaagagtaaaattcagaagaaaaattgtggcagaaaagtaggcawagcaatagacactgttagaagagcagtatataatattgatgagaagccaataaatggcactgaagaggttagcaagcatggyagtatacaaggtatccaagggagaccttcagaaatgaatttycatttctgctgttccaatgataatggaatacaacttctgagagcctctgaggtgtgcagccaagagacacaagtccacatttatgtgatctaagttctgccaatatgccagtacgcattttcagatgaaaacagttgatatattttaggaatactctattttctggatatttgttt

SEQ ID NO: 55998 - DNA, 600 bp, Chicken  19866894310200_3
aagagatgaaaatccacaaaccaccrggtcaagatattactttgctttgtatggaaggctaatgtattgtgaacattcatttccacaaaatcagtaggaggatataaaaataaaattaaaaagtatgtgagaagtcttattttgtaaattcggtttataaagaaagaccatgagaagagtaaaattcagaagaaaaattgtggcagaaaagtaggcawagcaatagacactgttagaagagcagtatataatattgatgagaagccaataaatggcactgaagaggttagcaagcatggyagtatacaaggtatccaagggagaccttcagaaatgaatttycatttctgctgttccaatgataatggaatacaacttctgagagcctctgaggtgtgcagccaagagacacaagtccacatttatgtgatctaagttctgccaatatgccagtacgcattttcagatgaaaacagttgatatattttaggaatactctattttctggatatttgttttgaaacagaagtaaaacagaaaaactaaattgaaatcataactctccattgttttgatggaatgaagggttattttctgcca

SEQ ID NO: 55999 - DNA, 600 bp, Chicken  19866894310200_4
tgctttgtatggaaggctaatgtattgtgaacattcatttccacaaaatcagtaggaggatataaaaataaaattaaaaagtatgtgagaagtcttattttgtaaattcggtttataaagaaagaccatgagaagagtaaaattcagaagaaaaattgtggcagaaaagtaggcawagcaatagacactgttagaagagcagtatataatattgatgagaagccaataaatggcactgaagaggttagcaagcatggyagtatacaaggtatccaagggagaccttcagaaatgaatttycatttctgctgttccaatgataatggaatacaacttctgagagcctctgaggtgtgcagccaagagacacaagtccacatttatgtgatctaagttctgccaatatgccagtacgcattttcagatgaaaacagttgatatattttaggaatactctattttctggatatttgttttgaaacagaagtaaaacagaaaaactaaattgaaatcataactctccattgttttgatggaatgaagggttattttctgccaagtgtttctaaaaagcaaaccttgatgtgttttttttgttcc

SEQ ID NO: 56000 - DNA, 600 bp, Chicken  19866894310220_1
ctgttcagatatttcactgaaaatgttcctgtcccttttctaacgcctgtcacatctttatacaggcctccactaagctgcttgtcagtgttggtgcaagtgtctgctgttctgaatcctatcttttctacaacgtaatgttatgcgatgcacagtatcaaatgttttttacactccagacatacttaatctctagtaacattttgtgatatcttcagaaaatgtgactgcattatctgccatgattttattttttgtaaattcctctgtgtgctagtcatcattccttcatacttcagrtattcaaggacatccctttctaccacaactaaacatgtgattaactgagtaaacgtctaagttgagatccttattttttaaagaactgaatcctttctccattatatctctcttgtttatcagtttttttccatctctctacgtagttacacaggcgttcctctgcacctgtttcccaactgcttttaaaatgaattaggggatcagactagaattctgacatataaactatccaggcctgaagatcacttactatttttttataattagataacttgatataatcgctacacaattccc

SEQ ID NO: 56001 - DNA, 600 bp, Chicken  19866894310222_1
tgagggaaaacatttcattcagtttaaaatgaaaaatatttctttccattttcagtacgctccgcaatgaatgactgcaggcagacattgctttattcagtagctcagtgctaagacacacaaagcacagaggggcagcatttgccatctctggagactggaatactcaggttttcccattttaggtccacgtcctctgccacagaactttcttatgcaatttaaggtcagtctttgcgttgctctgctctgtactacacatgcaatgcatgtagccaatctctttataaatccagcagragaaggatttaaatatgttataggaaagtggagcagttccagtaggagggtataaaagagatttactgcacaaaatctcaggttgaaatatagtttcaagccagtgaggcagaggcaaggatagagtctgtctctccatcagcatgagtgaatgaatggaacggacagctaggttaacacggtcycttcctcatcagcctctacttgaggaatattaggcagggaggaatgagaggaggaaagaactgtttatctatttagcagatttggttataattattgtatggtcatgactgattt

SEQ ID NO: 56002 - DNA, 600 bp, Chicken  19866894310222_2
gtccacgtcctctgccacagaactttcttatgcaatttaaggtcagtctttgcgttgctctgctctgtactacacatgcaatgcatgtagccaatctctttataaatccagcagragaaggatttaaatatgttataggaaagtggagcagttccagtaggagggtataaaagagatttactgcacaaaatctcaggttgaaatatagtttcaagccagtgaggcagaggcaaggatagagtctgtctctccatcagcatgagtgaatgaatggaacggacagctaggttaacacggtcycttcctcatcagcctctacttgaggaatattaggcagggaggaatgagaggaggaaagaactgtttatctatttagcagatttggttataattattgtatggtcatgactgatttcatgatcattaagagatagtacatttaccaaaaacatttggttttgtttcattatgagttacgtgcaaagctctttgaaccagggacagcacttctcacattcaatacagtattgcacagtgacatgccaaaacccaaaacttcagtaaggactcttgacactacatggataccacatctaacag

SEQ ID NO: 56003 - DNA, 600 bp, Chicken  19866894310222_3
cctaaagagaagtccttcccagtctgtttactccaaaatttttcattttgcataaaatagttattagtccaaatgatagtgacatttgataaatgtgggttaactcatttcctacatctcagccttaggggaagggaaaagcaaaaatattcaccttgagaggcttcagcaatatcaagaaaggaatcctgaggcactgcgagtggttggggaggtgagtagtaagagcagcatttcaaacacaggttatcggcaaccaatgggcaaaaactctgaaaaagtaaataaaccacttctcartatagcaacaaggctaactgggaactgctttgactcctattcagacactgcagactcacatgaatctatttgttccccatttgcctttctgttgacaggacgcagtstgggtatgagccatcccggttgtgccagctacctcagaaggcaactgggcagcccagcattggtcatccactgcctctccacatctggagcaggtggatrttgtcggttcattcactgcatcactttcagtccggctgcagatgaactccatttcagttttgcttataaatgctttgtctccacattgccgta

SEQ ID NO: 56004 - DNA, 600 bp, Chicken  19866894310222_4
tttcctacatctcagccttaggggaagggaaaagcaaaaatattcaccttgagaggcttcagcaatatcaagaaaggaatcctgaggcactgcgagtggttggggaggtgagtagtaagagcagcatttcaaacacaggttatcggcaaccaatgggcaaaaactctgaaaaagtaaataaaccacttctcartatagcaacaaggctaactgggaactgctttgactcctattcagacactgcagactcacatgaatctatttgttccccatttgcctttctgttgacaggacgcagtstgggtatgagccatcccggttgtgccagctacctcagaaggcaactgggcagcccagcattggtcatccactgcctctccacatctggagcaggtggatrttgtcggttcattcactgcatcactttcagtccggctgcagatgaactccatttcagttttgcttataaatgctttgtctccacattgccgtagttccccaggaatctggctctccttacggcactttgttctttaatgactttttttccctggaatttaaaaataatagtaattacagaaaaggtcctgctatgctgtt

SEQ ID NO: 56005 - DNA, 600 bp, Chicken  19866894310222_5
tggggaggtgagtagtaagagcagcatttcaaacacaggttatcggcaaccaatgggcaaaaactctgaaaaagtaaataaaccacttctcartatagcaacaaggctaactgggaactgctttgactcctattcagacactgcagactcacatgaatctatttgttccccatttgcctttctgttgacaggacgcagtstgggtatgagccatcccggttgtgccagctacctcagaaggcaactgggcagcccagcattggtcatccactgcctctccacatctggagcaggtggatrttgtcggttcattcactgcatcactttcagtccggctgcagatgaactccatttcagttttgcttataaatgctttgtctccacattgccgtagttccccaggaatctggctctccttacggcactttgttctttaatgactttttttccctggaatttaaaaataatagtaattacagaaaaggtcctgctatgctgttctgaataaatgaagtccctttgagaagagctgttagcaaaaatgaaatgaagatgtcttctgccatgctgcccacacccctgctgtatccaatctacagt

SEQ ID NO: 56006 - DNA, 600 bp, Chicken  19866894310222_6
tgccatgctgcccacacccctgctgtatccaatctacagtatgaacgttctatagagcagagattttaacatgacaaaatctggttgtgttaaattatgtaacactcacattctgatatgtgcactccacatctttaaatctccactggtatgacaggaaagatgtacgtgttgaacttcgatataaacttgatttctttttttttgttcttcctatacgagttaaattaaaagccattaagcatgttttttgcatgcaaggaaatacagcaagatgtggagctgtatggtaagtgtgtrtgcaattgctgtatggggagtaattgaatcaatgaaacctgtttgcaacactcagtctgcacatgcaagaatgttgactgaattttgagaatgaaaggtgagtgaccgggaatgccagccctgtgacacatgcatgtggaacggtgcaagcttcaagctgtgcaagaaccagctcttcccaaatctaatttcaagcayagaactccttagaaagcaaaagagaatttcattttgcaggactcaagtgctccctgagctccttactgatactggcaagcaggctgaaatattgccagtaga

SEQ ID NO: 56007 - DNA, 600 bp, Chicken  19866894310222_7
ttttttttgttcttcctatacgagttaaattaaaagccattaagcatgttttttgcatgcaaggaaatacagcaagatgtggagctgtatggtaagtgtgtrtgcaattgctgtatggggagtaattgaatcaatgaaacctgtttgcaacactcagtctgcacatgcaagaatgttgactgaattttgagaatgaaaggtgagtgaccgggaatgccagccctgtgacacatgcatgtggaacggtgcaagcttcaagctgtgcaagaaccagctcttcccaaatctaatttcaagcayagaactccttagaaagcaaaagagaatttcattttgcaggactcaagtgctccctgagctccttactgatactggcaagcaggctgaaatattgccagtagattttagcttggtttctaaggaaacaaggcctttgtgattgcacaggagcatgtgtgtctatgtgcgtgtacgttagcctctgaaatgcccttcacctccaataccttttgagctcatcaaccaatctcaagccaaccttgctgaaggatatgagcattggagatacagtattcttacaagtgtcatgaaaatatgtgc

SEQ ID NO: 56008 - DNA, 599 bp, Chicken  19866894310228_1
  misc_feature (1)..(182): n is any nucleotide
nnnnnnnnnnnnnnnnnnnnnnnnnnnnnnnnnnnnnnnnnnnnnnnnnnnnnnnnnnnnnnnnnnnnnnnnnnnnnnnnnnnnnnnnnnnnnnnnnnnnnnnnnnnnnnnnnnnnnnnnnnnnnnnnnnnnnnnnnnnnnnnnnnnnnnnnnnnnnnnnnnnnnnnnnnnnnnnnnnnnnnccttctgacttattggaaagggtcatccgttactggagaccaacaggctctggctgagtcttgggaatatcaggtcgtgagtttgccttgattgtactgagattcacccccttctccmatytggagggttggaggaggtctaaattcatcacccraagcaggagaccccaacctgcccatttcatctggatatacacggggacacagggggrgatacacctctatatgcagtgcctgcatctctgtagaagaaaaaaaaaagagcacacacacaaaaaaaaccccacagtttctatcgagggaaccaaataccctgccacacaccgtgtcactcagcacaacacctcggagccaggagtgtggtccaatggtgaagctggctcctaaatcatatttctcttgcaataaataaacaaa

SEQ ID NO: 56009 - DNA, 599 bp, Chicken  19866894310228_2
  misc_feature (1)..(179): n is any nucleotide
nnnnnnnnnnnnnnnnnnnnnnnnnnnnnnnnnnnnnnnnnnnnnnnnnnnnnnnnnnnnnnnnnnnnnnnnnnnnnnnnnnnnnnnnnnnnnnnnnnnnnnnnnnnnnnnnnnnnnnnnnnnnnnnnnnnnnnnnnnnnnnnnnnnnnnnnnnnnnnnnnnnnnnnnnnnnnnnnnnnccttctgacttattggaaagggtcatccgttactggagaccaacaggctctggctgagtcttgggaatatcaggtcgtgagtttgccttgattgtactgagattcacccccttctccmatytggagggttggaggaggtctaaattcatcacccraagcaggagaccccaacctgcccatttcatctggatatacacggggacacagggggrgatacacctctatatgcagtgcctgcatctctgtagaagaaaaaaaaaagagcacacacacaaaaaaaaccccacagtttctatcgagggaaccaaataccctgccacacaccgtgtcactcagcacaacacctcggagccaggagtgtggtccaatggtgaagctggctcctaaatcatatttctcttgcaataaataaacaaataa

SEQ ID NO: 56010 - DNA, 599 bp, Chicken  19866894310228_3
  misc_feature (1)..(145): n is any nucleotide
nnnnnnnnnnnnnnnnnnnnnnnnnnnnnnnnnnnnnnnnnnnnnnnnnnnnnnnnnnnnnnnnnnnnnnnnnnnnnnnnnnnnnnnnnnnnnnnnnnnnnnnnnnnnnnnnnnnnnnnnnnnnnnnnnnnnnnnnnnnnnnnnnccttctgacttattggaaagggtcatccgttactggagaccaacaggctctggctgagtcttgggaatatcaggtcgtgagtttgccttgattgtactgagattcacccccttctccmatytggagggttggaggaggtctaaattcatcacccraagcaggagaccccaacctgcccatttcatctggatatacacggggacacagggggrgatacacctctatatgcagtgcctgcatctctgtagaagaaaaaaaaaagagcacacacacaaaaaaaaccccacagtttctatcgagggaaccaaataccctgccacacaccgtgtcactcagcacaacacctcggagccaggagtgtggtccaatggtgaagctggctcctaaatcatatttctcttgcaataaataaacaaataaaacagccggggattgtctagagcatgcggctgcc

SEQ ID NO: 56011 - DNA, 599 bp, Chicken  19866894310228_4
  misc_feature (1)..(88): n is any nucleotide
nnnnnnnnnnnnnnnnnnnnnnnnnnnnnnnnnnnnnnnnnnnnnnnnnnnnnnnnnnnnnnnnnnnnnnnnnnnnnnnnnnnnnnnnccttctgacttattggaaagggtcatccgttactggagaccaacaggctctggctgagtcttgggaatatcaggtcgtgagtttgccttgattgtactgagattcacccccttctccmatytggagggttggaggaggtctaaattcatcacccraagcaggagaccccaacctgcccatttcatctggatatacacggggacacagggggrgatacacctctatatgcagtgcctgcatctctgtagaagaaaaaaaaaagagcacacacacaaaaaaaaccccacagtttctatcgagggaaccaaataccctgccacacaccgtgtcactcagcacaacacctcggagccaggagtgtggtccaatggtgaagctggctcctaaatcatatttctcttgcaataaataaacaaataaaacagccggggattgtctagagcatgcggctgccctggtgagtagttgcaataacgtccactgccaagtaatccaagctttacaaccacca

SEQ ID NO: 56012 - DNA, 599 bp, Chicken  19866894310228_5
  misc_feature (1)..(48): n is any nucleotide
nnnnnnnnnnnnnnnnnnnnnnnnnnnnnnnnnnnnnnnnnnnnnnnnccttctgacttattggaaagggtcatccgttactggagaccaacaggctctggctgagtcttgggaatatcaggtcgtgagtttgccttgattgtactgagattcacccccttctccmatytggagggttggaggaggtctaaattcatcacccraagcaggagaccccaacctgcccatttcatctggatatacacggggacacagggggrgatacacctctatatgcagtgcctgcatctctgtagaagraaaaaaaaagagcacacacacaaaaaaaaccccacagtttctatcgagggaaccaaataccctgccacacaccgtgtcactcagcacaacacctcggagccaggagtgtggtccaatggtgaagctggctcctaaatcatatttctcttgcaataaataaacaaataaaacagccggggattgtctagagcatgcggctgccctggtgagtagttgcaataacgtccactgccaagtaatccaagctttacaaccaccaattgtcaagtgcaaagacaatatttgctcttctctcagct

SEQ ID NO: 56013 - DNA, 596 bp, Chicken  19866894310229_1
cagactcaccattgttatctttagaatcctactgctcttcgaaaattacttagtatctgaaattcacttgcacctatataatttaaagcttaatcctctaactcttcttgactattggtgtgaatctttttgattaagtaaatgatatgaccattaatatgaattgtgagcatagtggcattgtcagtgccataactgtgagtagtcctcctgatgataaacatgctcaaggatagatagacaaccatagccatctccacctgaagagttctgcatacaggggtctgtttttaaggtcaractttcctttgagtctttttgaccatttactgaactcttagtacagtgaggagtgttgaaataaatgttttcaggctcatgcactgcagaccccagcrtataactctagggctaatgcttaactgtaatgttttagggttctgctttagctcttcagtggcaaattcatcaatctatttattcagggcagcttaaaaacatcttcaatttcattccctctttctgggaagattttaggccctctgtagtggaaactgcagcatttctttagccagggagactggcatgagcagaat

SEQ ID NO: 56014 - DNA, 498 bp, Chicken  19866894310229_2
taactcttcttgactattggtgtgaatctttttgattaagtaaatgatatgaccattaatatgaattgtgagcatagtggcattgtcagtgccataactgtgagtagtcctcctgatgataaacatgctcaaggatagatagacaaccatagccatctccacctgaagagttctgcatacaggggtctgtttttaaggtcaractttcctttgagtctttttgaccatttactgaactcttagtacagtgaggagtgttgaaataaatgttttcaggctcatgcactgcagaccccagcrtataactctagggctaatgcttaactgtaatgttttagggttctgctttagctcttcagtggcaaattcatcaatctatttattcagggcagcttaaaaacatcttcaatttcattccctctttctgggaagattttaggccctctgtagtggaaactgcagcatttctttagccagggagactggcatgagcagaat

SEQ ID NO: 56015 - DNA, 600 bp, Chicken  19866894310233_1
atggacatctgtttttatgaaagaaactctggagtctccttccttgaagatcttcaaaagccacttggatatggatgtgggcaacctgcactaggtgggtctttttaatcagaagcactggaccagaagtccagacttaaccatgatgtgattttcactgaatcgcagaatcatagaatctcttgagttggaagggaccctcaaaggtcatgtagtccagcttccctgcaatgaacttgtatacctacagctagatcaggttgctcaaagtccagcctgaccttgaatgtctccaggaayggagaatccaccacccctatgggcaaaccgtgccagtgcttcactactacacttcactactacagtgcttcactaaggaaaaaactttttccttatatccaatgtaaatatcccctcttttagtttgaaaccattttcccttgtctaatcacaagagaccctgctaaagtgtctatctgtcccctttcttcttaaagaccccctttagatcctgaaaggctgtgctcggttcaccttgcagccttctcctctccagcctgaacaacccaagctctttcagcctgtcctcatagagagagg

SEQ ID NO: 56016 - DNA, 584 bp, Chicken  19866894310238_1
tgcttgctgcatctgcaatcaatctccatggtttcagtgccatggacagcaatacgaaagctttgttttaaagatcacctaaaccttttgttagttgttgctaagtgagtgaagctggagttatctacacagtgtgcatgactaaaattatgtcagagaacctgattagtctaagttgttgtctcagcacttcaggtttcttggatagccaaattctttacatctttccttggatacagtaaattgctgacacaaaggacaacgcaacttgaatttcattgcacctccaatgaggcacaraacatttcagaacagggaaactgaggctcagtttgcagagtactcaccaaattctgaactgtcagcagtttatcctacaagaaagttctcaatatcttaatcctaaaaacaaaaacaaaaaaacaaaaaaacaacaggtaattggcttttagcagagaaaagactgtacctttaaaaataaactggtttatgtgcattcatctatattacacactcgtgacctggatgtaagggccaacagctaccctctttccagtaagccacagaaaactgtttctgttttc

SEQ ID NO: 56017 - DNA, 599 bp, Chicken  19866894310240_1
  misc_feature (1)..(71): n is any nucleotide
nnnnnnnnnnnnnnnnnnnnnnnnnnnnnnnnnnnnnnnnnnnnnnnnnnnnnnnnnnnnnnnnnnnnnnntttctaacgagatactaagagatggctaagtgagcatgtgaaaaagcaccataaaatggagtagaccaagggaacctgaaaaaggcatttgaggacaacaatgagactgcattttaggaagctcagagaatcagtacatttttatactatcttctgttctcattacagtctgactattttcaccagaacaaattaagtttgggacattttctcttctttttacaatctrtgtgacaagaatgcattataaatttggcattttctatgtctttcaaaataatccttacaagtataaattatattagcattcaaggatgacagtttatcactaaatagatagataacaaatatctgactttaatctcacatttacatagtgagattcacaagtgtcatcagaaaaaaatgggccctttgtgagtttatgcaaatgtcatatcagatgaaagtaaacataaggctaatctacagagttcagatgcaaaacaaaacagagaacctagtgcagaagcagatgaagtgggaata

SEQ ID NO: 56018 - DNA, 600 bp, Chicken  19866894310240_2
ataaattatattagcattcaaggatgacagtttatcactaaatagatagataacaaatatctgactttaatctcacatttacatagtgagattcacaagtgtcatcagaaaaaaatgggccctttgtgagtttatgcaaatgtcatatcagatgaaagtaaacataaggctaatctacagagttcagatgcaaaacaaaacagagaacctagtgcagaagcagatgaagtgggaataaatagtacttacctccctcctatttagtcttttcttctgatctaggccatttattataaattytactctgcatctttctgtcctacatggatgatgatgtattgcattacgacagcctgctcatctcaggatgtcaaaatcatgcccagactttaattcagaagtctcgtaagagtaagctgcagtccactattgtactttgtgcaataatcaacatgcaattggagaagttatgatacattttagaccattttggtaaaccaaacacagtgcagaagctgacctctagctctggctcctacctgctcacaataatttttaggaaattcaactttatattttgatggaaaagagaaataaggg

SEQ ID NO: 56019 - DNA, 599 bp, Chicken  19866894310254_1
  misc_feature (1)..(64): n is any nucleotide
nnnnnnnnnnnnnnnnnnnnnnnnnnnnnnnnnnnnnnnnnnnnnnnnnnnnnnnnnnnnnnnnttggggatggaaattaaaaaataaaatcaccaagtagaacgagaccccattaaatgcaatacaacccagtaaaagataaagagagctctaccagaagtatgagtaacttgtcctgcactccttggcagatcacattctctgttcctctcttccttcccaattactcaatttgttgtactgcaaagtagtacagatgtcattgtgcaagtatattgactgatgggagtactgaaaakacagttttgtagatccttttgcattgaatacatccatatttgatattaggcatttatttaaagatgaagcacttaaaactgccgcatccaaatatgggactgtttctgtacactgccatttgcaactgataaaacattaactacgctgcggtattctcaagaaatgcactcaaaatcacagaatcatagaatggcttgggttggaagggacctcaaggatcaccaagctccaaacccccctgccgcagacagggccaccaacttccacatttagtactagaccaggctgcccagggccc

SEQ ID NO: 56020 - DNA, 600 bp, Chicken  19866894310257_1
cgggggaaaggggacatctatgtctccaagaagtctcagaattgtaggactaagcaggacacaaggaacctttggagatctcttatttaaccacatgctgaaatcagttccaacagctcagagccttatgcattcaggtttttagcatctccaaagataatgattcttcatccattcctaaaatccagtatttgactactctcagacttaaaaaatatttccatgcaaatatgctgtggcttgtgtctgttgattcttgtctttcagtagaatttaacatattttacacagataaatctrctttccccagtcagatgctttcccaagaaggattaaaatctgcagtgttttgaagagaaaagaacaaaacatcatgttaggaacttcctgaggctccttccaaccagaattatcctaagattctgggctctatgaattccagtgctgccattcatagattcatacttattctggttagcagcaatcatgatstgacagaagtcattccatgtggtatactatctgcctaaagtcagcatgtaacatccactttttagcatcctagagaagcaatcctcctgaagtgaatgtttatgtctc

SEQ ID NO: 56021 - DNA, 600 bp, Chicken  19866894310257_2
tgactactctcagacttaaaaaatatttccatgcaaatatgctgtggcttgtgtctgttgattcttgtctttcagtagaatttaacatattttacacagataaatctrctttccccagtcagatgctttcccaagaaggattaaaatctgcagtgttttgaagagaaaagaacaaaacatcatgttaggaacttcctgaggctccttccaaccagaattatcctaagattctgggctctatgaattccagtgctgccattcatagattcatacttattctggttagcagcaatcatgatstgacagaagtcattccatgtggtatactatctgcctaaagtcagcatgtaacatccactttttagcatcctagagaagcaatcctcctgaagtgaatgtttatgtctcctatgcagtaaacctcctatgatgaggcagattggatcccaaactaggcctctacttgcagccaaatctgtttagacatttaatcatgttctgatctcgtctggacccttcacaagttttcagatctttaatgttttttgattatggaattttactttctttacttcaaatatcctttatttaaacagtcaa

SEQ ID NO: 56022 - DNA, 600 bp, Chicken  19866894310263_1
aaaggatgcttaaacccaacacaaacgtgacagaaaattttccttcaggttctcaccattacagaatcacatcccatttgacagcaacacgttacccactgcagatggaacaatcctatccccacactgagccccaggcagtctcagctctcaggtgcagcactgaaccgttatacaagtagattattcctggataaatcataaattaaaccaacagagcatgcaacgtagctgccagataatgctacctgacagccctgagctccttcccagctgagctgaggtgaagtcgggctcccyttcagcatgagctttttgagatgtcaaacagaactgacatcccactccacctgctgacccatcagctccagagagaacaggacagcaccacgaggaatagaggagagctcagggttatatttcttatataaaacrtttggcaaatgttccactgtggggctgcacaatgttaaatgacgtaaataaggctaagctgctctctatcagtaatgggagtctgtcttttttctgcatttctaaggtaatgactgtattagagcactaacacccgtgctctagtagtacagtaaggatggaagc

SEQ ID NO: 56023 - DNA, 600 bp, Chicken  19866894310263_2
aggcagtctcagctctcaggtgcagcactgaaccgttatacaagtagattattcctggataaatcataaattaaaccaacagagcatgcaacgtagctgccagataatgctacctgacagccctgagctccttcccagctgagctgaggtgaagtcgggctcccyttcagcatgagctttttgagatgtcaaacagaactgacatcccactccacctgctgacccatcagctccagagagaacaggacagcaccacgaggaatagaggagagctcagggttatatttcttatataaaacrtttggcaaatgttccactgtggggctgcacaatgttaaatgacgtaaataaggctaagctgctctctatcagtaatgggagtctgtcttttttctgcatttctaaggtaatgactgtattagagcactaacacccgtgctctagtagtacagtaaggatggaagcctatttctacggaaatcagtgggtaaagcccttgtgaggataccagcgagaccagatgtcacttttaaagcccaaactgctcattacaaagttttgcagacagtgatgctttgctctgtactgagattctttgtg

SEQ ID NO: 56024 - DNA, 599 bp, Chicken  19866894310265_1
  misc_feature (1)..(207): n is any nucleotide
nnnnnnnnnnnnnnnnnnnnnnnnnnnnnnnnnnnnnnnnnnnnnnnnnnnnnnnnnnnnnnnnnnnnnnnnnnnnnnnnnnnnnnnnnnnnnnnnnnnnnnnnnnnnnnnnnnnnnnnnnnnnnnnnnnnnnnnnnnnnnnnnnnnnnnnnnnnnnnnnnnnnnnnnnnnnnnnnnnnnnnnnnnnnnnnnnnnnnnnnnnnnnnnacctactgaggaccttttagctaaacgcaacgttctaactcttgctgaacatacaaacgttacagaagaggaatcacccgcttctcacagatytggaaaaatagttgcagagttctctacttctggcaatcaagaaagctctgtaaataaagcatttccttttcagcaaaatctaaaagaagaaaggaactattcatcttctggagtttgtagcacatcagcaaccgggccttctgttttcagttctagcaaagcctgggccagccctgattctgttccaggagaaagagttcaggatctgacgcaaaatcagagctttaaaatgaccccacaaaaaagaagcaaatctgtgcaaacctccactgaacctattgcaacatccagaatcttat

SEQ ID NO: 56025 - DNA, 600 bp, Chicken  19866894310265_2
caggatctgacgcaaaatcagagctttaaaatgaccccacaaaaaagaagcaaatctgtgcaaacctccactgaacctattgcaacatccagaatcttatttcctaatcggaggtgttcctctggcatttccagcccagctgatgtggtgccaaaggacaggaacttcagcacagattttttaaaaaataatttaggaaaagtgattgaaacaaatgaaaaaaacattaaatctattgatgacattgaccaaggatcatctttacttcaggacataccaaatgcctcagctctgtgcaaygttaagaaacagaacaacaaagatgaagaaaaggctcatgtggttgaaactatgtcattggtgtctgacacagagctgggttttggcactcctacacagcacaactcccagaaaaacaacatttatgacagaaaaagagcaaaactggtcagaagtatcttaaagaaagaggctaaagctgtggttatgaaccacgggatcatttttggaactcggcctgtgtcttctatcaaagacagtttagaacttgcaaaaagcaaaaagaaaagtgcagaaaatacgaaaaacagtagaaagcta

SEQ ID NO: 56026 - DNA, 600 bp, Chicken  19866894310268_1
agagctcaagggtttgctgggcctgccagaagaggagacggagcttgacgtgagtatgatggtccactgttcttagatggtgtacccatctgcaacagatgacattttttacttgtttgcttggttcaggttcttaatttcttgtccatgaagatggtctgaggtgtcttctgctggtagaaaaatacagatcatctaattctgccatgatagggtatcttcatgctttttcccagagtcagtgctccaataatcccactattccagtagtcttttcacagagggattgcaggccttgcwaagagttgtctcttgccaactaggtcacsggtgatttcccatgctgctccccattgccaaataacagtgaatgcagcactgtttcctacagttaggtaggggagagtggcaaagcagtttgcatggtattcacaggatcgttgagtttgaaaaggaactctcaggatcatttggtcctacccctctgttcaagcagagtcagctagaacaagttgcccaagacggttcctagttaagtttttagcatctccacaaaaacactcaacagcatttctagataatctgttccagcatcaaaac

SEQ ID NO: 56027 - DNA, 600 bp, Chicken  19866894310268_2
aagaggagacggagcttgacgtgagtatgatggtccactgttcttagatggtgtacccatctgcaacagatgacattttttacttgtttgcttggttcaggttcttaatttcttgtccatgaagatggtctgaggtgtcttctgctggtagaaaaatacagatcatctaattctgccatgatagggtatcttcatgctttttcccagagtcagtgctccaataatcccactattccagtagtcttttcacagagggattgcaggccttgcwaagagttgtctcttgccaactaggtcacsggtgatttcccatgctgctccccattgccaaataacagtgaatgcagcactgtttcctacagttaggtaggggagagtggcaaagcagtttgcatggtattcacaggatcgttgagtttgaaaaggaactctcaggatcatttggtcctacccctctgttcaagcagagtcagctagaacaagttgcccaagacggttcctagttaagtttttagcatctccacaaaaacactcaacagcatttctagataatctgttccagcatcaaaacactttttcttcctaggggtctagagatga

SEQ ID NO: 56028 - DNA, 600 bp, Chicken  19866894310277_1
agctatgcaaaactgaattttgtgtatcttctttccaacaaggctattaattgctactgattttaaaacaatttctatagcattacaagaatactcagaaggaacactaagaagccttcatcaagaccagatctcctactttttttttttttaaatgcagttaattaagtacctcaaatttgaattatagtccaaattttcatagttcctcagctgtgacatacactgggcaaggtgtgaagaaacaagtaattgtccttagtgcttattcatgactgggacgttttaagctatggtacrtgtcatacattgcacattttcattatattggattttttatttatttttattttaagaatcaattcagtagccacatgactraacaaaaaatagataaattaaaacccacacatcttttctatgaggtcccatgtatgaagagtaacctaatataacgtgcccaatcacaccctctgctaaagagttatcaatatacaagaaattcacagagtcacaggatggcctgggttgaaaagcactgcaatgatcattcagtttcaacccccttgctatgtgcagggtctccaaccccagaccagg

SEQ ID NO: 56029 - DNA, 566 bp, Chicken  19866894310277_2
attacaagaatactcagaaggaacactaagaagccttcatcaagaccagatctcctactttttttttttttaaatgcagttaattaagtacctcaaatttgaattatagtccaaattttcatagttcctcagctgtgacatacactgggcaaggtgtgaagaaacaagtaattgtccttagtgcttattcatgactgggacgttttaagctatggtacrtgtcatacattgcacattttcattatattggattttttatttatttttattttaagaatcaattcagtagccacatgactraacaaaaaatagataaattaaaacccacacatcttttctatgaggtcccatgtatgaagagtaacctaatataacgtgcccaatcacaccctctgctaaagagttatcaatatacaagaaattcacagagtcacaggatggcctgggttgaaaagcactgcaatgatcattcagtttcaacccccttgctatgtgcagggtctccaaccccagaccaggcagcccagagccacatccagcctgggcattccacttcttttacaaca

SEQ ID NO: 56030 - DNA, 600 bp, Chicken  19866894310289_1
ccttccaactgtgtggtttagcttctgcccagaagtcatgtttgtaccgtgtgatatgaaggctcctacaattggattgtttgcctaatgctgtggtgcggtttgagctaggggctgggtgtgagcatccaaatcctctgttctgttatagagggctcctctacaaagggttatgcaggtgcaacttttctaatgtgtttacgtgtaaaactcttgatgaagtgtattatatttaagactcggtattagtaggagactttatattatggaaatgctgtaaaggagtaagtgacccagtamatcttgttagtagtactaggaaacagtttgatggtaatattctctacttgctgaacttttaacttttgcatctattaaaaggcttaaatgattattcatcatggactgaaaggagtccttgtacatcagtcattaccacccacatagaagacagcaattttattgtgaatacgcaaagaaagctagcaattcagaggagaaacttgagagacgttgtaatacatgcatataacagtgagctttgtttataattgacacaataaatggttcaatatctgagtaaaacctttgggggaaaat

SEQ ID NO: 56031 - DNA, 600 bp, Chicken  19866894310291_1
aaaacaaaaagaaaaatttcaaatgtagaaatgtatacagctgtgaatgacttttttttctttgtatgcaaatttggacttcatgagaaagaggatgtttgcttgttttggtaacctggatgattgaagtctatggtaatttggcctgtctagtgttgtacccttcttccctaccaagaaaactgtgatgactggaatgcatgttgtcaacttctgtaatcagggtactttaaatatttacagtgctgtgattaccagataacttcttacatacacatacttcagtattttctgcctttsaagtttacttcctggtktgtctcctactgtagttttttttttcccttgcatttaacctaacattgttggcaaaatgaataaaaaaaaaaccttcgtgacctcccagctgatggttcattgtgtaaataacaggattttttctttttgatctacgggggcaactgtgccaagtctgaagcttttttgtagatgaaactcttcaccttaagtgtctgctgaaggtgccagattatgtacaaggaagtctctgctgagagattcaaacctaataatactagtaataatccagtaaatggggtt

SEQ ID NO: 56032 - DNA, 600 bp, Chicken  19866894310291_2
ttcaaatgtagaaatgtatacagctgtgaatgacttttttttctttgtatgcaaatttggacttcatgagaaagaggatgtttgcttgttttggtaacctggatgattgaagtctatggtaatttggcctgtctagtgttgtacccttcttccctaccaagaaaactgtgatgactggaatgcatgttgtcaacttctgtaatcagggtactttaaatatttacagtgctgtgattaccagataacttcttacatacacatacttcagtattttctgcctttsaagtttacttcctggtktgtctcctactgtagttttttttttcccttgcatttaacctaacattgttggcaaaatgaataaaaaaaaaaccttcgtgacctcccagctgatggttcattgtgtaaataacaggattttttctttttgatctacgggggcaactgtgccaagtctgaagcttttttgtagatgaaactcttcaccttaagtgtctgctgaaggtgccagattatgtacaaggaagtctctgctgagagattcaaacctaataatactagtaataatccagtaaatggggttgagcagcaggaggacaa

SEQ ID NO: 56033 - DNA, 572 bp, Chicken  19866894310299_1
acctgtccgtatgccgtgaataccccctagtcgtatctttccaattacatttacgactacttcctcttaaatcccctattgtgctatatctgtcctaaagtgagagtgtaggctgtcacctgtttccacccatcatcaccgagactgctcctgctgagtactatctctgctcgtcttttcctgtcgatcttggaagtcatcacctttcttcaaactagtgggctgtgaagttaatgatggcaggaataaatcactttggtgcagagcactttggtggcagtttgtcaatgcagggtcatmaacaagtgctatttctgagtggagcgcaggctatagctgcaatatgagagaatctgaataagtggcaggcttggatttttarcattatttcctaaggaaataaggcttgtgtgatcttttagtgcatgtctggctgaccacaaagcacttgaacttgtaggtcaatttcaactaaatctgacagaagggtagaagatctcacagatagtaattgtgtcctgaaaattttgtgagaagtggctgaatagagcttagtaaatggggacatgtca

SEQ ID NO: 56034 - DNA, 490 bp, Chicken  19866894310299_2
acctgtccgtatgccgtgaataccccctagtcgtatctttccaattacatttacgactacttcctcttaaatcccctattgtgctatatctgtcctaaagtgagagtgtaggctgtcacctgtttccacccatcatcaccgagactgctcctgctgagtactatctctgctcgtcttttcctgtcgatcttggaagtcatcacctttcttcaaactagtgggctgtgaagttaatgatggcaggaataaatcactttggtgcagagcactttggtggcagtttgtcaatgcagggtcatrcattatttcctaaggaaataaggcttgtgtgatcttttagtgcatgtctggctgaccacaaagcacttgaacttgtaggtcaatttcaactaaatctgacagaagggtagaagatctcacagatagtaattgtgtcctgaaaattttgtgagaagtggctgaatagagcttagtaaatggggacatgtca

SEQ ID NO: 56035 - DNA, 599 bp, Chicken  19866894310301_1
  misc_feature (1)..(142): n is any nucleotide
nnnnnnnnnnnnnnnnnnnnnnnnnnnnnnnnnnnnnnnnnnnnnnnnnnnnnnnnnnnnnnnnnnnnnnnnnnnnnnnnnnnnnnnnnnnnnnnnnnnnnnnnnnnnnnnnnnnnnnnnnnnnnnnnnnnnnnnnnnnnnncagtgtcacagggatagcctcctgctgcctgcattcccccccaatttgtcaaaatacagccatggtgctgaaatgcaggcatcaatttgtggcttccactaccttcagtggtttctgcctgtgcactgcacaccagattttgtctcagtgtgcttgaytgattagtgtgggtgtaactatgccaggaaaatagatggtccctctcttatttcaattcttactttgttacctaagattaggaaaccagtcataattaaaattagaaaatcamagctgctaaatagaatgctaaaaaacagtaacaagtaacagccactacatacatatatatctcattcattcatgacctgttgtagctacctacttcaaaaagtgcagtatgaaggccataacctcagttaccatgctaagcaccaccctgtcagggacctgactgcatcctccttcctgagatttg

SEQ ID NO: 56036 - DNA, 599 bp, Chicken  19866894310301_2
  misc_feature (1)..(29): n is any nucleotide
nnnnnnnnnnnnnnnnnnnnnnnnnnnnncagtgtcacagggatagcctcctgctgcctgcattcccccccaatttgtcaaaatacagccatggtgctgaaatgcaggcatcaatttgtggcttccactaccttcagtggtttctgcctgtgcactgcacaccagattttgtctcagtgtgcttgaytgattagtgtgggtgtaactatgccaggaaaatagatggtccctctcttatttcaattcttactttgttacctaagattaggaaaccagtcataattaaaattagaaaatcamagctgctaaatagaatgctaaaaaacagtaacaagtaacagccactacatacatatatatctcattcattcatgacctgttgtagctacctacttcaaaaagtgcagtatgaaggccataacctcagttaccatgctaagcaccaccctgtcagggacctgactgcatcctccttcctgagatttgtctgctggggcttgggaggactaactcagagcccacactgtgaagggacacccttcttgctggggactatggggaagtgctccagacagtgctgtggggtagatgcagccagg

SEQ ID NO: 56037 - DNA, 599 bp, Chicken  19866894310310_1
  misc_feature (1)..(21): n is any nucleotide
nnnnnnnnnnnnnnnnnnnnntaaatacttgggaagaagcaagaagagttgacgtgcgcttcatttgaatttatgttggagaagtcacagacagtgacagaaaatataaaattgtcagaaagcaataaattcctgtaagactcatggtgataacacaagtgtatagagaactggaaaatgcaccaagctcagctacttaattttgttggcaaatgttctgctggcagctgctagctgctggcatgtttgtccccttcactttaaccaagcagaaagccagtgcctgtttaactccactaygatgagaccataagtacttgcagtgtctttacagcacttgcctttaaccagtcatgcttttccaaaacgctcagattttctgcttgaagtttcctgtttttcaccaagctgttgttttttacaagtttctattacttgttctttacatctaatttgaagtctctctgaagaatgacatatctacctctataacgaatgggaaccaaaccacagaaaaaaagcaataaacacccaacactgggacagtaaacttgcaaaggagaaaacctttttttgtacaccagaaactctcagccctt

SEQ ID NO: 56038 - DNA, 600 bp, Chicken  19866894310310_2
ttttacaagtttctattacttgttctttacatctaatttgaagtctctctgaagaatgacatatctacctctataacgaatgggaaccaaaccacagaaaaaaagcaataaacacccaacactgggacagtaaacttgcaaaggagaaaacctttttttgtacaccagaaactctcagcccttggtttggggaaggaagcatcgactgaagagctaagcaccagttgcctgttatatccaaagcaaatcaattaagcctgctcaaatctggaaacccattccttggcaccaacagtcacrgaatgcactcattataacwcccaatcttctcaagaaataacaaagacagctgactcatggtatygggaattgagggggataaaaagcctctgacggagcataaaacaaagatggatgaaaaatatatttctatgatctgcagtttttacaacatttcataatctctcgaaattcaaagcttttgattcgagtgagaaaaaaaaatagactttctgtttttcttctgaggaaacacatttcaacacaaacagatgtgctggtgttcattaaatgagccttgcacaagaccaaccccagcaa

SEQ ID NO: 56039 - DNA, 600 bp, Chicken  19866894310310_3
ttgttctttacatctaatttgaagtctctctgaagaatgacatatctacctctataacgaatgggaaccaaaccacagaaaaaaagcaataaacacccaacactgggacagtaaacttgcaaaggagaaaacctttttttgtacaccagaaactctcagcccttggtttggggaaggaagcatcgactgaagagctaagcaccagttgcctgttatatccaaagcaaatcaattaagcctgctcaaatctggaaacccattccttggcaccaacagtcacrgaatgcactcattataacwcccaatcttctcaagaaataacaaagacagctgactcatggtatygggaattgagggggataaaaagcctctgacggagcataaaacaaagatggatgaaaaatatatttctatgatctgcagtttttacaacatttcataatctctcgaaattcaaagcttttgattcgagtgagaaaaaaaaatagactttctgtttttcttctgaggaaacacatttcaacacaaacagatgtgctggtgttcattaaatgagccttgcacaagaccaaccccagcaaacccaatggcaatgttaca

SEQ ID NO: 56040 - DNA, 600 bp, Chicken  19866894310310_4
ctacctctataacgaatgggaaccaaaccacagaaaaaaagcaataaacacccaacactgggacagtaaacttgcaaaggagaaaacctttttttgtacaccagaaactctcagcccttggtttggggaaggaagcatcgactgaagagctaagcaccagttgcctgttatatccaaagcaaatcaattaagcctgctcaaatctggaaacccattccttggcaccaacagtcacrgaatgcactcattataacwcccaatcttctcaagaaataacaaagacagctgactcatggtatygggaattgagggggataaaaagcctctgacggagcataaaacaaagatggatgaaaaatatatttctatgatctgcagtttttacaacatttcataatctctcgaaattcaaagcttttgattcgagtgagaaaaaaaaatagactttctgtttttcttctgaggaaacacatttcaacacaaacagatgtgctggtgttcattaaatgagccttgcacaagaccaaccccagcaaacccaatggcaatgttacatcttcattctctttcagatctgaggtctttgaggatatccagata

SEQ ID NO: 56041 - DNA, 600 bp, Chicken  19866894310311_1
atttgtctttggcaaatttgctttggagactttgagagatgctaatgtactcagcttcagtcttcagcttaagtctagatgggagaatgaaaaccatgcgagactgacgttaacctgttctacaaagtgaattgtgatctgttggatcatggcaccagaacttcagtatgctgtatataacatgcactgtacaggccttataaatagcaaatgcatgttatcatgctgactgctgatcattcagagggaatatgacagtggatggatacagaattcaaatctattttttttctttctgtwtgtcttattttaccttccattaaaatcagacttttagataactcaaatttaaagtagaaagaatcaacacaagctgaggctcgaggaacaatctatccctttctaagaagtgtgtatatatcaagccaagacagaatgacagctaattctcccaaagccatgtggaggtatgtacaggttacacctgaagcatggaggtctgctttgctgactgctacactgccccatcagggttaagaatgagaattcttgtcccagatatacttttcctcctaccttcaatactcctcatggaaaaat

SEQ ID NO: 56042 - DNA, 599 bp, Chicken  19866894310312_1
  misc_feature (1)..(9): n is any nucleotide
nnnnnnnnntcctcatctgaaaactttccttccttgcactgtaaagcaggtgtggaaatgagtgaatttatccccagtaaaatgtccttaacaaccaaaaccttcaaatctggagagctaaaatctgtgtatgcataactcaaattagtcacagtaaaatcaacacagaaaacatgaactgacatcattgtttcacccttacatcagtctcaagatatgacaaggtactgaattattttcatatcagaaaagtctaagtcatcttcaggtggcatagaatagcacttgttgtactattarrgcatccaataaatgcaaggcatctaaggggtgtgcagacctgaaaactagagcagattttgccagaacagcggggacatctatcaccatgctgtttgagcatccaccataaacctagaaaagcactcagccaactcaggacactaaatgaactcatcaggccccaaaacacgttatttacacgtacaattgctgcttgtgtcaacaggcaccccattccaggataatgctgtacaaaatctgaattttctcctaaatttgggtgaaacatgcactgtttcagccttcccttttaatcc

SEQ ID NO: 56043 - DNA, 599 bp, Chicken  19866894310312_2
  misc_feature (1)..(8): n is any nucleotide
nnnnnnnntcctcatctgaaaactttccttccttgcactgtaaagcaggtgtggaaatgagtgaatttatccccagtaaaatgtccttaacaaccaaaaccttcaaatctggagagctaaaatctgtgtatgcataactcaaattagtcacagtaaaatcaacacagaaaacatgaactgacatcattgtttcacccttacatcagtctcaagatatgacaaggtactgaattattttcatatcagaaaagtctaagtcatcttcaggtggcatagaatagcacttgttgtactattarrgcatccaataaatgcaaggcatctaaggggtgtgcagacctgaaaactagagcagattttgccagaacagcggggacatctatcaccatgctgtttgagcatccaccataaacctagaaaagcactcagccaactcaggacactaaatgaactcatcaggccccaaaacacgttatttacacgtacaattgctgcttgtgtcaacaggcaccccattccaggataatgctgtacaaaatctgaattttctcctaaatttgggtgaaacatgcactgtttcagccttcccttttaatcct

SEQ ID NO: 56044 - DNA, 599 bp, Chicken  19866894310313_1
  misc_feature (1)..(45): n is any nucleotide
nnnnnnnnnnnnnnnnnnnnnnnnnnnnnnnnnnnnnnnnnnnnnactgaataactcctgtttccaaattgaagactacgggaaaaacaaaaaggaagtgttgtgttacagtgtatacacacatctgaagcttaagtagtttaagcaattccaatccttccactcacatgaagaaggatgtaacataaatggagaagaaaaaaaagaaggtaatggtggattaaaaggacaagctggcttacaaggagcaatacgacaaaacctggaaaagcagcaatccagaggagatatgatagagayctataagatcataagtgacatggaaggtgtgaatcagagctgactgtttactgcctcttctaaacacagggccgggggcacccgatgcggcaggcagatggcaggttcagaacaaacgcgaggaagcagctctccactcaactaggaaaggaaactcaggaactcttcatcaggggatgttgtggctgctgaaactttatatggattcaggggatgactgaacaagctgagagatgagaaatcctttgagggttgataagcaaacagaaaccacctctggcacaggaagtccctgaaaa

SEQ ID NO: 56045 - DNA, 600 bp, Chicken  19866894310313_2
cataagtgacatggaaggtgtgaatcagagctgactgtttactgcctcttctaaacacagggccgggggcacccgatgcggcaggcagatggcaggttcagaacaaacgcgaggaagcagctctccactcaactaggaaaggaaactcaggaactcttcatcaggggatgttgtggctgctgaaactttatatggattcaggggatgactgaacaagctgagagatgagaaatcctttgagggttgataagcaaacagaaaccacctctggcacaggaagtccctgaaaaataaactatmagagttcgggaaggcaacatggggagatttcaatctgctgctaggaaattgagcaaggtggagctcaggtctgatctagtattgctgtatttatgtgccacaacagaaaattaaaaaataaaaataataattgtaaagaccccagtttcaaatacttcagagtctggagatctccaacctccaaaatgtggtgggtagggctcaccacgtgcccaggtggtgtcagcccaacaacgggagagggtagtcatgttccttttctcacacagctcacagtgggggcatatcagacaaccactg

SEQ ID NO: 56046 - DNA, 600 bp, Chicken  19866894310319_1
gttccatcaggcctgagccttactccacaagaagggagggagcaaagctgcgaggttaggagagggaatgagtcctgttcagccttaccttccagcctccttcaggctgtggggagctgggagctggaccctctggggcatagaggaagggctcagcagggagggggctgaatgccccattgctctggggttgcagcagtgctcagcatgtggctttggtctgcgttttataccctgagtgtgggttgggcttgggataatactgaagaggataccagaagttgagagtgctgaggacaraactgggcaccttcctgaaagaaagaaactgtgtttgggtggtggggtgtccttgtcktgrgtgggtgagggctggaagatgatcaagggatgtcattaggagacatggagctcttggaatgagtccagaggagggccactaagatggtcagagggctgcagcacctctcctatgaggaaaggttgagggaattgggcttgtttagcttggagaagagaaggctgtggggagacctcattgtggccttccagtacttgaagagagtgtataaacaggagggggaacggctgtttacgagg

SEQ ID NO: 56047 - DNA, 600 bp, Chicken  19866894310319_2
ggagagggaatgagtcctgttcagccttaccttccagcctccttcaggctgtggggagctgggagctggaccctctggggcatagaggaagggctcagcagggagggggctgaatgccccattgctctggggttgcagcagtgctcagcatgtggctttggtctgcgttttataccctgagtgtgggttgggcttgggataatactgaagaggataccagaagttgagagtgctgaggacaraactgggcaccttcctgaaagaaagaaactgtgtttgggtggtggggtgtccttgtcktgrgtgggtgagggctggaagatgatcaagggatgtcattaggagacatggagctcttggaatgagtccagaggagggccactaagatggtcagagggctgcagcacctctcctatgaggaaaggttgagggaattgggcttgtttagcttggagaagagaaggctgtggggagacctcattgtggccttccagtacttgaagagagtgtataaacaggagggggaacggctgtttacgagggtggatggtgataggacaagggggaatggttttaaastgagacaggggaggtttaggt

SEQ ID NO: 56048 - DNA, 600 bp, Chicken  19866894310319_3
gagggaatgagtcctgttcagccttaccttccagcctccttcaggctgtggggagctgggagctggaccctctggggcatagaggaagggctcagcagggagggggctgaatgccccattgctctggggttgcagcagtgctcagcatgtggctttggtctgcgttttataccctgagtgtgggttgggcttgggataatactgaagaggataccagaagttgagagtgctgaggacaraactgggcaccttcctgaaagaaagaaactgtgtttgggtggtggggtgtccttgtcktgrgtgggtgagggctggaagatgatcaagggatgtcattaggagacatggagctcttggaatgagtccagaggagggccactaagatggtcagagggctgcagcacctctcctatgaggaaaggttgagggaattgggcttgtttagcttggagaagagaaggctgtggggagacctcattgtggccttccagtacttgaagagagtgtataaacaggagggggaacggctgtttacgagggtggatggtgataggacaagggggaatggttttaaastgagacaggggaggtttaggttgg

SEQ ID NO: 56049 - DNA, 600 bp, Chicken  19866894310319_4
ggtggtggggtgtccttgtcktgrgtgggtgagggctggaagatgatcaagggatgtcattaggagacatggagctcttggaatgagtccagaggagggccactaagatggtcagagggctgcagcacctctcctatgaggaaaggttgagggaattgggcttgtttagcttggagaagagaaggctgtggggagacctcattgtggccttccagtacttgaagagagtgtataaacaggagggggaacggctgtttacgagggtggatggtgataggacaagggggaatggttttaaastgagacaggggaggtttaggttggatatgagaaggaagttttttgcccagagmgtggtgacgcactgaacaggttgcccaaggaggctgtggatgccccatccctgcaggcattcaaggccaggctggatgtggctctgggcagcctgggctgctggttggtgaccctgcacatagcagggggttggaactggatgagcactgtgggccttttcacctgcatgccctgttctcacccacagccctggctgatgctgatggcaggctgggcagtgtgggcagggtgggtgttgtttgcctt

SEQ ID NO: 56050 - DNA, 600 bp, Chicken  19866894310319_5
atgtcattaggagacatggagctcttggaatgagtccagaggagggccactaagatggtcagagggctgcagcacctctcctatgaggaaaggttgagggaattgggcttgtttagcttggagaagagaaggctgtggggagacctcattgtggccttccagtacttgaagagagtgtataaacaggagggggaacggctgtttacgagggtggatggtgataggacaagggggaatggttttaaastgagacaggggaggtttaggttggatatgagaaggaagttttttgcccagagmgtggtgacgcactgaacaggttgcccaaggaggctgtggatgccccatccctgcaggcattcaaggccaggctggatgtggctctgggcagcctgggctgctggttggtgaccctgcacatagcagggggttggaactggatgagcactgtgggccttttcacctgcatgccctgttctcacccacagccctggctgatgctgatggcaggctgggcagtgtgggcagggtgggtgttgtttgcctttacatgggggcacaggcacagctcagtggggttatgagggccaattttccacc

SEQ ID NO: 56051 - DNA, 600 bp, Chicken  19866894310322_1
ctgcagcagttctttggggaagggtttaaggatttaccagaaacagcttggagaggaggcctctgggtgaatattggtttgctgcagatccaagcgtggcttccacagactcgatttgatccggctgttaagagagaatacaagctcaagtatgccaaagaagaggtgggtgtagagttggcttttttacctctctaatgtgtaaaatctacacaaaggagtttggcttgggtgttcttgggcaaattcttggtcacggttttcaaactgtgtgattttaatgtgttttattgtccaaartgatgctgtacctactttgttgccaagacccaaacctcagagaatcatttattcttgccttttagttacaccagctggagtgtgaatggagaacaaatgatttgtcatcccaactgcgtacaggaaaaagtcttgaagacaaagcactctccaactacattcatccccatctccggtaacttcttgggcactcagctcttctcttttaggctggaaacattgtctctgaatgctgaggctcagttttctttatggtgtttgtgttcttctgtagaaagtaggcttattgattagaaagta

SEQ ID NO: 56052 - DNA, 600 bp, Chicken  19866894310322_2
aagtcttgaagacaaagcactctccaactacattcatccccatctccggtaacttcttgggcactcagctcttctcttttaggctggaaacattgtctctgaatgctgaggctcagttttctttatggtgtttgtgttcttctgtagaaagtaggcttattgattagaaagtagcaattggcgtattgacatgataatttaaaatacagaagctgttctgcttactagcagaaattaaggagtagtctgtatgcatttcatactgtcataaacacagcaattaaagtagtaacccttaartcttgagaaaatcgaagctgtacccagaagtgaaagtagtcacacatcaaattatagtagttttgctaaactgtgatagtattattgacattttgaaatgaggtggtttccctatcactgtaactccaaaaagcttcaagatataccagtgctgctttgcagaattcttcgactaatctttgctaagtagaaaactccagatgctgttttgctgtcagcctttgcctgtgctgctgtggttaatatcttaccacatgcaatacatggtggaaatttagaatttgtagccattgttctttg

SEQ ID NO: 56053 - DNA, 600 bp, Chicken  19866894310329_1
ttattatttatctgccatcctgttagaagggaaatagttaaccacaactctacatatgctgttgaatttaggagacaattacactgtgtgagtaaaggagattgactgttcaaatcaatgttttgtcttcccagacttaccagatgactctcttgtgccatagacatagatagtgtactaatattcaggtaattttgtctttagacaaaaggctgctgtttgccttccaccctcacagcccatattccctcgcttaggaagggagttgccatttgcagtgctttttccttttgtgtcttygtgtgccccttctgaggctaaacaaagtaaatrtttcttgtatctttaatatcatttctgagtgggtcagaaacacagatgtacctttctaggatggctagggagcagagtcttgtgcttctgtctttgtttatcctgatggaatatccttttgaatgttttaattaaagcttaaatctgttcttttgcacttcatcctgcacagctgtggagagaatttcggtgcgctctgttgattttagcaagatattctcttgactttgagtaggtaaggcaaaaatttgagaatggcagggattg

SEQ ID NO: 56054 - DNA, 600 bp, Chicken  19866894310329_2
atagttaaccacaactctacatatgctgttgaatttaggagacaattacactgtgtgagtaaaggagattgactgttcaaatcaatgttttgtcttcccagacttaccagatgactctcttgtgccatagacatagatagtgtactaatattcaggtaattttgtctttagacaaaaggctgctgtttgccttccaccctcacagcccatattccctcgcttaggaagggagttgccatttgcagtgctttttccttttgtgtcttygtgtgccccttctgaggctaaacaaagtaaatrtttcttgtatctttaatatcatttctgagtgggtcagaaacacagatgtacctttctaggatggctagggagcagagtcttgtgcttctgtctttgtttatcctgatggaatatccttttgaatgttttaattaaagcttaaatctgttcttttgcacttcatcctgcacagctgtggagagaatttcggtgcgctctgttgattttagcaagatattctcttgactttgagtaggtaaggcaaaaatttgagaatggcagggattgacagtgcacctgctaaaacagactgctttttat

SEQ ID NO: 56055 - DNA, 599 bp, Chicken  19866894310341_1
  misc_feature (1)..(41): n is any nucleotide
nnnnnnnnnnnnnnnnnnnnnnnnnnnnnnnnnnnnnnnnntttggatttgctctgtttttcgcttgaccctgtagcgttgtgatctgatttttaaaggcatgattccaactgaaaacaaaagaaatgctttcctttttattttggaagtgtcttatacacataccataagaaacaggaaataactgtttaattacatagcattaaacatgaaaacaaagtgcattaaattcatacatcattcagagtagaaatattaaataaggaagaattatctttccccacctctcattaccacagrtatcaatcctgatactgtatagctaatgttcccttccttctcctccttccaccttgcttaccaaaactcaatcctgcgtgacamgattcctgctaactgacagaggtagaatactcatctgtggaactctcttaatctaatccacagtgagttctcatgttccactccaacgcagctctcattttaaaggaaatagggcaatcatttcataggaaacaaatgatttttctgtaagcactggggtttcctgctcatcagcacacattacacacacacrgatttattgatgtgtacttaca

SEQ ID NO: 56056 - DNA, 600 bp, Chicken  19866894310341_2
tctgatttttaaaggcatgattccaactgaaaacaaaagaaatgctttcctttttattttggaagtgtcttatacacataccataagaaacaggaaataactgtttaattacatagcattaaacatgaaaacaaagtgcattaaattcatacatcattcagagtagaaatattaaataaggaagaattatctttccccacctctcattaccacagrtatcaatcctgatactgtatagctaatgttcccttccttctcctccttccaccttgcttaccaaaactcaatcctgcgtgacamgattcctgctaactgacagaggtagaatactcatctgtggaactctcttaatctaatccacagtgagttctcatgttccactccaacgcagctctcattttaaaggaaatagggcaatcatttcataggaaacaaatgatttttctgtaagcactggggtttcctgctcatcagcacacattacacacacacrgatttattgatgtgtacttacaggtcctgctccacttttttatctaaagcatactccaaatcggtcacgagcattttctgatataagtcctgtagagcttgtctgga

SEQ ID NO: 56057 - DNA, 600 bp, Chicken  19866894310341_3
tccccacctctcattaccacagrtatcaatcctgatactgtatagctaatgttcccttccttctcctccttccaccttgcttaccaaaactcaatcctgcgtgacamgattcctgctaactgacagaggtagaatactcatctgtggaactctcttaatctaatccacagtgagttctcatgttccactccaacgcagctctcattttaaaggaaatagggcaatcatttcataggaaacaaatgatttttctgtaagcactggggtttcctgctcatcagcacacattacacacacacrgatttattgatgtgtacttacaggtcctgctccacttttttatctaaagcatactccaaatcggtcacgagcattttctgatataagtcctgtagagcttgtctggatgtccagacttctgctggacccagctttgaatctgagcaacaaaaagcaaaaatagaccatagtttttaaatactcaaattgcattgattattcactgtcctactaaatgaaaaaatacagcagtgtaagatgccaaacacccacttttctcacagattcattagaactttgaaatacaaaagctacagagag

SEQ ID NO: 56058 - DNA, 600 bp, Chicken  19866894310341_4
acttttctcacagattcattagaactttgaaatacaaaagctacagagagactggggattaactgatcctataataaaataactagaaattagcaaagtcagcagcaggaaagctggagaaacagacagaggcaactctccacaagcagaacttcttgtcgcagggtgaattctaaaaatccagaggaagttgaaaaacttagaaaagaaatccatcaagtgcaagtaagtaggagagtccatgagctaatgctgtttaggagaacaccgcagggaagtatggctgcgtgcttgcacttyctaaacactttgctgccatctgctctacatcattagagggtgagtgcaaacacagtcccctgctatcacaaattacacagtacagttgcccaagccttgtaaaataacccgggttcggtctgctggwgcacacaaggcacgcagtgccccagggaagccattctgctgatgggcagctgcttctgctgggctagatggatccaggcagtgaggatgttcctacagggaccccaccaacctgctgcatgtgctacaccaagacactcattttggctgagcatgggtttgttatgcaagcat

SEQ ID NO: 56059 - DNA, 600 bp, Chicken  19866894310341_5
agaggcaactctccacaagcagaacttcttgtcgcagggtgaattctaaaaatccagaggaagttgaaaaacttagaaaagaaatccatcaagtgcaagtaagtaggagagtccatgagctaatgctgtttaggagaacaccgcagggaagtatggctgcgtgcttgcacttyctaaacactttgctgccatctgctctacatcattagagggtgagtgcaaacacagtcccctgctatcacaaattacacagtacagttgcccaagccttgtaaaataacccgggttcggtctgctggwgcacacaaggcacgcagtgccccagggaagccattctgctgatgggcagctgcttctgctgggctagatggatccaggcagtgaggatgttcctacagggaccccaccaacctgctgcatgtgctacaccaagacactcattttggctgagcatgggtttgttatgcaagcatgggttcatcattcaaatggttgagacattaatataaaccactctcattttccataaataaccaaagtttaaaagtcagcttgtagtatgttgtaacacacgtggtagtgttcagatcaacatttcca

SEQ ID NO: 56060 - DNA, 600 bp, Chicken  19866894310345_1
aaataaacagtttatgagtacaaataccgtggcaagtgaacaagtacttgagaaaagttgccccaaagctcattttgaaagtaaggtttacaataatgaagtcttcagcataagttagccttccatatatattgtctttccaagttttatgtgctaatatattgtaagaaggaaaatttaacagaattaataaaattttgtattttcaatcttagaaaacaacctgtattttaaaataataatgaacaatttttacaaatactaacactttaaatgaaagaccacagaaaggtggaatgyggaaaaggactgcttgtttatggtggagatatttatcttacgtttgcatttctcagtgttcataagtttaaatttagccactctccacattcagaaacttgtactgacaacttgtcatacactttctttttgacattacaaatgaaaacactgtcctggtttctgaggtagtgttaatatcacactgatgttttggctgctactgagagatgtgcattgggccactcagatgagaattgctgcggcctttactgagcagcagcagggatgcagtgaaggtcaggggccctgaattaagcg

SEQ ID NO: 56061 - DNA, 600 bp, Chicken  19866894310348_1
aatgttcatttcgtattcattcatttgtgcctgtagttttacctggattgtgggctattgttcttatttgcaaagcctgggtttaatttcctgtgggaagattttcttttgtctccagggctcattctcctattatcatctgcctcgagagtactaaagcactgtcctgctggtaaaatataatttgttttgtagggttctaatgaaaatttttaccacttctgtcctcaaaaatataaagatcaagattttcccacctttccattccagctgtcagtactgagcgcctcacacctcttyattcttttcctgctcctgaacactgggtatttcatgagctccccagacactatcctgcaaataactgtgtccttccccccacccatcctctaccagaggctttgctggcaatgctgggtgcctggagagaattctaaccagccatgcggatagcatgctgtgtaaaagtgttttcttaaaaagttgagtagatactgctttccgttccatttcaggcctccagcccctcttactacatcttgcagttgatccctttatttatatggcatacatattttatattttcctcattaggctgtt

SEQ ID NO: 56062 - DNA, 445 bp, Chicken  19866894310355_1
actgaagatcagagagcagtggaattccccaatcccttcagacaccaaataggcacctcacctccagctcacagaatatcacaggactgcagtagtcttctcccagtttccagatggcattcatctctacgctgcagttattcgccctgccaactacagaagttttctgcattacaagccccattatcaacatccagtgaagaaaagtaccaacaaattctgcatgtgcaaaatgatccacagctaattttgacagcacatcatagaaggtaaagcaacagtgagcagtacaaacagaayggtacaagatgcacagtggaattagcacagaagtcttccataatactgacagcaggaatagtatcgccacatcactgagttctgcaacgttaacatttgggattagggatcagacagtactctatcagcaggacagaatcttcca

SEQ ID NO: 56063 - DNA, 600 bp, Chicken  19866894310363_1
tcctatgccagcgttgttgttgttgttctgggagccagaaacctggcactgctgagtgatggaagtgctgttttgtgagcaagtgagctcaagtgatgagggaactgggctcatgagacatctgggttatgctgcttgtgtgggctttgtctgttgtcagtttattctcctcaagctaatctgaatccacgctgcctttgcaatgggatcaggagctttggggagagcctggaatcactgcctggtggagggccgtggggcaggagctgaaggttatgggcatgccttgtggatggctgmagtcatagcgtgttttgtgaggtgctgcattgagctgcttctgccttgcagcagcattgtgaccaaagtaggaagatttctctttttagtggttcagtgtggttkgatggtaggtggacctattgaggaatgcgttaggttgaatgtatcttgggactggattctcaccctgccatggagcacagtcccctgcccagagcatctcgtattcatagatgtgttagatgaacctctacaagtggagtacagggtaagccaggaagagtgcttgcctttcgtagtggggacatcttactttcc

SEQ ID NO: 56064 - DNA, 600 bp, Chicken  19866894310363_2
tgggctcatgagacatctgggttatgctgcttgtgtgggctttgtctgttgtcagtttattctcctcaagctaatctgaatccacgctgcctttgcaatgggatcaggagctttggggagagcctggaatcactgcctggtggagggccgtggggcaggagctgaaggttatgggcatgccttgtggatggctgmagtcatagcgtgttttgtgaggtgctgcattgagctgcttctgccttgcagcagcattgtgaccaaagtaggaagatttctctttttagtggttcagtgtggttkgatggtaggtggacctattgaggaatgcgttaggttgaatgtatcttgggactggattctcaccctgccatggagcacagtcccctgcccagagcatctcgtattcatagatgtgttagatgaacctctacaagtggagtacagggtaagccaggaagagtgcttgcctttcgtagtggggacatcttactttcctcttctgccctgctgatagcggtgttttactacgggttactcttagatacgaaacaggaactgagaagtttgcctcctaagcacagaggtgttcctgcaccgcac

SEQ ID NO: 56065 - DNA, 600 bp, Chicken  19866894310367_1
gaggctcttcatttttagtatgaggtcaagaaacaataggcctgtttcaaaaggatctgctatactttttccacttgaggacaagggataggatgaagctctgaactgtgatgatactgagcatgagcagtggaggtatatttatggacaaaactatcaagggtcatgtagctggaattttgattcaaccacaaaattggttacatatatcatttttttcacacagttttgcaagctttaagtaaaaaaatcatgaagtattagtttttatctcttctgcacttcatagtttgctgactstcctacataactttttagcaattattataatagagctgtgcctgaaattatatttggtattgtacttttctgcttattggtatcttttagaagagcactttctacctgggcaaaagctgttcttgctactacagagatacattttaccgttttaaccacacccaaagccaataaacttcccctgacgtttccagctgggagtatcagatgcagccatgactctgttttcatattatctcataaaaaactagcacacatcccagtaggtaatgaacatactatcccctgagcaacatccaa

SEQ ID NO: 56066 - DNA, 492 bp, Chicken  19866894310367_2
gaaaaatgaagccttcccatgacatggcactctgtgacagtactgtgcacactgaaaggaaacctgtatatggaatttatccaacagccagcatacatctcagtgacaaataaaggaaaggtacaaaaagcccagattttagtcccatgggttctacaggcagttgaaaagcttgaatttctataatttctaagcttgctattgtttgataaaaaacacttgtaacaattctaccagttgatggaaatctgattagaatcccagtataaacttttttccctcttgggctcctatgacttyttctgtttccctgccattgacataaattttgagtaggtaaaatcactactcttatgtttatttttacctgatacttagagtatttgtcaattcttaggactcagacaaccacagaaagatctgactgataaattacaatacatgaaaatgcatgaagtgggagcttctactatactctctgctatatttgtg

SEQ ID NO: 56067 - DNA, 600 bp, Chicken  19866894310372_1
gctgggtgtcaaaccactgcctgcaggcgtggctgtcctgcagtgccagtttttctgcagaggttgggcgttttgcgccatggctgtctctgctgtgagttctcaggcactggcccaatggtaggtgtcacccagcatgtgcattagcttttgtgctgagtaaacaggcaattacaattgggctctctcccattctttgaatgtgggcaaaggggacagctgctgtttgcttagcagttcctactctttatgttgctccttccgctcacacatcacttccaagatgggatgaactgctcyktgcccgggaacaaagggatgtccacgtgcagaggccctgaactgctcctcctttcccatgccctcggggcagggcagatggctgaggtccgtggaggtgctggggatgcactgagaaccatcgctggtctgttatcatagggttgctctggatttgtggttgttgaggtgctctctctcacctggttggagcaccgttgccacctgtcgcttgtgttgctttgtttgaccttttatgtttactgtagtgttgtttgtaagagctggcagctagacgtgtttcctgccgtaatgagcgct

SEQ ID NO: 56068 - DNA, 600 bp, Chicken  19866894310372_2
ctgggtgtcaaaccactgcctgcaggcgtggctgtcctgcagtgccagtttttctgcagaggttgggcgttttgcgccatggctgtctctgctgtgagttctcaggcactggcccaatggtaggtgtcacccagcatgtgcattagcttttgtgctgagtaaacaggcaattacaattgggctctctcccattctttgaatgtgggcaaaggggacagctgctgtttgcttagcagttcctactctttatgttgctccttccgctcacacatcacttccaagatgggatgaactgctcyktgcccgggaacaaagggatgtccacgtgcagaggccctgaactgctcctcctttcccatgccctcggggcagggcagatggctgaggtccgtggaggtgctggggatgcactgagaaccatcgctggtctgttatcatagggttgctctggatttgtggttgttgaggtgctctctctcacctggttggagcaccgttgccacctgtcgcttgtgttgctttgtttgaccttttatgtttactgtagtgttgtttgtaagagctggcagctagacgtgtttcctgccgtaatgagcgctg

SEQ ID NO: 56069 - DNA, 600 bp, Chicken  19866894310372_3
gaactgctcctcctttcccatgccctcggggcagggcagatggctgaggtccgtggaggtgctggggatgcactgagaaccatcgctggtctgttatcatagggttgctctggatttgtggttgttgaggtgctctctctcacctggttggagcaccgttgccacctgtcgcttgtgttgctttgtttgaccttttatgtttactgtagtgttgtttgtaagagctggcagctagacgtgtttcctgccgtaatgagcgctgacccgcgtgccccttggcagggattgtctctttgtggkaaaaaaaaaaattagaaggcatttagcaaagtgagacagaaaacaaacaaagctggcaggaggctgcggccgggcattgccgccaagggggctgggctgctgctgcaggacggaagcaggaggcagtggggaaggcagcgccacggaagcactccttaagccccaatgctgtcccattagcccctgcctgctgctccagcactgtcacatcctgcgtgctgccggctgcctgccagctgtggtacctgacacctctcctccatctcctcctctgcggatgctgccaggggcacgtggctc

SEQ ID NO: 56070 - DNA, 600 bp, Chicken  19866894310378_1
actaacaattggcaggagatacaaatggaaaaatactagctcgttataatggctgtgagctcgggtgctacgtgcacaatccaggctatgacaccttgaagctatcaaagcaggaagaaaaactgaggcttcagttaagataagggggtagctcgcctgggaagagattaagacagtggaatggtatgaaaacatgcatgaccaatggtattgttaggctttttgcaatgctccaaccaattacaagctgacacgcattcgccacgatctatatatgtgtgtaagaagtggataataaayggagattctgatgcactcacattgggtcatgtcatcactccccaygtggctcggccagcraacagactagattctggtttcaaacccttgaggggtccgcaacaataaagagagctgtcagaaaagcatttatcacggaaatgccaaagaacaactggaaatattaaaataatgtatcatcaatagtgctaaaaacatatgtgcatgagatattttacaaaagcttctatataaccaggatcaaataccacttgctacagttacaggagccctaaacccagtgaggttttccaatactgt

SEQ ID NO: 56071 - DNA, 600 bp, Chicken  19866894310378_2
ataatggctgtgagctcgggtgctacgtgcacaatccaggctatgacaccttgaagctatcaaagcaggaagaaaaactgaggcttcagttaagataagggggtagctcgcctgggaagagattaagacagtggaatggtatgaaaacatgcatgaccaatggtattgttaggctttttgcaatgctccaaccaattacaagctgacacgcattcgccacgatctatatatgtgtgtaagaagtggataataaayggagattctgatgcactcacattgggtcatgtcatcactccccaygtggctcggccagcraacagactagattctggtttcaaacccttgaggggtccgcaacaataaagagagctgtcagaaaagcatttatcacggaaatgccaaagaacaactggaaatattaaaataatgtatcatcaatagtgctaaaaacatatgtgcatgagatattttacaaaagcttctatataaccaggatcaaataccacttgctacagttacaggagccctaaacccagtgaggttttccaatactgtccaacctgtgatatttgaattctagccaaataaccatagccaacg

SEQ ID NO: 56072 - DNA, 600 bp, Chicken  19866894310378_3
tcgggtgctacgtgcacaatccaggctatgacaccttgaagctatcaaagcaggaagaaaaactgaggcttcagttaagataagggggtagctcgcctgggaagagattaagacagtggaatggtatgaaaacatgcatgaccaatggtattgttaggctttttgcaatgctccaaccaattacaagctgacacgcattcgccacgatctatatatgtgtgtaagaagtggataataaayggagattctgatgcactcacattgggtcatgtcatcactccccaygtggctcggccagcraacagactagattctggtttcaaacccttgaggggtccgcaacaataaagagagctgtcagaaaagcatttatcacggaaatgccaaagaacaactggaaatattaaaataatgtatcatcaatagtgctaaaaacatatgtgcatgagatattttacaaaagcttctatataaccaggatcaaataccacttgctacagttacaggagccctaaacccagtgaggttttccaatactgtccaacctgtgatatttgaattctagccaaataaccatagccaacgatacaatagtaacta

SEQ ID NO: 56073 - DNA, 548 bp, Chicken  19866894310378_4
tggtttcaaacccttgaggggtccgcaacaataaagagagctgtcagaaaagcatttatcacggaaatgccaaagaacaactggaaatattaaaataatgtatcatcaatagtgctaaaaacatatgtgcatgagatattttacaaaagcttctatataaccaggatcaaataccacttgctacagttacaggagccctaaacccagtgaggttttccaatactgtccaacctgtgatatttgaattctagccaaataaccatagccaacgatacaatagtaactagtggaatcttgctyatccagtcagagaaaatataaagacccaggtcaatcatagaattcaagtactacctagggaaatattactccttcaaatactgccaaagttatatctaggcacagacatactcaaaaccaacactttttgaagaatgtacagatgaattaacagtgtagtataagccaagccaaaataataataaattatttaatacttctaggtatgctgtttgtattacaacattttactagatatattatatatt

SEQ ID NO: 56074 - DNA, 600 bp, Chicken  19866894310382_1
ttttgggcactctcattatatttgatttattagctccaattctcattatattgtattatattgtattacagtgtgttatcttgcactctgatatcttatttaataaattactttgtttctcctcagatcattgctgctgttttattttggggcccatatctctatccctttcccttatccttttccagaggctcagatctgccagtccctctgccctgctagtcacgaaactgagacaaaccagcccataaaccattgacatcatctctcaactccattttttgatactttttgtcttgyttttgccttgaaatggccatcattgctagaaattgtaatttgcataatgttatcattactgagatgcaaagagaagcaaaactgagagttcttgcccaaattaatcttatttaggtacaccaccatctatagatacctaaaaggaaggacttaattatgacaagttgctttagatttctctatagttagtacagcaaagtaggctactccgaagacaatttcattctcatgtgaaagagtctccagaaagactccatagtcaacttagatcaggttttacaattacaaaatttcaaaagg

SEQ ID NO: 56075 - DNA, 600 bp, Chicken  19866894310382_2
ggcacatttccatgccttaaaaagcctctcaggtgggctgcaacaccgttgtctcgttacttcagacactttgaagtcccctcctcagcccacccattaatacatacacatatgcaaacccttgtacacacatacagaaatgtatatatttatatatacatgtttgtatatatttatgaataaaccattgtataatctatacagggaccagaaaaaatctaataccaagaaccactcatgcaaaagcggctaaaaatctgtcttagagggggcagttttggaggctggcttccatatatyactccctggggtggatgaagttaaaagagtacaagtggtctgatttgctacaaactgtactcataacttttctatgccagaaaatgtggcatgtcaacaggatgttttcttatcctccttcaactttttgtttgatgaaccttcctcatcttgtcatttgactgtaaactttggagtaggttttctttttactataggcttgtacagccccttttgatacacagagatggtaaaataacatttcagtaagctgtaaactaatttagctagccaaaagaaacacatttatgatatattata

SEQ ID NO: 56076 - DNA, 600 bp, Chicken  19866894310384_1
atgcttcttttcaacactacccacattcacttctcaaatcttattttcttaagctttatgcgctttaagaggcagttgtgagtagctctgtgttcaatctctagaaatattgtttatcaaactaaaaaggcctctcccatttctatttttttttttttttttaattaaagaacttctaagattgtcaagttttggaaactttcacatcttttaaaattctacattggaagtttaaagaaaatggcagaaatacctgggagttcttttgtgcttgtttattacttaggtttaattgtttgstatttaaatccacttgtaaaagcagatcataaagcttcagggcattcttcatttcagagcttgygttgtgtaagtttttgtaacatgcttactcggcttattgatttgartttgtcakgtatagtgcattagttcatttgtagtctcaaattmttgtgtaagcaaaatgctaagggcttctgcctgatatgtaatgtttgatacttctgtttcatattaatgagaacttactaatgaatgatatttgtttagggtgggtttggtggaatcaaaaatccgtattctagttggaaacctgga

SEQ ID NO: 56077 - DNA, 600 bp, Chicken  19866894310384_2
ttaagaggcagttgtgagtagctctgtgttcaatctctagaaatattgtttatcaaactaaaaaggcctctcccatttctatttttttttttttttttaattaaagaacttctaagattgtcaagttttggaaactttcacatcttttaaaattctacattggaagtttaaagaaaatggcagaaatacctgggagttcttttgtgcttgtttattacttaggtttaattgtttgstatttaaatccacttgtaaaagcagatcataaagcttcagggcattcttcatttcagagcttgygttgtgtaagtttttgtaacatgcttactcggcttattgatttgartttgtcakgtatagtgcattagttcatttgtagtctcaaattmttgtgtaagcaaaatgctaagggcttctgcctgatatgtaatgtttgatacttctgtttcatattaatgagaacttactaatgaatgatatttgtttagggtgggtttggtggaatcaaaaatccgtattctagttggaaacctggagaagaacgagttcattacactggctcatgtgaatccacagtcattcccagcgcccaaggagaat

SEQ ID NO: 56078 - DNA, 600 bp, Chicken  19866894310384_3
tgtttatcaaactaaaaaggcctctcccatttctatttttttttttttttttaattaaagaacttctaagattgtcaagttttggaaactttcacatcttttaaaattctacattggaagtttaaagaaaatggcagaaatacctgggagttcttttgtgcttgtttattacttaggtttaattgtttgstatttaaatccacttgtaaaagcagatcataaagcttcagggcattcttcatttcagagcttgygttgtgtaagtttttgtaacatgcttactcggcttattgatttgartttgtcakgtatagtgcattagttcatttgtagtctcaaattmttgtgtaagcaaaatgctaagggcttctgcctgatatgtaatgtttgatacttctgtttcatattaatgagaacttactaatgaatgatatttgtttagggtgggtttggtggaatcaaaaatccgtattctagttggaaacctggagaagaacgagttcattacactggctcatgtgaatccacagtcattcccagcgcccaaggagaatcctgacaagtaagcaaaaatatgttaaccaataaactaagattttt

SEQ ID NO: 56079 - DNA, 600 bp, Chicken  19866894310384_4
aaactaaaaaggcctctcccatttctatttttttttttttttttaattaaagaacttctaagattgtcaagttttggaaactttcacatcttttaaaattctacattggaagtttaaagaaaatggcagaaatacctgggagttcttttgtgcttgtttattacttaggtttaattgtttgstatttaaatccacttgtaaaagcagatcataaagcttcagggcattcttcatttcagagcttgygttgtgtaagtttttgtaacatgcttactcggcttattgatttgartttgtcakgtatagtgcattagttcatttgtagtctcaaattmttgtgtaagcaaaatgctaagggcttctgcctgatatgtaatgtttgatacttctgtttcatattaatgagaacttactaatgaatgatatttgtttagggtgggtttggtggaatcaaaaatccgtattctagttggaaacctggagaagaacgagttcattacactggctcatgtgaatccacagtcattcccagcgcccaaggagaatcctgacaagtaagcaaaaatatgttaaccaataaactaagattttttttaatct

SEQ ID NO: 56080 - DNA, 600 bp, Chicken  19866894310384_5
tttttttttaattaaagaacttctaagattgtcaagttttggaaactttcacatcttttaaaattctacattggaagtttaaagaaaatggcagaaatacctgggagttcttttgtgcttgtttattacttaggtttaattgtttgstatttaaatccacttgtaaaagcagatcataaagcttcagggcattcttcatttcagagcttgygttgtgtaagtttttgtaacatgcttactcggcttattgatttgartttgtcakgtatagtgcattagttcatttgtagtctcaaattmttgtgtaagcaaaatgctaagggcttctgcctgatatgtaatgtttgatacttctgtttcatattaatgagaacttactaatgaatgatatttgtttagggtgggtttggtggaatcaaaaatccgtattctagttggaaacctggagaagaacgagttcattacactggctcatgtgaatccacagtcattcccagcgcccaaggagaatcctgacaagtaagcaaaaatatgttaaccaataaactaagattttttttaatcttagacctaatttttcatgatggagcctaaaggcat

SEQ ID NO: 56081 - DNA, 600 bp, Chicken  19866894310386_1
tccctgcggagcccaccggacgcggcttggcatcccccctggggctgggaaggaccgtcctgaggtccccgtcgccgccctcccggcacgcagctgcagcgccgacccggccaaagctcttacacatcgaccccgacacgagagctatgaccgcacggggtaccaccccggtgagagccgccacgagtgctttctccgtttccattgcatggcccgttcagaggatacctcacagttcgtttaagaggaaagaactgcttctgacggccagggccttttactcaatgaaagcaaagcccrggcgttgggggagcagtggggcaccctmgggccagggacacatggcagtcttaaaagtgaaatgtggttctacagaggaggctctgaaaacagagcacccaccccacgttaaggctccatgtgcaacagcaacacactggggctgattttccaccctcccatcacccggttgccagaggaagacacgttatcaactgacacttcttggctcacagcccagcagtgcctctttgacatacaaaagtgtttcttggctgagaagaaaaactgtgtagtgtccagaaataactatctttttcc

SEQ ID NO: 56082 - DNA, 600 bp, Chicken  19866894310386_2
ggcatcccccctggggctgggaaggaccgtcctgaggtccccgtcgccgccctcccggcacgcagctgcagcgccgacccggccaaagctcttacacatcgaccccgacacgagagctatgaccgcacggggtaccaccccggtgagagccgccacgagtgctttctccgtttccattgcatggcccgttcagaggatacctcacagttcgtttaagaggaaagaactgcttctgacggccagggccttttactcaatgaaagcaaagcccrggcgttgggggagcagtggggcaccctmgggccagggacacatggcagtcttaaaagtgaaatgtggttctacagaggaggctctgaaaacagagcacccaccccacgttaaggctccatgtgcaacagcaacacactggggctgattttccaccctcccatcacccggttgccagaggaagacacgttatcaactgacacttcttggctcacagcccagcagtgcctctttgacatacaaaagtgtttcttggctgagaagaaaaactgtgtagtgtccagaaataactatctttttccccccccgtctcaagagagatggaaagca

SEQ ID NO: 56083 - DNA, 419 bp, Chicken  19866894310389_1
tcagcaagcctgctcgatttttttccacagtccttgctgccagcatgcctctctctgcctcgcctgtgtgcctgccctgcacgagaggcagctgcatcatacttgttctgccagggtgccacctgcacccagggtacagcaagggcagcaagccccacccccatcatcttcaccccgttctctatctccaaagcaggatgggtgttcccaacactgggcagcacctgccatcccctctgattgccccagcctgggtgaggatggagccagtagcaaagagggaggacaccactagccccrgatggtgacaactccaggagtacgcatccatgggacacatgagatgagagccaccatgaggtggggacagcacagatcacaggcattcaccagaatgctgagcccccccatcctgcaat

SEQ ID NO: 56084 - DNA, 600 bp, Chicken  19866894310393_1
agttttcaaaatgaaattacagatatttcagtaagttctgtagacgaagaaaaggaatatgaaagatgagtaggaattagtccgtgtaattgccatatgcaacttagaactctattctgaatgtcactgaatgggaatcagatcttgttagattacttaccgctttcagaatttgaatttcatctatgtagaaactggttagggtttggggcatttttataatatcaaagtgaaaactacttgaaacttcccttgctgcttttattaatcctgtgtgtaaataatcttcctttgatactraacygtatgggaataataatcactctctttagtactaacrtagagcacaacccatttaccttcctttgaaaggagatcactctgtaatatttggtcccgaaattgaaaaacccagctgggaaagtgaaagaccttttgtatacttggagctactgatgttaatgctgtagtatctgtgtcacatctctgtgtagtcctgcaggatgggagaatgatgagataaggatatggcatgaaagttttcattcactgaaagcaaaagcagtttaaaagacatcatagtgaagctattggtattat

SEQ ID NO: 56085 - DNA, 600 bp, Chicken  19866894310393_2
ttcaaaatgaaattacagatatttcagtaagttctgtagacgaagaaaaggaatatgaaagatgagtaggaattagtccgtgtaattgccatatgcaacttagaactctattctgaatgtcactgaatgggaatcagatcttgttagattacttaccgctttcagaatttgaatttcatctatgtagaaactggttagggtttggggcatttttataatatcaaagtgaaaactacttgaaacttcccttgctgcttttattaatcctgtgtgtaaataatcttcctttgatactraacygtatgggaataataatcactctctttagtactaacrtagagcacaacccatttaccttcctttgaaaggagatcactctgtaatatttggtcccgaaattgaaaaacccagctgggaaagtgaaagaccttttgtatacttggagctactgatgttaatgctgtagtatctgtgtcacatctctgtgtagtcctgcaggatgggagaatgatgagataaggatatggcatgaaagttttcattcactgaaagcaaaagcagtttaaaagacatcatagtgaagctattggtattatgggc

SEQ ID NO: 56086 - DNA, 600 bp, Chicken  19866894310393_3
tagacgaagaaaaggaatatgaaagatgagtaggaattagtccgtgtaattgccatatgcaacttagaactctattctgaatgtcactgaatgggaatcagatcttgttagattacttaccgctttcagaatttgaatttcatctatgtagaaactggttagggtttggggcatttttataatatcaaagtgaaaactacttgaaacttcccttgctgcttttattaatcctgtgtgtaaataatcttcctttgatactraacygtatgggaataataatcactctctttagtactaacrtagagcacaacccatttaccttcctttgaaaggagatcactctgtaatatttggtcccgaaattgaaaaacccagctgggaaagtgaaagaccttttgtatacttggagctactgatgttaatgctgtagtatctgtgtcacatctctgtgtagtcctgcaggatgggagaatgatgagataaggatatggcatgaaagttttcattcactgaaagcaaaagcagtttaaaagacatcatagtgaagctattggtattatgggctttgaaagtgagaagagcctttagtcaaaaagcaac

SEQ ID NO: 56087 - DNA, 600 bp, Chicken  19866894310393_4
gagctactgatgttaatgctgtagtatctgtgtcacatctctgtgtagtcctgcaggatgggagaatgatgagataaggatatggcatgaaagttttcattcactgaaagcaaaagcagtttaaaagacatcatagtgaagctattggtattatgggctttgaaagtgagaagagcctttagtcaaaaagcaacagatgagttgccttaaaatatatgcaggaagagagacttaaattcttaaatagcttattacaaagaatagcattggaagttgtttgacctatttcaattttgtatycatcttaaatgtttcagaggagataacctttaaaacaacaaaagtggggtcattttcccttttcttactaaccactaaaatggagttttctttaacaattgtactcagatggggctgcgcttatttacactttcggtaaaggagaacaaaaacattgatttagtctataaatatatagtcccagaagttgtacgggtttccttttcaatgttccagcatgttgttgtggaaaaagatgcagtatttatggtaagttatctgcactgggtgtgtgtatgtgactacaacgtatatttgtac

SEQ ID NO: 56088 - DNA, 599 bp, Chicken  19866894310401_1
  misc_feature (1)..(18): n is any nucleotide
nnnnnnnnnnnnnnnnnntgttcagtgtgcggtagtgtcccacaagaccatcgtcactgggccacaggactccatggcaggggcagaaagcccactgggacacatggcaggagcagcatggcggcctgggcaggtcccttggggtgggcacagggcaacagatgggcagcagctgcctctggggaggggactggcccagggcactgctcctcacctctgcagaaagcactggccagtccaggggcttgttcttacatagaatcattaaggttgcaaattaggtgtgagccctaaatgcaytttctttttctgcttaaatgtcgtgagcctggatggttgtgtcttactgcattaaggtacgtgtgtcaatgatgtcggctctgaactgtcagctcaggcagctgggctcagtggtgttgtggggcccttcccattgaactggtgattctgtagtaagttaattgcaggtcttctgctcctgaatgcctttgctcataaagcaagaaatgccatcaaagtcttaactttcatcgggagagaaggtaccttatttcctcctgcaaattaaagaataagacmatttyatatgagagtgttct

SEQ ID NO: 56089 - DNA, 600 bp, Chicken  19866894310401_2
aggtgtgagccctaaatgcaytttctttttctgcttaaatgtcgtgagcctggatggttgtgtcttactgcattaaggtacgtgtgtcaatgatgtcggctctgaactgtcagctcaggcagctgggctcagtggtgttgtggggcccttcccattgaactggtgattctgtagtaagttaattgcaggtcttctgctcctgaatgcctttgctcataaagcaagaaatgccatcaaagtcttaactttcatcgggagagaaggtaccttatttcctcctgcaaattaaagaataagacmatttyatatgagagtgttctgaaagcaaaaaggaaaaaaaatcctaaccgttcagaacttttggatctggtgatagtgcagctgactcccatgcagaataactgcattgtggttaccagaccgtccagctcaagtcactttgtgtaactgtcctattgcttttgtaggtgttttcacaacagtggaaaaccgcattgtgtaaaggaacagtaagccatgtgggtaaatgcgaacagcagtttaaacgtgcaggtatgtcttttgtcagccaaggaagaatccgtaatgggatctcagtgg

SEQ ID NO: 56090 - DNA, 600 bp, Chicken  19866894310401_3
tgagccctaaatgcaytttctttttctgcttaaatgtcgtgagcctggatggttgtgtcttactgcattaaggtacgtgtgtcaatgatgtcggctctgaactgtcagctcaggcagctgggctcagtggtgttgtggggcccttcccattgaactggtgattctgtagtaagttaattgcaggtcttctgctcctgaatgcctttgctcataaagcaagaaatgccatcaaagtcttaactttcatcgggagagaaggtaccttatttcctcctgcaaattaaagaataagacmatttyatatgagagtgttctgaaagcaaaaaggaaaaaaaatcctaaccgttcagaacttttggatctggtgatagtgcagctgactcccatgcagaataactgcattgtggttaccagaccgtccagctcaagtcactttgtgtaactgtcctattgcttttgtaggtgttttcacaacagtggaaaaccgcattgtgtaaaggaacagtaagccatgtgggtaaatgcgaacagcagtttaaacgtgcaggtatgtcttttgtcagccaaggaagaatccgtaatgggatctcagtggaagac

SEQ ID NO: 56091 - DNA, 600 bp, Chicken  19866894310412_1
agcaatctagtttgtaaggtactatttgctcttggcaaattctttaattcctacttgtcttttctgccttcaaaccaatagaattgtgttctggacttcctcaatgattttctcagaggatgaagtgaacctcaccagtctgtagcattctggatcattttagaacagggcatacagcatttacctttcttctcagatctctatgtaaataagtttaaaatctgtctaagtggtcaccaattaatagttttcttattcatgctgttggacatgagttttgatgaaggcctgagctgttaytcttgaataggcaggccactctgatgttttaaatagaagtacagaaagaggtcccarggaacctagagaagtgttctcactctgtcagagtttctgtgttacctggacaatttatgtgttttactgcccaacacttttctatcatggtttcatctaattaggtgtgctaattctggagctgaagcatgttgcagagatccaggcatcttgttccatgtacataactgtttgttttaatgcaacagatgttactgcaaacagtgtatacaattgtttgtggatttgttccagaagaaacct

SEQ ID NO: 56092 - DNA, 600 bp, Chicken  19866894310412_2
tcttttctgccttcaaaccaatagaattgtgttctggacttcctcaatgattttctcagaggatgaagtgaacctcaccagtctgtagcattctggatcattttagaacagggcatacagcatttacctttcttctcagatctctatgtaaataagtttaaaatctgtctaagtggtcaccaattaatagttttcttattcatgctgttggacatgagttttgatgaaggcctgagctgttaytcttgaataggcaggccactctgatgttttaaatagaagtacagaaagaggtcccarggaacctagagaagtgttctcactctgtcagagtttctgtgttacctggacaatttatgtgttttactgcccaacacttttctatcatggtttcatctaattaggtgtgctaattctggagctgaagcatgttgcagagatccaggcatcttgttccatgtacataactgtttgttttaatgcaacagatgttactgcaaacagtgtatacaattgtttgtggatttgttccagaagaaacctggcaagtgcgaagatgtatagaaatacacacttcatattactgtttgtgttttgagg

SEQ ID NO: 56093 - DNA, 599 bp, Chicken  19866894310418_1
  misc_feature (1)..(114): n is any nucleotide
nnnnnnnnnnnnnnnnnnnnnnnnnnnnnnnnnnnnnnnnnnnnnnnnnnnnnnnnnnnnnnnnnnnnnnnnnnnnnnnnnnnnnnnnnnnnnnnnnnnnnnnnnnnnnnnnnnctctgcctgacatgacatttaaaagcccgagacctgtaccgcatttattagacatcgtcatattcagcaaaacatttaggcagctattcagctggaggcgcctaagcagtcccagtgtcaacaacaggagtcctcaaacgcttcagtgtatgcatgtgtcggagtgccttgctgaatcaggccttyggctgctgaactggagggatcgctcccgcctttacctccagagccccgcaagcacacgtgccacgcgacaacattcgagttaattgggtaaaactgcacgtgctcagtgacctcggggggtkctgtggacaaatacarcggtgccacccygcatgcctatttctgggattagtcacaggcacctgcatgagatgtggccgtgtcacctctgtgctctgtactccrtccccacaccccgcgggtgtcgcaccgtgacagagcagactgacagctttggtgctgccatttttaatgtgttt

SEQ ID NO: 56094 - DNA, 600 bp, Chicken  19866894310418_2
gacatgacatttaaaagcccgagacctgtaccgcatttattagacatcgtcatattcagcaaaacatttaggcagctattcagctggaggcgcctaagcagtcccagtgtcaacaacaggagtcctcaaacgcttcagtgtatgcatgtgtcggagtgccttgctgaatcaggccttyggctgctgaactggagggatcgctcccgcctttacctccagagccccgcaagcacacgtgccacgcgacaacattcgagttaattgggtaaaactgcacgtgctcagtgacctcggggggtkctgtggacaaatacarcggtgccacccygcatgcctatttctgggattagtcacaggcacctgcatgagatgtggccgtgtcacctctgtgctctgtactccrtccccacaccccgcgggtgtcgcaccgtgacagagcagactgacagctttggtgctgccatttttaatgtgtttccttacatccccctttcacagattaataatttccgctgggccggaatactgtcaggctggcatcagataacttcccaggcagtgctatacctggcattgcctattttatctaataaagacttt

SEQ ID NO: 56095 - DNA, 600 bp, Chicken  19866894310418_3
gcccgagacctgtaccgcatttattagacatcgtcatattcagcaaaacatttaggcagctattcagctggaggcgcctaagcagtcccagtgtcaacaacaggagtcctcaaacgcttcagtgtatgcatgtgtcggagtgccttgctgaatcaggccttyggctgctgaactggagggatcgctcccgcctttacctccagagccccgcaagcacacgtgccacgcgacaacattcgagttaattgggtaaaactgcacgtgctcagtgacctcggggggtkctgtggacaaatacarcggtgccacccygcatgcctatttctgggattagtcacaggcacctgcatgagatgtggccgtgtcacctctgtgctctgtactccrtccccacaccccgcgggtgtcgcaccgtgacagagcagactgacagctttggtgctgccatttttaatgtgtttccttacatccccctttcacagattaataatttccgctgggccggaatactgtcaggctggcatcagataacttcccaggcagtgctatacctggcattgcctattttatctaataaagactttgctatctctggtccat

SEQ ID NO: 56096 - DNA, 600 bp, Chicken  19866894310418_4
taccgcatttattagacatcgtcatattcagcaaaacatttaggcagctattcagctggaggcgcctaagcagtcccagtgtcaacaacaggagtcctcaaacgcttcagtgtatgcatgtgtcggagtgccttgctgaatcaggccttyggctgctgaactggagggatcgctcccgcctttacctccagagccccgcaagcacacgtgccacgcgacaacattcgagttaattgggtaaaactgcacgtgctcagtgacctcggggggtkctgtggacaaatacarcggtgccacccygcatgcctatttctgggattagtcacaggcacctgcatgagatgtggccgtgtcacctctgtgctctgtactccrtccccacaccccgcgggtgtcgcaccgtgacagagcagactgacagctttggtgctgccatttttaatgtgtttccttacatccccctttcacagattaataatttccgctgggccggaatactgtcaggctggcatcagataacttcccaggcagtgctatacctggcattgcctattttatctaataaagactttgctatctctggtccattgcttgtaattt

SEQ ID NO: 56097 - DNA, 600 bp, Chicken  19866894310418_5
ccagtgtcaacaacaggagtcctcaaacgcttcagtgtatgcatgtgtcggagtgccttgctgaatcaggccttyggctgctgaactggagggatcgctcccgcctttacctccagagccccgcaagcacacgtgccacgcgacaacattcgagttaattgggtaaaactgcacgtgctcagtgacctcggggggtkctgtggacaaatacarcggtgccacccygcatgcctatttctgggattagtcacaggcacctgcatgagatgtggccgtgtcacctctgtgctctgtactccrtccccacaccccgcgggtgtcgcaccgtgacagagcagactgacagctttggtgctgccatttttaatgtgtttccttacatccccctttcacagattaataatttccgctgggccggaatactgtcaggctggcatcagataacttcccaggcagtgctatacctggcattgcctattttatctaataaagactttgctatctctggtccattgcttgtaatttacccttcataaattgacttgccaacacagtcagttgtagagggaaaaaataagacgctgacgtaccttgagaccc

SEQ ID NO: 56098 - DNA, 600 bp, Chicken  19866894310422_1
gatggtcacggcagcagctgtgagcatgatgtgttctgcacctcctctgccatccagtcccacagctgtcccattggacacttatagcctttgggaatgtggccatgagtatgctggtttgccacctgtggaaatgcgtatggtacaatgtcacgcttgcactatcagctgaaaggtatgcagaacagctttggatccgttgtattgcagagagcaaaaggggacacatttcagttgtagggtgcactgcacgctccttctggagtgcccattgcagcagttattcacttcaaaaacacmaaagtaatttaaaagcttcctcagttccagtgccatccagttttcatgctgatagttcaaagttgaagtaaaaagtttcaaccacacacacataaagactttgagcttttttatgttactgagagcataccataaagacaagtttcactacatcctttataaccacagtgatggttttacctgtacagttattcagatcacactccagaattcatcatcaagttaattatcagatttcagtctgttctgtatttaaggggagattgtggtttggctgtgggaaaaagaaaacacaagaga

SEQ ID NO: 56099 - DNA, 600 bp, Chicken  19866894310427_1
aatgctgagaaaagccttctcctaggaggcattttcctggggatattctcaaaggagtgacacagaaggagctccagattgccaccaccccaaaagcagcgtgtatgatggtagggctgtgtgtccgtgctgaaccagccgcctttgggcttcacacttcactttccctttcctgttcctgtacctgagcagtgctgctgacagtgcagagctgcaggtggcaatgagggccccagtgggagctgcaggcagcctggggtggtggtggcactgcatcactctgtcagccacactgcagcmcgatctgccccttgccctgtgcacttagtacgtagagggcccctgaagcaaagtgctcctttgtgctaacttccagggagaaactgaacaccaagcctacctttgtgctctgggaagggtggagagaaaaaccttctcctgttcctaaaatgcctgggttgccctggaaagaacgtgcacatgatgagtagtgcagccttgtgctgtgtcagctcttgttatctgtcctacctttgttttctgtgttctctagacctcagcagcccaacctacaatttaacctgaaagcaacagaggtgt

SEQ ID NO: 56100 - DNA, 600 bp, Chicken  19866894310427_2
cacataccagccatgcactaggtttaatgcttgtccctcggatgggaaatcccacaggcagcagtgcctctgggacagctcccgcagtgccctctgcaactgtaatgatttgtagtatttatcaagaagtaaagcaattaaaaaatgctgctctacagctcaccaatctagctgtaatagcagccaaagagttcagctgtgtcagggaatgcggtgggtcagctgaggacaagatgacaaacacagctttctgccagcctggactcctcagtcctgctcattccagtggaagggaccctygcaccgtaatttgtgtcatggaaaatgatgattttttaaaycttggttcttagcttgaagcatggcaaacagattaattgaacagtctgggaaatcgatcagcaaatgctgcccagcaggaaagcctcttcctgtctgttcctgtcctcacagaagtatcatcacttgtctgatgagaaagatgcactaaaatggcagtgtgaagttcatgagttgcacggtacactcacacaagggcacagaaggaactctgttagatggcacagcagaataagcagccttggagctggcactggctcc

SEQ ID NO: 56101 - DNA, 600 bp, Chicken  19866894310427_3
atgggaaatcccacaggcagcagtgcctctgggacagctcccgcagtgccctctgcaactgtaatgatttgtagtatttatcaagaagtaaagcaattaaaaaatgctgctctacagctcaccaatctagctgtaatagcagccaaagagttcagctgtgtcagggaatgcggtgggtcagctgaggacaagatgacaaacacagctttctgccagcctggactcctcagtcctgctcattccagtggaagggaccctygcaccgtaatttgtgtcatggaaaatgatgattttttaaaycttggttcttagcttgaagcatggcaaacagattaattgaacagtctgggaaatcgatcagcaaatgctgcccagcaggaaagcctcttcctgtctgttcctgtcctcacagaagtatcatcacttgtctgatgagaaagatgcactaaaatggcagtgtgaagttcatgagttgcacggtacactcacacaagggcacagaaggaactctgttagatggcacagcagaataagcagccttggagctggcactggctcctggcccccacctcactgcggcacctccctgcttaccttgct

SEQ ID NO: 56102 - DNA, 600 bp, Chicken  19866894310429_1
ccaagctttctccttgggcctcttctcttcctccctaagaaaaccaaatcctacaaaccctaccctaaagtctgcttgatagttaattactggaataagtagacttgcaatgactcaagctggatgattacgctgacaaatctatttaacagctctgtcttctgactgaagaaaaatattttagcaaagactgactcatcaaaatggtgatgtgactgaaaattttcattcactgagttaaagcaccataatacaacttaacataaatactacttttgctcacgtgacagcaaagaactyaatattttaaagtcacatacaaactgtcaaacccctcaagatgatctctcaatgacacaaaatctctttgatgacccaagcatgactgccactttaaagctttttagatgaacatttggcaagactgatgttccaataaatatgatcatatacatcatacatgaagagaatgaaaagatttaaagattacccaaggttaaattttatcagcttaacattctaagacattttctgcacactcagacacttaatacacttagaaatctatttcatgttagattccaggttttcgaacaaata

SEQ ID NO: 56103 - DNA, 600 bp, Chicken  19866894310435_1
gtaactctcaaagtaggttttgtatcctaaaattatgccatgggatgtaaggattaagatttaggccctggaactgaaaatgtgcactcgagaaggaagctttgcactctgaagacaaggcctggacccccaaaaaggggctgcagggccataaatgaggctttaccaagagatgtctaagacacaccaaagaggatctgacactaacttttgcttcatggaagcacatttctcattccccttagctgactgggcagtgccccaaggcatgctgggaaatgtagtccacaagagatacargaaagtagctgctgcttaataatggtggactttgacccttaaaatgggggttttgtttcttcaatgaaccctagaagtgagagtctggtgccaaaaatggcagatgtggaccctaaaatgaaacctttgtcacataaaatttgctgtcctttaaatgaggctttggatcatgcagtgaggcactgagccttctaaagagggttttgagccctctaaacagggctttggactaacaaggaggcattggagccataaatgaagttatgggcccactaagtgggagtctgcgcactcaacatg

SEQ ID NO: 56104 - DNA, 600 bp, Chicken  19866894310439_1
ttaatagaaaaactctcagtgacttttgtgaaactgttttaggctttaaaacacactgcagtgtttgtgagcgcaacagctgtggctgtttgcctaactacaaacacagatacaacatacagctttccagctccagagaacacgtctgagagtccagggggaagcggctgaagtccatgttgcacatggctgtcactgtgatcctggaagtcaaaaatgagaaaggtcgttttctatgaggggtaatgaagggagaacgttaacacagataaacaatttggcatcttgaaagacagcaaraatctgcaagaaaattcttatcasttctygcactcccatggtagctgtaatttcagtacctatcaaggaactaaagtgctgtttcttacactggagtgatactgtcaatacggacacttcctttgtgayttacatccaactatttccctacaaggtaacaacaacaacaaaatacttcaccatttacatatcaagatcccattttgtccagtttgcttaaggttttctcatattcccattgctctgtttcctccatgggtcacaccaccaacaacataaacctatggaacatgataaacc

SEQ ID NO: 56105 - DNA, 600 bp, Chicken  19866894310439_2
tttgtgaaactgttttaggctttaaaacacactgcagtgtttgtgagcgcaacagctgtggctgtttgcctaactacaaacacagatacaacatacagctttccagctccagagaacacgtctgagagtccagggggaagcggctgaagtccatgttgcacatggctgtcactgtgatcctggaagtcaaaaatgagaaaggtcgttttctatgaggggtaatgaagggagaacgttaacacagataaacaatttggcatcttgaaagacagcaaraatctgcaagaaaattcttatcasttctygcactcccatggtagctgtaatttcagtacctatcaaggaactaaagtgctgtttcttacactggagtgatactgtcaatacggacacttcctttgtgayttacatccaactatttccctacaaggtaacaacaacaacaaaatacttcaccatttacatatcaagatcccattttgtccagtttgcttaaggttttctcatattcccattgctctgtttcctccatgggtcacaccaccaacaacataaacctatggaacatgataaaccttattgcaagtcacgtgaactgca

SEQ ID NO: 56106 - DNA, 600 bp, Chicken  19866894310439_3
gaaactgttttaggctttaaaacacactgcagtgtttgtgagcgcaacagctgtggctgtttgcctaactacaaacacagatacaacatacagctttccagctccagagaacacgtctgagagtccagggggaagcggctgaagtccatgttgcacatggctgtcactgtgatcctggaagtcaaaaatgagaaaggtcgttttctatgaggggtaatgaagggagaacgttaacacagataaacaatttggcatcttgaaagacagcaaraatctgcaagaaaattcttatcasttctygcactcccatggtagctgtaatttcagtacctatcaaggaactaaagtgctgtttcttacactggagtgatactgtcaatacggacacttcctttgtgayttacatccaactatttccctacaaggtaacaacaacaacaaaatacttcaccatttacatatcaagatcccattttgtccagtttgcttaaggttttctcatattcccattgctctgtttcctccatgggtcacaccaccaacaacataaacctatggaacatgataaaccttattgcaagtcacgtgaactgcacttaa

SEQ ID NO: 56107 - DNA, 543 bp, Chicken  19866894310439_4
gctccagagaacacgtctgagagtccagggggaagcggctgaagtccatgttgcacatggctgtcactgtgatcctggaagtcaaaaatgagaaaggtcgttttctatgaggggtaatgaagggagaacgttaacacagataaacaatttggcatcttgaaagacagcaaraatctgcaagaaaattcttatcasttctygcactcccatggtagctgtaatttcagtacctatcaaggaactaaagtgctgtttcttacactggagtgatactgtcaatacggacacttcctttgtgayttacatccaactatttccctacaaggtaacaacaacaacaaaatacttcaccatttacatatcaagatcccattttgtccagtttgcttaaggttttctcatattcccattgctctgtttcctccatgggtcacaccaccaacaacataaacctatggaacatgataaaccttattgcaagtcacgtgaactgcacttaaagaagctttttttttttgttccagaaagtatattggtgacttc

SEQ ID NO: 56108 - DNA, 599 bp, Chicken  19866894310442_1
  misc_feature (1)..(185): n is any nucleotide
nnnnnnnnnnnnnnnnnnnnnnnnnnnnnnnnnnnnnnnnnnnnnnnnnnnnnnnnnnnnnnnnnnnnnnnnnnnnnnnnnnnnnnnnnnnnnnnnnnnnnnnnnnnnnnnnnnnnnnnnnnnnnnnnnnnnnnnnnnnnnnnnnnnnnnnnnnnnnnnnnnnnnnnnnnnnnnnnnnnnnnnnntagcagggaagttcttcagatctgctattcagttgtatatcagtaactcaaggtaaatggtgcaggaatgtggtagaaactgaggttcgagtccacccaccatcctagcagcagraaaaatgcttaaaaaagcagatggactgctgtgtagtcattactctgagacttgtacagtttgtaacctgaaatggagacattatgtcattgatggagaaggtcctggcaaaactcctggcctaactcttgatagaagtgaaaacaacaggatgcctttattacatggagacattctgcgtctattggtaaacaggaaacacttatctggacataaagggagacaatatcctacaatagaactaaacagagtaataatgaatyactgatttttttacattttggggtttttttatatac

SEQ ID NO: 56109 - DNA, 600 bp, Chicken  19866894310442_2
actgaggttcgagtccacccaccatcctagcagcagraaaaatgcttaaaaaagcagatggactgctgtgtagtcattactctgagacttgtacagtttgtaacctgaaatggagacattatgtcattgatggagaaggtcctggcaaaactcctggcctaactcttgatagaagtgaaaacaacaggatgcctttattacatggagacattctgcgtctattggtaaacaggaaacacttatctggacataaagggagacaatatcctacaatagaactaaacagagtaataatgaatyactgatttttttacattttggggtttttttatatacaaatttggaacttttttaggaggaggaagagcatgctgagaccacaagctgaagcattaggttcataatcttaaccagctgatcttctatgtgcaagtgatatagatagaagaaaatgtgttatttygacatctggttattttttatcaccatattcacactattttctcttgtatgtattttttttttaattcttttctttctgattttagaaacaagtggttacaggaagttcccagtatagctttttgtctggaagagatt

SEQ ID NO: 56110 - DNA, 600 bp, Chicken  19866894310442_3
tcttgatagaagtgaaaacaacaggatgcctttattacatggagacattctgcgtctattggtaaacaggaaacacttatctggacataaagggagacaatatcctacaatagaactaaacagagtaataatgaatyactgatttttttacattttggggtttttttatatacaaatttggaacttttttaggaggaggaagagcatgctgagaccacaagctgaagcattaggttcataatcttaaccagctgatcttctatgtgcaagtgatatagatagaagaaaatgtgttatttygacatctggttattttttatcaccatattcacactattttctcttgtatgtattttttttttaattcttttctttctgattttagaaacaagtggttacaggaagttcccagtatagctttttgtctggaagagatttggctatttcacaaagcaggaaagtattttttcattcagaaatgagcttcagatctcattaaatatataacttttcctagttccaagcacacttctatattcattctcctcccagttcatggagatagtctacttagctaggaaaagaatttggcagcaggaa

SEQ ID NO: 56111 - DNA, 600 bp, Chicken  19866894310448_1
gtatgtcacaaagaccctcttaggtataacaaatgaaaaatatgatttaactcagattaattttaagtttttgcgttacatttctgctttcacctcatctctgtcaattcactcctactgagcaggatgtgaggacatgagctggaattttgtttaaggccatgttagaaacttgctgtgatttacacatgtgcaaatcccaagttcctccactagcataaatgaaagcacaatttggcttgaaacatgacctgcaacaagattacatgattttttctttcttttctctctctctctctytytttttttttttaaataattaggtgtagcttcaaaataaaaatccaatgacttcataggcagagtgcagaactgacggatttgtgctagtctgctacagaataagtgagattggactttgactgtttactggaatcccatcccaaatatatattcacaacacctctcattgtgaacctcttgttctctccttgaacagaacatgctccaagaataagtacagtgctccttcacaagagatctgcaartaactgcaaatcatatcagctttgataagtattggccctcccacattcatgc

SEQ ID NO: 56112 - DNA, 600 bp, Chicken  19866894310448_2
atgtcacaaagaccctcttaggtataacaaatgaaaaatatgatttaactcagattaattttaagtttttgcgttacatttctgctttcacctcatctctgtcaattcactcctactgagcaggatgtgaggacatgagctggaattttgtttaaggccatgttagaaacttgctgtgatttacacatgtgcaaatcccaagttcctccactagcataaatgaaagcacaatttggcttgaaacatgacctgcaacaagattacatgattttttctttcttttctctctctctctctytytttttttttttaaataattaggtgtagcttcaaaataaaaatccaatgacttcataggcagagtgcagaactgacggatttgtgctagtctgctacagaataagtgagattggactttgactgtttactggaatcccatcccaaatatatattcacaacacctctcattgtgaacctcttgttctctccttgaacagaacatgctccaagaataagtacagtgctccttcacaagagatctgcaartaactgcaaatcatatcagctttgataagtattggccctcccacattcatgctg

SEQ ID NO: 56113 - DNA, 600 bp, Chicken  19866894310448_3
gacctgcaacaagattacatgattttttctttcttttctctctctctctctytytttttttttttaaataattaggtgtagcttcaaaataaaaatccaatgacttcataggcagagtgcagaactgacggatttgtgctagtctgctacagaataagtgagattggactttgactgtttactggaatcccatcccaaatatatattcacaacacctctcattgtgaacctcttgttctctccttgaacagaacatgctccaagaataagtacagtgctccttcacaagagatctgcaartaactgcaaatcatatcagctttgataagtattggccctcccacattcatgctgagaaggtatgctacrcagatcagcactattcrggtgtattagcagataataaaggatcagaatgaaacatgtttcctatttacaaggagtagcgctgcctctcagagaattacttttaagaactatcaccctgctttagtatttaaaaaaaactacagaattcccacttacaaaaagccttctgaaaagtattatattacagaatgactcaacctttaagtaactgggggcaaataacccacaaac

SEQ ID NO: 56114 - DNA, 600 bp, Chicken  19866894310448_4
aattaggtgtagcttcaaaataaaaatccaatgacttcataggcagagtgcagaactgacggatttgtgctagtctgctacagaataagtgagattggactttgactgtttactggaatcccatcccaaatatatattcacaacacctctcattgtgaacctcttgttctctccttgaacagaacatgctccaagaataagtacagtgctccttcacaagagatctgcaartaactgcaaatcatatcagctttgataagtattggccctcccacattcatgctgagaaggtatgctacrcagatcagcactattcrggtgtattagcagataataaaggatcagaatgaaacatgtttcctatttacaaggagtagcgctgcctctcagagaattacttttaagaactatcaccctgctttagtatttaaaaaaaactacagaattcccacttacaaaaagccttctgaaaagtattatattacagaatgactcaacctttaagtaactgggggcaaataacccacaaacaccttggtgccaaagtatgtttttgttaatgaacgcatttgttatgtttatatcagacatattcttgaa

SEQ ID NO: 56115 - DNA, 600 bp, Chicken  19866894310448_5
aaataaaaatccaatgacttcataggcagagtgcagaactgacggatttgtgctagtctgctacagaataagtgagattggactttgactgtttactggaatcccatcccaaatatatattcacaacacctctcattgtgaacctcttgttctctccttgaacagaacatgctccaagaataagtacagtgctccttcacaagagatctgcaartaactgcaaatcatatcagctttgataagtattggccctcccacattcatgctgagaaggtatgctacrcagatcagcactattcrggtgtattagcagataataaaggatcagaatgaaacatgtttcctatttacaaggagtagcgctgcctctcagagaattacttttaagaactatcaccctgctttagtatttaaaaaaaactacagaattcccacttacaaaaagccttctgaaaagtattatattacagaatgactcaacctttaagtaactgggggcaaataacccacaaacaccttggtgccaaagtatgtttttgttaatgaacgcatttgttatgtttatatcagacatattcttgaaacctcaaaaacatagca

SEQ ID NO: 56116 - DNA, 599 bp, Chicken  19866894310449_1
  misc_feature (1)..(27): n is any nucleotide
nnnnnnnnnnnnnnnnnnnnnnnnnnntatcgaaaagtcaggtaagaggcatttttctttattgtattgcccagattttcagttgcacagccactatacagacacatttcaaactttgtgataaaaatgtgcaatataataacactgaaaagccacttactcagcttactgttagcacagccaattccatggtccagtatttgctgtatggtgggcacgaggaccccctgtgtaacatgtactggggcatgtagctggctaagaatttggtcttttgtgcataaagtgtcttatacagaraacggcaagcacagttggcagctatgaatcacagtatgaacaaagggagattcactgatggttctcttcagttgtatttgagcattgatgatttttcttaaggctgaaggccagagggacagatcacataggtttttgaaacctcttcaattctatcctgaattgctattgccaatactatttctgctactgtattaacaagcatcagcaggaactcattcatttagttcayagaactacaatctactcctaacagtagtgctagtacttgatgttttgttttgttctttcatgtatgg

SEQ ID NO: 56117 - DNA, 600 bp, Chicken  19866894310449_2
taacatgtactggggcatgtagctggctaagaatttggtcttttgtgcataaagtgtcttatacagaraacggcaagcacagttggcagctatgaatcacagtatgaacaaagggagattcactgatggttctcttcagttgtatttgagcattgatgatttttcttaaggctgaaggccagagggacagatcacataggtttttgaaacctcttcaattctatcctgaattgctattgccaatactatttctgctactgtattaacaagcatcagcaggaactcattcatttagttcayagaactacaatctactcctaacagtagtgctagtacttgatgttttgttttgttctttcatgtatgggatctgctctcttacacagaaagtagttacagagaacgttcagattttaagcataggtgttttatggaatcatagaatcaaatgctagaaaatttcagtcagctagcaaatggggaatggtgacttacttctggaaagttctgcaggatgagaatgactaaaagaactcctcagtcttagctatagtagaatccaacgcttatcatagaaagtcaaaagtaaagtggacataa

SEQ ID NO: 56118 - DNA, 600 bp, Chicken  19866894310457_1
gcactagccttgactacagccattgcattcttaaacttcataacattctataattttattagctttctcagttttagggagcaggaagaagtcctatatacataatattcataatcttttaaacagactgtacctcgttgcaatgaaacattaatttcctgtctcaaataagtgcaagttatccatctgtctattcattttccttgatggaaggacaattgtgcctttgtgctttaagaaaaaaagaaaaatgctaccagtaatgccccatctaatttattctgacgtctcttttgttcrcatgtaatacagcccattaaaatatctgcagtgtagtagaacatttctacaactatttttcagtgccagtttcttcacaaagacactactccctccttcatctggtcttgagaaagaatgttatattcttatcttcytgagaaactttgttctttgttgaaacttaaaacccagcagagaggtttgtactttttgagtgaggttatcagacttagtaatttaccacttcaatttaccagtttaaggtgctggcaggggaggatggtatgaggttgctctctctgctgctactgaaggaga

SEQ ID NO: 56119 - DNA, 600 bp, Chicken  19866894310457_2
ttgcaatgaaacattaatttcctgtctcaaataagtgcaagttatccatctgtctattcattttccttgatggaaggacaattgtgcctttgtgctttaagaaaaaaagaaaaatgctaccagtaatgccccatctaatttattctgacgtctcttttgttcrcatgtaatacagcccattaaaatatctgcagtgtagtagaacatttctacaactatttttcagtgccagtttcttcacaaagacactactccctccttcatctggtcttgagaaagaatgttatattcttatcttcytgagaaactttgttctttgttgaaacttaaaacccagcagagaggtttgtactttttgagtgaggttatcagacttagtaatttaccacttcaatttaccagtttaaggtgctggcaggggaggatggtatgaggttgctctctctgctgctactgaaggagactgaaattagcacaggcctgaaaaatgattattggcccttctgagggagaggggcctttgggaagtgggcagatgtctcccttctcagcctatagaacaagatctggctcctctcagggcagcgctagtggaggagg

SEQ ID NO: 56120 - DNA, 599 bp, Chicken  19866894310459_1
  misc_feature (1)..(160): n is any nucleotide
nnnnnnnnnnnnnnnnnnnnnnnnnnnnnnnnnnnnnnnnnnnnnnnnnnnnnnnnnnnnnnnnnnnnnnnnnnnnnnnnnnnnnnnnnnnnnnnnnnnnnnnnnnnnnnnnnnnnnnnnnnnnnnnnnnnnnnnnnnnnnnnnnnnnnnnnnnnnnnnntgattgcataaaaaattatactaattacattattccacagccatctggctatggaagaagattttgacatgcctaaattaaatcaattcctttctttttatttcccatcaaaaataatcccttataatcactaagaaaamcactgataaataaggtccatacatactaatacactaagaatgcattctgtttaatgtagcagagtactaattatttttctaaaatctaatttttaaagatttaatgtatgtgcaaaattcaaactcttaggtttgagttctgttgaccaaaaacagatttcaaaaaccttttgtactgctttgagatatttcctctgatctccaaatactttttacaaaggtcatgggatatccaaagatttcatatacactagccctgaaatgtctgagcacctagaacagttgttggtactatgtaa

SEQ ID NO: 56121 - DNA, 600 bp, Chicken  19866894310459_2
ccaaatactttttacaaaggtcatgggatatccaaagatttcatatacactagccctgaaatgtctgagcacctagaacagttgttggtactatgtaaatatctaaatccttctccaaagttgataatcatctaaatgcctacctttcaattacagtcaaatgacagctggtatcatgttgtcaggtgcataactctctaaactcacttagctaaaagcagtggataaaacagtggtgaactgtattatctgaaatatcaatgtgttattctattctgcccatactcctctagaagtatmcatgggacttccatagatcttgtgtaatgtttgccaatgagtgaaatctaaaaaggcaatgtctttaggyaggcatctgaatcaagtcyaaaatctccgcacaaatacagtggcattttagataccattttacaaacagaatcctaaatatggttgtctaaatctgtactgcaacttgtccacactagtaatagacttgctttctctataaaggagaaacacacaatagatatttaaaatttgagaatactacatttaatttcttaacagagactgatgtttgtgttaattttgtgcagc

SEQ ID NO: 56122 - DNA, 600 bp, Chicken  19866894310459_3
acctagaacagttgttggtactatgtaaatatctaaatccttctccaaagttgataatcatctaaatgcctacctttcaattacagtcaaatgacagctggtatcatgttgtcaggtgcataactctctaaactcacttagctaaaagcagtggataaaacagtggtgaactgtattatctgaaatatcaatgtgttattctattctgcccatactcctctagaagtatmcatgggacttccatagatcttgtgtaatgtttgccaatgagtgaaatctaaaaaggcaatgtctttaggyaggcatctgaatcaagtcyaaaatctccgcacaaatacagtggcattttagataccattttacaaacagaatcctaaatatggttgtctaaatctgtactgcaacttgtccacactagtaatagacttgctttctctataaaggagaaacacacaatagatatttaaaatttgagaatactacatttaatttcttaacagagactgatgtttgtgttaattttgtgcagccattggctgccaaggctatataacttgaaaacagatcataggacattcatgagaagacaaaagattatag

SEQ ID NO: 56123 - DNA, 600 bp, Chicken  19866894310459_4
actatgtaaatatctaaatccttctccaaagttgataatcatctaaatgcctacctttcaattacagtcaaatgacagctggtatcatgttgtcaggtgcataactctctaaactcacttagctaaaagcagtggataaaacagtggtgaactgtattatctgaaatatcaatgtgttattctattctgcccatactcctctagaagtatmcatgggacttccatagatcttgtgtaatgtttgccaatgagtgaaatctaaaaaggcaatgtctttaggyaggcatctgaatcaagtcyaaaatctccgcacaaatacagtggcattttagataccattttacaaacagaatcctaaatatggttgtctaaatctgtactgcaacttgtccacactagtaatagacttgctttctctataaaggagaaacacacaatagatatttaaaatttgagaatactacatttaatttcttaacagagactgatgtttgtgttaattttgtgcagccattggctgccaaggctatataacttgaaaacagatcataggacattcatgagaagacaaaagattatagtggtactgaaaataaaaaa

SEQ ID NO: 56124 - DNA, 600 bp, Chicken  19866894310462_1
tacgggcctgcctgagcgccagctcattcctacaatgggtggatgtcaactcaagagtgagaaccccactgctgatccttctctgccctgtccatgtgcagcaaggaatgcataaatggaggcagggccagccctgccctggagatacaacctgcaggaacagccttgggtctgggatacacaacgtgctcctgaggaaaacaaaagcaaacagcaactcccagcacccggtgcagctctcagccagagatctccacctgccaattagatttcctccgccaatttgtatggagaatgacraagaggaaatgccagatgctgctgggcacgcagaacagactcgatgtgtgtgtttaaagcactaataactcccttcctgctgaaagagggaaaagactttctcttaatcgtttcttgcatcagtaatcagagagaggagcagatggtgccagaagtacagtaatatgcccattaaaataacctcagttgctgatgagttagcaccagagtccatgcagcaaacacctttacgagagcccagctccagcagaaagcagcggctcatgccatgagacaggggaaataagaacttgctagcaa

SEQ ID NO: 56125 - DNA, 600 bp, Chicken  19866894310467_1
acagcttctgccagaggagcacgtgcccagggtttccagtatcactatgcattcttgcctcttttgagttcctataagagcaatactcagcctcaaacttcttaaatcacaagccaaagagagtatagctgtgcacaagcatgagtgtaatgttatcaggccatattctaaaacagtactaagaatactgccagaactactgcaaacaggtatcaatggaccatcaaagattctttctggtgtgtttttcacaagtcttaaactaaaattgtaagccaccttgatagacatgctaacttyggaaactcttctgttcagccagtttcaaattcaacagtttggaaagcactgtatccatgtcactgttgacatcctgactgccaagaagttacagggcaagtttaaagaccctttaatcttttcaataattatgccttcactgaggtacatagctgactagataaaataagtacctacacactttttcccctgtctccacaatgtaaattattaactataattagaggactgagggaaaatggaagtaattattttcagccttgttaagaactgtttcagttagatcacctcctaaatgtc

SEQ ID NO: 56126 - DNA, 599 bp, Chicken  19866894310469_1
  misc_feature (1)..(89): n is any nucleotide
nnnnnnnnnnnnnnnnnnnnnnnnnnnnnnnnnnnnnnnnnnnnnnnnnnnnnnnnnnnnnnnnnnnnnnnnnnnnnnnnnnnnnnnnntcatattcagagggaccctcccccgactccctgttctagacgtgtgtatgtgactgctgcatagttttaagccactctggatggtgactcttcctgtgcatgctgtgtacatgcagagcattccacagaaagacaaaatacattatcaggttttgcagtatcttgttcacgaaacatcagcttttgcatttactcaaacttaacaatggaytkcaagttacagatacactgagtcatttgaaagcaaaacctagaagaaaccccttgaaaaaaaggctggattgaatgtgcatgaacaaaaggctcaggaaatacaaaagtagtgaacagtagtttaatacatgcagtgcagtaacatgcatctaytggacattttgatgtcatcattagctcagcagtgtttttttcacagcgctcgtgagcgtacatgccctgattccatgctagggcatggaagaatgtaagagccactcttctgaccttataatttatgaagaggaggaaaaaaat

SEQ ID NO: 56127 - DNA, 599 bp, Chicken  19866894310469_2
  misc_feature (1)..(87): n is any nucleotide
nnnnnnnnnnnnnnnnnnnnnnnnnnnnnnnnnnnnnnnnnnnnnnnnnnnnnnnnnnnnnnnnnnnnnnnnnnnnnnnnnnnnnnntcatattcagagggaccctcccccgactccctgttctagacgtgtgtatgtgactgctgcatagttttaagccactctggatggtgactcttcctgtgcatgctgtgtacatgcagagcattccacagaaagacaaaatacattatcaggttttgcagtatcttgttcacgaaacatcagcttttgcatttactcaaacttaacaatggaytkcaagttacagatacactgagtcatttgaaagcaaaacctagaagaaaccccttgaaaaaaaggctggattgaatgtgcatgaacaaaaggctcaggaaatacaaaagtagtgaacagtagtttaatacatgcagtgcagtaacatgcatctaytggacattttgatgtcatcattagctcagcagtgtttttttcacagcgctcgtgagcgtacatgccctgattccatgctagggcatggaagaatgtaagagccactcttctgaccttataatttatgaagaggaggaaaaaaatag

SEQ ID NO: 56128 - DNA, 600 bp, Chicken  19866894310469_3
ttaagccactctggatggtgactcttcctgtgcatgctgtgtacatgcagagcattccacagaaagacaaaatacattatcaggttttgcagtatcttgttcacgaaacatcagcttttgcatttactcaaacttaacaatggaytkcaagttacagatacactgagtcatttgaaagcaaaacctagaagaaaccccttgaaaaaaaggctggattgaatgtgcatgaacaaaaggctcaggaaatacaaaagtagtgaacagtagtttaatacatgcagtgcagtaacatgcatctaytggacattttgatgtcatcattagctcagcagtgtttttttcacagcgctcgtgagcgtacatgccctgattccatgctagggcatggaagaatgtaagagccactcttctgaccttataatttatgaagaggaggaaaaaaatagctaactggacagtgcagtggcccgtttcaaggtggggaaggagtctcaaaaatcagtctggataaagagcctttatccttggctttaaacactatttacacagctttgacccaacagcacaaagtcagacctaaaaacctgaaccagctcctgg

SEQ ID NO: 56129 - DNA, 492 bp, Chicken  19866894310470_1
taaggtctgggaaggggtggatcctagctcctgagggagcactgcatgcacctgagctcccctgggctgaccctgccctcccaccaggtgctcaatcactggttcaagccatgacttggcatttccactacagatgtggtgtaggaccacgtcagaggccttgcataagtccctgtagataacatcagttgccctctgtccatttataccatcagctcatcatagaaggctaccagattggtaaggcacgatctgccctcggtgaagctgtgctggttttcatgaggattcagccctgcrtgctggcaggtcttgcagaaagtgagcaaaaaagaattgcccaaatgaaacacagcttttgcatttctctgagcatttacaggaaggaagcaaaggaggttcagctgctcagatgcactccagcattcttaaagccaacccctgcagctcagtgctgaagggctcttcctgtttaatggagggaacatcatt

SEQ ID NO: 56130 - DNA, 599 bp, Chicken  19866894310476_1
  misc_feature (1)..(267): n is any nucleotide
nnnnnnnnnnnnnnnnnnnnnnnnnnnnnnnnnnnnnnnnnnnnnnnnnnnnnnnnnnnnnnnnnnnnnnnnnnnnnnnnnnnnnnnnnnnnnnnnnnnnnnnnnnnnnnnnnnnnnnnnnnnnnnnnnnnnnnnnnnnnnnnnnnnnnnnnnnnnnnnnnnnnnnnnnnnnnnnnnnnnnnnnnnnnnnnnnnnnnnnnnnnnnnnnnnnnnnnnnnnnnnnnnnnnnnnnnnnnnnnnnnnnnnnnnnnnnnnnnnnnnnnnnnntcacccctatgtcacctcctgacatcacccccrtggtgtcaccgtgcgatgtcgctctctgatgtcatccccgtggygtccccctccccccccgttgacacccccatcacatcgtccccaaggcgtcgtcccctgttacgtcacatcacgtcaccccgtgatgtcacccccacggcacgacctatgatgtcagcagtgatggcagacatctcacgtgtgacgtcgctgattgcagctgcgacrtcacgagacccaattgtgacgtcgcagggctcgtgtgtgatgtcacggtcctcgtttgtgatgtcatagtcgccatctgtgtaatcaca

SEQ ID NO: 56131 - DNA, 599 bp, Chicken  19866894310476_2
  misc_feature (1)..(223): n is any nucleotide
nnnnnnnnnnnnnnnnnnnnnnnnnnnnnnnnnnnnnnnnnnnnnnnnnnnnnnnnnnnnnnnnnnnnnnnnnnnnnnnnnnnnnnnnnnnnnnnnnnnnnnnnnnnnnnnnnnnnnnnnnnnnnnnnnnnnnnnnnnnnnnnnnnnnnnnnnnnnnnnnnnnnnnnnnnnnnnnnnnnnnnnnnnnnnnnnnnnnnnnnnnnnnnnnnnnnnnnnnnnnnnntcacccctatgtcacctcctgacatcacccccrtggtgtcaccgtgcgatgtcgctctctgatgtcatccccgtggygtccccctccccccccgttgacacccccatcacatcgtccccaaggcgtcgtcccctgttacgtcacatcacgtcaccccgtgatgtcacccccacggcacgacctatgatgtcagcagtgatggcagacatctcacgtgtgacgtcgctgattgcagctgcgacrtcacgagacccaattgtgacgtcgcagggctcgtgtgtgatgtcacggtcctcgtttgtgatgtcatagtcgccatctgtgtaatcacagtcattgtgtgtgacatcgcagttctctcttgaggtgtcacatc

SEQ ID NO: 56132 - DNA, 582 bp, Chicken  19866894310476_3
  misc_feature (1)..(57): n is any nucleotide
nnnnnnnnnnnnnnnnnnnnnnnnnnnnnnnnnnnnnnnnnnnnnnnnnnnnnnnnntcacccctatgtcacctcctgacatcacccccrtggtgtcaccgtgcgatgtcgctctctgatgtcatccccgtggygtccccctccccccccgttgacacccccatcacatcgtccccaaggcgtcgtcccctgttacgtcacatcacgtcaccccgtgatgtcacccccacggcacgacctatgatgtcagcagtgatggcagacatctcacgtgtgacgtcgctgattgcagctgcgacrtcacgagacccaattgtgacgtcgcagggctcgtgtgtgatgtcacggtcctcgtttgtgatgtcatagtcgccatctgtgtaatcacagtcattgtgtgtgacatcgcagttctctcttgaggtgtcacatcctcacctatgacatcagtgtccccatatgtgatgtcacggtcccatctatgacatcacacttctcacccatgatgttgacaaccccatctatggcatgcctgtccccgtctctgacgtcacagtcctcacttatcacaacacatctcca

SEQ ID NO: 56133 - DNA, 600 bp, Chicken  19866894310484_1
ttgaacaggctcgtattttggctcaggtccctggagcgcacatcccttgctaagaaacatgcatctggaaaagaggatctatgataaggggacaagtccagggcaacttccccaaagtcactgctgtcccacaactggcagctgcacttctgctgggcacatttctctcccaggtgctattctccttaaacatcctgaagaacggcagcagaaaagtctattaactgcatcctcgagaatgtatttacaataactgtagtcacacataaacatgatatctggcattaaacagacaaattkycagtcatgtggattccaaaacagctaacacrgcagcctgatggatgcaggcagaaaggaaccagaaatttgagttcagtggtgcccaaacactgcgaaatacatacccttcaaaactaaatcaataacaaaatcccttcagaatgcagaaattatttcactaatatgcagtgataataattcacgtctcacaacatttcctgacttttgcattgctatttactctccccctgagtatagcattatttttaccatgacaatttgtgaataatacacagataataaataggctctgagata

SEQ ID NO: 56134 - DNA, 600 bp, Chicken  19866894310484_2
tgaacaggctcgtattttggctcaggtccctggagcgcacatcccttgctaagaaacatgcatctggaaaagaggatctatgataaggggacaagtccagggcaacttccccaaagtcactgctgtcccacaactggcagctgcacttctgctgggcacatttctctcccaggtgctattctccttaaacatcctgaagaacggcagcagaaaagtctattaactgcatcctcgagaatgtatttacaataactgtagtcacacataaacatgatatctggcattaaacagacaaattkycagtcatgtggattccaaaacagctaacacrgcagcctgatggatgcaggcagaaaggaaccagaaatttgagttcagtggtgcccaaacactgcgaaatacatacccttcaaaactaaatcaataacaaaatcccttcagaatgcagaaattatttcactaatatgcagtgataataattcacgtctcacaacatttcctgacttttgcattgctatttactctccccctgagtatagcattatttttaccatgacaatttgtgaataatacacagataataaataggctctgagatac

SEQ ID NO: 56135 - DNA, 600 bp, Chicken  19866894310484_3
ggagcgcacatcccttgctaagaaacatgcatctggaaaagaggatctatgataaggggacaagtccagggcaacttccccaaagtcactgctgtcccacaactggcagctgcacttctgctgggcacatttctctcccaggtgctattctccttaaacatcctgaagaacggcagcagaaaagtctattaactgcatcctcgagaatgtatttacaataactgtagtcacacataaacatgatatctggcattaaacagacaaattkycagtcatgtggattccaaaacagctaacacrgcagcctgatggatgcaggcagaaaggaaccagaaatttgagttcagtggtgcccaaacactgcgaaatacatacccttcaaaactaaatcaataacaaaatcccttcagaatgcagaaattatttcactaatatgcagtgataataattcacgtctcacaacatttcctgacttttgcattgctatttactctccccctgagtatagcattatttttaccatgacaatttgtgaataatacacagataataaataggctctgagatacatgtatagagtagttatgaaatggacatcga

SEQ ID NO: 56136 - DNA, 600 bp, Chicken  19866894310485_1
atcctaggtaagtgcgtgctcttgcaatgaaactcaagtacttctctcaaatacacagcatttttgttgaaatgatcacaacactcttaccaggttatgaataattgtgtcaaaactcatcttctccacgaggctgttactgctttgatagcagcccagatgcagttgtgaagctttacactttatggcaatgaagctattttcagtgagctgcttttcccatacatgagcaaccaaccagatatgtagactaaacccagctcgcaggtcaggaggagagtgaattcttagaatacaccwgtgtctaaaccaattacttttatgtaagtcatctgaggagatggagaggatagtttgacaagattattttattcttgttttttgactctgtttctttctactttgtgaaagaaaatgggcaaattcagcacggaattctgagactgaaaattgcaagagagccttttttgaggcagacactgtgagaaattccatctctgctatcttgagtggttttcacctctgccactgacacactgcttttcctttgctaaagtgtccagcttcccttttgagacttgtcatttgtaggcatgaaga

SEQ ID NO: 56137 - DNA, 600 bp, Chicken  19866894310488_1
tcattcaaacctcacagcagaaccagcaaatgcaagtctaatgtacaatttcaactgcccccaccgttaaccagataaatgcattacattgtgcaaacaaaacccagtgctgtgatggacagcacaagaagcagtgcactgcctggagctgcagacctgctcactgaagagatgctctaaaaatgaacaaatcaataacacaatgagcttttctgctttaacatgtacccagcaggacactaataagagtctaagtgctaaaatgtttgcagtgaggaagggactcgttccctgtgatgrgtggggggctgctgcgtttggggctccagtgaccaacctgacaaaaagaggagactaagatcattcaaagacaaatcagccttctggattcctgcatcacgtgtgctctttttatggaaaacccagctattacctcaattttggacatcactgaagatgttatacaatatcttttcccagtatgaaaacatttgcgttgtaacccagccatgaacaagcctcagcacaagccatgctgcctggaaagcatgcaaagccagcagtgcagctctcctccagaaagcacagcaatgtgggatg

SEQ ID NO: 56138 - DNA, 599 bp, Chicken  19866894310492_1
  misc_feature (1)..(21): n is any nucleotide
nnnnnnnnnnnnnnnnnnnnnagtgcaagtttacctctcgggcagcagagttcgtttctttgttttcccttctgtccctgtgcccccccgctccccactctctgtttttatctcgttgggtctctgtttgatcccaaagcggaccaacagcgtgcacagccaggctgcattgctgagcaaggagctgcttccagcactgaaccactgctgcgcgctccccgatcctctgatgccggcacacatcacttaaagacagacaggaaaaaaaaaccccacaaaacctacaggtgaaatgtgttkttctcgtggtgaggatttgctctgtgtgcattttcctgcctggacggcgctgtgctgggtgggaggtgtgctctgctcggtgggaaggagctctcagcagggccaggccttgggggccgagcactcagaaacaatgatgttacacgtagaggctgaagaatcctgtttaaaagaggggggggaaaaaagaaatcatggtgaattcaaaaaagaaatggacgtatttaatgcaagcagaatggcactgtgtggtacaatcacaaagaagctgttctcatagctatgaactgtatttatcc

SEQ ID NO: 56139 - DNA, 600 bp, Chicken  19866894310492_2
tctattgatgctctcgtgtttacaaattgtgtatacttttatttctttgatcttgttttaattttattttttggcgtattctttcaggtcatttgcttcagtaataaatgcgatcgtttgttttcaagtaattggtttccacctttccatgtatttgtacattgtacatagttcttcagtattagagggagccgtattgtttgtcatatttacaatatgtgttggtgctcatttgagaaaataaaattttcaagtactaaagctgtgctgtgtcgctgtgtccatctcctcctgttctgygtgcamattcctgaaggctgagggcagcaggagttggctgtggagcacgtggtgcactgaactcaggaatagtcygactgcactccttgctgcgccatcggtgctgggcaccaaaaccccttcagcacacaaaagctgtgctcatggagcagtatcccactgcctggggagcagctcgtgcttcagcagggggagtgcaggctgagggtgtgctgtggagcagtccctatggatggcagaagagctgctccatcctgcaygtgctgtaacacctttctgagccgtctcttgcaggtgccg

SEQ ID NO: 56140 - DNA, 600 bp, Chicken  19866894310492_3
gatgctctcgtgtttacaaattgtgtatacttttatttctttgatcttgttttaattttattttttggcgtattctttcaggtcatttgcttcagtaataaatgcgatcgtttgttttcaagtaattggtttccacctttccatgtatttgtacattgtacatagttcttcagtattagagggagccgtattgtttgtcatatttacaatatgtgttggtgctcatttgagaaaataaaattttcaagtactaaagctgtgctgtgtcgctgtgtccatctcctcctgttctgygtgcamattcctgaaggctgagggcagcaggagttggctgtggagcacgtggtgcactgaactcaggaatagtcygactgcactccttgctgcgccatcggtgctgggcaccaaaaccccttcagcacacaaaagctgtgctcatggagcagtatcccactgcctggggagcagctcgtgcttcagcagggggagtgcaggctgagggtgtgctgtggagcagtccctatggatggcagaagagctgctccatcctgcaygtgctgtaacacctttctgagccgtctcttgcaggtgccggtgctc

SEQ ID NO: 56141 - DNA, 600 bp, Chicken  19866894310492_4
gtattctttcaggtcatttgcttcagtaataaatgcgatcgtttgttttcaagtaattggtttccacctttccatgtatttgtacattgtacatagttcttcagtattagagggagccgtattgtttgtcatatttacaatatgtgttggtgctcatttgagaaaataaaattttcaagtactaaagctgtgctgtgtcgctgtgtccatctcctcctgttctgygtgcamattcctgaaggctgagggcagcaggagttggctgtggagcacgtggtgcactgaactcaggaatagtcygactgcactccttgctgcgccatcggtgctgggcaccaaaaccccttcagcacacaaaagctgtgctcatggagcagtatcccactgcctggggagcagctcgtgcttcagcagggggagtgcaggctgagggtgtgctgtggagcagtccctatggatggcagaagagctgctccatcctgcaygtgctgtaacacctttctgagccgtctcttgcaggtgccggtgctcccagtgtccatctgatccctgggacctgatccatgctgcccacctctctgaaaccctggcaaagcccca

SEQ ID NO: 56142 - DNA, 600 bp, Chicken  19866894310492_5
agctgtgctgtgtcgctgtgtccatctcctcctgttctgygtgcamattcctgaaggctgagggcagcaggagttggctgtggagcacgtggtgcactgaactcaggaatagtcygactgcactccttgctgcgccatcggtgctgggcaccaaaaccccttcagcacacaaaagctgtgctcatggagcagtatcccactgcctggggagcagctcgtgcttcagcagggggagtgcaggctgagggtgtgctgtggagcagtccctatggatggcagaagagctgctccatcctgcaygtgctgtaacacctttctgagccgtctcttgcaggtgccggtgctcccagtgtccatctgatccctgggacctgatccatgctgcccacctctctgaaaccctggcaaagccccaatcaggttgggagcagcactttatttcaggtgttcccaatgagctgctgcagtcatggagtcatagaatggcctgggttgaaaaggaccacagtgctcatccagttccaaccccctgctatgtgcagggtcgccaaccagcagccaggctgcccagagccacatccagcctggcctcgaatgcct

SEQ ID NO: 56143 - DNA, 600 bp, Chicken  19866894310497_1
tgcgtttgaaattttcagaacataattcactgtgtcattttgttaaagctccatttatgattctcttgctttagaaatgaacagattgctgcaattttggaccaaaagaattatgttgaagaactaaacagacaactgaagtaagtattactttgaagtatgcatgtttgtttaggcttacaggtaaagtgcctttatgtccttctctaccacagtactttgtgagagagaacttcagggaaatgggtgaatattcttcgtgctgtagatgtagtgaggctgaaggaagtttctcttttrggagactgagggaggaaatctgttttcakgcttctatttttgatagtcagaaccttttgatagagaaatagcagggcaaaattgattgtgctgttcaggatttataacttcaaatgaatgcaaagcttgatctgaacgcattgtcagaaataccatttcaactgcagtctgtttaacaattgtcaataagtattattgtgtgttgtggatgaatctccatggttttgcatcttgccttggcaaaaaaaaaaaaaaaaaacctgctcagatctccttctgtagaatctgtagtgtagctga

SEQ ID NO: 56144 - DNA, 600 bp, Chicken  19866894310497_2
ctgtgtcattttgttaaagctccatttatgattctcttgctttagaaatgaacagattgctgcaattttggaccaaaagaattatgttgaagaactaaacagacaactgaagtaagtattactttgaagtatgcatgtttgtttaggcttacaggtaaagtgcctttatgtccttctctaccacagtactttgtgagagagaacttcagggaaatgggtgaatattcttcgtgctgtagatgtagtgaggctgaaggaagtttctcttttrggagactgagggaggaaatctgttttcakgcttctatttttgatagtcagaaccttttgatagagaaatagcagggcaaaattgattgtgctgttcaggatttataacttcaaatgaatgcaaagcttgatctgaacgcattgtcagaaataccatttcaactgcagtctgtttaacaattgtcaataagtattattgtgtgttgtggatgaatctccatggttttgcatcttgccttggcaaaaaaaaaaaaaaaaaacctgctcagatctccttctgtagaatctgtagtgtagctgatgttgatcccttttttgacatgcaatcgt

SEQ ID NO: 56145 - DNA, 600 bp, Chicken  19866894310504_1
atctctctagcttcaggctttttctgctgcgcatcgctgtgacatcccgacacctctcacgcaagcagcaccaaaagcagatgtccttgtgaacttcatggcatcttcagttctaatcattacaaacagacgcctcaggcaacactttcatctccaatccctttgtggaggtggatgcaatattgctgagtctgaagcgcaccagtattcatcgcttttatgaagctaaagcctcatgagatttgtaccatctcttcttccttcagctcagagataaacaaaaaggtaaaaaaaaaaaaraagaagaagacaaacattgctatttcatccaaatgagtgctccaacggtatgtgggaacagcaggcacagagctcagcagctgagggtgaaatcctccccttggtgaaccccaggggcctgggcagctgctgcaggagccaaggtttcctccacaaattcccagtcagggacatcaactacgtaacgttaccaggaggagaaaacactctgtcctctgcctgacaaaaccaggcatatcaacaccgcccaaagctcactatctgtttgctcagtacctcgtgtgtttgcactgcgctcac

SEQ ID NO: 56146 - DNA, 600 bp, Chicken  19866894310504_2
aatgattgcaagtgtaacagagccacaacaatcaatagctgcaagtggcagcaatcagacaaaagaaatgcaaacatttacagagcattgaaacgacagtgacacttttgggtcggtgctgattgggcgggtgctggtaaggccttaatgggcagaacaaaagtgtgccaggaacattccagctatgagttttattagcaaatgtgctggtttgtgttttgatctttggtcctctacacatatttctcaggaaaaaagatgctattcacatgacagacctcagtggcttgcagttatttytgtgatgtcaagacaaacatcacttgctttatccttcatgatctcagtgcagactgggcaaacctcaccaaatgtttacagacatatacagacagcctggaacaaagcacatcaccaacactgcctgcatcagcagcgatcccaggtaactgtactgcagcacaagcaagtaatcaaaatggtgctgaccattcttcaggagacaactcagcaacaaggctccaggaggagctcactgtgacctcagtcatttcagtgggattctatgcaagaacatggcatgcaggccaggcccagaag

SEQ ID NO: 56147 - DNA, 600 bp, Chicken  19866894310514_1
attccagatccttgggtacttcgcatgactcgtgcgagacgttctcaggcagaactgaggcagatgagcgctgagagagttatggacactgtgacagagtcagctgctgtagtgatggtggattactgtgagctcaaagtaggtctaatttcaactttaattttgaaataggacttattttttgctatatgtacaactataagacagttgttaaccagtgccagttaaaatagttaatggcagggacatatagaatatgaaataattcaacctatagtggactgtgattgtgtccatgcygacagctgctgttgatttctgtaggctgcwgtttttacttytggtaaatgctttcctaggagacagtttctctacctcgttgttaaaattcaaccagcccttttaccttaaaactgacaacctgctggtactgttacttattaatgttactgctaaacttccaaaaataaaagagccaaggatctcttgctattctaaacttgtatttttttttcctcagcaactgttgcatatggtcactgagctaacaaaagaagctgatatatttcattttgaaaaattatatgctgcaatttgtca

SEQ ID NO: 56148 - DNA, 600 bp, Chicken  19866894310514_2
cgtgcgagacgttctcaggcagaactgaggcagatgagcgctgagagagttatggacactgtgacagagtcagctgctgtagtgatggtggattactgtgagctcaaagtaggtctaatttcaactttaattttgaaataggacttattttttgctatatgtacaactataagacagttgttaaccagtgccagttaaaatagttaatggcagggacatatagaatatgaaataattcaacctatagtggactgtgattgtgtccatgcygacagctgctgttgatttctgtaggctgcwgtttttacttytggtaaatgctttcctaggagacagtttctctacctcgttgttaaaattcaaccagcccttttaccttaaaactgacaacctgctggtactgttacttattaatgttactgctaaacttccaaaaataaaagagccaaggatctcttgctattctaaacttgtatttttttttcctcagcaactgttgcatatggtcactgagctaacaaaagaagctgatatatttcattttgaaaaattatatgctgcaatttgtcagtgtatttatcaacatcgggaagatcataa

SEQ ID NO: 56149 - DNA, 600 bp, Chicken  19866894310514_3
ttctcaggcagaactgaggcagatgagcgctgagagagttatggacactgtgacagagtcagctgctgtagtgatggtggattactgtgagctcaaagtaggtctaatttcaactttaattttgaaataggacttattttttgctatatgtacaactataagacagttgttaaccagtgccagttaaaatagttaatggcagggacatatagaatatgaaataattcaacctatagtggactgtgattgtgtccatgcygacagctgctgttgatttctgtaggctgcwgtttttacttytggtaaatgctttcctaggagacagtttctctacctcgttgttaaaattcaaccagcccttttaccttaaaactgacaacctgctggtactgttacttattaatgttactgctaaacttccaaaaataaaagagccaaggatctcttgctattctaaacttgtatttttttttcctcagcaactgttgcatatggtcactgagctaacaaaagaagctgatatatttcattttgaaaaattatatgctgcaatttgtcagtgtatttatcaacatcgggaagatcataacaaaactgaat

SEQ ID NO: 56150 - DNA, 600 bp, Chicken  19866894310520_1
tttgcctctgcctgtatccttccattctgtctctgcttccaatgtatgtatttgcaaatgaaatgtatgcacatcagtcgcagttagttgcaaaatactcaaaatgctgctataactgaattcattttgctttaaatacacttaatgcactgagtgttttccattccctcaagatgttttaggccggcagtcgcttgaaagtagtgctgctaaaaactgcttgtccagtacaatgaatcaaaaatcccaggcttttcctgcatttagaacatactaaaatattcaacttaaaatgatgtygaagggctgtatgtaagcaacagcttctatgagacataccagatgaaaacttatctggagaagttaggaaagtaccgctgacttttagttttatcagagctgattttccattgccagagtataattcaaaacagtgaaaatacagaaggtcaaagaaataatggtatcccacatgtttatcaagtagccatatggaataagttagtcaaaataatgttattattttctaatctaacttaagtttcttgatgagggatcgcatgcctccccagtgtctataatgaggtagcatgacctcac

SEQ ID NO: 56151 - DNA, 599 bp, Chicken  19866894310523_1
  misc_feature (1)..(74): n is any nucleotide
nnnnnnnnnnnnnnnnnnnnnnnnnnnnnnnnnnnnnnnnnnnnnnnnnnnnnnnnnnnnnnnnnnnnnnnnnntccgctccgaccccgcgccgttcccgcgctgggccgcgctgcctgctgggtagccaatgccgagcggctcccactggctccgcccacccggcgcggagtgcgtcacttccgcttccggcggtgacgggaagcggaagttgctgaggggacgtgtccgagcgcggcgggagccgggatctggggcaatatggtggggcgtggacccggggctgggaccgggagctgrgactgacattgaattgggaacatgggactgggagctgggattggggccgggacctgaaaccgagaccgggaatgggaaccgggagctgagactggaatcaggagctgggaatgggaatgagaacgtggagcaggaacggagtatggggcctggggccggaggcaaggaccggtatagggaatgggaattggggtttagaactgggaaagaggaggggaacaagaacckgggacaaggaccaggagtgagaaccgagggctagggccgggaatgggagctggaggctggggagtgggaaa

SEQ ID NO: 56152 - DNA, 600 bp, Chicken  19866894310523_2
ccgagcgcggcgggagccgggatctggggcaatatggtggggcgtggacccggggctgggaccgggagctgrgactgacattgaattgggaacatgggactgggagctgggattggggccgggacctgaaaccgagaccgggaatgggaaccgggagctgagactggaatcaggagctgggaatgggaatgagaacgtggagcaggaacggagtatggggcctggggccggaggcaaggaccggtatagggaatgggaattggggtttagaactgggaaagaggaggggaacaagaacckgggacaaggaccaggagtgagaaccgagggctagggccgggaatgggagctggaggctggggagtgggaaacagggctgggaccgggagctggggaacgggaaatgggggctggggccgggaaagggatgataggtrgggcagggaacccggggaaccaggaccagggactgagcatggagcccagcagccctgctgccccatgccatgcccccacaggagctagaggcaatgagcaggtacaccagcccagtgaacccggctgtcttcccacacctcaccgtggtgctgctggccattg

SEQ ID NO: 56153 - DNA, 475 bp, Chicken  19866894310523_3
ccgggaatgggaaccgggagctgagactggaatcaggagctgggaatgggaatgagaacgtggagcaggaacggagtatggggcctggggccggaggcaaggaccggtatagggaatgggaattggggtttagaactgggaaagaggaggggaacaagaacckgggacaaggaccaggagtgagaaccgagggctagggccgggaatgggagctggaggctggggagtgggaaacagggctgggaccgggagctggggaacgggaaatgggggctggggccgggaaagggatgataggtrgggcagggaacccggggaaccaggaccagggactgagcatggagcccagcagccctgctgccccatgccatgcccccacaggagctagaggcaatgagcaggtacaccagcccagtgaacccggctgtcttcccacacctcaccgtggtgctgctggccattggcatgttcttca

SEQ ID NO: 56154 - DNA, 600 bp, Chicken  19866894310529_1
aaatacagcttttttccactgtcctgctgaactgtacttcttgaaagcacagacaaaggatagacagactaatgatttatatcactgcagaagagttaatgcagttgatcccacatttgttaattagctgctttaagactgaaatcatgttgtaatccttttcacagcagttttccctcatgaggttcattcatacccacttgttaaagccatctctacacagccactattttcactacgtaacagaagttttcttcttccaagacaaatccatgtcctggatgctgccataaccccttyctacaaayttctttcaactatcaagacaagcacagaactttagcacacaagcttgcttctgtgcaaggtggttggcatttttgtcctctgcatgtgcaccactatagccaactctccttagcgtgtgacaaaaaagagaggaaaaaaaggaagagatcccacaatgaccgctgaccggaagtccactcacatacaatccttaattcccactcctgtccactgaaaccaaaactgagccaagagtaatcaccttctatcaaagatactttggtccttcctttgtgtgatggcatatggaga

SEQ ID NO: 56155 - DNA, 600 bp, Chicken  19866894310529_2
cttttttccactgtcctgctgaactgtacttcttgaaagcacagacaaaggatagacagactaatgatttatatcactgcagaagagttaatgcagttgatcccacatttgttaattagctgctttaagactgaaatcatgttgtaatccttttcacagcagttttccctcatgaggttcattcatacccacttgttaaagccatctctacacagccactattttcactacgtaacagaagttttcttcttccaagacaaatccatgtcctggatgctgccataaccccttyctacaaayttctttcaactatcaagacaagcacagaactttagcacacaagcttgcttctgtgcaaggtggttggcatttttgtcctctgcatgtgcaccactatagccaactctccttagcgtgtgacaaaaaagagaggaaaaaaaggaagagatcccacaatgaccgctgaccggaagtccactcacatacaatccttaattcccactcctgtccactgaaaccaaaactgagccaagagtaatcaccttctatcaaagatactttggtccttcctttgtgtgatggcatatggagagaactctg

SEQ ID NO: 56156 - DNA, 487 bp, Chicken  19866894310534_1
caagttaaaagtgtggtggctacagactgcaaatgccctgataaaaaagcactgctccagcatgacaagtatctgacggatcctgaggcagatttctcttgaactgtttggggattttcttcctgctctctctgccacttttgcaactgtccccctgggaaacatcccagcagcctctgtccccattaggaggaaatctttcacttcctcattctgattttgagtgcttaatggtcctggataattcccttgacctataaccagtctaggcttctatgcatacaaaagaaatgccaatcyagatgatatatgttatgaaacaaatttagaaatacatttaaataagcactctgtcctgtgtgtgatgttacgtggtgcgtgagcgttgcaggctgcattgattcctagccagctttagctatagtcataactcacttcttctaaaatatgggagcccacactggatagctctgctgatttcactaaa

SEQ ID NO: 56157 - DNA, 585 bp, Chicken  19866894310542_1
gattttaccttcaaaatcagatacacaataatggtattatttcacaacttccatcccaagggattctcctcaaaagctacacctttactggtagcagtatgggtggatctgtatgagaaatacaggcaggacttcatgcaccatggcagttctgggaaggaacatgacagctaatttgaacttagtcgtgtgaagctccaaatctcatactgaatgctgggatgaggattatgttcttccaaaatgatgagatcttccccacagagagcaaagctcatctgtgcaagaaatgcagctctmctaggacaagtccagacagttgaacaaaccttgaactctgattcagggggttgggaagatgctctgtgaaagaatcaccgcatgcaggtcctgccctctgatctgcaggagcctttcagagaaagcatgcagacgatatcatcatcttatatggatatggatcagtgtgggcatagctatgggaacaggtagttccctcatgacaatcatgaataaaactaactcaaaatcatcagcaacaaagaactcatacagcaagcatcaccaacactgactggtgaacag

SEQ ID NO: 56158 - DNA, 599 bp, Chicken  19866894310546_1
  misc_feature (1)..(70): n is any nucleotide
nnnnnnnnnnnnnnnnnnnnnnnnnnnnnnnnnnnnnnnnnnnnnnnnnnnnnnnnnnnnnnnnnnnnnntcagcactagagcacctcagccatacagagggacaagaggtggaggagctgcagcacacccaagggacaccgggcacgtggctgcaggggggaagctttaacccaaagcacagcagtgctggtggctggatttacactgagcgaggccctcccttctccaggacgctactgaggcagtcccagctgctgtcagcttctcagacacatgtcagagccattctcttgcccckcagtacacagctcctgcaagcagagcgtggagcaccrgcaggctgcagccctgcaccagcactactggggcataactaagccatggaagtatggcacccagctcaagccacagttaattcaaacaagcccaccagtcaaacgagcccaccagttttgacagctcagtttgaaggctctggtgcttgaaatgcaaaatgcaacataacccattaccctggttctgccgagaattctatcttggttttgtagyttattcaacaaatccaacagactgatcctatcctattccctgtgcctt

SEQ ID NO: 56159 - DNA, 599 bp, Chicken  19866894310546_2
  misc_feature (1)..(33): n is any nucleotide
nnnnnnnnnnnnnnnnnnnnnnnnnnnnnnnnntcagcactagagcacctcagccatacagagggacaagaggtggaggagctgcagcacacccaagggacaccgggcacgtggctgcaggggggaagctttaacccaaagcacagcagtgctggtggctggatttacactgagcgaggccctcccttctccaggacgctactgaggcagtcccagctgctgtcagcttctcagacacatgtcagagccattctcttgcccckcagtacacagctcctgcaagcagagcgtggagcaccrgcaggctgcagccctgcaccagcactactggggcataactaagccatggaagtatggcacccagctcaagccacagttaattcaaacaagcccaccagtcaaacgagcccaccagttttgacagctcagtttgaaggctctggtgcttgaaatgcaaaatgcaacataacccattaccctggttctgccgagaattctatcttggttttgtagyttattcaacaaatccaacagactgatcctatcctattccctgtgccttaaggacaatccaaccatctattcactttctgctttcc

SEQ ID NO: 56160 - DNA, 600 bp, Chicken  19866894310546_3
agctgctgtcagcttctcagacacatgtcagagccattctcttgcccckcagtacacagctcctgcaagcagagcgtggagcaccrgcaggctgcagccctgcaccagcactactggggcataactaagccatggaagtatggcacccagctcaagccacagttaattcaaacaagcccaccagtcaaacgagcccaccagttttgacagctcagtttgaaggctctggtgcttgaaatgcaaaatgcaacataacccattaccctggttctgccgagaattctatcttggttttgtagyttattcaacaaatccaacagactgatcctatcctattccctgtgccttaaggacaatccaaccatctattcactttctgctttccacatggatgaaagcaacaataggtgctttgggagtgaatgcccgccaatgtgcatttacagccctgcctgggtgcagccacacttcctgcccccacacacttaccatgagtaagattttcttcacctttccctttgactttgggataacgagggcatactaagagattcctgaggattaactgccttatgtgccttgcttcggcccattgcaaag

SEQ ID NO: 56161 - DNA, 600 bp, Chicken  19866894310554_1
aacataccttctcccgtaaacattcctttcaagatcaacctatttttcaagaaaatttagagtaaaattgtaagagaataagatatttttaacctgttcaaatttgctgttgttctacttttatatttccacaacgagctctccacgatgtttgctaatcacgtttcctagaatttctgtctctggtattagatatagcaagccaggtaaattcttaaattttttttccaccccaaaacgatttatgtcatttttcactctataatcaccagggctaatgatctactacaaaagattaakatctaaaaakccagattataaagtcaaaaaagaagatttcatatccataaattaactcccactcttgcaaagcaaatatctatcccrttcatgagcattttaaactggtccctcctcaggcagggaggatgttttaaacttcaaagttaatcctctcttgatctggattaattgctgtaagagcctgcaagtcyttctgagtgctcttggccagctgttatgacctacctgtttcctttattcattccttagaattaaaaatgcattcctgttccaaattaaccctttccctactaaaaa

SEQ ID NO: 56162 - DNA, 600 bp, Chicken  19866894310554_2
ctcccgtaaacattcctttcaagatcaacctatttttcaagaaaatttagagtaaaattgtaagagaataagatatttttaacctgttcaaatttgctgttgttctacttttatatttccacaacgagctctccacgatgtttgctaatcacgtttcctagaatttctgtctctggtattagatatagcaagccaggtaaattcttaaattttttttccaccccaaaacgatttatgtcatttttcactctataatcaccagggctaatgatctactacaaaagattaakatctaaaaakccagattataaagtcaaaaaagaagatttcatatccataaattaactcccactcttgcaaagcaaatatctatcccrttcatgagcattttaaactggtccctcctcaggcagggaggatgttttaaacttcaaagttaatcctctcttgatctggattaattgctgtaagagcctgcaagtcyttctgagtgctcttggccagctgttatgacctacctgtttcctttattcattccttagaattaaaaatgcattcctgttccaaattaaccctttccctactaaaaaacaatcacct

SEQ ID NO: 56163 - DNA, 600 bp, Chicken  19866894310554_3
tttaacctgttcaaatttgctgttgttctacttttatatttccacaacgagctctccacgatgtttgctaatcacgtttcctagaatttctgtctctggtattagatatagcaagccaggtaaattcttaaattttttttccaccccaaaacgatttatgtcatttttcactctataatcaccagggctaatgatctactacaaaagattaakatctaaaaakccagattataaagtcaaaaaagaagatttcatatccataaattaactcccactcttgcaaagcaaatatctatcccrttcatgagcattttaaactggtccctcctcaggcagggaggatgttttaaacttcaaagttaatcctctcttgatctggattaattgctgtaagagcctgcaagtcyttctgagtgctcttggccagctgttatgacctacctgtttcctttattcattccttagaattaaaaatgcattcctgttccaaattaaccctttccctactaaaaaacaatcacctgtgaattttcacaactgcatcactgtcaacattatggttgtatgcttcatatgagtgttgctacagcaacaagtgga

SEQ ID NO: 56164 - DNA, 600 bp, Chicken  19866894310554_4
atagcaagccaggtaaattcttaaattttttttccaccccaaaacgatttatgtcatttttcactctataatcaccagggctaatgatctactacaaaagattaakatctaaaaakccagattataaagtcaaaaaagaagatttcatatccataaattaactcccactcttgcaaagcaaatatctatcccrttcatgagcattttaaactggtccctcctcaggcagggaggatgttttaaacttcaaagttaatcctctcttgatctggattaattgctgtaagagcctgcaagtcyttctgagtgctcttggccagctgttatgacctacctgtttcctttattcattccttagaattaaaaatgcattcctgttccaaattaaccctttccctactaaaaaacaatcacctgtgaattttcacaactgcatcactgtcaacattatggttgtatgcttcatatgagtgttgctacagcaacaagtggatctttacatataaccactacagaggtcacacggcaccagatttgctttaattgaagtctgaatatgccaactaggaattttagatagaaagaagccttggtaataaa

SEQ ID NO: 56165 - DNA, 600 bp, Chicken  19866894310562_1
tctgctctgcgtgagaaccatgaaaaactggagaagagcaaatgccagctgaaggaagaggtggcaaacctcagacatcatttggaggctaatatggtgaaccacagccaaatagaacagtacaagaaagagatggaagaacgagcaggacaagaaatcagacaaaaactacaagaagtcaatttgtttttgcaggtaaatgaatttgttgtgtatgtctgtagtttttattatgtaacttcttttttttttttcattttttgtttgtattttgattttttgtgttagtactttacttgktagggggaagttctttaccaggagagtggtgaggtgctggaacgggctgcccagagaggttgtagatgccctgtccctggaggtgttcaaggccaggttggatggggccctgggcaacctggtctagtaaatggggaggttggtgcccctgcccggcaggggaattggagatgcatgatccttgaggtcccttccaacccaggccattctgtgattctatctttcctgaagggaagtgggaaaatggaaaattgttggacagaagtgcttttgtgtgtgtaatttgcctgcaggtgccca

SEQ ID NO: 56166 - DNA, 600 bp, Chicken  19866894310562_2
cagagaggttgtagatgccctgtccctggaggtgttcaaggccaggttggatggggccctgggcaacctggtctagtaaatggggaggttggtgcccctgcccggcaggggaattggagatgcatgatccttgaggtcccttccaacccaggccattctgtgattctatctttcctgaagggaagtgggaaaatggaaaattgttggacagaagtgcttttgtgtgtgtaatttgcctgcaggtgcccaagttaatagcattcccttgacagacttctgttttgcagttcttagaggctrttgctatctggtgatctttgttattgctgttcatcatatgaatattgtaacttagagatggtttggccatacatgcaggtcatgttttatcactgtacaggataaaatgctcagggaagaagtcactgaagctaccatgaggcagaaagagtggggatgggattctcataatttctttgtagaatcctttttgtgtgccctgtcctacagacataragttgttttagtagctgctctcgtaagtaatactgctaggagcagatctttatctggatgaaaacagttatttaatgtattggt

SEQ ID NO: 56167 - DNA, 600 bp, Chicken  19866894310562_3
gatgccctgtccctggaggtgttcaaggccaggttggatggggccctgggcaacctggtctagtaaatggggaggttggtgcccctgcccggcaggggaattggagatgcatgatccttgaggtcccttccaacccaggccattctgtgattctatctttcctgaagggaagtgggaaaatggaaaattgttggacagaagtgcttttgtgtgtgtaatttgcctgcaggtgcccaagttaatagcattcccttgacagacttctgttttgcagttcttagaggctrttgctatctggtratctttgttattgctgttcatcatatgaatattgtaacttagagatggtttggccatacatgcaggtcatgttttatcactgtacaggataaaatgctcagggaagaagtcactgaagctaccatgaggcagaaagagtggggatgggattctcataatttctttgtagaatcctttttgtgtgccctgtcctacagacataragttgttttagtagctgctctcgtaagtaatactgctaggagcagatctttatctggatgaaaacagttatttaatgtattggttccagggttctgc

SEQ ID NO: 56168 - DNA, 600 bp, Chicken  19866894310562_4
cttttgtgtgtgtaatttgcctgcaggtgcccaagttaatagcattcccttgacagacttctgttttgcagttcttagaggctrttgctatctggtgatctttgttattgctgttcatcatatgaatattgtaacttagagatggtttggccatacatgcaggtcatgttttatcactgtacaggataaaatgctcagggaagaagtcactgaagctaccatgaggcagaaagagtggggatgggattctcataatttctttgtagaatcctttttgtgtgccctgtcctacagacataragttgttttagtagctgctctcgtaagtaatactgctaggagcagatctttatctggatgaaaacagttatttaatgtattggttccagggttctgcctttattgctgatggtagcgaggaggtccagttgtctcagctgagtaaaactgggcccttgaaattggttatgtgcaactgtctggggagaggcaattcactttttctttgcagtggttgaaattgcattatctgcttcagacacaggcagcctcccaggacaggttagaacaaatcagagccaatcatcatgcctcactgag

SEQ ID NO: 56169 - DNA, 600 bp, Chicken  19866894310567_1
aagttactgagctgagttacagagtgcttccctgtggcagttggtcaaatacacactgcaaatgagagttgtgcaccctaaaagatagctgtggctcattcagcactgagttctggatgttgtggcagtattttcttgctgtggaaaccaagcctccaatgttttgcaaaagtaaatcaggctgtatctaagagactggggaaaacttactattgaaatgtatgtaaccctaatttagtgtagattatctaaatccaaacttagagcatgtgcaagacttctttcactacagtttccatytatgttctctgcaacattgcttgataactcaactgttattgttaattcagttcttgtgcttctaacaggcactcatagcttgagttttatttaagtcagcttgctgtccaaggaacattctggaagcatatcattcacacttgggttaacacagtgggactctatgctctgctgctaacattttcattctgcactattcgagcactctcacagagcagctgctttcttaatacaaactgttaaactgactttaagtcctccagagaaagctaactgcagtgaaggggggactctgctgta

SEQ ID NO: 56170 - DNA, 600 bp, Chicken  19866894310567_2
gagggaaagacaagcggctcctgccatgtcgctagagtcaaaaatcagtagagcaggagtttctacttgtaatcagacaataagaatgagaagaagaattttagaatcccttttgaatctctaagagaatgacacatttggcagacagggaaaacgagtgaattgcaaataaatattggacaggaagccctttaagtgaaagatggattctgaatactgttatcttagccttaaagaaagtgtgttgccacatgttcagaagccttccctatcatgtaaagtgaaattaagtcccaccamggaggagcatatccttaagaaggaaatgcagttctttaaacatctaccagtagcaaagcaaaagaaaattattcatactgaaaacaaatcacctgaaatagtagttaagtgagttaacagaactaagtgcagctctaagctgaatatctccatcactgccactcatcatgcatttgcttcattcacagccaattgaaattgtattcccggtgctcaaaatctcatcagcaactactgctcaactagactgtttagaaccaaaaattaaattaagtaccagataatactgagaatgaggcc

SEQ ID NO: 56171 - DNA, 599 bp, Chicken  19866894310573_1
  misc_feature (1)..(31): n is any nucleotide
nnnnnnnnnnnnnnnnnnnnnnnnnnnnnnnactctctctttcttgcatttggacatcttggcaatgataacaattgccctcccagcatattgctgtgatgatggtaacaacatctcttggacagaaaaatatgaaagagtgaatgaagctgccttaggtgaaacaaagccttggcagtaatttataacaatgacataggagagaagtttctctaaatgaggcattcagatagccaaaccagtcatttatcgtaatgattaatacaaatggtattcataataataaatatcacagccccygtgttgtaaggcacagaagagtctggattcactgagctgagttctcaggctctgaaccttgcctgtatctgtgagctgaggagtaatgtggtctcaagtaaacacttyttgtatccagacattttggtcacagcagagttcagctattcccatctttcccttttataagggagataataatgcgccgtggactagtgccttagtctagaactaagaatggtagtagatgtgtgttaaacaaatgaagctgtcacaaaaatgcaagacttgagagaaaaattaccaagcagcttgaagta

SEQ ID NO: 56172 - DNA, 600 bp, Chicken  19866894310573_2
caacatctcttggacagaaaaatatgaaagagtgaatgaagctgccttaggtgaaacaaagccttggcagtaatttataacaatgacataggagagaagtttctctaaatgaggcattcagatagccaaaccagtcatttatcgtaatgattaatacaaatggtattcataataataaatatcacagccccygtgttgtaaggcacagaagagtctggattcactgagctgagttctcaggctctgaaccttgcctgtatctgtgagctgaggagtaatgtggtctcaagtaaacacttyttgtatccagacattttggtcacagcagagttcagctattcccatctttcccttttataagggagataataatgcgccgtggactagtgccttagtctagaactaagaatggtagtagatgtgtgttaaacaaatgaagctgtcacaaaaatgcaagacttgagagaaaaattaccaagcagcttgaagtagttatgcaaaatgtttcatcctatrtttgtggtgagactgtrtagatccatacttccttaacagttctggttgtattttttttttttttaatctctttccttcttctca

SEQ ID NO: 56173 - DNA, 597 bp, Chicken  19866894310573_3
ggattcactgagctgagttctcaggctctgaaccttgcctgtatctgtgagctgaggagtaatgtggtctcaagtaaacacttyttgtatccagacattttggtcacagcagagttcagctattcccatctttcccttttataagggagataataatgcgccgtggactagtgccttagtctagaactaagaatggtagtagatgtgtgttaaacaaatgaagctgtcacaaaaatgcaagacttgagagaaaaattaccaagcagcttgaagtagttatgcaaaatgtttcatcctatrtttgtggtgagactgtrtagatccatacttccttaacagttctggttgtattttttttttttttaatctctttccttcttctcataggtttacgtgattaagctgtgtccagaatagattgcagcatttcttagccaggtagcacaaaagcattgtgtgcctgatatgtaaagcaagaatagctaagtactctctatccttagccacataacataatgtgctgtccacaaactctgatgagaaaaaattattttatatcagagaatcaacataaaaagtcactttatttggaggaaa

SEQ ID NO: 56174 - DNA, 580 bp, Chicken  19866894310573_4
ttctcaggctctgaaccttgcctgtatctgtgagctgaggagtaatgtggtctcaagtaaacacttyttgtatccagacattttggtcacagcagagttcagctattcccatctttcccttttataagggagataataatgcgccgtggactagtgccttagtctagaactaagaatggtagtagatgtgtgttaaacaaatgaagctgtcacaaaaatgcaagacttgagagaaaaattaccaagcagcttgaagtagttatgcaaaatgtttcatcctatrtttgtggtgagactgtrtagatccatacttccttaacagttctggttgtattttttttttttttaatctctttccttcttctcataggtttacgtgattaagctgtgtccagaatagattgcagcatttcttagccaggtagcacaaaagcattgtgtgcctgatatgtaaagcaagaatagctaagtactctctatccttagccacataacataatgtgctgtccacaaactctgatgagaaaaaattattttatatcagagaatcaacataaaaagtcactttatttggaggaaa

SEQ ID NO: 56175 - DNA, 600 bp, Chicken  19866894310577_1
gtagaataaagggtatctttgctaaatgcccaggaaactagaagcaagtgacaaaatacttgtatattaggaaggaaaaactgtcttatgtcaaagatggaagcaactatgtttaatggttcatggtgtctcaagatttactaacacgtctgtatttttgcacagtcagaaagaatataagcactacttcaaaactgctgtattcttatttactcttctattactgtaaggaaacaagaaattgagattgacattgaacaaacctgatcattttcttttctttataccttgacgtatttygctacagaaggatttcaataatggacattgtcatatgcatacacattttgaaatatataatattaatttaatgaaaattaaggttgaacacatagagaatagagttcatccatttttaaatcaaaatttactgacaattctactgaaaaagataagatgatccttttaaactagggctaatttgttaggaaaaaaaaagaaacagttaaacaccaaatgaaagggtcagctgcttgcaagattaaacactaactgatttttatttttcttctgggcctccacaaaggaaatttatggcaa

SEQ ID NO: 56176 - DNA, 599 bp, Chicken  19866894310589_1
  misc_feature (1)..(68): n is any nucleotide
nnnnnnnnnnnnnnnnnnnnnnnnnnnnnnnnnnnnnnnnnnnnnnnnnnnnnnnnnnnnnnnnnnnncggggcagaagctttgtgatttcattccagtttttcctggagagcactaatcttagatgcaatattagttcacgaggaggctcatgtggacagatttcactgcttctccttagtacggtagacctccagagtatggataggatgttatggtagtttcaggtgttggaaaagaagtagaattatctgttctgcaaatagtccatatactgatggttcaccatgcaaaatgccygatgattttcagaacatttttgcttattgtttctgctgatactgacaatttgctggattaatctccccatttttccagggatggaaataggattacaagtgtatcctgaagtatttgaagcaccaataygtcagatttcttatcggcaccagaaatggcatatcagaggcatttcccctaaagaagccaagtgaatgtcaaggtggacatatactraaaaatgaagaatgactttcttttccccaaagtctgtggcttctgtgtgaccaaagtggcttcaatttccatggttacttcag

SEQ ID NO: 56177 - DNA, 600 bp, Chicken  19866894310589_2
atattagttcacgaggaggctcatgtggacagatttcactgcttctccttagtacggtagacctccagagtatggataggatgttatggtagtttcaggtgttggaaaagaagtagaattatctgttctgcaaatagtccatatactgatggttcaccatgcaaaatgccygatgattttcagaacatttttgcttattgtttctgctgatactgacaatttgctggattaatctccccatttttccagggatggaaataggattacaagtgtatcctgaagtatttgaagcaccaataygtcagatttcttatcggcaccagaaatggcatatcagaggcatttcccctaaagaagccaagtgaatgtcaaggtggacatatactraaaaatgaagaatgactttcttttccccaaagtctgtggcttctgtgtgaccaaagtggcttcaatttccatggttacttcagatgttgctctcaacagccactggaataataattgctcctgtccagaatcagtgatgtgatgccttaagctgctagatacaaggaatgatagttgtatgaatggatgtttgcaggttgcacatatatagca

SEQ ID NO: 56178 - DNA, 600 bp, Chicken  19866894310589_3
ggtagtttcaggtgttggaaaagaagtagaattatctgttctgcaaatagtccatatactgatggttcaccatgcaaaatgccygatgattttcagaacatttttgcttattgtttctgctgatactgacaatttgctggattaatctccccatttttccagggatggaaataggattacaagtgtatcctgaagtatttgaagcaccaataygtcagatttcttatcggcaccagaaatggcatatcagaggcatttcccctaaagaagccaagtgaatgtcaaggtggacatatactraaaaatgaagaatgactttcttttccccaaagtctgtggcttctgtgtgaccaaagtggcttcaatttccatggttacttcagatgttgctctcaacagccactggaataataattgctcctgtccagaatcagtgatgtgatgccttaagctgctagatacaaggaatgatagttgtatgaatggatgtttgcaggttgcacatatatagcagcagaaagcagtctacaagtaaagcttatatgtcaagataaggtatgtgtgaaatgagtcacactgttggtagatacaatagtcttg

SEQ ID NO: 56179 - DNA, 600 bp, Chicken  19866894310591_1
ggagtcattttacttttaagtacagaagtacagagttccatgttatgaaccagtctatatatatatgacaagaattaaatttttcaccagcacttgtatgcttatagccccaggcattggaaaatatatatccaaacagatgctgaggctgagagtgagcaaggtatttgacatgaagaaccacaagaacatgtatagcttttgaaaaactgctaaaattgagcagaaaaaaaagaatgcctttgtatgtatcccagaaatggtgtagcaacagtaaaaaggtggatataatctgtgtgrtgttctcctccccttttcctgtcatcagttttgatcatcatcatgtagaatggctgttactagtctgtctcwgatataatatggtactgtatttaatttgcattctccttctgagctgtattagtgataagagaggagagaaaagcatacatgcttgaaaagaaagaacaacaaaagacttacagaacaaatgaaaaatgcagtcaccaaggagcaaagtaaatttgataacccagctaataagaaagctgctaatatttagacttctcagtattcagaaaagaaaaaaatagcttaatg

SEQ ID NO: 56180 - DNA, 600 bp, Chicken  19866894310591_2
aattaaatttttcaccagcacttgtatgcttatagccccaggcattggaaaatatatatccaaacagatgctgaggctgagagtgagcaaggtatttgacatgaagaaccacaagaacatgtatagcttttgaaaaactgctaaaattgagcagaaaaaaaagaatgcctttgtatgtatcccagaaatggtgtagcaacagtaaaaaggtggatataatctgtgtgrtgttctcctccccttttcctgtcatcagttttgatcatcatcatgtagaatggctgttactagtctgtctcwgatataatatggtactgtatttaatttgcattctccttctgagctgtattagtgataagagaggagagaaaagcatacatgcttgaaaagaaagaacaacaaaagacttacagaacaaatgaaaaatgcagtcaccaaggagcaaagtaaatttgataacccagctaataagaaagctgctaatatttagacttctcagtattcagaaaagaaaaaaatagcttaatgtccttttgcctggaatagaagaagccaaaacctctgagaaagatgttttgcttccttgttgttaccttgact

SEQ ID NO: 56181 - DNA, 599 bp, Chicken  19866894310599_1
  misc_feature (1)..(118): n is any nucleotide
nnnnnnnnnnnnnnnnnnnnnnnnnnnnnnnnnnnnnnnnnnnnnnnnnnnnnnnnnnnnnnnnnnnnnnnnnnnnnnnnnnnnnnnnnnnnnnnnnnnnnnnnnnnnnnnnnnnnnngctgacatggatgtataggtgctacctggcgtgcacgctgggctcccagctgttaggagccacgcgggaggacaaggcaggctccctctctgctcttcctgcacatgttttgctatataagattggcgcacgcagttggctgccttagctgttttcttttgagggctttcatttttgattcraacaggtctcatcctcagtccgcggcattccttctgatgtaccaccttcctgctaattaatttatccaactttgtcatctggctattaagaaccaaacaygcattacaacccgaagctggggggtcttcacagctagaatccctctcccccrctcttatgctgtaaacgccagcgatttacttgccagaaataccaggtttgggttaatgtactgtccctgggtgataccactgctttggattaccgtgatgtgcatgtaggcattaaatattgaaagctgttttcatattctccagtg

SEQ ID NO: 56182 - DNA, 599 bp, Chicken  19866894310599_2
  misc_feature (1)..(18): n is any nucleotide
nnnnnnnnnnnnnnnnnngctgacatggatgtataggtgctacctggcgtgcacgctgggctcccagctgttaggagccacgcgggaggacaaggcaggctccctctctgctcttcctgcacatgttttgctatataagattggcgcacgcagttggctgccttagctgttttcttttgagggctttcatttttgattcraacaggtctcatcctcagtccgcggcattccttctgatgtaccaccttcctgctaattaatttatccaactttgtcatctggctattaagaaccaaacaygcattacaacccgaagctggggggtcttcacagctagaatccctctcccccrctcttatgctgtaaacgccagcgatttacttgccagaaataccaggtttgggttaatgtactgtccctgggtgataccactgctttggattaccgtgatgtgcatgtaggcattaaatattgaaagctgttttcatattctccagtggtgaggctctgtataaacaagtcttatttactgaacagtttgggaagtgtgtacacactggtatgccttaggaaatctaccattttaagccttcgtggtc

SEQ ID NO: 56183 - DNA, 600 bp, Chicken  19866894310599_3
acgctgggctcccagctgttaggagccacgcgggaggacaaggcaggctccctctctgctcttcctgcacatgttttgctatataagattggcgcacgcagttggctgccttagctgttttcttttgagggctttcatttttgattcraacaggtctcatcctcagtccgcggcattccttctgatgtaccaccttcctgctaattaatttatccaactttgtcatctggctattaagaaccaaacaygcattacaacccgaagctggggggtcttcacagctagaatccctctcccccrctcttatgctgtaaacgccagcgatttacttgccagaaataccaggtttgggttaatgtactgtccctgggtgataccactgctttggattaccgtgatgtgcatgtaggcattaaatattgaaagctgttttcatattctccagtggtgaggctctgtataaacaagtcttatttactgaacagtttgggaagtgtgtacacactggtatgccttaggaaatctaccattttaagccttcgtggtcctgattttctctggccatgttaaatggagtggtagaccaggaactatattagc

SEQ ID NO: 56184 - DNA, 600 bp, Chicken  19866894310602_1
tcttggggagccaatacagtgattcagtgaagcctctttgtgtcatcattgcagctcagtgagcttatgagtgagaaacgccatgaagtggaaaaagaccatgagaggaaaatggcaaggatgaaggaggagcaccaggaggtcctagcaaggattcaggatcagtatgaagaggaggtacttctggggaagtgcaaagaactgggagatcactgttggtcaaatggactgtacctgggctggcactgctgcttgccagctctgcttatctcagccactcctagaatgggggcatctcayttgttttagtggttttgctgctgtgtaaagcaaactgagkctygggttatgagattaacctgtcaaagcgttctgtgcatgcaacttctacatacatttgtggacttctgtactagagaagctttttaatggttttmtagttgcctgttctggaaagcctcctgtcacacagtcagcagtgtgtgacaaagctgtagactatcatgggtcatttcttctttcctgggccgtcttcataacaatattgtgcctataagcagcaggctttaatcttgctgaaattgatacttgcgaaggaca

SEQ ID NO: 56185 - DNA, 600 bp, Chicken  19866894310602_2
tgtcatcattgcagctcagtgagcttatgagtgagaaacgccatgaagtggaaaaagaccatgagaggaaaatggcaaggatgaaggaggagcaccaggaggtcctagcaaggattcaggatcagtatgaagaggaggtacttctggggaagtgcaaagaactgggagatcactgttggtcaaatggactgtacctgggctggcactgctgcttgccagctctgcttatctcagccactcctagaatgggggcatctcayttgttttagtggttttgctgctgtgtaaagcaaactgagkctygggttatgagattaacctgtcaaagcgttctgtgcatgcaacttctacatacatttgtggacttctgtactagagaagctttttaatggttttmtagttgcctgttctggaaagcctcctgtcacacagtcagcagtgtgtgacaaagctgtagactatcatgggtcatttcttctttcctgggccgtcttcataacaatattgtgcctataagcagcaggctttaatcttgctgaaattgatacttgcgaaggacatgtgtgatgagctggtcatatagagtgtgtgtcctttgtg

SEQ ID NO: 56186 - DNA, 600 bp, Chicken  19866894310602_3
catcattgcagctcagtgagcttatgagtgagaaacgccatgaagtggaaaaagaccatgagaggaaaatggcaaggatgaaggaggagcaccaggaggtcctagcaaggattcaggatcagtatgaagaggaggtacttctggggaagtgcaaagaactgggagatcactgttggtcaaatggactgtacctgggctggcactgctgcttgccagctctgcttatctcagccactcctagaatgggggcatctcayttgttttagtggttttgctgctgtgtaaagcaaactgagkctygggttatgagattaacctgtcaaagcgttctgtgcatgcaacttctacatacatttgtggacttctgtactagagaagctttttaatggttttmtagttgcctgttctggaaagcctcctgtcacacagtcagcagtgtgtgacaaagctgtagactatcatgggtcatttcttctttcctgggccgtcttcataacaatattgtgcctataagcagcaggctttaatcttgctgaaattgatacttgcgaaggacatgtgtgatgagctggtcatatagagtgtgtgtcctttgtgttc

SEQ ID NO: 56187 - DNA, 600 bp, Chicken  19866894310602_4
ggaggtcctagcaaggattcaggatcagtatgaagaggaggtacttctggggaagtgcaaagaactgggagatcactgttggtcaaatggactgtacctgggctggcactgctgcttgccagctctgcttatctcagccactcctagaatgggggcatctcayttgttttagtggttttgctgctgtgtaaagcaaactgagkctygggttatgagattaacctgtcaaagcgttctgtgcatgcaacttctacatacatttgtggacttctgtactagagaagctttttaatggttttmtagttgcctgttctggaaagcctcctgtcacacagtcagcagtgtgtgacaaagctgtagactatcatgggtcatttcttctttcctgggccgtcttcataacaatattgtgcctataagcagcaggctttaatcttgctgaaattgatacttgcgaaggacatgtgtgatgagctggtcatatagagtgtgtgtcctttgtgttcrtggcttgctgaagagcttcacttggctgctttttcttgtttgtattccgtgacaggaaagaaagcaaagagcagagctgtttgaaggcctgcg

SEQ ID NO: 56188 - DNA, 600 bp, Chicken  19866894310602_5
ggttatgagattaacctgtcaaagcgttctgtgcatgcaacttctacatacatttgtggacttctgtactagagaagctttttaatggttttmtagttgcctgttctggaaagcctcctgtcacacagtcagcagtgtgtgacaaagctgtagactatcatgggtcatttcttctttcctgggccgtcttcataacaatattgtgcctataagcagcaggctttaatcttgctgaaattgatacttgcgaaggacatgtgtgatgagctggtcatatagagtgtgtgtcctttgtgttcrtggcttgctgaagagcttcacttggctgctttttcttgtttgtattccgtgacaggaaagaaagcaaagagcagagctgtttgaaggcctgcgaggtgagttggcactcctccgacagcgtcatgaagtggaggtgaaagctctgcaggcagagctggatgaacgtctgactgcactgcagcacagacatggggagaaggtgaggagggtgctgcctggcagtttgggacttggctgctttggcctgggtactgtgacacctccatgcatctgccaccctctgtagccaacagtaataca

SEQ ID NO: 56189 - DNA, 600 bp, Chicken  19866894310606_1
tttcatttgttattggcaatcaagtttcctaacttctatcgatcctgttccacagagatcagcgttgttttgtttttttgttttttttcttttgagatgcaaaaactatgaaggcacttctttatttcacagataaaaagtacatagggaaacagataaatgtttctaggaggaaatatttacactgtcatctcccaaaaaagaaggcatataggggaaaaggacaagaatttgcaaccataaaaatgtgttcatgaaagagaccagcagtacagacccatcttgagggtgatgattaamagatgagattaagcctttctcttaatcttcccttcaacatttcacattatggggtgttcaagcaggccctttgataaatgttacttttaaaaatagcttttgaccactcctttgtgctttctgagttactgggtgaagccaggagtaacctgtgcagatcatcttacctgaaagtcagtataaccttctattccaccccacaattaatcagctacaaaagtacacatataatgtataggaaatttaaagagttccaaaaatatcctaatgttacagttcttcttcctagctcccacagag

SEQ ID NO: 56190 - DNA, 600 bp, Chicken  19866894310608_1
tgtcattggctaggagaaagaacagtacaggattcaccgggtttttcaaatgcaatgtgaagagaccacccaacacgactactaaaatcactactggaatcatttcatttaagttgtggttgaacatgaaaacaaacaaacaacaacaaaaacagccacaaagaaactttctgattccagaaagacaagtcaaagagaaagtgctttaaagcaaggcatgatatattctgttgatactaacaaattgtacatgctgttcagagaaaaattctaattctcaatggcttcacataactacaygtactatcaacaaacaaaaattaaggcatctcaatgaaggtgctagaaaatttccctcatggctctaatgtaaacacaggcctactatatgttctmaaaataaacctaaaattgacagatcatattgcatgagaatgcagcttttaaagtctcaacagtttcagacattcctcacatgagtkatttcaggggtgggaatggggagacagctttcctattgttctgaatttcttgcagaaatgcagcctaaccagtgaggggatttatacaatatcctgtgttgagaatatgtaagagagt

SEQ ID NO: 56191 - DNA, 600 bp, Chicken  19866894310608_2
gaatcatttcatttaagttgtggttgaacatgaaaacaaacaaacaacaacaaaaacagccacaaagaaactttctgattccagaaagacaagtcaaagagaaagtgctttaaagcaaggcatgatatattctgttgatactaacaaattgtacatgctgttcagagaaaaattctaattctcaatggcttcacataactacaygtactatcaacaaacaaaaattaaggcatctcaatgaaggtgctagaaaatttccctcatggctctaatgtaaacacaggcctactatatgttctmaaaataaacctaaaattgacagatcatattgcatgagaatgcagcttttaaagtctcaacagtttcagacattcctcacatgagtkatttcaggggtgggaatggggagacagctttcctattgttctgaatttcttgcagaaatgcagcctaaccagtgaggggatttatacaatatcctgtgttgagaatatgtaagagagtgtattttccatttctcaatttatcacctttcactttggcagaatctgtattaagcattyatttaagttacacaatttctaaatctgaacacacagt

SEQ ID NO: 56192 - DNA, 600 bp, Chicken  19866894310608_3
agacaagtcaaagagaaagtgctttaaagcaaggcatgatatattctgttgatactaacaaattgtacatgctgttcagagaaaaattctaattctcaatggcttcacataactacaygtactatcaacaaacaaaaattaaggcatctcaatgaaggtgctagaaaatttccctcatggctctaatgtaaacacaggcctactatatgttctmaaaataaacctaaaattgacagatcatattgcatgagaatgcagcttttaaagtctcaacagtttcagacattcctcacatgagtkatttcaggggtgggaatggggagacagctttcctattgttctgaatttcttgcagaaatgcagcctaaccagtgaggggatttatacaatatcctgtgttgagaatatgtaagagagtgtattttccatttctcaatttatcacctttcactttggcagaatctgtattaagcattyatttaagttacacaatttctaaatctgaacacacagtgactaatttgttcttttttctttcttttttttttctcctctgcttgtccatcactacagaaagaagctttcaaagaacgtttccta

SEQ ID NO: 56193 - DNA, 565 bp, Chicken  19866894310608_4
tggctctaatgtaaacacaggcctactatatgttctmaaaataaacctaaaattgacagatcatattgcatgagaatgcagcttttaaagtctcaacagtttcagacattcctcacatgagtkatttcaggggtgggaatggggagacagctttcctattgttctgaatttcttgcagaaatgcagcctaaccagtgaggggatttatacaatatcctgtgttgagaatatgtaagagagtgtattttccatttctcaatttatcacctttcactttggcagaatctgtattaagcattyatttaagttacacaatttctaaatctgaacacacagtgactaatttgttcttttttctttcttttttttttctcctctgcttgtccatcactacagaaagaagctttcaaagaacgtttcctacattcttacattccttaaaggaactacatcgaaatcttcaaaaccaacagaaaatgttcagagactaagatatatagattatttgtgctgagattgtcaatgtatacaacacatagatgaagccacaacacagaggtgaaca

SEQ ID NO: 56194 - DNA, 503 bp, Chicken  19866894310608_5
atattgcatgagaatgcagcttttaaagtctcaacagtttcagacattcctcacatgagtkatttcaggggtgggaatggggagacagctttcctattgttctgaatttcttgcagaaatgcagcctaaccagtgaggggatttatacaatatcctgtgttgagaatatgtaagagagtgtattttccatttctcaatttatcacctttcactttggcagaatctgtattaagcattyatttaagttacacaatttctaaatctgaacacacagtgactaatttgttcttttttctttcytttttttttctcctctgcttgtccatcactacagaaagaagctttcaaagaacgtttcctacattcttacattccttaaaggaactacatcgaaatcttcaaaaccaacagaaaatgttcagagactaagatatatagattatttgtgctgagattgtcaatgtatacaacacatagatgaagccacaacacagaggtgaaca

SEQ ID NO: 56195 - DNA, 502 bp, Chicken  19866894310608_6
tattgcatgagaatgcagcttttaaagtctcaacagtttcagacattcctcacatgagtkatttcaggggtgggaatggggagacagctttcctattgttctgaatttcttgcagaaatgcagcctaaccagtgaggggatttatacaatatcctgtgttgagaatatgtaagagagtgtattttccatttctcaatttatcacctttcactttggcagaatctgtattaagcattyatttaagttacacaatttctaaatctgaacacacagtgactaatttgttcttttttctttctyttttttttctcctctgcttgtccatcactacagaaagaagctttcaaagaacgtttcctacattcttacattccttaaaggaactacatcgaaatcttcaaaaccaacagaaaatgttcagagactaagatatatagattatttgtgctgagattgtcaatgtatacaacacatagatgaagccacaacacagaggtgaaca

SEQ ID NO: 56196 - DNA, 599 bp, Chicken  19866894310609_1
  misc_feature (1)..(1): n is any nucleotide
nggttggatgtagtgatcccccgtgggtctcttcccgctcaacatactcccatgattctatgattttggccacagaggtggagtgggatgagcagttatagtgagcatcacgaactcctctgtactggaaactctcacgagttgtctgcagatgtaaccctgttgctggctttaaaggtaaatatcttaaaaatggtgaggaaagttaagttatgcgggctttttgggaacgatggcaggggttggttggttttttgtttttttacatttacatatctgaagacacagaaacttcacggrggaagctgctggagtggaactgtaagaggaccaagggttataagatgaaataaactacgttcacatttaacaggctcttgctcataaatgttgtcttgtgcagacaaaaatattgtctactgtacctcttgtggcacacaggcaggtgaaacatgatgttgtgtcagatgatttaagtatcccagtctggctttttactgaaatgaggggataggagattgtacacctgctttttagatcacgggcaatttccacttgaaaaaatggtttgtgttctctttgtggggcccagrcaataa

SEQ ID NO: 56197 - DNA, 600 bp, Chicken  19866894310609_2
tcacggrggaagctgctggagtggaactgtaagaggaccaagggttataagatgaaataaactacgttcacatttaacaggctcttgctcataaatgttgtcttgtgcagacaaaaatattgtctactgtacctcttgtggcacacaggcaggtgaaacatgatgttgtgtcagatgatttaagtatcccagtctggctttttactgaaatgaggggataggagattgtacacctgctttttagatcacgggcaatttccacttgaaaaaatggtttgtgttctctttgtggggcccagrcaataatttcctcttaaagctgaagttcctggggtggtcccagcatgattttttttatggcaaggaccagaggacaagcaaacttcacatatggaccccaatcattccttaggaagtagctgtgggctggcagctagcataagctactctctatgtgttcctgatgcttgggaaagtacatacttagacagtgtgagggtttttttgttcatatgatcataatctggtttcaaaatagagcttccatgcagtgtcctgcaataacagggggtctgtgaatgctcaccatggagccacggt

SEQ ID NO: 56198 - DNA, 600 bp, Chicken  19866894310610_1
taaggaaatacaccaaccaaattcattcttcagactaatcaagtagaagaaagcaagaacataccacttctttaagctttgcttcaatttcttcagaggttaattttttgcttagtggtgtttttcttagcaacatgtcacagtaattagcaagaagctcagggcatttggattcaggctgtgttttcaatccaacgctaagtaaagaaagaacgacatatcttcaaactgaaggaatcctgttaatctggagcagtcacactgtgaacaagacagaccaagcactccccttggcagggycttagtagaacaagggaattcaacactaatgaaaaaactagggacaactccctcttcctcttggaagaataaatactattaagcattttcaagacagcttctacagctgcttttcatcttagaactctgtaagtacaattacactcaaactgcagttttaatcaaataaatactgcatgatagtgagtattccagtaaagacttaacagataacataacaaaatatttcactcatcagtacggcctcttgacaactctcaagaacaacttcctgaagtgcacgttacagaaggcaaaacc

SEQ ID NO: 56199 - DNA, 600 bp, Chicken  19866894310614_1
catatacttacagctcagatgttcattgtgtattgaatagcacagggattgttgcatactggaaaaacaaaacaaaaaaaagaatattacataaaaacagtgaaagcaagtgtaactcacatatcagataacataattaaaaataacaataattggcaaggccagttctcattatgtcaagggccttactcacatctcagctgttacatgcaatagacatcctaataaactgaagtactttttccaaagaaaatcctattaaaaaatgtcttgcctagtccaatttccagcaacactgcratctattactagatcaagaagaaagytgggacctgttcaggaatttaaamaataataaagagactgttaaaaggttggcaattttttttcatcatagattattattaatttttccccaaaactattattattaaactactatttatttttataaaatatgaatttgaaattgatcagttctcttgtgaaaagtcagcgtatacttgagaagttaatcagtttttgcactatccactctttgctcttctttaccagttaaccatgcggtaattctcccttggatatccgaaatttagaaaa

SEQ ID NO: 56200 - DNA, 600 bp, Chicken  19866894310614_2
tgtgtattgaatagcacagggattgttgcatactggaaaaacaaaacaaaaaaaagaatattacataaaaacagtgaaagcaagtgtaactcacatatcagataacataattaaaaataacaataattggcaaggccagttctcattatgtcaagggccttactcacatctcagctgttacatgcaatagacatcctaataaactgaagtactttttccaaagaaaatcctattaaaaaatgtcttgcctagtccaatttccagcaacactgcratctattactagatcaagaagaaagytgggacctgttcaggaatttaaamaataataaagagactgttaaaaggttggcaattttttttcatcatagattattattaatttttccccaaaactattattattaaactactatttatttttataaaatatgaatttgaaattgatcagttctcttgtgaaaagtcagcgtatacttgagaagttaatcagtttttgcactatccactctttgctcttctttaccagttaaccatgcggtaattctcccttggatatccgaaatttagaaaagggggtatttttcatccaaaaatttc

SEQ ID NO: 56201 - DNA, 600 bp, Chicken  19866894310614_3
gttgcatactggaaaaacaaaacaaaaaaaagaatattacataaaaacagtgaaagcaagtgtaactcacatatcagataacataattaaaaataacaataattggcaaggccagttctcattatgtcaagggccttactcacatctcagctgttacatgcaatagacatcctaataaactgaagtactttttccaaagaaaatcctattaaaaaatgtcttgcctagtccaatttccagcaacactgcratctattactagatcaagaagaaagytgggacctgttcaggaatttaaamaataataaagagactgttaaaaggttggcaattttttttcatcatagattattattaatttttccccaaaactattattattaaactactatttatttttataaaatatgaatttgaaattgatcagttctcttgtgaaaagtcagcgtatacttgagaagttaatcagtttttgcactatccactctttgctcttctttaccagttaaccatgcggtaattctcccttggatatccgaaatttagaaaagggggtatttttcatccaaaaatttcttacccagtgttctcaagacctta

SEQ ID NO: 56202 - DNA, 600 bp, Chicken  19866894310647_1
aagaaaatggggaagaagaactgtatatctgagctggggctagattttgtgacttcaaagaatgatgtggtccctgtgaacaaaggtttgtggagtcctgttgccagactgatatgagacagtgctgaaaggaaatttactgttctatgttatctcacattcaacactttgctcataaagttttattggagaagttgtgtatgatacggtcttaaagatatggctccccatataattgtacctctgcctctggggtttacacttctgttcctaatttcacgtaagctgttttaaaatgcmacatcaaattatgctgagaacattaacattgtgaaaaatatgttaagagtcaagaaatgctgaaattgaatcaccttcagcaatctcctgctgaagtatatgtgttatcatagagcttttatttcaagaatgacaatctgttttgcaacagaatcccactggaaagtcaatggggcattttaaaaagctttttaaaaatacatttaggattttctttctgaaagactggaaatagaaatttaataaataggtggctgagaagtcttgctaatatgttgtttagtatggctaaactgcgat

SEQ ID NO: 56203 - DNA, 599 bp, Chicken  19866894310650_1
  misc_feature (1)..(63): n is any nucleotide
nnnnnnnnnnnnnnnnnnnnnnnnnnnnnnnnnnnnnnnnnnnnnnnnnnnnnnnnnnnnnnngattttatgcttaacatgattgaaaaaaaaaaaaacacaatgaaaatagatgaagaaaaaagaagtgtgtactgctgctgtgcaacttcttgttactatcactataatcttggttaatatctgcaaaaggcaaaggcttaaatttgtattttagatcaatttctatttttcattttacttcttcagaaagttaactggcttgtttacaataaagtataacttttcagttttattttkttaaaataaaagcattaagaattatcatttgccatcatttatataaaatagattaaatcaataagttaaacaatatcttcatctcttgcttttcaaatgtgcacctacaaaccttttgactctaatgagttgtttgaaaagttgtataaaattcaatgtgtggtcagatgtgctatgtttaagctgattgtaagcaatatcattgsaggcatactgcctcatctccaaaattctgcctgcaacaaacaaaaaatattctaaaattcatgcagaccacccagtgatcaggttgtggggtg

SEQ ID NO: 56204 - DNA, 600 bp, Chicken  19866894310650_2
ttgtattttagatcaatttctatttttcattttacttcttcagaaagttaactggcttgtttacaataaagtataacttttcagttttattttkttaaaataaaagcattaagaattatcatttgccatcatttatataaaatagattaaatcaataagttaaacaatatcttcatctcttgcttttcaaatgtgcacctacaaaccttttgactctaatgagttgtttgaaaagttgtataaaattcaatgtgtggtcagatgtgctatgtttaagctgattgtaagcaatatcattgsaggcatactgcctcatctccaaaattctgcctgcaacaaacaaaaaatattctaaaattcatgcagaccacccagtgatcaggttgtggggtgtgcctggcattactgcctaagatgaaggacaagagcatgcacacctttgtccaggtcgtggactactgtgcccaggtagatgaattgatcttcccggtggccaagttcgggaagagatagggtgtttgagaggcatctgggagttcaaaatgtgacagatcaatggggctgtactctgccttctcaggtgtgcatgtgccaacctag

SEQ ID NO: 56205 - DNA, 600 bp, Chicken  19866894310652_1
caacagtggataaatgtttaaataagaatacgtggaaaaggacagagttagtgaccttcttggtgtgcgtgcatgtacaaataccagagtttctactgtcaaaacaaaattgttttatacagttaattgtttattctatggactgcattactgtgatgctgttattggtgtgttaatgttagttcacagttaagcatatgacaaatccaaattctttgcaagtgtaactaagaaattcaaattttccctaaatggattttaacttaagtggaattgtagatatatattgtagatacattracaatgtatgatttacatttttctcttaatctgcaaattatgtrcaatggcctgctgagctgttgtgtagtatgccctatagtgtgaactctggcttctgtaatcctaggaccacacagaaaagaggagaatcatttggaatcagcagaataggcaacaaaataaaaggtgtattcaagagttctgcaatggaaggagctatgctgcctaactataacttaaatgatggagaagatgactttgtgagtaaaagctttacgttcttctttagaccttgtgttgtgttgtttttgttttttt

SEQ ID NO: 56206 - DNA, 600 bp, Chicken  19866894310652_2
gagttagtgaccttcttggtgtgcgtgcatgtacaaataccagagtttctactgtcaaaacaaaattgttttatacagttaattgtttattctatggactgcattactgtgatgctgttattggtgtgttaatgttagttcacagttaagcatatgacaaatccaaattctttgcaagtgtaactaagaaattcaaattttccctaaatggattttaacttaagtggaattgtagatatatattgtagatacattracaatgtatgatttacatttttctcttaatctgcaaattatgtrcaatggcctgctgagctgttgtgtagtatgccctatagtgtgaactctggcttctgtaatcctaggaccacacagaaaagaggagaatcatttggaatcagcagaataggcaacaaaataaaaggtgtattcaagagttctgcaatggaaggagctatgctgcctaactataacttaaatgatggagaagatgactttgtgagtaaaagctttacgttcttctttagaccttgtgttgtgttgtttttgttttttttttccctcacttaattgaaaatgttaagcttgtatttttctgct

SEQ ID NO: 56207 - DNA, 600 bp, Chicken  19866894310652_3
aagcaatttttctttaaaaaacttactgtgccatttacaattctggatgataataaggtggtattcatgggatgtgatttttcactctgaagtttgccacaagaccacaatagcttacgttactggagaaattgctatgaagctggacggtgatgtgttgtcttctctcaagatcatcagctagtagtcctttcttatttgtcttgtgtgtgtctcttggctaatgttttctttcatgctaaacagcaatgaacagagccagtggaaagaatcagcaaattacaacgctaaatagtgggkttttttttctttaaatggaacattttctacagtctgaatcttcataaaggtcatatcttcaaactgttgctatttatttactggacagttaagttcttgttgatgtcacttctctgctctctcttgggaggccagattatgatgaaaatggatttattttccaacatcgttcccaggatgcagctaaacacagcttttcatttactcctctgactcccagttggatgagagagaaaattggtgagaaattgtggtggaactcatagtttgagataaaaagctattttccgaggcagaaaa

SEQ ID NO: 56208 - DNA, 600 bp, Chicken  19866894310653_1
tgtgtaaacaggagtaagtcaggacagaaataaacagcctttagataaattgttgcctgtcctgcttcagattaccgaaaacattggcatttctgcctgcactgtaactaacccatctcagctacaatagccctattcacactaattgtgtcagggactcatgccaaaagttactcccacaacttgcaggagcagagctgctttttatccagtttgatagaagactgtgtttgacatattgcttttgtagggataacagtaactgcacttcaatacataaaaacaatattttgttatggrggaaagccaacatagaaatgtagcgtttgaactgtatcacactacaagcttcactcctcagcagaaacagtcatctcagaactcatcattttatatttgaagccacgtggcttctgcagaggtgttttcacatacatgtttcccttagacaacttaaattcttctgtcaggactcagcactaataccctgaatgacatctgattatcaaacctgcctcattacttgcatccaccctctaaggtttaagtagctatactyctgttgagcagcatggagcttgctgaactccaccagcaatc

SEQ ID NO: 56209 - DNA, 600 bp, Chicken  19866894310653_2
taactgcacttcaatacataaaaacaatattttgttatggrggaaagccaacatagaaatgtagcgtttgaactgtatcacactacaagcttcactcctcagcagaaacagtcatctcagaactcatcattttatatttgaagccacgtggcttctgcagaggtgttttcacatacatgtttcccttagacaacttaaattcttctgtcaggactcagcactaataccctgaatgacatctgattatcaaacctgcctcattacttgcatccaccctctaaggtttaagtagctatactyctgttgagcagcatggagcttgctgaactccaccagcaatctatctccattgagggaggtgaccatttatatcacaacttctgtctgcccattcctctcagtaacttccaacatactgagacttagtctatggccagtaggatcccttaaacagacttcagggactttttgacttccaaaacactttgacaggtagactaaatcacttactatgtttgctgacccctccagaaaacacactctctacaactacctgaaaggaggctgtggcaaggtggggaccctcctctgctctcaggt

SEQ ID NO: 56210 - DNA, 600 bp, Chicken  19866894310653_3
aggaggctgtggcaaggtggggaccctcctctgctctcaggtaacaggcaacagggctagagggaatggcctcaagctgcaccagggaaggaccaggctggacattaggaaaaattttttcttcctcaagagtggtcagatattggagcaagttgcccagagaagtggtggagtcactgtccctggagctgtttaaggaaaaggaagatgtggtactcagagatacagcttagtggacagtattggtggcaggtggatgattggaccaggtgaacatagaggtcttttccagccttaatsattctattaaattcaatacacttgaaaagcaggatttctgtttgcagaaacagtggtgattatcctcagatggacaccagttctgccctttattattgttttactgatttgatcagcagaatttacagctggttgataggcctgtgattccctggatccttcctgagaccttctttatagactggcactgcatttatcatcccttgctctgcaggaagaagaaaagtttcaagtgagaggatacacattgctaatattaatccaggtatttcaacctggaagtaagaaatttgaacgttc

SEQ ID NO: 56211 - DNA, 600 bp, Chicken  19866894310656_1
ttttattttctctcttgttatcctacaatcagtactctctgagggaaggatggaggggaaggcagttcttacataagaatttaaaaaatattgggagtatttcatttttaattttttttccccaggaaataaggtatcattttgtatgtttatgtagtatatctgtatattttgtagtgaaatgttttcatcttactacattaaagctatttagtccttctgatcacagctctgttggttgattggtttaaaatagaataatggaggaaggacaacatatgtttacatgttgttctatcrttaaacaacgggagaaaaatctataaggaaattttgacctttgaactctaatggattttcgaagttcagttccgagttttttcaatatctgttcacctgtgttctttttgtttcatttctattttgctttcccctttttgttctaaggctgctagctgtctgctatgttgcattttaaaacagtactgatatcaacctgagacatgatttcaatgaaattcagcacaatcaatgcatttcagtgaaatacagcaactctgtaaaatgtagtataatcatcaaatcgaatgggagataaca

SEQ ID NO: 56212 - DNA, 600 bp, Chicken  19866894310657_1
tcagttaaataaagtaataaacaaaagtgttcaaagtgaggcaatattgtctttatgttatttctcagttgtgatcaggtatctgtgggacatggaaaactaaaatcaaacaacatacataatctttaattctctagtaaaatttagtgccaaattgtgctctcaggtaaatttctgcaaagcaggatccacagtagcattacagtacaatggcatatttctgggtttagaaagggtaaaagataagaagttgttttcacctcttaaaggctcagcacacaccaaacactgaactaacaygcaccatcctgctgacctggtgcgagcaggtgcagcaacactcattgcaaataaactgattggatttcaccagattgtaatttggctaagtgacttggcctgcttcagtaacttgagagcacagtttggctcctttcacggtgagaaggcagccaaccaaacacaactttcaccagtcctcagattctggccccagatttcaacatacactattacatcgatcaaacgaaccatagagattacttatcattttactggtccttaacacatttcacacagtcctgcagcgagcagaatcac

SEQ ID NO: 56213 - DNA, 599 bp, Chicken  19866894310658_1
  misc_feature (1)..(120): n is any nucleotide
nnnnnnnnnnnnnnnnnnnnnnnnnnnnnnnnnnnnnnnnnnnnnnnnnnnnnnnnnnnnnnnnnnnnnnnnnnnnnnnnnnnnnnnnnnnnnnnnnnnnnnnnnnnnnnnnnnnnnnnnaaattgtatgaaaaaattgaaaaattagaagaagactatagcatggatcaatacgacgggggactatgagagctttcccttgatagccctcaagaaacagggcttttccacctacttaatatccctctcccctcttgctattaccaagtagcatccttcccattaaattttgtcactatyggagggaaagtagtaatgagatgcagagtccagcatgatggcaccaggctgcagtgttgtactgaagagatgtctggacctgttgggctttgtgtcttctgaacactgtgagatcacatctgattctctatcaaaamacagtgcatggcaaatggcaaagctgagaagtgacagctcagcccattttaaagtctcagtgctcagaattttcgttttctattcagatcactgtttatargcttcccaactaacagttcagggttgaaaaatcacattcagtgtcctccctttcatttggc

SEQ ID NO: 56214 - DNA, 600 bp, Chicken  19866894310658_2
tgaaaaattagaagaagactatagcatggatcaatacgacgggggactatgagagctttcccttgatagccctcaagaaacagggcttttccacctacttaatatccctctcccctcttgctattaccaagtagcatccttcccattaaattttgtcactatyggagggaaagtagtaatgagatgcagagtccagcatgatggcaccaggctgcagtgttgtactgaagagatgtctggacctgttgggctttgtgtcttctgaacactgtgagatcacatctgattctctatcaaaamacagtgcatggcaaatggcaaagctgagaagtgacagctcagcccattttaaagtctcagtgctcagaattttcgttttctattcagatcactgtttatargcttcccaactaacagttcagggttgaaaaatcacattcagtgtcctccctttcatttggcttggcagaataaaggtcacgagtgagtctgtcaaactgagcaccactcattttgctcaccgtgacaaataaaaagataatctgatgctgtaggctctatcacctctatcaaatcccattttgtcttcagtgcgttggc

SEQ ID NO: 56215 - DNA, 600 bp, Chicken  19866894310658_3
atatccctctcccctcttgctattaccaagtagcatccttcccattaaattttgtcactatyggagggaaagtagtaatgagatgcagagtccagcatgatggcaccaggctgcagtgttgtactgaagagatgtctggacctgttgggctttgtgtcttctgaacactgtgagatcacatctgattctctatcaaaamacagtgcatggcaaatggcaaagctgagaagtgacagctcagcccattttaaagtctcagtgctcagaattttcgttttctattcagatcactgtttatargcttcccaactaacagttcagggttgaaaaatcacattcagtgtcctccctttcatttggcttggcagaataaaggtcacgagtgagtctgtcaaactgagcaccactcattttgctcaccgtgacaaataaaaagataatctgatgctgtaggctctatcacctctatcaaatcccattttgtcttcagtgcgttggcagtttcaaatggttgcttttcaaaaggttctctcgaatatgtgaattttggctttacatcttttccttgtgagatgttgacatgcagcttaaagcatgaac

SEQ ID NO: 56216 - DNA, 575 bp, Chicken  19866894310669_1
tccttaatcagctatgcgacgctcaaatgcaccatgtactaaattcaagctcaaagacatttacagacaggttttcttacggaggaaaactggattgaaaaggacctccaggctcagccctgaccagtgctgttagctagaggcatcacttcatgtaagcttctttcagcagcttggtttctacccataccaattctaaagatatgttttgaaagaatggaacaaatttctcatgctgctttatctaccgagcaggaacgtgaccctgtgtaactactgtatctcctgcagtaagagcaygatgtctgtcacttacagaccacatgcaccatagcaggggctggagcagcacctgcagcagtgaaactcacctgaaagaacgtcaggatctgtcttgtgtattctttgtgtgatttagatgaccagttatcagcaaaactcagacgacaataatgtgcaaaacattccttgttctcagcaagattcttcagatgaaacaacactgagaatgaacatggattaacaagacaactgaaatcttggaaacagtttatacagctttaaagcacaaaaag

SEQ ID NO: 56217 - DNA, 600 bp, Chicken  19866894310674_1
ttaaatttagtataaaaaaagatgtcctgggcacatgcaatggataatctaagttcattctttacgaatatcttcaggagctgttttctgaatgctccaacatctgttgttcccagctccatatgtgaaacatgcaaaaatctgatatatatatatatttttttttaatatagcaaacatatttcctcatctccatgtggccatttgagaaaatgtctccacccttgagctgtgttttctaacctcttttctatgtatttaaaaaacaaacaaacaaaaaccagccaaacgagagctccrataaaacatgccatcaattagcagaagcggccacaaagcagtaatgtaagataacaaaggtttatgttttggagttataattttatccattttattgaataatttttttgtgcwatgtttaatctctgagcagagtgtttaaaggcatttaatagctgcgttttaaatgctgatagcatctctgaggagcaaagatgaagtaaatgggttttgcttgtggatacttcagggaagtcttttgggaaatgaaatctccatttcagcatcagcagtgaatattatctgaacaccttcatgatc

SEQ ID NO: 56218 - DNA, 600 bp, Chicken  19866894310674_2
agctccatatgtgaaacatgcaaaaatctgatatatatatatatttttttttaatatagcaaacatatttcctcatctccatgtggccatttgagaaaatgtctccacccttgagctgtgttttctaacctcttttctatgtatttaaaaaacaaacaaacaaaaaccagccaaacgagagctccrataaaacatgccatcaattagcagaagcggccacaaagcagtaatgtaagataacaaaggtttatgttttggagttataattttatccattttattgaataatttttttgtgcwatgtttaatctctgagcagagtgtttaaaggcatttaatagctgcgttttaaatgctgatagcatctctgaggagcaaagatgaagtaaatgggttttgcttgtggatacttcagggaagtcttttgggaaatgaaatctccatttcagcatcagcagtgaatattatctgaacaccttcatgatcgccatggcagcataaggctgaagcaggaatacctattgctatgtctacaaggtcttttatggtgtgttaagctcatttcatagggctggcttcctttccccagagaatattgga

SEQ ID NO: 56219 - DNA, 599 bp, Chicken  19866894310678_1
  misc_feature (1)..(206): n is any nucleotide
nnnnnnnnnnnnnnnnnnnnnnnnnnnnnnnnnnnnnnnnnnnnnnnnnnnnnnnnnnnnnnnnnnnnnnnnnnnnnnnnnnnnnnnnnnnnnnnnnnnnnnnnnnnnnnnnnnnnnnnnnnnnnnnnnnnnnnnnnnnnnnnnnnnnnnnnnnnnnnnnnnnnnnnnnnnnnnnnnnnnnnnnnnnnnnnnnnnnnnnnnnnnnncacagcgagcgctccgcaaggctttgacgacagctcccgtaccgctacttctgcctgcgcggataccgcaccgctgaggcacgatacacctgcraaagcgcacagtgctgcgaggtttaaccttaaacagagctcgctcccagagctaggctcacccacccgcgtctgcctccccaracagcytccaacaggaaacatttccccccgcagcaactctttgctacggcaaacagcggctctccgcacaaacgccgagagccgcggggctgtggcagagccgctcgggctcctctcttagggcgccggcgtccctcagcgcgacccacctgtgccagccgcggtgctgcgagcagcacacccgctaactctaggccgcccggctgctcgcggccg

SEQ ID NO: 56220 - DNA, 599 bp, Chicken  19866894310678_2
  misc_feature (1)..(123): n is any nucleotide
nnnnnnnnnnnnnnnnnnnnnnnnnnnnnnnnnnnnnnnnnnnnnnnnnnnnnnnnnnnnnnnnnnnnnnnnnnnnnnnnnnnnnnnnnnnnnnnnnnnnnnnnnnnnnnnnnnnnnnnnnnncacagcgagcgctccgcaaggctttgacgacagctcccgtaccgctacttctgcctgcgcggataccgcaccgctgaggcacgatacacctgcraaagcgcacagtgctgcgaggtttaaccttaaacagagctcgctcccagagctaggctcacccacccgcgtctgcctccccaracagcytccaacaggaaacatttccccccgcagcaactctttgctacggcaaacagcggctctccgcacaaacgccgagagccgcggggctgtggcagagccgctcgggctcctctcttagggcgccggcgtccctcagcgcgacccacctgtgccagccgcggtgctgcgagcagcacacccgctaactctaggccgcccggctgctcgcggccgcacactgcggagccgccactcctacggccgctcagcggcccgcagacgctcccgctgcaccaggagtcagcctgagggcagcc

SEQ ID NO: 56221 - DNA, 599 bp, Chicken  19866894310678_3
  misc_feature (1)..(117): n is any nucleotide
nnnnnnnnnnnnnnnnnnnnnnnnnnnnnnnnnnnnnnnnnnnnnnnnnnnnnnnnnnnnnnnnnnnnnnnnnnnnnnnnnnnnnnnnnnnnnnnnnnnnnnnnnnnnnnnnnnnnncacagcgagcgctccgcaaggctttgacgacagctcccgtaccgctacttctgcctgcgcggataccgcaccgctgaggcacgatacacctgcraaagcgcacagtgctgcgaggtttaaccttaaacagagctcgctcccagagctaggctcacccacccgcgtctgcctccccaracagcytccaacaggaaacatttccccccgcagcaactctttgctacggcaaacagcggctctccgcacaaacgccgagagccgcggggctgtggcagagccgctcgggctcctctcttagggcgccggcgtccctcagcgcgacccacctgtgccagccgcggtgctgcgagcagcacacccgctaactctaggccgcccggctgctcgcggccgcacactgcggagccgccactcctacggccgctcagcggcccgcagacgctcccgctgcaccaggagtcagcctgagggcagccctgcac

SEQ ID NO: 56222 - DNA, 600 bp, Chicken  19866894310681_1
tcacaaagaaaccgaacagctcttatgtaacagaagtacagcacatcccagctctctgcataacacatatggaatgctgattaaaaaaaaattggaacatctcgtttctgagatttagtttcaatatttgtcaacattcacgccagacctacttctttagtaaagaattattctgttctaattcttgctatgctcaggtcacagagcccacagaggcagcagtagtagaacccgatatctgctaaatcccaggttccagatagctctgagaggcagcaagcagcccccggcttccctccrgcccgaggtgagcagggcaggaggctcctggatcccagggcggtgccagcagcccgcagcrcccagcacggctccggcagcaccgtgtgcatggaacccacagtgtgctcttcatgctatggagcgcagcagaaaggggaataagagggttgttacaatagttttcattaagttgccacacaggttttaatgcgttgtaaacattcctctccttttttgtttttgtttttttttttgttgctttttattttgtttttgttttgttttatgaatagaacgatgttcaggttttcacactca

SEQ ID NO: 56223 - DNA, 600 bp, Chicken  19866894310681_2
aacacatatggaatgctgattaaaaaaaaattggaacatctcgtttctgagatttagtttcaatatttgtcaacattcacgccagacctacttctttagtaaagaattattctgttctaattcttgctatgctcaggtcacagagcccacagaggcagcagtagtagaacccgatatctgctaaatcccaggttccagatagctctgagaggcagcaagcagcccccggcttccctccrgcccgaggtgagcagggcaggaggctcctggatcccagggcggtgccagcagcccgcagcrcccagcacggctccggcagcaccgtgtgcatggaacccacagtgtgctcttcatgctatggagcgcagcagaaaggggaataagagggttgttacaatagttttcattaagttgccacacaggttttaatgcgttgtaaacattcctctccttttttgtttttgtttttttttttgttgctttttattttgtttttgttttgttttatgaatagaacgatgttcaggttttcacactcagaatgactttacattttagtcctagcaaaccacagcacgctcagtaccaggagccattaac

SEQ ID NO: 56224 - DNA, 599 bp, Chicken  19866894310683_1
  misc_feature (1)..(78): n is any nucleotide
nnnnnnnnnnnnnnnnnnnnnnnnnnnnnnnnnnnnnnnnnnnnnnnnnnnnnnnnnnnnnnnnnnnnnnnnnnnnnngaatggaaagagaagacttcagggcttctcaaagaactacttagtaaggttccctgagaatctgcttttgacgtaataaggcgcataaatgaaggtcacattcaaagagccatctcattggaagcaatgtcagggaacaggagaataagatatgttgtttgccattgtagagacaaaaatcatgtagccagagctcacttagaattgaaaccaaaaggtaawgtaagggacaaaaagaagagatttttaaagtatgttaagagcaaaaagaggatcaaagatgacattggtccattactttatgaggtttgacacttcacaaatagggacaaagataaaacagagacatttaatgccttttttgtctctgtattcaacaacagtgatgtaccctgtgacccctgagatggagaaccattccctcagtcatagtaaactcctagctgaactcgttcaggattttctgctccagttgaatgcacataagtttatgggccacaatgggattcatccaaggatac

SEQ ID NO: 56225 - DNA, 600 bp, Chicken  19866894310685_1
caccactatccattagcttgtatattgtgaatatacttacaactaaactgctacagagaacatagcggtggaagtgtgcatctcttctgttttgtcatcatgtttcacttactcgctaacttgtaaaatgaagtaatccatgacgaatctttcaggtccttagcatgaattagcaagatgctgctatgtattatctcacagttactgtcaaaaggtcgacccctgaatacagagtatacactaaattctacatatttagcttcctttggaactgtggcaatatattctattaaaactcaytctattgcataatgctattaatcatggtagtttaagcgctcagtccttgcctatctttttaacagagtctaaatggcattcaccaatgtagaagtaccccagtattcatcaggtactattcttcaagtaggctagattatgcagtctctccctttgcacatgtagagagtacatatgcaaacttgactaaagaatatgcacaacagtgaaacgctgagcaagtgtgctccacatactggaagttgggcagttgtaccagagcagtcctggccctgagctggttgcctcagctggtaggag

SEQ ID NO: 56226 - DNA, 600 bp, Chicken  19866894310685_2
caggtactattcttcaagtaggctagattatgcagtctctccctttgcacatgtagagagtacatatgcaaacttgactaaagaatatgcacaacagtgaaacgctgagcaagtgtgctccacatactggaagttgggcagttgtaccagagcagtcctggccctgagctggttgcctcagctggtaggagcctccagaaacaaggatggttttccacagtaccacagaagtacaacagattcactgcctcagagagaaccaagcttgtatgctcactatgagccttgctctgcattgcrcagtccttgtagcctggtcacgtatttctaacgctgttcctcaccataaccaatttgctgaaagatcacactgaagtttgtggcrtgcttggagagtaaactcatgtaaccaagttcagctgtgcagctgatgtccagcttgtggcctgaaggcacacacagtatgtggctcacaaggccgactcacctgaaccacaggcagctctgggctgaacgaatacttgggggaagagcagcgtgtgggtaggctgctgactgagttattcaggaattaacagcaacccactctcagtcaagatc

SEQ ID NO: 56227 - DNA, 600 bp, Chicken  19866894310685_3
tatgcacaacagtgaaacgctgagcaagtgtgctccacatactggaagttgggcagttgtaccagagcagtcctggccctgagctggttgcctcagctggtaggagcctccagaaacaaggatggttttccacagtaccacagaagtacaacagattcactgcctcagagagaaccaagcttgtatgctcactatgagccttgctctgcattgcrcagtccttgtagcctggtcacgtatttctaacgctgttcctcaccataaccaatttgctgaaagatcacactgaagtttgtggcrtgcttggagagtaaactcatgtaaccaagttcagctgtgcagctgatgtccagcttgtggcctgaaggcacacacagtatgtggctcacaaggccgactcacctgaaccacaggcagctctgggctgaacgaatacttgggggaagagcagcgtgtgggtaggctgctgactgagttattcaggaattaacagcaacccactctcagtcaagatccttccctttgctcctctttcacacagctgtctgtatgtcgctaccaggatttcacagcrcattccatgcccgccactgaagaccc

SEQ ID NO: 56228 - DNA, 600 bp, Chicken  19866894310685_4
gaaagatcacactgaagtttgtggcrtgcttggagagtaaactcatgtaaccaagttcagctgtgcagctgatgtccagcttgtggcctgaaggcacacacagtatgtggctcacaaggccgactcacctgaaccacaggcagctctgggctgaacgaatacttgggggaagagcagcgtgtgggtaggctgctgactgagttattcaggaattaacagcaacccactctcagtcaagatccttccctttgctcctctttcacacagctgtctgtatgtcgctaccaggatttcacagcrcattccatgcccgccactgaagaccctctgggacacaagcacagctgggagccagctggctgagcagttctagcaccctccttttcctcaggagctcttgtcccactgcacgtgtgatgagccacccagcatgccctgccactagcaaagtggtatgcacacatgagtagggaaatttggcaccatgattttgatggccttccagaaacatctgctggacgagcaaagctgaggcaaacaaaccacgctgaatgctttctattttcccccatcagctagtaggctgaggatctttgcaat

SEQ ID NO: 56229 - DNA, 600 bp, Chicken  19866894310685_5
tagtagagcaataaaaactaaacagtatcctcagttaagcttttcaaagcaaagcctccctaatttccaggaatatggacatccttagtaactgagctggcttatctttctagaataaattctgtcactcccacttgtaccgatctgcatcatacagaaatctcaggattttttgggacagtgtgcagagtggcacaacattcagcaggagtaacaggagacagaatgtgacacattgactcattatggaattagcatttggaaagagaaacgactacatctcaggaagttctattagtkcctctgcaactcataaaataagcccagaattttagtctcactgagaattaggaagagcagacacctaggactgcacgctgagaaggtttttgcattgttaacagggctgcctttgtacattcaattcaccatctcccaaaatactcaagtcacaragaacactgttccatcagtgatgtcctggtatcattggaatcagtgggagttttcctgttaatgtcagcagagccaaygtttggtattttcagcaatgcattacatgaagaataaattaaaaatctgacaggttccactcatcct

SEQ ID NO: 56230 - DNA, 600 bp, Chicken  19866894310685_6
agaaatctcaggattttttgggacagtgtgcagagtggcacaacattcagcaggagtaacaggagacagaatgtgacacattgactcattatggaattagcatttggaaagagaaacgactacatctcaggaagttctattagtkcctctgcaactcataaaataagcccagaattttagtctcactgagaattaggaagagcagacacctaggactgcacgctgagaaggtttttgcattgttaacagggctgcctttgtacattcaattcaccatctcccaaaatactcaagtcacaragaacactgttccatcagtgatgtcctggtatcattggaatcagtgggagttttcctgttaatgtcagcagagccaaygtttggtattttcagcaatgcattacatgaagaataaattaaaaatctgacaggttccactcatcctttaatcttctaaagctgcagtataaatgggtgataagccatttaagtgctctttgattagaactttagaaagtcatgttctgtcttctccaaaaaagagtaacatcgcgggcaccattttaaaagtggtatttttaaaacctcttggcaaacctt

SEQ ID NO: 56231 - DNA, 563 bp, Chicken  19866894310685_7
cattgactcattatggaattagcatttggaaagagaaacgactacatctcaggaagttctattagtkcctctgcaactcataaaataagcccagaattttagtctcactgagaattaggaagagcagacacctaggactgcacgctgagaaggtttttgcattgttaacagggctgcctttgtacattcaattcaccatctcccaaaatactcaagtcacaragaacactgttccatcagtgatgtcctggtatcattggaatcagtgggagttttcctgttaatgtcagcagagccaaygtttggtattttcagcaatgcattacatgaagaataaattaaaaatctgacaggttccactcatcctttaatcttctaaagctgcagtataaatgggtgataagccatttaagtgctctttgattagaactttagaaagtcatgttctgtcttctccaaaaaagagtaacatcgcgggcaccattttaaaagtggtatttttaaaacctcttggcaaacctttccccctacacctgctgagctgcaggtcctcttctcagaag

SEQ ID NO: 56232 - DNA, 600 bp, Chicken  19866894310687_1
ggcttgttgtcatgttctcacacacacagttctgggccctcctgggacagtggacttctggtttgagggggcagggccattcttatggttgccgctggcttacttttgctactcttgctcttccatgactcccatgaggttctgctgagcaccagatggggttcacaagtcctccaaaactcttttgctcaaaaaaagaagggacaagcggagtttaattgatcacaatgaatgcaattagtacttcgcagagttttctacccgtgtctctttacctttgagactttcattcatcttaaygcctatttccattcttaattacactcagtgagccaataacagatacgtcattctcttctgtaatcgtctgcatgaaaatactggaaagagacaaattgaccggaacaagcatttagtcaaattccagctctcggttaacttgcttggtggccatggcaagtaagttatttcactttgctctgggctgrcttattcatacagaaaatgggaatagcaaatcaatccatgttaaggatagaatccagycccaaacaactttttaggagctcggctttgcttagcttagcttagctttgcttg

SEQ ID NO: 56233 - DNA, 600 bp, Chicken  19866894310687_2
tcaaaaaaagaagggacaagcggagtttaattgatcacaatgaatgcaattagtacttcgcagagttttctacccgtgtctctttacctttgagactttcattcatcttaaygcctatttccattcttaattacactcagtgagccaataacagatacgtcattctcttctgtaatcgtctgcatgaaaatactggaaagagacaaattgaccggaacaagcatttagtcaaattccagctctcggttaacttgcttggtggccatggcaagtaagttatttcactttgctctgggctgrcttattcatacagaaaatgggaatagcaaatcaatccatgttaaggatagaatccagycccaaacaactttttaggagctcggctttgcttagcttagcttagctttgcttgctaagtctttttgaaaacgtcttattgttttgaaaaatccctgttaatcgtaccatgtggggagacagagaaaatccatcgtgctgtttaagtwagcaaaccaaattgaggaaaacaactgcagtctcctcarcaattgagaagcaaattctgtaggctcaygagagcatgcagagcatcctgagctc

SEQ ID NO: 56234 - DNA, 600 bp, Chicken  19866894310687_3
cgcagagttttctacccgtgtctctttacctttgagactttcattcatcttaaygcctatttccattcttaattacactcagtgagccaataacagatacgtcattctcttctgtaatcgtctgcatgaaaatactggaaagagacaaattgaccggaacaagcatttagtcaaattccagctctcggttaacttgcttggtggccatggcaagtaagttatttcactttgctctgggctgrcttattcatacagaaaatgggaatagcaaatcaatccatgttaaggatagaatccagycccaaacaactttttaggagctcggctttgcttagcttagcttagctttgcttgctaagtctttttgaaaacgtcttattgttttgaaaaatccctgttaatcgtaccatgtggggagacagagaaaatccatcgtgctgtttaagtwagcaaaccaaattgaggaaaacaactgcagtctcctcarcaattgagaagcaaattctgtaggctcaygagagcatgcagagcatcctgagctcagtgtgctttcaggtggtgcctcactttctaccagaccagtagactccagagaatcca

SEQ ID NO: 56235 - DNA, 600 bp, Chicken  19866894310687_4
attgaccggaacaagcatttagtcaaattccagctctcggttaacttgcttggtggccatggcaagtaagttatttcactttgctctgggctgrcttattcatacagaaaatgggaatagcaaatcaatccatgttaaggatagaatccagycccaaacaactttttaggagctcggctttgcttagcttagcttagctttgcttgctaagtctttttgaaaacgtcttattgttttgaaaaatccctgttaatcgtaccatgtggggagacagagaaaatccatcgtgctgtttaagtwagcaaaccaaattgaggaaaacaactgcagtctcctcarcaattgagaagcaaattctgtaggctcaygagagcatgcagagcatcctgagctcagtgtgctttcaggtggtgcctcactttctaccagaccagtagactccagagaatccaggtccaccaraggccggagaggacctcggtttacagaaggttgggtttgcagtccaagaactccttcctaagcagacggacacttcgtatcagcccttacttgctaattaagaggattaatgaccactttccagttccaactaacgct

SEQ ID NO: 56236 - DNA, 598 bp, Chicken  19866894310687_5
gttaacttgcttggtggccatggcaagtaagttatttcactttgctctgggctgrcttattcatacagaaaatgggaatagcaaatcaatccatgttaaggatagaatccagycccaaacaactttttaggagctcggctttgcttagcttagcttagctttgcttgctaagtctttttgaaaacgtcttattgttttgaaaaatccctgttaatcgtaccatgtggggagacagagaaaatccatcgtgctgtttaagtwagcaaaccaaattgaggaaaacaactgcagtctcctcarcaattgagaagcaaattctgtaggctcaygagagcatgcagagcatcctgagctcagtgtgctttcaggtggtgcctcactttctaccagaccagtagactccagagaatccaggtccaccaraggccggagaggacctcggtttacagaaggttgggtttgcagtccaagaactccttcctaagcagacggacacttcgtatcagcccttacttgctaattaagaggattaatgaccactttccagttccaactaacgctgctaaccaccgactgttacgcttgactgcatcctttt

SEQ ID NO: 56237 - DNA, 569 bp, Chicken  19866894310687_6
agttatttcactttgctctgggctgrcttattcatacagaaaatgggaatagcaaatcaatccatgttaaggatagaatccagycccaaacaactttttaggagctcggctttgcttagcttagcttagctttgcttgctaagtctttttgaaaacgtcttattgttttgaaaaatccctgttaatcgtaccatgtggggagacagagaaaatccatcgtgctgtttaagtwagcaaaccaaattgaggaaaacaactgcagtctcctcarcaattgagaagcaaattctgtaggctcaygagagcatgcagagcatcctgagctcagtgtgctttcaggtggtgcctcactttctaccagaccagtagactccagagaatccaggtccaccaraggccggagaggacctcggtttacagaaggttgggtttgcagtccaagaactccttcctaagcagacggacacttcgtatcagcccttacttgctaattaagaggattaatgaccactttccagttccaactaacgctgctaaccaccgactgttacgcttgactgcatcctttt

SEQ ID NO: 56238 - DNA, 475 bp, Chicken  19866894310687_7
tttttaggagctcggctttgcttagcttagcttagctttgcttgctaagtctttttgaaaacgtcttattgttttgaaaaatccctgttaatcgtaccatgtggggagacagagaaaatccatcgtgctgtttaagtwagcaaaccaaattgaggaaaacaactgcagtctcctcarcaattgagaagcaaattctgtaggctcaygagagcatgcagagcatcctgagctcagtgtgctttcaggtggtgcctcactttctaccagaccagtagactccagagaatccaggtccaccaraggccggagaggacctcggtttacagaaggttgggtttgcagtccaagaactccttcctaagcagacggacacttcgtatcagcccttacttgctaattaagaggattaatgaccactttccagttccaactaacgctgctaaccaccgactgttacgcttgactgcatcctttt

SEQ ID NO: 56239 - DNA, 559 bp, Chicken  19866894310689_1
ttctaagaaaagcagctaagatgtttttactctaacctagtggaaaagaaagaaaattcaatcttttttttttccttttttttcctagttacagtgaggtaaatgcaattcacttaattttatcctcattgaaattggattttaagaagttcagaggttctggcaagcaaggaattttagttttgttattgtgaggccagacagggatatttatttgcctcttcctctcttttcctctgctactgaaggcaactctgctgtgtttccagttaagcctgactttttacggtgaactaaaawgccagatgaaaatttgagcagattaacactgagaggattgtcaaaaaaaatcatacccagcttaaactgtagatgcagcataactgtttaacttcattcttttcaagtgaaaaaaataattgtttggggattctgaagccaagacattaggagagccatctaaaaatggtttccatacaggaaaactgttgaagcaaatgtgaccaccatcaatgcccaggtaagtatctcaaggtttttgtgctgctccctgtcagca

SEQ ID NO: 56240 - DNA, 600 bp, Chicken  19866894310691_1
gaaatggagtctgagctctctgaagctacgtcaagatgtcaggactggtctcaggctcagtcacacagcctcagtgaccactgctgaagcttgccatggcttgcctatcagggaaagcattccctggctttctttccatagaaaaaaatgtgctgtgcagagagcagtggaactccagcctccttgtgagaggacctggctgtaggacagcgctgcatcctgcacctggaaagctctgggttatctccactttgcctcttagagagacgaccgagtctttaaaaagtctgtgcccctaaytggggcactgcagttagctggctgatagaccagagctggatatataaatgcaatatcactcaggctggttttgctgctgtgtggagaggcaggggcaggtgcctgggacctcattatctggatctggcacagtgcctgcttggtggcaagagtctgaacaggatggaggctgtgggatgtgctcccctgttccctcactatccctgtcataagcaaccctgccgatttcatggtaatgaagttgcaatctcagtggcttgtgcttctttccatgaggtaacaagtaatttcagaaacagc

SEQ ID NO: 56241 - DNA, 600 bp, Chicken  19866894310693_1
ttgttttctgaattaaattattccatccagctcttttccctttctgttgcagtacttattttggagagagtttttgatggcttttttaatggagatttttttacatgttttagttaagttgggaaaaattcaatactaagaaaaaagccatttttttctgcctctcttcttgttgttttttatactctttatgccagcttccagtgcctgctttatgaagcagaaggaacagagcgaagacaagtagggctcaagtcatttttagcctggcaggttcagcagagccaggagggaggtggrcttgtggtatggaaggaccaactgttgggatgtagcattcctttttgttgctagtggacgttgtccttgggagccacctcattttcatgttttcagaatggagaaatggctgtgtctgttgggtaatgaagaccaaatcactgctgtgcacctggagaccagctgtatgtctacttggaatatgtagcacaaagctaatacaataacaggaagcaattgtgaggcaatatggtgtacaattactacagtttattttggaacgggagtgtctcttgtatgttcctgactcttaaatcaggt

SEQ ID NO: 56242 - DNA, 600 bp, Chicken  19866894310694_1
gcatgcccacagctatatgcatcatgttcagctcagtacatctagactgcagaaagagctaacagtattcacagatacctttataaagggtttcagatgttctttctggcaactcgtggctccttgactcctacacttactccaacaaaaaggagaaaaacacaatctaatttatccatattttttcttacataccagagcatttacttagctttactccctaaagctgatgatcacacaacgcagcttctccattctctgccctgccacaacacctgcttgctctgcatctaactgctygctctaccatcctctcagtggaattaagatacatgcacrctgatgtaagtaatgcatgggaagccttatgaataaaatatcctgcatccaaatatactacacagcagcagcatacacctgcattcttgatgcccccagctccttgctcttgcaacctgcaagtttcattcttctgcttcattaggttcagttcaattgttaccataagatggttgatctcaggcaaaagcactgatcacttccaagtcacgcttgtttgtcatatttcagcatttactgttctggtaaattcagaaatgt

SEQ ID NO: 56243 - DNA, 579 bp, Chicken  19866894310694_2
atctagactgcagaaagagctaacagtattcacagatacctttataaagggtttcagatgttctttctggcaactcgtggctccttgactcctacacttactccaacaaaaaggagaaaaacacaatctaatttatccatattttttcttacataccagagcatttacttagctttactccctaaagctgatgatcacacaacgcagcttctccattctctgccctgccacaacacctgcttgctctgcatctaactgctygctctaccatcctctcagtggaattaagatacatgcacrctgatgtaagtaatgcatgggaagccttatgaataaaatatcctgcatccaaatatactacacagcagcagcatacacctgcattcttgatgcccccagctccttgctcttgcaacctgcaagtttcattcttctgcttcattaggttcagttcaattgttaccataagatggttgatctcaggcaaaagcactgatcacttccaagtcacgcttgtttgtcatatttcagcatttactgttctggtaaattcagaaatgtactatttctgtttccatt

SEQ ID NO: 56244 - DNA, 600 bp, Chicken  19866894310695_1
gtttggggttctccactgcagacctgagggttcccactgccatttgcacaatatttcactgtcagcctctgagatttcaggagtagtggcagctgctctcctgcccgtattcccccacccacccttgcagcagttgtcagaatgcattgcaaggcaattatagtgataagtaccaagagtgaagacagaaaattagataaaatgcaaatgaagggagatgatgctgaagctttagggtatggtctcagtgactttctgtggggctgttaaaggatgcagaaaagagcttgcacagccttsctgttccagaacttgtcataagcttcactttgtggaatcctaaacctaaattcttagaaacagtaagttcataagatacaagactcctacttcaaagagcacgtaggcaacttaggaaggcagggtgcaagcaactctatctggaaataagtgtgtccattctgtgtagtcaaataaagaagrtcctttttcttgtgttctattttgtgaaagagagttggcaagcataatagtcagttttttaatgggctagaccaccatggcagtcggtacgaaagtgaagaactataattatttaaa

SEQ ID NO: 56245 - DNA, 600 bp, Chicken  19866894310695_2
gacagaaaattagataaaatgcaaatgaagggagatgatgctgaagctttagggtatggtctcagtgactttctgtggggctgttaaaggatgcagaaaagagcttgcacagccttsctgttccagaacttgtcataagcttcactttgtggaatcctaaacctaaattcttagaaacagtaagttcataagatacaagactcctacttcaaagagcacgtaggcaacttaggaaggcagggtgcaagcaactctatctggaaataagtgtgtccattctgtgtagtcaaataaagaagrtcctttttcttgtgttctattttgtgaaagagagttggcaagcataatagtcagttttttaatgggctagaccaccatggcagtcggtacgaaagtgaagaactataattatttaaattgtactgcaggaatttgttactctttgtctaaaactgarggcttcttcccctctgcagtcatgctcatccgcacaacgtgytacatatccttcaggaaaattaatagctcttcctctaggatgaggtcaaaagagctatgttttaggtgaaaagacaaaggaaggtcaacatcattttcagg

SEQ ID NO: 56246 - DNA, 538 bp, Chicken  19866894310695_3
taaacctaaattcttagaaacagtaagttcataagatacaagactcctacttcaaagagcacgtaggcaacttaggaaggcagggtgcaagcaactctatctggaaataagtgtgtccattctgtgtagtcaaataaagaagrtcctttttcttgtgttctattttgtgaaagagagttggcaagcataatagtcagttttttaatgggctagaccaccatggcagtcggtacgaaagtgaagaactataattatttaaattgtactgcaggaatttgttactctttgtctaaaactgarggcttcttcccctctgcagtcatgctcatccgcacaacgtgytacatatccttcaggaaaattaatagctcttcctctaggatgaggtcaaaagagctatgttttaggtgaaaagacaaaggaaggtcaacatcattttcaggaaaagcaaagtactaacactgtttttaaggaaaaatgatgaacaggaaagagaaggtgatccaaaaattccatggattcaaaggggatgtttctc

SEQ ID NO: 56247 - DNA, 496 bp, Chicken  19866894310695_4
actcctacttcaaagagcacgtaggcaacttaggaaggcagggtgcaagcaactctatctggaaataagtgtgtccattctgtgtagtcaaataaagaagrtcctttttcttgtgttctattttgtgaaagagagttggcaagcataatagtcagttttttaatgggctagaccaccatggcagtcggtacgaaagtgaagaactataattatttaaattgtactgcaggaatttgttactctttgtctaaaactgarggcttcttcccctctgcagtcatgctcatccgcacaacgtgytacatatccttcaggaaaattaatagctcttcctctaggatgaggtcaaaagagctatgttttaggtgaaaagacaaaggaaggtcaacatcattttcaggaaaagcaaagtactaacactgtttttaaggaaaaatgatgaacaggaaagagaaggtgatccaaaaattccatggattcaaaggggatgtttctc

SEQ ID NO: 56248 - DNA, 589 bp, Chicken  19866894310707_1
tgttttatttaaaatacagaaatatattaaaatctttcaaatacacacaacacatgctaaagaaaagtaagcagcttacgcctataaacatccagagtgaaagcactaatgtaaccaatatgaagtccaaatcaaaagaaatgtgaattgcgcttctgcagtatagtttttttctccaaatacaaaattggaattttatgttaagtatacatttaagtaatattctaaggatattataaaataaagataatataaaatatcctcagtctcacaaacaaaatgctgagatacacattgttycgggttatacacagaacaaagctacaattcaatctgagakttctgagaccttcataaacctcgagtttatgaatggcagcagatataacaggttgaattacaacccaattattctgcaagttcacatattgttactaaaaacatttcctttttaattagttacattgggattcataaagttaaaactgactatacaggagctatacagtttgaaaggtgaatatttccataggattactcaaagataaccaatacaaattctttactgctagatagttttgtaaaatat

SEQ ID NO: 56249 - DNA, 549 bp, Chicken  19866894310707_2
atacacacaacacatgctaaagaaaagtaagcagcttacgcctataaacatccagagtgaaagcactaatgtaaccaatatgaagtccaaatcaaaagaaatgtgaattgcgcttctgcagtatagtttttttctccaaatacaaaattggaattttatgttaagtatacatttaagtaatattctaaggatattataaaataaagataatataaaatatcctcagtctcacaaacaaaatgctgagatacacattgttycgggttatacacagaacaaagctacaattcaatctgagakttctgagaccttcataaacctcgagtttatgaatggcagcagatataacaggttgaattacaacccaattattctgcaagttcacatattgttactaaaaacatttcctttttaattagttacattgggattcataaagttaaaactgactatacaggagctatacagtttgaaaggtgaatatttccataggattactcaaagataaccaatacaaattctttactgctagatagttttgtaaaatat

SEQ ID NO: 56250 - DNA, 600 bp, Chicken  19866894310709_1
tcttctttgccagtggcttcttcttctttttttttttttttcaagtggaagacaaagtaggaagaaagagtttggtgaataatagggagagataacttagaaataagtcactccctaatggctacatgacaattactagaagcactacatttctacatggtaaagcagcaaagctttgatgccagagcccagtgatagcagagggaggaaaaaggtcttagctcttctgcgtggatctggagactcaaagatattttctttttgtgcatttaaagtctcatctttttcttctataaaccygagatgtagggcacttccaactccaactggcttccagctgagcctgtgccactgcaccctcatccctcccacccacccaaaggatttcaacatgaaaagcccctgacctctttcagagggaacaggatgcagcaaaaatgaattaactatttgtgatggcctcaccctctccaagtgcccttccaaatcccagcccttcgatggctctacagtgaactgagccttttgttcctggcacgctggaaggaggtctgagcattagttttgcttactctggtaaatcactcttcaaatgccttt

SEQ ID NO: 56251 - DNA, 600 bp, Chicken  19866894310718_1
cttcaggtcttgtctgagttctgtgggaatccacccagtgtttcagacttccaagtgaggctgtatgtgtagcagaaggtggtgcaggccaacaagatgctgagtgtgatgaaggaatgaaactcagctgtagaaacatctggtctggaatgcaaataaaaataaaatataatcatttttagattcctgccaacatgaagtggagaatatctcggatttcatcatagcagtacagtcatttggtacggtaatttatgacaatattcatctggttaatcattaggtatttcttgtaatctstatggtcwtaatgattcagaatccaataggcttgtacctcaaggagttgcttcttccagtcagtgctacgattcctttgattaagagtcacaaataaagccttctttaaagtaaaagcactggagtagttacaagttcatttggtttaaaaacctcaccaattccagctatcttttatacagaaacagaagataaaacaccccaagaattgcagtgagaaacaggtattatccattgtttgctttcagcctgaaggctgggatacaagaattctctccaaacgcttcttacacagttaag

SEQ ID NO: 56252 - DNA, 600 bp, Chicken  19866894310718_2
cttgtctgagttctgtgggaatccacccagtgtttcagacttccaagtgaggctgtatgtgtagcagaaggtggtgcaggccaacaagatgctgagtgtgatgaaggaatgaaactcagctgtagaaacatctggtctggaatgcaaataaaaataaaatataatcatttttagattcctgccaacatgaagtggagaatatctcggatttcatcatagcagtacagtcatttggtacggtaatttatgacaatattcatctggttaatcattaggtatttcttgtaatctstatggtcwtaatgattcagaatccaataggcttgtacctcaaggagttgcttcttccagtcagtgctacgattcctttgattaagagtcacaaataaagccttctttaaagtaaaagcactggagtagttacaagttcatttggtttaaaaacctcaccaattccagctatcttttatacagaaacagaagataaaacaccccaagaattgcagtgagaaacaggtattatccattgtttgctttcagcctgaaggctgggatacaagaattctctccaaacgcttcttacacagttaagtaagtttg

SEQ ID NO: 56253 - DNA, 600 bp, Chicken  19866894310724_1
ggaatgttaatggggagcgttcagcttactgttgtcattggctctaattggaggaggggttcttcatcttggatttgcaatagctgagaaagctgtggttctgagtggatttactctatggtccatgaacactgttgtcaagtcaagtacttagaatgatagaatggctcaggttggagaggatctcaaagatcacccagttccaaccctctaccatgggccaggctgccacctatcaggtcaggctgcccaggctccatcccacctggccctgagtgcctgcagggatgggaaggaagyggtccctccaggggtctgtgcagccttcatgggattttgcactatttaattccaaatatttgagggggaaaaaaaagtgaagggaattccaggaaacacccactggccatgccagaaaaatggcttggtaaaaaaacaygctgccraagaaggcagtgttcagtgcagagcgaagctgtctcatggccttgcagcgagggtgggagtgggaacagaaagctgaagggaactcgtcatgagcacaagctactgcccgcgagcacctgggacacccacagccaccgctctcatgggagccag

SEQ ID NO: 56254 - DNA, 600 bp, Chicken  19866894310724_2
aagtcaagtacttagaatgatagaatggctcaggttggagaggatctcaaagatcacccagttccaaccctctaccatgggccaggctgccacctatcaggtcaggctgcccaggctccatcccacctggccctgagtgcctgcagggatgggaaggaagyggtccctccaggggtctgtgcagccttcatgggattttgcactatttaattccaaatatttgagggggaaaaaaaagtgaagggaattccaggaaacacccactggccatgccagaaaaatggcttggtaaaaaaacaygctgccraagaaggcagtgttcagtgcagagcgaagctgtctcatggccttgcagcgagggtgggagtgggaacagaaagctgaagggaactcgtcatgagcacaagctactgcccgcgagcacctgggacacccacagccaccgctctcatgggagccagcgtgggaaaactgtcaccctgggtgtaaagcttcccccagagagacaggaaaagggatgttcaaagtgagactgagcatccttcccctcctttcgcgtcctccccacgccccacccaatggccaatgcttttattctgt

SEQ ID NO: 56255 - DNA, 600 bp, Chicken  19866894310724_3
gtacttagaatgatagaatggctcaggttggagaggatctcaaagatcacccagttccaaccctctaccatgggccaggctgccacctatcaggtcaggctgcccaggctccatcccacctggccctgagtgcctgcagggatgggaaggaagyggtccctccaggggtctgtgcagccttcatgggattttgcactatttaattccaaatatttgagggggaaaaaaaagtgaagggaattccaggaaacacccactggccatgccagaaaaatggcttggtaaaaaaacaygctgccraagaaggcagtgttcagtgcagagcgaagctgtctcatggccttgcagcgagggtgggagtgggaacagaaagctgaagggaactcgtcatgagcacaagctactgcccgcgagcacctgggacacccacagccaccgctctcatgggagccagcgtgggaaaactgtcaccctgggtgtaaagcttcccccagagagacaggaaaagggatgttcaaagtgagactgagcatccttcccctcctttcgcgtcctccccacgccccacccaatggccaatgcttttattctgttgaatgc

SEQ ID NO: 56256 - DNA, 600 bp, Chicken  19866894310725_1
tgcactagtgcgggtgacgggaaatgtttttttcccattgcctaattgaatgccaatactgataagaactggtaggagctgctaccagaagaagccatttgtagaagataatagcaagttttatcaagcctacaaaaccagaaactatgtgacataacaagattgttacataaagcatacgaacaaatgacacaaaaaataccttacatcactgaggcagcgctaatgaagcctgtctgctgggcagtgattgtaggaaatagtgcaacactggtcctactgaaaactgcaaagtttatkacagtccttgtgtacggcatccaagctgtgatgtcaggccctgatcatcagctgttgcttctttagattttatttgttcatattacccctggaaagcctgaatgttagtaatatggaaaatctgactcatggctgcctgaggtcccaaagcaaggtttggaatgaaacctgtgtttatttaaggatatatttcttggcagaattacagagatgttaccacaagttctttgctttcaacttaatttatatggtaacaatagaatgttttaggtcaaaggtgagatagaacttgcttaagga

SEQ ID NO: 56257 - DNA, 600 bp, Chicken  19866894310726_1
aactgaacccaaatgttcattaaaagttactaatatttaccattctgggtgacctacagtatttgctttcaagcaagagctttcctcatcagaaacctatctgtcctgtattatcacgtgaagaagggtcaacaatcctttgaattattttccgctaccaggaaggtgatcagggttatgattatttttgttccatagatcaatctccaatgctttgcatacagagtagacttaaaatgctaccattaccaatttacacccacttgctgtccataaatgactttcaaggttcaaggcagygwagtgtataagtgctgacttaactgctggagcactgaagaagagaagaaatgatgagacagagcaagtcctaaatgccttccataattaacaaacaaggcaagacaagttatgaaaaacaaagggactagacagatttatgcttaaagtctgctacttctgaaagtttgtccaactacgaaatcctcttttgatctacattaattgaaagcacttaaaattcaatcatacatttatggccacatgtttaaaactgaatccctaatcttgcatttttaacctactggtcagactggaatg

SEQ ID NO: 56258 - DNA, 600 bp, Chicken  19866894310726_2
ctgaacccaaatgttcattaaaagttactaatatttaccattctgggtgacctacagtatttgctttcaagcaagagctttcctcatcagaaacctatctgtcctgtattatcacgtgaagaagggtcaacaatcctttgaattattttccgctaccaggaaggtgatcagggttatgattatttttgttccatagatcaatctccaatgctttgcatacagagtagacttaaaatgctaccattaccaatttacacccacttgctgtccataaatgactttcaaggttcaaggcagygwagtgtataagtgctgacttaactgctggagcactgaagaagagaagaaatgatgagacagagcaagtcctaaatgccttccataattaacaaacaaggcaagacaagttatgaaaaacaaagggactagacagatttatgcttaaagtctgctacttctgaaagtttgtccaactacgaaatcctcttttgatctacattaattgaaagcacttaaaattcaatcatacatttatggccacatgtttaaaactgaatccctaatcttgcatttttaacctactggtcagactggaatgct

SEQ ID NO: 56259 - DNA, 600 bp, Chicken  19866894310726_3
caatcctgtatgatgcagtgatttgtgagctgccccagcgtggagacagcaacctctgtttttgttcacaggtagaagaacaatgaaaagagctagcagcctgaagtaagcaaaatcaaaccactatgcaagtcgttgtgaaaggatacattcagcctcttgtttaatcaggtatgggaaaaaggaagaacaattacgccaaagagctgcatttcgttctctgattagaagatgcaaggtaaacatgacatacttgtaggcaataggactccatgtgatgttataggaactagcaaatcragaactgttttcctggatcccctaatatgcaccaacagcagcactgaaaacactcataaattgggccatttgtgtatactatagtccagattcaaagacctctaccctttcagttccgccccaaacaccaaaaggtaagaaatgctacttgaatatttcattatgttatgtatggagaagagctctgttaaaaagctgggcactattgtcctgtcttggctaatagtttgtgtgacattcataagggagaccagatatttgcacccattatatgtaaggatttttttgcccaaggacaac

SEQ ID NO: 56260 - DNA, 600 bp, Chicken  19866894310728_1
ccaagaaggccagtggtatcctggggtacattaataagaatgtggccagcaggtcaagggaaatgatcctcccccctctattctgccctaatgagaccacatttagaataccgcatgcagttctgggctccccagttaaaataatacaggggtctcctagaaggagtccagtggaagaccacaaaggtgataaagagcctggagcatctcccttatgaggaaagcctgagtaacctgggtccattcagcctgaggaaaagactgagaggggatctgattaacatttataaatatctaaasggaggtgggaggcaaatggatgaagccaggcttttctcggtggtttgtattgatgggagagaagcaatggcctaaaacttcagcacaacttctttacagtaagggtgacacagcactggaataggctacccagagaagctgtggagtctctttctgtggagatattcaaaacctgtctggatgcctatctgtgtgaccaattgtaggaaatctgctttagcaggtgggttagacttggtgatttcttgagctctcttccaacacctgcaattctrtgattctgtgaaaatgtctaggtgg

SEQ ID NO: 56261 - DNA, 600 bp, Chicken  19866894310728_2
gattaacatttataaatatctaaasggaggtgggaggcaaatggatgaagccaggcttttctcggtggtttgtattgatgggagagaagcaatggcctaaaacttcagcacaacttctttacagtaagggtgacacagcactggaataggctacccagagaagctgtggagtctctttctgtggagatattcaaaacctgtctggatgcctatctgtgtgaccaattgtaggaaatctgctttagcaggtgggttagacttggtgatttcttgagctctcttccaacacctgcaattctrtgattctgtgaaaatgtctaggtggattttcaatatctccagaggaagaaactccacaacctctctggacatcttgttccagtgctccatcatgcaattccagtcattccatcagtttgattgttatcaaactaaacaataacaayagttctagctatgggatactaactggtaggctctccttgcctccttctcttcttacttcatagggaaagacccaaggccagagaacacaggattcagtctacctaaacatggatatttactaccatttctgatgctctaagttaccaaaatatc

SEQ ID NO: 56262 - DNA, 600 bp, Chicken  19866894310728_3
taggctacccagagaagctgtggagtctctttctgtggagatattcaaaacctgtctggatgcctatctgtgtgaccaattgtaggaaatctgctttagcaggtgggttagacttggtgatttcttgagctctcttccaacacctgcaattctrtgattctgtgaaaatgtctaggtggattttcaatatctccagaggaagaaactccacaacctctctggacatcttgttccagtgctccatcatgcaattccagtcattccatcagtttgattgttatcaaactaaacaataacaayagttctagctatgggatactaactggtaggctctccttgcctccttctcttcttacttcatagggaaagacccaaggccagagaacacaggattcagtctacctaaacatggatatttactaccatttctgatgctctaagttaccaaaatatctgcacagaatagacaaaaatgacagaagcactgatttctggagcaggattggaattaactggaaggtcaccctgcccaaggttactctgcccaaatggagattactaccaaccaacatatgtgtaggcaaatgaccctcaacttct

SEQ ID NO: 56263 - DNA, 548 bp, Chicken  19866894310729_1
catcaaaagcaaactgagaaggggaaaaaaaaaaaaacacccaaccctcaatgctgagagcatgcactaaaatgttattaagtctcttgaatttcatttgcacagctgaagctgtccctggtccctttggagaaccagcaatagaggcaggctgaaatgatggacatcctttccacttgctattttccaaatgtatcagggcagtatctcagcaggacgaatgtgtcctgcatctcccatacactaatgacagatttcttcttcccacttcaggcagatgtataaataagccaggcagtyggctgcgtacctggggagctggcaaacatctcccacaaagagccataagtgggaggcgataggcactgcttactccatgacttgtgctcacatcatgcctcttctgctggtgtcaaatcaagatggattttgaatctcaaggcccattctaccccaaagcaaaagcagcctggaaggtagcaaaagatgtccaaattctagacacatacactaacataaacagggggtaaagtaacgctccatggaaa

SEQ ID NO: 56264 - DNA, 600 bp, Chicken  19866894310734_1
tttgaggtttattttcagagcctgattttcagtgtcttgagagaaataataggtgataagaaaagagatattttgctgtgttcagttaccatccaaacgccatcctgacgtgggagaaggaaaggaattggagttttagtacaggaaatctgatggttttttaggtgcttgcctcaggctgtgcatgttatgcctggcaagaaatggggaatttctattccagcctttgatgctggttatagcaggggataatttgtgagtgaacaatacactaaaagcattgcctgtgcctgctggtgrattcagtgtgtgcatcccattgccttttcttgctttgcttcattttagcctctgatagagcatctgtgtggcaaacttttctgatttcccccatactttggcacaaaggaaataaatttggcttagcacctgaacagttaatgttattgaaaagacatcgttcattagaacgacttaaagaaaatccaaatcaaatgagcaaaataagaataggatctcctctgcggatttataggtggcaaactgaaatatcagagggtcatgtattcatctgtcaatgtgtaatgtaattagacaaga

SEQ ID NO: 56265 - DNA, 599 bp, Chicken  19866894310735_1
  misc_feature (1)..(199): n is any nucleotide
nnnnnnnnnnnnnnnnnnnnnnnnnnnnnnnnnnnnnnnnnnnnnnnnnnnnnnnnnnnnnnnnnnnnnnnnnnnnnnnnnnnnnnnnnnnnnnnnnnnnnnnnnnnnnnnnnnnnnnnnnnnnnnnnnnnnnnnnnnnnnnnnnnnnnnnnnnnnnnnnnnnnnnnnnnnnnnnnnnnnnnnnnnnnnnnnnnnnnnngatgcccaacatgaggccgccccgagggctcagccccagccccgcgctctcaccacgctcagctttcccaggctggtggttctgaggtccgatccaatgaygggtacacccgtggcatggcatgtacagagaatcatcggatcgttagggttggaaaagacttccaagacccccaagtcggaccatcaacccttccccaccatgcccttctgttccaacatccccatagttctggaatacctccagggatggtgactccaccgctccataggcagctgtgccaacacctcaccactctttctatgaaatgcttttcctaatatccagcctggctatacaaacgcaaaacacagaagtggtgccttgttcaggaggctccagtggacactgctggagatgg

SEQ ID NO: 56266 - DNA, 519 bp, Chicken  19866894310738_1
tgcgatgttctttatctacagcctaattaaagtaaaaacatacgctgtctgtgtctggttcaattaaaaggaattggacagactggcctcagtgctcttcaaagcatttcactgggctgtcctgtccctgcaagatgacttgtcatctcttgagacagtatctttttgaagaaagatggaacaaagtgccaggctgtatacctaaaattagatcaaaatgtgcatctttctgctctgagttgtttagttcactttctgtagtacctcctgtagccaaacttgacttactctctttccatkaagaaagtgacttttcattctgctgctgttcacttgatgttggtgagtgatattttccttragttcactgcagtgctcttttgctgtctgtggttaactgatcaatcatgcttataaracagtaattcatcctttacttactctctcaagcccttactctcctcttgtgttgcacacctgaccaggagtccatctttaatacaaacccactatttcccc

SEQ ID NO: 56267 - DNA, 458 bp, Chicken  19866894310738_2
aattaaaaggaattggacagactggcctcagtgctcttcaaagcatttcactgggctgtcctgtccctgcaagatgacttgtcatctcttgagacagtatctttttgaagaaagatggaacaaagtgccaggctgtatacctaaaattagatcaaaatgtgcatctttctgctctgagttgtttagttcactttctgtagtacctcctgtagccaaacttgacttactctctttccatkaagaaagtgacttttcattctgctgctgttcacttgatgttggtgagtgatattttccttragttcactgcagtgctcttttgctgtctgtggttaactgatcaatcatgcttataaracagtaattcatcctttacttactctctcaagcccttactctcctcttgtgttgcacacctgaccaggagtccatctttaatacaaacccactatttcccc

SEQ ID NO: 56268 - DNA, 401 bp, Chicken  19866894310738_3
gtcctgtccctgcaagatgacttgtcatctcttgagacagtatctttttgaagaaagatggaacaaagtgccaggctgtatacctaaaattagatcaaaatgtgcatctttctgctctgagttgtttagttcactttctgtagtacctcctgtagccaaacttgacttactctctttccatkaagaaagtgacttttcattctgctgctgttcacttgatgttggtgagtgatattttccttragttcactgcagtgctcttttgctgtctgtggttaactgatcaatcatgcttataaracagtaattcatcctttacttactctctcaagcccttactctcctcttgtgttgcacacctgaccaggagtccatctttaatacaaacccactatttcccc

SEQ ID NO: 56269 - DNA, 600 bp, Chicken  19866894310751_1
tataacagtctattttaagctctgactcaccactttaatgttaactcctcaccatgggtcaatgaacaagaaacaactcatcggagatcagatgcagaatctttttagcatgctcagctgtgagcagctgatgtccttgccttacagctcaggtctatttggtggatgcatacaaatacattctgtgcaaaacgcacaaagtaatcctactatatttattaagctgcataacaaatatcacaggagctgaagggtggaatcaaaagggttgaatagaatatggtattttaactcttctcycttttacacttacccaaacacttacatacactttgatgccagctgtaaaacatatcctcactcttatccccacagcttctctgaagactccctataactttagggaattaacttagtcagctccttgatacataaacgattgaagatgggtctattgcattcttccaccatttcccacactgatgctagcagttgtttggtcctatggtgaactagtttggggaactaaacgatgtccaacaaaaaaacctttatcttcaaaaatccaaggactgtcatccgatgaatcagatcactaca

SEQ ID NO: 56270 - DNA, 600 bp, Chicken  19866894310753_1
tccctgtgtgcctggagggaaagggcagtaggttacccagcctccatgcaagttcagcaatggctctgctggggaatccccatctcctgtgggctggcccttggtctaaacatttctttggggtggtggttttggaggggtgctctgccaaccccaactcaggccctggctcttctgacagggatgggcttcctgctccgccacgctgacatcctggtgggggcagccatcacggccagcctgacgctgctggtggctgctggagccctgtgcagggcaaaatggcggagacggcatccrggcagggccctggggcctgaggaaccaccagagcaggctgtggaggagccaccggtgwtggagctgcgggacctgggggactgcctgcgccttgaccccttccagctgaarctgcgggccaggccccctgagtggctgtggggggctcgggcacaccctggccaggcctacagagtcttcctggagcagtcgcccccgctctagggcggccctcgttacctgtgcagtcagtgctggctgtgtaggctctccttgtgtgttttatggaccacccctctcccccagcctttctcgcttttg

SEQ ID NO: 56271 - DNA, 600 bp, Chicken  19866894310753_2
aatggctctgctggggaatccccatctcctgtgggctggcccttggtctaaacatttctttggggtggtggttttggaggggtgctctgccaaccccaactcaggccctggctcttctgacagggatgggcttcctgctccgccacgctgacatcctggtgggggcagccatcacggccagcctgacgctgctggtggctgctggagccctgtgcagggcaaaatggcggagacggcatccrggcagggccctggggcctgaggaaccaccagagcaggctgtggaggagccaccggtgwtggagctgcgggacctgggggactgcctgcgccttgaccccttccagctgaarctgcgggccaggccccctgagtggctgtggggggctcgggcacaccctggccaggcctacagagtcttcctggagcagtcgcccccgctctagggcggccctcgttacctgtgcagtcagtgctggctgtgtaggctctccttgtgtgttttatggaccacccctctcccccagcctttctcgcttttgtcactgttttttaactgcttgctctccttttggaagcaaatgctctttgtattttctc

SEQ ID NO: 56272 - DNA, 600 bp, Chicken  19866894310753_3
atttctttggggtggtggttttggaggggtgctctgccaaccccaactcaggccctggctcttctgacagggatgggcttcctgctccgccacgctgacatcctggtgggggcagccatcacggccagcctgacgctgctggtggctgctggagccctgtgcagggcaaaatggcggagacggcatccrggcagggccctggggcctgaggaaccaccagagcaggctgtggaggagccaccggtgwtggagctgcgggacctgggggactgcctgcgccttgaccccttccagctgaarctgcgggccaggccccctgagtggctgtggggggctcgggcacaccctggccaggcctacagagtcttcctggagcagtcgcccccgctctagggcggccctcgttacctgtgcagtcagtgctggctgtgtaggctctccttgtgtgttttatggaccacccctctcccccagcctttctcgcttttgtcactgttttttaactgcttgctctccttttggaagcaaatgctctttgtattttctcccccttaccctgcttgagatttgtgcaaaactgttagcatgtaataattaaat

SEQ ID NO: 56273 - DNA, 594 bp, Chicken  19866894310754_1
  misc_feature (1)..(114): n is any nucleotide
nnnnnnnnnnnnnnnnnnnnnnnnnnnnnnnnnnnnnnnnnnnnnnnnnnnnnnnnnnnnnnnnnnnnnnnnnnnnnnnnnnnnnnnnnnnnnnnnnnnnnnnnnnnnnnnnnncgtgcccgttaatttggaaaaaaatcactctgcagatccgcttttattttgggaatacactcaggaacagcggggaaactgaggcagaggttccccactcaaaccctcagcccccagagcagccgtttcccacctgtatgggaaaaggggggcattggggctgtgcctttccatacacgtcccatrcgccccgccagggccaggatgaggacacggatggggtatgccaccggttccttccagcctggtgtcatcagcgtttgggcccgtgcccagcccagctgtgggatcgggatgggcgacctttccatcagagccgcctgtcccgcgtgggtggttcctgctggcaccctctgctccggagccacgcgggacatgaggctattttgaacgctggcgttgttggccttggcaggcagtgagggtttggctctctgctcatttccagccccgcttgcatttttggctgtgggggatggt

SEQ ID NO: 56274 - DNA, 600 bp, Chicken  19866894310760_1
agcatcctgtagatggcaaagcaaagtgctgacagctgttttgctcttctaaacagttcctatgtgcctccaaaataccgaagttgcattaaaaagcataatctcccattttcagttgcaggaaggaaaaatacacttgaactatactctatttactttacagaatgcatgtaaggctgttcagaaataccgactgcatgtcacttcatgaaaacagtgagaagcaaagagagaaaagagctccaaaaaccaaaagctgctgttactgggttactgttttcacaatgaaagcaataaacwttttgtaaatgcttttcagtagaacagaatcaaaccaatattgctgccattctgtactttaagaaagactctttacttgacctcccatgaacccttatcactcaagtaaaataatttccagcagcctcttgaaatgcacttacggatgtattaggtaggcttatcgttggttttgtttgcatattgtttgtatatttctattcccattcttacagtagctctgtgcttgtgattttcattagctttcagtaaggaattccaaactgagtaatatgagaaaaacaattttctgagttaacc

SEQ ID NO: 56275 - DNA, 347 bp, Chicken  19866894310762_1
agagaaaccgagaacatgataaacaggaggcttggctgctgatggaacttcagaaacttcggcgtcagattgaagcttctgagattcgaatggttcaaagagctccacttggtgtggatcaaggggctctgcatgacttttctgtcagaatacaggatttagaggtaactgtgtatgttctcatttgaacatctcaaactcatcatgactctgttcagcagagcatactgtatttggatttctcatcagctgggagtgacatgtacactgcacatatcacagctggcttccaattaaaaratatatttsrgttggcattctagaagcctaagtaggaaaagctgact

SEQ ID NO: 56276 - DNA, 338 bp, Chicken  19866894310762_2
gagaacatgataaacaggaggcttggctgctgatggaacttcagaaacttcggcgtcagattgaagcttctgagattcgaatggttcaaagagctccacttggtgtggatcaaggggctctgcatgacttttctgtcagaatacaggatttagaggtaactgtgtatgttctcatttgaacatctcaaactcatcatgactctgttcagcagagcatactgtatttggatttctcatcagctgggagtgacatgtacactgcacatatcacagctggcttccaattaaaaratatatttsrgttggcattctagaagcctaagtaggaaaagctgact

SEQ ID NO: 56277 - DNA, 337 bp, Chicken  19866894310762_3
agaacatgataaacaggaggcttggctgctgatggaacttcagaaacttcggcgtcagattgaagcttctgagattcgaatggttcaaagagctccacttggtgtggatcaaggggctctgcatgacttttctgtcagaatacaggatttagaggtaactgtgtatgttctcatttgaacatctcaaactcatcatgactctgttcagcagagcatactgtatttggatttctcatcagctgggagtgacatgtacactgcacatatcacagctggcttccaattaaaaratatatttsrgttggcattctagaagcctaagtaggaaaagctgact

SEQ ID NO: 56278 - DNA, 599 bp, Chicken  19866894310763_1
  misc_feature (1)..(119): n is any nucleotide
nnnnnnnnnnnnnnnnnnnnnnnnnnnnnnnnnnnnnnnnnnnnnnnnnnnnnnnnnnnnnnnnnnnnnnnnnnnnnnnnnnnnnnnnnnnnnnnnnnnnnnnnnnnnnnnnnnnnnnnttagtgggtgctgagctctgcctgctgcaggtgtttggcgttagaagcaggcatctcattgtaggaattgtgtgtgttttttgaaacacttgctttgaaaagtgatcccggtgatggcaccataacaggcataggaaaatcaggaggttgcaaagggaatggcaacctgggctgcgtcccytgtcccccatactgaggggaagcccccatagcctcaccatggggctcacccatgctggggacagagccataggtgcccgatggactcaccttcccgttggggctggtcttcttgaataccctgcaggaaaagcacacagacrgtggtgaggctgggggcagcgctgccctctccccagagaggagcatccccaggagctgtgcccaggcaggcaggtatgtcccagccttgggattcggtgtcccatgggctcacagcacagaccctcagcatgtggccttacacttactttgatcctt

SEQ ID NO: 56279 - DNA, 600 bp, Chicken  19866894310763_2
gctgcaggtgtttggcgttagaagcaggcatctcattgtaggaattgtgtgtgttttttgaaacacttgctttgaaaagtgatcccggtgatggcaccataacaggcataggaaaatcaggaggttgcaaagggaatggcaacctgggctgcgtcccytgtcccccatactgaggggaagcccccatagcctcaccatggggctcacccatgctggggacagagccataggtgcccgatggactcaccttcccgttggggctggtcttcttgaataccctgcaggaaaagcacacagacrgtggtgaggctgggggcagcgctgccctctccccagagaggagcatccccaggagctgtgcccaggcaggcaggtatgtcccagccttgggattcggtgtcccatgggctcacagcacagaccctcagcatgtggccttacacttactttgatccttctgccattgtaagtcaggtgccacacagacaggaacctgcatggagagatgggggaaatgctggaggtgggaacaggacacccattggccatcaccagcaatggggactcaatggttcgcgcrccactgctctgcagagccct

SEQ ID NO: 56280 - DNA, 600 bp, Chicken  19866894310763_3
gcaggaaaagcacacagacrgtggtgaggctgggggcagcgctgccctctccccagagaggagcatccccaggagctgtgcccaggcaggcaggtatgtcccagccttgggattcggtgtcccatgggctcacagcacagaccctcagcatgtggccttacacttactttgatccttctgccattgtaagtcaggtgccacacagacaggaacctgcatggagagatgggggaaatgctggaggtgggaacaggacacccattggccatcaccagcaatggggactcaatggttcgcgcrccactgctctgcagagcccttggcaatggccctcctgggggttggcactgtgagcagcacggctggaggctcagcagggctcagatgctctatgtgcatccagggctagccgtgcttcctcgggactttgcggggttgggggtacaatccagtggtggagctgctggagactgcagctgctggaaatttgctgccatcacccaccgggaggaatgtgctcattgtcctcactcacaggagagtgaggaaaccatgggcaggggagcccagagccattcagagccccatcccacactcact

SEQ ID NO: 56281 - DNA, 600 bp, Chicken  19866894310769_1
agactgagatcaaacaaaaactcttgtatttttaacttttagcagcataaaaaaataagcttaggtttaccgctgaaaactcaagtggtgctactaccttaattttctcactactgaaacattcctggggtttttacacagaaagatcagattcctcacataacctcttggagaaagcttttatcttctttaatcagccactagaggaggtccatattttccattttctacctctaggtcttacctaatgactgccaatgagctgattcacattctgctgacactgaagttggatttgtrgacaatacattgttccaaaatacatattgctgtaaaatgcattcaagaagcctaacatcgttataaaataccagatcttaactacagagctcactagataacactctatatattcacttaatctgcactgtacgtcttcagtacagcattcataacattgcagtcttcggagatggtactacggttcaacagtttcttccccttagagaatagtcctggggtctaaataacagcactgatttggtagcagaagttttcattcctttggggatattacagggtcatgcactgatttaggtg

SEQ ID NO: 56282 - DNA, 599 bp, Chicken  19866894310776_1
  misc_feature (1)..(162): n is any nucleotide
nnnnnnnnnnnnnnnnnnnnnnnnnnnnnnnnnnnnnnnnnnnnnnnnnnnnnnnnnnnnnnnnnnnnnnnnnnnnnnnnnnnnnnnnnnnnnnnnnnnnnnnnnnnnnnnnnnnnnnnnnnnnnnnnnnnnnnnnnnnnnnnnnnnnnnnnnnnnnnnnnnatatctagcttcttttaaaatagtttctgaagttcctcaggaagtagctgttccatttagtttggacttttggtgagacttttaatcttctaagtattttaatcagcatctgcagatgcatccacagcacactgtttwgtgttttcagacattgttttaaggtggtaaaaaagtgttattttttttaacttactctttaaactcgtgtcttccatcagaccgtattccagtttacctgtagcctcacaatatttcacttttgatacaagtccagctgatgccaagcatgagcattcattatatgtatactataacgagtatgaatattctagtgtatcaagatgtaagaacttcaagcctgtcagataacagtgtacaygcttagtggacttcttaaattaacacaaggtggtcttctcaactcacttgctactgac

SEQ ID NO: 56283 - DNA, 600 bp, Chicken  19866894310776_2
ttttaatcttctaagtattttaatcagcatctgcagatgcatccacagcacactgtttwgtgttttcagacattgttttaaggtggtaaaaaagtgttattttttttaacttactctttaaactcgtgtcttccatcagaccgtattccagtttacctgtagcctcacaatatttcacttttgatacaagtccagctgatgccaagcatgagcattcattatatgtatactataacgagtatgaatattctagtgtatcaagatgtaagaacttcaagcctgtcagataacagtgtacaygcttagtggacttcttaaattaacacaaggtggtcttctcaactcacttgctactgacagacattttcaagattttacggatctttaatttgtgaagagtccacagtgagtatgaagatgaaatcttatggtatggctttgtgttcttctaagaaaacaacgctaagggttttgcagtctgggttagaaactgtttattccatagtgaaagtgattggaaggcaaattcatgcttagagggtaaacctctgtgacctttatgcagaacattgaggggcttacatacagggaagatcatga

SEQ ID NO: 56284 - DNA, 545 bp, Chicken  19866894310777_1
  misc_feature (1)..(94): n is any nucleotide
nnnnnnnnnnnnnnnnnnnnnnnnnnnnnnnnnnnnnnnnnnnnnnnnnnnnnnnnnnnnnnnnnnnnnnnnnnnnnnnnnnnnnnnnnnnnnntcggatttgctctataaatattattattgtggtcctgtatatgttgcaacgtccgtggaaataaataggaggcgttactttcagagcgagctatgtatgtagctatacaactgaaggcacccaggacagactgactgcgtcccgaacggctggcattttcgatccgtgcgttggattccgggatgctggaggcagaagacccctcyttgatgtcagaacgcttccgtgcagacgaagttgagagctccccaactgggaggggggcgatgcgcagggaacagctcaccccgagccctgcggcagctgggggcgcttcgggaacagcagccccaccgccaggcggccaccaaggcgagccgagtggggaggcggcgagcgcacggcccggcggggcagagccttcacagccccctctgcccccgcggcaacgggcggggggcggcgctgcggg

SEQ ID NO: 56285 - DNA, 599 bp, Chicken  19866894310779_1
  misc_feature (1)..(120): n is any nucleotide
nnnnnnnnnnnnnnnnnnnnnnnnnnnnnnnnnnnnnnnnnnnnnnnnnnnnnnnnnnnnnnnnnnnnnnnnnnnnnnnnnnnnnnnnnnnnnnnnnnnnnnnnnnnnnnnnnnnnnnnntttttgggacacgttcacacatctaacctcacagcacacaacagaagtcatttagactaaatctactttagaaattgattagactattgattttgtcatagttcagatgcagacaaagtgacctttacatcccacaaaaaacgaagggaattgactcatgcacacagtgagtcttcatcrcaaagaaactgcattgctctctcagaaagcaagttctgtaatacttacttttcccctggcagctgccagaagatcagggctccttccctcacctcagcttccaaaacacactgaagggacaacatctctcacacgcagaagaccagcctggagakgaactcaagacggatctgcctataggtcattagatggtaaaaatcatcagtaccaaattgtacctcaacagcacacgtgaccccccagcaggaagctcaccaytgtcattatccggaaggtcacctctatttagatgttatttg

SEQ ID NO: 56286 - DNA, 600 bp, Chicken  19866894310779_2
acacaacagaagtcatttagactaaatctactttagaaattgattagactattgattttgtcatagttcagatgcagacaaagtgacctttacatcccacaaaaaacgaagggaattgactcatgcacacagtgagtcttcatcrcaaagaaactgcattgctctctcagaaagcaagttctgtaatacttacttttcccctggcagctgccagaagatcagggctccttccctcacctcagcttccaaaacacactgaagggacaacatctctcacacgcagaagaccagcctggagakgaactcaagacggatctgcctataggtcattagatggtaaaaatcatcagtaccaaattgtacctcaacagcacacgtgaccccccagcaggaagctcaccaytgtcattatccggaaggtcacctctatttagatgttatttgtctgtagctaatgagtttggcattcattaatccactgcgagagctgtggctataggtggtccatgctgtaggatgctgtgggtgcactgcagtggttggctctgcaataacacgggcttgcaatgtggctaccagtttgcctatgctttctactat

SEQ ID NO: 56287 - DNA, 586 bp, Chicken  19866894310779_3
aaacgaagggaattgactcatgcacacagtgagtcttcatcrcaaagaaactgcattgctctctcagaaagcaagttctgtaatacttacttttcccctggcagctgccagaagatcagggctccttccctcacctcagcttccaaaacacactgaagggacaacatctctcacacgcagaagaccagcctggagakgaactcaagacggatctgcctataggtcattagatggtaaaaatcatcagtaccaaattgtacctcaacagcacacgtgaccccccagcaggaagctcaccaytgtcattatccggaaggtcacctctatttagatgttatttgtctgtagctaatgagtttggcattcattaatccactgcgagagctgtggctataggtggtccatgctgtaggatgctgtgggtgcactgcagtggttggctctgcaataacacgggcttgcaatgtggctaccagtttgcctatgctttctactatttaaagccttaattcagagacttcagcccagctgggaagcccagcaatggaaacacagctcagctggagccgcaagaaagctgcaccca

SEQ ID NO: 56288 - DNA, 600 bp, Chicken  19866894310783_1
gaaatgtattccagcttcacttaatgagttcctattacaacatgcttttctcttattttcagtttttttcttccttgcagtcctaagttgaaatactaccctatttaacatccagaaactgcagtggaaccaccatcctaacatagagctatatttcagtcccaaattcagacagaaatcaaggaatgtaactcataaccaattgtacaatacagaaaatgaatacttaaacataatacgggaaaataaatatttaagagatgcatacaacattgatattaaacatgtagaataatttgygtggtagtttatataccaaaaatgtgcaactttgcgctttcagaatgaaaaatggagaaagtctccaagaacacaagcaggatgaaagataaaaattaataaagtcaggcaattgaacctgaagacacaagctagagcagtaacagctagcagtgtttgagttattttacccagaattgattatctgttatactacattgagatatccagattattgatctgtaagattatggtacctgggtctccccccctttcctccaggcacaggaatggagttgcaacaaataacactaagtaagg

SEQ ID NO: 56289 - DNA, 600 bp, Chicken  19866894310788_1
actcctgcagatacaacagcaactggagttcgtcctagctctgtcaagtcagcactcacatccagagctgtcaagggacaagcagctgttgtttgtgatagtgttgcacctcaagctgatgtgatctgccctcttaaaaagccatatctgcctccttttgtaaacattttgttccacgcacaaatattacagtttaaaagcatgcttttagatgctaaggttgtaagactgaaaacaaagaagtcacttgatttagggcagaggtgcagccttgcactgactgtgtcagctgctggttcrtgtcagtaaatagcatgcaaaaatttggttggaaaaaagaaaggacaaagctcatgaagatggaatataagattttgatttcaatgttgacacaactggcagagaaacaccacagaagctttactgacctctggaaacccccagtctggaatttacgtcagaaagagatagcactcagcagagtggtgtgtttacattatactaggagtatatatagctaaaaggaaagtatgtacttaaaggtcacattttacactgccgaagctgtgccacatcccagttttccagagagcaacatgg

SEQ ID NO: 56290 - DNA, 599 bp, Chicken  19866894310789_1
  misc_feature (1)..(28): n is any nucleotide
nnnnnnnnnnnnnnnnnnnnnnnnnnnnattgattaggaggaatagctactgcttgtaaccgtaattattcacagctaagttaccttaccttaaatttaagggaaattcggactgttcactgagaggatagtgatttagtgcaatccaaatgtcaccaaggctgtcccgagagatccctgttgttgcatccctcaggactcccaattctttctgaaatgaaagatttcacaggctgtatgtaaagctttataaagctaagtgatttcattaaaataaacattggaggcataggaaactgrtgcagagtttaaactctggatcagatctgtgttatgcagtagttactgggaagtcttgaagaatcaaggaatataatgtgasagcaatcccatgtgactggttctgtctcagctgtgaagactacatctggatacaaacttgctctcaattcaaaacctgtgcagaagataaatgatacaggagccagctttcatctggcaagttttgagtacactgagtaaaattagtcatgagcacagcttcactgaacaagaaaattgctataaaatattgcaggtctataaaatctattaagagt

SEQ ID NO: 56291 - DNA, 600 bp, Chicken  19866894310789_2
accttaccttaaatttaagggaaattcggactgttcactgagaggatagtgatttagtgcaatccaaatgtcaccaaggctgtcccgagagatccctgttgttgcatccctcaggactcccaattctttctgaaatgaaagatttcacaggctgtatgtaaagctttataaagctaagtgatttcattaaaataaacattggaggcataggaaactgrtgcagagtttaaactctggatcagatctgtgttatgcagtagttactgggaagtcttgaagaatcaaggaatataatgtgasagcaatcccatgtgactggttctgtctcagctgtgaagactacatctggatacaaacttgctctcaattcaaaacctgtgcagaagataaatgatacaggagccagctttcatctggcaagttttgagtacactgagtaaaattagtcatgagcacagcttcactgaacaagaaaattgctataaaatattgcaggtctataaaatctattaagagtaatgcatttctaggctagtttctgcagtgcttctgataataggcaactctagtatttttcactctgagggaattcttgttgtc

SEQ ID NO: 56292 - DNA, 600 bp, Chicken  19866894310801_1
catgaggctgttcccttacaaaagctttcgaagttaaagagaatgggaagaggaacctcgttaaaatgaaagctctacagagtgctctgcattttcaatcagttaccttttaccactttggctctaattaaaaggttaacaaacatgagcagtgagcatttaacagagaaaaggaaagctcaggtctctctgcttgaaccatgaactgcatttaactacttggatgctgccagtgatataatcatggtaagcctttgattccctgggacaaacttgcataagcattacaaattacaaggmattcctgtggacaacakggactcttctacctgagcttactttccttatataatcaatgcagtgaagaaagagttcatttctgctcatattcaatattttcrttatgagcaaaacagtaccacctccacaaatgtgtggaaagacatgtagtcatgtaatttttaccgtgtacaacagagtaccctgcacaacagcagtattctgcagatactgtgagcacacagtagtgggaggcacagagaggtcaccatctcagcaaggctagcagtttagcaaagccaacgtgattgtgtgtgtgtg

SEQ ID NO: 56293 - DNA, 600 bp, Chicken  19866894310801_2
acaaaagctttcgaagttaaagagaatgggaagaggaacctcgttaaaatgaaagctctacagagtgctctgcattttcaatcagttaccttttaccactttggctctaattaaaaggttaacaaacatgagcagtgagcatttaacagagaaaaggaaagctcaggtctctctgcttgaaccatgaactgcatttaactacttggatgctgccagtgatataatcatggtaagcctttgattccctgggacaaacttgcataagcattacaaattacaaggmattcctgtggacaacakggactcttctacctgagcttactttccttatataatcaatgcagtgaagaaagagttcatttctgctcatattcaatattttcrttatgagcaaaacagtaccacctccacaaatgtgtggaaagacatgtagtcatgtaatttttaccgtgtacaacagagtaccctgcacaacagcagtattctgcagatactgtgagcacacagtagtgggaggcacagagaggtcaccatctcagcaaggctagcagtttagcaaagccaacgtgattgtgtgtgtgtgtgtggcaattaacatat

SEQ ID NO: 56294 - DNA, 600 bp, Chicken  19866894310801_3
gttaccttttaccactttggctctaattaaaaggttaacaaacatgagcagtgagcatttaacagagaaaaggaaagctcaggtctctctgcttgaaccatgaactgcatttaactacttggatgctgccagtgatataatcatggtaagcctttgattccctgggacaaacttgcataagcattacaaattacaaggmattcctgtggacaacakggactcttctacctgagcttactttccttatataatcaatgcagtgaagaaagagttcatttctgctcatattcaatattttcrttatgagcaaaacagtaccacctccacaaatgtgtggaaagacatgtagtcatgtaatttttaccgtgtacaacagagtaccctgcacaacagcagtattctgcagatactgtgagcacacagtagtgggaggcacagagaggtcaccatctcagcaaggctagcagtttagcaaagccaacgtgattgtgtgtgtgtgtgtggcaattaacatatctaacagatggggagggagacaacatgtcctcttcctcacagcatggctcttcaaagtgtgtagtgggctttctgatgagggag

SEQ ID NO: 56295 - DNA, 600 bp, Chicken  19866894310802_1
atccgcacagatctgcagaagagccatggactccagccatccttccctgaggctcccaaagaggctgatgatggcaagaacaaagcagacctggcccttaaaccatccctactgcggctccttagccaggtgagcactggctccatgagagggtgctgcaggctgtgctgctgttgcatagcccttaccataccgccttccaccagctcttttccatccacatggactccatcaacatcatggttctacatgtggccacctcagagtctctctggcacatccaggccagcaagacgcgtyttctcctcaatggtgatgggaagaggtaatgctgtgttcatgccctttatcccaccaaaaagggagggaaggggcttggttttgcagggccttcagcctcagtctgctctctgctctccccagcctgaactgtgaggtgaayctgacaaaggtcaacagcaaagtgctccggagcagccagctggtgagtgccagggaagggagaaattcagtgctctgggcagcagctctctggggcacctcaggacctgttccagtgtgtccctcgaggttgggtggtgctgaatgccctgtagggct

SEQ ID NO: 56296 - DNA, 600 bp, Chicken  19866894310802_2
ccatgagagggtgctgcaggctgtgctgctgttgcatagcccttaccataccgccttccaccagctcttttccatccacatggactccatcaacatcatggttctacatgtggccacctcagagtctctctggcacatccaggccagcaagacgcgtyttctcctcaatggtgatgggaagaggtaatgctgtgttcatgccctttatcccaccaaaaagggagggaaggggcttggttttgcagggccttcagcctcagtctgctctctgctctccccagcctgaactgtgaggtgaayctgacaaaggtcaacagcaaagtgctccggagcagccagctggtgagtgccagggaagggagaaattcagtgctctgggcagcagctctctggggcacctcaggacctgttccagtgtgtccctcgaggttgggtggtgctgaatgccctgtagggctatcagctgcatgctgtgcccagtgcattacctgcaaccttcatcagcagggagctgggtgactcctggtgtgcttcttgtccgtgtccctacacaggatgacacatgcctggcagagctggccctggcactctccatctcac

SEQ ID NO: 56297 - DNA, 600 bp, Chicken  19866894310806_1
cagttgcttgcaaattgggacataaatgtgtggtatggggtatttttccatcacaacacatatcttacttgtgccactcatagacagtggcacagccatcacttgtgtaaatgtactgaagacccagctcttctcttttgaagttgtatcagtcacaatgctactgagatgctcttgagatgtcctttaaaaaagggctgctagtggcttttatgtcagtctgattaacagagataggaatcaaccacattggaaagggatatttggtaagaagtatattttgtcagaaatataaactgyggtgctcaggatgctcctgccactgtgggtgctgcagcacaggcctctctcttcctatctcagtgaacctaactgcagatctgggtgtctgcccaggtgcagaacaagagttgaagtcatttgagtgaaaaatgaccatcagccacaagagaatgtgtcatggaaacttctgatagtaaccccaatagtcttctgtgcagcatttcaaatgaaatgtgcagtgctaaaagagattgttgtgtacatgactgacaccctgagtagagaggagcttgcaataagaaattgtgcaactgcaca

SEQ ID NO: 56298 - DNA, 600 bp, Chicken  19866894310806_2
ttcctatctcagtgaacctaactgcagatctgggtgtctgcccaggtgcagaacaagagttgaagtcatttgagtgaaaaatgaccatcagccacaagagaatgtgtcatggaaacttctgatagtaaccccaatagtcttctgtgcagcatttcaaatgaaatgtgcagtgctaaaagagattgttgtgtacatgactgacaccctgagtagagaggagcttgcaataagaaattgtgcaactgcacaagaacatgggaacctcaggatgatagagagaataagcccagccatacacarcttctgtgtgggcaggagctggaaagacctgggaaccaagtggctccatgatgacggatgtgtgaggagggatggacgcaggggaggagtcatgtttatctctgagttatcaaaatgagcaagaagtctgagataatgtcatctgaaagcaratggagcagcttgctgagagtgaagtattttaaatagttatagtgaagcaacggattaaaatgctaacgagatcatattcttgtcataataactcgagttagccaatatctgatgagcagctgtaaaacatgatgaaacgaagccaag

SEQ ID NO: 56299 - DNA, 600 bp, Chicken  19866894310806_3
ttcaaatgaaatgtgcagtgctaaaagagattgttgtgtacatgactgacaccctgagtagagaggagcttgcaataagaaattgtgcaactgcacaagaacatgggaacctcaggatgatagagagaataagcccagccatacacarcttctgtgtgggcaggagctggaaagacctgggaaccaagtggctccatgatgacggatgtgtgaggagggatggacgcaggggaggagtcatgtttatctctgagttatcaaaatgagcaagaagtctgagataatgtcatctgaaagcaratggagcagcttgctgagagtgaagtattttaaatagttatagtgaagcaacggattaaaatgctaacgagatcatattcttgtcataataactcgagttagccaatatctgatgagcagctgtaaaacatgatgaaacgaagccaagaggaaaagatgacgaaatatgcagcctttataaaaggccttagaccttttcacctgaagccaaactaattacctcatggttgtaaatgattgtttggattctgagaattcagttgggttgttagattttattgaaatcgcatgggcagagca

SEQ ID NO: 56300 - DNA, 600 bp, Chicken  19866894310807_1
ggagggcaggaggtgttctgggtgcagagcagaagctccctgcagcccaggagaggcccatggtggagcaggctgtcactgtggagcccatgggcaccaaacaaagcagatctcatgcagtcatggaggagcccatggtgcagcagtggatgaagtctgaaggagccacagcccatggagagtcctcacagggggcagcccctagatggacctgcagcccaaggagagccacccatgttgggacaggagacctgggggagctgtcatcagtggggacctgtgctggagcagttcctgaargataagctccatactatggagccatgttggagctgaagcctgtggtaagcccatgtaggatcagctggggaaggacagcatcctgtgggagggatcccacatggagcagggacagaaagtgatcttagaagagcagcagatataaagtgttatgaactgcctgcagcctgcattcccttgccccagtcagggagaaagtggagaagctggatgtgggaaaggtgttatttaattgtttttagttctctataatctagtctgttggtaaaagtcaataaactacattaatctccctattca

SEQ ID NO: 56301 - DNA, 600 bp, Chicken  19866894310812_1
gtaaacttaacggacatcatctttcatcgattgctaacttattttgcttaaggtaaccctgtgagttggaaaagttcagcaagagagcagtctcttgaatcctctgtcattctgaaaaaccaaaattgtttctgtaacgtattttaagctttgggaatctgaggtctgtgggtgtagcatactttgctgttttgaaggttgtaatgccactcacttgctttgttcataacactgcaggtgttgaaaattgtacttcactggtctgtcaaggtcatgggtttatctaagataaaccagccrtaaggagctggggcagcctactgcctttataygtgccggctgttttgggcagggttatcgcacagtttgtttaacctagcagcagaggtcaaacaaaacctgtcttggttgtcttgttctgtacattgcagaaggagactatccaaagttgtgctgacctttctgcaggtctttgcagcagccagtgatttgaagaacctgcgtttggtggaaatgagaagccatgaattaagtggttgtggttagagctttcacttaagtgctattattgcacttgtttacatatagaaacacatactg

SEQ ID NO: 56302 - DNA, 600 bp, Chicken  19866894310812_2
gctaacttattttgcttaaggtaaccctgtgagttggaaaagttcagcaagagagcagtctcttgaatcctctgtcattctgaaaaaccaaaattgtttctgtaacgtattttaagctttgggaatctgaggtctgtgggtgtagcatactttgctgttttgaaggttgtaatgccactcacttgctttgttcataacactgcaggtgttgaaaattgtacttcactggtctgtcaaggtcatgggtttatctaagataaaccagccrtaaggagctggggcagcctactgcctttataygtgccggctgttttgggcagggttatcgcacagtttgtttaacctagcagcagaggtcaaacaaaacctgtcttggttgtcttgttctgtacattgcagaaggagactatccaaagttgtgctgacctttctgcaggtctttgcagcagccagtgatttgaagaacctgcgtttggtggaaatgagaagccatgaattaagtggttgtggttagagctttcacttaagtgctattattgcacttgtttacatatagaaacacatactgtgtgttcctgtgatttcagcctagtttttgga

SEQ ID NO: 56303 - DNA, 600 bp, Chicken  19866894310812_3
gctatccatttgattaagaaaagtgtgtaaaaggatagatgctgtacaagctaattctaaaacgaaagaccatgtaatctctttttgacttttgctggctcatttaagttttgaatgtgggacttgacttccttttgactgcatgtttccgcagcccacagaagcagggtaaacccgaaggacacattcagaaaagtaaatctcaaaattcaagccactcttcacactggctccgcattcgtctttgttccccttcacagatgtctctgctggggtgttcagaacaggctgtactgaagracgtgtctttggggcctgccctgtgcttgttcttgaagctgcctggaggcaaaccaggtcttcattttgaggttgcaaaactgtgctggtgtggcaggggacagactttgtttctcagctgaacttaccaaggctcctgagctccatgccacactggagccacagcattcctgggagagccaggttacaactgtgttacaacgggtcaggcatgtcaccgcctgtatgtgaccacaaacctactcaaaagctgttagttcatgtgggcgtagttgttgaattggaaggactcctcagcat

SEQ ID NO: 56304 - DNA, 600 bp, Chicken  19866894310812_4
tgcctggaggcaaaccaggtcttcattttgaggttgcaaaactgtgctggtgtggcaggggacagactttgtttctcagctgaacttaccaaggctcctgagctccatgccacactggagccacagcattcctgggagagccaggttacaactgtgttacaacgggtcaggcatgtcaccgcctgtatgtgaccacaaacctactcaaaagctgttagttcatgtgggcgtagttgttgaattggaaggactcctcagcatgaggaactgtctgtagggatcgtcctctcctgctccttkctggatgggttttagctcatgctgctgtgtttctgcagcaccttatttcttgggctgaggcagacagagtgctcagcacttcattttgttacctggtctggaagctggagtgcttgttggtaacagacagtggaagacttgtgtgtgctaatgtttgtggtaggattgcagctgtcagtctccttatggaatactgaatgctagaccactactgaatatcagacctaagcaggatggagaccagctgcagtgtgctgccagccccagattttcatgatgtttctgtagattctggataca

SEQ ID NO: 56305 - DNA, 600 bp, Chicken  19866894310812_5
ctgcagtgtgctgccagccccagattttcatgatgtttctgtagattctggatacagtttagagagtatggttggaatataacatttgtcagcattgcaatggaaatgatatattctcatcagggggaaataatcatttaaagttattccttaacctcaagttagcttcccagttagctgaagctaatcaatttgcaatcgtttttcttattatttctacagagttaagtgttttgacaggtcactggttatgctggaggtcttggtgagggaaggttctgtggtttgtgccatagaacrggtcagatggttgtactggaccattacctaatctgaaagtctgggggttaaattgcaaagtaatgagcctgtattttggaggtgctgacagctgctattaaggtgcatggaaaatgccaaatgctccagctgtttcctgtgggtgtaaatatgaatgcagaatgcagatgcccattcttaacagtcttgtctgtgagttctgtcatttgtgtcacccccccctaaatgttagctgaaaatctttctgaatgaattccaaatgccagcaagttttctgactgtcatgacgtgcactgcttc

SEQ ID NO: 56306 - DNA, 600 bp, Chicken  19866894310814_1
caatcttcttgcccactctgaagttgggtcccaccataagaacaccagaagatgcagacgagctcggccgagagccgtgaccgctcctcccaggcatccctttcgtcgtccgctgcctttcatccttttccctattgggatggtccatgatcttagtacagcacctctgccagcaagctggcagaaagagatctgagcgcgcactcttctccttagaacagaaatatatataatccaaaagtatctcagtcaggatccaagagtatcatggaaatgcatggagttcttttggcaccgtayccagtttcctaacgcatcattgtgaagtaccaaccagttgactgtgatcttgaggactcagtaaaggcaaactgcttttggtttctcacctggggaaaagaaaaaagatacataacataaaaatcattagtttaaaacagcgaccaagaagtgcacaacatggcagacctccagtaccttctagagctcttgaggaaattaacagctccataggaattttatcatttcttaacaatttctgattaaaaaaccccaacatcgcggtaagaactgctgtccatccacagcttgttattggag

SEQ ID NO: 56307 - DNA, 600 bp, Chicken  19866894310817_1
tcggtaaatgtgaaatttcatgtctaacctaaaaggactttttttgcagcccaagcagcactgataacggaaaagtggtgttttcagaccaagtggacagagcagctggcatggagcgcgtagcacctgatggcagcagggctgagcccagggcagtgctcagaaccaggatctgcccagacctccgagctcactgtgcaggaaccccttggtctgccggttccgtgctggaataggaatgattttcctctcctgggtttgaagtgcaactccagctgtgtacttctgcacctcatgaaygttttcagtttgtatctgagcctgtgctgggcaaaaatatgcatcagagagcattgtagaagcgtgccttctgcagtagctgggttttatttcttgcctgtaagagaatgtctttgaatgatttcagaaatgttgagagatgggaactttgcacttggttttaagagcgcttactgcatcagcaggctktgttcccagactcaagaggattacaaatgtgaatgaccttgacttgtttagagctgagctatctattaatcagcagtaatgcctgagttggagcagtccctttcttaactg

SEQ ID NO: 56308 - DNA, 600 bp, Chicken  19866894310817_2
ctcactgtgcaggaaccccttggtctgccggttccgtgctggaataggaatgattttcctctcctgggtttgaagtgcaactccagctgtgtacttctgcacctcatgaaygttttcagtttgtatctgagcctgtgctgggcaaaaatatgcatcagagagcattgtagaagcgtgccttctgcagtagctgggttttatttcttgcctgtaagagaatgtctttgaatgatttcagaaatgttgagagatgggaactttgcacttggttttaagagcgcttactgcatcagcaggctktgttcccagactcaagaggattacaaatgtgaatgaccttgacttgtttagagctgagctatctattaatcagcagtaatgcctgagttggagcagtccctttcttaactgtgctcatcaccgtcatggcttttctgggcacgcagtgtgcgatcatgcaaaggactttggtgaaatgcaatggggctgcatgagagtaaatgatgctatcactagcagggagttaagggccacatattggcattggtggtggactcctttcctgtgttgcacaacagcagtaagagcacagagaagtag

SEQ ID NO: 56309 - DNA, 600 bp, Chicken  19866894310820_1
ggtcttagttccatgtcacagtgatgatcccaaagggtagcagggctacagcagagtaacagaagccttatgaagcacagagaaaagttctccttctgctggcacaaagtaggtgtctccttagctcatgtaagaaaggtgagctgagcaacagcatggttgagacgacatgtacccatgaaagtacctcttgacacattttcttaagagtgactgaaacaacaaggatgccactcaaatacttgttcttatctaagcaagcatgttttcagctcatcccccagcaggtcctgtcttcgrggcataaaggtactcatggagtccatcaaattgctgtcataattaactcaggaagcaaaggggactgactgttcctggaagtggctgtatgctttcttttaacaagttcaggccgtgcagtgtactgtccagtactgtctgaaatggaaataaaagtgggtaagctagagtccaggtaatatcagcgtttgagaagtacctggcacttcaggagagcaagcacttgattctgggaagcttctgtgtgtcacaggttgtagatgggaaaataagcctagctttgtgatcactgcagaaaat

SEQ ID NO: 56310 - DNA, 600 bp, Chicken  19866894310822_1
tcagttgttcattaaaaactaaaaactacaagaagatttctctcctatggtgttaaatttcatcccacagtccttggtattgacaatgactcctaatttttttgttgttgttcaaagtcccaagattggcgtctgaggagtaccactagtacgtttttttttattcctggtaactctcaatgtaacctcgtgagtattttcattccacttatccacaattacaccttgatcagtcctctagcttgagagctgcacttcacagctgtgaaccttggaacataactgaccatagggttaacrttaaaatctaattccagtgtattcataggatcagggatgagattggtaaaagagataagaaagaggtaatatttgattttttttcttgatcaactgaacagacaagttttcacatataccatcaagatacaaaakaatgcaatcaattgtacccctattgcattataactttatttttccaatagatttttctaataggcaatcacttaatttgaatctcttgaaaaacaaaagttmgtcatacaataatcttttcaatattgtgagtgcattgatggttgataaaggagtgtgacttat

SEQ ID NO: 56311 - DNA, 600 bp, Chicken  19866894310822_2
aggagtaccactagtacgtttttttttattcctggtaactctcaatgtaacctcgtgagtattttcattccacttatccacaattacaccttgatcagtcctctagcttgagagctgcacttcacagctgtgaaccttggaacataactgaccatagggttaacrttaaaatctaattccagtgtattcataggatcagggatgagattggtaaaagagataagaaagaggtaatatttgattttttttcttgatcaactgaacagacaagttttcacatataccatcaagatacaaaakaatgcaatcaattgtacccctattgcattataactttatttttccaatagatttttctaataggcaatcacttaatttgaatctcttgaaaaacaaaagttmgtcatacaataatcttttcaatattgtgagtgcattgatggttgataaaggagtgtgacttattgatgtgatgtgttaaaatgatgaagtttttgcttacggtcaaatctttctgcagatagtatctcaatttagaaaaagaatgatgccattagatctgatatcaaggtagcttccttagctgacttctggtgtaaa

SEQ ID NO: 56312 - DNA, 600 bp, Chicken  19866894310822_3
ctagcttgagagctgcacttcacagctgtgaaccttggaacataactgaccatagggttaacrttaaaatctaattccagtgtattcataggatcagggatgagattggtaaaagagataagaaagaggtaatatttgattttttttcttgatcaactgaacagacaagttttcacatataccatcaagatacaaaakaatgcaatcaattgtacccctattgcattataactttatttttccaatagatttttctaataggcaatcacttaatttgaatctcttgaaaaacaaaagttmgtcatacaataatcttttcaatattgtgagtgcattgatggttgataaaggagtgtgacttattgatgtgatgtgttaaaatgatgaagtttttgcttacggtcaaatctttctgcagatagtatctcaatttagaaaaagaatgatgccattagatctgatatcaaggtagcttccttagctgacttctggtgtaaatcatcatgacctgtacattcatcatttctagtggagaaccttctcctagtagagaagtcttaactgtgactactagcaagttagctttttgtaatgtccttc

SEQ ID NO: 56313 - DNA, 600 bp, Chicken  19866894310822_4
gacttattgatgtgatgtgttaaaatgatgaagtttttgcttacggtcaaatctttctgcagatagtatctcaatttagaaaaagaatgatgccattagatctgatatcaaggtagcttccttagctgacttctggtgtaaatcatcatgacctgtacattcatcatttctagtggagaaccttctcctagtagagaagtcttaactgtgactactagcaagttagctttttgtaatgtccttcgggaggaatggttttttggagctgttgcagagaaaggttggcacatcttactgaartgtccgccctcttctgcaaaatgaagtgctatgtgttgaaatgccccagtttctaagctgattgtaaaagagaacagttttcaaaacagtgataaatagagttacagtgatcgttgttaagtggtacgtatcttcattagccttcagtggaagaaatccttgctactgaatttctactgtcatgtccaggttttcaccattgtattgcttgtatgtggtgctgcattagggtctgtctttagggcacaaacgttcctagatttataatggcatctgttcagaggcatggtagaatttttc

SEQ ID NO: 56314 - DNA, 600 bp, Chicken  19866894310825_1
tgttttacagttgcagaatctgtgttcctctgctatgcagtaaattttcacatggtaaaagggcacttcagagggtaaaaaacataaaaggagacagaccataagaagctcttttcaacactagccagaattgaactagagcaccttactctactacatacaaagaaaaatctttccaaaaacatttccttagggaacaggacaggcatttgtagatttcttttctagcaagatatccttaacactattttggccactggagagaggagagtagcaatacagtacagttagatgttgtaytaagggacatggtttagctgaaattattggtgataggtatgcacttggactagatcacacatgttcaacctgcagcttatgggctctgcatgcggcccagcgcagctccgtgtcatcaagacagcagctttgccccaccgagcagccaaagccagccctgggacatggggagggtgcagtgcagcgctgccaaatcatatgactctacttctcatttgcaaggaaatcatgtcacttttcagtgattacaatttgaaaagacgctatatgcagaaacacgctgccaaattcaatgcatat

SEQ ID NO: 56315 - DNA, 600 bp, Chicken  19866894310828_1
tttaaggctgtcgttcaaaaaaagatttttcacagtcacctcttgattatctgtgggtgccttatctgagttgcagattacatgtgctatgctttaaaaaaagaaaaaggcagaactctttcagaggctttataaaggatgctgcacaatgattttttttgtttataacaccatactgcatctgcagcttgattctttttttttcaaagggtatgaaagcacaacaactccatcaggcttatttatacatatttatattctttcttttacttttccttctttgccctcagtaccctgcakactgagaaccgatggtatcagactgtagtctgtgtggaggagggtttgtggcagggcaaccttccccagctgttttctcctgrtgctgcataagggtttctgcagtgtgatgctgcacagccagctgggctggagaggaggaggggagtgctctgctgcagggaaaatatctgtacctgagggagtgtgagccagtggcaaacagctgaagggatgggatgcctcagaaaccactagtcaggttggagatgtgacagcttgctaacaacacgtctgctcagttacagggataaattgaca

SEQ ID NO: 56316 - DNA, 600 bp, Chicken  19866894310828_2
gtgctatgctttaaaaaaagaaaaaggcagaactctttcagaggctttataaaggatgctgcacaatgattttttttgtttataacaccatactgcatctgcagcttgattctttttttttcaaagggtatgaaagcacaacaactccatcaggcttatttatacatatttatattctttcttttacttttccttctttgccctcagtaccctgcakactgagaaccgatggtatcagactgtagtctgtgtggaggagggtttgtggcagggcaaccttccccagctgttttctcctgrtgctgcataagggtttctgcagtgtgatgctgcacagccagctgggctggagaggaggaggggagtgctctgctgcagggaaaatatctgtacctgagggagtgtgagccagtggcaaacagctgaagggatgggatgcctcagaaaccactagtcaggttggagatgtgacagcttgctaacaacacgtctgctcagttacagggataaattgacaaaggctgagcacaaactcagctgccatcgctccagaagcctcactgctgaatcagcaaatttctgctcccagaatactggatg

SEQ ID NO: 56317 - DNA, 600 bp, Chicken  19866894310828_3
acaggggttgacacagaccacagacctaaatcatcctccaccctcctggattttggccatgtttaagatccatcagttaaaaagatgtctgagaagtggcacctgtttgctttaatgttgcttgaaaagtgtgaaaccacttcaggcttctcacagaaaaaaggtaatgtagagtaaagtattatggtatggttagtatcactaatcccaaacttattgccctatagtagttataaagtttgagtggttttttttctgagctgaggaaatggaggagtaagaaatatattaaaaaaaaaraataataaaaaggaactttctataaaaacagagggaaaagaaaaaagatggcaccattttattccacccagaaggtttcagaagacagcaactggctgaatttatttccaagtgccagctgagaaatgtcagccagctcttctgtctcctgaaggatgctgtgcttcataaagctatgtgtgagcagaacccacgtgcctgttcacctgccttgagaatcatagaatcatgatagttgaatagagcactaagattgtgcagtccacccatcagtccacgtgcatgctctggctgctctag

SEQ ID NO: 56318 - DNA, 600 bp, Chicken  19866894310828_4
ggggttgacacagaccacagacctaaatcatcctccaccctcctggattttggccatgtttaagatccatcagttaaaaagatgtctgagaagtggcacctgtttgctttaatgttgcttgaaaagtgtgaaaccacttcaggcttctcacagaaaaaaggtaatgtagagtaaagtattatggtatggttagtatcactaatcccaaacttattgccctatagtagttataaagtttgagtggttttttttctgagctgaggaaatggaggagtaagaaatatattaaaaaaaaataaraataaaaaggaactttctataaaaacagagggaaaagaaaaaagatggcaccattttattccacccagaaggtttcagaagacagcaactggctgaatttatttccaagtgccagctgagaaatgtcagccagctcttctgtctcctgaaggatgctgtgcttcataaagctatgtgtgagcagaacccacgtgcctgttcacctgccttgagaatcatagaatcatgatagttgaatagagcactaagattgtgcagtccacccatcagtccacgtgcatgctctggctgctctagacc

SEQ ID NO: 56319 - DNA, 599 bp, Chicken  19866894310829_1
  misc_feature (1)..(142): n is any nucleotide
nnnnnnnnnnnnnnnnnnnnnnnnnnnnnnnnnnnnnnnnnnnnnnnnnnnnnnnnnnnnnnnnnnnnnnnnnnnnnnnnnnnnnnnnnnnnnnnnnnnnnnnnnnnnnnnnnnnnnnnnnnnnnnnnnnnnnnnnnnnnnnattaattactactgtctgcacctttcagtacgtctccaaacagtttgtgtaccatcctgccacagtgaagatttccaatgaaattaaagcaggtttacaacatttgctcagagaaaagctatttagtgatgatactgctaagaaatgttcaaagatgytgaatgtggtcttctgactcmtatcacacccttccaagtgaattgttacctaggtttacaggaggcacgatatgaagcagaaaagcaaatgaaactgacataattaggatttatctctgcttcagcagtctttatgtgttttttttttctcaactaattttctattattctcactcacctaaaatgatcagtgtagaaagatatatayacctatattttcactgatactgctatctttaaaaatctgttcaaccgggaagcagcaaagttcctcctccatttccaaaggagaacctgaa

SEQ ID NO: 56320 - DNA, 599 bp, Chicken  19866894310829_2
  misc_feature (1)..(121): n is any nucleotide
nnnnnnnnnnnnnnnnnnnnnnnnnnnnnnnnnnnnnnnnnnnnnnnnnnnnnnnnnnnnnnnnnnnnnnnnnnnnnnnnnnnnnnnnnnnnnnnnnnnnnnnnnnnnnnnnnnnnnnnnnattaattactactgtctgcacctttcagtacgtctccaaacagtttgtgtaccatcctgccacagtgaagatttccaatgaaattaaagcaggtttacaacatttgctcagagaaaagctatttagtgatgatactgctaagaaatgttcaaagatgytgaatgtggtcttctgactcmtatcacacccttccaagtgaattgttacctaggtttacaggaggcacgatatgaagcagaaaagcaaatgaaactgacataattaggatttatctctgcttcagcagtctttatgtgttttttttttctcaactaattttctattattctcactcacctaaaatgatcagtgtagaaagatatatayacctatattttcactgatactgctatctttaaaaatctgttcaaccgggaagcagcaaagttcctcctccatttccaaaggagaacctgaaaaggggtattaatctcaagtg

SEQ ID NO: 56321 - DNA, 600 bp, Chicken  19866894310829_3
gaagatttccaatgaaattaaagcaggtttacaacatttgctcagagaaaagctatttagtgatgatactgctaagaaatgttcaaagatgytgaatgtggtcttctgactcmtatcacacccttccaagtgaattgttacctaggtttacaggaggcacgatatgaagcagaaaagcaaatgaaactgacataattaggatttatctctgcttcagcagtctttatgtgttttttttttctcaactaattttctattattctcactcacctaaaatgatcagtgtagaaagatatatayacctatattttcactgatactgctatctttaaaaatctgttcaaccgggaagcagcaaagttcctcctccatttccaaaggagaacctgaaaaggggtattaatctcaagtggatcagaggaactatcggaggaactatgtgagtagttactgaagccaattattactgctacagttttactgtctttagaagggaacttgtaaatttttctttatttattctaagtaattattgtggcttgtttgggcttcattaaattattggcattatgtgcctgatgttcgctgagctctgcatag

SEQ ID NO: 56322 - DNA, 599 bp, Chicken  19866894310830_1
  misc_feature (1)..(41): n is any nucleotide
nnnnnnnnnnnnnnnnnnnnnnnnnnnnnnnnnnnnnnnnncttatacagtgactgataccccttagttccaagatatcccttagttccaaagacaatgttggtgatgttgctcttgtgcttttcttgatcactggttttgtttagttttcatcttcttttgtaaatccttctaaaccatctacagtgtctttcttaaaaaaaatctcttttgtctttgtttcttcatcaagtgatctgtccacactgttttgtccatagcttattaataattttgcattttcaaaagaatatggactayagatgaaaccgttcctcattgacatgaaacatatctgaaagatattctactggaatgtgtttaaaacttcataactcagttttccagttattctaggtgtattttcagtggttgtttgtttggaaattgacagaaatacaagagctataccctatttaaggattctggtggaaagaagtattaagactttaaaggaaggtagcttataaacagaagtgattcctctttatatctggtcaggaaaacaaaagtttaaaagtatcaaaagtatatgttcaagttacaaacctatgcagagc

SEQ ID NO: 56323 - DNA, 599 bp, Chicken  19866894310841_1
  misc_feature (1)..(100): n is any nucleotide
nnnnnnnnnnnnnnnnnnnnnnnnnnnnnnnnnnnnnnnnnnnnnnnnnnnnnnnnnnnnnnnnnnnnnnnnnnnnnnnnnnnnnnnnnnnnnnnnnnnncatcctttcttttaatcctgctaaactcatatcctcagtgttgctttatctgaacatttctaatttatacaatatttatatctcaacattttggacctgatgatcctcatgagctccttccaacatgggatattctatgattctctgattctaaatatgaggagttaaacaacccatgaaaaacagtatcctgaacaagrkgctttcttgtcctggtctgactggccctgagaatttagacttcaccataatactgcctgatgttactgtgccacatttagtgactttctggtcatatctgaaattcttcacttygtggtggactgaaatattgtgccttattaacaataaaaataaactgaacagagccctgcaggggtcaaattattaccatataaacactgattagcattccttaaactgtgtaaatcytttaagtctgaaaggataattttcacaaattgcctttgctttcatgaacttagaatcaagagcttca

SEQ ID NO: 56324 - DNA, 599 bp, Chicken  19866894310841_2
  misc_feature (1)..(99): n is any nucleotide
nnnnnnnnnnnnnnnnnnnnnnnnnnnnnnnnnnnnnnnnnnnnnnnnnnnnnnnnnnnnnnnnnnnnnnnnnnnnnnnnnnnnnnnnnnnnnnnnnnncatcctttcttttaatcctgctaaactcatatcctcagtgttgctttatctgaacatttctaatttatacaatatttatatctcaacattttggacctgatgatcctcatgagctccttccaacatgggatattctatgattctctgattctaaatatgaggagttaaacaacccatgaaaaacagtatcctgaacaagrkgctttcttgtcctggtctgactggccctgagaatttagacttcaccataatactgcctgatgttactgtgccacatttagtgactttctggtcatatctgaaattcttcacttygtggtggactgaaatattgtgccttattaacaataaaaataaactgaacagagccctgcaggggtcaaattattaccatataaacactgattagcattccttaaactgtgtaaatcytttaagtctgaaaggataattttcacaaattgcctttgctttcatgaacttagaatcaagagcttcaa

SEQ ID NO: 56325 - DNA, 600 bp, Chicken  19866894310841_3
tcctgctaaactcatatcctcagtgttgctttatctgaacatttctaatttatacaatatttatatctcaacattttggacctgatgatcctcatgagctccttccaacatgggatattctatgattctctgattctaaatatgaggagttaaacaacccatgaaaaacagtatcctgaacaagrkgctttcttgtcctggtctgactggccctgagaatttagacttcaccataatactgcctgatgttactgtgccacatttagtgactttctggtcatatctgaaattcttcacttygtggtggactgaaatattgtgccttattaacaataaaaataaactgaacagagccctgcaggggtcaaattattaccatataaacactgattagcattccttaaactgtgtaaatcytttaagtctgaaaggataattttcacaaattgcctttgctttcatgaacttagaatcaagagcttcaatgaaacttagcttttggaagggccttgtccaaagcccgcagaagtctctgagaaacgtctgcatcctaaagatgtagagagttacgatgcttactgtgaaagtacagtagtagat

SEQ ID NO: 56326 - DNA, 600 bp, Chicken  19866894310841_4
ttctatgattctctgattctaaatatgaggagttaaacaacccatgaaaaacagtatcctgaacaagrkgctttcttgtcctggtctgactggccctgagaatttagacttcaccataatactgcctgatgttactgtgccacatttagtgactttctggtcatatctgaaattcttcacttygtggtggactgaaatattgtgccttattaacaataaaaataaactgaacagagccctgcaggggtcaaattattaccatataaacactgattagcattccttaaactgtgtaaatcytttaagtctgaaaggataattttcacaaattgcctttgctttcatgaacttagaatcaagagcttcaatgaaacttagcttttggaagggccttgtccaaagcccgcagaagtctctgagaaacgtctgcatcctaaagatgtagagagttacgatgcttactgtgaaagtacagtagtagataaaggcagatgtttatacagggatggagatatatttacaaatatatgttggcaggaaagttcgttcttctatagtggtaaattcacgcgcaacatacttccgctggttgttatttaa

SEQ ID NO: 56327 - DNA, 590 bp, Chicken  19866894310851_1
acagcaaggagggccccctccaagcaaatgttgcctgttctaaatgggcagcactgacctgttccagtctggtgctttgcaataaaaacccaccgatggccatgagctcacgagcacggcaaattgagcccatcttaatcagaaggatttcttttttccttgcacgtgcccttggtagatggctgcaggctgcagactgatgctctgctgagggatgagagcaaatttctcactcctccttgcagcagctgaggttgtatggggtgcttctgctcccgtctggtttatgacacatagctygtgtgctttggaaaggtgggcagggagatggatgggtgtgatgaaactgcactgtaatgatagccatcacctggtgctgaggatttcccagcagcatcacctggtggtggggggcagtgaggtgagctcctccctgctgcctgcccacccacrtcggtcccccttcagctgttgttgggcttcatgtcaggtcccgatgtccctccgtgaggtcccctcccatgtattccccaactccttcctttgtaaaggggcagcagccatgtgcatgtgtgtgtgtgtgtgtgtgt

SEQ ID NO: 56328 - DNA, 437 bp, Chicken  19866894310851_2
ttttccttgcacgtgcccttggtagatggctgcaggctgcagactgatgctctgctgagggatgagagcaaatttctcactcctccttgcagcagctgaggttgtatggggtgcttctgctcccgtctggtttatgacacatagctygtgtgctttggaaaggtgggcagggagatggatgggtgtgatgaaactgcactgtaatgatagccatcacctggtgctgaggatttcccagcagcatcacctggtggtggggggcagtgaggtgagctcctccctgctgcctgcccacccacrtcggtcccccttcagctgttgttgggcttcatgtcaggtcccgatgtccctccgtgaggtcccctcccatgtattccccaactccttcctttgtaaaggggcagcagccatgtgcatgtgtgtgtgtgtgtgtgtgt

SEQ ID NO: 56329 - DNA, 600 bp, Chicken  19866894310856_1
tcatctgctctttttccttccctattaaaaaaggctgccatgctccttatcgctcagcccacttgttgagagtgggaatgttcgtctatttataaagccagcattaatctaacagaccgctctccggtctgtgtaggttgtccgtatccgtataaatgtctcttcagatcacagaatcaccacgggattatagaatggcctgggttgaataggacctcagagatcatctagtttcaaccaccctgctgtgggcagggtcaccaagcactagaccaggctgcccagagccacatccagccmggatctactggtcttcacaacttgaatcctttctcttgcagatccaagtgtgggacacagccggtcaagagcgcttccggacaataacccagtcctattacaggagtgcccatggagccattcttgcctatgaccttactaggaggtccacgtttgagtctattcctcactgggttcatgaagttgaaaagtacggtgctgcgaacttggtcatgatgttaattggtaggaatctaaatttaaatattacattatatagcttttctaatatgtgcaaaatccccctcacttccccactgc

SEQ ID NO: 56330 - DNA, 600 bp, Chicken  19866894310858_1
atcagttcactttttggaccacagctaagttgtgttttgagtagctgcagctgctagtttaatgtacgtttctcacgtgcataacatggtagcagattatatacccatccctacccaaagggagaaacagcagcagaagatctctcagtgttgtctgatgctgcacctccttgccacatgagtacacattccatcagatcatataatcatagaatcatagaatggcttgggttgcaagagaccttaaagctcacccatcaccccacctagctcaggctgcccagggcccaccattcaccycggccttgagtgtctcctgggatagagcaaccacagcttctctgggcagcctgtgccagtgatgcactgccctctgagtaaagaacttcctaacatctaacctgaatttccccttttagaggggaaatgagcagatgagtagagaggraccaaactgcttctgccaagggactcttgtgtagcccctccgtcacagaaatgaaagcacgaggagccagacaggtagtaaggagtccaagctgatgcaaagagaagtgtaaagctgatacctgtcacctaaataagctcgaactgatattc

SEQ ID NO: 56331 - DNA, 600 bp, Chicken  19866894310858_2
tgttgtctgatgctgcacctccttgccacatgagtacacattccatcagatcatataatcatagaatcatagaatggcttgggttgcaagagaccttaaagctcacccatcaccccacctagctcaggctgcccagggcccaccattcaccycggccttgagtgtctcctgggatagagcaaccacagcttctctgggcagcctgtgccagtgatgcactgccctctgagtaaagaacttcctaacatctaacctgaatttccccttttagaggggaaatgagcagatgagtagagaggraccaaactgcttctgccaagggactcttgtgtagcccctccgtcacagaaatgaaagcacgaggagccagacaggtagtaaggagtccaagctgatgcaaagagaagtgtaaagctgatacctgtcacctaaataagctcgaactgatattcagagattgcagcagttcacaagtacccatcaggttactgcaagccggaaagtctcaacacctttgcagatctggcatcctctatttatattcctaagcagggatttggaagctgaactttaggcaacggagtttgaaaatgtctctca

SEQ ID NO: 56332 - DNA, 600 bp, Chicken  19866894310861_1
cacttttcacccacaaatcagcttacagtgtcaaaatgctcataatttccgagctcagatactgccatttttgctcttttcattagggaaaaaagaaaaaaaagacagtaaaaacattgtgcttctgagaaaatccaactcatgagctgattcatatcaattactttgcaatgtaatcacggtgaatttgtcccattttcccctcccttttatttcccacagtctagctttctatatctgttctttgttcaatagagaaacagcatataatctcagatattcagaatatctatggctatytgcttgggtgtctaaaatgtctctgagtacggtcacaacccatggcagacacaatgagcagaacgatatgctctgtaccaacaagccagaatcaacacagtggtgaacctgcaaatctgcaatataaagaaaacattcataacaatgtttggggcccagtctccattgacaaatgtacwasaaatttaaaacatatcaataacatggcatctaggttaaaaaccatagctcagactaaagactagctgtaaggcacatcaaaagatattctttaaattcagtagctccctgtgagttcat

SEQ ID NO: 56333 - DNA, 600 bp, Chicken  19866894310861_2
cggtgaatttgtcccattttcccctcccttttatttcccacagtctagctttctatatctgttctttgttcaatagagaaacagcatataatctcagatattcagaatatctatggctatytgcttgggtgtctaaaatgtctctgagtacggtcacaacccatggcagacacaatgagcagaacgatatgctctgtaccaacaagccagaatcaacacagtggtgaacctgcaaatctgcaatataaagaaaacattcataacaatgtttggggcccagtctccattgacaaatgtacwasaaatttaaaacatatcaataacatggcatctaggttaaaaaccatagctcagactaaagactagctgtaaggcacatcaaaagatattctttaaattcagtagctccctgtgagttcattaagctcagaaggctctctttaaatgccctgaaggatgggattatttcatgttttactcttggcaaacccaaatattccatattgaatgaaaatgtatgcatttcagtcatccgctgctttctggaacattttctctttcttctactgtgatgacttatttctctttgttttacacaat

SEQ ID NO: 56334 - DNA, 600 bp, Chicken  19866894310861_3
gtgaatttgtcccattttcccctcccttttatttcccacagtctagctttctatatctgttctttgttcaatagagaaacagcatataatctcagatattcagaatatctatggctatytgcttgggtgtctaaaatgtctctgagtacggtcacaacccatggcagacacaatgagcagaacgatatgctctgtaccaacaagccagaatcaacacagtggtgaacctgcaaatctgcaatataaagaaaacattcataacaatgtttggggcccagtctccattgacaaatgtacwasaaatttaaaacatatcaataacatggcatctaggttaaaaaccatagctcagactaaagactagctgtaaggcacatcaaaagatattctttaaattcagtagctccctgtgagttcattaagctcagaaggctctctttaaatgccctgaaggatgggattatttcatgttttactcttggcaaacccaaatattccatattgaatgaaaatgtatgcatttcagtcatccgctgctttctggaacattttctctttcttctactgtgatgacttatttctctttgttttacacaatat

SEQ ID NO: 56335 - DNA, 599 bp, Chicken  19866894310871_1
  misc_feature (1)..(110): n is any nucleotide
nnnnnnnnnnnnnnnnnnnnnnnnnnnnnnnnnnnnnnnnnnnnnnnnnnnnnnnnnnnnnnnnnnnnnnnnnnnnnnnnnnnnnnnnnnnnnnnnnnnnnnnnnnnnnnagaagagctctgctcttcctcgtttagccagtgttttgtcatgacattcctcctcttcactgtacacagctgcagtccctacaaagaacacatccccagcacaggcccttgtgctataggtgctaacaccactagctccacatagtgtagaggaaacattcatgtaagagttccccattatcctgacaayaacaagagactgcagaacactgggagcctggcacagccccaggaagggactgtgtgctctctcccaccactttccctkcacatgcctaatgaagcactcccactagctctgttagaaatgaggtggaattttgggtggccctgatccctccaatcacagtaattcttttcaagacaagacttgtaaataccagtaagatgttcttgccccaaactgaaatataatgtttatcttatgaaataacacatttcaaacccaacaccagaacacacatgccataatccgatggcaattttcct

SEQ ID NO: 56336 - DNA, 558 bp, Chicken  19866894310871_2
  misc_feature (1)..(32): n is any nucleotide
nnnnnnnnnnnnnnnnnnnnnnnnnnnnnnnnagaagagctctgctcttcctcgtttagccagtgttttgtcatgacattcctcctcttcactgtacacagctgcagtccctacaaagaacacatccccagcacaggcccttgtgctataggtgctaacaccactagctccacatagtgtagaggaaacattcatgtaagagttccccattatcctgacaayaacaagagactgcagaacactgggagcctggcacagccccaggaagggactgtgtgctctctcccaccactttccctkcacatgcctaatgaagcactcccactagctctgttagaaatgaggtggaattttgggtggccctgatccctccaatcacagtaattcttttcaagacaagacttgtaaataccagtaagatgttcttgccccaaactgaaatataatgtttatcttatgaaataacacatttcaaacccaacaccagaacacacatgccataatccgatggcaattttcctattaaagagcatttatcacttaaaactgattttatat

SEQ ID NO: 56337 - DNA, 599 bp, Chicken  19866894310875_1
  misc_feature (1)..(106): n is any nucleotide
nnnnnnnnnnnnnnnnnnnnnnnnnnnnnnnnnnnnnnnnnnnnnnnnnnnnnnnnnnnnnnnnnnnnnnnnnnnnnnnnnnnnnnnnnnnnnnnnnnnnnnnnnncattttttaatttaagagccaaaatagaaaaacagttttcttcttatgaacataattacagtccctactatagaagcactggaatttatgccagtgactgacagccatgaaattctaagtgacatgctgagaactctgtcatttattttcctgcagtcctgctgcattcaactaactgtccttcaatttctcartatgaatacatttagacattagctaatgtatcattcttgacatctattcaccttcaacagtgcattaaaaaaaagacaataaatttaaagcaaagtcaaggggcagccttacttgatgcacaataaaatactgtaatgccaacagcatgaagtatacataagggtgaaagttttcaacgtttttaagtgtttactccctttaaagttgtaatgtagacttatacyaargtttayccttatttaaggacagtgctkcagtacatcatgggtctgtacatctaaagcttctgaaagcatat

SEQ ID NO: 56338 - DNA, 600 bp, Chicken  19866894310875_2
tgacatgctgagaactctgtcatttattttcctgcagtcctgctgcattcaactaactgtccttcaatttctcartatgaatacatttagacattagctaatgtatcattcttgacatctattcaccttcaacagtgcattaaaaaaaagacaataaatttaaagcaaagtcaaggggcagccttacttgatgcacaataaaatactgtaatgccaacagcatgaagtatacataagggtgaaagttttcaacgtttttaagtgtttactccctttaaagttgtaatgtagacttatacyaargtttayccttatttaaggacagtgctkcagtacatcatgggtctgtacatctaaagcttctgaaagcatatccaatgtaccaagtcctttggagtagactatactcttagttcagccagtgaaattgcctttattttcaccacctgctttaaatacaattagctccacagactggtgctaagtgcttgaaatttcttccaatttacaagtgtctgcttatcctacttcagaatgcatagtgcattacacattctcaaaagctgaggtgagaatatatgctgagtatattaagcacac

SEQ ID NO: 56339 - DNA, 600 bp, Chicken  19866894310875_3
catgctgagaactctgtcatttattttcctgcagtcctgctgcattcaactaactgtccttcaatttctcartatgaatacatttagacattagctaatgtatcattcttgacatctattcaccttcaacagtgcattaaaaaaaagacaataaatttaaagcaaagtcaaggggcagccttacttgatgcacaataaaatactgtaatgccaacagcatgaagtatacataagggtgaaagttttcaacgtttttaagtgtttactccctttaaagttgtaatgtagacttatacyaargtttayccttatttaaggacagtgctkcagtacatcatgggtctgtacatctaaagcttctgaaagcatatccaatgtaccaagtcctttggagtagactatactcttagttcagccagtgaaattgcctttattttcaccacctgctttaaatacaattagctccacagactggtgctaagtgcttgaaatttcttccaatttacaagtgtctgcttatcctacttcagaatgcatagtgcattacacattctcaaaagctgaggtgagaatatatgctgagtatattaagcacacatg

SEQ ID NO: 56340 - DNA, 600 bp, Chicken  19866894310875_4
gagaactctgtcatttattttcctgcagtcctgctgcattcaactaactgtccttcaatttctcartatgaatacatttagacattagctaatgtatcattcttgacatctattcaccttcaacagtgcattaaaaaaaagacaataaatttaaagcaaagtcaaggggcagccttacttgatgcacaataaaatactgtaatgccaacagcatgaagtatacataagggtgaaagttttcaacgtttttaagtgtttactccctttaaagttgtaatgtagacttatacyaargtttayccttatttaaggacagtgctkcagtacatcatgggtctgtacatctaaagcttctgaaagcatatccaatgtaccaagtcctttggagtagactatactcttagttcagccagtgaaattgcctttattttcaccacctgctttaaatacaattagctccacagactggtgctaagtgcttgaaatttcttccaatttacaagtgtctgcttatcctacttcagaatgcatagtgcattacacattctcaaaagctgaggtgagaatatatgctgagtatattaagcacacatgagcaaa

SEQ ID NO: 56341 - DNA, 600 bp, Chicken  19866894310875_5
cctgcagtcctgctgcattcaactaactgtccttcaatttctcartatgaatacatttagacattagctaatgtatcattcttgacatctattcaccttcaacagtgcattaaaaaaaagacaataaatttaaagcaaagtcaaggggcagccttacttgatgcacaataaaatactgtaatgccaacagcatgaagtatacataagggtgaaagttttcaacgtttttaagtgtttactccctttaaagttgtaatgtagacttatacyaargtttayccttatttaaggacagtgctkcagtacatcatgggtctgtacatctaaagcttctgaaagcatatccaatgtaccaagtcctttggagtagactatactcttagttcagccagtgaaattgcctttattttcaccacctgctttaaatacaattagctccacagactggtgctaagtgcttgaaatttcttccaatttacaagtgtctgcttatcctacttcagaatgcatagtgcattacacattctcaaaagctgaggtgagaatatatgctgagtatattaagcacacatgagcaaagttggtaagtcacagaaataa

SEQ ID NO: 56342 - DNA, 600 bp, Chicken  19866894310875_6
ggaagcctacttgtcccatcctgatctctactccctttggggttctggtcccagatactgggtttccttttgcttttgtcaaatcatttctctttgttcctacataatatgtgacaggatgcaccttttgtctttctctgtgccattgaggatctttgtgtggtctttagaggacagtgactacctcctgactgggagatcatagttcatagaatggccagggttgaaaaggatcacaatgatcatctagtttcaacccccctgctatgtgcagggacaccaattactagaccagtctayccagagccacatccagcctgaccttgaatgcctccagggatggggcatccacaacctccttgggcaaccagttccagtgtgtcaccaccctctgcgtgaaaaacttcctcctwatatctaacctatatttccccgtctcagtttaagaccattcccccttgtcctatcactatctacccctcataaacagctgttccccttcctgtttatatgctcccttcaagtactggaaggccacaatgaggtctccctggagccttctcttctccaacctaaacaagcccagttgccccaaccttt

SEQ ID NO: 56343 - DNA, 600 bp, Chicken  19866894310875_7
acaggatgcaccttttgtctttctctgtgccattgaggatctttgtgtggtctttagaggacagtgactacctcctgactgggagatcatagttcatagaatggccagggttgaaaaggatcacaatgatcatctagtttcaacccccctgctatgtgcagggacaccaattactagaccagtctayccagagccacatccagcctgaccttgaatgcctccagggatggggcatccacaacctccttgggcaaccagttccagtgtgtcaccaccctctgcgtgaaaaacttcctcctwatatctaacctatatttccccgtctcagtttaagaccattcccccttgtcctatcactatctacccctcataaacagctgttccccttcctgtttatatgctcccttcaagtactggaaggccacaatgaggtctccctggagccttctcttctccaacctaaacaagcccagttgccccaacctttcatcataggagaggtgccccagtcctctgatcatcttagtggccctcctctggactcctccaagagttccaagtccttcctgtacttgggggccccaggccaggatgcagtac

SEQ ID NO: 56344 - DNA, 600 bp, Chicken  19866894310877_1
atcaactacatctgtactacagctactgtatttgttcgagttcagtatcagggaacaatagtggctgcatagccctgggacttattcttaattccctgctgagagaacaagtagactacataccctgtccaaaggaaaatatccccctgattcccctccaattctctctgcagttctctcatcttctgtcaagctagcagttccagctggtagccttgctcacgttctgtgattacatgaattggcacaccacctgcacctaaataaaggtgacttatttcatgtgagttgcaacagctwttaggcattgggctgttacagtgatagagacagaaaggtttggtgtgctagtaccagacccactgcattgcaacaaagaaatgtttcatttttgatcaacactagcagatagtttcagtaaaagtggaatgtgggaaaagatcagcagggatgatattttctattctgccttagctggtcacacacactgattttctctttgtccttgtacctttttacagtttacctgcacctgaaaaatcacatgaagtagcacttagtaataaatttgccattgatttttgtggtctcattctttca

SEQ ID NO: 56345 - DNA, 600 bp, Chicken  19866894310885_1
cataaagctgctgagcactgtcatgttagagggatcctcactcaatttcagaaatgcatttccttaccttcatgactcttattatttttaactaagaactacattaattactggcaacaatgctagaatacgctgtgagaaaaactcacctgtttttaatttgtgcttcttgtgccacccactggaacaggctgaaaacccaagtgaaaataaaatgttcaggggaattcatatccactttatttcaatatgttgcatgaattaatgtaacaagagcttgcaatatgctccaacagtttkaatcaattctcattaactcaaaatatctgaagagaagaacccaggttttctaatctcctgaccaaacgcttacaagtcactaagactgtggagtcagaagaaaagcaagcryagttcaacactgtatctggatatgtattctccagatattaatgataatgtacagggcataaagaaaatttcagataacatagtccatccaactctggtcattgtcatttgagaaagctcaactgaagagcaagaggaaaggctgttagtcttacacaaggaagaaggagctcgctggactaaggaaat

SEQ ID NO: 56346 - DNA, 600 bp, Chicken  19866894310885_2
tggcaacaatgctagaatacgctgtgagaaaaactcacctgtttttaatttgtgcttcttgtgccacccactggaacaggctgaaaacccaagtgaaaataaaatgttcaggggaattcatatccactttatttcaatatgttgcatgaattaatgtaacaagagcttgcaatatgctccaacagtttkaatcaattctcattaactcaaaatatctgaagagaagaacccaggttttctaatctcctgaccaaacgcttacaagtcactaagactgtggagtcagaagaaaagcaagcryagttcaacactgtatctggatatgtattctccagatattaatgataatgtacagggcataaagaaaatttcagataacatagtccatccaactctggtcattgtcatttgagaaagctcaactgaagagcaagaggaaaggctgttagtcttacacaaggaagaaggagctcgctggactaaggaaatagaagaacttgccttgtttagtcatgcaaacagaagactgagcaagagtataattgctctctccaaatacccatgggctcatattccaagtgagcacagcctctagaacat

SEQ ID NO: 56347 - DNA, 600 bp, Chicken  19866894310885_3
ggcaacaatgctagaatacgctgtgagaaaaactcacctgtttttaatttgtgcttcttgtgccacccactggaacaggctgaaaacccaagtgaaaataaaatgttcaggggaattcatatccactttatttcaatatgttgcatgaattaatgtaacaagagcttgcaatatgctccaacagtttkaatcaattctcattaactcaaaatatctgaagagaagaacccaggttttctaatctcctgaccaaacgcttacaagtcactaagactgtggagtcagaagaaaagcaagcryagttcaacactgtatctggatatgtattctccagatattaatgataatgtacagggcataaagaaaatttcagataacatagtccatccaactctggtcattgtcatttgagaaagctcaactgaagagcaagaggaaaggctgttagtcttacacaaggaagaaggagctcgctggactaaggaaatagaagaacttgccttgtttagtcatgcaaacagaagactgagcaagagtataattgctctctccaaatacccatgggctcatattccaagtgagcacagcctctagaacatt

SEQ ID NO: 56348 - DNA, 600 bp, Chicken  19866894310885_4
gaaaggctgttagtcttacacaaggaagaaggagctcgctggactaaggaaatagaagaacttgccttgtttagtcatgcaaacagaagactgagcaagagtataattgctctctccaaatacccatgggctcatattccaagtgagcacagcctctagaacattgttcacagtgataaataagtgattacaaaatccatcaaggatgaatttaagctgatctcacagggaagtttaatagcatcaaagcagggagtgaaaccctccggtaggatagacaatagcagaaaattttacttrtagtaggatagataatggcagaaaaccttactctttaagaaacaaaagagcttgaaccatttctgaaagactgtacaatgagcttgtttgcaacagcaagggatcacgcatagaggcacagagtcgcttgtctgtatttttactgaggacatgaggacacatatccaccctctagaaggagtgcaaacaacaggaatatctcagtgtgatagcatcattataaaaacaatgtttggttcattggtttctagttatttcttttagtctgaaaatgattatgggacaaacacaacaaaacct

SEQ ID NO: 56349 - DNA, 600 bp, Chicken  19866894310885_5
tagaaggagtgcaaacaacaggaatatctcagtgtgatagcatcattataaaaacaatgtttggttcattggtttctagttatttcttttagtctgaaaatgattatgggacaaacacaacaaaacctgaatttgacgctctccttaatgccacccccaaaaagccattctgagtaactagccattcaaagtacccactgggtttccagcacaattttatttgaccttttaatgaaagaataaaatgtataaggcaagtgatttcagctgatcacctaggtgactacttaaagcagcccyccttataacctaacctgcccattgtccaaagtgcaatgttgagctttgtctctcacaaatgtgtgcctcaagtgcattttgtgatttttgagtttcttttttagcccaatctgactgcatacttttttcagtgcacacagaaaaagtaaggtgcttcaaatacctagtaaagaagccaggtaccctcaggtactaaaataaaaaataattataacaataattaatccattttgatgaaaactcatgctcttcttatagaagactatggaactgcatagaagctccttattttccaaaaat

SEQ ID NO: 56350 - DNA, 600 bp, Chicken  19866894310887_1
ttgtgcaagcccagcaccagccagttcagtgacgtctcctgacccaactctttggctttgagaactgaatgaatatgaaagaattctttccagatgctacgaagccaagtgccagctctgccatagtcttcaagcacataagtcctgtttatcagaactgagaacgtttacaaaattaaatgagctctgactactcgaggctaacacagatgctgtggaattacttggttcgtctatcctgattccagagactttaagtcttcgaagagacagtttcagcaaggggcaggggtctctgcrgtttagagtgtttgttttcctgcacctaaccttgtttagggctaggattactgcccaaagacattagtgcctcccaagacacaaggactgcagcaatgagaacaaggtttgctatgaaagtgactcattatggcttactcctttcagatgctgacccccgacgggaagcaggaggcccaagctcagaccctcatgagtcctcagcactgcaatcaatccaaaccagattaccagatgcaatgagagcccgaggccagcgtaaagcgacacctcaatgaacctcagagaggagataacgct

SEQ ID NO: 56351 - DNA, 600 bp, Chicken  19866894310895_1
aagctgatcccgttttcatacaaaaggaggaagagcattatggtgatgttcctacaagtagcaagatgttactggtaatctcctctatgttctaagggagacaaatgagaagcccaaagcaaataggctattgtctgttctgggtggtggggggcacagaattcagagacaggaaaggaataggttgagaaatatttagagggtggccagagcccagcacatgcgagagaagatcttcaaagatcagagagaagcaaactgaaacttagaactatgttagatgcaaatctcatgtcatgyaaatgtcacgtcaactggatgatgggataagtggactgtaaaggaccggtcacatattgcaaacatagcggttggcgcagggaaatgttggagaacggaatgcttacaggtaagccacaaatcatcgtgtctgacctaarcctttgtgatggtccaggagtagaagttaaaggcgcttgctgcatcagcacacattgcagaagtaccgcaccagccagccatcagaactacattcacctactgctgtgtccaagtcagtcagctgtgctgaagtggcttcagacttgagctgttttgctt

SEQ ID NO: 56352 - DNA, 413 bp, Chicken  19866894310895_10
aacacaccacctgctttggtcaccttcaggagttgtatttacaggcacctcagggacttctcagtaaacagcagggagcaattacttctgttagctttgaatgttttgctcatctgtctcatggtgtaagcagctatgaaggctgtagtattcaaatggcctgcaataaatgaagttatttaccatgaaacagttacttcagaataatwatatgagggtagttctgcatgttaggttttyctttctgaaataattaagagcacatatgtcttttacctgctcccctgttagyaggyctcygtcatgatcatctccagtacctgaagggggcctacagaaaagctggggagggactttttataagggcatgtagcgacaggacaagaggaattggttttactggaagagggtag

SEQ ID NO: 56353 - DNA, 600 bp, Chicken  19866894310895_2
tgggtggtggggggcacagaattcagagacaggaaaggaataggttgagaaatatttagagggtggccagagcccagcacatgcgagagaagatcttcaaagatcagagagaagcaaactgaaacttagaactatgttagatgcaaatctcatgtcatgyaaatgtcacgtcaactggatgatgggataagtggactgtaaaggaccggtcacatattgcaaacatagcggttggcgcagggaaatgttggagaacggaatgcttacaggtaagccacaaatcatcgtgtctgacctaarcctttgtgatggtccaggagtagaagttaaaggcgcttgctgcatcagcacacattgcagaagtaccgcaccagccagccatcagaactacattcacctactgctgtgtccaagtcagtcagctgtgctgaagtggcttcagacttgagctgttttgctttgtgctactgtaccaggatggtcagcattagtgaacttgcagcttggaggctgcttgactgctcacgtgttttacaggtggagacatgagggctggcrrctgtgtgtctgcattcccagcatagcccaaagagaaatgat

SEQ ID NO: 56354 - DNA, 600 bp, Chicken  19866894310895_3
aatgcttacaggtaagccacaaatcatcgtgtctgacctaarcctttgtgatggtccaggagtagaagttaaaggcgcttgctgcatcagcacacattgcagaagtaccgcaccagccagccatcagaactacattcacctactgctgtgtccaagtcagtcagctgtgctgaagtggcttcagacttgagctgttttgctttgtgctactgtaccaggatggtcagcattagtgaacttgcagcttggaggctgcttgactgctcacgtgttttacaggtggagacatgagggctggcrrctgtgtgtctgcattcccagcatagcccaaagagaaatgatttaagattgccctacatttaacttcaaatgtttgaaactgagagtgaaagtgcaacaaccgaagttaacacaaagtaatacagcgatgttcctgtrcatcaaagaaacacaccacctgctttggtcaccttcaggagttgtatttacaggcacctcagggacttctcagtaaacagcagggagcaattacttctgttagctttgaatgttttgctcatctgtctcatggtgtaagcagctatgaaggctgtagtattc

SEQ ID NO: 56355 - DNA, 600 bp, Chicken  19866894310895_4
atgcttacaggtaagccacaaatcatcgtgtctgacctaarcctttgtgatggtccaggagtagaagttaaaggcgcttgctgcatcagcacacattgcagaagtaccgcaccagccagccatcagaactacattcacctactgctgtgtccaagtcagtcagctgtgctgaagtggcttcagacttgagctgttttgctttgtgctactgtaccaggatggtcagcattagtgaacttgcagcttggaggctgcttgactgctcacgtgttttacaggtggagacatgagggctggcrrctgtgtgtctgcattcccagcatagcccaaagagaaatgatttaagattgccctacatttaacttcaaatgtttgaaactgagagtgaaagtgcaacaaccgaagttaacacaaagtaatacagcgatgttcctgtrcatcaaagaaacacaccacctgctttggtcaccttcaggagttgtatttacaggcacctcagggacttctcagtaaacagcagggagcaattacttctgttagctttgaatgttttgctcatctgtctcatggtgtaagcagctatgaaggctgtagtattca

SEQ ID NO: 56356 - DNA, 600 bp, Chicken  19866894310895_5
cctactgctgtgtccaagtcagtcagctgtgctgaagtggcttcagacttgagctgttttgctttgtgctactgtaccaggatggtcagcattagtgaacttgcagcttggaggctgcttgactgctcacgtgttttacaggtggagacatgagggctggcrrctgtgtgtctgcattcccagcatagcccaaagagaaatgatttaagattgccctacatttaacttcaaatgtttgaaactgagagtgaaagtgcaacaaccgaagttaacacaaagtaatacagcgatgttcctgtrcatcaaagaaacacaccacctgctttggtcaccttcaggagttgtatttacaggcacctcagggacttctcagtaaacagcagggagcaattacttctgttagctttgaatgttttgctcatctgtctcatggtgtaagcagctatgaaggctgtagtattcaaatggcctgcaataaatgaagttatttaccatgaaacagttacttcagaataatwatatgagggtagttctgcatgttaggttttyctttctgaaataattaagagcacatatgtcttttacctgctcccctgttag

SEQ ID NO: 56357 - DNA, 504 bp, Chicken  19866894310895_6
catttaacttcaaatgtttgaaactgagagtgaaagtgcaacaaccgaagttaacacaaagtaatacagcgatgttcctgtrcatcaaagaaacacaccacctgctttggtcaccttcaggagttgtatttacaggcacctcagggacttctcagtaaacagcagggagcaattacttctgttagctttgaatgttttgctcatctgtctcatggtgtaagcagctatgaaggctgtagtattcaaatggcctgcaataaatgaagttatttaccatgaaacagttacttcagaataatwatatgagggtagttctgcatgttaggttttyctttctgaaataattaagagcacatatgtcttttacctgctcccctgttagyaggyctcygtcatgatcatctccagtacctgaagggggcctacagaaaagctggggagggactttttataagggcatgtagcgacaggacaagaggaattggttttactggaagagggtag

SEQ ID NO: 56358 - DNA, 473 bp, Chicken  19866894310895_7
gaaagtgcaacaaccgaagttaacacaaagtaatacagcgatgttcctgtrcatcaaagaaacacaccacctgctttggtcaccttcaggagttgtatttacaggcacctcagggacttctcagtaaacagcagggagcaattacttctgttagctttgaatgttttgctcatctgtctcatggtgtaagcagctatgaaggctgtagtattcaaatggcctgcaataaatgaagttatttaccatgaaacagttacttcagaataatwatatgagggtagttctgcatgttaggttttyctttctgaaataattaagagcacatatgtcttttacctgctcccctgttagyaggyctcygtcatgatcatctccagtacctgaagggggcctacagaaaagctggggagggactttttataagggcatgtagcgacaggacaagaggaattggttttactggaagagggtag

SEQ ID NO: 56359 - DNA, 421 bp, Chicken  19866894310895_8
atcaaagaaacacaccacctgctttggtcaccttcaggagttgtatttacaggcacctcagggacttctcagtaaacagcagggagcaattacttctgttagctttgaatgttttgctcatctgtctcatggtgtaagcagctatgaaggctgtagtattcaaatggcctgcaataaatgaagttatttaccatgaaacagttacttcagaataatwatatgagggtagttctgcatgttaggttttyctttctgaaataattaagagcacatatgtcttttacctgctcccctgttagyaggyctcygtcatgatcatctccagtacctgaagggggcctacagaaaagctggggagggactttttataagggcatgtagcgacaggacaagaggaattggttttactggaagagggtag

SEQ ID NO: 56360 - DNA, 417 bp, Chicken  19866894310895_9
aagaaacacaccacctgctttggtcaccttcaggagttgtatttacaggcacctcagggacttctcagtaaacagcagggagcaattacttctgttagctttgaatgttttgctcatctgtctcatggtgtaagcagctatgaaggctgtagtattcaaatggcctgcaataaatgaagttatttaccatgaaacagttacttcagaataatwatatgagggtagttctgcatgttaggttttyctttctgaaataattaagagcacatatgtcttttacctgctcccctgttagyaggyctcygtcatgatcatctccagtacctgaagggggcctacagaaaagctggggagggactttttataagggcatgtagcgacaggacaagaggaattggttttactggaagagggtag

SEQ ID NO: 56361 - DNA, 600 bp, Chicken  19866894310897_1
gccctttaaatacggaaataaggtaaatatcctagaaattatttacaaagtaattagaaaacatctaaaaatatgtggttcgctaaacagcaatataacaatttttttaatttatgcaacactatttctctgctagcttctgacatgtatcatttcagttctcagaaggcacattaaaatcacattgcataatgtctgtttacatgaaagcctgtatacaaaacagtttagtgcacagtgtgacaaaatttctccctgctaggccatacttcattatgtcttttcattttaaataaatasctcagaagtaaatggacaataaacaatttatttgaagaggagctgatagttatctcgttcttctaaaacatacattttagttacatggtttttcagtgattttagtttataagttcataaaatgaaagcaaagtattctaaaatagaatacaaggatcttatgtaagagaatgtgtgtaaaataagacaggaaaagcatttcatctaacatttttaagtaagaaaatgaaagaccagccctgtcagtgttggttttagagtaggtgtgtgcctgtgggcatatgtatgtttgtatgactt

SEQ ID NO: 56362 - DNA, 600 bp, Chicken  19866894310899_1
ggaagcatcatgcatcttcttggaggaagtgggagctcagttaggatacgtgtttcttcacagttactcagaaataactcataagacacattgcagtcttaagatttggcatagtgcttaatgtggcatgaaagaagcattaaaatactactgtcttttaagcagtttagtgaagagtcaggaaggtaggagaatctgtgttacctttaaagctggacaaccaattggaagtcttaactggtgcacgtacatgtgttaagtagcttactggtatcagaatgaccatttctgtcaggctaygtacggagccgacagcaaatgctgattctgaattactgtaaataattttgatttagaatttgtattttttctgtaatataaaattaaatatttaacttttggggtattgggatgaaggcttaaaggggaatacttgattctggaaaaagggcattttgcagggtccagccaaacaaaacccattaatatgctagtgacaacagtattgtggatttctttgttttattttgtttgtgtgtttattttgagtgattcctaagcgtaaaatattcaagcatagctatccagtttgttgatgta

SEQ ID NO: 56363 - DNA, 599 bp, Chicken  19866894310900_1
  misc_feature (1)..(134): n is any nucleotide
nnnnnnnnnnnnnnnnnnnnnnnnnnnnnnnnnnnnnnnnnnnnnnnnnnnnnnnnnnnnnnnnnnnnnnnnnnnnnnnnnnnnnnnnnnnnnnnnnnnnnnnnnnnnnnnnnnnnnnnnnnnnnnnnnnnnnntctctgctccccgttccctgcgctcacccaccttgtcacctcagttagtcagtccctgctcattctggcaggtgctgcctcctgttctctgttaagagaagaacaacattaaagaaggctagcaggtgcaacaagagcagcacgctttactcatccaagcccttaraagagtaaaatgaaagttgtatcctatcacgtctggtatcaaaaatagaggtatatgaaatatctaaacaaggcaagggctatttcagttttttacacaactccacttgaaacttttgcaccaagtgtagcaacttaaataactggtcaaataattcatttattgttcactttcttcatttaatgcagttgaaagtggttgctatatgcttgtgtgttcttcttttccttttgaccatgaacacagagaagttcctctcatcaagttttactgttttaaagtcaaggtaatggtgcttg

SEQ ID NO: 56364 - DNA, 600 bp, Chicken  19866894310904_1
tcagtaaagaaaagggggagaacatgcaggaagagcacgcaaggaaacttaaaactgtttaaaagatgctcttttagtaggaattagccccatgaaaggtgaaaggcaacaactcccaaccaatgtctgcaggccatgactccagtcaatacccaaagctatatttttgacttctggcatttacagcctcatgggaggttcttcatttgagctctactttgcacacccagattcatttcagacctgagaatcactcaccataaattaaggctctcctacacactgcatccttatcattayacaactgaggaaacagatacrgggaggtgagatgactgcaagtgggcagaataacctagaaaaccttccagaacattaactgaaaatcctgcatcacaactgctatcttttctcctgcacaaagcagaaggttcctgtcccctctgcctgaaatgcactgtttggatttctttaaggaaaagccaggaacaattgccagggttcacccattggagatcaatttcaaagcaatggaccatgaaagcctttgctgtaatgagcactgagaaaggcaaagaaacccgattttaaggaaaaaaa

SEQ ID NO: 56365 - DNA, 600 bp, Chicken  19866894310904_2
acatgcaggaagagcacgcaaggaaacttaaaactgtttaaaagatgctcttttagtaggaattagccccatgaaaggtgaaaggcaacaactcccaaccaatgtctgcaggccatgactccagtcaatacccaaagctatatttttgacttctggcatttacagcctcatgggaggttcttcatttgagctctactttgcacacccagattcatttcagacctgagaatcactcaccataaattaaggctctcctacacactgcatccttatcattayacaactgaggaaacagatacrgggaggtgagatgactgcaagtgggcagaataacctagaaaaccttccagaacattaactgaaaatcctgcatcacaactgctatcttttctcctgcacaaagcagaaggttcctgtcccctctgcctgaaatgcactgtttggatttctttaaggaaaagccaggaacaattgccagggttcacccattggagatcaatttcaaagcaatggaccatgaaagcctttgctgtaatgagcactgagaaaggcaaagaaacccgattttaaggaaaaaaaacttttctttaaaccatccca

SEQ ID NO: 56366 - DNA, 600 bp, Chicken  19866894310904_3
cttccagaacattaactgaaaatcctgcatcacaactgctatcttttctcctgcacaaagcagaaggttcctgtcccctctgcctgaaatgcactgtttggatttctttaaggaaaagccaggaacaattgccagggttcacccattggagatcaatttcaaagcaatggaccatgaaagcctttgctgtaatgagcactgagaaaggcaaagaaacccgattttaaggaaaaaaaacttttctttaaaccatcccagtgacagatttgcagtactgcaggaaattgctgatctgctttygctttggggaacaaaagataccagaaagagcaaattcctttgtccatctgagcttttccaaggaagatgatggaaggccttagtgagaaatgtaagctaaagggagtggaagtcaagcaggacaactcaggaaaaaaaaaacaagtgagtgtcaaaagaacaaaaataggtttccaacaagatccagaaatcacattaaaaaaaggataaagaaaaataaataaaaaaaggaaaactcagatcaagaacagaaacaaacagcagcatccaacagaaggcacaaagaggggagaaacaaat

SEQ ID NO: 56367 - DNA, 600 bp, Chicken  19866894310905_1
gcctgcatgctgcccctcaggtgtcagagagactcaccttccatatttccaccaccttctgctgtgttgttgtgtggaaacttctgggggacggagagaagaggaggcagcaaatgtcagtgagatagtcctcctcagtcttgtctgttttggaacaaacttccgcttctcgcctgagttttatggcaggctgatggtaaagagctgctcacctgctttaaaatgtttatatgctactcagcaaaccagaatgggtttactacagaaacaggaattacttcacatgtaatcaacccgtckccacattcttttcaccgtgtttccgccattgtcagaagcacatggggctgatactgtcattagcaagagtccttcaccggagctcacttccctcgctggaaaagcactctggataatcccaccactgcacaaaaaaagcatcaagattcttgctggtggtactacacctacatggagactctgtcactttggcttttgatgggactttcgctttgtatatactgcacaactggtcctgctcccgagggaagcctttatgcttagttccatggtggcagacctgaggctgctgtttgtgtc

SEQ ID NO: 56368 - DNA, 438 bp, Chicken  19866894310916_1
tcaggttattcatgatgaattcctatgaacaacgttcacatccaatacaaaggtaaataaccctggaatggtgtatattacattgcttgcactaaactagcattgtgtaagagagtttagatgtatcaccaccaatcattgaaatgactacaaaaggattaatacgtcacttactaattttgtctgctctaattgaatatctgagatgtggtacatggctagtgatgagattttagcattacgatgaaaagtagcttctattaggcacatgctgctgataagaaaaagaaaaaaatctamatgtgcaacaatacacacacaaaaatccactccccacctccactagcacatttattccaagaaaagcttaacattaaatacccaccctttaactatgccagtgtgggttttgtgggttaatatactacagtatgtgaa

SEQ ID NO: 56369 - DNA, 599 bp, Chicken  19866894310917_1
  misc_feature (1)..(244): n is any nucleotide
nnnnnnnnnnnnnnnnnnnnnnnnnnnnnnnnnnnnnnnnnnnnnnnnnnnnnnnnnnnnnnnnnnnnnnnnnnnnnnnnnnnnnnnnnnnnnnnnnnnnnnnnnnnnnnnnnnnnnnnnnnnnnnnnnnnnnnnnnnnnnnnnnnnnnnnnnnnnnnnnnnnnnnnnnnnnnnnnnnnnnnnnnnnnnnnnnnnnnnnnnnnnnnnnnnnnnnnnnnnnnnnnnnnnnnnnnnnnnnnnnnnnttggtggtgcgtggctcctgcatgtagggggatgagaatgcccattattctgcacrtggagagcgctaccctgcagggccaggcacccagggaggcagcggcagggtgacgtgtgctgcagagctgcctgcagctgrctgggcacctgcctcgggtttgggcacctgctcccagggtactgaggaaaagcactttaaatctggatgccctccatctctgtaacctccgttaagatatttccagtttcttcaccygatacacaaaggtatcagtacaagactcggttgcctttagaagytgggctaagtaattctgctttggaagaatttattccacwgggaaataaataaataaa

SEQ ID NO: 56370 - DNA, 599 bp, Chicken  19866894310917_2
  misc_feature (1)..(163): n is any nucleotide
nnnnnnnnnnnnnnnnnnnnnnnnnnnnnnnnnnnnnnnnnnnnnnnnnnnnnnnnnnnnnnnnnnnnnnnnnnnnnnnnnnnnnnnnnnnnnnnnnnnnnnnnnnnnnnnnnnnnnnnnnnnnnnnnnnnnnnnnnnnnnnnnnnnnnnnnnnnnnnnnnnnttggtggtgcgtggctcctgcatgtagggggatgagaatgcccattattctgcacrtggagagcgctaccctgcagggccaggcacccagggaggcagcggcagggtgacgtgtgctgcagagctgcctgcagctgrctgggcacctgcctcgggtttgggcacctgctcccagggtactgaggaaaagcactttaaatctggatgccctccatctctgtaacctccgttaagatatttccagtttcttcaccygatacacaaaggtatcagtacaagactcggttgcctttagaagytgggctaagtaattctgctttggaagaatttattccacwgggaaataaataaataaatcttacaaacattttttttcaaaactctgaggagctgcacagcgcctgctggcacttctgaatttagagtgctgcatatcg

SEQ ID NO: 56371 - DNA, 599 bp, Chicken  19866894310917_3
  misc_feature (1)..(46): n is any nucleotide
nnnnnnnnnnnnnnnnnnnnnnnnnnnnnnnnnnnnnnnnnnnnnnttggtggtgcgtggctcctgcatgtagggggatgagaatgcccattattctgcacrtggagagcgctaccctgcagggccaggcacccagggaggcagcggcagggtgacgtgtgctgcagagctgcctgcagctgrctgggcacctgcctcgggtttgggcacctgctcccagggtactgaggaaaagcactttaaatctggatgccctccatctctgtaacctccgttaagatatttccagtttcttcaccygatacacaaaggtatcagtacaagactcggttgcctttagaagytgggctaagtaattctgctttggaagaatttattccacwgggaaataaataaataaatcttacaaacattttttttcaaaactctgaggagctgcacagcgcctgctggcacttctgaatttagagtgctgcatatcgaattgtttctgctctccagtattttgcttccctttcaaaagctttttctactgcaatttgtagaacatcttgtgggcaattcctctgcttgcagccttkcctgtcacatcgcttttc

SEQ ID NO: 56372 - DNA, 599 bp, Chicken  19866894310917_4
  misc_feature (1)..(2): n is any nucleotide
nnttggtggtgcgtggctcctgcatgtagggggatgagaatgcccattattctgcacrtggagagcgctaccctgcagggccaggcacccagggaggcagcggcagggtgacgtgtgctgcagagctgcctgcagctgrctgggcacctgcctcgggtttgggcacctgctcccagggtactgaggaaaagcactttaaatctggatgccctccatctctgtaacctccgttaagatatttccagtttcttcaccygatacacaaaggtatcagtacaagactcggttgcctttagaagytgggctaagtaattctgctttggaagaatttattccacwgggaaataaataaataaatcttacaaacattttttttcaaaactctgaggagctgcacagcgcctgctggcacttctgaatttagagtgctgcatatcgaattgtttctgctctccagtattttgcttccctttcaaaagctttttctactgcaatttgtagaacatcttgtgggcaattcctctgcttgcagccttkcctgtcacatcgcttttccttcacaaatagtataaggaaatagagaatgactgcctgggatg

SEQ ID NO: 56373 - DNA, 600 bp, Chicken  19866894310917_5
atgcccattattctgcacrtggagagcgctaccctgcagggccaggcacccagggaggcagcggcagggtgacgtgtgctgcagagctgcctgcagctgrctgggcacctgcctcgggtttgggcacctgctcccagggtactgaggaaaagcactttaaatctggatgccctccatctctgtaacctccgttaagatatttccagtttcttcaccygatacacaaaggtatcagtacaagactcggttgcctttagaagytgggctaagtaattctgctttggaagaatttattccacwgggaaataaataaataaatcttacaaacattttttttcaaaactctgaggagctgcacagcgcctgctggcacttctgaatttagagtgctgcatatcgaattgtttctgctctccagtattttgcttccctttcaaaagctttttctactgcaatttgtagaacatcttgtgggcaattcctctgcttgcagccttkcctgtcacatcgcttttccttcacaaatagtataaggaaatagagaatgactgcctgggatgatataggttcttttgttgttgttacatatggaccgactcg

SEQ ID NO: 56374 - DNA, 600 bp, Chicken  19866894310917_6
atttccagtttcttcaccygatacacaaaggtatcagtacaagactcggttgcctttagaagytgggctaagtaattctgctttggaagaatttattccacwgggaaataaataaataaatcttacaaacattttttttcaaaactctgaggagctgcacagcgcctgctggcacttctgaatttagagtgctgcatatcgaattgtttctgctctccagtattttgcttccctttcaaaagctttttctactgcaatttgtagaacatcttgtgggcaattcctctgcttgcagccttkcctgtcacatcgcttttccttcacaaatagtataaggaaatagagaatgactgcctgggatgatataggttcttttgttgttgttacatatggaccgactcgtattgtaaactgtctgccacctgttttcttctggaagtaggaaaagtagtttgcttctttcttacaaaatgcatgaaatatctaattaattttgctcatatccactcatttacataataaatcctygtaggaaaacatgctgaaatctgagtcaaaattytcagtaatccgttaagactttgcatgtgttttatagca

SEQ ID NO: 56375 - DNA, 600 bp, Chicken  19866894310917_7
ttccctttcaaaagctttttctactgcaatttgtagaacatcttgtgggcaattcctctgcttgcagccttkcctgtcacatcgcttttccttcacaaatagtataaggaaatagagaatgactgcctgggatgatataggttcttttgttgttgttacatatggaccgactcgtattgtaaactgtctgccacctgttttcttctggaagtaggaaaagtagtttgcttctttcttacaaaatgcatgaaatatctaattaattttgctcatatccactcatttacataataaatcctygtaggaaaacatgctgaaatctgagtcaaaattytcagtaatccgttaagactttgcatgtgttttatagcagtgttttcatgagtgggcaagctggggaaaacagggggtgtgacatggtgatactaaatcaaagcaatcctggaaagtattcacactaggttttagagtgatatctctgttttatcactgcaatgttgtatctcagatcaagttgtccggaacgtttgcttctcaagtcttaatggtttctatgtttggcatcattgggttgtttctcttgcaaatgggctgacccgc

SEQ ID NO: 56376 - DNA, 600 bp, Chicken  19866894310917_8
agaacatcttgtgggcaattcctctgcttgcagccttkcctgtcacatcgcttttccttcacaaatagtataaggaaatagagaatgactgcctgggatgatataggttcttttgttgttgttacatatggaccgactcgtattgtaaactgtctgccacctgttttcttctggaagtaggaaaagtagtttgcttctttcttacaaaatgcatgaaatatctaattaattttgctcatatccactcatttacataataaatcctygtaggaaaacatgctgaaatctgagtcaaaattytcagtaatccgttaagactttgcatgtgttttatagcagtgttttcatgagtgggcaagctggggaaaacagggggtgtgacatggtgatactaaatcaaagcaatcctggaaagtattcacactaggttttagagtgatatctctgttttatcactgcaatgttgtatctcagatcaagttgtccggaacgtttgcttctcaagtcttaatggtttctatgtttggcatcattgggttgtttctcttgcaaatgggctgacccgcattgcttccagtctttatacatgttcttcttccg

SEQ ID NO: 56377 - DNA, 600 bp, Chicken  19866894310918_1
gttaaagcacaggtcccccttgaagtagtcctcacttcagcactccttcttcccacgaagccccaaaggctgcctgcacccctgccaaacaagacatggaatatccagaaagctcccagttggctgttgggtggtaatctgccttccaagtctcctgacagcaccatgtcctcaccaagctgacagagaacagggtgcagggatacatctgctctgtgccacaccaagagctccctgtgacactgggctgaccgtggccttcatggtttgtcatggccctgtcctgtgggcctctggtgyggtgaacaccccacgtccatctgggttgagaacaagcaagctgtctgcaggagctgaaaccagaaccagtgcaggcgttgttttacatcataatggaaaaaaagggaacataccaggaacaaactttaaaaatagcatcagtacgtggtatcttatccccccccccccatggattcgtgtgtttacaacttgacaaaatagtttaccaggacactctaagtttctaatttgtcatcttcctcccctttttgttgttaaagaagaaaatgcttgatgatagtcataaggaatagacaagaa

SEQ ID NO: 56378 - DNA, 600 bp, Chicken  19866894310920_1
gccaaccgagcctttcacttgctggagggcccaccatgcagttggtgaagctccccgcttccagttgaatatctttggcccaacctacaaccatacggtgtatttgctggtcaggagaagttccaatactggaaattttctcttgtagttcttatgtacctcagcccccctgaactgtctcttaatttatgggagtagattggctttccaaccactcaagatcagtttcccacccttactagagctctttcctgaccatttacagcttctcatttttccttctgtagtgagaaccccagrcaaaggcctatttttccaacactaaayggtgaacgtgctgttcttactgctgccaccagacatatacccacatctcagggccatgcttgctctctggacttcagcaactgctgaaggggtcatcaagtcatcagccaagcccaggtctaatggtccaatggaaattaaacactatttaactttgggtctgggctttgcttttttttgggtgacgttcaaggatacagtcttccaatctgtgagagattactcctattccttgatcctcaatgctggctttgaattgagccacattaaaag

SEQ ID NO: 56379 - DNA, 600 bp, Chicken  19866894310920_2
ggcccaccatgcagttggtgaagctccccgcttccagttgaatatctttggcccaacctacaaccatacggtgtatttgctggtcaggagaagttccaatactggaaattttctcttgtagttcttatgtacctcagcccccctgaactgtctcttaatttatgggagtagattggctttccaaccactcaagatcagtttcccacccttactagagctctttcctgaccatttacagcttctcatttttccttctgtagtgagaaccccagrcaaaggcctatttttccaacactaaayggtgaacgtgctgttcttactgctgccaccagacatatacccacatctcagggccatgcttgctctctggacttcagcaactgctgaaggggtcatcaagtcatcagccaagcccaggtctaatggtccaatggaaattaaacactatttaactttgggtctgggctttgcttttttttgggtgacgttcaaggatacagtcttccaatctgtgagagattactcctattccttgatcctcaatgctggctttgaattgagccacattaaaagaaaataaacgaaacacctccaactgac

SEQ ID NO: 56380 - DNA, 600 bp, Chicken  19866894310922_1
ttttgcaaggcaatgggtacatagtgaagaggtaatggagagaaatgtctggaaggctacatcaggcagaccttgctgtgcaacttagaaaggcagtgaatagctaaaatcaatgtggacataatgatttatcttaaatattaatccacggccatctagatggagaatgatgtaactgctcctttttatttccagtttttctaacttggtttctttgagctttcttagtttctgtgctaaagaattgcagcttgtttgagttgacagacctttgaggcgtaaggagttctgtgcagttcytcctgctgtcaagtctctggggagctgatgagcaagggtgaatcagtgtgtgttagcttacaggggaattttgtttgcctgatgtgtgcatgcatagcaaaggtggaacagagtttaagagagcaggactggagtcagatgtgaaggcaatggctgttttacagcccagaaaaaaaaaaaatcctgaagttagtaaaatattaggtattcctattgccatagagcagctaaaagcaagtaacaaagtgtaaaagacaatcagaatgcttctggtgtctctgttctgctttgaagttctga

SEQ ID NO: 56381 - DNA, 600 bp, Chicken  19866894310923_1
ccattcctgcaaaacaggctgaacaattcactccagcctcacaaaccacagggcagcaaacacgactgatacaatatatgggtcatgtatttaataaggaatccacccactccaaggtcagccaaagacatgagtatcaacacacaaagcctgcaacaaagactggtttttgagcttggttttctgctgtcagtcattcgtaaaactgccagccctgcagagatgacagatatgtaacaagtcacccagtgcaaaatgaaaaggtttccacagcatctaacagcctgctgcggtttcagkgttagaccagcagtgttttgaacccctctgtggttggaatttgttgttgcactgagcrgaccagggraggaaaacaaataaacaaaacgagaccatgtaacamcttacatacagcaatgcatacacaagctgaagaacaaaacttattactaaatccttaagtttgaaattcaggatggctactgcaatgaaagaaaggattttgctttggaaatcagcatgatttttgcccaggaagggatggagaattcacaaagtcttccccatgcacccaaatagcagcttacttcctgacatccc

SEQ ID NO: 56382 - DNA, 600 bp, Chicken  19866894310923_2
aacacgactgatacaatatatgggtcatgtatttaataaggaatccacccactccaaggtcagccaaagacatgagtatcaacacacaaagcctgcaacaaagactggtttttgagcttggttttctgctgtcagtcattcgtaaaactgccagccctgcagagatgacagatatgtaacaagtcacccagtgcaaaatgaaaaggtttccacagcatctaacagcctgctgcggtttcagkgttagaccagcagtgttttgaacccctctgtggttggaatttgttgttgcactgagcrgaccagggraggaaaacaaataaacaaaacgagaccatgtaacamcttacatacagcaatgcatacacaagctgaagaacaaaacttattactaaatccttaagtttgaaattcaggatggctactgcaatgaaagaaaggattttgctttggaaatcagcatgatttttgcccaggaagggatggagaattcacaaagtcttccccatgcacccaaatagcagcttacttcctgacatcccccacgccctgcaggccagtggctctgcaattctgcaggcacaatacacagaaacaaaa

SEQ ID NO: 56383 - DNA, 600 bp, Chicken  19866894310923_3
gatacaatatatgggtcatgtatttaataaggaatccacccactccaaggtcagccaaagacatgagtatcaacacacaaagcctgcaacaaagactggtttttgagcttggttttctgctgtcagtcattcgtaaaactgccagccctgcagagatgacagatatgtaacaagtcacccagtgcaaaatgaaaaggtttccacagcatctaacagcctgctgcggtttcagkgttagaccagcagtgttttgaacccctctgtggttggaatttgttgttgcactgagcrgaccagggraggaaaacaaataaacaaaacgagaccatgtaacamcttacatacagcaatgcatacacaagctgaagaacaaaacttattactaaatccttaagtttgaaattcaggatggctactgcaatgaaagaaaggattttgctttggaaatcagcatgatttttgcccaggaagggatggagaattcacaaagtcttccccatgcacccaaatagcagcttacttcctgacatcccccacgccctgcaggccagtggctctgcaattctgcaggcacaatacacagaaacaaaatttgtgaat

SEQ ID NO: 56384 - DNA, 600 bp, Chicken  19866894310923_4
cacccactccaaggtcagccaaagacatgagtatcaacacacaaagcctgcaacaaagactggtttttgagcttggttttctgctgtcagtcattcgtaaaactgccagccctgcagagatgacagatatgtaacaagtcacccagtgcaaaatgaaaaggtttccacagcatctaacagcctgctgcggtttcagkgttagaccagcagtgttttgaacccctctgtggttggaatttgttgttgcactgagcrgaccagggraggaaaacaaataaacaaaacgagaccatgtaacamcttacatacagcaatgcatacacaagctgaagaacaaaacttattactaaatccttaagtttgaaattcaggatggctactgcaatgaaagaaaggattttgctttggaaatcagcatgatttttgcccaggaagggatggagaattcacaaagtcttccccatgcacccaaatagcagcttacttcctgacatcccccacgccctgcaggccagtggctctgcaattctgcaggcacaatacacagaaacaaaatttgtgaatgcagagccaatttgcatacaccctattgatagactt

SEQ ID NO: 56385 - DNA, 600 bp, Chicken  19866894310927_1
attacatagaaacacagaagtatataatcatttgagttggaagggacttttaatggtcatttattccatcttcccttacaatgaacagcggcgtttaaagcttgatcatactgctcagagcctggtctagcttgaccttgagtagacacttctacagggtctacagggaagggaagaaatccaggtgggttttgaatacctccagagaaggagactccacaacctctctaggcactgttgaaccacgacgtcccctcacaacagccagcccacaatccctacagttttgtgcaccacccmgatgcaatcagggtgcatggaacagaaaaccaaaccccaagagtatcccaccagagakagttttctcaggttactgggggccagcagagggatgtacttaagcttcagaaaggactctttatatcactactggtgcctatacatcatgaatatcatagctacctaacagacagatgcactgtgccagtttctggggctctctcaccagggtgggatggtagcatcatccctgtaacaaagattaaacaacttcttccacagacttcagatgctgaaaagttcagcaagcaatttacagga

SEQ ID NO: 56386 - DNA, 600 bp, Chicken  19866894310927_2
atttattccatcttcccttacaatgaacagcggcgtttaaagcttgatcatactgctcagagcctggtctagcttgaccttgagtagacacttctacagggtctacagggaagggaagaaatccaggtgggttttgaatacctccagagaaggagactccacaacctctctaggcactgttgaaccacgacgtcccctcacaacagccagcccacaatccctacagttttgtgcaccacccmgatgcaatcagggtgcatggaacagaaaaccaaaccccaagagtatcccaccagagakagttttctcaggttactgggggccagcagagggatgtacttaagcttcagaaaggactctttatatcactactggtgcctatacatcatgaatatcatagctacctaacagacagatgcactgtgccagtttctggggctctctcaccagggtgggatggtagcatcatccctgtaacaaagattaaacaacttcttccacagacttcagatgctgaaaagttcagcaagcaatttacaggatgatgaaggattgctggctgtagtgaaagtcagtgttaatttgtaatccttacaaatc

SEQ ID NO: 56387 - DNA, 600 bp, Chicken  19866894310935_1
tgtaaagtttctctaagttcctgtagcacacaaatttggcgttcttccaaaccagaaggaaaaatagggattacactgttctgttgtccattttcagcgatccttattatcctgaagttaagcactattttcttcttcctataagctgggacagttgtttgttttctaaattgtcagacatggtcaacatggttttcatgaatgcagagctgtaagaggtagtggaaaaaacttggtgtacttcagcagaaaatagcactccagactatacttctgctttcacagcacagatgaaacaaracagggtaagattaaaaataatggtatctaagagatctctaggatcatcaagaatcccaaccaccaaagaaacccattatgaaacatactattccagtggtatcttgttccattatagcccccaaaaaaagaaatcaacattctttggaaatgtgctgaatatgaggaaaatggaacattcctcctcatctgctggaaatactctaaagtaaataaggatgctaagtactgggcagaaatactggaagtaattttttaaaataacaaaaaagcagacgccaatggaggcccctagtcatc

SEQ ID NO: 56388 - DNA, 599 bp, Chicken  19866894310946_1
  misc_feature (1)..(20): n is any nucleotide
nnnnnnnnnnnnnnnnnnnnaacatacaaacccccacaaaaggcatctggatagcagttaagcttgtcaagagcacacacatcccatggtttctctgtgctctcaaaggctggacaagcaggcattattcaaaacctgcaaaaagtgaagtttctggacagcaagaatagaaggctactttgaaataaggattacatcttgaagaacgtcatcactgtacagtagctagctaacagcattttccccttccctcacctgctacacgtcagtctatgtcagtggtgggctatgctctaacargaraagagtataaaaattattgtgcatctgtgaaatgattattaaaactaagcagtgtgctttgatgcccaggattcaatctttgatacgtaacacctgacagcaagagccagcactgtgtggatctctgctactggcacaggataggaaacaggccagagccagaactgcgatagaacgaatcctcatttccagtttatcagcacaaccaacaccagcagcagactgatgccttcaactgcctacagtgacattctggaaaaacattattgtggctggaagcgtgcagtcacaagcag

SEQ ID NO: 56389 - DNA, 599 bp, Chicken  19866894310946_2
  misc_feature (1)..(17): n is any nucleotide
nnnnnnnnnnnnnnnnnaacatacaaacccccacaaaaggcatctggatagcagttaagcttgtcaagagcacacacatcccatggtttctctgtgctctcaaaggctggacaagcaggcattattcaaaacctgcaaaaagtgaagtttctggacagcaagaatagaaggctactttgaaataaggattacatcttgaagaacgtcatcactgtacagtagctagctaacagcattttccccttccctcacctgctacacgtcagtctatgtcagtggtgggctatgctctaacargaraagagtataaaaattattgtgcatctgtgaaatgattattaaaactaagcagtgtgctttgatgcccaggattcaatctttgatacgtaacacctgacagcaagagccagcactgtgtggatctctgctactggcacaggataggaaacaggccagagccagaactgcgatagaacgaatcctcatttccagtttatcagcacaaccaacaccagcagcagactgatgccttcaactgcctacagtgacattctggaaaaacattattgtggctggaagcgtgcagtcacaagcagaag

SEQ ID NO: 56390 - DNA, 600 bp, Chicken  19866894310954_1
tctacagacagctgagattatcctcacagtcactggttctcattccagacttcaatcatcctgaaatttgctggaaaagcaatgctgccaggcacacatagtccaagaggttcttgcagtgtacacatggtggaggagccaactatgtgctgctggaccttgctcttacaaaggaggaagcactagttgggggtgtgaagactggggccagccttagctacagtgaccatgagaaagcagagttcaagatctcgcatggaataaacagggcaatatgtagagttgcaaccctggacataygaacagccaattttgacctcttcaaggaagtaactggaagaatcccatgagttagagcattggagggtaaggaggcccaagatatttgattgatattcaagcacagtgtcttccaagctcaacaatggtgcatccctaagaatatgaaattagggaaaagtggcaggagacctgcttgtatgaataaggagctcagaaaaaccttaaagaagaaagtctacggaatgtggaaaagttcccactgggcaggaatgtaagaacattgtcaggtcatggagggatgcaatgaggaaggctaag

SEQ ID NO: 56391 - DNA, 600 bp, Chicken  19866894310954_2
aatggtgcatccctaagaatatgaaattagggaaaagtggcaggagacctgcttgtatgaataaggagctcagaaaaaccttaaagaagaaagtctacggaatgtggaaaagttcccactgggcaggaatgtaagaacattgtcaggtcatggagggatgcaatgaggaaggctaagacccacttggaattacatctggtgagaaagatcaaggacagcaagaaaggcttgtttaggtacgtcaataggaaaaggaagactagggaaaatgcaggcttgctgctgaatgaggtgaatgamctggtaacagaggatactgagaaggaaaaattatcgaatgccttctttccttcagtctttactgctaagactaccaatcaagagtcccagaccctgaaggtaagagaagaaaatctgaagaaagaaagaaaaacttcctcttggttgaggaggatttgctcatatatcatctaggcaaacttgatgtacacaaatccacggaccctgaaggaatacacctatgagtgctgagagagctggcagaagtgactgccaagctgttctctattatctttgaaaggtcatggagaaagggaggtg

SEQ ID NO: 56392 - DNA, 600 bp, Chicken  19866894310955_1
gtagataggtatctgttggtatatattcttgtatgtagaagagccaatgcccactggtatcaattgaaaatctcttgttaatatcactggcctttgccttggatctgaagtgaaagtatttgcatgggcattagatattttaggttgctctgtgcctgttgctggtgttcattctctgcccaagctcagcagtaagtggattttgataggagaaatgggcattggcagctttgagaaatctgagccatgagaaggtttagcccagttttggattttttgtgatagcggcctgaaatctgrccagtaaattcaaaccattctggagagacttcagaaaaattgagactaatatatttttatgcttgtatgaatcatcctmgtgttttgttaagtcttaacggctaaaatgtaaactaagttcactggggcactaataagaacgaaatatccttaaagaaaaaacagctggtgactcaaaatcaaatcctgctaatatttctctcccaataaaattggtatcactgacatgaaggcaaattcttcacattatatatagtatgatatattgtaatacataatagaatatatatgcatacataa

SEQ ID NO: 56393 - DNA, 600 bp, Chicken  19866894310955_2
aatatcactggcctttgccttggatctgaagtgaaagtatttgcatgggcattagatattttaggttgctctgtgcctgttgctggtgttcattctctgcccaagctcagcagtaagtggattttgataggagaaatgggcattggcagctttgagaaatctgagccatgagaaggtttagcccagttttggattttttgtgatagcggcctgaaatctgrccagtaaattcaaaccattctggagagacttcagaaaaattgagactaatatatttttatgcttgtatgaatcatcctmgtgttttgttaagtcttaacggctaaaatgtaaactaagttcactggggcactaataagaacgaaatatccttaaagaaaaaacagctggtgactcaaaatcaaatcctgctaatatttctctcccaataaaattggtatcactgacatgaaggcaaattcttcacattatatatagtatgatatattgtaatacataatagaatatatatgcatacataaaaccataatgctttgaattaggatttagaaaatatattgagaaacaaaattacattcactgctagcccctcaattacca

SEQ ID NO: 56394 - DNA, 600 bp, Chicken  19866894310955_3
tatgaaaataaattgaggccagggctggtttacatagggctttaaagtgccctggttttgatatagcttcacaggcaatgttgtcacccctcacttcagtgaggcagcaccaagagaatacatctgtcctctgaatggttcagtgagatgcaagtggaatgatgccatgtgctcatggttacactggcagcttctgacagagccggggaaccaacccagacccccccaggctccacagggatgtaatcacaccaaaatgctgtacaggcaggttagagggaatttcagaaacactcacaygtcaaatcagaaaaaacaggaatagtgtaaagaaaaattcctcatggtaagacatcaccttgttcttggattgcgtgctcttatccttgtttacagattccagtgttttgttttttttttttcaacgaccattttttcacaacaacataattataaactttgctcatgtccttctttgaatggttcttgctggggaacccaaatgataatgcttctctgacatgagaattttgcatatggatgcagcaaagcgtgttactggaggcaacaccgcgcagtgtgtttatctttgctccttca

SEQ ID NO: 56395 - DNA, 600 bp, Chicken  19866894310957_1
tcagagaatacaagtcatacggccttttaaatccatgtgatgtgtagcttctgtcatatttttcatacataagtggaagagttatcatgatttacaaattagactggcagctctaacatacaacattaaggaaggacacagatctctaaacagagacagcttctgtgtttggatggctaaagaggggtggtctttcacacagcagaaagagaaatcagaaaagatggctcttagaagatgaagaaatagtttggctccagcaggatctggacccacgtggtcgagactagcaaacactgwcacttaccggcaagcagaaatagagcttccagcaagaaagcacctgaaaatttgagaccacacttcaaaaaacattttgagtaaacactttttaatgggaaaaccaacactgtatcaacaatagataccycacgcttgcagaaatatttttaagtttaattttgtatctctctttgccaagagtatcactagagccccttgttcttgtataacactaaatgctaggttgtgtatttgcattttgaggattttgttgtttaaatcactttagattctgttattttgcaaaacttctttagc

SEQ ID NO: 56396 - DNA, 600 bp, Chicken  19866894310957_2
gaaggacacagatctctaaacagagacagcttctgtgtttggatggctaaagaggggtggtctttcacacagcagaaagagaaatcagaaaagatggctcttagaagatgaagaaatagtttggctccagcaggatctggacccacgtggtcgagactagcaaacactgwcacttaccggcaagcagaaatagagcttccagcaagaaagcacctgaaaatttgagaccacacttcaaaaaacattttgagtaaacactttttaatgggaaaaccaacactgtatcaacaatagataccycacgcttgcagaaatatttttaagtttaattttgtatctctctttgccaagagtatcactagagccccttgttcttgtataacactaaatgctaggttgtgtatttgcattttgaggattttgttgtttaaatcactttagattctgttattttgcaaaacttctttagcagttttgcttctagagcagtttttgcttctccaacaaaagctgaaaagcgactgactttttgctacacattttaaatgctgccattggttttgaacacattactgaccaggctcttggttgacagcaagg

SEQ ID NO: 56397 - DNA, 600 bp, Chicken  19866894310967_1
ataaaaacactttaacataactagaggcactctcaatttgtaaaatgtaaattacctgttcaatcttagtcttgaagtcatccataattgtctcataagcctcatttcacattaatagtgcttttacagaacagcctgattgaaaatgtaacacacgtaaagattctttccaatattaaataattagtagttttctttccctttcagttaatcatttcattatattcttagaaatttttgttggtctgcgggggttaattctgcacttatcctcatgtgctgtaaaactttcaccacgcratgttagactacctacgttgtgttgctgttcgttaattgcaggaagctgctctatgccttgctacaggatataaggtgcttcaggggtcactgaaggtggaagttttcattctgttctttttcaaatttatctrtctcattggttggcatagtaattacatgacatagatcactacattgtccagtttacatcaagaatacraagccaaataaatcacttttccccaggtcatcattggtctagtattcacagagcaacatatctcaccagccttcactaatgtttttgcctttctctcc

SEQ ID NO: 56398 - DNA, 600 bp, Chicken  19866894310967_2
cctgattgaaaatgtaacacacgtaaagattctttccaatattaaataattagtagttttctttccctttcagttaatcatttcattatattcttagaaatttttgttggtctgcgggggttaattctgcacttatcctcatgtgctgtaaaactttcaccacgcratgttagactacctacgttgtgttgctgttcgttaattgcaggaagctgctctatgccttgctacaggatataaggtgcttcaggggtcactgaaggtggaagttttcattctgttctttttcaaatttatctrtctcattggttggcatagtaattacatgacatagatcactacattgtccagtttacatcaagaatacraagccaaataaatcacttttccccaggtcatcattggtctagtattcacagagcaacatatctcaccagccttcactaatgtttttgcctttctctccctaaccacagctgcactcagcttgatcacatctcctgaccttgcacttatcctgaagacttgtagtctaccagaagaccaagctgaaggtgctgtgatgtgtaaaggtatttggcttttgcagcttcaacccaa

SEQ ID NO: 56399 - DNA, 600 bp, Chicken  19866894310967_3
ttcagttaatcatttcattatattcttagaaatttttgttggtctgcgggggttaattctgcacttatcctcatgtgctgtaaaactttcaccacgcratgttagactacctacgttgtgttgctgttcgttaattgcaggaagctgctctatgccttgctacaggatataaggtgcttcaggggtcactgaaggtggaagttttcattctgttctttttcaaatttatctrtctcattggttggcatagtaattacatgacatagatcactacattgtccagtttacatcaagaatacraagccaaataaatcacttttccccaggtcatcattggtctagtattcacagagcaacatatctcaccagccttcactaatgtttttgcctttctctccctaaccacagctgcactcagcttgatcacatctcctgaccttgcacttatcctgaagacttgtagtctaccagaagaccaagctgaaggtgctgtgatgtgtaaaggtatttggcttttgcagcttcaacccaaacacacaaggtcatcaatgaatccatcttggtcacctaaccaattattttacagtacaactccttgcc

SEQ ID NO: 56400 - DNA, 600 bp, Chicken  19866894310968_1
gatgcaatctgggaaactctcaccttcagcctcatattggttcaataagtcctgaaaaacaggcatatgatgttcttttttgttcctgtgtgagctttcatgggacccatctggtgcaaatcttatgatattccaacaccgtgaccatcatttcctatgcagtgaagctgatattcagctctgtacacatggatcataatccaccattcacatggaagagctgattgaaatgctctttatttcacagtgtgagagctgtaaatggctctttggactatggcttatctttcactctgtcascactgctgaaacacaccaccgattatctcactgtgctcacatccattgtatggtatctttaaatgctcagcaagcttcaatgtccgtcactgggtgccattttttccatatgcaggaattcaatcacatatttttgcttcatatgcacttctgtgtcaaacaccattctgtcagactgcccctctgctgccatctgtgaacaaaataaaatgggatatcgatgggaagattcaacctcttctgccatatcatcaacatttgcttctgatgttgtagaccaacaaaacaaaataggaggta

SEQ ID NO: 56401 - DNA, 599 bp, Chicken  19866894310969_1
  misc_feature (1)..(19): n is any nucleotide
nnnnnnnnnnnnnnnnnnnacaagatcttgtactcagccaaacacattggtatatttattgaagtgcataaatataatagaaattaagtttattttcaggttattacccttgttcatttgtaatcatagaataatttgagttggaagggacctttaggtgtcatctagtccaactccccctgcaatgaagaaggacaactgcagctagataaagaataaatgtaggattttagttattagaataattcaaattttggctcctaaatgaagactttttcatgacatctagctcaacttccrttgacttccaagaaatgagcacttaacatttataattagggaactgttaaagtccgcaaaaggtttgtgaaagtcttgtactgcaaggaagtcaattacacaattctgttttctttgtatatatctgagaatatttttgttgaaaacctctcctgttaattcttctatgaatttgttgctccgtgaggtggatagccaaagcaagtgcaaaattgtcttgcrcgtatctcagggcagtgcagcacatggctgcagcagtgcaccattccaaaaagatgctctgtagaacagtgtgcaaa

SEQ ID NO: 56402 - DNA, 600 bp, Chicken  19866894310969_2
taggattttagttattagaataattcaaattttggctcctaaatgaagactttttcatgacatctagctcaacttccrttgacttccaagaaatgagcacttaacatttataattagggaactgttaaagtccgcaaaaggtttgtgaaagtcttgtactgcaaggaagtcaattacacaattctgttttctttgtatatatctgagaatatttttgttgaaaacctctcctgttaattcttctatgaatttgttgctccgtgaggtggatagccaaagcaagtgcaaaattgtcttgcrcgtatctcagggcagtgcagcacatggctgcagcagtgcaccattccaaaaagatgctctgtagaacagtgtgcaaatgacactgccttgtgttgtctgcattctagtttaggactgggaaggtagartttagtgcctgcttatggtccttactactgtcattataaatgacagtaaggttaaacaaaacaacaaacaaacataaggcagggcaggggagtgagtgccgtagtgtattgtgttaatttttagatgtaatactgatgttgttaactggactcaaggttttcagacataaag

SEQ ID NO: 56403 - DNA, 600 bp, Chicken  19866894310969_3
agtccgcaaaaggtttgtgaaagtcttgtactgcaaggaagtcaattacacaattctgttttctttgtatatatctgagaatatttttgttgaaaacctctcctgttaattcttctatgaatttgttgctccgtgaggtggatagccaaagcaagtgcaaaattgtcttgcrcgtatctcagggcagtgcagcacatggctgcagcagtgcaccattccaaaaagatgctctgtagaacagtgtgcaaatgacactgccttgtgttgtctgcattctagtttaggactgggaaggtagartttagtgcctgcttatggtccttactactgtcattataaatgacagtaaggttaaacaaaacaacaaacaaacataaggcagggcaggggagtgagtgccgtagtgtattgtgttaatttttagatgtaatactgatgttgttaactggactcaaggttttcagacataaaggcccattctttcagaaaagcagtgtttgtcatggactttagacattatttgtgagctttggaattacgtcttgtgcttaatgtaatgaaatttgacgctaaaccaaataaattgttcattaccgtaat

SEQ ID NO: 56404 - DNA, 600 bp, Chicken  19866894310972_1
aatgcagtagacaagaaaaagtctggaaccaaatcacataaatgtgattatttatttatttggtttccacatggtgttcaaatataacttctcaggttttttttcaaataaaattattagagatttatttcaatgtttatgcactttcctttgaactcattacccatgtcttgggcagtctgtttcagtaaaacggatgtaggtctcacagatactttatctgtgtgacaacagtggctgtaaaccaagtgataatgcttatgtttctcttgtatttgcaatctgctgctatgaatagcraacatgatcaaagagcatttagagaaacaagatcataactgaaattgatattattttccttttttttgtattttgcttttcattttttttagtaactgcctttcaactcagaagtccaatcgcaatatatggctaacactcatgctgttaaaaaactagtcaggcatgtctatcctctatctggtttgcatcctacttgaaagaaagaaacaccctaaaaacacaagtcaacagattttgccaactttttatttttcctccctctttattcttcttttttttcctttttcatccaaatga

SEQ ID NO: 56405 - DNA, 600 bp, Chicken  19866894310974_1
attcatcaatcatcttcacgtgttcacagcattgtaaagtttcaggcaatgtacagtataaccatcttcagatcttaatgccaaccatccttaagtatctgtcctcttcttaaagtgaaaaagtggctcaactctgtcatgggaggggatggagttgtcttctttgttctaagtagaagtcacccttcacgctctgttagaagctgttttaaagaccttgcactcattttttccccccacatccctgaatataaccttggccatataactcacacttcccatttaaattataaataatawacatgtcctttcactaatctttatttcagccttgttacacatatcatatggaagaatgctgtatctttcactcaggtttgaactggagttacattttggaatattgttctctggaagatcatagaatcagagaatcaccaaggttaggaaagacctccaagatcatccagtccaactgttcacttatcaccagtattccccactaaaccacgtccctcaatacaacgtctaaattcatgaaaaccaccaaggacagtgactgccacctccatgggcagcccatttccagtgcctgaccac

SEQ ID NO: 56406 - DNA, 600 bp, Chicken  19866894310974_2
tgccacctccatgggcagcccatttccagtgcctgaccactctttcagagaataaatatctcctaatgtccaaatcgagatgtctcactgcaaccataaatctggattaaacactaaaattctatacaaatgtagctttttccccccctcatttgtcattgctagcatcaattatcaacactatatattagcacttcagcctctgctttcctgttaccagctcataatgtggtctgagccctattccaagtattaaatctacccagtgatactaacatgattctttagataaccagacargtatttttggttgaaaataactagttgagtaataattctaggcttacagcctatcctatactgatctataaccttattactattcagtccggctgctcctgtcctcatcctaatcttgaggcagtttgtgtatttagtactgattttagttgtttatcatgttttccagaactcagacactttccttgactattctcagtggacacctgtgagcttattataaaaacagtaaatatgtatcatgatttctcatatacactgaattcaatctaagcccaaaaataattctcaagaaggaat

SEQ ID NO: 56407 - DNA, 600 bp, Chicken  19866894310980_1
tttgggaagcctttattttttaatctttctgaatgtaaaaagaccgtgcagagttgcaaaagggaacaaggatcatttcctggtctaaaaaatggttgaaaagagccagtggggccctgaaggaggagctggagagatgcaccaaaaaggagtgtaagaaagagaagtccaaatgcacaactcgcgtaaactctgcttgctctgttagtgtccacccagtagagatgaaagcagcagtgaacggagatctaaataaccctaaaattagctggtattaagcaaatattttctctttaccaytaatctcttagttcctgggtctcaggttgattgacataataaaaacacaggtagaaggcatgcaatttgctgttcctgtttttaaagaagcatgagctattaccagagaagttaagttaaaaacaaagcacgtagagccactgtaggcagacatgagagctgtcctgggcgctgcacacatctcaatgcaaggcagataggagtcatgctatagtattttactcttccttcttgcatgaaggggaattttgtgacatcaaacaatgttgtgtgtaatggagcaagctgtgccatgctgtt

SEQ ID NO: 56408 - DNA, 600 bp, Chicken  19866894310992_1
aagacatggccatgggatgacagacatcttgtcacacatgcaaaagccctctaggggaacacactgtgctgatatagccctaggtgcacttcagggagggcgtcctctctacctgaatgggaagcacagtggcagatgtgcctctggaggtatttttcagccagatgagctccaggttgaaaactagacagtctagactgtcacataaacatcagagacaacatgagcacaaacttgttttcttgtgctggtagctggccagatctgtgaatccaggaaggagggaagggagaaacaccmctcacagacacctttccatctgctcatcttcagcagcagacatagactgttggaaaagagcaacatttttagccaagaagcagctaaacagttgtgtaggacatcacgtaacgcatagccaatgtctctcacctccatcaatcacagtgaacatcacaaagaaaccaatgggcacccccaatggcaaagacaaaatccacagctgaaagcactgcagcccctaaatgtttggatttcacccacctggcagctcaggtgtaattaggccactgattggtatgtttggaggaagggtataag

SEQ ID NO: 56409 - DNA, 599 bp, Chicken  19866894310996_1
  misc_feature (1)..(73): n is any nucleotide
nnnnnnnnnnnnnnnnnnnnnnnnnnnnnnnnnnnnnnnnnnnnnnnnnnnnnnnnnnnnnnnnnnnnnnnnntgatataggcgtcatattaagtcagacccagctctttcaggtccatgaaacgtagccatgtgctttctaatttagaaatcaaacgtaaccaagaatctcagctcttctttttaaatagtgtgttaaacagtttcaatccaatttaccttgcacagatgaaaacataaatcagtagctggtctccactccacatgctaatttaatgagatggggatctgaccacatgygtatatatgctccaggaacctgcagaccttttcctccatgctgcattcagtttggatgcacgccaaaggactacacatgagttaaagggaggagggaaaggcagcctggcctaccagctkgcaccaggstctagaacaagggtgtgagacataggtcaggattcgagtgccatccatgccytcctctgatgatcactcaaagcacaaatgcacaagttactgaaagcaacctcacagtccagacagacgctctgggacatctcctcaggatgatgtctggggtcaccactcagcagctg

SEQ ID NO: 56410 - DNA, 600 bp, Chicken  19866894310996_2
aaacgtagccatgtgctttctaatttagaaatcaaacgtaaccaagaatctcagctcttctttttaaatagtgtgttaaacagtttcaatccaatttaccttgcacagatgaaaacataaatcagtagctggtctccactccacatgctaatttaatgagatggggatctgaccacatgygtatatatgctccaggaacctgcagaccttttcctccatgctgcattcagtttggatgcacgccaaaggactacacatgagttaaagggaggagggaaaggcagcctggcctaccagctkgcaccaggstctagaacaagggtgtgagacataggtcaggattcgagtgccatccatgccytcctctgatgatcactcaaagcacaaatgcacaagttactgaaagcaacctcacagtccagacagacgctctgggacatctcctcaggatgatgtctggggtcaccactcagcagctggaagagctctttcccacagttcggaaggactccagtctaaacagagatggtctctcagaagaaagccctaagaaggtcacccaaaagcacccacaggtccaccatttggctcactgcacta

SEQ ID NO: 56411 - DNA, 600 bp, Chicken  19866894310996_3
catgtgctttctaatttagaaatcaaacgtaaccaagaatctcagctcttctttttaaatagtgtgttaaacagtttcaatccaatttaccttgcacagatgaaaacataaatcagtagctggtctccactccacatgctaatttaatgagatggggatctgaccacatgygtatatatgctccaggaacctgcagaccttttcctccatgctgcattcagtttggatgcacgccaaaggactacacatgagttaaagggaggagggaaaggcagcctggcctaccagctkgcaccaggstctagaacaagggtgtgagacataggtcaggattcgagtgccatccatgccytcctctgatgatcactcaaagcacaaatgcacaagttactgaaagcaacctcacagtccagacagacgctctgggacatctcctcaggatgatgtctggggtcaccactcagcagctggaagagctctttcccacagttcggaaggactccagtctaaacagagatggtctctcagaagaaagccctaagaaggtcacccaaaagcacccacaggtccaccatttggctcactgcactacaaaacaaa

SEQ ID NO: 56412 - DNA, 600 bp, Chicken  19866894310996_4
ttttaaatagtgtgttaaacagtttcaatccaatttaccttgcacagatgaaaacataaatcagtagctggtctccactccacatgctaatttaatgagatggggatctgaccacatgygtatatatgctccaggaacctgcagaccttttcctccatgctgcattcagtttggatgcacgccaaaggactacacatgagttaaagggaggagggaaaggcagcctggcctaccagctkgcaccaggstctagaacaagggtgtgagacataggtcaggattcgagtgccatccatgccytcctctgatgatcactcaaagcacaaatgcacaagttactgaaagcaacctcacagtccagacagacgctctgggacatctcctcaggatgatgtctggggtcaccactcagcagctggaagagctctttcccacagttcggaaggactccagtctaaacagagatggtctctcagaagaaagccctaagaaggtcacccaaaagcacccacaggtccaccatttggctcactgcactacaaaacaaaggacctttgggggttttgtctggtaggtcttcaaagaaggtgtgtaatgtct

SEQ ID NO: 56413 - DNA, 600 bp, Chicken  19866894310999_1
tcacaggggtggtcccacatggactggccattgttgaagttgaaatagtagatatcaccagtgacatcctggctgtgtagcaaaaacagtgtgagaacacacagcaactttagctctgcacagacatggactcattcaaggggtttcaaggctctaaaaacattcttactgcaccatgcgatcaacccacattcagtgaacaggagcacaaggcctccaagaacccagaggcataagtgtagtgaaaaagccctccctgagaatgctcacatcctcattcaacttttgaaacattcttcyctcttcttccaccaccccagaaagaacccaggaagtacctgtgtacattttttccccttgccagttggtactctgctctgacaatcataaacacagcagagaaggccagcagagaccagcaatcttatataacagcttctgagagggttctctcaccagggcttccactggggtggtaacggagccacaatgccttccctggccagccacatcagctcaggctccttctctggctcaatgccgatgtctctcgcaaaatcccagacttctagagaaacagaacaggaatctgtagagatg

SEQ ID NO: 56414 - DNA, 600 bp, Chicken  19866894310999_2
acccaggaagtacctgtgtacattttttccccttgccagttggtactctgctctgacaatcataaacacagcagagaaggccagcagagaccagcaatcttatataacagcttctgagagggttctctcaccagggcttccactggggtggtaacggagccacaatgccttccctggccagccacatcagctcaggctccttctctggctcaatgccgatgtctctcgcaaaatcccagacttctagagaaacagaacaggaatctgtagagatggtctacaccaagcagtacacaaagmcagcttccacagctaaagcaatggacacaatgggaaatcccactactcaaaacaggttcaaacaggtctgcgtgtcagtgagcatgtcttccctagccggtgaagcagagggatagagactgcaagatggcaaatgcccttgcaatcaaaaagctagtttttcaactctacgtgacatctccttttgtctgctctcttgaatcacgctctccacagttcccatattcttaatactccttgaaataatatagcaagcttgaatcgcttattgcagctcctaggaggacaagcatctattac

SEQ ID NO: 56415 - DNA, 599 bp, Chicken  19866894311001_1
  misc_feature (1)..(77): n is any nucleotide
nnnnnnnnnnnnnnnnnnnnnnnnnnnnnnnnnnnnnnnnnnnnnnnnnnnnnnnnnnnnnnnnnnnnnnnnnnnnngtgagaattgtagacctggggctgagtctgctgactgtgcctagacaccataaggggattcacctccccactgtgcccaatgtgctgctgactgggacgaacctggacagtctctgatttgatttttcttttttttttttcttttttcccctttcgtttttgcagagacagaagacaagttactctatgtacccgaaggcgtgagcccacacccgtcacatcrtcagctccgccggtgggcacgctctattccccmcccgtggtatgttcacagaagcctctaagcatgaagtagctgggcacaggccaattccacagcccagctcttccctgcttggatcagatttgatccctaagagaatagttctgctcccttcagtcctttggtttttgacaatgcaaggttttttttggatggaaaatcagctcacatttagatgcctctgctgatagcatgtggctcaggctgctgcttccagtagctgcagtctgtatctggctgaaggagatggctgtacccct

SEQ ID NO: 56416 - DNA, 599 bp, Chicken  19866894311001_2
  misc_feature (1)..(44): n is any nucleotide
nnnnnnnnnnnnnnnnnnnnnnnnnnnnnnnnnnnnnnnnnnnngtgagaattgtagacctggggctgagtctgctgactgtgcctagacaccataaggggattcacctccccactgtgcccaatgtgctgctgactgggacgaacctggacagtctctgatttgatttttcttttttttttttcttttttcccctttcgtttttgcagagacagaagacaagttactctatgtacccgaaggcgtgagcccacacccgtcacatcrtcagctccgccggtgggcacgctctattccccmcccgtggtatgttcacagaagcctctaagcatgaagtagctgggcacaggccaattccacagcccagctcttccctgcttggatcagatttgatccctaagagaatagttctgctcccttcagtcctttggtttttgacaatgcaaggttttttttggatggaaaatcagctcacatttagatgcctctgctgatagcatgtggctcaggctgctgcttccagtagctgcagtctgtatctggctgaaggagatggctgtacccctctcattctgccgctcagcactggtagttgtgca

SEQ ID NO: 56417 - DNA, 600 bp, Chicken  19866894311010_1
gcaccactaattgcctcacagtgttcagatccactgttaattttccataagtgttcagcaagtatgggtgcagttttttcctcatggaggaattcagtgacacatttttgcttcatccacacttccatgttagacatcattttgtcaaactacctctctgctgccatctgttgcatggcaagaacatgtaatggaatattgttgggaaggtccgacctctactgtgataccaccaacgtacacttctgacattatgggccaacataataaaatagtaggcattactttcagagcagactycatatattaaacgtatttataaaaataatacataattcaaaatgatgtagggaattgatttcttaggtttattttttatttcattaatgtatgttttaattcatagctttgggagaaataaactgttcacttatctttcttcaaaaactgtaagtgtccgcattctctgttctgtgactgaaaagcttcaaaattaaggaatacaatattttaggaaatcttatatatttaactgaaaaagtagaactctactcccaagtcagtctcctgtgtcccagaagacacagacccgaaaacgct

SEQ ID NO: 56418 - DNA, 358 bp, Chicken  19866894311015_1
atgaggatttatatttcatagttttagtgatgagaaattagtcgtgttcacagcaggctgacagctccagatgttaaggtttcttacttggagtgatagcctggttgttctggcagcctctgctctctgcctttgttcttgctttataggtctgtcagcacaggggaaagaaaggtaaacttcagtgctatgggtgaaaagtatttctgtcagtggagatgcataaggaagtttttaagtgattttaaaaaataaatctgtatccagttcttgatggcagaagagctctgtgccaaaaarattattaactcaggctaaaagttcaagagaagcagatgctactgtgaaaacatcgatt

SEQ ID NO: 56419 - DNA, 600 bp, Chicken  19866894311016_1
aaactgaggggagaaagttagtagtcagcatacaggtgtgtgagatgcatgctttttgtagggtgactgcttggtcagaaacaaagtccaggacaagaacaatattttggaagtttaaaagcctttatggttcttctatttcacttttatttaagaggaaaaaaaaaaagttaaaagctatgcttgaatagagaatttactttttgcagagtagcaccaatgtgtttgagagcgaagtttagctcttttgaatttagcttttttgcacaaaaacacttagtatgaaatattgttgaggaraaccaaagaaattacatatgaaaacatccagcatcactgtaccggtaaaacactaataaactttgtgtctttgttttgcagatgattaagcttcaagaggtatttaaaaccttttacctaggaaaacacagtggtcgaaagcttcagtggcagaccacgttagggcatgctgtcctgaaggcggaatttaaagaagtgagtttgttcatagaagtttgcttatttaatgcgtagcctgttgggataaaactaaagttagttattccgaatctagtcgtgtttagtatttctttcttttgt

SEQ ID NO: 56420 - DNA, 600 bp, Chicken  19866894311016_2
aaacgcttgttaaattatttaagtcttaaataacccacattgtttcttaatgtggttttgtttcttctcttggaatgtcttgccttgctaatgaatgcaacttagttgaaatagagtaaacaacaataatgttattttataaactcattctgaatagggaacttaggattttggcactatgtatcactaggatagatagatttgttgttaattgacaaaaatgtatacatctgtctgaagagtttcagatatttccttctcattgccagctgaaacaaacgttttactactgatgatacrgggttgaagtataaagaaatgtgcaactggttgtagcaaagccagaattccatatattgtaattaaaatgcagtggtgtggagtaaatgctaggctgttctaacgaggttctggtttgtactgtatggtactgttagataaacagaagaggttttaataatatcccgtttccttgctactacgttcaagcagattcttctgtgcgacaggcattcaaaaatgcacatctataaataaagaatgtacagcttctctaacttatcagatttgggagatacaagagaagatgaaaattacctc

SEQ ID NO: 56421 - DNA, 600 bp, Chicken  19866894311016_3
aagtgtcgctctttcagacattagtgctgcttatgtttaatgaaggagatgaattcagttttgaagaaattaaaatggccaccggtataggtaggaaaaatactttgtggttcttaaatgtattcactgagtgactgacgattatgaatctgtaggtaaagaccttgcgttaagaatgctactatccatcggtcagttttacaaaatacatgattgcaattcttaaaatgcgggtggtgataaaggcttggtgtatgtacagattatttctgttctagcacactttcaaatattaaaatstgaaaatgatctgttacggaatgctgccattttggggcacttcaagagatgatttccattgacctgttctgagatcatgactatctcttttccaccagtgttgctggagtgccctgtttacaataggttgatttgtttaaaaagagcagtgtccagtagtgaatatatatggtagctgttcctcttacactttgaatctgaagatggatgaaacatagaaaactgaagaaaaacgtagttttctttttaaccagatgtagtatctattgcagtagagtattcttagaggttttcgtttat

SEQ ID NO: 56422 - DNA, 600 bp, Chicken  19866894311018_1
cctgaagagcaaccagctggggaatgcaaacaggtgtacccagctgtgcttcaactccagaaagtcgctttgtgagtgcacgtttgggtgtgtgcgtttggatgaagtcctctgttttgtttcgcttcctcttttcctttttttagggcattctttggcacacagggagcagggacctcgttcagctgcacgccagcaggccgcctccttgcttgctccgctggccacttttagaaagcgtatttttggaataggcacggagctctctcctctcttcacctcttacctaccaatcccgtrcttttttgtcgctcgtgtttctgcttaacgagtttatggcgttccccgctcttggccatctggtcccgcagaaggccttgaagagagcgttccagctctggcgctgcctgacaggcctcctcaggctggtggtgctcggggcctggtgtgaagcaggggtcaggtgtaaggagtaattcatcaaccacacactgatttcaggctgcatttccaaccatctgcagcttggattgccgccagagctcaaaagtctagctggagcccatgtgatagtgccagagtggaggcaaacacttgcaa

SEQ ID NO: 56423 - DNA, 600 bp, Chicken  19866894311019_1
aagagttgctgttcacagatcatcttatcaatttatactgtgactagatttcaggcagtgtcctgtgcatgaaaagcttgatatccaattgctggccttgaagctagacagtatgttcctccttaaaaaatggagtttttcaaaaacaacaaacccaacaaattaagtggcccttatcacctctatgcagtattttacagggtgtctgtcttctcaaagggccatattttgtatattacaattttcccctctgagttttgtaaggaaacatagttttagtcccagctatgatgtgtataygtatgaatgattttgtttcagtggtcagaatgtgtaggaaggcacttgattttcacctatatttccttgttcctgaatcttttattttctcctgcaggacagaggaagttcctatagtgcaagaagcattgtcatttaatgctggtactgaaagaacgaagattcacactggactcrtttaactttttttactatatagttgggatgactgattttgattgaaccagcaaaagaaaaacaaacagaagatgagactgcttttgagggagatatgtctagtggacatggaagcaatacata

SEQ ID NO: 56424 - DNA, 600 bp, Chicken  19866894311019_2
cacctctatgcagtattttacagggtgtctgtcttctcaaagggccatattttgtatattacaattttcccctctgagttttgtaaggaaacatagttttagtcccagctatgatgtgtataygtatgaatgattttgtttcagtggtcagaatgtgtaggaaggcacttgattttcacctatatttccttgttcctgaatcttttattttctcctgcaggacagaggaagttcctatagtgcaagaagcattgtcatttaatgctggtactgaaagaacgaagattcacactggactcrtttaactttttttactatatagttgggatgactgattttgattgaaccagcaaaagaaaaacaaacagaagatgagactgcttttgagggagatatgtctagtggacatggaagcaatacataacccatatttgttcctaccttaatttggaaacttaagtttgtgatgggctgaaaacatgcaattggatacagcggatttttgtaataaacaatgtattcccagagatatcagttgcctttgttaggtaccctgacactacaaggagggcagtatgtagaatgcggatcctttgcacg

SEQ ID NO: 56425 - DNA, 600 bp, Chicken  19866894311023_1
tttaattatttggaatatatagtgaatactaacttcctgattttttttttttaattcactataaagtttagaggctatgcctctatattcttagctcttaaaatgttaattctatccttcattgtgctcctcctccattccgaccatccattccatactgccacatcaggtgaatcagctttaggaacactcttgaatgaaaaaaactgtcattctctgaggtcacctacatttctcacagcactactggatatgaagtacttcacatcaaatgtcacacctagagacactcaccatacrcatttttttcttcagctttgcaggctgaggcctacacgtgatttttacgcttactatattttctgcctcctttcctcccattctttctgtctgccttccttccttcctggctacagtgtgcagcctctggacttcggagcttctgaggagtgctggggtttgaggccagagctgaaggcagtaagcagatgcctccaactcctcttagtgacagaaggtgaaacactgctggctggttagttatgaagatattttgctggaggcaaatctggagcaggtttgagagaaaacacactgcag

SEQ ID NO: 56426 - DNA, 600 bp, Chicken  19866894311039_1
agccttaaaaattacactgccacgtccctgaaattgttccctctaatcaggattcagtaaaatatcccattcattgctaccagcaatcataaccaacattcagtctgtttaaaagatgctttatagagttactgtggtgtcatctgtgagtgatcagaagtacatgaagctcaggggagaccttatcactctctaactctgcctgaaaggaggttgtggcaaggtggggttcagccccttctcccaggtaacagtgatagcatgagaagtaatggcctaaagttgctccagaggaggttygggttggatatcaggaaaaatttcttctcagaaagagtggtgctgcagtggcacaggctgcccagggaggtggtgcagtcattgtccctggaggtgttccagagccrtgtggatgtggcactgagggatgtggtcggtgggcattcagaggacaggctgatggttggacttaatggtcttaaaggtcttttccagtctgaaggattctatgatattattatttgtatatcaatgcagttcaatgtatttgtatatcagtatcttctatctttacatttctggagttaatgttcacatacg

SEQ ID NO: 56427 - DNA, 600 bp, Chicken  19866894311039_2
tttaaaagatgctttatagagttactgtggtgtcatctgtgagtgatcagaagtacatgaagctcaggggagaccttatcactctctaactctgcctgaaaggaggttgtggcaaggtggggttcagccccttctcccaggtaacagtgatagcatgagaagtaatggcctaaagttgctccagaggaggttygggttggatatcaggaaaaatttcttctcagaaagagtggtgctgcagtggcacaggctgcccagggaggtggtgcagtcattgtccctggaggtgttccagagccrtgtggatgtggcactgagggatgtggtcggtgggcattcagaggacaggctgatggttggacttaatggtcttaaaggtcttttccagtctgaaggattctatgatattattatttgtatatcaatgcagttcaatgtatttgtatatcagtatcttctatctttacatttctggagttaatgttcacatacgttagaattttttttatgtccaataacatttttaaataattatctgcagagactcctcctggaacactgcaaaaaagcagaagacctttgggtatatctcctggaaaa

SEQ ID NO: 56428 - DNA, 600 bp, Chicken  19866894311039_3
gaggacaggctgatggttggacttaatggtcttaaaggtcttttccagtctgaaggattctatgatattattatttgtatatcaatgcagttcaatgtatttgtatatcagtatcttctatctttacatttctggagttaatgttcacatacgttagaattttttttatgtccaataacatttttaaataattatctgcagagactcctcctggaacactgcaaaaaagcagaagacctttgggtatatctcctggaaaaaaatctgctgcagaatttgggtaaggaatactttttgttwtttatttcaacagacgtctttagcaagtctatgctctcctgtgctctacacagwgttcctctatgaacagtrtatgaactcttagggttaccgtgcagggctcacagaccatcagcagacatctattgatcccagcaccatactcagggtttagccctgaccctctgggctgtaaggcccggggagaaggcatctttttgtascatcatggctgagtycaggcaccatctgcactgcagacagtgcagcctatgtgcagactggatagaacaggagatgggtggactaatcagcaaagca

SEQ ID NO: 56429 - DNA, 600 bp, Chicken  19866894311039_4
ggattctatgatattattatttgtatatcaatgcagttcaatgtatttgtatatcagtatcttctatctttacatttctggagttaatgttcacatacgttagaattttttttatgtccaataacatttttaaataattatctgcagagactcctcctggaacactgcaaaaaagcagaagacctttgggtatatctcctggaaaaaaatctgctgcagaatttgggtaaggaatactttttgttwtttatttcaacagacgtctttagcaagtctatgctctcctgtgctctacacagwgttcctctatgaacagtrtatgaactcttagggttaccgtgcagggctcacagaccatcagcagacatctattgatcccagcaccatactcagggtttagccctgaccctctgggctgtaaggcccggggagaaggcatctttttgtascatcatggctgagtycaggcaccatctgcactgcagacagtgcagcctatgtgcagactggatagaacaggagatgggtggactaatcagcaaagcagaggttaggaagtgcccccggccaccttgctgtcaggtggcagatcctgagtat

SEQ ID NO: 56430 - DNA, 600 bp, Chicken  19866894311039_5
atttgtatatcaatgcagttcaatgtatttgtatatcagtatcttctatctttacatttctggagttaatgttcacatacgttagaattttttttatgtccaataacatttttaaataattatctgcagagactcctcctggaacactgcaaaaaagcagaagacctttgggtatatctcctggaaaaaaatctgctgcagaatttgggtaaggaatactttttgttwtttatttcaacagacgtctttagcaagtctatgctctcctgtgctctacacagwgttcctctatgaacagtrtatgaactcttagggttaccgtgcagggctcacagaccatcagcagacatctattgatcccagcaccatactcagggtttagccctgaccctctgggctgtaaggcccggggagaaggcatctttttgtascatcatggctgagtycaggcaccatctgcactgcagacagtgcagcctatgtgcagactggatagaacaggagatgggtggactaatcagcaaagcagaggttaggaagtgcccccggccaccttgctgtcaggtggcagatcctgagtatgttttcactgctgaggaa

SEQ ID NO: 56431 - DNA, 600 bp, Chicken  19866894311039_6
actcctcctggaacactgcaaaaaagcagaagacctttgggtatatctcctggaaaaaaatctgctgcagaatttgggtaaggaatactttttgttwtttatttcaacagacgtctttagcaagtctatgctctcctgtgctctacacagwgttcctctatgaacagtrtatgaactcttagggttaccgtgcagggctcacagaccatcagcagacatctattgatcccagcaccatactcagggtttagccctgaccctctgggctgtaaggcccggggagaaggcatctttttgtascatcatggctgagtycaggcaccatctgcactgcagacagtgcagcctatgtgcagactggatagaacaggagatgggtggactaatcagcaaagcagaggttaggaagtgcccccggccaccttgctgtcaggtggcagatcctgagtatgttttcactgctgaggaagcaggcatcagaaaaatgcttgagggagctgcaaatacctctaaagatgatttaatcagaaaggtaatgacaaaagcaagcagttccttgacctgtgtaacacctgcagattgtccttgagctaactgaaa

SEQ ID NO: 56432 - DNA, 600 bp, Chicken  19866894311039_7
ctgcaaaaaagcagaagacctttgggtatatctcctggaaaaaaatctgctgcagaatttgggtaaggaatactttttgttwtttatttcaacagacgtctttagcaagtctatgctctcctgtgctctacacagwgttcctctatgaacagtrtatgaactcttagggttaccgtgcagggctcacagaccatcagcagacatctattgatcccagcaccatactcagggtttagccctgaccctctgggctgtaaggcccggggagaaggcatctttttgtascatcatggctgagtycaggcaccatctgcactgcagacagtgcagcctatgtgcagactggatagaacaggagatgggtggactaatcagcaaagcagaggttaggaagtgcccccggccaccttgctgtcaggtggcagatcctgagtatgttttcactgctgaggaagcaggcatcagaaaaatgcttgagggagctgcaaatacctctaaagatgatttaatcagaaaggtaatgacaaaagcaagcagttccttgacctgtgtaacacctgcagattgtccttgagctaactgaaaagttctgtttcctaa

SEQ ID NO: 56433 - DNA, 600 bp, Chicken  19866894311039_8
ggactaatcagcaaagcagaggttaggaagtgcccccggccaccttgctgtcaggtggcagatcctgagtatgttttcactgctgaggaagcaggcatcagaaaaatgcttgagggagctgcaaatacctctaaagatgatttaatcagaaaggtaatgacaaaagcaagcagttccttgacctgtgtaacacctgcagattgtccttgagctaactgaaaagttctgtttcctaaagttgacttcactcacttaaaaacattacaattttaacctttgtgtgatggtttggaaggagargwgcagcaaacacctgagaaggggcaagaaaacctctggagagagtaatgtagtgttgttcataaaaacttaagtgccaaatgtttacaaaagatattgaaagaaattagccatccaaggtaatacttaaaaataagactacttatgtgttatggctttggtttaatcatcttagataaaagggagttatgcgtttcagcctaagtaaccagtatgtggcttgttgctgctttcagacagcagacacagaccagaagatagagaggctgcctgccagggacgcattaaggtgttttgcag

SEQ ID NO: 56434 - DNA, 600 bp, Chicken  19866894311039_9
actaatcagcaaagcagaggttaggaagtgcccccggccaccttgctgtcaggtggcagatcctgagtatgttttcactgctgaggaagcaggcatcagaaaaatgcttgagggagctgcaaatacctctaaagatgatttaatcagaaaggtaatgacaaaagcaagcagttccttgacctgtgtaacacctgcagattgtccttgagctaactgaaaagttctgtttcctaaagttgacttcactcacttaaaaacattacaattttaacctttgtgtgatggtttggaaggagargwgcagcaaacacctgagaaggggcaagaaaacctctggagagagtaatgtagtgttgttcataaaaacttaagtgccaaatgtttacaaaagatattgaaagaaattagccatccaaggtaatacttaaaaataagactacttatgtgttatggctttggtttaatcatcttagataaaagggagttatgcgtttcagcctaagtaaccagtatgtggcttgttgctgctttcagacagcagacacagaccagaagatagagaggctgcctgccagggacgcattaaggtgttttgcagaa

SEQ ID NO: 56435 - DNA, 391 bp, Chicken  19866894311044_1
aggaaggttctgcctctactgtcatatcacttacatccacttctgatgctgctaatcatcatcatcaaataggaggcattacttttggaacaggccctgtatgcacagatcacagtgtcaaaatcttacccaaattagatgtatttccatgagcctaagccttttagtattacaaaattaaggaacagaaggtaaagattttaaagaatatttttaaatgtttaatattttcccatccaatctgttctgatattagtgttcttcttgtcttttctacatgaattgaaaataacaaaactmtatatataccttgtaagatatttaaaaaaggttttcctctgttaaccatgacatcaacaaactgagatcctcagctgaggagaactaaaag

SEQ ID NO: 56436 - DNA, 600 bp, Chicken  19866894311050_1
tgatgaatgtgcaagtcttaaaatcacatgatgaatgtgcaagtcttaaaatcacaaaaatatccacaaattctgactaaaaaggaagttcaaaacagattcatttgactttcacagcacaggtacaaactgtatcgctgtcttgaagccaaatatttacttctacatcaaaagcaaccaaaacataaggcataaaattatgcagtctacattaacacaaagcctacgttttagtagttagcttcacactgtgaagcagttaaaaaaaaaaaaagaacaaaaccacaacatacaaatgtwgatttgggaaagatcagattaagatcaagcaamaccaggacaatattaacaaagcaactacatctacataaccacacagaagtgagatttaccatgaaccgatgcatgagatgtacaggagtggagccagactggaatggcttttgcctgggggttggccttggcccatcatagaaaggctgttgcgtagatgatgttggcagagctggaaagccaccaatctgatcatcgtcatcctcctccttttcaagtagattggaattagcttttatcattccaatatctaaaagtttaaaacac

SEQ ID NO: 56437 - DNA, 600 bp, Chicken  19866894311050_2
aatgtgcaagtcttaaaatcacaaaaatatccacaaattctgactaaaaaggaagttcaaaacagattcatttgactttcacagcacaggtacaaactgtatcgctgtcttgaagccaaatatttacttctacatcaaaagcaaccaaaacataaggcataaaattatgcagtctacattaacacaaagcctacgttttagtagttagcttcacactgtgaagcagttaaaaaaaaaaaaagaacaaaaccacaacatacaaatgtwgatttgggaaagatcagattaagatcaagcaamaccaggacaatattaacaaagcaactacatctacataaccacacagaagtgagatttaccatgaaccgatgcatgagatgtacaggagtggagccagactggaatggcttttgcctgggggttggccttggcccatcatagaaaggctgttgcgtagatgatgttggcagagctggaaagccaccaatctgatcatcgtcatcctcctccttttcaagtagattggaattagcttttatcattccaatatctaaaagtttaaaacacatacatatatattgatatcttccaagtattatt

SEQ ID NO: 56438 - DNA, 600 bp, Chicken  19866894311052_1
acccccaaatccttttccccagggatgctctcaagccattctctggccaacctgtgtctgcgcttaggattgccctgatccaggcatttggccttgttgaactccatgaggttggcattggcccacctctcaaacctgtccaaatccctctggatagtattccttccctcctgcgtgtcaactgcaccactcagcttggtttcatctgcaaacttgctggagttcactcaattccactgtgcatgtcgcctacagaaatgttaaatatcatcagtcccagcaccaatccctgaggaacakcactcataactggtctccacttgaacactgagctgctgacaacaactttctgagtgtgaccatcatcactgaccaacagttagaagaattatttttctgctggcctatctgatacccagctgcagtagctactggtacctaggatatatagtatgatcaaccagaagagaaagaaatgttgctaaagaatgaagacaattaccaaaataattactattgtcttaagctcagttatttcctctttaataacttcattttgttctgatagtcttataggacagccagataagaaaatattat

SEQ ID NO: 56439 - DNA, 600 bp, Chicken  19866894311060_1
cacagctgaagctactggaacccccccccccccccgccctgtttgaggcactcattttcacgtactacaatctcaaccaagctggtaggcaacctcacttaccattttgtaccttgaattaagtcatcaaatttacatcacaaagaataaatatgttttaatgagttttattccttccctcacactcttaagcagttgacagcatgagatgcacccactgcagttcctttaattgttgaaggggactggaaaggggaaaatcataaatccactaattagcagagagacagcatatgtggratctggcctccactgcaaccagtcggagctttgccaaccaagttcacccactgagttgaacaacagttgttggaaaaacgtgaatagctccattaggagtttggagcaagaaaacattcacttggcagtcacttacaatagaattggatgatagatagatgaaacagagaatatttacctagcatactaaattttgcaacaataccactgccatcagtatgaaatcagagcaaagattaggtttatctgcatagccttaaagccctgaggtaagaattccatcacaagttcctagctcca

SEQ ID NO: 56440 - DNA, 599 bp, Chicken  19866894311067_1
  misc_feature (1)..(55): n is any nucleotide
nnnnnnnnnnnnnnnnnnnnnnnnnnnnnnnnnnnnnnnnnnnnnnnnnnnnnnntcctatctatttttccagattggtggccaagtgaagtgtttataggaggatataccatccacaagccagggaatttatatttccacagctaaatgttaattagcatataggcttgcacacttcacaggttagcaaagcaatcacagtgatccagcacaagtgctgcagctccaggtttgaaaagaatgaagggcctagagagagagagccattctcaaataaattagacactattggtacttttyttgttgttctcaggctattatttcatatgttgtttatttgcctcactagtacactgggatttgagagggtcactggcagaaggtaggaaacacggtcttctaccagccagcatgtatgcccatccctgccttccccatcagtggacgcaggacctagcccagtgtctatgtcctcccacctatgttctcatagccctgtgcttctgctatggtaatgccatgtcagtgacttggaaggttattttggatgaggagttcatttgctttgatttcatagaatcatagaatcaccaaagttg

SEQ ID NO: 56441 - DNA, 585 bp, Chicken  19866894311067_2
agaaggtaggaaacacggtcttctaccagccagcatgtatgcccatccctgccttccccatcagtggacgcaggacctagcccagtgtctatgtcctcccacctatgttctcatagccctgtgcttctgctatggtaatgccatgtcagtgacttggaaggttattttggatgaggagttcatttgctttgatttcatagaatcatagaatcaccaaagttggaaaagatctctaagatcacctagtcctactgtccacctgcaaccaatatttcaccactaaaccaattgttgaaataygtctaatttggttaggatctctccagatttggctgtgaatatatttctagatcactaataatttcactgtcactattgatgtgggtgaacgctcctctgtaagaaaagggaaatggtccagaatgaaaacagcgctctctgggttgtggtttgattctcatttgttcaagttttgtttctcagaacatatacaggacaccttaaattgtatttgtttttttctctctctagatatataattacatcccatttgatgtaagaaatgggcaattctgataaatatga

SEQ ID NO: 56442 - DNA, 600 bp, Chicken  19866894311068_1
ggaaattatcttttacaaacatttcctgataaggtaattgctccttttatacaagtcctgtaaaagttccagcaccaccaccacaatggaggcacaccatgcagaacgcccttgtaactcacagctacacgtccaaagtattggttttaagacaaaccagcagactctggcagtaaatcatcatttatgactcagacccgaggctgcatacaactctcccctagggcaggcaagaatcatcctctttccctgcttcacgtagtaggaattgattctccgaaatgtgataactcgttcaaytgtgtttattacagaaacaacttgtagcagactgtaatgcaagctgatgtagtctaaaaaaaaaaaatcaatagactagtgttaataacgcttagcctactagaaaacatacgaccgagtgccgaggtaccttttctggccagattcccaggtggaagtataacctagcctggagcattagatgctgcacattgtccggatacatggccaggtacagatccaacgagtctctcaagagttgataagactgatcagtgctttctctgccagcaaaaaagaaactcaattgtaaggctagct

SEQ ID NO: 56443 - DNA, 600 bp, Chicken  19866894311077_1
ttattcaaaatcagcctcattatcatctgcaaaatagtttgttttgattattatttgctgttgagctggctgtcacttgcagtaatacataaattctgatgcagtttttttcaagtagtctttttttaatatacatgtgtacttgtgtaaatgcctgtgtgtgtgtatattatatatatatatatatatatatatataatataatgatatatgatcatgaggacctcaggaaattcaattacctcccctcaaagaagggccagctttgggatcaggcaaggctgcttggcttctatctaktagggccttgaaaacctcgagggattgaacctatacaacccctttgggcaaccttctccatttcttccctgccctcatggagggggaagaacttctatcacatgcagtctggctctttgtttcaacacatgctttttgtctcttatcctctccatgttgtacagcaagatcctgactccatcttcttgccagcctacttacactggggtacaggcaggttgctgttaggtttcccttcctcyccaaagccatctcttgatccagctgaagaagtcccaacccctcagcctctcttcacaa

SEQ ID NO: 56444 - DNA, 600 bp, Chicken  19866894311077_2
ctcccctcaaagaagggccagctttgggatcaggcaaggctgcttggcttctatctaktagggccttgaaaacctcgagggattgaacctatacaacccctttgggcaaccttctccatttcttccctgccctcatggagggggaagaacttctatcacatgcagtctggctctttgtttcaacacatgctttttgtctcttatcctctccatgttgtacagcaagatcctgactccatcttcttgccagcctacttacactggggtacaggcaggttgctgttaggtttcccttcctcyccaaagccatctcttgatccagctgaagaagtcccaacccctcagcctctcttcacaagactgctcctctgaccagtctagagcctgggataggaccactgggcctgttccagttggttcttttccagatgtctactctgttctgggagtctctggctgcagtgcctaggggtggtctcacatgtccaacatgacaagagaaggataatccctttcctggatctcctctctttattcttactaacaaaggccggggtgctgctggccttccttgctaccagaccgtgctgctgattcacc

SEQ ID NO: 56445 - DNA, 599 bp, Chicken  19866894311081_1
  misc_feature (1)..(36): n is any nucleotide
nnnnnnnnnnnnnnnnnnnnnnnnnnnnnnnnnnnncacagtgtttacaaacttgatgcacttctgctttacgtaggtcactgtaacatattaaacatacacctatggcttgctgatgcaatcctacggttatttcaaccttaaagacattatttaaaacttgcatgtgtttttcaccctcagaagcacacagagaccaaatattcctctttagtcagtaattaagcttgcaataaaacaaatgggcaataaagtttcactttgaagctggcagattcccaaatattccattgatccacwctgacagagatggcatttcctccattcattttgacgtatgtcttgtgactcaaataatcatcaggctgttttgtaaatatgatttttaacaggaaaataaatattaatgttttcgattttcaaagatagtattcagatacctctagccagaaactttcttcttaactacatacagtagtcaatgcacgttcactaaaagctaagcatttacctaacaaaatacgtatgagaactaaaaaaataggaagcattttattagagccttatgagtcgaccttcatttcatgcaaactcttttc

SEQ ID NO: 56446 - DNA, 600 bp, Chicken  19866894311089_1
aagtagctgagctcactactgtgtttcttctactgtacaggtcaactcacactctcattctaaatgtctcttttctttctaccatctttcttctacatatctttcccagaaggctttctggaaactgttagtgttttccacgtcctttaaaaatatcattaaaatatttggagcaatacacacactgctgtcatgctgtaacacagtctgaaacaaacgctgcggcctgctaaggttaccccaagccataacaccttttggctgagttctcatgacacgatcgtgaaggtcagtgcagcyctttttggtaaatattttgttacaacacagctgctgcagaaagtagtttgagcttccgtatttctgactgcaatctgagagttacctgagacagaatatgcctggggctgtgcagctgattcagaaagctgctggttgaagagtactccacagcaatggccaaaggcaaacttaagtaaatagtgttgtgcaaggaaacatttatgggaaatgggcagtgcaactactgccagattaaactgggtgaagagctgctgtaaaaagttggcattcaaatgatgctgtgtcagaaattgaaag

SEQ ID NO: 56447 - DNA, 599 bp, Chicken  19866894311096_1
  misc_feature (1)..(168): n is any nucleotide
nnnnnnnnnnnnnnnnnnnnnnnnnnnnnnnnnnnnnnnnnnnnnnnnnnnnnnnnnnnnnnnnnnnnnnnnnnnnnnnnnnnnnnnnnnnnnnnnnnnnnnnnnnnnnnnnnnnnnnnnnnnnnnnnnnnnnnnnnnnnnnnnnnnnnnnnnnnnnnnnnnnnnnnntatttttgatggctttgttggttttgaaatgaaacagggaaaaaaaaaaagaaaaactcaattgagcccctgaatctctttgttacctggttgtttccaacatagtgtaaattggtttggtgtggttttgaygatcccacgacctcagctttaagcttatactcaaatgtcgtcctaaataagcccaaatcagggccctaaaggatggtttgtgtttgtgtggtgctgtcctgagtcttgactggagtttttatttgatcatttaattttggggataccttttcttttgcctgaaaagattagcagtccctagatctgctacatttgaggatatccatctgttctcccagacctcagctttctggccacaaatgaggtgtttcagatctagtcaagctgcgtgcatcgaccactcctgcttctcttggggc

SEQ ID NO: 56448 - DNA, 538 bp, Chicken  19866894311096_2
ttgactggagtttttatttgatcatttaattttggggataccttttcttttgcctgaaaagattagcagtccctagatctgctacatttgaggatatccatctgttctcccagacctcagctttctggccacaaatgaggtgtttcagatctagtcaagctgcgtgcatcgaccactcctgcttctcttggggccatggagctaggagcatcagccgatattcaaagatgctatgttccaacagtatccttattgctttctgcagggtgctctactaagcagggaacagaaaaataaacrgaaagcacacatgccatcagtttgccagaacactctggatgaagctttaacaattaaagtaatgcaggaaaaagaaacaaaaagtatgttccaaatctggaaagaagccagtttcgtacttccgaagaacagttggaagtaacaatctttatacccaaattcccaaagaccttgaaggaagcatggtggaggggaagccagctattcagaccctgtgcttgaaggtggaaaccaaagt

SEQ ID NO: 56449 - DNA, 600 bp, Chicken  19866894311097_1
agcgtattacaccagtatctacaatcaatatactatgccctggcagagcatgtgataaacaggagcagcttcgccatggtaactgattcatatttcatacattgggcctgattctgatagctttgtgctcgtgtaacccccccctcatacctgcacgagtagatgtgagatcagcatcaggttaattgatttgtgctgtctccagcatcagcgtgaaagctttcagcaaacaaagattttaaaataataataataaaacctaaaaaaataaatgatgtgctaggtctattttctgactgygttgggcatctggagcaccggggtctcctacagcctttgaaatgggccctcgaatcacttggctggtaacttaattctaatagctcacttaacaagtactccgtcatggatatatatattcctcgtgataatatctcatgttacattgatgttctgaggtgyataggggaggtttggatcagcactaccagcagtgggtctgtgtgggtctcagccctgcatggctcagaggtttgtcccgggtccaggcaggcaaattttgggtaattagaggttagctggggcttctagaataggtat

SEQ ID NO: 56450 - DNA, 600 bp, Chicken  19866894311097_2
atgtgagatcagcatcaggttaattgatttgtgctgtctccagcatcagcgtgaaagctttcagcaaacaaagattttaaaataataataataaaacctaaaaaaataaatgatgtgctaggtctattttctgactgygttgggcatctggagcaccggggtctcctacagcctttgaaatgggccctcgaatcacttggctggtaacttaattctaatagctcacttaacaagtactccgtcatggatatatatattcctcgtgataatatctcatgttacattgatgttctgaggtgyataggggaggtttggatcagcactaccagcagtgggtctgtgtgggtctcagccctgcatggctcagaggtttgtcccgggtccaggcaggcaaattttgggtaattagaggttagctggggcttctagaataggtatccacaactgaaggccatagtatgacaggctggtagcctcaccccatgctgtcccagcaccaccagtgagagtccctgtgggcagagatgagctgtttgtcagtccttgggcaggctcggctcatccgcacacaggcagtgcaaaatgttggactggctcgtg

SEQ ID NO: 56451 - DNA, 600 bp, Chicken  19866894311104_1
aaagacctttcattctctttagggcctcagacaatatctctcttctaagagcgctgactgacattaacagggatagagagtggtgcagtgagactgctgctttgaatacttaacccctggctgctagcactaaggaaaattgacttttatttgtgaggagaaatactttttaaaatactgttatttggactctttccacgctgatccaaattcagtcggacctggtaggatttaataaatgagctgtcagtgatgcttttgcctttgaggaatgactgacttctgatcttgttccctcaragtggatgttgtcccacgtctcttytctgttacctgtcagttgctcatgtaacgcttctggtaaccagcagttactgctctgtaatgaaagccagaaatggggagggagggtgcttgtgactgaggccttcygtcccatgtaaggggtcagccttggttagggcagggaccagctggtgggacctctgtgtgatggggagtccttcttgttcattgcttggtgcaacttcgtgtcttaaagcggtcctgttacttgtcagtgacccacaacctgaagtatttataaacagactaacattt

SEQ ID NO: 56452 - DNA, 600 bp, Chicken  19866894311104_2
ctcagacaatatctctcttctaagagcgctgactgacattaacagggatagagagtggtgcagtgagactgctgctttgaatacttaacccctggctgctagcactaaggaaaattgacttttatttgtgaggagaaatactttttaaaatactgttatttggactctttccacgctgatccaaattcagtcggacctggtaggatttaataaatgagctgtcagtgatgcttttgcctttgaggaatgactgacttctgatcttgttccctcaragtggatgttgtcccacgtctcttytctgttacctgtcagttgctcatgtaacgcttctggtaaccagcagttactgctctgtaatgaaagccagaaatggggagggagggtgcttgtgactgaggccttcygtcccatgtaaggggtcagccttggttagggcagggaccagctggtgggacctctgtgtgatggggagtccttcttgttcattgcttggtgcaacttcgtgtcttaaagcggtcctgttacttgtcagtgacccacaacctgaagtatttataaacagactaacatttctcttcctctccctctccaacctat

SEQ ID NO: 56453 - DNA, 600 bp, Chicken  19866894311104_3
aggaaaattgacttttatttgtgaggagaaatactttttaaaatactgttatttggactctttccacgctgatccaaattcagtcggacctggtaggatttaataaatgagctgtcagtgatgcttttgcctttgaggaatgactgacttctgatcttgttccctcaragtggatgttgtcccacgtctcttytctgttacctgtcagttgctcatgtaacgcttctggtaaccagcagttactgctctgtaatgaaagccagaaatggggagggagggtgcttgtgactgaggccttcygtcccatgtaaggggtcagccttggttagggcagggaccagctggtgggacctctgtgtgatggggagtccttcttgttcattgcttggtgcaacttcgtgtcttaaagcggtcctgttacttgtcagtgacccacaacctgaagtatttataaacagactaacatttctcttcctctccctctccaacctatgcaggagcagaaagtagatgccttaaaagtgctcaaggatctctggcgggacttcctgcagtgctattcctctcggaccatgctgtgctggtcagtctggtgggcac

SEQ ID NO: 56454 - DNA, 599 bp, Chicken  19866894311111_1
  misc_feature (1)..(85): n is any nucleotide
nnnnnnnnnnnnnnnnnnnnnnnnnnnnnnnnnnnnnnnnnnnnnnnnnnnnnnnnnnnnnnnnnnnnnnnnnnnnnnnnnnnnnaaacttgattgctaaagttgcttagaacagattattaagctttttgcctatggaatagttactccggggaagtatcagtcaaatcttctcccaggagctccatctgctgacatattaaaaaaaaaaagttgctacaacttttcagtcgtaacatctatagctgctacattaaaaaccaaagtcaatgaagttcccatgtagaaattaaaaatgcycccctgctcatgggaattagcgaccattcagtagatggatcttaccttctagggattcaattccagttgcttgagccaacaggtcttcatgtcttgcaacaacctttaaaaaacaaaagagagagagagagagagaaaatagaaacaatgacataagaacggagatgtgtgcctgaaagagttatcaaaatatcatcatcacatttcattaaacagatccaagaaaaagcatatgaaagcattttcagaacacattttgattcacaaaatggtaagctcaaaacaggagagtcagatca

SEQ ID NO: 56455 - DNA, 600 bp, Chicken  19866894311111_2
ccattcagtagatggatcttaccttctagggattcaattccagttgcttgagccaacaggtcttcatgtcttgcaacaacctttaaaaaacaaaagagagagagagagagagaaaatagaaacaatgacataagaacggagatgtgtgcctgaaagagttatcaaaatatcatcatcacatttcattaaacagatccaagaaaaagcatatgaaagcattttcagaacacattttgattcacaaaatggtaagctcaaaacaggagagtcagatcaactgcagtatagttgatatattamtataagtcagaaaaacaatccatcatgtttcaacacacactgatatataacaatagctgtaagcgtaagcttaataatgacacagtaataatgtatttttatatttttattataatgggtgttttggggtttttattttacatttttaatgcttttatttctatttatgagatttagaaactaacttccaaagaacttaccattgcaatgggagcaatttttcaaaccaagcacaaacttatcatgttctctcacagccacgtcagtgggatttgcagtccccacctgagttttatcact

SEQ ID NO: 56456 - DNA, 599 bp, Chicken  19866894311114_1
  misc_feature (1)..(185): n is any nucleotide
nnnnnnnnnnnnnnnnnnnnnnnnnnnnnnnnnnnnnnnnnnnnnnnnnnnnnnnnnnnnnnnnnnnnnnnnnnnnnnnnnnnnnnnnnnnnnnnnnnnnnnnnnnnnnnnnnnnnnnnnnnnnnnnnnnnnnnnnnnnnnnnnnnnnnnnnnnnnnnnnnnnnnnnnnnnnnnnnnnnnnnnnntctcagcaccagcacggacctggcacaacttactgagctggagcatcacttggagtaagcgataagcactgaatccttactgaagagccgtaacgagtgttagaacacagacacrttcttgtttttcagtgaaaaagaattagctagaaagattaagtgattctcctcagttcagtaaagcaacagtgaacgccttcctataagatamagtatcaatctaaatcagaattggtcttcctgcattttgtcacaasatcwagatttgtttggatgttgatgcaagcagttggcaagcaagcatggcgttctgcagcacagctgtggataacccatctgcagccacacgcrtccctctgaaggagctgagagcacacatggctgccccaggaaggatacctggcagaatacacagcg

SEQ ID NO: 56457 - DNA, 599 bp, Chicken  19866894311114_2
  misc_feature (1)..(92): n is any nucleotide
nnnnnnnnnnnnnnnnnnnnnnnnnnnnnnnnnnnnnnnnnnnnnnnnnnnnnnnnnnnnnnnnnnnnnnnnnnnnnnnnnnnnnnnnnnnntctcagcaccagcacggacctggcacaacttactgagctggagcatcacttggagtaagcgataagcactgaatccttactgaagagccgtaacgagtgttagaacacagacacrttcttgtttttcagtgaaaaagaattagctagaaagattaagtgattctcctcagttcagtaaagcaacagtgaacgccttcctataagatamagtatcaatctaaatcagaattggtcttcctgcattttgtcacaasatcwagatttgtttggatgttgatgcaagcagttggcaagcaagcatggcgttctgcagcacagctgtggataacccatctgcagccacacgcrtccctctgaaggagctgagagcacacatggctgccccaggaaggatacctggcagaatacacagcggtcaccaaagaaacctgggcagagctgagggcatcaatatgcactcatggagtatattggaaaaggaggactccgggcatatacccgagctgt

SEQ ID NO: 56458 - DNA, 588 bp, Chicken  19866894311114_3
  misc_feature (1)..(46): n is any nucleotide
nnnnnnnnnnnnnnnnnnnnnnnnnnnnnnnnnnnnnnnnnnnnnntctcagcaccagcacggacctggcacaacttactgagctggagcatcacttggagtaagcgataagcactgaatccttactgaagagccgtaacgagtgttagaacacagacacrttcttgtttttcagtgaaaaagaattagctagaaagattaagtgattctcctcagttcagtaaagcaacagtgaacgccttcctataagatamagtatcaatctaaatcagaattggtcttcctgcattttgtcacaasatcwagatttgtttggatgttgatgcaagcagttggcaagcaagcatggcgttctgcagcacagctgtggataacccatctgcagccacacgcrtccctctgaaggagctgagagcacacatggctgccccaggaaggatacctggcagaatacacagcggtcaccaaagaaacctgggcagagctgagggcatcaatatgcactcatggagtatattggaaaaggaggactccgggcatatacccgagctgtacacaggcttcagttttcatctgagatcacaaagg

SEQ ID NO: 56459 - DNA, 584 bp, Chicken  19866894311114_4
  misc_feature (1)..(42): n is any nucleotide
nnnnnnnnnnnnnnnnnnnnnnnnnnnnnnnnnnnnnnnnnntctcagcaccagcacggacctggcacaacttactgagctggagcatcacttggagtaagcgataagcactgaatccttactgaagagccgtaacgagtgttagaacacagacacrttcttgtttttcagtgaaaaagaattagctagaaagattaagtgattctcctcagttcagtaaagcaacagtgaacgccttcctataagatamagtatcaatctaaatcagaattggtcttcctgcattttgtcacaasatcwagatttgtttggatgttgatgcaagcagttggcaagcaagcatggcgttctgcagcacagctgtggataacccatctgcagccacacgcrtccctctgaaggagctgagagcacacatggctgccccaggaaggatacctggcagaatacacagcggtcaccaaagaaacctgggcagagctgagggcatcaatatgcactcatggagtatattggaaaaggaggactccgggcatatacccgagctgtacacaggcttcagttttcatctgagatcacaaagg

SEQ ID NO: 56460 - DNA, 494 bp, Chicken  19866894311114_5
tctcagcaccagcacggacctggcacaacttactgagctggagcatcacttggagtaagcgataagcactgaatccttactgaagagccgtaacgagtgttagaacacagacacrttcttgtttttcagtgaaaaagaattagctagaaagattaagtgattctcctcagttcagtaaagcaacagtgaacgccttcctataagatamagtatcaatctaaatcagaattggtcttcctgcattttgtcacaasatcwagatttgtttggatgttgatgcaagcagttggcaagcaagcrtccctctgaaggagctgagagcacacatggctgccccaggaaggatacctggcagaatacacagcggtcaccaaagaaacctgggcagagctgagggcatcaatatgcactcatggagtatattggaaaaggaggactccgggcatatacccgagctgtacacaggcttcagttttcatctgagatcacaaagg

SEQ ID NO: 56461 - DNA, 600 bp, Chicken  19866894311120_1
attaaataagaccatttgggtgttgtcggggtgaaaaaggtatttataatgggttgtcattctttttgaaaatagtagaagtagaaattcatcattaaatttgcttcagacagtgcccataaataccaaacttcagcctgaagcatactggggttctacagccaaggaatagatggctagaaacataggccactttcacattacttcaccctaactctgcccttacgcagctggaaggagacacctggggtaatgataaatagaacattttcttaactccccctcagttctggatcctcygtttcaaacatggacgcactgtattcgtctcacttacttgtcttcagttttaacatagccacaaacgtaagctacggcagagctttgcttgttttgttaatttgccatttaaaaaacagtatcttcattttcctgaagggaggtttctctgcttatatatcctgacactgttagcatgtgtgtgagtaaaaatgcaagctccattttgaaaacacaaattttgggtttgatctaaagaatatgctgtcatttcatttcatctttaagttatttagggtttgtttgtttttttttccaaac

SEQ ID NO: 56462 - DNA, 599 bp, Chicken  19866894311129_1
  misc_feature (1)..(110): n is any nucleotide
nnnnnnnnnnnnnnnnnnnnnnnnnnnnnnnnnnnnnnnnnnnnnnnnnnnnnnnnnnnnnnnnnnnnnnnnnnnnnnnnnnnnnnnnnnnnnnnnnnnnnnnnnnnnnnagttatggggtgagtacagattcagacttcctgctcaggtgagcagtacagggtcaggtgacattgatgccagctgagaatctcgcccaaggcatgcatacaaaccagctccccacggagtcagtcttcgcagtgccccccacaagagaagaagtggcccaaaagagcaggctctggatctaggcctggrtcccattgyggttggtggtagaactgtgattgacttcaaggcagacgtggttatacactgagcttaatgagcctgtaatgaggaagattcttgctaggttattctcagcttttcctgttatagaaattataatttcagtaaacacacagagaagaagaagccagatatagaaagtcattacaaataagagaactgacattaaatttamaagaagtggaattaaagttaaaggtcttctgctttcaaacactttcttaaaagccatgttctctgagaacacatgacctgctttagtaatc

SEQ ID NO: 56463 - DNA, 599 bp, Chicken  19866894311129_2
  misc_feature (1)..(101): n is any nucleotide
nnnnnnnnnnnnnnnnnnnnnnnnnnnnnnnnnnnnnnnnnnnnnnnnnnnnnnnnnnnnnnnnnnnnnnnnnnnnnnnnnnnnnnnnnnnnnnnnnnnnnagttatggggtgagtacagattcagacttcctgctcaggtgagcagtacagggtcaggtgacattgatgccagctgagaatctcgcccaaggcatgcatacaaaccagctccccacggagtcagtcttcgcagtgccccccacaagagaagaagtggcccaaaagagcaggctctggatctaggcctggrtcccattgyggttggtggtagaactgtgattgacttcaaggcagacgtggttatacactgagcttaatgagcctgtaatgaggaagattcttgctaggttattctcagcttttcctgttatagaaattataatttcagtaaacacacagagaagaagaagccagatatagaaagtcattacaaataagagaactgacattaaatttamaagaagtggaattaaagttaaaggtcttctgctttcaaacactttcttaaaagccatgttctctgagaacacatgacctgctttagtaatccctgctctc

SEQ ID NO: 56464 - DNA, 600 bp, Chicken  19866894311129_3
tacaaaccagctccccacggagtcagtcttcgcagtgccccccacaagagaagaagtggcccaaaagagcaggctctggatctaggcctggrtcccattgyggttggtggtagaactgtgattgacttcaaggcagacgtggttatacactgagcttaatgagcctgtaatgaggaagattcttgctaggttattctcagcttttcctgttatagaaattataatttcagtaaacacacagagaagaagaagccagatatagaaagtcattacaaataagagaactgacattaaatttamaagaagtggaattaaagttaaaggtcttctgctttcaaacactttcttaaaagccatgttctctgagaacacatgacctgctttagtaatccctgctctcgacaagtcagcaaattcacactgcttcggttcctgactgtgttcatatcagaccaacatgaaaagtgccacaaagggcaactaaactcttgctaaatcaaactgtgctttcatttgtataagtggatgcattaggagccagtggacagtgcttgatgaatccaaaaagatctttaacatttatttttatttttacttttt

SEQ ID NO: 56465 - DNA, 600 bp, Chicken  19866894311131_1
agcaagcatactggaaagagctctcttagggaatagtgtcaacttctatgagcattagttttttttcagtgtatcaatgaaataaaaagcaagaattaaaaaagggctgagggctggggatagaaaatggaaatcaatagtgcctaaatgaacctgagtttctgctttataatttaagtcctttatgtcataaggaaaatagaatttgcatatcaagtcaggcatgtggaagagttaaaattgcactcgcatgctgggatgcaatgaggcgcttcttttcagtgttacaagatcataatmttccaaacagcttgagataaaaggaagtggttgaaatctccctttccccttctctgatacaaaattggccatgttgaattaattatgaagaaactaggaatgtattcattttaatagattcctgatgtgtggactcttttgtccctcttcctctgttgcttgaaaacatacaacagcaataccctcctgctcctcacttcctccctccccctttcctctgctgacatactatgttaaatatgctaacatttttttcagtagttgaaatcagagttttgggaacggtaagaatcacaccct

SEQ ID NO: 56466 - DNA, 600 bp, Chicken  19866894311137_1
aacagagagatcagctacttgactacttgaatctctgtaattggaaactgtacctctgtatgacaccctctgtagtatacttgatatatttaattgtctagaagaagctttgggagaattgggaggttggaaccacatcacacattatctcgattgacattttgattcaccttagatttactaaatggttctcagaaataaaaattctcacttttttactttaatatccataagccatacagaaaataatatgaagcaattctattctaagtgacattcagctgaatatcttgattcacytgggatacagcaatttatattataaagatcaartattctgttggtagagaggaacttcaatgacagtgaaaatgaatgcaaactcatttccttggaaaccagcatttgttagaaccgggcgtatgcttaatattttataattttagttaagaaataatttttagaatcatagggagcatagaagattatgggattttaaagctatttacttttcccgaaaaaaaatcattaagactgaaactccagagaagcagtctgtaattctaatttccatctatgatcctggaattgagtgaaaaa

SEQ ID NO: 56467 - DNA, 600 bp, Chicken  19866894311137_2
tctgtaattggaaactgtacctctgtatgacaccctctgtagtatacttgatatatttaattgtctagaagaagctttgggagaattgggaggttggaaccacatcacacattatctcgattgacattttgattcaccttagatttactaaatggttctcagaaataaaaattctcacttttttactttaatatccataagccatacagaaaataatatgaagcaattctattctaagtgacattcagctgaatatcttgattcacytgggatacagcaatttatattataaagatcaartattctgttggtagagaggaacttcaatgacagtgaaaatgaatgcaaactcatttccttggaaaccagcatttgttagaaccgggcgtatgcttaatattttataattttagttaagaaataatttttagaatcatagggagcatagaagattatgggattttaaagctatttacttttcccgaaaaaaaatcattaagactgaaactccagagaagcagtctgtaattctaatttccatctatgatcctggaattgagtgaaaaaaataacactgacagcatgcaagaacatgcaagt

SEQ ID NO: 56468 - DNA, 600 bp, Chicken  19866894311140_1
gttcatactcatggcaggtggtgtttgatgcaccaccagaatctaatccatgagatcagtctggcattcccataagcacaaatccccaaatctccacttcagagagaaaaattcacatcagacttcagaacaacactggacattacaggtgggtgttgaaagccttcatggctttccacattggcttccctgcagctcttcatgtcttctctctatgtagtgtgccactgagaggcatccacctgctcttctgctgcagggagcattaaatatctccattctccaggtacaggattagtygttctcaacatgggcattttccagctaacagattaagcctctcctactgggcacacagcattgggaygttgtctttgaagatttaatgaacagtttgatgtttgctgtgcactccggctcctctcctcctgcaaggaagtgcagctaagggagatggagaggaagggggggatgctgccctcctgccagccctccttctgagatggaagatagagcaacatccacaccaggttgcatgaacacccgaagacttgtgtagccactgggaactgttgcagtcactggtttatccagcagctt

SEQ ID NO: 56469 - DNA, 600 bp, Chicken  19866894311140_2
tcccataagcacaaatccccaaatctccacttcagagagaaaaattcacatcagacttcagaacaacactggacattacaggtgggtgttgaaagccttcatggctttccacattggcttccctgcagctcttcatgtcttctctctatgtagtgtgccactgagaggcatccacctgctcttctgctgcagggagcattaaatatctccattctccaggtacaggattagtygttctcaacatgggcattttccagctaacagattaagcctctcctactgggcacacagcattgggaygttgtctttgaagatttaatgaacagtttgatgtttgctgtgcactccggctcctctcctcctgcaaggaagtgcagctaagggagatggagaggaagggggggatgctgccctcctgccagccctccttctgagatggaagatagagcaacatccacaccaggttgcatgaacacccgaagacttgtgtagccactgggaactgttgcagtcactggtttatccagcagctttcatgctttgaaaaataatttcctctccctccttttggccagcacagtgatttgctgcccgatggct

SEQ ID NO: 56470 - DNA, 600 bp, Chicken  19866894311153_1
aatagaggatttgtccaaagagttgctccatggttagttttaaacctattttaatgaaaatttttattaacaatctagaagaagatataagtaacaatagttaaaacacagagcctatgactttggaagatattatgaatactaaagagggctaaggactctacagaactagaaatagtagatgaatagtccaacagaacagaaagtgagattgacctgaatggcacagtgttacccagtagtatagaataaagagaagtattattgtaggaaatcagcttggaaaacaatgcaaaatartaaaaaaaawaaaaawcctacagtctggaaatgtgtagaaccaccttgaaaactgtttacagattgcctgcaagttagaccaagacagcccatcagaaatagaagaaagaaagtaaagactttcccactgaagatttactgaatggaaaaggaatctgattcagacagtctagctgatttctagaccagccttggcaaagggaggaatgttttcaaggagatgagccatgcgtgtggtgccctgacaatcccagagcagcaggtgttccttaggaacaactagcagcttatgctacttgg

SEQ ID NO: 56471 - DNA, 600 bp, Chicken  19866894311153_2
ttgtccaaagagttgctccatggttagttttaaacctattttaatgaaaatttttattaacaatctagaagaagatataagtaacaatagttaaaacacagagcctatgactttggaagatattatgaatactaaagagggctaaggactctacagaactagaaatagtagatgaatagtccaacagaacagaaagtgagattgacctgaatggcacagtgttacccagtagtatagaataaagagaagtattattgtaggaaatcagcttggaaaacaatgcaaaatartaaaaaaaawaaaaawcctacagtctggaaatgtgtagaaccaccttgaaaactgtttacagattgcctgcaagttagaccaagacagcccatcagaaatagaagaaagaaagtaaagactttcccactgaagatttactgaatggaaaaggaatctgattcagacagtctagctgatttctagaccagccttggcaaagggaggaatgttttcaaggagatgagccatgcgtgtggtgccctgacaatcccagagcagcaggtgttccttaggaacaactagcagcttatgctacttggctgttgtaaa

SEQ ID NO: 56472 - DNA, 600 bp, Chicken  19866894311153_3
aaagagttgctccatggttagttttaaacctattttaatgaaaatttttattaacaatctagaagaagatataagtaacaatagttaaaacacagagcctatgactttggaagatattatgaatactaaagagggctaaggactctacagaactagaaatagtagatgaatagtccaacagaacagaaagtgagattgacctgaatggcacagtgttacccagtagtatagaataaagagaagtattattgtaggaaatcagcttggaaaacaatgcaaaatartaaaaaaaawaaaaawcctacagtctggaaatgtgtagaaccaccttgaaaactgtttacagattgcctgcaagttagaccaagacagcccatcagaaatagaagaaagaaagtaaagactttcccactgaagatttactgaatggaaaaggaatctgattcagacagtctagctgatttctagaccagccttggcaaagggaggaatgttttcaaggagatgagccatgcgtgtggtgccctgacaatcccagagcagcaggtgttccttaggaacaactagcagcttatgctacttggctgttgtaaactctac

SEQ ID NO: 56473 - DNA, 600 bp, Chicken  19866894311160_1
ttattaagacagaaaaggaagggaaaaataacagtaattagaattatataaatatatatatttacaaaacaagtgatgcacaaaacagtcactatgaagaaaatcagctctgtcccaatgaaacgaggacaatgcaaaaaagcaacgggaacaaaaccttctggagtacaattacggtgttaatatcttttatttccaccaacacacacatgtgaataattctgtactatcaagttcaaattttatatttgggagatctctgcataatcaaattacccgtttcaaatataagtaagaagyatttcaccttaagaaacatgaagaatgctttggaagaccatgtgaaaggtcaaagatatctcacatttcttactattgggcaagcaagaaaattaaaagagaaatcataacgcacagctgtactttcttttcagtgttaatttgaatcctgaaataattacactgagtctcacagagaatattatcatttgggtcagtagctatattcctacttttcattctgaatgtcacagtgtttataaactgctcttcttcacatgaaaatgtggtgtgatgcactgatatggaaataaataagga

SEQ ID NO: 56474 - DNA, 600 bp, Chicken  19866894311175_1
gagggaagcagtttattcagaggaagggttgctttgctctcttcttgggctccctttctgggaggcagatgcacaaatcccacagcgtgggtgtgcagggccagctgccacctgtgtccctgtgctggaccccatgcacccaccggggacatggctggggaacctgggctctgggagtgcagacaatgagaaatgagcggttactggaaagcattcttccaacgaaactgcatgcagcatgactcatctgagagcagactagcaaggcaagtcacctctcatcttaaaacacaaagcacrgcgaggttcagcccgtgtatagctatccttctcaaggagccccattactctatcagcaaggcatgctgtgctgtgctggctgtgggtcgcacaaccgtggcacgctaatcctggctgccatraggcagctgctcaacgtttgcatgtgatttatggtaacacgttgcaaacgtatatgtatgtgtgtgtatgtgaaagaataatacacgagcactgttctgaatggaatacaaatcctaattattactatagtggcagcaaatttatttcttgcatgtcacaagccatatattgtccaaa

SEQ ID NO: 56475 - DNA, 600 bp, Chicken  19866894311175_2
tgctggaccccatgcacccaccggggacatggctggggaacctgggctctgggagtgcagacaatgagaaatgagcggttactggaaagcattcttccaacgaaactgcatgcagcatgactcatctgagagcagactagcaaggcaagtcacctctcatcttaaaacacaaagcacrgcgaggttcagcccgtgtatagctatccttctcaaggagccccattactctatcagcaaggcatgctgtgctgtgctggctgtgggtcgcacaaccgtggcacgctaatcctggctgccatraggcagctgctcaacgtttgcatgtgatttatggtaacacgttgcaaacgtatatgtatgtgtgtgtatgtgaaagaataatacacgagcactgttctgaatggaatacaaatcctaattattactatagtggcagcaaatttatttcttgcatgtcacaagccatatattgtccaaactccttcatactgtacatgaataatagtaataaaacaacaacaaacactattgatcttcaaaaccaactgcatcatttttctaatatgaaaagatcagagagagatttctgtacaatgtttc

SEQ ID NO: 56476 - DNA, 600 bp, Chicken  19866894311175_3
ccaaatgggaaagtccagttctgctctaaaaacgtgagaaattccctgtgaagttgcatgggcctatggctgtgtttggaccaggcatccaactaccatgaatgcatagggattggtgagtatcagctgggtatttccatatcctggtggtgctggttcactgctggtggtgtcgccattgggctgactgtgatgggaaccatcctccgcaaaactggtgggtttgacttaaaatgaggcagcagtgcctttgatgagatggctctatgtttttacagcacgtttgtgtttttgcaaccraacctcccagcctggggattttgctgagttgctctgttttccacttcccccttttgtggtgcgttgctgtgggagctgggctgaagctggcctggcaccaggcagaacatcagcccacgttcctgcagtgcacggggtgagcaacatctggctctgtgctttacctagcagatccctagtgcttgttcctagcctgcactcaggagcgctgtttcagaggtgtttgcaaaccttccctggtgctttgggtgcgtggaatgtgcacctcaccctcactgcagaggctgcaacccaggctgg

SEQ ID NO: 56477 - DNA, 599 bp, Chicken  19866894311176_1
  misc_feature (1)..(7): n is any nucleotide
nnnnnnntaatagagatgattcacgcaccgatacaactaaattttacccatatgttttgcacaacactatgtgaactgcattttaatgttggtttcgttctcccccaaaatgatagttgtgtttatgaatttttcagaagagtcttatttataaatgtttctcaaatacagggaggtaaacaagcacatttatttggatcaatattaaaactacagaattctcatccataatttagcttcatttcaactgttcatgatcttgccatagtttctagataaaatggtagccatggcaaccaygtatcatatatcagatagaaatcagtattgaatccatccaccgtacacaaaaacgttagtgctgagctgagaaaaataataaaaaattaaaaaaataataaaaataacagctgaggagtatttgtgtattgaacttgttgtgttaagaagctgaattcatccacattagcttgggagattatgttttatgtatgaggaactgttgcaacacattactctgatgatcaagattcagacctgagaacaactctctacaacaaaggataacagctgagttgcacagtttcctttaattaaag

SEQ ID NO: 56478 - DNA, 600 bp, Chicken  19866894311184_1
caagcagagccagcttactttatggtagggaagttcttttaaacagttatttttggaggtaaattaatggtcggaatgttttctttcggaacatttttatttatagagtttctttgaggggcagtcagcttcttgggatgtcgctaagaaggatcaaaacagagcaaagaatcgctatggaaacattatagcatgtgagtatcagtgtgcatggttttagtgacagacatattcctgtactacttgttccatgttctctcccgcttaaaaagtccctggtggagtacctgctaaatatcycaatcagagaaggatggcagtgcctttttggggacttttttttgtccttcacagttcaacttactttctctttgcctctctcttgtacaagctgtggtaagcatataatagtgacaagctaacactcactggggtgttaattctgcagtagttttctacagtcataattgatttcaggtaatactaacagcttcaaaacttatctggtttatgttatttgttgttggtacgtctgaattgcagttgtttaaagctgattattaaaaataacgtgactaaaatcagagagttctgtctctt

SEQ ID NO: 56479 - DNA, 599 bp, Chicken  19866894311193_1
  misc_feature (1)..(82): n is any nucleotide
nnnnnnnnnnnnnnnnnnnnnnnnnnnnnnnnnnnnnnnnnnnnnnnnnnnnnnnnnnnnnnnnnnnnnnnnnnnnnnnnnngccattgccccgcgagagctcggttagcgcaggagcagcataagggagggctcagagctgcagaatttggcttactgtgctaatgccctctgtgctcatccccacagcacagcgatgctcagcacagcccctttgcactgcccccatatcccccgccctgcaggacagcacagggcctcagcacctctgtgtcatgatagggatccgtaggagtgcayatgcactttgggtattgtcaataatatttgtctttttcaggtgcactggctctattatgctaattgcttccctctctacatgttattttaaggtgagcattaattgatttctaactgtaatcacaattatgatgtgttatactgattaatggagggcttgattaacagataagaaggtgctactgttttcatttttggaagaagagatgaaatatgtttttactcgatggctgaagtgctaatttcagtggagaaagcggtgctaatgcaaggcaattaatcatctattttggtaattt

SEQ ID NO: 56480 - DNA, 480 bp, Chicken  19866894311193_2
tttcatttttggaagaagagatgaaatatgtttttactcgatggctgaagtgctaatttcagtggagaaagcggtgctaatgcaaggcaattaatcatctattttggtaatttacagtaataaattaattctcatggcacagagtgtgcttctatagaacaaactcaaggctgtaggatatgcctccctgtagaactcaaagcaggcatgtccaactccaacaccacagaatgtatggagctgcagtcagatcagtaactcaacatcaggtattcagttcaaaatctgatcatgtctctstaccaaacttctacaagccctctcttagcacagagatatccctctcttcacaatcacatcttatccacatcatcactttttggcagcacagacatttgtgaacaaccacattcaaggatgaagctcaggaagagtcacatttcatccaacatctctgaccaacaccacgagacctcactg

SEQ ID NO: 56481 - DNA, 599 bp, Chicken  19866894311200_1
  misc_feature (1)..(189): n is any nucleotide
nnnnnnnnnnnnnnnnnnnnnnnnnnnnnnnnnnnnnnnnnnnnnnnnnnnnnnnnnnnnnnnnnnnnnnnnnnnnnnnnnnnnnnnnnnnnnnnnnnnnnnnnnnnnnnnnnnnnnnnnnnnnnnnnnnnnnnnnnnnnnnnnnnnnnnnnnnnnnnnnnnnnnnnnnnnnnnnnnnnnnnnnnnnnntatttgtagcctcctattcacaacagcatagaaaggagggactgcgcagttttcactctgctttctatactctccaatatctaagtaacctttagtttgctttcctttgayggtacagtctcaaagtttgtggttcccttacgtgggagagctcagtgtgtaactctcaggtattgcacactgttgttggggccggcagtatggagctctgccctctgggagagaacacacatcagccctttgaatgccacattcttcctagatgcagtgagggcttcatacaataatgtacaaattttaaacaaagaattgcaggctttatgaattgcggagaggctgcgttttcgtatgtatgaccgtgcgtgcagtctcaccgcaatatatgtctgatttattctagttgattacat

SEQ ID NO: 56482 - DNA, 600 bp, Chicken  19866894311210_1
gtttcaatacaagaaggatttttttttcttttgcctttctctgagctctctactcaggaactctaagtgaagttactcctacagcacagcacgtagcatttctttacctgcagtgatctccgtaagcacagcatccacgctgataatacctgcacaccatggcagactgaccagtggacaggtcatgagagtagcgacagttgtctccttccttgcagactccatgcatgaaatacctgtaacacagaggattactgtgaattaagaagtgctgaagctgtaaacgcagtatttggaagktaagttgtttttataaatcaaggtatcaatcaaggctgaattaaggacatcgttaatggctcatgggaccatgccccactataaacatacaagtgaaagagcctgaaaaaggacaaagccttttctactccaatgaactgcaaaaaacactgaatagtgtttttgtcccattcttatagatgttaacctagaaaatgtaagcttctttaaatacatggcattataactactcagacttcgtatgagagccataactgaatgtattaaagaacacttaaccaacagagaagtattaaccaa

SEQ ID NO: 56483 - DNA, 600 bp, Chicken  19866894311220_1
gccattttattaaagctgtatgagtattttgctgcaaaaggtaagagaaacatggcccagaccgatctttaaggatttaacgggattttcatttctaatatcacactgaaggagagctcatttttctgtttgtggctcgggatgcactaactaaacatgtccctaggagaaaaaataatatcttcactacaaatcgtgcgtcacggctcaattggaaagagtaatagtgagggagcagtgccatctgcaggatgtattcctgcattccttgaacgtgttaccgtggtcaacccctccatrcactgtcatgcataactaaaatagtgcctctaaccactctgtagtatatatcggagtgcctgttccagatgctttgaacatatttcacatttgccctttttcttctgtgtgtaatcagtccctagcatgcctacaagctcagggtttgtctcaagaaggaacagcgttttattttgcatttctggatcggagtctctgaagataacacagtgctctgtgagcaacagtctcccgtggtgaaaggaaaacaattatttccaaaacaaagataaattaaaagaaaagaaaacaaaacaaaac

SEQ ID NO: 56484 - DNA, 600 bp, Chicken  19866894311231_1
aagctgtgctctttttaggttgtggacgttaatcaaactgctctttatttttagattttcttcatacgactctatgccacaaactctattaatgttatgtcttggaacatcaaagttattcacagatcaatcaaattgacagaaaacgttcctcttgctttgggagaactgaactcagctggctttttaatgggagaatctgacagtggaaaaaaataaaaataaaaataaatctaaaaaataccccacacactataaatcaatggatcagatatactgaccgtgaatgaaatttctccraggaggtggagaaggagctgagcagcagtttttccccacaagtgcctctgtgcataggtttcccccaaggaggattaaaagaaactgaacataaaaaataaaattacttcaaatcctgtcttttctgtttactgtactggaccctgctgaaaatagccccagtccctcactcacactgggaatgagacctgaagccctgcagtgaagtttcagcttctgtcactatcagtcagctgctgcagtaccactggaggtgtgagcagggagatgtgcagggaggtgtgagcagctcagaaaaag

SEQ ID NO: 56485 - DNA, 600 bp, Chicken  19866894311232_1
tgcgacatttatttggcaatcttttaagttcactgtaccacttcatcagctgccacttcctttgcccctgcagtccatggcagtacactgaacgtgtgctacacggtgcgtgaggcacgggaccagctggcagagttgctgggggcaggtgcatgtcaggctgcaggagcaggacacagatgctgtgggtgatgtgaggctcttcagagccggtcagcgttctgtgcacgctgtttggcaggtgcctgacctggggctctgtactcacaagaggcggtgcagaagtaagggcaggataarcaggagctggggcttgccgggtactgcacatccctgggcactgtgagatgggaagtcccgctgcatctggacacttgaactcggtgacttctcatcagctcctgctcttygttcctcagctcctcagtcacgaacacaggtaggggcctgctctctcagaggggaagtgagagaacagattagttagtatttgtgaagcaggcagtttctatagtgataagcagcacggaaaaactcatgaggaaagtaattgtcttcaacgcggatagtatgcagtcaataaagcatggagacgcactc

SEQ ID NO: 56486 - DNA, 600 bp, Chicken  19866894311232_2
tgaggcacgggaccagctggcagagttgctgggggcaggtgcatgtcaggctgcaggagcaggacacagatgctgtgggtgatgtgaggctcttcagagccggtcagcgttctgtgcacgctgtttggcaggtgcctgacctggggctctgtactcacaagaggcggtgcagaagtaagggcaggataarcaggagctggggcttgccgggtactgcacatccctgggcactgtgagatgggaagtcccgctgcatctggacacttgaactcggtgacttctcatcagctcctgctcttygttcctcagctcctcagtcacgaacacaggtaggggcctgctctctcagaggggaagtgagagaacagattagttagtatttgtgaagcaggcagtttctatagtgataagcagcacggaaaaactcatgaggaaagtaattgtcttcaacgcggatagtatgcagtcaataaagcatggagacgcactctgaacaacggagcagaaaataccaagcagctgctcattaagtgcacaccatccagctagagacctgggtgaggcaaggtcctgtggagtggtgtgtgattatcaaattaa

SEQ ID NO: 56487 - DNA, 600 bp, Chicken  19866894311232_3
ctctgaacaacggagcagaaaataccaagcagctgctcattaagtgcacaccatccagctagagacctgggtgaggcaaggtcctgtggagtggtgtgtgattatcaaattaacagtggtcttttaacacgtgcatacaggcagccttaaccctggcattgccagttttggaaggcctgagtgaaatttcctgggggaggatggagagattgtagcatataattatccagactataaaaatggaaattccatgttgtggcatcaaatgaacgcacatcatctgggagactaaggtccacrgtgctgatctccgtcayttggaccaaggagaatctgactgcagtatcagccttgaaatgtggagcagtgaaggtgctcgggaatcttggctttcccgtgcaggttctgaggaaggtgatggcttacagaaatagtctcctgtcctgcttctaccctctgccccttctttccaaactgtccttgctttctgtcttcctgctcctcatctctttgaccagaatccccactgaccttacctgtgctcctgtggccaccttctccccatgatgtggctaatttccagtttcccacccagggcac

SEQ ID NO: 56488 - DNA, 600 bp, Chicken  19866894311232_4
gaaaataccaagcagctgctcattaagtgcacaccatccagctagagacctgggtgaggcaaggtcctgtggagtggtgtgtgattatcaaattaacagtggtcttttaacacgtgcatacaggcagccttaaccctggcattgccagttttggaaggcctgagtgaaatttcctgggggaggatggagagattgtagcatataattatccagactataaaaatggaaattccatgttgtggcatcaaatgaacgcacatcatctgggagactaaggtccacrgtgctgatctccgtcayttggaccaaggagaatctgactgcagtatcagccttgaaatgtggagcagtgaaggtgctcgggaatcttggctttcccgtgcaggttctgaggaaggtgatggcttacagaaatagtctcctgtcctgcttctaccctctgccccttctttccaaactgtccttgctttctgtcttcctgctcctcatctctttgaccagaatccccactgaccttacctgtgctcctgtggccaccttctccccatgatgtggctaatttccagtttcccacccagggcaccttgtataatttcatta

SEQ ID NO: 56489 - DNA, 600 bp, Chicken  19866894311249_1
cctctttacatggtaagaggatgctgcctgccagtgttcatgctgctcctccttgctgccttacccactgaagcaaactgcacagccccagtgctggctctgggtgctgtactggtgagctgttgtcacagagggactcgctgcactggagtcacagatgttggcaaactttcagggaaacagctgaatgcagaatctctcacaagcagatatcagaagttaaataaagcttccctctgcaggagaatgaagaattagagaagtgacagttgtgtgtttctccattattcctgggcagaygcaccaggtgtgtcagtgctaggatgctgaaaagtaatacccagtaatgccttcctatggggacaggcagtcagtatgaacccaaggagctcatctggcttgggctgaaggctctgtttagccaatataggcaggtagtggaggtgtgaaattgaaagagtcagggttgcttcctaccctattctttgcagacaggtttcttgtacttactgaaaggccaagagtcccaagggacagtggtatcacctttaatactttctttctaatgagatttttccaggttcgtcccaaagccacatc

SEQ ID NO: 56490 - DNA, 600 bp, Chicken  19866894311254_1
ggttcaccagcatcgtgcctgtgctccacccaggggagcaaagctttgcagctcctctttccccccccacaggacctgggcatcaccaaagttggccacatgaagagaatcctgcaagccattaaggagctcagcaacccaccctaggctgccaggagctggggggcccggggtccctgctgccccctgcgtgtgtgtgtgaagcccttcccccccccccccctccccgcttgccttgctttgtctgtttgtcccccagcatccctggagctgctgcttctccctgaggcaccaacggcrcagggtcactacaggagccagggagctgggctgcagtatggggccaaagcaaaaagatctcccccctttccctatgtcggtatttaagctgtgtaaatatttggagaaaagatatttattgctgctgctggtgtcgagtcactgactggggacagaaaggggatgggacccggacccttccagccccttttccatccctgcatcccctccatgagcagcacaacacaaccacattaagatatacacaatattttattgacagctctacatcacttttttttccccccccattcagtaaaa

SEQ ID NO: 56491 - DNA, 546 bp, Chicken  19866894311254_2
cctgaggcaccaacggcrcagggtcactacaggagccagggagctgggctgcagtatggggccaaagcaaaaagatctcccccctttccctatgtcggtatttaagctgtgtaaatatttggagaaaagatatttattgctgctgctggtgtcgagtcactgactggggacagaaaggggatgggacccggacccttccagccccttttccatccctgcatcccctccatgagcagcacaacacaaccacattaagatatacacaatattttattgacagctctacatcacttttttttrcccccccattcagtaaaaacagtattttggtttgtttttttcctcccccccccttttatgtacacagtgctcccccccggctatttacaggctataaacagaagcagggctagcttttcaacttctcctccagcttcatcatgtccatgggggttgttttggcgacctcaaagaagaccctgcaaggaggtgtgtgcagggttacagagctcagcagcagccctggcacccccaggagagccccca

SEQ ID NO: 56492 - DNA, 501 bp, Chicken  19866894311254_3
gggctgcagtatggggccaaagcaaaaagatctcccccctttccctatgtcggtatttaagctgtgtaaatatttggagaaaagatatttattgctgctgctggtgtcgagtcactgactggggacagaaaggggatgggacccggacccttccagccccttttccatccctgcatcccctccatgagcagcacaacacaaccacattaagatatacacaatattttattgacagctctacatcacttttttttccccccccattcagtaaaaacagtattttggtttgtttttttcctrccccccccttttatgtacacagtgctcccccccggctatttacaggctataaacagaagcagggctagcttttcaacttctcctccagcttcatcatgtccatgggggttgttttggcgacctcaaagaagaccctgcaaggaggtgtgtgcagggttacagagctcagcagcagccctggcacccccaggagagccccca

SEQ ID NO: 56493 - DNA, 600 bp, Chicken  19866894311257_1
aatgttcagggaatggatgcaggttctgctcagctaaccggtcatgggagcaggtcagcagctcacctggcagatttttaggatatcagcagagcaactgaaagctgaaaacttatttcaaaatgaaactggatgtcctattgcatttatagggctaatttatcactagtttcactaatcccaaatcctttgatgtctctttgttcatcactgaaggacttcttttagattttttaagtttacgacagtttaattagtagctttgagtgaaatggcaacagctaaacacctggaaaaccrgtttcttcaagatgaatattcaaaagttgaaacagatgaaaaaagaacatttctgaaacatctggttgtgtgcgctggcaataagctttactccagttcttgaaatgcaagaatgatatttccaagtgggagctgatacaaataattatgtttgctcctttctatgaagtactcattcctaaccagaagatattgtccacatacacaaactaccaatgaggatcctgccagcacaacaaagaatcagaacactcatttaaaggatgaaccaagcaaccttttcacacaagtctcatatgg

SEQ ID NO: 56494 - DNA, 599 bp, Chicken  19866894311268_1
  misc_feature (1)..(6): n is any nucleotide
nnnnnnattactttttaatgcacagagtgggacttttgagaggtatgaagtgacaaaacgtggctttgttttgcagctggattccctgcatgtatgtgcctctggtgtctgactaggctgcagctccatcaacatatccaacagagcccggggcaaagctgcagaaaaacacccagcacattcaatttacaaacagaaataaacaccttttcagcaggttctacataatcaccaagcaaaaccagaggaggaaggaaaaaaaaaaaagcagaacacaacattttttatcttgctggcgtrtggcggtgaccctttattttctcaaggaaataatgctattattgagagatgtctagcacttgggatctgaagcagcatcgcaatctccttgcgtgtcactgctggctccggtgtcccacctcaacagagctgtgcccacgcagggctgtgtccctggtccctgtgggtggcatatccctgtccccatccccaggwctgaagccacctctccatgcccgaaaccacagccacaccacacagcttcagctgagcgtgtgaaaatgaaccagagatgaaaacgtctgaagcaataaattaac

SEQ ID NO: 56495 - DNA, 531 bp, Chicken  19866894311268_2
gaaataaacaccttttcagcaggttctacataatcaccaagcaaaaccagaggaggaaggaaaaaaaaaaaagcagaacacaacattttttatcttgctggcgtrtggcggtgaccctttattttctcaaggaaataatgctattattgagagatgtctagcacttgggatctgaagcagcatcgcaatctccttgcgtgtcactgctggctccggtgtcccacctcaacagagctgtgcccacgcagggctgtgtccctggtccctgtgggtggcatatccctgtccccatccccaggwctgaagccacctctccatgcccgaaaccacagccacaccacacagcttcagctgagcgtgtgaaaatgaaccagagatgaaaacgtctgaagcaataaattaacacacacagcaggggggtgagagcttaatcctccctcgtgcaaacagcccctgacacccatttccgcgtagaggcggtgagacatggtggcagcaccagagtgtgattcctcctcctaacatgatcta

SEQ ID NO: 56496 - DNA, 577 bp, Chicken  19866894311295_1
aaccccgaatcagctgagagctcactcctcctgaacacaaaggtttgaactccatcatccagcacagagcagcgagccgggtccttgccctgcagctccgcagggcagcaagaagctaattaggcactgatcattatttcacatttggtcaccttgaattctgtgaccgggatgaggaacatctggggaacagccgtgtgcaggaggggatgcagtgtgcaggaggggatgcagtgtgctccagacctgcccccctgtgcagctccatggggccggacccagcacggtgccccacactgygccccatcagctcagctccgaatgggctcagtgcaggaacagctgtgagcgctgctgccccacggtgcgctcagcccaccccagcctgactcaggataattatgtttaatatcacttttatggggcgatatattgttttaatttcatagctatgcaacctgtgataggcagtgcttcccgctcggctcctggggatacggcagctcccggaggcggcatttattaaaatcttctttgtccgtatttcatgtttattgctgccatctttaattaagga

SEQ ID NO: 56497 - DNA, 600 bp, Chicken  19866894311300_1
tgagttcctggccacaatactgcagctagtgatgctaggaacactaaatacccttaatgatggtgatgatgatgacctgtggccctttgctgcattacagttttaatttccctttagagtaaacaaaacaaaaaacaacaacaaacacctaactcctctgagggtaacttaaattgctttctgtttctcactgaaggggatgcttttacccagcatgttgtccagtatgtgaaatggtgaatttgtggctctgataaggatcagatctaaaatagagtttagataagaacggagagtaamgtttgtaaaattttaaacttggtactcccatctctcacttcaaataactattttaagaatgtaaatttagttgcagtaagagttgtgactgttaatccagctgttgtggcacttcagaatggatagaattacatagcacgggtgaggctgcaccctcgagtattgtgttcagttttgggcccctcactgcaagggagacatcaaggccctggagcatgtctggagatgggcaatgaagctgtgaggagactggagcataggccttatgaggagtggctgagggagctgggagtgtttagt

SEQ ID NO: 56498 - DNA, 600 bp, Chicken  19866894311304_1
gctttcatcgtgctgttgcatctcctcagaaataaatggggaataaaactgaacatgtgcaggccatgttgatcactgacagtatgagctaatgtttctcaaattaagctacatggtatttctgtcactgttcctttcctattttttgtttagactgtggctttgctgaaagtcattgtacccaatgcctttgcatttttgggatgcagttctttttttcttcccttccttctgcagcgcgcagcaagagaagtaatgtttgtgatccatccagctcaggcctcaagcctggcctagcaytgtgaagcatagtgggacccaacattgtgacactgcctgtgtggcaggttagtcccttgctggctycatagacctggcctcagttcccagtcggtgtgggcttggttgtcacccagcagcacttgggctggggaaaagagcttttggttgttgttgcagcaaattaaatctcactcatcctcttgaagaacatcatgggcccttttctttgcacaggaaaagataggctgagcagtggctaacctgatttgcttcagagagcacttggatcggatcaggggtttaggttttggaagggag

SEQ ID NO: 56499 - DNA, 600 bp, Chicken  19866894311304_2
tgttgatcactgacagtatgagctaatgtttctcaaattaagctacatggtatttctgtcactgttcctttcctattttttgtttagactgtggctttgctgaaagtcattgtacccaatgcctttgcatttttgggatgcagttctttttttcttcccttccttctgcagcgcgcagcaagagaagtaatgtttgtgatccatccagctcaggcctcaagcctggcctagcaytgtgaagcatagtgggacccaacattgtgacactgcctgtgtggcaggttagtcccttgctggctycatagacctggcctcagttcccagtcggtgtgggcttggttgtcacccagcagcacttgggctggggaaaagagcttttggttgttgttgcagcaaattaaatctcactcatcctcttgaagaacatcatgggcccttttctttgcacaggaaaagataggctgagcagtggctaacctgatttgcttcagagagcacttggatcggatcaggggtttaggttttggaagggagggctgcatcttgagagagacaataggaggcacttgtcactacccttccacctggtaaacccatgct

SEQ ID NO: 56500 - DNA, 600 bp, Chicken  19866894311305_1
gctgtagggagcctgctttgcaggggggttgggctcgatgatctctggaggtcctttccagcctctacaattctgtgattcatctacctggacttgtgcaaagtgcttgacgctgtcccacatgacatcctggtcggcacatgggagaaaaatggatctgatggatggcccactcgctggataaggaattggctggatggttgcactcagagagctgcagtcaaaggctcaacaacccaaatggagatgggtagcaagtggcgtttctcagattttgccatatctgaattgagtttttaygttataaggactgcatgaatgttaatatgcggtacacctaaacttctactgaacaatgaaacaaaagcagagatatccacaggacagaaaaaaatccgaacgtttctctttttttctttctttaattgcaatgagcaaacctgatgttgtaatacagtcttccaatgaaagaccaacaggtgtaaagaaagcacagatgaagttcttccaaaagaaaacagcaaaaccacctgaaacaactcatcgaaaagaaacaaaacaagaagtgccagccttgacccctctctgagcctaaattag

SEQ ID NO: 56501 - DNA, 600 bp, Chicken  19866894311305_2
gaaacaaaagcagagatatccacaggacagaaaaaaatccgaacgtttctctttttttctttctttaattgcaatgagcaaacctgatgttgtaatacagtcttccaatgaaagaccaacaggtgtaaagaaagcacagatgaagttcttccaaaagaaaacagcaaaaccacctgaaacaactcatcgaaaagaaacaaaacaagaagtgccagccttgacccctctctgagcctaaattagaggccactttacagaaaggtggatccacagtaccagagggcccttttaaacaggacrtaactgcatgcatctgggttgggatgattttaaactgagagaaatcagagtgctgcataaaatttaactttccagatagttcccagacttgattwagaagtgtcttgagaagggtaactctttactgtttctgagactacaatgctttaagcgctcagagggggaaagaacaaacaacccttttctaacttattcttaaataatacacctactttacaacatatgggtgcattctctgttgttcagtactggaattgccaagaatgacacaactaagtgcacaaactttattcagcttcc

SEQ ID NO: 56502 - DNA, 600 bp, Chicken  19866894311305_3
tacagtcttccaatgaaagaccaacaggtgtaaagaaagcacagatgaagttcttccaaaagaaaacagcaaaaccacctgaaacaactcatcgaaaagaaacaaaacaagaagtgccagccttgacccctctctgagcctaaattagaggccactttacagaaaggtggatccacagtaccagagggcccttttaaacaggacrtaactgcatgcatctgggttgggatgattttaaactgagagaaatcagagtgctgcataaaatttaactttccagatagttcccagacttgattwagaagtgtcttgagaagggtaactctttactgtttctgagactacaatgctttaagcgctcagagggggaaagaacaaacaacccttttctaacttattcttaaataatacacctactttacaacatatgggtgcattctctgttgttcagtactggaattgccaagaatgacacaactaagtgcacaaactttattcagcttccacaaaaacatttactaatgtaacagctatgtatgctatcataacagtggtacaggactggaactttcctaattctgttacccttcaaaacaaaca

SEQ ID NO: 56503 - DNA, 600 bp, Chicken  19866894311307_1
cctaaccagtgaaaaatgttaacagtatttacattttgtgcaataccattttaaggaatgaaaattgccttctttgaatttatattatctggcctacaccgacttggcatgaagaggacaaacccccccggagactgctggctacacctcgctctacagcagaagcctttacaagtcggatttggctccaggtttaaaatgtcccttcatcagggagaatgtttagaaaggtgggaagtgagggttaccacacagctgctctgccatctgaaagatgtctttgtgctgtgataaaacttstacaggtagaagcttttccctgcctgagcctgaaatgtctgtgctggatggctttgggttcacctgggcatgggcatggactggaatatgggcatggggattgttgcctttcgcaggcaaccgtgatgttcgttgcttaggggagcctgcggcttggccaaataccgaggtgacaccaatatgatgagcggtaaaatggcctctattcactactaaaacacagcttatattacatttttacctacaaaaccgtgctgtcatgtcccactctgattggttcataccagacaacaccgtgcc

SEQ ID NO: 56504 - DNA, 600 bp, Chicken  19866894311313_1
cttaaatagttataaagctctactcacctatagcacacattttcagtgcaaggattatgcactttgactatgacaaatacatgttgaaagtgggaacgaatattttttggagtaaaaggaagtgctcctggctcttggaagacaatggtaactatatcatttcctatatgccttttccttagcagctagacaagaaacatgcattgaaaaattagttataataaattaaatcacaatttcttcattttagcaaacaaaatataagaaaatgaatgatgcctttttcttttcccagaaaawaaaactttcaaktaatcatattttggatagctggaaataaaggatatcgaactgaactgtaaaaagacaggaaaaacaccacaaccggactaagttcacaaaaatactgagtttttccacatccctatactagttctgcatagtttcagctcacttctctcttattctacaagaaaaaaaaaaatcttactttactgcatcagaatcttaattaaaatcagttccccttttataacacaatatctgcctttatacaaaaagcatcacatttgattgtatttctcaatacaattcctcttc

SEQ ID NO: 56505 - DNA, 600 bp, Chicken  19866894311313_2
taaagctctactcacctatagcacacattttcagtgcaaggattatgcactttgactatgacaaatacatgttgaaagtgggaacgaatattttttggagtaaaaggaagtgctcctggctcttggaagacaatggtaactatatcatttcctatatgccttttccttagcagctagacaagaaacatgcattgaaaaattagttataataaattaaatcacaatttcttcattttagcaaacaaaatataagaaaatgaatgatgcctttttcttttcccagaaaawaaaactttcaaktaatcatattttggatagctggaaataaaggatatcgaactgaactgtaaaaagacaggaaaaacaccacaaccggactaagttcacaaaaatactgagtttttccacatccctatactagttctgcatagtttcagctcacttctctcttattctacaagaaaaaaaaaaatcttactttactgcatcagaatcttaattaaaatcagttccccttttataacacaatatctgcctttatacaaaaagcatcacatttgattgtatttctcaatacaattcctcttccatattgcattt

SEQ ID NO: 56506 - DNA, 600 bp, Chicken  19866894311313_3
ttccttagcagctagacaagaaacatgcattgaaaaattagttataataaattaaatcacaatttcttcattttagcaaacaaaatataagaaaatgaatgatgcctttttcttttcccagaaaawaaaactttcaaktaatcatattttggatagctggaaataaaggatatcgaactgaactgtaaaaagacaggaaaaacaccacaaccggactaagttcacaaaaatactgagtttttccacatccctatactagttctgcatagtttcagctcacttctctcttattctacaagkaaaaaaaaaatcttactttactgcatcagaatcttaattaaaatcagttccccttttataacacaatatctgcctttatacaaaaagcatcacatttgattgtatttctcaatacaattcctcttccatattgcatttttatttactatcacccttaacatgatgttcttgacttttattttaatagattatcatgagtttcatcacaaactatatagagctgcttactttaagagagccaagacagaatactcatggagaaacaatagctattagaaactgtattattttaagtaagac

SEQ ID NO: 56507 - DNA, 600 bp, Chicken  19866894311313_4; identical to SEQ ID NO: 56506

SEQ ID NO: 56508 - DNA, 600 bp, Chicken  19866894311325_1
tatttcctgctgagaaacgtgtaaatgctccctttcttcctatatcctctttaccgctggcatcttgtatttatagagtgcagacggagaacttaacatccatgttttcttcttataaagtctctcctttgatctagtcctctatccaggagattgctttgatccctcgcagttttactaattctaaatatgcaattatgcttatctagtcctggaggatctgaatgtttcgagctgtccctcatccactgctggtttaccaacataccacagctttaatcaaaaacaactcgttcttasccagagcactacaggctacggatcctcacctgcccaggaagggactgaagttagtagggatggctgcaaaaatggcacggggcagccatattccccttcccaccaatcacaaggagggtgggctgagaatgactccaggcctgcctcctgcttgtttttaaacatctccccagcaatgtcattccatgaatgaatgaaagctctggttactcaaagctgcctgatgtctcacaggggaacacagagggaagcagaagaggaggaagaaaggcacgatgccattatttcatgatgggatct

SEQ ID NO: 56509 - DNA, 600 bp, Chicken  19866894311326_1
caccaaccctgagctctgacacattctacaaactccagagagcgctgaggaatgcggcacagctcgctgccacagcccctgggccggcaggaaagggttccctgggaatgccaggggcaggaatgcagccctgctgtgcttacagtgatgggctccaagcaggacctgcaccagcctgcaaccacgcagctctaccacacgttctgttttccagcctgttcctatggtgccaaggaaccaagagacagaaagcctaaaatgaaactaagctgggccacgttcccccacacaagacggggraaccaaagcgcttcatgccttcatttggatgccagggctgtgtttgtagctgctcaacgaccccatcctcacagcagaacggcgaggatcccatccagcaagcagcggttcctgttttccaccaccaggagcccacacaagcagcagttggcccagcaccaagccaacagatcggggcaaagcaggagggattcgagtcgccccactcccccacttccacctccggctccttgcaaagctctgctctgcctgcagcaatccctgccagcttttgggatgctttcccaaagcaccacgtct

SEQ ID NO: 56510 - DNA, 599 bp, Chicken  19866894311329_1
  misc_feature (1)..(116): n is any nucleotide
nnnnnnnnnnnnnnnnnnnnnnnnnnnnnnnnnnnnnnnnnnnnnnnnnnnnnnnnnnnnnnnnnnnnnnnnnnnnnnnnnnnnnnnnnnnnnnnnnnnnnnnnnnnnnnnnnnnnttgggtgcgaggagctcctggctggtagctgaacatagacaagtgctgtctgtcagaaggcatgcacagaaatttggtgaagtggtaaggtggttgtgctttctcttaaatgggtactggtgcgatcttgtgtgaaaaacctgagcctatttctgacacttgtccctgaaaaaaaggatactgkaaaaaagagaatagcacaagaatgaccagaaaataatgacttataatgagaggctagaggaatgtgattaactccatttatcaaagaatgatttgatctgtctggtatctagataaggaacagctttttaatatacagcaagatccagaagctagaaatgaaaggtaggcrtgttttgaccagaaataaattgaagtttaactatgaaggtattagccatggaagaagtgtatctgatactgaagattatggagaaatcttcatcactagaaatgttagaatcaagattgaatgttttt

SEQ ID NO: 56511 - DNA, 600 bp, Chicken  19866894311329_2
gaaggcatgcacagaaatttggtgaagtggtaaggtggttgtgctttctcttaaatgggtactggtgcgatcttgtgtgaaaaacctgagcctatttctgacacttgtccctgaaaaaaaggatactgkaaaaaagagaatagcacaagaatgaccagaaaataatgacttataatgagaggctagaggaatgtgattaactccatttatcaaagaatgatttgatctgtctggtatctagataaggaacagctttttaatatacagcaagatccagaagctagaaatgaaaggtaggcrtgttttgaccagaaataaattgaagtttaactatgaaggtattagccatggaagaagtgtatctgatactgaagattatggagaaatcttcatcactagaaatgttagaatcaagattgaatgtttttctgctccaacctccatggaaattgatcccagtctatctcttgggatgcgtttattcatatatttattcattcactgtgcagctttgtgcaggtttaatggggacagcccagttcactgttgttgaagtcctgtctccagtggtattcaaaggcgaaaccacaactgaatttg

SEQ ID NO: 56512 - DNA, 599 bp, Chicken  19866894311330_1
  misc_feature (1)..(228): n is any nucleotide
nnnnnnnnnnnnnnnnnnnnnnnnnnnnnnnnnnnnnnnnnnnnnnnnnnnnnnnnnnnnnnnnnnnnnnnnnnnnnnnnnnnnnnnnnnnnnnnnnnnnnnnnnnnnnnnnnnnnnnnnnnnnnnnnnnnnnnnnnnnnnnnnnnnnnnnnnnnnnnnnnnnnnnnnnnnnnnnnnnnnnnnnnnnnnnnnnnnnnnnnnnnnnnnnnnnnnnnnnnnnnnnnnnnnccctcacccggccggggccgtgtgcggcggcgctctggcaccccgcagcctggaccgtctctggttgccatycccttctccyccagctacgtcccctggaactaccacgagccgcagccgggcgtgtatgacttcagcggggatcgggacgtggaagccttcctggacctggcggcggagctggggctgctggtgatcctgcgcccggggccctacatctgtgccgagtgggagatggtgagccccgaccccgcacgggggctgccacgaggcccggccggccccgtgctcgctgatgatgctctccacgttcctgcagggcgggctgcctgcctggctgctgtggaaagcagacatcatcctgcgctcct

SEQ ID NO: 56513 - DNA, 599 bp, Chicken  19866894311330_2
  misc_feature (1)..(218): n is any nucleotide
nnnnnnnnnnnnnnnnnnnnnnnnnnnnnnnnnnnnnnnnnnnnnnnnnnnnnnnnnnnnnnnnnnnnnnnnnnnnnnnnnnnnnnnnnnnnnnnnnnnnnnnnnnnnnnnnnnnnnnnnnnnnnnnnnnnnnnnnnnnnnnnnnnnnnnnnnnnnnnnnnnnnnnnnnnnnnnnnnnnnnnnnnnnnnnnnnnnnnnnnnnnnnnnnnnnnnnnnnnccctcacccggccggggccgtgtgcggcggcgctctggcaccccgcagcctggaccgtctctggttgccatycccttctccyccagctacgtcccctggaactaccacgagccgcagccgggcgtgtatgacttcagcggggatcgggacgtggaagccttcctggacctggcggcggagctggggctgctggtgatcctgcgcccggggccctacatctgtgccgagtgggagatggtgagccccgaccccgcacgggggctgccacgaggcccggccggccccgtgctcgctgatgatgctctccacgttcctgcagggcgggctgcctgcctggctgctgtggaaagcagacatcatcctgcgctcctccgaccctgg

SEQ ID NO: 56514 - DNA, 600 bp, Chicken  19866894311339_1
ccagacctccagatgatcaaatttcattggaataaatatctctagaaattatactttatttctcaaaatatttgaccagtaatatttgagcattgaaaccacttaaactgtcactcttaacagtaatgcacaatataacatgacttggttaatgaaactagacaagttgttttaatttcctaattcactagttacagcaaaaatttctatttgagatggggacagtgaaatatattttttttcaaagtattaactcaaacattggtggtaaagatgttaaagcaacagaagtgatagctrtgaaatccgtcaagaaaggtctgtgatatcaggaatatgaacattagtcagaaatcataaagatgctgtttaccccactaatggctaaggccaacttactatattaatttggaatggatttttcagatacactctgggataattttagatatttcaggcattacatcattaataatatgagaattaaacacagagtctttatagtttcttctactcatttagaacagaaagctataagctattcgttttatatctgcttgcaagaagtatgaaaagctagatgttattaaggagctgagc

SEQ ID NO: 56515 - DNA, 600 bp, Chicken  19866894311341_1
gcgatcaccctttcgtgaatagcccgtgttacattgcacagctggggctattgagctgaccttgattgctggattcacaacgcagatctgatgtaggagatgacagcgaccagcccgccgtctctgactacccaaccaccactgatttctcaggtcttagtctgtaaaggtgtgcaaaatgcatcacttggatttctgagcctgctacatccagatggagcctaatgtctccaattctgtaaaagttaagcttagattatttctctcactttctagtttaaaaaagctataatttcactygtttttatgctccacttgcatcttggagaaagcacagtcttagaaagactgtgtacatattaaagctataatgattcttcagttcagtgctactaactctccctttgcaaaatattttggctaaaagcctgcttttattctttattatttcttagaaatcacactatccattgagctgccacatgaagtatcacgcttagatttactcaggttctaaaccactcagttcatttgtgcatttgcttatgatggtgagcggtgagtggaaaaggatacactcacagaaaagaaaaagtgaat

SEQ ID NO: 56516 - DNA, 599 bp, Chicken  19866894311344_1
  misc_feature (1)..(10): n is any nucleotide
nnnnnnnnnntggaaaacaaaaaggaaaagaattgaaatctcagaacatataaagtcaagtatttttcaaagagatgaagagaagtataaataacactggctagctatgaactacagttagccctgcttacatctctgctgcaaaggcttgtaccagagggatcaatttctctcctgactgcagggactgcctaagtgactaacaagttcagagaggtctgctaggtgagagagcaatgacaggctcaatctctcatattccaattgagaattagtgtgattgaatgctgggttttaaaycttagtctccactcatgagttctgtttctctagctcaaccaagaggcaagtccttgcatctgtgtcattgtggaaactggagatgagtacatttcagacccatgaagaagttaccctacacaataacagctaagtgtaattatctgaaatggtatcctcctctgagagtcagtggtgttaacagtgcttaattgcattggtattaactaacaacatacaacagctatgacaactctaaaacattctacatggccaaaaagcacaaatgttaagcaagcagcatgaaacaaaggaaatca

SEQ ID NO: 56517 - DNA, 599 bp, Chicken  19866894311345_1
  misc_feature (1)..(72): n is any nucleotide
nnnnnnnnnnnnnnnnnnnnnnnnnnnnnnnnnnnnnnnnnnnnnnnnnnnnnnnnnnnnnnnnnnnnnnnnccagatttggtggaaggttgtagcaggcaatgcgttcccagtgcttcttattttgcccctccccctccccccccccatagcttcctggtttctggttttcctcccacgctccccgtgttaagcagttggtgtgttttgccccagaaaatggtgctggttcaatccatctccagcacgtgttgtcggcgtggatgccaggctgtcccctctcatcctcacgcacacacrgcacatgcagcaataagcatacatgtgcrggctgctgcatgcatttgtgaatatttgtgtatatttatctctacgcatgcagggaaacaaatatattaaaacacatgtgcatatgttttccttcccagatatattttgaaaaatatgagtcagcagcaggcaggaacatattatataatctctgggagtgaagaaaaccttgcagttattaggaggcaggcttgctgtgagcagcacttcttagcatcattttgttagcccacgtcagggtgtggctctctgtcaagtggccttatttc

SEQ ID NO: 56518 - DNA, 599 bp, Chicken  19866894311345_2
  misc_feature (1)..(43): n is any nucleotide
nnnnnnnnnnnnnnnnnnnnnnnnnnnnnnnnnnnnnnnnnnnccagatttggtggaaggttgtagcaggcaatgcgttcccagtgcttcttattttgcccctccccctccccccccccatagcttcctggtttctggttttcctcccacgctccccgtgttaagcagttggtgtgttttgccccagaaaatggtgctggttcaatccatctccagcacgtgttgtcggcgtggatgccaggctgtcccctctcatcctcacgcacacacrgcacatgcagcaataagcatacatgtgcrggctgctgcatgcatttgtgaatatttgtgtatatttatctctacgcatgcagggaaacaaatatattaaaacacatgtgcatatgttttccttcccagatatattttgaaaaatatgagtcagcagcaggcaggaacatattatataatctctgggagtgaagaaaaccttgcagttattaggaggcaggcttgctgtgagcagcacttcttagcatcattttgttagcccacgtcagggtgtggctctctgtcaagtggccttatttccatcggacgcagctgtgtccgattcagaa

SEQ ID NO: 56519 - DNA, 429 bp, Chicken  19866894311346_1
ctgtggtggtttggaggctgggtttgttttgaggtgtgggtcttttttcagacctcggtgttaactgtacccagctgtggtgctgggctgcccttaatgtcagttggatgtgcttttagtattatagttttcttttgaataaatatttgcatttgtagttccccaacttagggtggggggtggggggagggagaagaaaaagaaaggcttattcagagccaaggaaaaagtcactaaaaatatttttctatcccagctgccacgtttgtggaaagctgcgctgggaccgtgccctttcaygcagcgttaggggcactgggggctgcttggccgaaacgaggccttggcatccgcatgtggcatccgcccttgtatggcagtgtgccgggccgcaggcagagtgtgcaacaggagtgtaggccccatcgg

SEQ ID NO: 56520 - DNA, 600 bp, Chicken  19866894311355_1
cgccgccttaacggcagcgcggcggtatggcatgcggagcggcctcgggctgcccacacgtggccataccggggggtcctgcgggaaggaacccgtttcaagctgtgaacacagagcccagggtccccaaacacacagacggggtgtcctttccgtgtcgcggccttttgctgcttcccacaatggcacacgtgcccctcacgctgaaaacaccacgtaaggaaatggatataaaaccaggaaggttatggagtaaaggtaaagcagattctagacacaagagtgcagggatgtgtgtgyaatatgtgtgtgtgcaaacttaatgtttggacctgactccaaatccggatctgaatttcctcctggatcaggttgcttttgttctgggaccccattttaatttgtggacagctagaaagaaagaaacacatgttccctgggtggttgtagagactttgctactagcagacaagttcaggtgcccatcagaatccaaactgagtgcaccagggttccccacccccagctgatggggccatgtgcagtaacgcttaaattcagcacatcctagcatgacaatacaagacacagctctcctgg

SEQ ID NO: 56521 - DNA, 466 bp, Chicken  19866894311362_1
acagagaattctagcagaaaaatctaatttgaaatgtttccaactattataggagaagttaggctgtatttggtaaattccaatgtttcatttcttcactgtatcacatagaaaatcaaacaattattaaaaacaaacaaaaaaaacccctccatctatattcatagtctatgagaaatttttgttctcggtagtgcacagttataggttacaagaggagcagaagttatgtgctttaaatgattggaaattccttagatttcaaagctggaaccacttagaagtggctactcaaatgtrtcatgggagagataataacttcactcttttccttaaaaatacgtccataaataatatcaaaacacttttatttcattgaaatataacctgtttctgtaatgttagctttacttaggaaacaatttactggaagaattcgcaagccctattttcagtttttacacaa

SEQ ID NO: 56522 - DNA, 600 bp, Chicken  19866894311363_1
caaagaatcaaagtcctttttttttttttttctttaataagaatgaaaaaagaaaagaaaaaaaagagcaatagggttcaacacacaaaattaattgaagagagaccactactttatttattctgtttctgtggtctctggctacagaacatcctgcatttttaagctttaggtgtgtttgttctcacactccaggatactgtacctggatgtatttggtgccagaccaaatcaggccactgagacctacagctgcagccctaagtcccgtcctttcccatcttctcccagcagcctcayctcagtcactcacaattcccagtaggtttcyaggctaacaaagagatcagcgttyacatcactgctagcagaacttccatcagtgctcagccacacgtggtgactgtcacctctgagctgatggrccctaacaccttacacatgcatctcacctaagggatctgctgccctgctgaggagtccttcccagcaagtctggcagtctgggacacaactgagctgaaagtcacctcctctaggatggtcacaactgagatgccacttcgggcatggctcaagcctagagcaacaaagctcttt

SEQ ID NO: 56523 - DNA, 600 bp, Chicken  19866894311363_2
ctttaataagaatgaaaaaagaaaagaaaaaaaagagcaatagggttcaacacacaaaattaattgaagagagaccactactttatttattctgtttctgtggtctctggctacagaacatcctgcatttttaagctttaggtgtgtttgttctcacactccaggatactgtacctggatgtatttggtgccagaccaaatcaggccactgagacctacagctgcagccctaagtcccgtcctttcccatcttctcccagcagcctcayctcagtcactcacaattcccagtaggtttcyaggctaacaaagagatcagcgttyacatcactgctagcagaacttccatcagtgctcagccacacgtggtgactgtcacctctgagctgatggrccctaacaccttacacatgcatctcacctaagggatctgctgccctgctgaggagtccttcccagcaagtctggcagtctgggacacaactgagctgaaagtcacctcctctaggatggtcacaactgagatgccacttcgggcatggctcaagcctagagcaacaaagctcttttcaacgtgggaacttcttcccttccagaatg

SEQ ID NO: 56524 - DNA, 600 bp, Chicken  19866894311363_3
agaaaaaaaagagcaatagggttcaacacacaaaattaattgaagagagaccactactttatttattctgtttctgtggtctctggctacagaacatcctgcatttttaagctttaggtgtgtttgttctcacactccaggatactgtacctggatgtatttggtgccagaccaaatcaggccactgagacctacagctgcagccctaagtcccgtcctttcccatcttctcccagcagcctcayctcagtcactcacaattcccagtaggtttcyaggctaacaaagagatcagcgttyacatcactgctagcagaacttccatcagtgctcagccacacgtggtgactgtcacctctgagctgatggrccctaacaccttacacatgcatctcacctaagggatctgctgccctgctgaggagtccttcccagcaagtctggcagtctgggacacaactgagctgaaagtcacctcctctaggatggtcacaactgagatgccacttcgggcatggctcaagcctagagcaacaaagctcttttcaacgtgggaacttcttcccttccagaatgcatttatcaaagcccgagattagc

SEQ ID NO: 56525 - DNA, 600 bp, Chicken  19866894311363_4
tttctgtggtctctggctacagaacatcctgcatttttaagctttaggtgtgtttgttctcacactccaggatactgtacctggatgtatttggtgccagaccaaatcaggccactgagacctacagctgcagccctaagtcccgtcctttcccatcttctcccagcagcctcayctcagtcactcacaattcccagtaggtttcyaggctaacaaagagatcagcgttyacatcactgctagcagaacttccatcagtgctcagccacacgtggtgactgtcacctctgagctgatggrccctaacaccttacacatgcatctcacctaagggatctgctgccctgctgaggagtccttcccagcaagtctggcagtctgggacacaactgagctgaaagtcacctcctctaggatggtcacaactgagatgccacttcgggcatggctcaagcctagagcaacaaagctcttttcaacgtgggaacttcttcccttccagaatgcatttatcaaagcccgagattagcagctttcagagcaaaaagcacactgtgtttatttgccttggcatgtgtccaattgttttttaagctccgg

SEQ ID NO: 56526 - DNA, 600 bp, Chicken  19866894311368_1
ttgtatttatgtatttctcacagccttttgagtcaaaaaacttaatagatttttatattctttgtgaaataagacttcattaaactttagctgaattcaccagaaaacttttatcaaatttttctaagctgctgcccttcaaaagaaaggacacctctgtttttgactgtccattgatccattaatgagagtgagcaaagtcctgtttctcagttcagctgtacagcaatcttttttcctcctttcacaaatcagtcatcttcctaggaaaactatcctttaaaaatactttgggaaatrattgcataacagaaatggcttgtttgaaggatagtacggaagaaagcattgtttgttagacagaagctgctagatattagttaaaaacaaaatgatggagcctccaaaaataaatattgaagtagttgactttttttttcttgtctcatctcaaggtatttttgtaccacttcctttccttatttgaacaatatgatctttgtttcctttacaaagtactttcattgttttccactgtacagaatggaaacatgacctaagaagagtattgttgtctgtcaagataaagcacagtgcatt

SEQ ID NO: 56527 - DNA, 600 bp, Chicken  19866894311372_1
atcatgacattctgctcgaattactctgaaattggtttcttgtgagtcattatatccatcacttaaatttaactacacattatgcacattatagcaggtacatgacaaggtaggcctggccatgggatggagaagcctgacacgtaaccattgaatagttacatgtcaagagaaaaatcaatcatgacaaataacctcctttactgacaaagagggtgaggagcaatggaaaaagaaggaataaaaaataaagaatgaatagagctggagcaggcagcagaggaatacaagaacagggaygtgctaatgtggttcaagagacacccaagtataagtaacaaagcacacttgattgaagatttttccttttcaataattgttttctgcttttctgtatggtgtctccycagatacctcttgttttcacttctaggcttcaaaacccttggtttccttcttcatacagcatgtaagtgacaaaatcttttcctaatttctcagctgttaaaagtgcacctgttaccattgccagagtggcctaaattttctttccctttgctacagaaggaatcactaactcctcaattcaattttgtttgt

SEQ ID NO: 56528 - DNA, 600 bp, Chicken  19866894311372_2
aggtaggcctggccatgggatggagaagcctgacacgtaaccattgaatagttacatgtcaagagaaaaatcaatcatgacaaataacctcctttactgacaaagagggtgaggagcaatggaaaaagaaggaataaaaaataaagaatgaatagagctggagcaggcagcagaggaatacaagaacagggaygtgctaatgtggttcaagagacacccaagtataagtaacaaagcacacttgattgaagatttttccttttcaataattgttttctgcttttctgtatggtgtctccycagatacctcttgttttcacttctaggcttcaaaacccttggtttccttcttcatacagcatgtaagtgacaaaatcttttcctaatttctcagctgttaaaagtgcacctgttaccattgccagagtggcctaaattttctttccctttgctacagaaggaatcactaactcctcaattcaattttgtttgtcctccattcctcagataatgtaatttctagaaagcaagcctcctcctctcccctctccgtgcagcacctagtctttttcattgcatttccttattgctgcccatatc

SEQ ID NO: 56529 - DNA, 600 bp, Chicken  19866894311373_1
tatttttgcaaaggatatttcttcccaaataatggaatattttcatctgtctcttgtattctgcagctctgccatgaaagaagtggatgccttcccttgtaatccttcataacccttcaagggttatgcatcttcattaactcacagtccctgtagacactgtaatgacaaagtcactgttagtgaggcacatgccgggactctactccataccattcatctgtcacctgagatggaaattaacctttcagtttaaaattactaattttggcttgtactgagaagattcacttgccttartgtagctttttagtaggagttgacaaatatgtattccattttgatgttcctgacttctcaaaatgacatgtaggtcttgtgtccaacctataagtcccgatgaagttcttagagtcttatgtatctccaatgttataagactcctatggttaataataggtaaataaattgcattgtagcatctcatatgagcgaggaatctaagctattcatagcagatatagtcaataggatccactgagttggaagaacattttagctaatgaaatgtaagagaatgtaggagtttgatttgtcatg

SEQ ID NO: 56530 - DNA, 600 bp, Chicken  19866894311375_1
ttgaagaaattcaggcagattcacttacaggttggacctgtaatttcgttttctgcttttgcacataggcctttttcttataaatttaagggaagattataccacagtaaagaggttattcggtggaattaatgactggtaaatttagaagagattaagaggagagattttctgtgctgtgtgtcactcgctcatgtaataattcatagttgtctcacaagaggtcagttagtcaaacatagcagtttaaatctgaaaagggactaataatatataaccactaccagagcttatagttaygcaggctttgtgtatgagcagtcagttctcatattccggtgataaaagctttcattgtggtgagaaggcatttggaactctgcctgctctgtaccactgatgctgagggctggcctgaggcaccctctgatgtgctgagcagtaccacagccacgacccggtctttcatgaagtcaccagaggtttttctttgattttcctatagaggaaaatcttcagagacttcacctcacacatacacatatttgttatgcactcttgaaaggtgagatggtgctaaatgggaggacagagagaaag

SEQ ID NO: 56531 - DNA, 599 bp, Chicken  19866894311376_1
  misc_feature (1)..(166): n is any nucleotide
nnnnnnnnnnnnnnnnnnnnnnnnnnnnnnnnnnnnnnnnnnnnnnnnnnnnnnnnnnnnnnnnnnnnnnnnnnnnnnnnnnnnnnnnnnnnnnnnnnnnnnnnnnnnnnnnnnnnnnnnnnnnnnnnnnnnnnnnnnnnnnnnnnnnnnnnnnnnnnnnnnnnnnaaagaaacggtggtgatgagctataaggggagtgcatggggcagcgaggaggggtggggtgtgggggctacgcaggagcacccatgggtgctgggggctgtgctctgtgcagagtgcagctgaaggaatggagygagcgcrgttgcggttcccctccccctgtaggacctcaggaaggggtcwgaaggacccatcccagctgcacccggagggtccccactctctcccagtttggctgcgtggggccgtggtggggtccttggccaagaagcaacatttcgggatgtgcttcactctcacagagtgctgctccctgcagagcacccagggcacggctttgggcagcgaggaggaggaggaagatggagaggtgccaccacgctccgtggtggggctgctyctcttcccccccatggggacaggtggctgtggg

SEQ ID NO: 56532 - DNA, 599 bp, Chicken  19866894311376_2
  misc_feature (1)..(159): n is any nucleotide
nnnnnnnnnnnnnnnnnnnnnnnnnnnnnnnnnnnnnnnnnnnnnnnnnnnnnnnnnnnnnnnnnnnnnnnnnnnnnnnnnnnnnnnnnnnnnnnnnnnnnnnnnnnnnnnnnnnnnnnnnnnnnnnnnnnnnnnnnnnnnnnnnnnnnnnnnnnnnnnaaagaaacggtggtgatgagctataaggggagtgcatggggcagcgaggaggggtggggtgtgggggctacgcaggagcacccatgggtgctgggggctgtgctctgtgcagagtgcagctgaaggaatggagygagcgcrgttgcggttcccctccccctgtaggacctcaggaaggggtcwgaaggacccatcccagctgcacccggagggtccccactctctcccagtttggctgcgtggggccgtggtggggtccttggccaagaagcaacatttcgggatgtgcttcactctcacagagtgctgctccctgcagagcacccagggcacggctttgggcagcgaggaggaggaggaagatggagaggtgccaccacgctccgtggtggggctgctyctcttcccccccatggggacaggtggctgtggggcaggag

SEQ ID NO: 56533 - DNA, 599 bp, Chicken  19866894311376_3
  misc_feature (1)..(117): n is any nucleotide
nnnnnnnnnnnnnnnnnnnnnnnnnnnnnnnnnnnnnnnnnnnnnnnnnnnnnnnnnnnnnnnnnnnnnnnnnnnnnnnnnnnnnnnnnnnnnnnnnnnnnnnnnnnnnnnnnnnnnaaagaaacggtggtgatgagctataaggggagtgcatggggcagcgaggaggggtggggtgtgggggctacgcaggagcacccatgggtgctgggggctgtgctctgtgcagagtgcagctgaaggaatggagygagcgcrgttgcggttcccctccccctgtaggacctcaggaaggggtcwgaaggacccatcccagctgcacccggagggtccccactctctcccagtttggctgcgtggggccgtggtggggtccttggccaagaagcaacatttcgggatgtgcttcactctcacagagtgctgctccctgcagagcacccagggcacggctttgggcagcgaggaggaggaggaagatggagaggtgccaccacgctccgtggtggggctgctyctcttcccccccatggggacaggtggctgtggggcaggaggggacgtctgcccccttccttttgggatggaggtggaatcgg

SEQ ID NO: 56534 - DNA, 600 bp, Chicken  19866894311376_4
tgctctgtgcagagtgcagctgaaggaatggagygagcgcrgttgcggttcccctccccctgtaggacctcaggaaggggtcwgaaggacccatcccagctgcacccggagggtccccactctctcccagtttggctgcgtggggccgtggtggggtccttggccaagaagcaacatttcgggatgtgcttcactctcacagagtgctgctccctgcagagcacccagggcacggctttgggcagcgaggaggaggaggaagatggagaggtgccaccacgctccgtggtggggctgctyctcttcccccccatggggacaggtggctgtggggcaggaggggacgtctgcccccttccttttgggatggaggtggaatcggagcagagaacatgaaaacataacaaaattaaaggtgcaaaaccccattgcctctctttttcttttcggagaggggtgaattaggttggtcccaggagatcagcgccgtgcgtttcggaacagttccagccaatcggaaggcggctcatgagttcagtatctttaaaaaccaaccaaggaggggctctcgctggttgggctttaagatcttgaggtatc

SEQ ID NO: 56535 - DNA, 599 bp, Chicken  19866894311379_1
  misc_feature (1)..(44): n is any nucleotide
nnnnnnnnnnnnnnnnnnnnnnnnnnnnnnnnnnnnnnnnnnnnttggagctcgatgacatttgaggtcccttgcagcccaagccattctatgattttcctctgctacgcagtctgcgactgtctgcctttctgctgccccacagcttctgtgtctatgagtttccagtggtccccatccaactgctgctgaggtcaaagactgtgtttgagcagaagtaggatcacatgaatgcacgccccttggaatcttgcaagagcaattcttttgtatccacataagatgaatcacacttttacrgcaatcttattttagtcattttcgttgtgccttrwtgggttaaaaggacagaggggaaaaaaaaataaatgaacagacaacccttcttgcaataaaagttttaaatatcaagttttctcaggcaaagctctcagtgtttttaatgtgacggtaaatcttcagtaggaaaaaaagctttgtctgcttaaggatttcatggggaaacctaatctacagcagtgtttcagagygttctgctatagctgtttgctgcttgtgcagaactagaggctcagagcactgrgctcmgtgtcaagcaa

SEQ ID NO: 56536 - DNA, 599 bp, Chicken  19866894311379_2
  misc_feature (1)..(10): n is any nucleotide
nnnnnnnnnnttggagctcgatgacatttgaggtcccttgcagcccaagccattctatgattttcctctgctacgcagtctgcgactgtctgcctttctgctgccccacagcttctgtgtctatgagtttccagtggtccccatccaactgctgctgaggtcaaagactgtgtttgagcagaagtaggatcacatgaatgcacgccccttggaatcttgcaagagcaattcttttgtatccacataagatgaatcacacttttacrgcaatcttattttagtcattttcgttgtgccttrwtgggttaaaaggacagaggggaaaaaaaaataaatgaacagacaacccttcttgcaataaaagttttaaatatcaagttttctcaggcaaagctctcagtgtttttaatgtgacggtaaatcttcagtaggaaaaaaagctttgtctgcttaaggatttcatggggaaacctaatctacagcagtgtttcagagygttctgctatagctgtttgctgcttgtgcagaactagaggctcagagcactgrgctcmgtgtcaagcaaaattccaccttcttgtgcagacaggcaaaggaga

SEQ ID NO: 56537 - DNA, 599 bp, Chicken  19866894311379_3
  misc_feature (1)..(9): n is any nucleotide
nnnnnnnnnttggagctcgatgacatttgaggtcccttgcagcccaagccattctatgattttcctctgctacgcagtctgcgactgtctgcctttctgctgccccacagcttctgtgtctatgagtttccagtggtccccatccaactgctgctgaggtcaaagactgtgtttgagcagaagtaggatcacatgaatgcacgccccttggaatcttgcaagagcaattcttttgtatccacataagatgaatcacacttttacrgcaatcttattttagtcattttcgttgtgccttrwtgggttaaaaggacagaggggaaaaaaaaataaatgaacagacaacccttcttgcaataaaagttttaaatatcaagttttctcaggcaaagctctcagtgtttttaatgtgacggtaaatcttcagtaggaaaaaaagctttgtctgcttaaggatttcatggggaaacctaatctacagcagtgtttcagagygttctgctatagctgtttgctgcttgtgcagaactagaggctcagagcactgrgctcmgtgtcaagcaaaattccaccttcttgtgcagacaggcaaaggagat

SEQ ID NO: 56538 - DNA, 600 bp, Chicken  19866894311379_4
aatgcacgccccttggaatcttgcaagagcaattcttttgtatccacataagatgaatcacacttttacrgcaatcttattttagtcattttcgttgtgccttrwtgggttaaaaggacagaggggaaaaaaaaataaatgaacagacaacccttcttgcaataaaagttttaaatatcaagttttctcaggcaaagctctcagtgtttttaatgtgacggtaaatcttcagtaggaaaaaaagctttgtctgcttaaggatttcatggggaaacctaatctacagcagtgtttcagagygttctgctatagctgtttgctgcttgtgcagaactagaggctcagagcactgrgctcmgtgtcaagcaaaattccaccttcttgtgcagacaggcaaaggagattgtgctgaagtacgaagggaggctcactagaaccagaggttaccaggctgctggtgcagaggtatgtctgctttttcttaaacaatgtctcttctttataccaaagtcatctgaagtttttattcacagatatacgtatgtcttctacgtcattctgatttccaactgattccagacattccaacatctgattcca

SEQ ID NO: 56539 - DNA, 600 bp, Chicken  19866894311379_5
tgaatcacacttttacrgcaatcttattttagtcattttcgttgtgccttrwtgggttaaaaggacagaggggaaaaaaaaataaatgaacagacaacccttcttgcaataaaagttttaaatatcaagttttctcaggcaaagctctcagtgtttttaatgtgacggtaaatcttcagtaggaaaaaaagctttgtctgcttaaggatttcatggggaaacctaatctacagcagtgtttcagagygttctgctatagctgtttgctgcttgtgcagaactagaggctcagagcactgrgctcmgtgtcaagcaaaattccaccttcttgtgcagacaggcaaaggagattgtgctgaagtacgaagggaggctcactagaaccagaggttaccaggctgctggtgcagaggtatgtctgctttttcttaaacaatgtctcttctttataccaaagtcatctgaagtttttattcacagatatacgtatgtcttctacgtcattctgatttccaactgattccagacattccaacatctgattccagatgtgcatttagtcattacaatttcgcagaytaatttaatgtgtgagggatg

SEQ ID NO: 56540 - DNA, 600 bp, Chicken  19866894311379_6
cacacttttacrgcaatcttattttagtcattttcgttgtgccttrwtgggttaaaaggacagaggggaaaaaaaaataaatgaacagacaacccttcttgcaataaaagttttaaatatcaagttttctcaggcaaagctctcagtgtttttaatgtgacggtaaatcttcagtaggaaaaaaagctttgtctgcttaaggatttcatggggaaacctaatctacagcagtgtttcagagygttctgctatagctgtttgctgcttgtgcagaactagaggctcagagcactgrgctcmgtgtcaagcaaaattccaccttcttgtgcagacaggcaaaggagattgtgctgaagtacgaagggaggctcactagaaccagaggttaccaggctgctggtgcagaggtatgtctgctttttcttaaacaatgtctcttctttataccaaagtcatctgaagtttttattcacagatatacgtatgtcttctacgtcattctgatttccaactgattccagacattccaacatctgattccagatgtgcatttagtcattacaatttcgcagaytaatttaatgtgtgagggatgaatct

SEQ ID NO: 56541 - DNA, 600 bp, Chicken  19866894311379_7
actagaggctcagagcactgrgctcmgtgtcaagcaaaattccaccttcttgtgcagacaggcaaaggagattgtgctgaagtacgaagggaggctcactagaaccagaggttaccaggctgctggtgcagaggtatgtctgctttttcttaaacaatgtctcttctttataccaaagtcatctgaagtttttattcacagatatacgtatgtcttctacgtcattctgatttccaactgattccagacattccaacatctgattccagatgtgcatttagtcattacaatttcgcagaytaatttaatgtgtgagggatgaatctccttgtgttaacacagtagaagcttccttctcaaatcatacaaatattgatgtctgccagagagggtgatgggaatgrgatgctaacaatatgatgttagtattctctgaagagcaatttcagcagactgtggggccacagctcaatagctgagcatgaaaaatgtgtctagcttttagtttgcaagacaattctgcaatagcttgttgtaaatacattgataaagaaggattttgcttgcatcatattcaaaggatttgaatctaatcttagc

SEQ ID NO: 56542 - DNA, 600 bp, Chicken  19866894311379_8
ccagaggttaccaggctgctggtgcagaggtatgtctgctttttcttaaacaatgtctcttctttataccaaagtcatctgaagtttttattcacagatatacgtatgtcttctacgtcattctgatttccaactgattccagacattccaacatctgattccagatgtgcatttagtcattacaatttcgcagaytaatttaatgtgtgagggatgaatctccttgtgttaacacagtagaagcttccttctcaaatcatacaaatattgatgtctgccagagagggtgatgggaatgrgatgctaacaatatgatgttagtattctctgaagagcaatttcagcagactgtggggccacagctcaatagctgagcatgaaaaatgtgtctagcttttagtttgcaagacaattctgcaatagcttgttgtaaatacattgataaagaaggattttgcttgcatcatattcaaaggatttgaatctaatcttagcaaatctatttacactattgaaaatagactctggtcctaattacttgaaactaataatatgcaggaaacttcctaatatgcaaccgatggagaagaggtctttgg

SEQ ID NO: 56543 - DNA, 600 bp, Chicken  19866894311387_1
ggcactttctatttaaaagaaaaagaaacattaaaagaaaaagtggtgtgaagaagcatgtgtcaggcatatgcaattcctccagcatcatgttttccacactgatttaatagctgttgattctcttcaaatgttcttgtttccaagacctgttttacagtaataaatcttcttggctgtaaaattcttgaaatgattcagtgggatgattgtttccttagcacattccctgagtgctcatagttaaaaatggaaaagttcctaagcgggtcattttttttccctgcaatatgtgtcgtygattctgaaaactacggtcaatacaatcacctgtgttggccctggcaaaccactgtttgcctcgtgctccttactgttctgatttctcttggtaaattatggtaagttttttgctagagtgccctgttgaactatgttaagaaatgcctagctggacaaaggggggaaaaaatgttgtggcatgatttgatacgggtcttcatttaaaaaagtagaaaaaaacttactgaaatttatacttagtttagtaatgaaaattgctaagggcttccttaatttccctaagcatttgcacacgag

SEQ ID NO: 56544 - DNA, 600 bp, Chicken  19866894311391_1
ctctgataataaaaatttcattgttgaaacaataaaatagacttttattataacacagagtatccaccctaaacattgtccttttagcttcttcgagttaaatgtatgcacagttttacagtctataaacagatctggaataaaagttaataaatgtcaaaatttgcatttcaaaaaattcttgctgcattttagggaagatcaatctatgaacctttcaacattatgtcaaatgaaatgctaattgtacctttaggaatttcagagacagtgacaagaaactaaatgctctgttccttygcatcagcaagtcgaggataattgtatatctactcttgtgaacttctaagaaaaaaagaaaaatactaagaaaaaagggttttctattctttaactcaggagggtaaactccttcagccacccttcatcaatctaccttcaaataaagtgtgttaacatgttgacaatggacaaatcacacagagctacatttattcattttataataggtttgtcaaatgggcttcagctagagatttaagagmgagaaacattttcatctggggaagactgacttattctgttcaagttgctggaacg

SEQ ID NO: 56545 - DNA, 600 bp, Chicken  19866894311391_10
gcatttagaaatgaccaatagttagaataaacttactgacaggatctaatttgtgtacttgctagtaaagctccattttaattagcagccacagtctttcagcacaagctcaaagagacagaagtttagtgattaagaagatgaagctgttaaattgataaattgaccttgaaatacttgtaactgtgggggatggcctagtagctatatggttggtatgttgtgctaccacacgggggacagagtttagggattgaccctggtacttctgcgtttttacctgattgaccagctgaagayaggaaaaaccactgaggtgacccacccaatgcctaaattcaattgctcattttctaagcaaacaaatttcattgttatttaacacttgctggcagatagcctgaaatatcatctcagttcttcaacatcttactcgctccctttgccagaaagaggtgctaaaacaaggtagaaaagataatggggttgaaatgacatattaaggtgaataatgacctttcagcctctgttgagaacaaaacagtgagggacaaatttggttctcacttgtcaaaggttcttgataacagtcaagcaggc

SEQ ID NO: 56546 - DNA, 600 bp, Chicken  19866894311391_2
tgtacctttaggaatttcagagacagtgacaagaaactaaatgctctgttccttygcatcagcaagtcgaggataattgtatatctactcttgtgaacttctaagaaaaaaagaaaaatactaagaaaaaagggttttctattctttaactcaggagggtaaactccttcagccacccttcatcaatctaccttcaaataaagtgtgttaacatgttgacaatggacaaatcacacagagctacatttattcattttataataggtttgtcaaatgggcttcagctagagatttaagagmgagaaacattttcatctggggaagactgacttattctgttcaagttgctggaacggtttgcagcatgcatttctttkgggggaatgattatctcactcctcyatccccaaatattagtaaagtattccctctttgaagrgtgaaaacactgaaatgaaaaaggaagaggcataagaggtttttttatatcctctctaggcaaatccataatgcaagacttgttttgtttagtaatcaatcttaacagtttatctctaagcaatacaaattatatgccatggttgtaagtgcaagaacaca

SEQ ID NO: 56547 - DNA, 600 bp, Chicken  19866894311391_3
tgtatatctactcttgtgaacttctaagaaaaaaagaaaaatactaagaaaaaagggttttctattctttaactcaggagggtaaactccttcagccacccttcatcaatctaccttcaaataaagtgtgttaacatgttgacaatggacaaatcacacagagctacatttattcattttataataggtttgtcaaatgggcttcagctagagatttaagagmgagaaacattttcatctggggaagactgacttattctgttcaagttgctggaacggtttgcagcatgcatttctttkgggggaatgattatctcactcctcyatccccaaatattagtaaagtattccctctttgaagrgtgaaaacactgaaatgaaaaaggaagaggcataagaggtttttttatatcctctctaggcaaatccataatgcaagacttgttttgtttagtaatcaatcttaacagtttatctctaagcaatacaaattatatgccatggttgtaagtgcaagaacacactcgtgcaataagmaaggctagctgaaaagtagaacctaattcaggtttgcaacattttccctgctattatcctacc

SEQ ID NO: 56548 - DNA, 600 bp, Chicken  19866894311391_4
aagaaaaaaagaaaaatactaagaaaaaagggttttctattctttaactcaggagggtaaactccttcagccacccttcatcaatctaccttcaaataaagtgtgttaacatgttgacaatggacaaatcacacagagctacatttattcattttataataggtttgtcaaatgggcttcagctagagatttaagagmgagaaacattttcatctggggaagactgacttattctgttcaagttgctggaacggtttgcagcatgcatttctttkgggggaatgattatctcactcctcyatccccaaatattagtaaagtattccctctttgaagrgtgaaaacactgaaatgaaaaaggaagaggcataagaggtttttttatatcctctctaggcaaatccataatgcaagacttgttttgtttagtaatcaatcttaacagtttatctctaagcaatacaaattatatgccatggttgtaagtgcaagaacacactcgtgcaataagmaaggctagctgaaaagtagaacctaattcaggtttgcaacattttccctgctattatcctacccacactatattgaatatatttccta

SEQ ID NO: 56549 - DNA, 600 bp, Chicken  19866894311391_5
tattctttaactcaggagggtaaactccttcagccacccttcatcaatctaccttcaaataaagtgtgttaacatgttgacaatggacaaatcacacagagctacatttattcattttataataggtttgtcaaatgggcttcagctagagatttaagagmgagaaacattttcatctggggaagactgacttattctgttcaagttgctggaacggtttgcagcatgcatttctttkgggggaatgattatctcactcctcyatccccaaatattagtaaagtattccctctttgaagrgtgaaaacactgaaatgaaaaaggaagaggcataagaggtttttttatatcctctctaggcaaatccataatgcaagacttgttttgtttagtaatcaatcttaacagtttatctctaagcaatacaaattatatgccatggttgtaagtgcaagaacacactcgtgcaataagmaaggctagctgaaaagtagaacctaattcaggtttgcaacattttccctgctattatcctacccacactatattgaatatatttcctacagctacactgagactgtttgaacattcacttactct

SEQ ID NO: 56550 - DNA, 600 bp, Chicken  19866894311391_6
tctggggaagactgacttattctgttcaagttgctggaacggtttgcagcatgcatttctttkgggggaatgattatctcactcctcyatccccaaatattagtaaagtattccctctttgaagrgtgaaaacactgaaatgaaaaaggaagaggcataagaggtttttttatatcctctctaggcaaatccataatgcaagacttgttttgtttagtaatcaatcttaacagtttatctctaagcaatacaaattatatgccatggttgtaagtgcaagaacacactcgtgcaataagmaaggctagctgaaaagtagaacctaattcaggtttgcaacattttccctgctattatcctacccacactatattgaatatatttcctacagctacactgagactgtttgaacattcacttactctgcagagattgagagacagaataaagccagggaagtgtttatgctcctgttaacctattcagtcagctttatcctgctcaggcctggactcggctttttctaactctctaaatgcttttatagcagacagactgtggttttcaaaatagagactgcactcatcctgcctttctggc

SEQ ID NO: 56551 - DNA, 600 bp, Chicken  19866894311391_7
gtacttagggaatctatttccatttgtcttagcagtacgtatctgaaacagaaactgttgatcttgtaagcatttggacactattctgatgtcattaaagtgaaagataattttgtctttggcctgaactggaattacgttgcatcttcttattcttaggtccaccacagtatctcatgcgtggcatatttttaatttgcactacgtacatgtaaaattatacacccagaattgatgcatttaagtaatttcaggactacataacctttttttgctggaatacaaactactcacttgttyaaatggtttggaatatttaatattgctttccatccattttgttgcaaagatgctaatctccttaccacttccatgttgcataatagcaataaataaattagaatatatggtatacatagaccacagttatctggtatttttctttccgaatgcttgattattatgtgtttgttttgttggtgttgtttttttytyttttttttcagtatacactaattttagatctgccatttccacaaaacattattcactttcatatttaccataaaatttcattggagagagaaggtatacatattt

SEQ ID NO: 56552 - DNA, 600 bp, Chicken  19866894311391_8
aatttgcactacgtacatgtaaaattatacacccagaattgatgcatttaagtaatttcaggactacataacctttttttgctggaatacaaactactcacttgttyaaatggtttggaatatttaatattgctttccatccattttgttgcaaagatgctaatctccttaccacttccatgttgcataatagcaataaataaattagaatatatggtatacatagaccacagttatctggtatttttctttccgaatgcttgattattatgtgtttgttttgttggtgttgtttttttytyttttttttcagtatacactaattttagatctgccatttccacaaaacattattcactttcatatttaccataaaatttcattggagagagaaggtatacatatttgaaacgaaaggataaaaaaaaaaaagtatgatctgtgctgtggactcaagtagtgggtccaagcagttaacaatgctgtactacaacatcttgaaataagtgaattccatcacaccagtcaaatttaacccataatttcaacataaattgaatagattcagtcaagtcactggggcctgttttcctccagttt

SEQ ID NO: 56553 - DNA, 600 bp, Chicken  19866894311391_9
tttgcactacgtacatgtaaaattatacacccagaattgatgcatttaagtaatttcaggactacataacctttttttgctggaatacaaactactcacttgttyaaatggtttggaatatttaatattgctttccatccattttgttgcaaagatgctaatctccttaccacttccatgttgcataatagcaataaataaattagaatatatggtatacatagaccacagttatctggtatttttctttccgaatgcttgattattatgtgtttgttttgttggtgttgtttttttytyttttttttcagtatacactaattttagatctgccatttccacaaaacattattcactttcatatttaccataaaatttcattggagagagaaggtatacatatttgaaacgaaaggataaaaaaaaaaaagtatgatctgtgctgtggactcaagtagtgggtccaagcagttaacaatgctgtactacaacatcttgaaataagtgaattccatcacaccagtcaaatttaacccataatttcaacataaattgaatagattcagtcaagtcactggggcctgttttcctccagtttat

SEQ ID NO: 56554 - DNA, 599 bp, Chicken  19866894311396_1
  misc_feature (1)..(66): n is any nucleotide
nnnnnnnnnnnnnnnnnnnnnnnnnnnnnnnnnnnnnnnnnnnnnnnnnnnnnnnnnnnnnnnnnncttttatgcatgtcccttccttagtttgtaagcaggacatgtcttccagacctgagatcatcagctcagtgcctctccaggcggatacgtaccttgttgtttgtgaatttgcttcacagctacaaagagaaagcacaaagcagaaggatcccaggttcaaaatcagcacaacaaaagcactgcgggtcacacgaggctgggtgaagcagtgcccagctctccttatggctgcayaacttggggtgaaatgccaatctgggggcaggagggtgaacatctgcctggttctggtgtgagaacagtggcaagatggagctcagctgatgcaaaaaatcaaactgttactgtcagtaggaactctgtgacttaagtttgaactgttcaaagcagcttcccaagygcagagggcacccagggctcactgtgyctgacaggtgctcatggtgagcaggaattgatggaattgatgctcccaccatgggagaagagcagaaagcacctttccccttgcttaaacattgatttcgtttcct

SEQ ID NO: 56555 - DNA, 600 bp, Chicken  19866894311396_2
ttgtgaatttgcttcacagctacaaagagaaagcacaaagcagaaggatcccaggttcaaaatcagcacaacaaaagcactgcgggtcacacgaggctgggtgaagcagtgcccagctctccttatggctgcayaacttggggtgaaatgccaatctgggggcaggagggtgaacatctgcctggttctggtgtgagaacagtggcaagatggagctcagctgatgcaaaaaatcaaactgttactgtcagtaggaactctgtgacttaagtttgaactgttcaaagcagcttcccaagygcagagggcacccagggctcactgtgyctgacaggtgctcatggtgagcaggaattgatggaattgatgctcccaccatgggagaagagcagaaagcacctttccccttgcttaaacattgatttcgtttcctcttccttgtcagagctctctcatgttcagcagcagctgctgaagccaacccacaacaccagcacttatctgagygcacactgctcaccccactgagctggcaaatggaagctcaaaccatgcatgcacccacctggagagcactgcccgggatgctgcaggccagac

SEQ ID NO: 56556 - DNA, 600 bp, Chicken  19866894311396_3
agaaagcacaaagcagaaggatcccaggttcaaaatcagcacaacaaaagcactgcgggtcacacgaggctgggtgaagcagtgcccagctctccttatggctgcayaacttggggtgaaatgccaatctgggggcaggagggtgaacatctgcctggttctggtgtgagaacagtggcaagatggagctcagctgatgcaaaaaatcaaactgttactgtcagtaggaactctgtgacttaagtttgaactgttcaaagcagcttcccaagygcagagggcacccagggctcactgtgyctgacaggtgctcatggtgagcaggaattgatggaattgatgctcccaccatgggagaagagcagaaagcacctttccccttgcttaaacattgatttcgtttcctcttccttgtcagagctctctcatgttcagcagcagctgctgaagccaacccacaacaccagcacttatctgagygcacactgctcaccccactgagctggcaaatggaagctcaaaccatgcatgcacccacctggagagcactgcccgggatgctgcaggccagacctcttcttgtgccttgtcacacccagc

SEQ ID NO: 56557 - DNA, 600 bp, Chicken  19866894311396_4
agatggagctcagctgatgcaaaaaatcaaactgttactgtcagtaggaactctgtgacttaagtttgaactgttcaaagcagcttcccaagygcagagggcacccagggctcactgtgyctgacaggtgctcatggtgagcaggaattgatggaattgatgctcccaccatgggagaagagcagaaagcacctttccccttgcttaaacattgatttcgtttcctcttccttgtcagagctctctcatgttcagcagcagctgctgaagccaacccacaacaccagcacttatctgagygcacactgctcaccccactgagctggcaaatggaagctcaaaccatgcatgcacccacctggagagcactgcccgggatgctgcaggccagacctcttcttgtgccttgtcacacccagctgggatcctgcccttatatacccacacacaatcacatgcctgcacagtgcccacactcccaagcaccacagagcagctacctggcatgcatggaaacgggtgcagcagatgggcagcacctttatctgcatcaggttttttaagagtttctagtttccagggtgatccccatccctgcct

SEQ ID NO: 56558 - DNA, 600 bp, Chicken  19866894311407_1
gtaaaaaaaaaaaggtaattctcttattcgttacagtagccttcaatatatttcatgttattttccctcaagcattttcttctataagcaagcactcctctccccttgtacttcaggtttacagactgttaatcacttccattgatgcccttctgactcaacatttctactgaaatttagtattcagaactagctatgattttccaactaaggtctttgcttttcaactgccaagtagagaagaacgataacattatgcatctcactggctataattctactgttaaattttatcactgygctagcattttcacaacaatgaaaaatcgctaattcacatttagtcccattagataatgagtccccttttgcagacactgttgctcagtccatggattgtgctaaagcactcaatattttttcctccattcaatraagacaaaagaagtaaccaaaacccacatactattcttcaagatcatttgccattctaagcttgtcctccagcatacttgcagatgtccrgtgtttctattttcttaaatttctctttcatttcccaatgaaatgtggaagaataaaccaaccccaaatggccac

SEQ ID NO: 56559 - DNA, 600 bp, Chicken  19866894311407_2
cttccattgatgcccttctgactcaacatttctactgaaatttagtattcagaactagctatgattttccaactaaggtctttgcttttcaactgccaagtagagaagaacgataacattatgcatctcactggctataattctactgttaaattttatcactgygctagcattttcacaacaatgaaaaatcgctaattcacatttagtcccattagataatgagtccccttttgcagacactgttgctcagtccatggattgtgctaaagcactcaatattttttcctccattcaatraagacaaaagaagtaaccaaaacccacatactattcttcaagatcatttgccattctaagcttgtcctccagcatacttgcagatgtccrgtgtttctattttcttaaatttctctttcatttcccaatgaaatgtggaagaataaaccaaccccaaatggccactcagtatgcccttccactatggcagggaaagaataatagctactcagactggttttccataaagtttgcacccgttccaggatattttccatactactaccgctgaatggcttacagagatagtacaagagatgt

SEQ ID NO: 56560 - DNA, 600 bp, Chicken  19866894311407_3
aactgccaagtagagaagaacgataacattatgcatctcactggctataattctactgttaaattttatcactgygctagcattttcacaacaatgaaaaatcgctaattcacatttagtcccattagataatgagtccccttttgcagacactgttgctcagtccatggattgtgctaaagcactcaatattttttcctccattcaatraagacaaaagaagtaaccaaaacccacatactattcttcaagatcatttgccattctaagcttgtcctccagcatacttgcagatgtccrgtgtttctattttcttaaatttctctttcatttcccaatgaaatgtggaagaataaaccaaccccaaatggccactcagtatgcccttccactatggcagggaaagaataatagctactcagactggttttccataaagtttgcacccgttccaggatattttccatactactaccgctgaatggcttacagagatagtacaagagatgttcacaacaggggagttggactagatgacctttaaagatcccttccaacacaactgaatctgtgatcctacaaaatagtctccaaaatctt

SEQ ID NO: 56561 - DNA, 600 bp, Chicken  19866894311409_1
gcaatagtggttttcttactataatagtacccagtgctgtctttattgtgtgtgtgtaggatttgtcagaaatcagtgttcagccaaggctccatacgtgtgtaaagacaagtaatgttggtctgtaggaatctggtttccattaagtgatctctgagagccatgccagacgttaacagcaccgcttctccctccagctgattcagttccttcctaaccctagatctggtgcaattgctgtctgtgcagaatccatctgcaagcaccgggcacctcctgcctccctgccccgtgctcgtkctctgtcygrggcaccttaagggctgttccccgggcacccctcaccttcttgtatccagaaaacatgcccgtgcatggagccttgcccaggtggcagctccctatgatggcaggcatgctgggcactgcccttgttcttgcaatgactttcaccgcgtggattccaagtggatcacagcagcgacctggccttgattcatgctgggggagtgttctgtggggatggaaagctaccaagactgtttgagggaagtaaacggtgctgtacagcaatccctatactgcaaagaagggaagaga

SEQ ID NO: 56562 - DNA, 600 bp, Chicken  19866894311409_2
ggttttcttactataatagtacccagtgctgtctttattgtgtgtgtgtaggatttgtcagaaatcagtgttcagccaaggctccatacgtgtgtaaagacaagtaatgttggtctgtaggaatctggtttccattaagtgatctctgagagccatgccagacgttaacagcaccgcttctccctccagctgattcagttccttcctaaccctagatctggtgcaattgctgtctgtgcagaatccatctgcaagcaccgggcacctcctgcctccctgccccgtgctcgtkctctgtcygrggcaccttaagggctgttccccgggcacccctcaccttcttgtatccagaaaacatgcccgtgcatggagccttgcccaggtggcagctccctatgatggcaggcatgctgggcactgcccttgttcttgcaatgactttcaccgcgtggattccaagtggatcacagcagcgacctggccttgattcatgctgggggagtgttctgtggggatggaaagctaccaagactgtttgagggaagtaaacggtgctgtacagcaatccctatactgcaaagaagggaagagaacaggaac

SEQ ID NO: 56563 - DNA, 600 bp, Chicken  19866894311409_3
ttttcttactataatagtacccagtgctgtctttattgtgtgtgtgtaggatttgtcagaaatcagtgttcagccaaggctccatacgtgtgtaaagacaagtaatgttggtctgtaggaatctggtttccattaagtgatctctgagagccatgccagacgttaacagcaccgcttctccctccagctgattcagttccttcctaaccctagatctggtgcaattgctgtctgtgcagaatccatctgcaagcaccgggcacctcctgcctccctgccccgtgctcgtkctctgtcygrggcaccttaagggctgttccccgggcacccctcaccttcttgtatccagaaaacatgcccgtgcatggagccttgcccaggtggcagctccctatgatggcaggcatgctgggcactgcccttgttcttgcaatgactttcaccgcgtggattccaagtggatcacagcagcgacctggccttgattcatgctgggggagtgttctgtggggatggaaagctaccaagactgtttgagggaagtaaacggtgctgtacagcaatccctatactgcaaagaagggaagagaacaggaactg

SEQ ID NO: 56564 - DNA, 600 bp, Chicken  19866894311413_1
agcttcttttctggtctgatttaaaccaatgttgcaacacttcaaccaccaaatgctggcagtaggaaggagcccaccatgcagaaataaccccgctgggaccctgtcatgctctgtgaatggccaccgtgtgctgctacaaaggtgctgctgctataacaactcatattctcaaatagaaaaccacaaggcaagcttacagattaggatgggttaccaccccagtgcacagtagagttattgccccatgggcgctgttgcttcgcttcctcacctctcagctaagtccccaatgggccyttgtgagatgtttggcaatgggagctccaaagatgagcttggtgcccatcctaacagctggaagacctttgaggtggggttttctctgctaagagatctctggcttcctcacctccttcacatgaacatccattggttttccaaagctgtgaaactcctgctccaagaggacagcactgaggatgttacacactgctcaagtttctcatcatccttcaaggtggatgaagtaaggaggctctatggaagtaaggagaaatgcaaatgtctctggaacacaatcctgaatttgcaggtcat

SEQ ID NO: 56565 - DNA, 600 bp, Chicken  19866894311420_1
atctgattttaatctcttgtaatgccacggatgtgtggtatactcttacaggagtcacttagatgtgcagcttatgaggagagcagcagaaaagatgcgtacaaacgaaatgacttcgatagtgtccctggagagaagatgagtatctgggtctctgtctcagaggagtgccctaatgattgatgttcagggtcaggcttcctttgctctgctgaagtggcacttttctgcttggtaccatcacaacagcggataggttgaagttggccccatcatgagttgtctgtagctgaatgatgwggacatcagctgtaggtcttaatggtgatcaccaaaggactgtttcttccttttttctttctcttgtccattggtatttgtattcaactctaatgtaagctccaactagttctccacagactctcctcctgtaggggaatattccatctcccttcaagaccggcttcttccacaaaggattcggtttggttctgtctcaaggaattacctactgtccatacctttggcaataaattcctgatatttagaccctggaaggagctgccaaaactgccatggcattttttgtttgtttggttg

SEQ ID NO: 56566 - DNA, 599 bp, Chicken  19866894311428_1
  misc_feature (1)..(153): n is any nucleotide
nnnnnnnnnnnnnnnnnnnnnnnnnnnnnnnnnnnnnnnnnnnnnnnnnnnnnnnnnnnnnnnnnnnnnnnnnnnnnnnnnnnnnnnnnnnnnnnnnnnnnnnnnnnnnnnnnnnnnnnnnnnnnnnnnnnnnnnnnnnnnnnnnnnnnnnnnaaatgcatcatgaaaagctcagaagtgtataccagtaagatccagatatgcacaaaccgttcatgaaatgaccatactgtcttctgcatgctcatacctacctgccagaatgctgaatgaatttactttgattaccttatagctaarttgggtaaaagtgatgattaccttttagcacagtacgtcagggaattaaaatatttacttttttcaagaataagaatactttctaagtgtatatctaaaaagcacagtacttctcaatcagtttggaatactatgtgaggttcccttcttaacagaacggagtatttttattgtttttattttcatataattttgaacacctctcctttgtaaaaaccatctccagaaaaatatatcttcttcaagtagcttacaatacatgttaaaaatacctacaaataggttattgcccatttaca

SEQ ID NO: 56567 - DNA, 600 bp, Chicken  19866894311428_2
atactttctaagtgtatatctaaaaagcacagtacttctcaatcagtttggaatactatgtgaggttcccttcttaacagaacggagtatttttattgtttttattttcatataattttgaacacctctcctttgtaaaaaccatctccagaaaaatatatcttcttcaagtagcttacaatacatgttaaaaatacctacaaataggttattgcccatttacaatctcttgaggtcaagaacaattcttgtgtcattttacgtatgcaatttcaacaggctaagccatgaatattcccrttcacttgaaccatgtcagcaacgtggacagtcaccacttaaaaatacctgcctaattatataccatttgaaacacaattagtctttttacatcacagtatacgtggcatttcttaatttagcaacagaaaggcacagttaaactgtaagatacagtacctgaatcacacatgctctagtgttatctaccaccagtgccaatccagacaacttattctgcaggggatgctaaagaaaaaaagcttctatttggaggggctttcttttagaaaaactcaatcacattacaagtttggtcca

SEQ ID NO: 56568 - DNA, 600 bp, Chicken  19866894311435_1
ttttgtagaatagaagagaaataaaccatttcccttactgttacagaaatttaagcaagctgaaagttttgtgtggagactttccaatcctttcaatccattgaaatacatcaagaaataattatcttaaatcagaccaaagatcaagctgggttgactggagtaattttcaacccttaagtgaagctatagagttttgattttcttttgcttttttctaattttcaaaagagatctaaactgaaaaacattttttttttttcatttgaaaattccagtgaccttgtttttacatcttcraacttgtttaatttttgcgattctatttaaaaaataagacaaaagttggttttggttcaacttatgctttctaggatatagtctttaaccatagttcgtgtaatattctgttacctgtagttgaatatccataataataaatatattgtctcttcagcttcaggtgcatctaggagaccttgggtgctgggaaaagtgatggaaaaggaatattgccaggcaaaaaaggtaaggaaatggaagtagaaacatcatctcattaaattaatagagaagaaaatcaattctctttgtaaaaat

SEQ ID NO: 56569 - DNA, 600 bp, Chicken  19866894311435_2
aaaatattagagtaatgaatgagagttcttcaggatggaaattgtccagagttctgccattcctgctctattcttcaagtcattgaatagcaagagagggggaactagaaaaaagagaaagtgggcaagtgtcttgggtacgattggccctggaaaacctgcctgtgtgagaaaactttgctttctctggatcctcctgaacatttctgataacaccgtgcaatcatatttcaatgactgcaattactgaccttcattttgattcctagaaaaaaattggtatctttaagcatcaggggraataatgaggcatcattgaaggcccagatatagaaatcatttagtgtgaggaagtatggaggaactctctcgagtctggcaaacttggagggatgggggagtctattttttgcttaaaaatatattaatcagaggaatggtcttctgataacatttctaatgtgatttatttttctttttgttttttataggctcaaaacagatttaaagttcctctgggtacaaaattctacagagtgaaagcagtaccatggaacaagaaagtataacacaacagaatttcagtccgttctgtctcca

SEQ ID NO: 56570 - DNA, 599 bp, Chicken  19866894311436_1
  misc_feature (1)..(147): n is any nucleotide
nnnnnnnnnnnnnnnnnnnnnnnnnnnnnnnnnnnnnnnnnnnnnnnnnnnnnnnnnnnnnnnnnnnnnnnnnnnnnnnnnnnnnnnnnnnnnnnnnnnnnnnnnnnnnnnnnnnnnnnnnnnnnnnnnnnnnnnnnnnnnnnnnnnttgcaagcaagcaaaatgcatggaaataacggaacagttgggagaggcagtgtttggagacataaaagcccctgtgagctatgtgagtcccttcccagactaaagctatgtggttaaatacagctaggaatagatttggcattgggggagtcrtaaaggtttatgttccagagggagaatgaagatctatgaaaaatttacatcaggtagggtcttccacagcattattcagaggtgttgtgtgtatgtattgaactgtcatgctggaatttatttctggatagaaaggagttatgtacttctrtaagggatgcctttgtggaaactagctggatgatgaggtgtaagaagagaacatgaggaacaacgatggcagaaggggctgggaagtggtaggatcattacaggcattgaacactttcttgactttatgctgcatggccctaatcatt

SEQ ID NO: 56571 - DNA, 600 bp, Chicken  19866894311436_2
aagcaagcaaaatgcatggaaataacggaacagttgggagaggcagtgtttggagacataaaagcccctgtgagctatgtgagtcccttcccagactaaagctatgtggttaaatacagctaggaatagatttggcattgggggagtcrtaaaggtttatgttccagagggagaatgaagatctatgaaaaatttacatcaggtagggtcttccacagcattattcagaggtgttgtgtgtatgtattgaactgtcatgctggaatttatttctggatagaaaggagttatgtacttctrtaagggatgcctttgtggaaactagctggatgatgaggtgtaagaagagaacatgaggaacaacgatggcagaaggggctgggaagtggtaggatcattacaggcattgaacactttcttgactttatgctgcatggccctaatcattaaagaaaaaaagttggaatagtaattacggtgtcatactgtgccagaaaataaacctttcttgtgttatatggactttatttctggaaagtgcttccagatggttggtgtcttcgtgttctgccrcgttttttcctttgctctcctttgtca

SEQ ID NO: 56572 - DNA, 600 bp, Chicken  19866894311436_3
tggatagaaaggagttatgtacttctrtaagggatgcctttgtggaaactagctggatgatgaggtgtaagaagagaacatgaggaacaacgatggcagaaggggctgggaagtggtaggatcattacaggcattgaacactttcttgactttatgctgcatggccctaatcattaaagaaaaaaagttggaatagtaattacggtgtcatactgtgccagaaaataaacctttcttgtgttatatggactttatttctggaaagtgcttccagatggttggtgtcttcgtgttctgccrcgttttttcctttgctctcctttgtcatttatgctgcagaggtatattttctctaaggattaactgaatgaatttggcaatgcaagtgatttaaacaacacaaacaaatccacgcaacagagcattgtttgaatagcaaatcattttggttccaatgattttctcagatctcctccagccattcttttctctctcacaccaggtcatttctctccagcatacactccagtatttgaaaaggttttttagtactggagagaaagaggaaagcagacaagctgttataatcctgccctctgc

SEQ ID NO: 56573 - DNA, 600 bp, Chicken  19866894311448_1
aataaagtacttctgaactaaatcgcatgaatctctaaagagcatgttagttgaatgacctgtgaaagcaagtatggtcaactggtaggcatagaccaaaccagacccagggacagttttgcatcccatcatgataggagtagagtttcccttttggactgtgctgacattgtcatccttttgggctcagtcagccactccatttctttgttctcttacatgttggcaaactgggctcaaggtccaggctcaaggtgtaggctggaaatgggcatagggccaccagcttaagcagtgagsttctttgatgcaagagtagggctgtgtcaggctgagagtacatggtaggaaaaaaagaacaagttttggctacagggaaaagctggaaagatgccttttagtcatacttgtcattattcatgtctttggatttactgatgcgctacagtgaaaacattcacatttgtttgacttagacttgatcagctagcttgatactgtagactagataagacgagaaacagtgatgccctccagctgctcttgtgctctgctgcctgcactgttattgctgcgagcagctttgtgtttcacaactac

SEQ ID NO: 56574 - DNA, 600 bp, Chicken  19866894311448_2
ctgacaaaatggtatctgacgtgaaaatgcatatggcacaaagacgtggcattgcattcctgcacgtggagaaaatgactctcattgaaattcatcaacgcttgctgaacattcatggaaaccagacagtggatgtgagcacagtgaggcagtgggtggtgagtttcagcagtggccacagcaacgtggaagtcaaaccacgttccagacagccatgcagatttttgagtgcggcatgcaggctcttgttcattgctgtcagaagtgcactgctaatggtggtgcccatgttgaaaaaawtttttgtagctgagaacttgctctatcaaacagtgttattgtgctctttgtatctgttgtagtttccatggaaataaataggagacattacgttcagagtgacgtttgtatgttgagttggtattgactgttaggtatgctatatgaaaataatggatcactttaacgttgcagaattttgtatttgcattttgtatatcaatttttaaactcgcattataaataaccttgtatgaagtctgagcatctcaaataagcctattttgttgtaatggacatatgacatacggtgtctgaatg

SEQ ID NO: 56575 - DNA, 600 bp, Chicken  19866894311454_1
atttgtataactttactaggataatgcctatcttattctgtgagtggcccctcactgtatcaacatgtcactgaaaacatgagtataaatttatcaaagtgcaatatctgttataaaggataaacgcctactgtggtttgaactgattttatagccttaccattgcaggagaaattgtttattatcttgttagctaatcatgattaaactttgtagctcagtgtcactgtgaggcaaactggggatgttctttctagaagccattgacattacagctagaaataaagatgtctgtattgwgaaactgatcttaaggaaaatgcaaaatcagcctttcaagcattcagctgtggttgtagttgtggtgaaaaagcaacaacaatgtgcaaataggaaaggaagctggtattctgctttcctctttgctttacaatacacagttcaggattgctatctgaaattcaaggagcttccaaaaccctttgtaatgtgcccatctgttgggagtcacccaaaagcactgtgcttgttgccagttgccagaagaaaatgtgatggaagtgccaaaatgttctttatatacagtcattccagtgaaaa

SEQ ID NO: 56576 - DNA, 600 bp, Chicken  19866894311454_2
gagatgcttgttgctcctcagtggctgcagtagcagattgtgcctggctctgctgatgggtaacatttccttaccataggagcacagcttgcctgattgtgttactttctcctatgtaatttggatggctcttatggtcccccaaatattttgagtcattttctaaaagacagtatttcacttcttacatatgttgacaatataacaaatgagtacaagtcgatttttaatgaatgttgcaactgttacccttggagagctgaacaggttgatatgctgtggagctttagcctacaaacmcaataatcagataaaagactgtaaagaatataactcactgtttggtcatgcaacactttgaattttgtgttgagggttgtgttgtatgcttaagaaaggccacggtatggagttttgtgtctaccaaattaatcaggatccaaaatctgttgctgcccagctttctggaacacatttgtcatggtgatcttttgaaatcaattgaaatgtatcttttcctcctggtacctgacatgatagattggtaataatcaaacactatttgtgcgatgtcagtctagcttttctgtcatgagtgat

SEQ ID NO: 56577 - DNA, 600 bp, Chicken  19866894311455_1
tactttctcctttgccatttttctattcccctcctcttccacctgccccatcctgcagtctttctgctacagaaacaaaacacctgcagaaccatatttccaagaatagaaacatagacaagttcaacagaataatctgtgttctgtttacagctctaaatgatggcttatgctgcctggtcactgctggataaatttcactgctggatcaattccatatggtacagaatatactgtccatatggtactttatgcactgaagcaaattgatggtaagcagaatttgttcagccctttgtrcactgacataccttcacaaatttaccacagaaaaaaggaaatatgccatggattggctccagcctttacaaagctacaaaaaatgttcagttcattttctttgttgtttatgtcaatgtcaacatttgacaaaataattttagccataagtgttcaaaaataaattcttaacctacgttacctctaacttagcaatgagtgtactgctgaaaatgacatttcttataatctcttcatttctcaaattttagattccttgattactcatatggaaatggtgacagaaattgttcttcctac

SEQ ID NO: 56578 - DNA, 600 bp, Chicken  19866894311455_2
ttggctccagcctttacaaagctacaaaaaatgttcagttcattttctttgttgtttatgtcaatgtcaacatttgacaaaataattttagccataagtgttcaaaaataaattcttaacctacgttacctctaacttagcaatgagtgtactgctgaaaatgacatttcttataatctcttcatttctcaaattttagattccttgattactcatatggaaatggtgacagaaattgttcttcctacaattttcacactctgcatactcaccagtattgtcctactcctgttcttcccraaaaaaaacacagctaaaatggcacaattgagcacttcctttttgtctaacaaaaacaatacagtaagccagctgtattgtagaatacttaccacagattcctccttttgcaccactgtaagggtgcagccctgcttctaatttttttttactcaattctcaaaatacaatttagaaattttaacaaaactcaaaatatattttctttctgcattattttctataaattttaagcagcagattttgtttccagttatttaagaaatgggttaagtggaatagctagctacaattgaagtg

SEQ ID NO: 56579 - DNA, 600 bp, Chicken  19866894311456_1
ggagtactgcacctaggactggggccttctgcacacaaaaaaagttgtggaattgttggagtggctccagaggagggcatgagaaatgtatttgagacaccatgttatttccactccatacctgagaaaaccacattcaggattcagctagaagggaataatgaatataactaacaatttcacagcctaattacaattacctgtacaagagattctgctatataggcaagagtgctatccataccagcattgcagtgggaatgaacaggatagaatgacaagagctgcagcccatgggasgtagtatccgtgtgcctgagaatgacaggagcagcacttcttgcactaccaccacttctcttgtcccagcctagcacacagtttaggtgggatgcgagtgtctggacttgggtaatatatcttcacatatatttgttgtaggccttaagttctctactgagtatttgtttgctaagttgtccaaatccaccccaaatcgtgattttcaaactttttgctaagctctctaattttcatggtttcaattcagtatgttgtaatttattttccatgcatttaaacaggagcggtgatatttgg

SEQ ID NO: 56580 - DNA, 600 bp, Chicken  19866894311457_1
gcatattccatatcgtgtttgtgtgttttgcagagtcaatgactgttcagggaagcacttaaagtacttttctgatcattatgagcaaataattttaagtaaacccagtactgtctatattcgaagaattaccactttttctcagtgagtaggaattgccatttcccatcctgtccagcggcaggttttctagcagccagagcaaaggaaggtgcacgctggttttcttctctgggttctgaaagagagccagcaagcatttgttctgttacatgaatagaattcagcacactcactgayragctgcaggatgctctcatacaccacagttatgctataaaggtctcactcccaccatactgcagtaagagctccaacagaagcaggaaggcacgtactgacctgtgcaggtggtgctgtggtttgtaactaagaacagaacgtcatctgatagagctttactgcaccaccgtgctggcgtatgttagacacaatgcatcggtatgcacggcttaacattaaatgaactgacatactcaataaacatacccagcattacctgacagcagaccttgcctgaatcaaaacaatttttcctca

SEQ ID NO: 56581 - DNA, 600 bp, Chicken  19866894311457_2
catattccatatcgtgtttgtgtgttttgcagagtcaatgactgttcagggaagcacttaaagtacttttctgatcattatgagcaaataattttaagtaaacccagtactgtctatattcgaagaattaccactttttctcagtgagtaggaattgccatttcccatcctgtccagcggcaggttttctagcagccagagcaaaggaaggtgcacgctggttttcttctctgggttctgaaagagagccagcaagcatttgttctgttacatgaatagaattcagcacactcactgayragctgcaggatgctctcatacaccacagttatgctataaaggtctcactcccaccatactgcagtaagagctccaacagaagcaggaaggcacgtactgacctgtgcaggtggtgctgtggtttgtaactaagaacagaacgtcatctgatagagctttactgcaccaccgtgctggcgtatgttagacacaatgcatcggtatgcacggcttaacattaaatgaactgacatactcaataaacatacccagcattacctgacagcagaccttgcctgaatcaaaacaatttttcctcac

SEQ ID NO: 56582 - DNA, 600 bp, Chicken  19866894311459_1
ggactctgagacactaaatcctgctaaatgccccccgtcccccccagatttcttctattcaggaaagacattgctttatagaattggcatacacatggacagtcgaataatatctcaatgtacagtttttaattcatcagctttctttgagcaggtaaatacattctaaatcaaaatagcatttaataatttttaaaaaggctaactcttctaccattataaatatgtctccaaaagaagaaaaaggagaaaacaaactaattttgttaaatcttgagaagtcttttaaccatttcctamagctgcaacagaaatgcttgcaacacaattgctattaagtattaagaggggacagactttgagacataccagttgagctcttaggctgataattttaagaaagcaagaatatttgacaactgatacactgtcagacaagcattcagactatgtgttctattatgctgttcaagagaaccagactaaacaacaaagatttcagtatcttactggtttcttattttagcctaaaaaatataaggaaagaaaaccagtgatagtattgactcactcggataggaagtctgcatggtagtagta

SEQ ID NO: 56583 - DNA, 599 bp, Chicken  19866894311460_1
  misc_feature (1)..(35): n is any nucleotide
nnnnnnnnnnnnnnnnnnnnnnnnnnnnnnnnnnntggcccactagaggtatgtactttcatgagaatacctatttattgcaaacagaagaagccatgatcatgtccctggtaagaacgtttttgcagaaacagtctaaatatttcttttagaagatactgaaactacaagcctaactactaaatgctaggtcctaatttgttgtatggacaataggaaagatattttcttcattcaccagtttagttcaaaattcacttagaagactaaatttattcatgtagatttaggccttaattrttcaagatggctggcaatcttactgctctctagctggaatctccaacaactagcaaagaggcttacatggatttgtaagtgtgggtgtatgtacatttctctaatgatgtacttttaatgatgtactcttgtaaataaaaagtttcccttagcaataaagtaaagtagcaattaaaaaaaaaaaaaaaaaaaaaggcaaatgaaaacaaatgtgaccttaaacatatccccctccacttcctcatatccctcatcatttttaagtctgatccactattttttagcacaggtagtctcta

SEQ ID NO: 56584 - DNA, 600 bp, Chicken  19866894311461_1
agtcttatactgcaatctgtctggggctgatgttttggggaaatgaaaaggctttcctgcacactgctttggcagcagagcgattgctattccctaactagctgtgttccaggagagtgagagaccatcacatttgcaagtgaaaatcaaatgcaagtagcaaaataattcaatccaagacttcacatctttggttgccattcaactgactggaatatttccacagcctgtcctggctcctcgctctgaagctctgtttccaaactgtcaggaaggcttcatgcaacgtgatggtaaagyactacttcaaagggaaatgcaggatcccacagcatcctccatacagtgccagtcctgccaagggctgccacagaatgcagtgcagatacaaccggttcacgggctgtgaattttcatttgtcacatcttgaattaccgacagatatcccaattacctgtgggtgtcacattccttatgaaatattgcaagagagatgtacaaagaattatcagcgttgccctatcttcaagggccttccgctgcctacctccgcagaagcatgacacgtgaaagccccagtattttttatctgaagcaca

SEQ ID NO: 56585 - DNA, 599 bp, Chicken  19866894311462_1
  misc_feature (1)..(135): n is any nucleotide
nnnnnnnnnnnnnnnnnnnnnnnnnnnnnnnnnnnnnnnnnnnnnnnnnnnnnnnnnnnnnnnnnnnnnnnnnnnnnnnnnnnnnnnnnnnnnnnnnnnnnnnnnnnnnnnnnnnnnnnnnnnnnnnnnnnnnnntgtgtgatagagcacagaaacactttaaacttttcttgatgtcacagtataaacaatgatgtttgtaaaccttttccaaggcaaatatcatgtgattattattttggtaaagtaccatcttcacttgtaaagcatgcagaaattgattacatgttaacatcaagyctctaaaggaaaaacaaagttaaggttttactgacctgtatttcttctgcatcatcacttccctctggggtttgagttggtggatcttctctaagccaaaaaaaaagagcagaaaaaaaaaaaasaaatgagcactggagtttgaattgactgtatatattataattccacagcaactgccagctgttgatctcagaacgctttccaaggaggattaagcctcaaaaccccaataaagaaaactggagcaaaccagcacagaaaaactgaagacaaaacaccctgacattggatgtgca

SEQ ID NO: 56586 - DNA, 599 bp, Chicken  19866894311462_2
  misc_feature (1)..(10): n is any nucleotide
nnnnnnnnnntgtgtgatagagcacagaaacactttaaacttttcttgatgtcacagtataaacaatgatgtttgtaaaccttttccaaggcaaatatcatgtgattattattttggtaaagtaccatcttcacttgtaaagcatgcagaaattgattacatgttaacatcaagyctctaaaggaaaaacaaagttaaggttttactgacctgtatttcttctgcatcatcacttccctctggggtttgagttggtggatcttctctaagccaaaaaaaaagagcagaaaaaaaaaaaasaaatgagcactggagtttgaattgactgtatatattataattccacagcaactgccagctgttgatctcagaacgctttccaaggaggattaagcctcaaaaccccaataaagaaaactggagcaaaccagcacagaaaaactgaagacaaaacaccctgacattggatgtgcaccctgtccaaaacacttggattctttccaatgaagaaatcactttctgctctgaaaacaccatagcccaagcttatccacaccctattaatcattctttttgaycctttctgtactcatgcagta

SEQ ID NO: 56587 - DNA, 600 bp, Chicken  19866894311462_3
aaagagcagaaaaaaaaaaaasaaatgagcactggagtttgaattgactgtatatattataattccacagcaactgccagctgttgatctcagaacgctttccaaggaggattaagcctcaaaaccccaataaagaaaactggagcaaaccagcacagaaaaactgaagacaaaacaccctgacattggatgtgcaccctgtccaaaacacttggattctttccaatgaagaaatcactttctgctctgaaaacaccatagcccaagcttatccacaccctattaatcattctttttgaycctttctgtactcatgcagtagcattaacttgttttttaaaagaccaacttaaattaagctttgcctccacactccttttcaagcaaaaaaatagaataaaatttaggtttcaaatgctgacccatatactgctggttctgaaaacaaaacatcctcacacttcacccacagaagatcgtacttgaagtggttacacagtcatgagcttcttcctggaaagttcctttttctacacagatgagatttgctgttgtacacattagcagctctgggagaaagcacttgagtgcaagtattcc

SEQ ID NO: 56588 - DNA, 600 bp, Chicken  19866894311464_1
tttcgagcttttcatttaggaaaaatgctgctactttatgaatatccagagaaccccagaagttctaatttcacataatgcatcctcataataaaacgtttgaaaagtaaattgtcataaagtcatgaaaaatgaaaagtccctgtgggtgttcgatatagctcttaattttcattgacagtgtgaatagtgttagcaggtactgtactcagcctcctgaggacatactgcggcagccttgtggtgactcatgttcttccttagtggtactgtcgtcttacagtactactgtgtccacargtttggtcattctttactagtagtcttcatgcatcaattaaaaatatgaatattaagtgtgctttgtgaggagtgtatgcttaaacaaacaaaaaaaaatcaactaaaccttcttttcctcagttctgccatacgaggagtagagaatgatgtggtacgtgtttctaatgtgtgcactgtttagcttacctgtgctacagcagagcttctatagcaatttgctgtctgatcccagccatgtttatagccttttgcctgtgagtattacctgcattagttaacttgtataatacagaaatt

SEQ ID NO: 56589 - DNA, 466 bp, Chicken  19866894311469_1
tagatttagatgtgcagtgttgtgggccctgtggaatttcctgcctcatcacttgtgtcacttgttcaatcatgtcaagagaaattctaagttggaaagaaatatagaaatatagaaataataaagggaaggatgacattttgataaatttagcagaaaaagtttaggtttttttttttttttttgagtagcaccaattctgttagtctttagaacatttttttcattgatatacttatttgtatcaagatcaagtggattctgcatatgctgatttctaagtttaagattaattagctytcttgaaaccacaagaaggatgatgactgatgatgaactgtctgatgctttctaggtaggagaatatgaaccaatttctacagcacatatgaccagtattttccaggcttggccttgtttcctactggggattcattgtgccactgtgggcatgttacttatgcat

SEQ ID NO: 56590 - DNA, 600 bp, Chicken  19866894311473_1
tattagagtaagcttattctgttctgtaattctctctcccaccttaagaagggaagtacatgctgaattaatgctggaaaggccaaagctagtcatgctactttcagggttaatacccatgacgagatctttgtggtcggggccaagaactgatatgggtcattaagatttttgcgcttaggaaagcacaaccatcttgttctaacatcgcttgttaccctcctcgagaaggatggtacagcaggttttctatgcttcagactagctgattactagatatttggttttgccttttttttyccacacgtgggaaattatgctggagagcaattgtaattatttggctagaaaattactttaatctttctagtgttgactgtctatttcagaagtacttatcagcatcctttctttttttcatttcatatgctcacactttcacaagatccgttaaatgcccgcctgctggaaagaattctgctgggatttctgctcctcttaaatcaagggcagcagtcataaggcttacactgcatctgctcgtacggctgtttttatattttcttgaaatgatttattcttgggggaaaatgatgggat

SEQ ID NO: 56591 - DNA, 600 bp, Chicken  19866894311480_1
tcctcaggatgatcccagcaaatcggcccctgtgcctcctgtcctgcccccacctccagccccgctccacccccacaggtccactagcacaggagcagggtaattacacgcaccagagtaataaatcagtgcacaacactagttttgcttcagcctctcaaagtcacaaagtctttcaggagctgtgactacgatagtcactacaattccctgaaaatcactctgtcataaccctcgagtacaactgtttatcagcagaggttcctacttagcctcatgcagaagcaatgactcagagtrgagctgagtcatagcwggggactgtgaaactaattccgccccaacctcccacctgctctacccagtcctccccaggtggaacagacgagactaacagtatcataagcctgaagagaggagatgcttttgawgttgaagaagaggtgcatctgtaaaagacgtgactgttcataaaaatgaataaagttactgataaagaatatctgttgatgttgtgggatgctgctgcctaaccaacgcttagtgaacatttcatagtagcagtaggatgctggtatttaacgtgtacctgaagagaac

SEQ ID NO: 56592 - DNA, 600 bp, Chicken  19866894311480_2
agcaaatcggcccctgtgcctcctgtcctgcccccacctccagccccgctccacccccacaggtccactagcacaggagcagggtaattacacgcaccagagtaataaatcagtgcacaacactagttttgcttcagcctctcaaagtcacaaagtctttcaggagctgtgactacgatagtcactacaattccctgaaaatcactctgtcataaccctcgagtacaactgtttatcagcagaggttcctacttagcctcatgcagaagcaatgactcagagtrgagctgagtcatagcwggggactgtgaaactaattccgccccaacctcccacctgctctacccagtcctccccaggtggaacagacgagactaacagtatcataagcctgaagagaggagatgcttttgawgttgaagaagaggtgcatctgtaaaagacgtgactgttcataaaaatgaataaagttactgataaagaatatctgttgatgttgtgggatgctgctgcctaaccaacgcttagtgaacatttcatagtagcagtaggatgctggtatttaacgtgtacctgaagagaactgatctgtcagaacag

SEQ ID NO: 56593 - DNA, 600 bp, Chicken  19866894311480_3
cacaacactagttttgcttcagcctctcaaagtcacaaagtctttcaggagctgtgactacgatagtcactacaattccctgaaaatcactctgtcataaccctcgagtacaactgtttatcagcagaggttcctacttagcctcatgcagaagcaatgactcagagtrgagctgagtcatagcwggggactgtgaaactaattccgccccaacctcccacctgctctacccagtcctccccaggtggaacagacgagactaacagtatcataagcctgaagagaggagatgcttttgawgttgaagaagaggtgcatctgtaaaagacgtgactgttcataaaaatgaataaagttactgataaagaatatctgttgatgttgtgggatgctgctgcctaaccaacgcttagtgaacatttcatagtagcagtaggatgctggtatttaacgtgtacctgaagagaactgatctgtcagaacagaaaacaaaatagaacaccagcagtctgccaaaaccagactgtgcccagctggggccttcacaatgcatggtgaaagctccagcaaacaattctcacacacaagcagagtttggga

SEQ ID NO: 56594 - DNA, 600 bp, Chicken  19866894311484_1
tgaacagagctcctcagtgaggcattctacaaaaatcccttatctagtgcatttattatgagacagcaatgcacagacttgctgaaaggatgcactgataaaatatcatggatttttttttttatttttggtggcaggtagtaaaatgctgttgattccagtggtttcttaaagacaaagcagtacagatctaacagaactttcagttctgtcgtgacctgctatctggaattagagcaaaagtttcctagggctgaataggcaattatggtactattggtactattagttatgccattkaatttaacctggaaatggaaaaacataaaacttattttattccaaattctattcattccatttaacatatattgctactccatttaagtctttcaagttttggtcgactactcagttttaacatgccaaaaatgaaccttctctcccttaaaatcctctccataccacactcctgtggcagaccacacggattaagctaaagctcctttttttttttttaatgaaaaaagtatatacaccaagaattaagaagtcataactcatacaccttttctgctcagattcaagtaatatttcatc

SEQ ID NO: 56595 - DNA, 515 bp, Chicken  19866894311484_2
tattccaaattctattcattccatttaacatatattgctactccatttaagtctttcaagttttggtcgactactcagttttaacatgccaaaaatgaaccttctctcccttaaaatcctctccataccacactcctgtggcagaccacacggattaagctaaagctcctttttttttttttaatgaaaaaagtatatacaccaagaattaagaagtcataactcatacaccttttctgctcagattcaagtaatatttcatctccctgaaggtctctttgcagaactattccaaaatcraaaccttttttgctactacactcagtgcaagttcatccaaatactagctcaaatgaaaacaaagtgggaatttaaaaagtagcagtggccatcagaaataacctttctatggcaacagccatataaagacagacagtttactccaggtcaaactgacaatagaaagtcaattgccagatacattttgaagtagcaaaacaaaccaagaaactaca

SEQ ID NO: 56596 - DNA, 600 bp, Chicken  19866894311488_1
agagatttttttttccccaagaggtcattgttactcactccattgtgcattactatgtgtgcagtgtacattactataacgggcagcagaatactaacaaggatacacagaaagaacaccttttacccacaagctaagaactgagctgctctgctggacctgggaccctctgagcatcaccacttggagcccattcagagatggatgcatcagcccaaaacaggtcaacaattaggatttctgacttgctgggaaagagttaagcattaaaagcatttctcttaaggatacaaaataacrtctagaaaataagaaattgaagccatttctcctaaaacaagccccattctctctcatgtttaccagacaaatgccactcatacttggtattcctcacggttgtgggagaagcgctgcacccaaatcccagccggattcttaaaagggattttggctcctttgttaaataccgacagccctatttgggccgggatcaacaactgcatcccaactgcagtgtcctctgctygcctcctgccctcctgcccagctgtccctggtagcactgcaggacacttgctgctcgctcgctgtcacccc

SEQ ID NO: 56597 - DNA, 600 bp, Chicken  19866894311488_2
aattaggatttctgacttgctgggaaagagttaagcattaaaagcatttctcttaaggatacaaaataacrtctagaaaataagaaattgaagccatttctcctaaaacaagccccattctctctcatgtttaccagacaaatgccactcatacttggtattcctcacggttgtgggagaagcgctgcacccaaatcccagccggattcttaaaagggattttggctcctttgttaaataccgacagccctatttgggccgggatcaacaactgcatcccaactgcagtgtcctctgctygcctcctgccctcctgcccagctgtccctggtagcactgcaggacacttgctgctcgctcgctgtcaccccttttatctcccataccttcctgctccatgtaagggcttctccaggtcagggcaattttaccctctcccagcctgcctgtcatcatagggatccctgttcttcacgccctcatccagctgctaacccaaggcaagcaattagcgtggagaaattagcaccatccgcagcagccccagtatcagcagggccatggaaccccacagcggggtgcacagctcccggcctccct

SEQ ID NO: 56598 - DNA, 600 bp, Chicken  19866894311492_1
actgtgtcttgctgagatcttataaagcttacgatggcagctatgtaagttgtcatacataggcgggtgtgtatttaattatagaatgcattttatttaatgctttcgtttagtgagtttaatgctttcaagtaagttaataccctccagagatatcctttgtgatcactaccatagagcttttgcctaaattagtcaaagcagagttcagacagcatttactcctggtgtctttggatgcacagaagactcccttttgttgcctagcaccagtgttcccagctactgcagtaatcctaygaatgaggtttagtctttaagaaaacattacccactggatttgcttcaaaacagactgaagagttaaatactgcaccaggaggtttcacttttaatctaatcttgagtgtggctgctctgtcataggaagaattgaatgctgacacataagtttggtcttcgtgaatttaggggagatgatgagtttagttcttgtcacaagtatatgaatgagaagttctttggtaccaggatttgcaattcctgagtatctctttctcatgggagcgaatcatggccatcagtaaagaaaatctgctt

SEQ ID NO: 56599 - DNA, 600 bp, Chicken  19866894311497_1
gggaccaacactttagcagagtctgctatggtaggacaaaggaaaatggtttcaaactaagggaggggagatctagactgggatataaggaaagtgctttttgtactaaaggtcgtgaagcactggcacaggttgcccagatgggtggatgccccctccctggagacactgaaggtcaggttggacggggtcctgagcacatgatcgactccctgttcattgcaggggagttggactggatgacctttaagggtcccttccaactcagaccattctatgattctgtgatgatatggacayggtgcctaggaattggccaagtgtctcaattctgtggcagagagagctgccattagcatcaggggatgagatggtttccctctcrtgcatgtctgtacacaagacacatctctaggcatgggctcttatttctgcctaaaccctcctgaaatacattgcctttttgacctctacagattttaaggtatccaagaagcttgcaactataactatagcttataaatagcttataattatataccaatataagggcaggtacaatacacagctgcagaagcatctggcaatggggagatggga

SEQ ID NO: 56600 - DNA, 600 bp, Chicken  19866894311497_2
taaggaaagtgctttttgtactaaaggtcgtgaagcactggcacaggttgcccagatgggtggatgccccctccctggagacactgaaggtcaggttggacggggtcctgagcacatgatcgactccctgttcattgcaggggagttggactggatgacctttaagggtcccttccaactcagaccattctatgattctgtgatgatatggacayggtgcctaggaattggccaagtgtctcaattctgtggcagagagagctgccattagcatcaggggatgagatggtttccctctcrtgcatgtctgtacacaagacacatctctaggcatgggctcttatttctgcctaaaccctcctgaaatacattgcctttttgacctctacagattttaaggtatccaagaagcttgcaactataactatagcttataaatagcttataattatataccaatataagggcaggtacaatacacagctgcagaagcatctggcaatggggagatgggatttcaaggccaggctaccttcagtgcccctagattgtatcactgcacttgaatgtggcatttttgggtctcagtctaagatgcag

SEQ ID NO: 56601 - DNA, 599 bp, Chicken  19866894311502_1
  misc_feature (1)..(56): n is any nucleotide
nnnnnnnnnnnnnnnnnnnnnnnnnnnnnnnnnnnnnnnnnnnnnnnnnnnnnnnntgtcctggaagtctcgttaattaagtagaaacccttgtaaattagaagtaattctgtaggtataaattctgatgtaactttttataaatggaactctgattagtgacataagaatgaactgtgtatggactttgaatgaggacagtatgactgtgtagcaaacttgcagagttgaaggatgcttcaggctacgactttctctgtgccaactggttattatatacataacatttcctgtaagctytggtagtttttgttccatctaacccttcaaattccaccataggttacttaccaaacagcattcatgcagtagaagcgatgctggctgcggcgagtattggtgctatctggagttcaacatcaccagactttggcattaacgtgagtagccctgttgtgcattccaggaaagctgccattgcttttgacaaacgtgacaaggacaaattagtggcagatggattctgttcactttaatcttactgccacctcgtggcacagccgagcacaccggattcttttttctagctgcwacaaagc

SEQ ID NO: 56602 - DNA, 600 bp, Chicken  19866894311502_2
gtaagctytggtagtttttgttccatctaacccttcaaattccaccataggttacttaccaaacagcattcatgcagtagaagcgatgctggctgcggcgagtattggtgctatctggagttcaacatcaccagactttggcattaacgtgagtagccctgttgtgcattccaggaaagctgccattgcttttgacaaacgtgacaaggacaaattagtggcagatggattctgttcactttaatcttactgccacctcgtggcacagccgagcacaccggattcttttttctagctgcwacaaagcaagcaaaacccatactttcagatggcagtaaggatttgcagcacagtagtttgagtatcttcaacaaactcaatgctgggagactctcagacaatccataatcttggtgagcttttgttgcatcttacctcgttttctcaaggccctgaagaatgagtatcactgggcatgacgagtgtacgtggaatgactttgtagcttctgaataaaaactgaataggaaaatagagaaaaaaggctacaaaaagtcatgatacccaaacagacattacagcatgccctggaaggtttgg

SEQ ID NO: 56603 - DNA, 600 bp, Chicken  19866894311504_1
gttcagaagtacaccgattttcattctatgattttatgaaaaacattggttttagttgatttgtaatagtaacggatgtccctgtattttttcaactaccccatgctgtgtggtccaccggaatatgtcaaacattgagtataaatgcctgctggaattactctgagttaattaactcataattagctctgaaaatgtcaaaagataagataaaaatgccaagtcgttttcaaccatcttatcctaatatgaatggaaaatgaatagtgacagcttaagattaagatttcaacaaataawattatccaccatgtaccacctttcttccctttgtttggcacagtgctccattttcctttcccttacttttccctctctgatgactcaagttaatccatggtaatctcaaaaactttaaatctgaataaaatgttcatcctattatttatttttgaatgaaatgcattcaattaaaagaaaagaagtctggaattcaaactcagggaaaataaggtaactaaaatattctggtattaaggttacctcttgccatgcataaatccatttgatttcatgttaaattttcatttagtcagcaca

SEQ ID NO: 56604 - DNA, 599 bp, Chicken  19866894311507_1
  misc_feature (1)..(162): n is any nucleotide
nnnnnnnnnnnnnnnnnnnnnnnnnnnnnnnnnnnnnnnnnnnnnnnnnnnnnnnnnnnnnnnnnnnnnnnnnnnnnnnnnnnnnnnnnnnnnnnnnnnnnnnnnnnnnnnnnnnnnnnnnnnnnnnnnnnnnnnnnnnnnnnnnnnnnnnnnnnnnnnnnnctgaaacgtgttgcttgtggactttttaaaaataaacctgatagctttctcagcagtttatctaggcattttctctcatcatcagccttggtccttatagcatgattcaggtggtgcgtttccataaacatgcctgtygggagctgggctactcagttggtgagcacaaacatggtactgttgcaagcagttgtgcacaagtaatgttagagatgcctttagaaagaatgtggtaaagtgatgatgtatacgttaacaccctcttgatatctttagttaaataggagtcttgtctgatttctatgtgggaggagagtccccaaagttttgccaaagaagcaaatatggtttctctcacagctaaagggtgatttcttcccaagggacaggacttgtcatgcacatttgagttgtggtgtagactggatcactgggct

SEQ ID NO: 56605 - DNA, 483 bp, Chicken  19866894311507_2
aagcaaatatggtttctctcacagctaaagggtgatttcttcccaagggacaggacttgtcatgcacatttgagttgtggtgtagactggatcactgggctatagaatcatcttttcccaccattgtgctaaaaggagagtgatgagtggtgtttggtaaaacttaccagtcccttacaagcccgttcctgcagtcatcctggctattatattcttcttatttgaactttgaggtgcttatgctgttaaacttgttcccagtttggcagttgctttgttttcagtcatgttgattcaacmgagcccacatacaattgcttcacatgagagaagccctctttagctgtctctgctgggcacttcggtggtcccacagctctttctgaaagtcttcctcaaagccagacagcaagcatgttaaaacgacagaagacctccagtctaggggcttgcttacagttcttcatcctctcacctctccca

SEQ ID NO: 56606 - DNA, 599 bp, Chicken  19866894311510_1
  misc_feature (1)..(128): n is any nucleotide
nnnnnnnnnnnnnnnnnnnnnnnnnnnnnnnnnnnnnnnnnnnnnnnnnnnnnnnnnnnnnnnnnnnnnnnnnnnnnnnnnnnnnnnnnnnnnnnnnnnnnnnnnnnnnnnnnnnnnnnnnnnnnnnngaaggacagtggggagggggcacctcggggggctttctgcagctttgtcctttgggctgagccaggtgtgagctgtgctttggccatgcacctgctgcagatgtcggaatggctttctttgcccgaacacctgggatgtgtaggtatgtacatgcctatgtatgtgtgtacrtgtacagcagtcgtgctttctctcctcctggcctggctgtgctatgctcagcccatgcaaagactcttagcaccttctttccccagcctgaaatgggaaacaaatcaagacttttgctgcygagagttggayttgttgggtggctgtatggggtctcagcagcagaactgctccctggagatgccctgtcccggtgcagcagacamtggggggacacggtgatgcctgagcatcccctggcactgctccgtgtttggctaagattttaagttgatgtgagcatcagggacgtcaggaat

SEQ ID NO: 56607 - DNA, 599 bp, Chicken  19866894311510_2
  misc_feature (1)..(7): n is any nucleotide
nnnnnnngaaggacagtggggagggggcacctcggggggctttctgcagctttgtcctttgggctgagccaggtgtgagctgtgctttggccatgcacctgctgcagatgtcggaatggctttctttgcccgaacacctgggatgtgtaggtatgtacatgcctatgtatgtgtgtacrtgtacagcagtcgtgctttctctcctcctggcctggctgtgctatgctcagcccatgcaaagactcttagcaccttctttccccagcctgaaatgggaaacaaatcaagacttttgctgcygagagttggayttgttgggtggctgtatggggtctcagcagcagaactgctccctggagatgccctgtcccggtgcagcagacamtggggggacacggtgatgcctgagcatcccctggcactgctccgtgtttggctaagattttaagttgatgtgagcatcagggacgtcaggaattgttgagtatttcctgctagatttggaatgccttttctcttttcttctgacacatcttggcatctagcctgtgataatgcctctcagcacygtgtttctttgggatatctgttcctgcagc

SEQ ID NO: 56608 - DNA, 600 bp, Chicken  19866894311510_3
gacagtggggagggggcacctcggggggctttctgcagctttgtcctttgggctgagccaggtgtgagctgtgctttggccatgcacctgctgcagatgtcggaatggctttctttgcccgaacacctgggatgtgtaggtatgtacatgcctatgtatgtgtgtacrtgtacagcagtcgtgctttctctcctcctggcctggctgtgctatgctcagcccatgcaaagactcttagcaccttctttccccagcctgaaatgggaaacaaatcaagacttttgctgcygagagttggayttgttgggtggctgtatggggtctcagcagcagaactgctccctggagatgccctgtcccggtgcagcagacamtggggggacacggtgatgcctgagcatcccctggcactgctccgtgtttggctaagattttaagttgatgtgagcatcagggacgtcaggaattgttgagtatttcctgctagatttggaatgccttttctcttttcttctgacacatcttggcatctagcctgtgataatgcctctcagcacygtgtttctttgggatatctgttcctgcagcgtggatattttt

SEQ ID NO: 56609 - DNA, 600 bp, Chicken  19866894311510_4
tttggccatgcacctgctgcagatgtcggaatggctttctttgcccgaacacctgggatgtgtaggtatgtacatgcctatgtatgtgtgtacrtgtacagcagtcgtgctttctctcctcctggcctggctgtgctatgctcagcccatgcaaagactcttagcaccttctttccccagcctgaaatgggaaacaaatcaagacttttgctgcygagagttggayttgttgggtggctgtatggggtctcagcagcagaactgctccctggagatgccctgtcccggtgcagcagacamtggggggacacggtgatgcctgagcatcccctggcactgctccgtgtttggctaagattttaagttgatgtgagcatcagggacgtcaggaattgttgagtatttcctgctagatttggaatgccttttctcttttcttctgacacatcttggcatctagcctgtgataatgcctctcagcacygtgtttctttgggatatctgttcctgcagcgtggatatttttgcctttggcaagccgtgtagcatgtctgtgtgcctcagtttcccatctctgtggcaagaatgatgctggctgtg

SEQ ID NO: 56610 - DNA, 600 bp, Chicken  19866894311510_5
aaatgggaaacaaatcaagacttttgctgcygagagttggayttgttgggtggctgtatggggtctcagcagcagaactgctccctggagatgccctgtcccggtgcagcagacamtggggggacacggtgatgcctgagcatcccctggcactgctccgtgtttggctaagattttaagttgatgtgagcatcagggacgtcaggaattgttgagtatttcctgctagatttggaatgccttttctcttttcttctgacacatcttggcatctagcctgtgataatgcctctcagcacygtgtttctttgggatatctgttcctgcagcgtggatatttttgcctttggcaagccgtgtagcatgtctgtgtgcctcagtttcccatctctgtggcaagaatgatgctggctgtggatgctcccagtagtggtgaggggcagtgtggggctgtcattgggagctgatagggaaaagcctcctgctggctttattacaaaaaaggaagagaaagggaagcagatgtaaagggcatctctaacaccatatctgacaaaatctcacatgcagcactaagccgagaaatagtctgtcatcaca

SEQ ID NO: 56611 - DNA, 600 bp, Chicken  19866894311510_6
gcatctctaacaccatatctgacaaaatctcacatgcagcactaagccgagaaatagtctgtcatcacactcccgtgcatggaatctactcaggccatgagctcttcagggcaggaatctgttatctgcttggtgctgcttcctgagtgcagcgcatcacgattgctttggggatcacgtgcaggagaaatggggagggcagaaatcgcagcgctgtctctgagcactttcacttgtgttggggggggggggcagctctgggacagctgctggcactttgccttgccctacctgataccrtgcagccccagtgcgtttgttttgttttccaatggagaacagggaaatgacacgtctgggcagcgctgggagagggctgggggtgctgtggggtgggctgggcgctgtgggggggggctgccgggcagcctgaggctgtcataaaggaaactgcaccgggagtgttaatgcttgagccaagttatggagaaataggtttattgtttgaaataaagtgtgaaagtaagacgtctgggagcatgctgcagagctttggaggcctgggaacaagcagggggctgggagggctctgcctgcccc

SEQ ID NO: 56612 - DNA, 600 bp, Chicken  19866894311510_7
cccagtgcgtttgttttgttttccaatggagaacagggaaatgacacgtctgggcagcgctgggagagggctgggggtgctgtggggtgggctgggcgctgtgggggggggctgccgggcagcctgaggctgtcataaaggaaactgcaccgggagtgttaatgcttgagccaagttatggagaaataggtttattgtttgaaataaagtgtgaaagtaagacgtctgggagcatgctgcagagctttggaggcctgggaacaagcagggggctgggagggctctgcctgccccatggtrctgtcagaggttaartgatatgatgggaatggcagcccttccctgcgcttgcatccatgaattggatggtagaggggcatcttttgcttagaggttgtgaggtgctggcagagctgtgggtgcccattcccagaggtccccctgggcagtctgagctgggagggcaccaagyccatggcagggggtggttgtggggggctgcgaggtcccttccaacccattctgtgattctgtgatgtgatattctatgcttgtctgtatcaggccatatgaaggagggaaggagatggtctctgggtt

SEQ ID NO: 56613 - DNA, 600 bp, Chicken  19866894311510_8
ttgttttccaatggagaacagggaaatgacacgtctgggcagcgctgggagagggctgggggtgctgtggggtgggctgggcgctgtgggggggggctgccgggcagcctgaggctgtcataaaggaaactgcaccgggagtgttaatgcttgagccaagttatggagaaataggtttattgtttgaaataaagtgtgaaagtaagacgtctgggagcatgctgcagagctttggaggcctgggaacaagcagggggctgggagggctctgcctgccccatggtrctgtcagaggttaartgatatgatgggaatggcagcccttccctgcgcttgcatccatgaattggatggtagaggggcatcttttgcttagaggttgtgaggtgctggcagagctgtgggtgcccattcccagaggtccccctgggcagtctgagctgggagggcaccaagyccatggcagggggtggttgtggggggctgcgaggtcccttccaacccattctgtgattctgtgatgtgatattctatgcttgtctgtatcaggccatatgaaggagggaaggagatggtctctgggttagggttctgcataca

SEQ ID NO: 56614 - DNA, 600 bp, Chicken  19866894311510_9
aagttatggagaaataggtttattgtttgaaataaagtgtgaaagtaagacgtctgggagcatgctgcagagctttggaggcctgggaacaagcagggggctgggagggctctgcctgccccatggtrctgtcagaggttaartgatatgatgggaatggcagcccttccctgcgcttgcatccatgaattggatggtagaggggcatcttttgcttagaggttgtgaggtgctggcagagctgtgggtgcccattcccagaggtccccctgggcagtctgagctgggagggcaccaagyccatggcagggggtggttgtggggggctgcgaggtcccttccaacccattctgtgattctgtgatgtgatattctatgcttgtctgtatcaggccatatgaaggagggaaggagatggtctctgggttagggttctgcatacatgtgatggctttgctggttctgcactacaaacatgggctcgaggtgtcagttgggtgctccggtcttgtctcgtttggttgttttcaggccctccaatggcacaaggcagattagctctaccaaaagcccctagaacaacaatctgctggggagtta

SEQ ID NO: 56615 - DNA, 600 bp, Chicken  19866894311511_1
gccgaaataccatgcttgtttccttgctaaacacatgcatatcatggctgcatcctgtgacaacacacatgacaacggacaatagattaccagtgtttttgtttgtttgtttgttttttaaataagtgcaaataatggctgttcatggaaaaaatattggcctttaagtgattaatgctattcagtctaacaattatttaggattgacatagtatgtctgggtgatatataatactttgcactgtgggtaaggggtcaaactgaaaaatctaacaacccctacccctcacagtcttaagmtttataaagataatgaaattcaagtaaatgagtttgaccaattgggctaatgaccacaaraaatggaggagtctcctgggaggaggtaccaacagcacttccaaaaaacttatccaaacattatatagggcattttacagaccaaagtaattgtttatgatctctgttttgcagcccggaaaaaaaatatgtaatgaaacatttcaaaacatgacttggccaaattgagcagtggaatttaatcttctacaatatgaattcagttgccaagtgctcactaggcaattttttttaaggtcc

SEQ ID NO: 56616 - DNA, 600 bp, Chicken  19866894311511_2
caacacacatgacaacggacaatagattaccagtgtttttgtttgtttgtttgttttttaaataagtgcaaataatggctgttcatggaaaaaatattggcctttaagtgattaatgctattcagtctaacaattatttaggattgacatagtatgtctgggtgatatataatactttgcactgtgggtaaggggtcaaactgaaaaatctaacaacccctacccctcacagtcttaagmtttataaagataatgaaattcaagtaaatgagtttgaccaattgggctaatgaccacaaraaatggaggagtctcctgggaggaggtaccaacagcacttccaaaaaacttatccaaacattatatagggcattttacagaccaaagtaattgtttatgatctctgttttgcagcccggaaaaaaaatatgtaatgaaacatttcaaaacatgacttggccaaattgagcagtggaatttaatcttctacaatatgaattcagttgccaagtgctcactaggcaattttttttaaggtccacagtaactgagatatgaaaagtcactgcaaacagcacatctgaggaacattctcatttc

SEQ ID NO: 56617 - DNA, 600 bp, Chicken  19866894311526_1
gtagaatcatggaatggtttggattggaagggacctcaaagtctcaccagcacaggctgctcagtgccccatccaacttggccttgagtgcctccagggatggggcacccacagcttctctgggcaaaaataaggccccagttatgcccagcatatgcagatcagatctcaaagaaggacagaaaagaaagatggattatctgaggcattttagattaagaggacctattctagctgtgaaggagttaactgagaaaagctggtacaaatccatatgctttcttagacaagaagtactgyaggtaagcagggaagagccagtgaagatataaaagrtgygtgtatttgagcattattgacwtaaaagtgactggtagagctcacaggaattttcttctgaaacacatttttcatctgtgaagtcagtttgttgaagctggcactctgtcggaacatgctttctagtctcagtggaaaaggttgcttagatctaagatgggatcactagtcaggaaagaaagggaagaggcaatcaaaagagccaaataattagctcactcatctaaaatagagaaaatccagggtgaagactttgctgtg

SEQ ID NO: 56618 - DNA, 600 bp, Chicken  19866894311526_2
caaagtctcaccagcacaggctgctcagtgccccatccaacttggccttgagtgcctccagggatggggcacccacagcttctctgggcaaaaataaggccccagttatgcccagcatatgcagatcagatctcaaagaaggacagaaaagaaagatggattatctgaggcattttagattaagaggacctattctagctgtgaaggagttaactgagaaaagctggtacaaatccatatgctttcttagacaagaagtactgyaggtaagcagggaagagccagtgaagatataaaagrtgygtgtatttgagcattattgacwtaaaagtgactggtagagctcacaggaattttcttctgaaacacatttttcatctgtgaagtcagtttgttgaagctggcactctgtcggaacatgctttctagtctcagtggaaaaggttgcttagatctaagatgggatcactagtcaggaaagaaagggaagaggcaatcaaaagagccaaataattagctcactcatctaaaatagagaaaatccagggtgaagactttgctgtgtgagaggaagaattctgaaccaatgttttcataatt

SEQ ID NO: 56619 - DNA, 600 bp, Chicken  19866894311526_3
agtctcaccagcacaggctgctcagtgccccatccaacttggccttgagtgcctccagggatggggcacccacagcttctctgggcaaaaataaggccccagttatgcccagcatatgcagatcagatctcaaagaaggacagaaaagaaagatggattatctgaggcattttagattaagaggacctattctagctgtgaaggagttaactgagaaaagctggtacaaatccatatgctttcttagacaagaagtactgyaggtaagcagggaagagccagtgaagatataaaagrtgygtgtatttgagcattattgacwtaaaagtgactggtagagctcacaggaattttcttctgaaacacatttttcatctgtgaagtcagtttgttgaagctggcactctgtcggaacatgctttctagtctcagtggaaaaggttgcttagatctaagatgggatcactagtcaggaaagaaagggaagaggcaatcaaaagagccaaataattagctcactcatctaaaatagagaaaatccagggtgaagactttgctgtgtgagaggaagaattctgaaccaatgttttcataattttg

SEQ ID NO: 56620 - DNA, 600 bp, Chicken  19866894311526_4
cagtgccccatccaacttggccttgagtgcctccagggatggggcacccacagcttctctgggcaaaaataaggccccagttatgcccagcatatgcagatcagatctcaaagaaggacagaaaagaaagatggattatctgaggcattttagattaagaggacctattctagctgtgaaggagttaactgagaaaagctggtacaaatccatatgctttcttagacaagaagtactgyaggtaagcagggaagagccagtgaagatataaaagrtgygtgtatttgagcattattgacwtaaaagtgactggtagagctcacaggaattttcttctgaaacacatttttcatctgtgaagtcagtttgttgaagctggcactctgtcggaacatgctttctagtctcagtggaaaaggttgcttagatctaagatgggatcactagtcaggaaagaaagggaagaggcaatcaaaagagccaaataattagctcactcatctaaaatagagaaaatccagggtgaagactttgctgtgtgagaggaagaattctgaaccaatgttttcataattttgacagcaagcccagctgctacac

SEQ ID NO: 56621 - DNA, 600 bp, Chicken  19866894311528_1
taagcgttgccacatcccacagtgctttatgcagagcagtgtgcagcccctcagggatgtgcatctttcttggcacagagcaaatcccaaacaaccctcagtaaaacagcatgcagtaggaatcatggctaaatcagatcattcgcattagacaaaagtcatcacaacttctacgtagaagaacacactattagcgaggctcctagaacacaacctaagaaaacaagattatgtgcaagtttgagaacccaaagactgaacaaacctagctgggatttgaacggagagttatagagaaayaacatgttagtaatagggcttcttcgcagctacttcaacctttgtagtggaagcagcaacagcccagcaccccaggaaatagaagcggctggaaatatttaattagagtaaagtgcagaaagccaagaaatgcagctgttgccataatggagcatgaagccaacatacctggaaaggtttatctggtgcctggagctggatgtgacacttgctgggtgagtaccagctrctgatggacaagtagtttggcagatactgatccccagatggtctcccatcaattgctgtcactttagtctt

SEQ ID NO: 56622 - DNA, 600 bp, Chicken  19866894311528_2
tatgtgcaagtttgagaacccaaagactgaacaaacctagctgggatttgaacggagagttatagagaaayaacatgttagtaatagggcttcttcgcagctacttcaacctttgtagtggaagcagcaacagcccagcaccccaggaaatagaagcggctggaaatatttaattagagtaaagtgcagaaagccaagaaatgcagctgttgccataatggagcatgaagccaacatacctggaaaggtttatctggtgcctggagctggatgtgacacttgctgggtgagtaccagctrctgatggacaagtagtttggcagatactgatccccagatggtctcccatcaattgctgtcactttagtcttaacaaaagtgatatctgaatgttattcatacatagaaagtctgattcacactttatccccgtctcccattttatattatctggctgctcatctctattgccgtctttacgcagcaaaagcattctcaaaacattggacrgttattgctgtgttgaatcgtatttggagaagtatcttttcatgatggccataaacatcagttccattagcagcaagaaaaaagcaggyg

SEQ ID NO: 56623 - DNA, 600 bp, Chicken  19866894311528_3
tgccataatggagcatgaagccaacatacctggaaaggtttatctggtgcctggagctggatgtgacacttgctgggtgagtaccagctrctgatggacaagtagtttggcagatactgatccccagatggtctcccatcaattgctgtcactttagtcttaacaaaagtgatatctgaatgttattcatacatagaaagtctgattcacactttatccccgtctcccattttatattatctggctgctcatctctattgccgtctttacgcagcaaaagcattctcaaaacattggacrgttattgctgtgttgaatcgtatttggagaagtatcttttcatgatggccataaacatcagttccattagcagcaagaaaaaagcaggygtttgctgcacttaaatcagtaagttgaaggtaaaaggcattaatttcctgtttgtagtaaagactcacaagtgcaggtttgacaagattagttacattaaagcccactaatcccataaagagctttcacccacctccagccagacatattgggcagctgtaggaatggaagggatttcaaactccacgaggccattccttgacaccaatt

SEQ ID NO: 56624 - DNA, 600 bp, Chicken  19866894311528_4
rctgatggacaagtagtttggcagatactgatccccagatggtctcccatcaattgctgtcactttagtcttaacaaaagtgatatctgaatgttattcatacatagaaagtctgattcacactttatccccgtctcccattttatattatctggctgctcatctctattgccgtctttacgcagcaaaagcattctcaaaacattggacrgttattgctgtgttgaatcgtatttggagaagtatcttttcatgatggccataaacatcagttccattagcagcaagaaaaaagcaggygtttgctgcacttaaatcagtaagttgaaggtaaaaggcattaatttcctgtttgtagtaaagactcacaagtgcaggtttgacaagattagttacattaaagcccactaatcccataaagagctttcacccacctccagccagacatattgggcagctgtaggaatggaagggatttcaaactccacgaggccattccttgacaccaattcacttgtgtaaacattgtccttcggtgtgagttcagctttaatccgaacagtgactctgtcagcaggacttccatcggggtaggtgact

SEQ ID NO: 56625 - DNA, 599 bp, Chicken  19866894311529_1
  misc_feature (1)..(170): n is any nucleotide
nnnnnnnnnnnnnnnnnnnnnnnnnnnnnnnnnnnnnnnnnnnnnnnnnnnnnnnnnnnnnnnnnnnnnnnnnnnnnnnnnnnnnnnnnnnnnnnnnnnnnnnnnnnnnnnnnnnnnnnnnnnnnnnnnnnnnnnnnnnnnnnnnnnnnnnnnnnnnnnnnnnnnnnnnntgctgggaatggtgtccacagttcacgtgcctgatgtctagcagggcgttaacttttatttttgccactggcaggcaggaaaagctgctccatccctaacacgttggctaatccccctcagtgcttaccrgggatcagagctgcttagcgtgaggaagaaatcctggaagcagcctcctgcagtagcagtggttttctgctcagacctctcctggaaggaagcttgtcaatagcagtgctcggctttggctgctggggcaatatgggctgacccagcaaccagggtgctgctttcagtgggtctccagcctgagacagcagaaggactctggagggcccgtgtccttctccagctggcagctgcagagggtgttcagctgaatgtggcccgagatggactggcacgggctgcctgctgctgccccacgt

SEQ ID NO: 56626 - DNA, 600 bp, Chicken  19866894311529_2
ccgagatggactggcacgggctgcctgctgctgccccacgtgttttgtggcctggcagctcaggggatgctgtggctgtagagaggctgagcattccctctcagaaaggaatggcactttctgagcagttccacagggaacctgtggtgcttgagaagccctgagcctttgcttttgagtctgtgaaagcacctctcacaggtgtgtatgcaaggaatgtgcctgctgcacatgctgtaccctctgtaactcttcttgggctgccaggacccatctgaggagcctgctccttaaagagcrtgtcccagtgcctgcagggcacacacagagcgggkcacacactgaggtgccccgcagccctccagcttcctgtgctttggggtgaagctgtatgaatgaggcttgctgcccacaagaaaagctttctgtgggctttgaagagctctcccggcttccaggaacttccctgcccttactcaagaggatgatgaagagtgagtttggggaacgctcccctgtaatctcgtttacatttgtgagtcagtaatttccttgttatgcccactgggttgtaaacagtgtctcctgatttaaataggg

SEQ ID NO: 56627 - DNA, 600 bp, Chicken  19866894311529_3
ccacgtgttttgtggcctggcagctcaggggatgctgtggctgtagagaggctgagcattccctctcagaaaggaatggcactttctgagcagttccacagggaacctgtggtgcttgagaagccctgagcctttgcttttgagtctgtgaaagcacctctcacaggtgtgtatgcaaggaatgtgcctgctgcacatgctgtaccctctgtaactcttcttgggctgccaggacccatctgaggagcctgctccttaaagagcrtgtcccagtgcctgcagggcacacacagagcgggkcacacactgaggtgccccgcagccctccagcttcctgtgctttggggtgaagctgtatgaatgaggcttgctgcccacaagaaaagctttctgtgggctttgaagagctctcccggcttccaggaacttccctgcccttactcaagaggatgatgaagagtgagtttggggaacgctcccctgtaatctcgtttacatttgtgagtcagtaatttccttgttatgcccactgggttgtaaacagtgtctcctgatttaaatagggctttctgatagacgaacgtggtgcgttccacagta

SEQ ID NO: 56628 - DNA, 600 bp, Chicken  19866894311529_4
aagctttctgtgggctttgaagagctctcccggcttccaggaacttccctgcccttactcaagaggatgatgaagagtgagtttggggaacgctcccctgtaatctcgtttacatttgtgagtcagtaatttccttgttatgcccactgggttgtaaacagtgtctcctgatttaaatagggctttctgatagacgaacgtggtgcgttccacagtatgtactaatcaccgtggctggctgccatggctttgcttatgcctgggctgatctgatgaggccagcctgctgtccagctgctyggtggcctgaatgtggcttttcttgagccatcctggccaggagaggctgttgaccactgtgattcacagyggtgtgagctggcgtggggtgaggctcagcccggctatctgacctggcaacctgcttgagcagacccacagcaaacgtggccctactgtcccagctcaggcagactggagttcatcctccctgtacctcgatgggatggccacgagctgtaatgggagcgtggctgtgtgctggcagcagttcccatggcgggtcgggttttggctgggtttcatgtatcttgaaatgaa

SEQ ID NO: 56629 - DNA, 600 bp, Chicken  19866894311529_5
tgaagagtgagtttggggaacgctcccctgtaatctcgtttacatttgtgagtcagtaatttccttgttatgcccactgggttgtaaacagtgtctcctgatttaaatagggctttctgatagacgaacgtggtgcgttccacagtatgtactaatcaccgtggctggctgccatggctttgcttatgcctgggctgatctgatgaggccagcctgctgtccagctgctyggtggcctgaatgtggcttttcttgagccatcctggccaggagaggctgttgaccactgtgattcacagyggtgtgagctggcgtggggtgaggctcagcccggctatctgacctggcaacctgcttgagcagacccacagcaaacgtggccctactgtcccagctcaggcagactggagttcatcctccctgtacctcgatgggatggccacgagctgtaatgggagcgtggctgtgtgctggcagcagttcccatggcgggtcgggttttggctgggtttcatgtatcttgaaatgaatttgcctcggagcgagtgctcaacagtgttgggaacacctggttccaggaggcaggaggatttcttccca

SEQ ID NO: 56630 - DNA, 600 bp, Chicken  19866894311529_6
gggtgaggctcagcccggctatctgacctggcaacctgcttgagcagacccacagcaaacgtggccctactgtcccagctcaggcagactggagttcatcctccctgtacctcgatgggatggccacgagctgtaatgggagcgtggctgtgtgctggcagcagttcccatggcgggtcgggttttggctgggtttcatgtatcttgaaatgaatttgcctcggagcgagtgctcaacagtgttgggaacacctggttccaggaggcaggaggatttcttcccagcagtcctccctcccyaggccccttcccattgccctgtgccagctgaggcagagaggagcagggctctgggacagctgggctccgtgcttcctgccctgtggccgttcagttggttgtcttccagcagagttgcgggggaaaccaaagataccacaataagctaatgaaaagcacatctaagtggccactgctcctcgtgcagaatgagaagcatctgctctcaccgcagggccttgtttgtggcaaaacaaatatgctcatggcagggaaatctgggctggggctgtgggcagaggaagctgacacatggctcgt

SEQ ID NO: 56631 - DNA, 536 bp, Chicken  19866894311529_7
gggctctgggacagctgggctccgtgcttcctgccctgtggccgttcagttggttgtcttccagcagagttgcgggggaaaccaaagataccacaataagctaatgaaaagcacatctaagtggccactgctcctcgtgcagaatgagaagcatctgctctcaccgcagggccttgtttgtggcaaaacaaatatgctcatggcagggaaatctgggctggggctgtgggcagaggaagctgacacatggctcgtgatggattgttagcattcacctctaaaatcaatagtgggcacaayttgtctgtcrgtttgtcattcygtgtcattgctgggctggaggatgtgtcacaccgtgctgggctggcagggggctgctccaagtcctggagctgcacagcctgtcctgtaaagctgtgagcagcagagctggggggtgagaccaggatccacctgcccatgctctctgctctctcacccccagttaggctcatgagctgtaccttccaaaagccctcaggtttgaagagctgtgg

SEQ ID NO: 56632 - DNA, 526 bp, Chicken  19866894311529_8
acagctgggctccgtgcttcctgccctgtggccgttcagttggttgtcttccagcagagttgcgggggaaaccaaagataccacaataagctaatgaaaagcacatctaagtggccactgctcctcgtgcagaatgagaagcatctgctctcaccgcagggccttgtttgtggcaaaacaaatatgctcatggcagggaaatctgggctggggctgtgggcagaggaagctgacacatggctcgtgatggattgttagcattcacctctaaaatcaatagtgggcacaayttgtctgtcrgtttgtcattcygtgtcattgctgggctggaggatgtgtcacaccgtgctgggctggcagggggctgctccaagtcctggagctgcacagcctgtcctgtaaagctgtgagcagcagagctggggggtgagaccaggatccacctgcccatgctctctgctctctcacccccagttaggctcatgagctgtaccttccaaaagccctcaggtttgaagagctgtgg

SEQ ID NO: 56633 - DNA, 514 bp, Chicken  19866894311529_9
cgtgcttcctgccctgtggccgttcagttggttgtcttccagcagagttgcgggggaaaccaaagataccacaataagctaatgaaaagcacatctaagtggccactgctcctcgtgcagaatgagaagcatctgctctcaccgcagggccttgtttgtggcaaaacaaatatgctcatggcagggaaatctgggctggggctgtgggcagaggaagctgacacatggctcgtgatggattgttagcattcacctctaaaatcaatagtgggcacaayttgtctgtcrgtttgtcattcygtgtcattgctgggctggaggatgtgtcacaccgtgctgggctggcagggggctgctccaagtcctggagctgcacagcctgtcctgtaaagctgtgagcagcagagctggggggtgagaccaggatccacctgcccatgctctctgctctctcacccccagttaggctcatgagctgtaccttccaaaagccctcaggtttgaagagctgtgg

SEQ ID NO: 56634 - DNA, 600 bp, Chicken  19866894311531_1
attgattatgatacagtattttaaaaaaacatctttttcctaaactgagaagttttaaagaacgaacacaggaaatcttttaccttttgccatacttgaatcagaggctgcattcttggtaatgtaaactgacgtcacgggatatttctgctcttgcaaccattgcctctcttgttcctccattccaactgttacaacacaggggttgttatctttctggcagtcgtcagtgtccaaatcaagtctacgttttaccttttcaaaactgttttctagaaactgttcatttgctgggggaayacttggagtatccatctgctggtgcatactcttgctctgcattagtagtggggatgggctttctacatcgtaagatttattgagttctactggagatttagtattttcttgcaaactggatgccttggtttcgttcacagctaggagcttctgtgttactgtagactgattaatggaaaatggctcattcagttttgaacctacgagtaccagtctctactttatacggtcccctgttgtccatcactacctgtccttccattgcagcagacaatgtccctttgccttctgagtgcccaa

SEQ ID NO: 56635 - DNA, 599 bp, Chicken  19866894311533_1
  misc_feature (1)..(109): n is any nucleotide
nnnnnnnnnnnnnnnnnnnnnnnnnnnnnnnnnnnnnnnnnnnnnnnnnnnnnnnnnnnnnnnnnnnnnnnnnnnnnnnnnnnnnnnnnnnnnnnnnnnnnnnnnnnnnccctccctacaatcaccgtattgtgagaaatccttggaggaaacaaattgtttccattatgcagagatgaacaaactcacttgacccagatgtccagctcagaaaaaaaacatttgtgcaccctctggcttctctattcctaggctaatgttgtcataggcatctgtatttcttgtttcacatagatatgyaatatctttgcaaaagmaatgacaaactgctgcttgtcttttcagggctgagctatattttcaagttgccaatctccatatttaaagctaatctacttatcttttccagggaggacacattaagttaatacaatgctaatagcaagtgttcaggatagtgcttttagcggagtcagactgcctgcgaatgggttaaatatgttgacataaagaacttgcttcttcatttacgatgacagtctgggcatctacgccaggaaaataaactactcttaattagcaatattgtgaaaaaggtg

SEQ ID NO: 56636 - DNA, 599 bp, Chicken  19866894311533_2
  misc_feature (1)..(92): n is any nucleotide
nnnnnnnnnnnnnnnnnnnnnnnnnnnnnnnnnnnnnnnnnnnnnnnnnnnnnnnnnnnnnnnnnnnnnnnnnnnnnnnnnnnnnnnnnnnnccctccctacaatcaccgtattgtgagaaatccttggaggaaacaaattgtttccattatgcagagatgaacaaactcacttgacccagatgtccagctcagaaaaaaaacatttgtgcaccctctggcttctctattcctaggctaatgttgtcataggcatctgtatttcttgtttcacatagatatgyaatatctttgcaaaagmaatgacaaactgctgcttgtcttttcagggctgagctatattttcaagttgccaatctccatatttaaagctaatctacttatcttttccagggaggacacattaagttaatacaatgctaatagcaagtgttcaggatagtgcttttagcggagtcagactgcctgcgaatgggttaaatatgttgacataaagaacttgcttcttcatttacgatgacagtctgggcatctacgccaggaaaataaactactcttaattagcaatattgtgaaaaaggtgactcctctacctcaaag

SEQ ID NO: 56637 - DNA, 600 bp, Chicken  19866894311534_1
atagctagcactgaaaattctctgaatattggtgatgttttattggtaacttgattttttttttgtaagtagaagatctaagaaagttttcttgcttggtttctgagcttcagtatgtgggtagatctgtcttctgtgacgctttgtacttcaacaggaagaaagcaaagaagcagttaaaagataggaaaggcagcagaattgtcaggaggagagaggcaatatagtataaaagctcaagggactggaaaataattgggatttcttaaactgttcagtcagtattacttcagaagtttscttctttcttgagaaggctgttctcttcaatgagactgcagcaagtagagtgaggtgtagcttgtcctaaaatggaaatgccactggatttgctgcattctgtgcacttactttgctctaggatctcttatgtcttcagtacaagtaaactgtacgtaaatgtgagtagttcaatattgaatgtagtggcaatgtatgtagcagtgctctgtagatgtttgccagtaagtctgtgtttcattgtgctgaagcagggataactgcttcaaacgcagctgggaagtatttgagtaagccagc

SEQ ID NO: 56638 - DNA, 600 bp, Chicken  19866894311547_1
gtatattgtccgaaatctgagtcgagtggagttcctgggcatgattggactctttggctccttcttcagtggaattcagctgtaagtgagcaggtttgaactccaagatgatttaaataagtatagctctggcctcctttgaagtactgtgccctactcttgaagggtagccatttctagagtagagtagttatctgcagatttgagaatttccattgtttttaatatctgagatacatacatgtatagctatgtactttaattcaagaactttatcctatgaaagtcccaagaggaggsagaagacgcatctttatcctgtattgcttgaagtcaggtaaatattccacatattgttctggtctatgaacaggaaactctctacagccctctacagttctgtttcatactttttagaagttacttatgttgaaaaacacatgcagtgagaagagattttactgattgatttgttctgtgtaattatgaatgaaatggcagaaataatgaaaatgtccttaagaaattggccttttcactttaaaatagtactcagaagattgtcacatggattttaggagtcatatccacatgtaccta

SEQ ID NO: 56639 - DNA, 600 bp, Chicken  19866894311549_1
caaacaaattgtttcagaggcaacggttaagtcaaatcccataatattaagaaagcaatatgataaaaatatttttctctcatttttaatagaccttaacaaaattctgtaatattacacaccttaggtcagattttactggtaaaactacacagctcagtgagagaaatatatatatgcactattttcttccccaactaatctttattcagacactgactgaacagtgctgaactagaactatgtgatacattccctataatcatagtacagatatggagggaaagtagaaccaaaagmggtttctcatagaactgtaacgtagagtactaattctttgatctctcttaaaattcaatagacggtcagttggctgaatttaaactgtgcaggcagttcactccaagtgatctttatgatcttttcagccacagttatgcactcggtttgaacactgaatgtaactaaccattggaaaatgggagatggagcagattttccaccacatgaatttcttccatgtgcggtcagtatactccctgcctcttactccatcaaaaataaggatttgatgcagtctaatcctttagtgaaaatttc

SEQ ID NO: 56640 - DNA, 600 bp, Chicken  19866894311557_1
agatttctagggagatctccgtggattcgatccccaaacactcatattattatttaaaactcctgcagtaaagtactgacaggtctcaccacggcacacgcagcatttctgctgcggcattactaacgaacgctataattacccagcattattctctaattatatctttagatatttctaattatgaccgttttgctttctcaaagcactcggtaaacatacattaagactgctatttgaaattccccatctcaacagcactccttacaataacaacaaccaacccctgaaggaccaatrtcagagcasaccgcagcagaggctgctcagccaccgaaatccccatcattctcctttcacctctatggtggtggtgaagtactgacaacactcccacrgtttaacctcagcagccccatgcataacgttaatttacaagtttaagttatcaggcaagcgtattgaagtcctctttctgtgtagatggaaattgctcaccttagggcccctctgaagcagcaccacgagcaaccaccttcacaaattaaacattatccgacctcagaatgaaaggcaaagccctcgctcagccacaggagt

SEQ ID NO: 56641 - DNA, 600 bp, Chicken  19866894311557_2
gggagatctccgtggattcgatccccaaacactcatattattatttaaaactcctgcagtaaagtactgacaggtctcaccacggcacacgcagcatttctgctgcggcattactaacgaacgctataattacccagcattattctctaattatatctttagatatttctaattatgaccgttttgctttctcaaagcactcggtaaacatacattaagactgctatttgaaattccccatctcaacagcactccttacaataacaacaaccaacccctgaaggaccaatrtcagagcasaccgcagcagaggctgctcagccaccgaaatccccatcattctcctttcacctctatggtggtggtgaagtactgacaacactcccacrgtttaacctcagcagccccatgcataacgttaatttacaagtttaagttatcaggcaagcgtattgaagtcctctttctgtgtagatggaaattgctcaccttagggcccctctgaagcagcaccacgagcaaccaccttcacaaattaaacattatccgacctcagaatgaaaggcaaagccctcgctcagccacaggagtctcctttca

SEQ ID NO: 56642 - DNA, 600 bp, Chicken  19866894311557_3
cgcagcatttctgctgcggcattactaacgaacgctataattacccagcattattctctaattatatctttagatatttctaattatgaccgttttgctttctcaaagcactcggtaaacatacattaagactgctatttgaaattccccatctcaacagcactccttacaataacaacaaccaacccctgaaggaccaatrtcagagcasaccgcagcagaggctgctcagccaccgaaatccccatcattctcctttcacctctatggtggtggtgaagtactgacaacactcccacrgtttaacctcagcagccccatgcataacgttaatttacaagtttaagttatcaggcaagcgtattgaagtcctctttctgtgtagatggaaattgctcaccttagggcccctctgaagcagcaccacgagcaaccaccttcacaaattaaacattatccgacctcagaatgaaaggcaaagccctcgctcagccacaggagtctcctttcagacagcagcagatactcatctctctgtaactcaacacacacaccggcaccacagaagtgatttcagcagttggatttctacataggttt

SEQ ID NO: 56643 - DNA, 599 bp, Chicken  19866894311560_1
  misc_feature (1)..(21): n is any nucleotide
nnnnnnnnnnnnnnnnnnnnnatgtagggtccatccccctctacttgtagggagtgtaatgctagttgttcacttcagccgatgtggaggttcgtggtagagctatactggttcagtatttcccttctcctgtagaatatctgacacagagcaggctagtgggagtggaggagccagaaggctttgcagtggtgtctgtcggctagcctgcgtgtttgtaggctcaccatcaggcagaggaatacaagggtctgtttctattataagttaaggtgtttatctccccacatcacgtgtttygtcaaaatgttttgtactttagaccacactttatgaaggccactattgtgttctaatttgcatttggtactctttcactttatgcaaaagtgttattcctcctgattaagtaactgaaagtatttagcttaaaatggaatctgtggggttctttgttggtttgttttgttttcctttaggggatgatctaaaatgcagataagcttcctgaaagagatattaaaataattgtagttcctctagtacagtacaagayagggataatagatacagtacagaacatgattagtagagtgtag

SEQ ID NO: 56644 - DNA, 600 bp, Chicken  19866894311560_2
tctattataagttaaggtgtttatctccccacatcacgtgtttygtcaaaatgttttgtactttagaccacactttatgaaggccactattgtgttctaatttgcatttggtactctttcactttatgcaaaagtgttattcctcctgattaagtaactgaaagtatttagcttaaaatggaatctgtggggttctttgttggtttgttttgttttcctttaggggatgatctaaaatgcagataagcttcctgaaagagatattaaaataattgtagttcctctagtacagtacaagayagggataatagatacagtacagaacatgattagtagagtgtagttgttattatgtcaagaattttaatctacgagacgttagccctggtaagcattttactactgtcccttctctcctttccttccgttgtcccataccaagagtgagctcgaaatgtaaccctccctagatctctcaggtttaatcattagtagttaccttaggcactctttacactcttgactcaaacatataatttttaatttgtcctgagcaggagacttcaaatacgagtgtatctcttgggttgcaaagaagtg

SEQ ID NO: 56645 - DNA, 600 bp, Chicken  19866894311565_1
aaaaaaacaccatgtggacattagctagcagaaaatgaagtgcccctgtagagcgagaactgctccctatattaagcacagcagggaaactctcaagcttcctggcttgctagtacatttctccatttctgccaataaaccacatagatttgaaaaagtctgacgaaaatagatcaccattcccaaaataaaacacattaaattcattcccatcaaacatgccctttgaaaaggcaagcagttaggtaaattttaaccaacttttagaatactggccttggtcacatgaagaaccttacrcatggaagactattgcaacagaatcacggaatcatagaattgctcaggttggaaaagaccttaaagatcatcgagtccaaccacaacctaaccatactacccttactataacaaccctctgctcaatcatgtccctgagcaccaatccaaatggtttttaaacacatccagggatggtatctcaaccatctccccggggagcctattccagtgcttaacaaccctttctgtaaagaagtttttcctgataaagcaaaccttttcttctcaactacagaaaaagagaacactgattgcagt

SEQ ID NO: 56646 - DNA, 600 bp, Chicken  19866894311569_1
ttacatgtacgtgtgcagtagctaatttgcaattctgaaaaccttggcttgtttacatcttctctgaagtaacacggggcccatgtgaggaaacaggctgcttttgcaaatgaagtttggagatgggagaaggaaaaagtcgttagttgggcagtattgtagcacaaaatgtcccaacctgctagacttcttgtttaattttcagattatttttagtactcgtgtattacagatgtttttgtctctgtaggtggagcagggaattctctaatgtggatggggggctgagccctggcaccrtgaggtgctcagtgctgggcacagtgagcttgtgttgtctagcagacgcgcagcttagcgatctatgctcatctctaaagcctgactgcttcatcccagctcaaagaacttggacttcctgattgatttgtagtggctattggcttcagctctaaagatctttctttgatcctggctctgttggttgaactgggagttttaccagtctttccacctgagatgtatgtagaaatgacaacctttgagcagttcgaatcaagccttcagcttgaagccctgaatgctaagtgtcttttttat

SEQ ID NO: 56647 - DNA, 600 bp, Chicken  19866894311569_2
tccctttctcctagagctcctaggccatctctcagggtaggctgtcaagtggtatgaattattatttgactatccattttttgtgcaggcacagttgaacattctatctggaaagaaggatagcatatgtaattataaagagacgtctagaaaaggagttcgaatttaaagatgcaagaaatcagtgattaattgaagagcttctgaaatatttggatgatatgatgggaaggtattattaaaatgcgtttgtctagtcattgctatctacttgtttacctggaaaacaaatactattcwataatagcagcatgactacttacacggtactttgtgctcaggtaacaatgtgtttggaggttgaattgctcaacgcaacacaaaccatagggagctcaagagggtgtaaacaaatatcttgagtttaacctcgtgtatcataacagcacggtttggtacatatgattataaagtatgaggatgggcctggtgttgtaatagtaaaaagatgataaagatgttgatttcagcagaaaattgccagattctggcaggcagtgtggtttctggaagacagacttgccatagaaggctggtgtc

SEQ ID NO: 56648 - DNA, 599 bp, Chicken  19866894311575_1
  misc_feature (1)..(43): n is any nucleotide
nnnnnnnnnnnnnnnnnnnnnnnnnnnnnnnnnnnnnnnnnnntttcttgaacacctccagggacaatgaccccaccacctccctgggcagacatctttatcaatgacccgaatagttggatggagtgcattctcagcaagtctgtggacaacaccaagctgagtgttgcagctgataaaacaagaaggaagggatgccatccaaagggacctgaataatcttgagaagtgggcccacattaacctaatgaagttcaacaaggccaagcacaaagtgtttcagttgggtcatggcaattwcaaatatgtgtacagattaggcaacaaytgaattgagagctgtcctgcagacaaggatttgggcattcctgtggatgraaagctagacatgagctactagtgtgtccctgcagcctggaaggtcatctgtatcctaggctgcatcaagatatgtgtggcaagcaaggtgagggagcacctttcctataaagaaaggttgggggagctgggcctgtttagcctagaaaagagaagactccaggacaacctcattgtggccttctgtcagtggtttacgggctcagcccagttccatgact

SEQ ID NO: 56649 - DNA, 599 bp, Chicken  19866894311575_2
  misc_feature (1)..(15): n is any nucleotide
nnnnnnnnnnnnnnntttcttgaacacctccagggacaatgaccccaccacctccctgggcagacatctttatcaatgacccgaatagttggatggagtgcattctcagcaagtctgtggacaacaccaagctgagtgttgcagctgataaaacaagaaggaagggatgccatccaaagggacctgaataatcttgagaagtgggcccacattaacctaatgaagttcaacaaggccaagcacaaagtgtttcagttgggtcatggcaattwcaaatatgtgtacagattaggcaacaaytgaattgagagctgtcctgcagacaaggatttgggcattcctgtggatgraaagctagacatgagctactagtgtgtccctgcagcctggaaggtcatctgtatcctaggctgcatcaagatatgtgtggcaagcaaggtgagggagcacctttcctataaagaaaggttgggggagctgggcctgtttagcctagaaaagagaagactccaggacaacctcattgtggccttctgtcagtggtttacgggctcagcccagttccatgactagtggggtggggggacccacggatccac

SEQ ID NO: 56650 - DNA, 600 bp, Chicken  19866894311575_3
cctccctgggcagacatctttatcaatgacccgaatagttggatggagtgcattctcagcaagtctgtggacaacaccaagctgagtgttgcagctgataaaacaagaaggaagggatgccatccaaagggacctgaataatcttgagaagtgggcccacattaacctaatgaagttcaacaaggccaagcacaaagtgtttcagttgggtcatggcaattwcaaatatgtgtacagattaggcaacaaytgaattgagagctgtcctgcagacaaggatttgggcattcctgtggatgraaagctagacatgagctactagtgtgtccctgcagcctggaaggtcatctgtatcctaggctgcatcaagatatgtgtggcaagcaaggtgagggagcacctttcctataaagaaaggttgggggagctgggcctgtttagcctagaaaagagaagactccaggacaacctcattgtggccttctgtcagtggtttacgggctcagcccagttccatgactagtggggtggggggacccacggatccacgcactgggaaaggaaaaatggaaagggtagggagatgggcctaaaaaaacc

SEQ ID NO: 56651 - DNA, 600 bp, Chicken  19866894311579_1
ttttaggccttggaggacccaagcttcccaccataaagataagagaagaaaaagaaaaccccagacaggcctggttactcttttaaggaaacgttcaaaagagacaagacatttcattgttttggtgggaatatccagcactgaccatgtttccaagtcagagaatggtccctactgtgcatccaaagccatgtttgctgggctgatgaaaactgtgggagaaaaagcaggtcaccaaggacaccaaatgtacagctctgggtgttgaggagtggccatatttcagccactcttgaagargagcaggaaggtctccttgcaggagacagaaaggactgggaagtaatgctcattgcagcatcacacggctttgaggcgaagctgtagccatcagttttcattatgtattaaatatcatgaattggctaatcaattacttaatgggttaggtaactcaatgcaaatgatgatggacctcaatgtgataacacaatgacaacatcgttgttaattatcycttcatttgctctttttatttgctgcccctcaacagctcagtcgcctgcatataaaacccatatgcttctcctccacaccctc

SEQ ID NO: 56652 - DNA, 600 bp, Chicken  19866894311579_2
ggagaaaaagcaggtcaccaaggacaccaaatgtacagctctgggtgttgaggagtggccatatttcagccactcttgaagargagcaggaaggtctccttgcaggagacagaaaggactgggaagtaatgctcattgcagcatcacacggctttgaggcgaagctgtagccatcagttttcattatgtattaaatatcatgaattggctaatcaattacttaatgggttaggtaactcaatgcaaatgatgatggacctcaatgtgataacacaatgacaacatcgttgttaattatcycttcatttgctctttttatttgctgcccctcaacagctcagtcgcctgcatataaaacccatatgcttctcctccacaccctcattattttttgtttcctctctttctactgcttctgctgcaaccttacccaattgtactggcccatgcaacttcaaatacttgtgcatggggacaccttttactatttcacttcatccactgggacttctggatgcctttttcagttatctaggggaattcaaaatttgcagccaatgggcatcttcagtagagaagtatattcattaaaatattttc

SEQ ID NO: 56653 - DNA, 599 bp, Chicken  19866894311587_1
  misc_feature (1)..(85): n is any nucleotide
nnnnnnnnnnnnnnnnnnnnnnnnnnnnnnnnnnnnnnnnnnnnnnnnnnnnnnnnnnnnnnnnnnnnnnnnnnnnnnnnnnnnncctacagggccactcgtggtcttgaaaaaatctgcattaaaggctgaagggaagaaatattacattcttgacacagagctgcagcgtgtccttgggcactgagccatcgagagagctgtgtgagcagccctgtccctgcagcagcaggatggccaagggagccctcacagagctccaccactgcctgcttcccctgaatgccacctacagagccrtacactgagactgagtttccctatcacacatcatgtccctggggctacggcctctgctgcagcatctacagaattagaatcttctccactaaggaagggcatcccgttcttggaactttgcacctagaacaccccaacagtacaaacaccaggcatacagccagmccagcataatggaaacagacttctgcgttgttcagggaatttgaaatttgtatccaaattccatggcttgaactcatctctagttataacgtgtaacataatagtctaacacatcatgagctgtctttcccttg

SEQ ID NO: 56654 - DNA, 600 bp, Chicken  19866894311587_2
gcagcgtgtccttgggcactgagccatcgagagagctgtgtgagcagccctgtccctgcagcagcaggatggccaagggagccctcacagagctccaccactgcctgcttcccctgaatgccacctacagagccrtacactgagactgagtttccctatcacacatcatgtccctggggctacggcctctgctgcagcatctacagaattagaatcttctccactaaggaagggcatcccgttcttggaactttgcacctagaacaccccaacagtacaaacaccaggcatacagccagmccagcataatggaaacagacttctgcgttgttcagggaatttgaaatttgtatccaaattccatggcttgaactcatctctagttataacgtgtaacataatagtctaacacatcatgagctgtctttcccttggtagaacaacagaaacattaaagaatgcctgactcaatcaggcatagcttccaatgggataaaattaaacagctttctgctggtgccacaaggaagatgcatcaggtaccactgcaatgctttaatcacacagcctctgagaaaggatcagcagcacgtacagcgg

SEQ ID NO: 56655 - DNA, 600 bp, Chicken  19866894311589_1
ttgagatattctagtatctggaatgttgcagaggaatcattagtaaataagcatggatacacgtgtatcccctaataagattcagttctcatcaactgatgggaattaaggctgagatggactgtttatgtgttgacagtttctttatgtgggacaaaagaggcccacaggattcaagattttaaattcactattttccccaatatgctacatgtttactcagtatttccttcacttctgttggctatagttgccatcttttgtcaggttagagcgctatcttgtgaacatcaggagacragggtaatctctctgaaagggactgtgttttcccaggcgttatttcttaacacggccattcacggtytctcctgatatgaattaagatatatggttacatctaccaaggatgaaaaattgggtaaaatgaatgtcctcacaagaaccaagaaatactgtatcgacaaaccttccgtgaatattaacaacaaagtccagagtgtctgcatatmattattaaaataactggaaatataatattttggtttcacacatggcaaaaatataactgagcatcgacattaatccaaaattatttct

SEQ ID NO: 56656 - DNA, 600 bp, Chicken  19866894311589_2
tcccctaataagattcagttctcatcaactgatgggaattaaggctgagatggactgtttatgtgttgacagtttctttatgtgggacaaaagaggcccacaggattcaagattttaaattcactattttccccaatatgctacatgtttactcagtatttccttcacttctgttggctatagttgccatcttttgtcaggttagagcgctatcttgtgaacatcaggagacragggtaatctctctgaaagggactgtgttttcccaggcgttatttcttaacacggccattcacggtytctcctgatatgaattaagatatatggttacatctaccaaggatgaaaaattgggtaaaatgaatgtcctcacaagaaccaagaaatactgtatcgacaaaccttccgtgaatattaacaacaaagtccagagtgtctgcatatmattattaaaataactggaaatataatattttggtttcacacatggcaaaaatataactgagcatcgacattaatccaaaattatttctttgttctcttaactgatgagaaaagtcaaaatcttataaagctggaatatgacaactatgctgaata

SEQ ID NO: 56657 - DNA, 600 bp, Chicken  19866894311589_3
tgtttactcagtatttccttcacttctgttggctatagttgccatcttttgtcaggttagagcgctatcttgtgaacatcaggagacragggtaatctctctgaaagggactgtgttttcccaggcgttatttcttaacacggccattcacggtytctcctgatatgaattaagatatatggttacatctaccaaggatgaaaaattgggtaaaatgaatgtcctcacaagaaccaagaaatactgtatcgacaaaccttccgtgaatattaacaacaaagtccagagtgtctgcatatmattattaaaataactggaaatataatattttggtttcacacatggcaaaaatataactgagcatcgacattaatccaaaattatttctttgttctcttaactgatgagaaaagtcaaaatcttataaagctggaatatgacaactatgctgaatagtgggttttttgttggtggtggtggtggggtttttttgctactattattaaaaccagtgtaccaagaaacagcctcagttctctaataccactattatcaatgttatgttacataaattacaagtgataaggtggtaatcaaaag

SEQ ID NO: 56658 - DNA, 600 bp, Chicken  19866894311591_1
tcctggggcaccatcccagccaacttttcaacaccagccactcagggactggagtgtcccctgggatgttacaggacccctccgctcagagccctgtggatgtgaatccaggaaggatccaacccacgcagagctccaggacatggaagcattcacagtgccgtgctgctcgtgcccttctgaactgactgggcatttttcacctgctgggatcgatggagggaaaactgagatttccattctactcctggcttagtactgaaatggagacaatcaaaactcccatctcttagcagcacraaggagctgatgttgcctattcaggaattgatcttaccagtggctcgtgctacttaatacacagacacacaggacaggcagctgagcgtgcctcaaaggttaaccaggcatgaaaacgaccgcgctgtgcatcagcagccagcacagagaggtcactcagaagcagctgctaatctttagagaaacagccgcctytgttacagagagcccttggctgaagccttggagaagcctgagctcccattaaatgccttgcaacagctcttttgtggtcctctgagatagaccgcagcgtgaatc

SEQ ID NO: 56659 - DNA, 600 bp, Chicken  19866894311591_2
tttttcacctgctgggatcgatggagggaaaactgagatttccattctactcctggcttagtactgaaatggagacaatcaaaactcccatctcttagcagcacraaggagctgatgttgcctattcaggaattgatcttaccagtggctcgtgctacttaatacacagacacacaggacaggcagctgagcgtgcctcaaaggttaaccaggcatgaaaacgaccgcgctgtgcatcagcagccagcacagagaggtcactcagaagcagctgctaatctttagagaaacagccgcctytgttacagagagcccttggctgaagccttggagaagcctgagctcccattaaatgccttgcaacagctcttttgtggtcctctgagatagaccgcagcgtgaatcgtcctagaacagagccataaatccycacattatttatgacaaagccctgagcaccagtaaagggaggmagatcaaacagcttatcatcaggcataaatcccctgccaattacaagagatttgctgttgacttcatctccagagaaattaccacgtcctggttaggtcacacagtccttgatgctctattaagtac

SEQ ID NO: 56660 - DNA, 600 bp, Chicken  19866894311591_3
aattgatcttaccagtggctcgtgctacttaatacacagacacacaggacaggcagctgagcgtgcctcaaaggttaaccaggcatgaaaacgaccgcgctgtgcatcagcagccagcacagagaggtcactcagaagcagctgctaatctttagagaaacagccgcctytgttacagagagcccttggctgaagccttggagaagcctgagctcccattaaatgccttgcaacagctcttttgtggtcctctgagatagaccgcagcgtgaatcgtcctagaacagagccataaatccycacattatttatgacaaagccctgagcaccagtaaagggaggmagatcaaacagcttatcatcaggcataaatcccctgccaattacaagagatttgctgttgacttcatctccagagaaattaccacgtcctggttaggtcacacagtccttgatgctctattaagtacttccccaatttccactcactccaaatcctctccagggccccatcactgtcaggataacggtcagggcagctgtcccacatgccatagcagaggctctctgccctcagctcagctgtctttgctcccccca

SEQ ID NO: 56661 - DNA, 600 bp, Chicken  19866894311591_4
acaggacaggcagctgagcgtgcctcaaaggttaaccaggcatgaaaacgaccgcgctgtgcatcagcagccagcacagagaggtcactcagaagcagctgctaatctttagagaaacagccgcctytgttacagagagcccttggctgaagccttggagaagcctgagctcccattaaatgccttgcaacagctcttttgtggtcctctgagatagaccgcagcgtgaatcgtcctagaacagagccataaatccycacattatttatgacaaagccctgagcaccagtaaagggaggmagatcaaacagcttatcatcaggcataaatcccctgccaattacaagagatttgctgttgacttcatctccagagaaattaccacgtcctggttaggtcacacagtccttgatgctctattaagtacttccccaatttccactcactccaaatcctctccagggccccatcactgtcaggataacggtcagggcagctgtcccacatgccatagcagaggctctctgccctcagctcagctgtctttgctccccccagcacccccatctcacacaggtgtgaggaaggcactgctgagca

SEQ ID NO: 56662 - DNA, 600 bp, Chicken  19866894311595_1
gataatttaggattgtcacctctaaacccagacatggatgaacttcaaatgcagagatcagtggaatcagaatctaggaaaacctggcggaaaaccagatgctctaaacagtctatgagctaatagacctaaactacccagttggtgtacgtatgggtttgaaactagccagaagaattgtgaattgctaagtgtgctgtgaagggagaggaggggaaatggtcatgaattaaagactttttgtctggtttggaaaacagtttgcctgtaagaggtaacagaccaggttctctgtggatwtgagttaacccaaaactcaaccaatctgatgttttggcagtacyaaaagctggaattacaccgttcttccctctctcctgtccccatctcctgagtggggtgagtgggaggagctgtagactgggggtggtgagatgtcttgtatggtgctggtgagctgagacaatggctcacaagatctcacaaaactgttacccaaactttagtcaattatttttgttgcaaatcatgtactgagtttttcagagtttactctggtagggctgaatgtttcccaaatcaggatcttagtattactac

SEQ ID NO: 56663 - DNA, 600 bp, Chicken  19866894311595_2
tcaaatgcagagatcagtggaatcagaatctaggaaaacctggcggaaaaccagatgctctaaacagtctatgagctaatagacctaaactacccagttggtgtacgtatgggtttgaaactagccagaagaattgtgaattgctaagtgtgctgtgaagggagaggaggggaaatggtcatgaattaaagactttttgtctggtttggaaaacagtttgcctgtaagaggtaacagaccaggttctctgtggatwtgagttaacccaaaactcaaccaatctgatgttttggcagtacyaaaagctggaattacaccgttcttccctctctcctgtccccatctcctgagtggggtgagtgggaggagctgtagactgggggtggtgagatgtcttgtatggtgctggtgagctgagacaatggctcacaagatctcacaaaactgttacccaaactttagtcaattatttttgttgcaaatcatgtactgagtttttcagagtttactctggtagggctgaatgtttcccaaatcaggatcttagtattactacactggaagcttctgtattggctagacatccacggaggttgcaga

SEQ ID NO: 56664 - DNA, 479 bp, Chicken  19866894311595_3
tgtcttgtatggtgctggtgagctgagacaatggctcacaagatctcacaaaactgttacccaaactttagtcaattatttttgttgcaaatcatgtactgagtttttcagagtttactctggtagggctgaatgtttcccaaatcaggatcttagtattactacactggaagcttctgtattggctagacatccacggaggttgcagaattggatcaatttccttattaatgccttgaactactaaatgaagaatgcttgtgaattaaactctgtgtcaaaggattgtgaaagaattgyggtatgtttatagataacaggactacctaaaatatccttctgcattgctacactgctacactggttttgttttttagggaatttatgaatccacactgtgatttttttcaactctgttaaggagagaaggaaagaatgttaacagggagaacatgttcgtagttttttactactgtctc

SEQ ID NO: 56665 - DNA, 599 bp, Chicken  19866894311597_1
  misc_feature (1)..(2): n is any nucleotide
nnttgtgtgttcttttcggtgttctttagtatgtacaaaatcagtgccattttagacattgttcttctcagtcttagtattcctgttatttttcattgagttatgcttttactgcttaggccaggtgatgctgcagtatggtttggagagatttgggaatgtctgcttgaggatgaaggagcatgctgactttaacgtagcttaagctcacagatttaaaggtgtttatgtatttactttccattgatttccatattagaggaaatacgtggattcattttaagttaggaaggaagcacytgtgcatctcttttggacttttgtatttttgtattttctaattattattatgctgactataactgacactacaaatgctaaatgactttatacactttttcccacaaaagtatccaggtcaggttcacaggcatgtgtttcactgctggtggatctagcaaatgcagtagtttcagtgattactgaattcctgtatctatagaacactgtacgtcaagggttcaaattcatacattgtcataatcttggatttttttaaaaatgctttcaagataatatgcttgcatagtgccctcagt

SEQ ID NO: 56666 - DNA, 600 bp, Chicken  19866894311599_1
gattcagtactatgagattttctctgtgatacttatcattagataaaagcactgagtagtggcaaactgattgatcaaggtcgttgtagaagtactttttgaaatgcaggcagcaatgtcccaaaatggcaagcaagttctagttctgtcatttagatgcatgagcaaagcttcaataaacagaaggaacagtgaacatttataaaactcctgctctgggtctgctggatgtagcctcgtttgtcaatctgaggacccgaaaactcaacgctaagatgcttcccaatgaattttgattcwgcaaggagctactcaccacaggaacaatttgtctttagtctgacttgctcggatttgtaatgcttcaccttttcattttgtacgctggccccaagcaaaaatgtgaggaatccattgctgaatcaccctatctcatgcaaaacttgtttgaagacaaaagagatgataacatccatttttggaagaagactttgtgcattgttagttgtgtgccagcctccttttcatttcagaatattcaacagatatcgatgaacttgatgtttccataatgtccagaatgacaatttttgtagctat

SEQ ID NO: 56667 - DNA, 600 bp, Chicken  19866894311601_1
tagatgatctgaggaggtcccttccaacctaaaagattctgtgaaatattggctgccagaagtatgtcatttgggagcagtataggggtcacaagaaaggagttcttgagtcagagtgtctgagccagggactatgggtaggtcttgttgaccacagtgaggacggagtgaggcagagctgtgatgtatttctcagaggattcaggagcatttacaccaagcatgatcctaatctaggtgtgccccaggtgttttacagcctgtccttgcatggctgagatcaccactggagtacgatamttttgagaagcctgaattgtgacatatcttctgggaggagggtaggtcatgtaattyggattgatctacgtccagcaccatcatctgcttgtgtggtttattactgatgttgggttgtacattatttttagttcatttgactttgctaacctttggtaatctgcttttttttcatttgggaaaggctaacagccctgcttcctcctcctgtccaccccttggcatcatctgcgttaacttttcaattcctgcccatgcaatatggctaaggactggaaataaatgcagtcttttagcagt

SEQ ID NO: 56668 - DNA, 600 bp, Chicken  19866894311601_2
agaagtatgtcatttgggagcagtataggggtcacaagaaaggagttcttgagtcagagtgtctgagccagggactatgggtaggtcttgttgaccacagtgaggacggagtgaggcagagctgtgatgtatttctcagaggattcaggagcatttacaccaagcatgatcctaatctaggtgtgccccaggtgttttacagcctgtccttgcatggctgagatcaccactggagtacgatamttttgagaagcctgaattgtgacatatcttctgggaggagggtaggtcatgtaattyggattgatctacgtccagcaccatcatctgcttgtgtggtttattactgatgttgggttgtacattatttttagttcatttgactttgctaacctttggtaatctgcttttttttcatttgggaaaggctaacagccctgcttcctcctcctgtccaccccttggcatcatctgcgttaacttttcaattcctgcccatgcaatatggctaaggactggaaataaatgcagtcttttagcagttctcgtgtgtgtcatgcccttattattgtaccaatagggctggaagatgatgcatta

SEQ ID NO: 56669 - DNA, 600 bp, Chicken  19866894311626_1
atttagcacttgtagaattaaactggttagttttgtttataataaaacttataaaagtaggaggagtggagaacatggaaaagccttagacaaaccacaacacatctgttctgttagtgaattcttgtataattcaatgatgaaaagagaccatagatgtgctggaattaaccaggtactacttgtgaaccgttaaaggcatgtacaggctgtgcagatgaatggtccttttgcaggtttttgcttttaaggaaatccccctcatcccccaaccattttcttgttactgtttcactctgrcttttcagtctcctgtaaatgtttggttcattgtgctaggtaggatgtttagaagctagaaaccattatatcactcttgaattcctgttgaggtgaggtcatgtgtagaatagagtgaagtaagaaaacttacatgggaagtagaactcttatttcccctttctttgattcgtttatacagtacaaaaaacaaaacaaaacaacaacaacaaaaaacacacagagaaatcttttaggaatgttaaaaaaaaccaacagatttatattacttatagattaaatcattctaaatattttttt

SEQ ID NO: 56670 - DNA, 600 bp, Chicken  19866894311628_1
aaataatacttggtttcaaaccagatacatgatagcctaaaaatctcttgctgcaaaggtagcatggaaaactacagtggattgactgtttgctaaacctgggtgtgtggtttgcaaaaggcgtgtaattatgttagctaaatgtagctaggtagtataaaatactgttatttacatcagtatagtttatttcctcaaaagaacacactacagtgggatacatttcttcatatattacaggcccaatcactgtacctatattgaaaaagcaaacacactaaatggtctttcccaaacccyataacatcttaaactcatcatcacactggtaccgagcttacatgcacaaatcagaagcagtgaacatctgagagtccttactgacaatgaattagtgtttccctctttgaagttacgtggcaccctttcagcacatgtagggcaggactaatacctagttcttttgaaaaaatccattcctttagcccatatgtaaaccagaaatgtaacagtcagtagctgaatagctattaagcttttgaactttctggaaaactggaaacaccaraccagctagttcttcaagctgaagaaccacca

SEQ ID NO: 56671 - DNA, 430 bp, Chicken  19866894311628_2
gcaaacacactaaatggtctttcccaaacccyataacatcttaaactcatcatcacactggtaccgagcttacatgcacaaatcagaagcagtgaacatctgagagtccttactgacaatgaattagtgtttccctctttgaagttacgtggcaccctttcagcacatgtagggcaggactaatacctagttcttttgaaaaaatccattcctttagcccatatgtaaaccagaaatgtaacagtcagtagctgaatagctattaagcttttgaactttctggaaaactggaaacaccaraccagctagttcttcaagctgaagaaccaccagataaatcattttaagaatatctagctttaaggagaaaaacaaaatctacgtgtccttctcccccacacaaagggttagactattattaaatcctcaa

SEQ ID NO: 56672 - DNA, 600 bp, Chicken  19866894311631_1
accacagtttccattagtgaaatatttcagttgtagctacttgtaaaatgattcttctaatgcatctaaattcagtgatgcaaatatgccagaagtttaaattatgtcagtagaactttactgtatttgcactggaagtgaaaacaagtagtaacttaatattctctttgataaactcatgagctgcattattatcaagtgcatacaacagaagtgtcaacacttctaaggtcaccaaagtactatcaactgaatactaagaatagtgtgccaaggcatagccttgaatagcattcaggyaccaactatgatacagcaattcaaagctaggttcagtaaaataacttctgaagttgattgaatgtgtactgcctgcaggtaacacaaaccaagaccgtgtatgagtgcaggtaccataaacttatttttcagaccagcaaacagaactacactttgtcaaagaattagatctctggagaattagtcttgtttgcttaaccagatgcacttcacagacctaagcaacagcatttttcaaagaaattagaatgattgatgcactccaagataggccacatcaagaacagcaagtagaaaaga

SEQ ID NO: 56673 - DNA, 600 bp, Chicken  19866894311639_1
tatactgtactcattccttttattttaatcacggtgcaaatctgtatagcagatttgcagaagcacttaactgcaaaatacgtggtaccaaagtggtgtcgctccttagagagtattggatcttactgtaagacagggattagcaacactgagcagtagttattcatacaggaggagaatgaaaatattttagtttcctgtctttttcccacgtactgtctgattcatggggaagaacgcccaccaaaacatgagctatccactgctagccttgttagaatggttttgtgtggctgtgcrtgtgtgttagtgaaacaagcacacatgaagggagggagcaaatcaatgattattgcttatttgaccatggtaaaaggctgttgctttatcaaacgcgttggtctgagtttcagctgctgtaaatactgatacagttattttattatccttgaaaaccatcaattaccatacttgtctgtggtaacctcaggtttaccgtcacacatcagtgcctctgtttcaactagaacctgatttttcagtttgatgcattcttctggctggctgggcgtgcacagacctggctaaagcaaagttgtc

SEQ ID NO: 56674 - DNA, 600 bp, Chicken  19866894311642_1
ccatattgtgtctgaatggaatttctacagctgactttaccctaggtattttgttgcttgttttttttcttcagatgatcgttttgcttagataacatcattttcatcttgaaacgatgaaccatgaaaaaagagatgtttcagtttggtcatagactttagcacagttgtcttctttgggagcgttctcttaagtcgtacagttgataagcattttaatggaactacttcaatgtatttaaatttcagcctgaatattattttgaagtagaaatacatcagtttcaaggcaagcaattrtgaaaagtacaaagtatgtagcaatatcagtaatatcatgacaaagggtgctgtctcaaggttgaattttgtcaacttttctttctgaagaagtggacgaaaatagtggtagcaagcagtgcttcttccttttctatttttttcagaaataatttactcttttcagaaaatcacactaaatacttaccaaaacgtgcatattcatgtctgtattctctgtatatttgtgtatgaatttactactcacagtttttgggacaatatgtaaaaaacaggagtgaagttacrcataactcttta

SEQ ID NO: 56675 - DNA, 600 bp, Chicken  19866894311642_2
ggcaagcaattrtgaaaagtacaaagtatgtagcaatatcagtaatatcatgacaaagggtgctgtctcaaggttgaattttgtcaacttttctttctgaagaagtggacgaaaatagtggtagcaagcagtgcttcttccttttctatttttttcagaaataatttactcttttcagaaaatcacactaaatacttaccaaaacgtgcatattcatgtctgtattctctgtatatttgtgtatgaatttactactcacagtttttgggacaatatgtaaaaaacaggagtgaagttacrcataactctttataattactttgcatcttcttgtttgaattgtttttgttttcctatggatttaataattgaagtttacatatcctgaaatcattacattttaatggataaaaactctttcaataagtcttttgaaacagtcatttagcaaagtggattttgtagctcttggaagaatttaagccttttaaggatattgattttaatcttaatgcaaaatatcttattcttttatttgtgtttaggaattgcagagagttttctaccacttctaaacccgtttgttatgtaattcttcaa

SEQ ID NO: 56676 - DNA, 600 bp, Chicken  19866894311650_1
ctacccaaacatatcaatgcttttttttttcctctccttttacactccctaatgctctttcagggattacagcagcacaagggtatgcgttctttaacatctccatctgaaaactattataggaaaccagcaactaaatataagttgtccaatcagagcctgagccagccacattgatgctgggatcccaaaatgctatcatagacaaaagcacttaccacagaaacacagcaaaagtgtacttgccaacacactgctgcagaaaccaattcctgcttcagagaggttttctggagaaawgtgctttgtaaacaaagatgaaaaatacccttactttaagttaacatgaaaacaaggacaatagtcctgctgaaatcagcaactctatggtgaaacaatatgctacacacatcatttcctacagtattttcaattagctgcatctaacgaaatacttttctcctctctttacatgcacacattccagagagcatgcacaagctgaatcatcatactgtggcgaaaacwtatgggaggagggaaaatatctttatatctctatcaagtgccttctgacaaataaagcattctgacagccca

SEQ ID NO: 56677 - DNA, 600 bp, Chicken  19866894311650_2
cagcaaaagtgtacttgccaacacactgctgcagaaaccaattcctgcttcagagaggttttctggagaaawgtgctttgtaaacaaagatgaaaaatacccttactttaagttaacatgaaaacaaggacaatagtcctgctgaaatcagcaactctatggtgaaacaatatgctacacacatcatttcctacagtattttcaattagctgcatctaacgaaatacttttctcctctctttacatgcacacattccagagagcatgcacaagctgaatcatcatactgtggcgaaaacwtatgggaggagggaaaatatctttatatctctatcaagtgccttctgacaaataaagcattctgacagcccacttctccctgagcagcatctataaaccttatcacgggttatttgttcccaggctaaacattcatcccattcctactctgcttctgaggggaatttcaacaggaccatttggcccagttgtcctggaagttagctcaaatacacttctttaggtagaagaaattagtatggatgatttacagtgttcagccgtctcccagccactcgctactttgaaaacagcactaaa

SEQ ID NO: 56678 - DNA, 579 bp, Chicken  19866894311661_1
tggtcattaataaaattacaaaagcacttttaaattaacttcagaagcaaagattaatatgaaagcatgctcaagcacattccattttaaactgtcaggctaaacaccgagtatcaggtcttctaaaaatctcttcttccttgccaacagaagaatgggaaatcttttgttttagctgcagtattttttctgggggtttaccacctctctccttaaacctgtactaacaaaagagcacctgcaaagtgtttgcaggaaggctgcagtaggacctcccagaagggtgtgaggtgagctccraaccctaartgcctccacgcaccatggcagtagagtggtgagawgtgtagtaagaatcaggctgctcctccttttatttattttattttctcaatgtttccttgaagagctcttaaaaaatagatggggggaaaaaattggaagggaagtgctttgtgagctgcaaagctaagccatctacttataggcagtttccttaggcacactgcatcaccaccagattctccgaagatgagagtcatggaggaggtagcacacagctcagctaagaaaacacag

SEQ ID NO: 56679 - DNA, 570 bp, Chicken  19866894311661_2
ataaaattacaaaagcacttttaaattaacttcagaagcaaagattaatatgaaagcatgctcaagcacattccattttaaactgtcaggctaaacaccgagtatcaggtcttctaaaaatctcttcttccttgccaacagaagaatgggaaatcttttgttttagctgcagtattttttctgggggtttaccacctctctccttaaacctgtactaacaaaagagcacctgcaaagtgtttgcaggaaggctgcagtaggacctcccagaagggtgtgaggtgagctccraaccctaartgcctccacgcaccatggcagtagagtggtgagawgtgtagtaagaatcaggctgctcctccttttatttattttattttctcaatgtttccttgaagagctcttaaaaaatagatggggggaaaaaattggaagggaagtgctttgtgagctgcaaagctaagccatctacttataggcagtttccttaggcacactgcatcaccaccagattctccgaagatgagagtcatggaggaggtagcacacagctcagctaagaaaacacag

SEQ ID NO: 56680 - DNA, 535 bp, Chicken  19866894311661_3
aagcaaagattaatatgaaagcatgctcaagcacattccattttaaactgtcaggctaaacaccgagtatcaggtcttctaaaaatctcttcttccttgccaacagaagaatgggaaatcttttgttttagctgcagtattttttctgggggtttaccacctctctccttaaacctgtactaacaaaagagcacctgcaaagtgtttgcaggaaggctgcagtaggacctcccagaagggtgtgaggtgagctccraaccctaartgcctccacgcaccatggcagtagagtggtgagawgtgtagtaagaatcaggctgctcctccttttatttattttattttctcaatgtttccttgaagagctcttaaaaaatagatggggggaaaaaattggaagggaagtgctttgtgagctgcaaagctaagccatctacttataggcagtttccttaggcacactgcatcaccaccagattctccgaagatgagagtcatggaggaggtagcacacagctcagctaagaaaacacag

SEQ ID NO: 56681 - DNA, 600 bp, Chicken  19866894311664_1
caaaactatttattgtttcacctacgaacaagttggtcacctaataacatactgacaaggtattcagctgggatatggaaatccacattacctgccttacagggatccgggggatttgtttgccaaaaccactcccacttcaatggctcgataacaagatggcatatggattagagataccttagttacaaatgcaccaggtcagtcattgtaaagtatttaaccacctaactttctgcaaagaaaaagacattgttacccagacttacacttgaatggctaggaattctctcccccccwggacaaagataaatcagaatcagtcacaattaaattcacattaatcattaacaccgtaacaaaacccagtgatgaaatcttttaggagctcattaacaagggcataacgtacacacttttatttaaacatagcaatttacacaacagctaatttccaccccccggaaagcctgcgtacccggatatcagaattagcacctaatgttcataaacccaataaaggctttgcatgattatttactgcaagcactggtcagatcctaagcaacgtggatatatgaaataacccaacttcctgtg

SEQ ID NO: 56682 - DNA, 600 bp, Chicken  19866894311664_2
aacaaaccacagttttggtctgaagttattgcagtgcaaatctaaaatacgtctttgcagagcagtgggacacacagaggtaggtacactcctccttcttggtaagaacttaatgttgcttaagagtagttcaagctaagtagctctacgttaggtatctcaggtatgctaacaggtcgtggcagactgcatgaacagagagatttaaaatgatacataaaatatttcactgttattaaaaagttccactgcaagaggttactttttttgtggactgttcttagtttgaaattcactcayctgaacttgtagtgacataatgctgtatctatctcgatgctcagtagcttagcaaggtaattttagggtcactcgagatcagaagagtgatgtcttgtgaaaataaagtgcactttttttgctcagagccatggctcatccttctgctaaaaagcagcctctmattagatgatctcatttatcaaccaggattgtcagaaaagcaatcaagacccagtccagtgatggaattggatggaaattgccaggcaatgccagaaaagaaagccactttgggcataattcttgccttctctcttt

SEQ ID NO: 56683 - DNA, 600 bp, Chicken  19866894311664_3
gtatgctaacaggtcgtggcagactgcatgaacagagagatttaaaatgatacataaaatatttcactgttattaaaaagttccactgcaagaggttactttttttgtggactgttcttagtttgaaattcactcayctgaacttgtagtgacataatgctgtatctatctcgatgctcagtagcttagcaaggtaattttagggtcactcgagatcagaagagtgatgtcttgtgaaaataaagtgcactttttttgctcagagccatggctcatccttctgctaaaaagcagcctctmattagatgatctcatttatcaaccaggattgtcagaaaagcaatcaagacccagtccagtgatggaattggatggaaattgccaggcaatgccagaaaagaaagccactttgggcataattcttgccttctctctttctctccccatttttgttctaaattatgcagttcttattaraagtcttccctcctacttacgaagcctggctcaacattctcttcacaagtgctaccagcgaagctgtcacgtgcactgatacaccaragagaatggtgacattatatgaagaaacatcatatt

SEQ ID NO: 56684 - DNA, 600 bp, Chicken  19866894311664_4
tcagtagcttagcaaggtaattttagggtcactcgagatcagaagagtgatgtcttgtgaaaataaagtgcactttttttgctcagagccatggctcatccttctgctaaaaagcagcctctmattagatgatctcatttatcaaccaggattgtcagaaaagcaatcaagacccagtccagtgatggaattggatggaaattgccaggcaatgccagaaaagaaagccactttgggcataattcttgccttctctctttctctccccatttttgttctaaattatgcagttcttattaraagtcttccctcctacttacgaagcctggctcaacattctcttcacaagtgctaccagcgaagctgtcacgtgcactgatacaccaragagaatggtgacattatatgaagaaacatcatattctagatggcactttaaacaaagaaaaacaaaaccascaaaaaccaggaggctgacatgaagataaagtcttcatgtataggaacaccctctctaattcatcagtgacaccatctagcttattgaaagaataacagtgtacttggctgtagactgcaatgtgattcaacccaaaggtg

SEQ ID NO: 56685 - DNA, 600 bp, Chicken  19866894311664_5
gccatggctcatccttctgctaaaaagcagcctctmattagatgatctcatttatcaaccaggattgtcagaaaagcaatcaagacccagtccagtgatggaattggatggaaattgccaggcaatgccagaaaagaaagccactttgggcataattcttgccttctctctttctctccccatttttgttctaaattatgcagttcttattaraagtcttccctcctacttacgaagcctggctcaacattctcttcacaagtgctaccagcgaagctgtcacgtgcactgatacaccaragagaatggtgacattatatgaagaaacatcatattctagatggcactttaaacaaagaaaaacaaaaccascaaaaaccaggaggctgacatgaagataaagtcttcatgtataggaacaccctctctaattcatcagtgacaccatctagcttattgaaagaataacagtgtacttggctgtagactgcaatgtgattcaacccaaaggtgctaatatgaacacatccatctcatttccactaatacacaagatgtcatgcacggctgagacatcagatttgaaatctatttacaatt

SEQ ID NO: 56686 - DNA, 600 bp, Chicken  19866894311664_6
aaagcaatcaagacccagtccagtgatggaattggatggaaattgccaggcaatgccagaaaagaaagccactttgggcataattcttgccttctctctttctctccccatttttgttctaaattatgcagttcttattaraagtcttccctcctacttacgaagcctggctcaacattctcttcacaagtgctaccagcgaagctgtcacgtgcactgatacaccaragagaatggtgacattatatgaagaaacatcatattctagatggcactttaaacaaagaaaaacaaaaccascaaaaaccaggaggctgacatgaagataaagtcttcatgtataggaacaccctctctaattcatcagtgacaccatctagcttattgaaagaataacagtgtacttggctgtagactgcaatgtgattcaacccaaaggtgctaatatgaacacatccatctcatttccactaatacacaagatgtcatgcacggctgagacatcagatttgaaatctatttacaattgtacatattttacaagatacatttcatctttacagctacagaataaaccaaactgacattggtagcgtccaa

SEQ ID NO: 56687 - DNA, 543 bp, Chicken  19866894311664_7
tatgttaaacttagttattaaaaacatttaagtgcatgcctacaaggaagctttcaggaaagatggcaatgaactagtgttgcttaaaaattacactggtttgtgtagaaaattgaagttccgttcaaaaacctcacaaaagcctaatagaaatctaattggctaaaataaatacagtttattacacttaaccaaaaaaatgcacctttaaaaatgtattgatttgagctcatctgatttttagccttgaatctccttcccttcccaagaagcagatagtgctaggtgagaataatgatrctcttccaatttaacaccaattattatcctgcataaacctgaggctgcagcggtgggggcagcttgtcattctccacgttttcagagtcaatagctgctaaggcttgatttttttggttttatctctaacggatatttctcaacaatatcttggacttcttttgcaactccatcagtccaatctattaaggtctttctcaagcttcttggcttcactcacaattctatcctgtctctcattca

SEQ ID NO: 56688 - DNA, 599 bp, Chicken  19866894311668_1
  misc_feature (1)..(67): n is any nucleotide
nnnnnnnnnnnnnnnnnnnnnnnnnnnnnnnnnnnnnnnnnnnnnnnnnnnnnnnnnnnnnnnnnnnatcgagttgctcagtgcctggtccagcctgaccttgaacgtctcccaagtttcttagctgaactactgagattgtcacgtgctttaaaaaaatcttaatcatatcctgtttactttttcccctgtgagtgtctgtttctgtgacctgtctaccacaagagaagcaaaggtggcatgtcttatattcaggctgatatgttatgtgaagcttttgatctggaaaaaataactctrtacacagacgctcttagatgaaaaacctgaggaatatgtaccatctaagctgtttgggaagaacgtagcattcactggtagtgttgacctactaagtgcatggttcttcatatgattaggcttaaaataataagaagaraagtctaagaacaggtaatttaaatttatattcttgcaatttgatttcttattttcaaattctttaaaattcaacacaaaactacattccagtgccctgaacrcctacgaggctcctttttgttttccttgggctatttacattgcctgttgtggctctc

SEQ ID NO: 56689 - DNA, 600 bp, Chicken  19866894311668_2
tgtcacgtgctttaaaaaaatcttaatcatatcctgtttactttttcccctgtgagtgtctgtttctgtgacctgtctaccacaagagaagcaaaggtggcatgtcttatattcaggctgatatgttatgtgaagcttttgatctggaaaaaataactctrtacacagacgctcttagatgaaaaacctgaggaatatgtaccatctaagctgtttgggaagaacgtagcattcactggtagtgttgacctactaagtgcatggttcttcatatgattaggcttaaaataataagaagaraagtctaagaacaggtaatttaaatttatattcttgcaatttgatttcttattttcaaattctttaaaattcaacacaaaactacattccagtgccctgaacrcctacgaggctcctttttgttttccttgggctatttacattgcctgttgtggctctcagctctgtttattaaaggtccatagcccacctggtgtttctgcctaattatacaatcctatgacacaagctccttcggttgtttatgtgttcactaagcataccagcagtcaataaaatgttactacagctaacaggttt

SEQ ID NO: 56690 - DNA, 600 bp, Chicken  19866894311668_3
gtcttatattcaggctgatatgttatgtgaagcttttgatctggaaaaaataactctrtacacagacgctcttagatgaaaaacctgaggaatatgtaccatctaagctgtttgggaagaacgtagcattcactggtagtgttgacctactaagtgcatggttcttcatatgattaggcttaaaataataagaagaraagtctaagaacaggtaatttaaatttatattcttgcaatttgatttcttattttcaaattctttaaaattcaacacaaaactacattccagtgccctgaacrcctacgaggctcctttttgttttccttgggctatttacattgcctgttgtggctctcagctctgtttattaaaggtccatagcccacctggtgtttctgcctaattatacaatcctatgacacaagctccttcggttgtttatgtgttcactaagcataccagcagtcaataaaatgttactacagctaacaggtttggtctacccacaccctattcactataatggtaatttccataagtggaaaggaacatgttatgcctgaaaattgatctactttgcattaggacaaagaagaaat

SEQ ID NO: 56691 - DNA, 600 bp, Chicken  19866894311668_4
cttcccctctctctgctgagatgacaaagagtactggaaacaaaacagaacaagtgggttgagatgaaaactatttactatttatttatttactattcacttattttactatttacaaagaagcaaaaatgctataataactatatatacagctgcaatatgattacttactgcctgccaatggatgcatagcaacaatatgatggcctgtaacaaatacaacatttcaccaatgcccagaagccccaagcagtagccacccctaagcctacagctttatgtccttctgcatgctatcargtggtatcaaatagcctcttgccttatttaggcgtctgttgcggccccactgcatcttctgcagctgtaaagaaaggggctgtttcctagggtgtgagggaataagccttaagtaaaggaaaatttaatagtctcttcagtggtagaattgaaggcagatctggaaagttaagactaagagctttctttaccttcaatcttgggtctcttatgttgtatctctggtatttttggtatgtaaacagaagatgatgatagcttgtaagtgaattgaacatatatttcaggaaaacatcaaat

SEQ ID NO: 56692 - DNA, 599 bp, Chicken  19866894311673_1
  misc_feature (1)..(8): n is any nucleotide
nnnnnnnngagcagcctgcttcctaaaggctgacattcattttgctgactctctctcccagaaatttccaccccttccttcctagtcctagaaagggcaccaaaggaaccagctccagcctaagaggaagggtacctcagctgacaagaagatccaacagctgtttcgttaagggctttgaagcagcaagctgcaattcagctactaccaaaaacatttctccaattgcatcagcgtttttccattaattaaagcaacctaatgcttccagtaattttatgcaggagctttgcagagagrctgcatgttgcttggctgatgttgtaagcactgtgacaacaccagggaaaaaaatatcctccttggtatcataagattaagctcagttaagaaaatacagtgttatgagttcagcatggcagatgattaggtggaagaatgtccaggtcatgaagatgcacacatcacctgtgagttggaagcccacactcagagggctgttgtaacaagatactacaaggatgggtatgctggctytgtgctagttaatatttggaccagtgacacaggaggaagtatgaaatggtcacagataagct

SEQ ID NO: 56693 - DNA, 600 bp, Chicken  19866894311673_2
ttttccattaattaaagcaacctaatgcttccagtaattttatgcaggagctttgcagagagrctgcatgttgcttggctgatgttgtaagcactgtgacaacaccagggaaaaaaatatcctccttggtatcataagattaagctcagttaagaaaatacagtgttatgagttcagcatggcagatgattaggtggaagaatgtccaggtcatgaagatgcacacatcacctgtgagttggaagcccacactcagagggctgttgtaacaagatactacaaggatgggtatgctggctytgtgctagttaatatttggaccagtgacacaggaggaagtatgaaatggtcacagataagcttcacgtggtaaaaagattctgggagggtgagggagaggcgttataaagcaacctgactagcaatgaacagtgtgcccagtcacagggatgagagtgaagtcattcctgtccaaccaaagtctgcaaccactgtggtgacacagctgtgctggaagcagaggcacagaaggcacgtgggtcatcagcacttggtgtgagcccaccacagcgtgccagccaccagtgcagtggccaataa

SEQ ID NO: 56694 - DNA, 550 bp, Chicken  19866894311683_1
cagtttggctggaactgctttagttcagaagggaccaagattacagtaacttttatgaaagaaattaattacatttcaagccagctatttagaaatgatgaataccacacagaaaaaccattaagactgcttctgggccagaggtcgtgactgaaacaggcgtgtttgtcccacaaggaaacctggctttttcccattggaagcaaaaactattttggcaagcggaggcagcatacatggaagcatgtcctgcctgtgcccacactccttcagtctgatggatgggatttttctaactcratctccatgaaattccttaaaattcactgctttacaacatgtgaaaacagaggaatcagagtataattatgttcagagagacaacagtgtttttcaagccaactctcctcgctagcatactttgaacctctttgcagacagatggacacatttttcaggaagcgtcagagtctgtttaagctaacagcaatctgctttgattagcagtagccagttatagaccactccgaatcccatttgcatcaccaac

SEQ ID NO: 56695 - DNA, 600 bp, Chicken  19866894311685_1
gtccctttgttcaattgtggttcctgctgcataaatccattggcattaccttcctaattggttaatggggtctgagacacaagatgtcaattccactaaaatctgtacacaaacacttactgagtgtttagatttttttttttcagaggtattttggacaatctttgagagggttggcatacaggacagactgctttcctttttagataaatattttgacaaggaatcttgaaattttaatttctaaccagctttagatttcacttgcagtacatagcatcatttgttcctttacttgcwatagttatgatcgatccaatgtaatgaaaaaaacggagggctgccarttgcacagcactccttatcagctggctagctgttacatttgagcaatccggctgtgtgtatgtgtcttatttctrcttccttctcttaaggtcttaaattaggacttccttcaacactraattctactatctagctcttttccacattactatctgtgcttcatgatttaatttaatcataatttaaagtttttattttcactcaattacagtgagattacctctagtatgcctacgtaagatacagggagtt

SEQ ID NO: 56696 - DNA, 600 bp, Chicken  19866894311685_2
accttcctaattggttaatggggtctgagacacaagatgtcaattccactaaaatctgtacacaaacacttactgagtgtttagatttttttttttcagaggtattttggacaatctttgagagggttggcatacaggacagactgctttcctttttagataaatattttgacaaggaatcttgaaattttaatttctaaccagctttagatttcacttgcagtacatagcatcatttgttcctttacttgcwatagttatgatcgatccaatgtaatgaaaaaaacggagggctgccarttgcacagcactccttatcagctggctagctgttacatttgagcaatccggctgtgtgtatgtgtcttatttctrcttccttctcttaaggtcttaaattaggacttccttcaacactraattctactatctagctcttttccacattactatctgtgcttcatgatttaatttaatcataatttaaagtttttattttcactcaattacagtgagattacctctagtatgcctacgtaagatacagggagttacagtcwcagaaacagtgaggcatcctgacacagtgtcatcctggta

SEQ ID NO: 56697 - DNA, 600 bp, Chicken  19866894311685_3
agtgtttagatttttttttttcagaggtattttggacaatctttgagagggttggcatacaggacagactgctttcctttttagataaatattttgacaaggaatcttgaaattttaatttctaaccagctttagatttcacttgcagtacatagcatcatttgttcctttacttgcwatagttatgatcgatccaatgtaatgaaaaaaacggagggctgccarttgcacagcactccttatcagctggctagctgttacatttgagcaatccggctgtgtgtatgtgtcttatttctrcttccttctcttaaggtcttaaattaggacttccttcaacactraattctactatctagctcttttccacattactatctgtgcttcatgatttaatttaatcataatttaaagtttttattttcactcaattacagtgagattacctctagtatgcctacgtaagatacagggagttacagtcwcagaaacagtgaggcatcctgacacagtgtcatcctggtatctaatttctaagtggtccctaagcagaatttaacacattgatgttcccttatggactgaaaaaccatttcctga

SEQ ID NO: 56698 - DNA, 600 bp, Chicken  19866894311685_4
gagagggttggcatacaggacagactgctttcctttttagataaatattttgacaaggaatcttgaaattttaatttctaaccagctttagatttcacttgcagtacatagcatcatttgttcctttacttgcwatagttatgatcgatccaatgtaatgaaaaaaacggagggctgccarttgcacagcactccttatcagctggctagctgttacatttgagcaatccggctgtgtgtatgtgtcttatttctrcttccttctcttaaggtcttaaattaggacttccttcaacactraattctactatctagctcttttccacattactatctgtgcttcatgatttaatttaatcataatttaaagtttttattttcactcaattacagtgagattacctctagtatgcctacgtaagatacagggagttacagtcwcagaaacagtgaggcatcctgacacagtgtcatcctggtatctaatttctaagtggtccctaagcagaatttaacacattgatgttcccttatggactgaaaaaccatttcctgagcctaatttttgggtgaagatgagtattgccttacaaaaaacct

SEQ ID NO: 56699 - DNA, 600 bp, Chicken  19866894311685_5
tgatcgatccaatgtaatgaaaaaaacggagggctgccarttgcacagcactccttatcagctggctagctgttacatttgagcaatccggctgtgtgtatgtgtcttatttctrcttccttctcttaaggtcttaaattaggacttccttcaacactraattctactatctagctcttttccacattactatctgtgcttcatgatttaatttaatcataatttaaagtttttattttcactcaattacagtgagattacctctagtatgcctacgtaagatacagggagttacagtcwcagaaacagtgaggcatcctgacacagtgtcatcctggtatctaatttctaagtggtccctaagcagaatttaacacattgatgttcccttatggactgaaaaaccatttcctgagcctaatttttgggtgaagatgagtattgccttacaaaaaaccttatgcaatttatgtaccatatgagttttccagcatcctccaggaagtctgcaactaagcaaggcaccagattcacatctcctgacaccgagcygaactacctcattgatgcatttcgtacttttaggaatgtatccaattt

SEQ ID NO: 56700 - DNA, 587 bp, Chicken  19866894311685_6
tgagattacctctagtatgcctacgtaagatacagggagttacagtcwcagaaacagtgaggcatcctgacacagtgtcatcctggtatctaatttctaagtggtccctaagcagaatttaacacattgatgttcccttatggactgaaaaaccatttcctgagcctaatttttgggtgaagatgagtattgccttacaaaaaaccttatgcaatttatgtaccatatgagttttccagcatcctccaggaagtctgcaactaagcaaggcaccagattcacatctcctgacaccgagcygaactacctcattgatgcatttcgtacttttaggaatgtatccaatttttaatctttgatcccagtgtgaacttacttgaagttataaatgttgaattttgagtgtatttttgtactgttacaattatgaaattgacttcttatatttatcttccttcaggaaactgagtaacatgattattggaatcggtcctttgaagctttgcagttctctgctccttttttctttaagctgtctccaagcagtgacaccatgtctaggtctcatcataacagccctaatgaaa

SEQ ID NO: 56701 - DNA, 600 bp, Chicken  19866894311696_1
ttcaatttgcaggatgcaagctgatagaaaaagaaaagaacccaggaaaactctgtgcttaagaattatttaaaaccattgctcttctccatcctttttactttaggaatcaagggactgattgtgcctcataggacccagagtggcattaaatagttttagatctgctttggattttgcccagctattcatggctcaaagagagagcctctaccagtatgttcctggtgtcctggccccatctgtgccttcgggcccagagttccacacaggcagaagcagaatgacaaactgcagtcycttcatgacatgatgtatgtagttaaaccattacatatatggggatgttattattttttatttcagcaaaaatattcccattatccaaactgttcattttggttttggaggacaaatacacggctgaaaagactttttctttttttttttttaatgttgttgaataagcaatgtgttttccctctggggacacagggggattaatgtgctgtattatacatctctgcataaatctctctgagaagtcaaaattgattcactgcaattgtggttatgccctgaaatttcattgaaaaaatg

SEQ ID NO: 56702 - DNA, 493 bp, Chicken  19866894311705_1
ctatgcagcaagtaatgctaaaatggctaaacagtatgctacatattttttatccaggaggtaatttgttgtattattatgctagtctaaatcagtttattcaagtaggaatccagaggaaaacattgtcagtttaggaggatatagatcctaactttcacattttcatctgaattctggatgtatttgttatcactttgtaaacactgctgataactagctggtttccagtcactgtaccctttcttcccttagggaggggggttactctgtgacacagagagttacagagagcttccyggtgacatccccctgtcctggggtgtctgtgcagattgtctttacttcacggtagtcttttgagctcactcttaagtaagataccggtgtagcaagactcagcatgtaatacctaactttccatttcaaagaagcatccagttttggagccagaatgcgtaccagaactgttgctgttgaagggtacttctgt

SEQ ID NO: 56703 - DNA, 600 bp, Chicken  19866894311707_1
ccccttgctactcatccattgtgagtaccaatggccagggaaaaacagtgaatcaagggaggatgatcctgaagaacttgagaggctaagagatttctcctcagtctttacagcaaaaggaaaaggctcaggtagatgcagaagtatcccatgtgtttatacccatctgtggggttgttatcctatgcaggtccttgtcatctatgatcataggaccaaagcagtggttggctccatctgataaaatggagtaaaagcacttgttttttgtttgtttgttcatttgttttgcaaacaaamttgtaaaactaatggaaaaggctttaaactaggggcctcagcggggaatttttttgaaggaatgaagatggaaaactgagagaagtagaacaacaggagataaagaggcaaatgtctacatgatgagatggtaaaaaaggctcccatgtaatccctaagaaagcagtacgactggaggctcgcctcagttgcatcactcagctcacaggtctgccctgctgtgggtggcaacatgctctttagcaaagttgggcccagraggagtaaaggttgtgctgtatgtagaagaacagcttgcat

SEQ ID NO: 56704 - DNA, 600 bp, Chicken  19866894311707_2
cttgttttttgtttgtttgttcatttgttttgcaaacaaamttgtaaaactaatggaaaaggctttaaactaggggcctcagcggggaatttttttgaaggaatgaagatggaaaactgagagaagtagaacaacaggagataaagaggcaaatgtctacatgatgagatggtaaaaaaggctcccatgtaatccctaagaaagcagtacgactggaggctcgcctcagttgcatcactcagctcacaggtctgccctgctgtgggtggcaacatgctctttagcaaagttgggcccagraggagtaaaggttgtgctgtatgtagaagaacagcttgcattcatgaagctttaccatgaaatagtctacaaaccagttgagagtttgcaggtcaggaacaaaaggaggctaatgagtatgctgttatgatggctttctgctacagaccttccaataaggaggcaaaatgagaagaatccttatttacatgactgaaagaagacttgtgatcaggaagatgattaaaaatatttattggttgtggaaataggaaagccaaaattctgctgcaattgaaattggcaggggaggtaaatggc

SEQ ID NO: 56705 - DNA, 600 bp, Chicken  19866894311713_1
aatccatccaaaacatatattttttgagcaaactctcctggtattatacaatttttattagtgaataagatttgactctattacaagtgttctcattctttctaggcttccaggttcttcgtaacataaaatactaatgtatttcagtctgcagtagtgcactagaagaacagatatcattggaggaattgcattaaagtgaatcaggcaactgtgaatgaattgagactgtttactttgaagttttctgtcaccactctgagaataccttcaagtagcatgtaacatttcatctcacakcaaaggttcacagactttgctggtcttgcctttgatgatttcttgcttgtcactgaggaaataccagggtacagtcaaataatctgatggatgtgggacactaacaacaagaatggcattcattacttcttgttagtaccagcagatcttcaggaagactactgtcttccttgggattctcagtcaatgctgaggcagagacagcttagatatataaatacaacatcttccagaaattccatgcttgtgtttctcttctatatcatagtgaaaacaagacaagacatacacatgtgaaat

SEQ ID NO: 56706 - DNA, 600 bp, Chicken  19866894311713_2
tgaggaaataccagggtacagtcaaataatctgatggatgtgggacactaacaacaagaatggcattcattacttcttgttagtaccagcagatcttcaggaagactactgtcttccttgggattctcagtcaatgctgaggcagagacagcttagatatataaatacaacatcttccagaaattccatgcttgtgtttctcttctatatcatagtgaaaacaagacaagacatacacatgtgaaatgaaatctgattttatctcagcttgttctaaaaggactttctcttatctttttkttgttgttgttaatttttatatttaatactatattcttcaaagacaactggaaaaacaggtggttttgtaacatgaggccagactcatgtctggtgaaacttgcttacaggtaaaaataattttaatgtagtttcagttaagaattaagaaaaactatctaggaaatgcttgaaaaaaaatcacagttaaaatataaattcatataaaactattaaagccagaagttatataagaataataaaataaaatatttggttgaaagaatgtaaaggtcaatataaatgcagacatgctaaact

SEQ ID NO: 56707 - DNA, 600 bp, Chicken  19866894311713_3
tagtttcagttaagaattaagaaaaactatctaggaaatgcttgaaaaaaaatcacagttaaaatataaattcatataaaactattaaagccagaagttatataagaataataaaataaaatatttggttgaaagaatgtaaaggtcaatataaatgcagacatgctaaactgctgtaaagaatgtaaacgaatcccccaaacctgagctttctcctgactgacagggaaacttagcactccttcatcttctgaaggggcaggtaccaactgtctgaaatcactgccctttccaagaaaycttctaaaaacaaaatcagttcatactgtaaaaatgactctaaatcatattcttgagcacatcaaactaaagtatggaccttgcttattagtgacttcattgcaaactgtagcaacttctaggagcaggtgcacacctattgctctctcttagacatctgtgttttttaaacagtgatattagtgtacccgagaattgaaaggtttcttctttgtgttaaaaagtatcctcactttacagtaacatttgcacttactactaagcacttatgttagctaagtgcatccagaacatttattt

SEQ ID NO: 56708 - DNA, 599 bp, Chicken  19866894311715_1
  misc_feature (1)..(54): n is any nucleotide
nnnnnnnnnnnnnnnnnnnnnnnnnnnnnnnnnnnnnnnnnnnnnnnnnnnnnncagacctgcactaaacaaacaaacaaaaaaacaacctgaagttgtacaaaaattccactatattttgagatgaatttaccacagggcagcagaaaggccacagtgactccaaatactttggaaaaaatatactgaatatacacaaatatatctgcaaggcaactgcacatgagaactgtactgcatattggcatccacccatgacttcaataaaaagacctctttcaactcaggagttttagttcyattcaccttagtcccttacctcactcacttttataaacatgcaatattttattttaatayattaccagattttactagaattcccatayagasgtaaagatggtcactttcaaagggtataaaggaaggaaaaaaggcatccaaaaagtctctttagtttccaactcagtgaaattaaaccttatcagtattytgagaatctctgtgaagttaaataccacccatggaatggctgcacaaaactaaaattcaagtggtttttaataggattacttcaaaggtatgtatgtttaggctac

SEQ ID NO: 56709 - DNA, 600 bp, Chicken  19866894311715_2
tgcactaaacaaacaaacaaaaaaacaacctgaagttgtacaaaaattccactatattttgagatgaatttaccacagggcagcagaaaggccacagtgactccaaatactttggaaaaaatatactgaatatacacaaatatatctgcaaggcaactgcacatgagaactgtactgcatattggcatccacccatgacttcaataaaaagacctctttcaactcaggagttttagttcyattcaccttagtcccttacctcactcacttttataaacatgcaatattttattttaatayattaccagattttactagaattcccatayagasgtaaagatggtcactttcaaagggtataaaggaaggaaaaaaggcatccaaaaagtctctttagtttccaactcagtgaaattaaaccttatcagtattytgagaatctctgtgaagttaaataccacccatggaatggctgcacaaaactaaaattcaagtggtttttaataggattacttcaaaggtatgtatgtttaggctacagctatgcaaacagctgcatcagcacgattgggaaggcagygtcatagatctggtctactg

SEQ ID NO: 56710 - DNA, 600 bp, Chicken  19866894311715_3
ctgaagttgtacaaaaattccactatattttgagatgaatttaccacagggcagcagaaaggccacagtgactccaaatactttggaaaaaatatactgaatatacacaaatatatctgcaaggcaactgcacatgagaactgtactgcatattggcatccacccatgacttcaataaaaagacctctttcaactcaggagttttagttcyattcaccttagtcccttacctcactcacttttataaacatgcaatattttattttaatayattaccagattttactagaattcccatayagasgtaaagatggtcactttcaaagggtataaaggaaggaaaaaaggcatccaaaaagtctctttagtttccaactcagtgaaattaaaccttatcagtattytgagaatctctgtgaagttaaataccacccatggaatggctgcacaaaactaaaattcaagtggtttttaataggattacttcaaaggtatgtatgtttaggctacagctatgcaaacagctgcatcagcacgattgggaaggcagygtcatagatctggtctactgccaggagaataataggcctattttaacat

SEQ ID NO: 56711 - DNA, 600 bp, Chicken  19866894311715_4
agttgtacaaaaattccactatattttgagatgaatttaccacagggcagcagaaaggccacagtgactccaaatactttggaaaaaatatactgaatatacacaaatatatctgcaaggcaactgcacatgagaactgtactgcatattggcatccacccatgacttcaataaaaagacctctttcaactcaggagttttagttcyattcaccttagtcccttacctcactcacttttataaacatgcaatattttattttaatayattaccagattttactagaattcccatayagasgtaaagatggtcactttcaaagggtataaaggaaggaaaaaaggcatccaaaaagtctctttagtttccaactcagtgaaattaaaccttatcagtattytgagaatctctgtgaagttaaataccacccatggaatggctgcacaaaactaaaattcaagtggtttttaataggattacttcaaaggtatgtatgtttaggctacagctatgcaaacagctgcatcagcacgattgggaaggcagygtcatagatctggtctactgccaggagaataataggcctattttaacatggtc

SEQ ID NO: 56712 - DNA, 600 bp, Chicken  19866894311715_5
acacaaatatatctgcaaggcaactgcacatgagaactgtactgcatattggcatccacccatgacttcaataaaaagacctctttcaactcaggagttttagttcyattcaccttagtcccttacctcactcacttttataaacatgcaatattttattttaatayattaccagattttactagaattcccatayagasgtaaagatggtcactttcaaagggtataaaggaaggaaaaaaggcatccaaaaagtctctttagtttccaactcagtgaaattaaaccttatcagtattytgagaatctctgtgaagttaaataccacccatggaatggctgcacaaaactaaaattcaagtggtttttaataggattacttcaaaggtatgtatgtttaggctacagctatgcaaacagctgcatcagcacgattgggaaggcagygtcatagatctggtctactgccaggagaataataggcctattttaacatggtcagaggttaaactatagatctaagcccacactttatgtcttggcacacttatcaaagttattttttggaggatacaaggaaatgcttagaatcacctatta

SEQ ID NO: 56713 - DNA, 600 bp, Chicken  19866894311715_6
gcaatattttattttaatayattaccagattttactagaattcccatayagasgtaaagatggtcactttcaaagggtataaaggaaggaaaaaaggcatccaaaaagtctctttagtttccaactcagtgaaattaaaccttatcagtattytgagaatctctgtgaagttaaataccacccatggaatggctgcacaaaactaaaattcaagtggtttttaataggattacttcaaaggtatgtatgtttaggctacagctatgcaaacagctgcatcagcacgattgggaaggcagygtcatagatctggtctactgccaggagaataataggcctattttaacatggtcagaggttaaactatagatctaagcccacactttatgtcttggcacacttatcaaagttattttttggaggatacaaggaaatgcttagaatcacctattactagagcttacctgatactgcgctgatgaatgaagacaaaccttagctgaatgccttcactggagagttctaaacagatagaaaatcccttggcccattaagtaatgctttaactttccataaaaaaaaaaaaaaatagctgagctt

SEQ ID NO: 56714 - DNA, 599 bp, Chicken  19866894311719_1
  misc_feature (1)..(72): n is any nucleotide
nnnnnnnnnnnnnnnnnnnnnnnnnnnnnnnnnnnnnnnnnnnnnnnnnnnnnnnnnnnnnnnnnnnnnnnnttcaaaggccagtcacagtgaggagagttcagtgcagtattagagtcagtaacatgctgtcctgatggaataggtgttgttcaggaagctctcacagactgctggagatgagaaggcattacagcaaattgactttgtagatacccagacttaacgactacagttttcccaacagtaagtgctggtgattaccgtgattaatagctgagcttgattcatggaacagargatattggatttacctgtgtgcagaggactgaagtttttcttcttaatatattgcaacacagttgcataaagctagattactcaagctctattcctgaaggatgcagtaagtagtgctgttatttgctctcttgtaggtgacactgcagataatctctggccaaggcagtcatgttcctttatcacccaagtagttcatctccatggacaccaatggtatcatttttatttagaaaaaaaaagaaaagctgagactattatagcgcacactattcagtatttacaaaatgatggatgtc

SEQ ID NO: 56715 - DNA, 600 bp, Chicken  19866894311719_2
gttttcccaacagtaagtgctggtgattaccgtgattaatagctgagcttgattcatggaacagargatattggatttacctgtgtgcagaggactgaagtttttcttcttaatatattgcaacacagttgcataaagctagattactcaagctctattcctgaaggatgcagtaagtagtgctgttatttgctctcttgtaggtgacactgcagataatctctggccaaggcagtcatgttcctttatcacccaagtagttcatctccatggacaccaatggtatcatttttatttagraaaaaaaagaaaagctgagactattatagcgcacactattcagtatttacaaaatgatggatgtcctttgagcatgagcgcggtgatggatagatacatgaggtaaaaggatttgggctctcaggacagtatttgtrtaggagttgtaagcaatggagaaggtacctgtgggatacatttatgtccttactcctcakatagcagagaaagagcttttggggctgctcaaactcgtatctaactgcagctgcacctgagtggctgcattagcagagatctcaagaatgcagcagcagccca

SEQ ID NO: 56716 - DNA, 600 bp, Chicken  19866894311719_3
gctagattactcaagctctattcctgaaggatgcagtaagtagtgctgttatttgctctcttgtaggtgacactgcagataatctctggccaaggcagtcatgttcctttatcacccaagtagttcatctccatggacaccaatggtatcatttttatttagaaaaaaaaagaaaagctgagactattatagcgcacactattcagtatttacaaaatgatggatgtcctttgagcatgagcgcggtgatggatagatacatgaggtaaaaggatttgggctctcaggacagtatttgtrtaggagttgtaagcaatggagaaggtacctgtgggatacatttatgtccttactcctcakatagcagagaaagagcttttggggctgctcaaactcgtatctaactgcagctgcacctgagtggctgcattagcagagatctcaagaatgcagcagcagcccaatctttctgcttttccccagatgctgtttgctgatgagattagcattaagcagaacagtcacagtgaaggagtgcagactcagacactgaaggtctggctgtaactccacttatgaggagagcaagtccctagaagc

SEQ ID NO: 56717 - DNA, 600 bp, Chicken  19866894311719_4
ttgtaggtgacactgcagataatctctggccaaggcagtcatgttcctttatcacccaagtagttcatctccatggacaccaatggtatcatttttatttagaaaaaaaaagaaaagctgagactattatagcgcacactattcagtatttacaaaatgatggatgtcctttgagcatgagcgcggtgatggatagatacatgaggtaaaaggatttgggctctcaggacagtatttgtrtaggagttgtaagcaatggagaaggtacctgtgggatacatttatgtccttactcctcakatagcagagaaagagcttttggggctgctcaaactcgtatctaactgcagctgcacctgagtggctgcattagcagagatctcaagaatgcagcagcagcccaatctttctgcttttccccagatgctgtttgctgatgagattagcattaagcagaacagtcacagtgaaggagtgcagactcagacactgaaggtctggctgtaactccacttatgaggagagcaagtccctagaagcagcaactaaatatgccagttgttttattttcttttwtttwtttattwatttattttatta

SEQ ID NO: 56718 - DNA, 600 bp, Chicken  19866894311719_5
tacatttatgtccttactcctcakatagcagagaaagagcttttggggctgctcaaactcgtatctaactgcagctgcacctgagtggctgcattagcagagatctcaagaatgcagcagcagcccaatctttctgcttttccccagatgctgtttgctgatgagattagcattaagcagaacagtcacagtgaaggagtgcagactcagacactgaaggtctggctgtaactccacttatgaggagagcaagtccctagaagcagcaactaaatatgccagttgttttattttcttttwtttwtttattwatttattttattattgccagcagaccgcttctgtgaaagctctgacatcccaggttcttctagataggattgrtttcaggtctctatccacagtactaaagaagtcagtattattcctcatcccagaacaggcaggattggtgctggctggtgtagatattgtgtgttggtgtaaatattcctcccatctgctgtattaaaggctttgcagggacagtgagcagtgtcctgagaccaggtcaggtcagtgcctgtgaccaggggaccttctcctggcaccacttgctca

SEQ ID NO: 56719 - DNA, 600 bp, Chicken  19866894311719_6
tttatgtccttactcctcakatagcagagaaagagcttttggggctgctcaaactcgtatctaactgcagctgcacctgagtggctgcattagcagagatctcaagaatgcagcagcagcccaatctttctgcttttccccagatgctgtttgctgatgagattagcattaagcagaacagtcacagtgaaggagtgcagactcagacactgaaggtctggctgtaactccacttatgaggagagcaagtccctagaagcagcaactaaatatgccagttgttttattttcttttwtttwtttattwatttattttattattgccagcagaccgcttctgtgaaagctctgacatcccaggttcttctagataggattgrtttcaggtctctatccacagtactaaagaagtcagtattattcctcatcccagaacaggcaggattggtgctggctggtgtagatattgtgtgttggtgtaaatattcctcccatctgctgtattaaaggctttgcagggacagtgagcagtgtcctgagaccaggtcaggtcagtgcctgtgaccaggggaccttctcctggcaccacttgctcactga

SEQ ID NO: 56720 - DNA, 600 bp, Chicken  19866894311719_7
ccttactcctcakatagcagagaaagagcttttggggctgctcaaactcgtatctaactgcagctgcacctgagtggctgcattagcagagatctcaagaatgcagcagcagcccaatctttctgcttttccccagatgctgtttgctgatgagattagcattaagcagaacagtcacagtgaaggagtgcagactcagacactgaaggtctggctgtaactccacttatgaggagagcaagtccctagaagcagcaactaaatatgccagttgttttattttcttttwtttwtttattwatttattttattattgccagcagaccgcttctgtgaaagctctgacatcccaggttcttctagataggattgrtttcaggtctctatccacagtactaaagaagtcagtattattcctcatcccagaacaggcaggattggtgctggctggtgtagatattgtgtgttggtgtaaatattcctcccatctgctgtattaaaggctttgcagggacagtgagcagtgtcctgagaccaggtcaggtcagtgcctgtgaccaggggaccttctcctggcaccacttgctcactgaaagggca

SEQ ID NO: 56721 - DNA, 600 bp, Chicken  19866894311719_8
gtggctgcattagcagagatctcaagaatgcagcagcagcccaatctttctgcttttccccagatgctgtttgctgatgagattagcattaagcagaacagtcacagtgaaggagtgcagactcagacactgaaggtctggctgtaactccacttatgaggagagcaagtccctagaagcagcaactaaatatgccagttgttttattttcttttwtttwtttattwatttattttattattgccagcagaccgcttctgtgaaagctctgacatcccaggttcttctagataggattgrtttcaggtctctatccacagtactaaagaagtcagtattattcctcatcccagaacaggcaggattggtgctggctggtgtagatattgtgtgttggtgtaaatattcctcccatctgctgtattaaaggctttgcagggacagtgagcagtgtcctgagaccaggtcaggtcagtgcctgtgaccaggggaccttctcctggcaccacttgctcactgaaagggcatcaggactacagaggagggcaggtgtgacaaatgccagctgagggcattgaagggaaaggtttttgctaggct

SEQ ID NO: 56722 - DNA, 600 bp, Chicken  19866894311722_1
ttacattagtattcttatacatcctaaaaaaaatctttattcaatctggtctgtagcaattggatgggatcaataccatgagaaaggtgttacagcagagatgtgatgacagaaggactagcatgatagaaatgagctataaaacagaagaagattgctcacccatatcagaagatcctaggtttgcaggggaaagcttcaccaagacaagatcttcagaaagaaagccttcctcagtggcagtcagcccttaaatgaggtctaagagaggtgcagccaggttctactggtggcatagcygaattgccttcacctgtgctcccatggctgaccgggtcctttcctcaggtgctcagtcagtggttcagactgtgactcaggagttcctatacactggttgttgtccactgatattttctgtcttgatggtctcttctctyaagcattgttaaaactccgctcattttgggaactaattgccaccagagtatattttataagaagagaagatgcaccttttgctaggctttttctcttcagtacaagccttgttttgaataaatacaatataatttattacaagaaatggagcatttctca

SEQ ID NO: 56723 - DNA, 600 bp, Chicken  19866894311722_2
aaaacagaagaagattgctcacccatatcagaagatcctaggtttgcaggggaaagcttcaccaagacaagatcttcagaaagaaagccttcctcagtggcagtcagcccttaaatgaggtctaagagaggtgcagccaggttctactggtggcatagcygaattgccttcacctgtgctcccatggctgaccgggtcctttcctcaggtgctcagtcagtggttcagactgtgactcaggagttcctatacactggttgttgtccactgatattttctgtcttgatggtctcttctctyaagcattgttaaaactccgctcattttgggaactaattgccaccagagtatattttataagaagagaagatgcaccttttgctaggctttttctcttcagtacaagccttgttttgaataaatacaatataatttattacaagaaatggagcatttctcacaacacaatgcaatcaaaagaaggagtagggaatattctcctaaatgacttacaattttttttaaggtaactcttaattccaaactgatttcagttagtgggaataagttgtttcagctagctttagatagagcctcaaa

SEQ ID NO: 56724 - DNA, 599 bp, Chicken  19866894311725_1
  misc_feature (1)..(182): n is any nucleotide
nnnnnnnnnnnnnnnnnnnnnnnnnnnnnnnnnnnnnnnnnnnnnnnnnnnnnnnnnnnnnnnnnnnnnnnnnnnnnnnnnnnnnnnnnnnnnnnnnnnnnnnnnnnnnnnnnnnnnnnnnnnnnnnnnnnnnnnnnnnnnnnnnnnnnnnnnnnnnnnnnnnnnnnnnnnnnnnnnnnnnncaggtttgaaggtcccgaagcatcgactcaatgggaggcgcagggggagaagttgagcggttcaccgcagagctgtgcgcctttgctccgtccttcttaaaattcacctctcctctckgctttgcgcagcagccggcggagccctggggagctggaaatgcagagctgcaggggatggggacaggcgtggggtccggctttgtgccgcaccgagggccatgtccccaaaagaagagatccgagcactgacagcactgctgccccgggctgtcccttcccctgcagatgtccccgtgtggctgtcagtgctgtgtgtgcaccccaaacttcgccatctgaaagcacggggagcccatctgcctccccacggtgcggctcacaaacgcttcttctgacccgagcgaaagggagatggga

SEQ ID NO: 56725 - DNA, 599 bp, Chicken  19866894311726_1
  misc_feature (1)..(63): n is any nucleotide
nnnnnnnnnnnnnnnnnnnnnnnnnnnnnnnnnnnnnnnnnnnnnnnnnnnnnnnnnnnnnnnttttggatagagtccactcttcctcacctttcgtgattataatggctaaaggctagtagtaataattgactactgctaccaatgcaacctttagtcatatttattttgtaatgtttctgcaaagattctgtacttgtctacaagatttcagtacgtgttcattcggtatactgttgtttattagcataatctctaacattatttttcttgtttgtttcccctttttatgatgtgatrtgcagagccacgatctgcaactgaacctggtaagaatcatataaaaaatgtctcttgattcactagctctttgagtttgtatagaagctgtaaatataaaaagatttctgctgagcattggtaatatgaaacccccttaaagacaatgtttctttatcacaccttccatactctacactgggctttacatcaattcctttataagttaaacagtaaattccatttagaccagtaaggagagcctcacagccaaaacttttgagcaagttttattctcagaaaatgagtaatttccatgc

SEQ ID NO: 56726 - DNA, 600 bp, Chicken  19866894311726_2
tcctttataagttaaacagtaaattccatttagaccagtaaggagagcctcacagccaaaacttttgagcaagttttattctcagaaaatgagtaatttccatgctacagaggatgaaaaaagtatcccacaaagttctatgacacaaattgtacgtgtttcataacacccaaccactaaatgctagttctgccagtgtaggttgacagatgtgagctgtctttgattctccagaagaaaggcacattgagttttctagcctttttatgagacaaaagttctacatttcagcaagcaagsaagaagtgttcttccaactacaggttttctctggctgcttcctttgcatttacatgctgctgtagttccttgaataataagtagagatgctaaaagactgagaacgcttcatctttgtgttagtattcctaagtcaatcaacaggtagaagtagagcagtggtgaagtcttactacatcactttacttaagagggtgactagttgtactcaaacatgcatggatttggagagagatttaataacagagtagaaaaaatattttagatgtggacattcccaaggagtgtctttgttctgaa

SEQ ID NO: 56727 - DNA, 600 bp, Chicken  19866894311738_1
attttgaccacaagattcaataaaaaataaaccatcaacagtttgaattaactctcagtgtttgccctttccccaaatgtctgagtattttacatatgcattcatattttttaatctgacaggaaaaatgaagcccttttccattagctctttgcatttcggcacagtaccagccataatgctgctgtgctggtgcaggccttgctgactgctttgttctctagtgacagctgaaaagcacattctcaggtgtaaagatttgcagggacgagatctggctgcctcataccaacctgacamatcattaaccacttgagccaaagcacagtggatgcagtgcaagtcttttcagggaatctgctacactttgcatgcacccctggcttctacagaagttgaaaacagaatggctataatactcacacagattaaacccttttgaagtatgcacactgttgcagaacagagacaattggttggatccataggaacctcrtatatgagtaaacttaacacgagcgagcttttaaggtggattagttaaaatgcattaagtccttgtgcagtcacttgcatccctggtttgatttccattgagtt

SEQ ID NO: 56728 - DNA, 600 bp, Chicken  19866894311738_2
aggccttgctgactgctttgttctctagtgacagctgaaaagcacattctcaggtgtaaagatttgcagggacgagatctggctgcctcataccaacctgacamatcattaaccacttgagccaaagcacagtggatgcagtgcaagtcttttcagggaatctgctacactttgcatgcacccctggcttctacagaagttgaaaacagaatggctataatactcacacagattaaacccttttgaagtatgcacactgttgcagaacagagacaattggttggatccataggaacctcrtatatgagtaaacttaacacgagcgagcttttaaggtggattagttaaaatgcattaagtccttgtgcagtcacttgcatccctggtttgatttccattgagtttatttttctatggaataataagctactcagctaaaacaaaacaaactaaattgacttatgcactcggggtctttgatttctgtcccaatggtaagttcagtttgaaagaaaaacaattattgaaaagttctgtttgcctgctaacctcctccccagttggaaactcttggaggatttgacactacggccacaaaga

SEQ ID NO: 56729 - DNA, 600 bp, Chicken  19866894311740_1
tttgaagactctggactttcccagaagacacactggtctacagggcagctacagcttttgatcttactctcttcaaaaaggtagatattgcacatattactttgaagtagctggagtgttttcatagtagtccttgttgcaaagctttgtgactttagatctatttgattttatgcattccatagattaaaaaaccatttctgttctttttgatgataaggatctgttaaatcattcacaccagtagaaaggtatatatcattctgatttgacaacattttctgctcacctttcctgggmataaaatatttcaacagtttgaagcaatggagaacttttacacacttttgagtaccgcacatcagtacagtcattgttcagtcttggcatcactaaatgaaaaggtagtgtcagcacaaggttaatgtaaaaaaactatgtgtaaacttttggaagacagcttccataaagggtatattctgggagaacaaggatttttattgtagaaccatttataaggaactggaaaaatattctgccacatttacataaaaggcaaaataggctgaaggagagactgcaaaagcaatcagtctacaa

SEQ ID NO: 56730 - DNA, 600 bp, Chicken  19866894311740_2
ttctaaaaactcacccactacagtagctttctgaacattttagcactctctggaaggacatttttaaagaaagttaaattctgggggttttcaaacagatttcactaaatacgctacacacaatggatatgagtttttacatagtagtgatgtaacttttttgatcattctatagaatggattttcaatgaatttgaagcataatttttctttggatataatttacgccatgcctccacacatgggcttttcagtgaatagaaaacactttcaatttaaaaaagaatgagaatcatatarctgatgttgtctgttctaggctactcttcakcaacaccaacactaaggtcagtttcatactgcagagaacctgattggaggttccttaggaagcagcaatttgggtaattccagaaaatgctttttccatacttagagatgcagcataactttacacaggtaaatttgaatctaaaattaagtaaattttgctgtcttatttgtactggtttttttttgtgtgtgtgttaaaagaaatggcactgggaatctggtaccatttcttcttctttcagtctgtgatcaattaaatatcctggt

SEQ ID NO: 56731 - DNA, 600 bp, Chicken  19866894311740_3
tgaacattttagcactctctggaaggacatttttaaagaaagttaaattctgggggttttcaaacagatttcactaaatacgctacacacaatggatatgagtttttacatagtagtgatgtaacttttttgatcattctatagaatggattttcaatgaatttgaagcataatttttctttggatataatttacgccatgcctccacacatgggcttttcagtgaatagaaaacactttcaatttaaaaaagaatgagaatcatatarctgatgttgtctgttctaggctactcttcakcaacaccaacactaaggtcagtttcatactgcagagaacctgattggaggttccttaggaagcagcaatttgggtaattccagaaaatgctttttccatacttagagatgcagcataactttacacaggtaaatttgaatctaaaattaagtaaattttgctgtcttatttgtactggtttttttttgtgtgtgtgttaaaagaaatggcactgggaatctggtaccatttcttcttctttcagtctgtgatcaattaaatatcctggtgaattaaaaaggaaaagggacttcttctttc

SEQ ID NO: 56732 - DNA, 600 bp, Chicken  19866894311741_1
gctttgttcacagagtgccctttgtcggctgattaaaccacaaatgaaatgcagcattgacaagcccatattgcatggcacactgtgagaatcacagaagtaagtgtgggttagttttgtgccattactgatattttattaggtaaatgggttccagttgtaccattttctaattttgttgttgtctgcactctaaatctgaattatcaggcctgagtgtgcttgtaagaacttcatcttctcaacatcttttttccccttcttttggttgcttgactgaccttgtttttatgttggtgkggttattgatgggagtagccaatgaaatgggtagtgaacatgggaagcgttttcagaatgagttattaaactcctaccagagcttgcatctgttataattatcacaaaaccgatatgtggccccataaactagcacgatgatttataaacttggtcttaaattttgttcatgtattaagtgtgattttttttttttccttgtaggaagtcacacctgtgtgtacaatggatggggtgggatctttacgccaggatgttccgaagttactgatttagtctggaatcatggcactgtggata

SEQ ID NO: 56733 - DNA, 600 bp, Chicken  19866894311746_1
tagtttgttgttatatggggtttgggctttaattgtatttttctgggctttttgatatgctttattttatttgaacagaaaacactttatgttctttgtgtctggtgtccattcagttctcagagtaggctggaataggattcactgtaagaggatatgcagttgctgtgcgtcttgaatatatatatataaaattacactagtagattatgaaagatcaagacaaacacaagtgtttcctctagagatatcaacgtgacttcacatcatggacagatttttaacataatatgttaaaamgtgtgtttttaagcatgttagtactattcaactatgtcaaagcagccaaaaacctcactcagggaaaattatctaataaagccaaagaatacgctccacataagtttactctgcttatcacctaccaccatggcaagaatccaagatgcctgagaaaccttttaacctgcacacgtataaattttcttgaagctacaaaagttccattcacacagtgccagagctctgcctgtgctaaggtaggaccaaaccgactgtctctagtgatgctactggtcagttcccatgaagccaagcttt

SEQ ID NO: 56734 - DNA, 599 bp, Chicken  19866894311747_1
  misc_feature (1)..(175): n is any nucleotide
nnnnnnnnnnnnnnnnnnnnnnnnnnnnnnnnnnnnnnnnnnnnnnnnnnnnnnnnnnnnnnnnnnnnnnnnnnnnnnnnnnnnnnnnnnnnnnnnnnnnnnnnnnnnnnnnnnnnnnnnnnnnnnnnnnnnnnnnnnnnnnnnnnnnnnnnnnnnnnnnnnnnnnnnnnnnnnnatttcaacttgtgtaccacaggtgaaaccagtgataatttacaaaccaaatataacctgcaaaatgaaagctgggattagaaaaaaatgtaagagccattctacaaggataggaaagtctacttraaagaaaaaggggaggattatgtattaactcaggagaagaagmagttattctttgtagtatggacagtagatggcacaagtagaaccctcttctacaaaggcacagaaaagaatgaaaagagtgaaatcacatttccttycatgcatataaaatgatcagaagtggactaaaatgttctcctgcatgtaggataaagctgtttaatatagagctttttttttttactgtaacttacctgggtccatgtccttacaggtagctctgtaatttctacagtgttcctgtccaccacaaatat

SEQ ID NO: 56735 - DNA, 599 bp, Chicken  19866894311747_2
  misc_feature (1)..(132): n is any nucleotide
nnnnnnnnnnnnnnnnnnnnnnnnnnnnnnnnnnnnnnnnnnnnnnnnnnnnnnnnnnnnnnnnnnnnnnnnnnnnnnnnnnnnnnnnnnnnnnnnnnnnnnnnnnnnnnnnnnnnnnnnnnnnnnnnnnnnatttcaacttgtgtaccacaggtgaaaccagtgataatttacaaaccaaatataacctgcaaaatgaaagctgggattagaaaaaaatgtaagagccattctacaaggataggaaagtctacttraaagaaaaaggggaggattatgtattaactcaggagaagaagmagttattctttgtagtatggacagtagatggcacaagtagaaccctcttctacaaaggcacagaaaagaatgaaaagagtgaaatcacatttccttycatgcatataaaatgatcagaagtggactaaaatgttctcctgcatgtaggataaagctgtttaatatagagctttttttttttactgtaacttacctgggtccatgtccttacaggtagctctgtaatttctacagtgttcctgtccaccacaaatatttcaccactgactacatactggttttgaccaagttcttgaatg

SEQ ID NO: 56736 - DNA, 599 bp, Chicken  19866894311747_3
  misc_feature (1)..(35): n is any nucleotide
nnnnnnnnnnnnnnnnnnnnnnnnnnnnnnnnnnnatttcaacttgtgtaccacaggtgaaaccagtgataatttacaaaccaaatataacctgcaaaatgaaagctgggattagaaaaaaatgtaagagccattctacaaggataggaaagtctacttraaagaaaaaggggaggattatgtattaactcaggagaagaagmagttattctttgtagtatggacagtagatggcacaagtagaaccctcttctacaaaggcacagaaaagaatgaaaagagtgaaatcacatttccttycatgcatataaaatgatcagaagtggactaaaatgttctcctgcatgtaggataaagctgtttaatatagagctttttttttttactgtaacttacctgggtccatgtccttacaggtagctctgtaatttctacagtgttcctgtccaccacaaatatttcaccactgactacatactggttttgaccaagttcttgaatggttcctctgaagtttttgtagtttgggagctgaaatkgcaataaaaamcagtggaatgctaagaaactttgtaataagacacggaagatattttttt

SEQ ID NO: 56737 - DNA, 600 bp, Chicken  19866894311747_4
tacaaaccaaatataacctgcaaaatgaaagctgggattagaaaaaaatgtaagagccattctacaaggataggaaagtctacttraaagaaaaaggggaggattatgtattaactcaggagaagaagmagttattctttgtagtatggacagtagatggcacaagtagaaccctcttctacaaaggcacagaaaagaatgaaaagagtgaaatcacatttccttycatgcatataaaatgatcagaagtggactaaaatgttctcctgcatgtaggataaagctgtttaatatagagcyttttttttttactgtaacttacctgggtccatgtccttacaggtagctctgtaatttctacagtgttcctgtccaccacaaatatttcaccactgactacatactggttttgaccaagttcttgaatggttcctctgaagtttttgtagtttgggagctgaaatkgcaataaaaamcagtggaatgctaagaaactttgtaataagacacggaagatatttttttctcatgcaccatacagctatcactttatattgtgctaatccatcaaccagcctctcatgctggtgataactttat

SEQ ID NO: 56738 - DNA, 600 bp, Chicken  19866894311747_5
gtagaaccctcttctacaaaggcacagaaaagaatgaaaagagtgaaatcacatttccttycatgcatataaaatgatcagaagtggactaaaatgttctcctgcatgtaggataaagctgtttaatatagagctttttttttttactgtaacttacctgggtccatgtccttacaggtagctctgtaatttctacagtgttcctgtccaccacaaatatttcaccactgactacatactggttttgaccaagttcttgaatggttcctctgaagtttttgtagtttgggagctgaaatkgcaataaaaamcagtggaatgctaagaaactttgtaataagacacggaagatatttttttctcatgcaccatacagctatcactttatattgtgctaatccatcaaccagcctctcatgctggtgataactttatgtcatagtaaaatcattacaaaaaaaaaaaaaccaacaagatacacacatgcaagtgacagaagcaattaccttattatctaaagagtagatacgtaattaagatatagctgaacccaggaaggggggtgtttctctttgttcggtttgttggttgtgagattct

SEQ ID NO: 56739 - DNA, 600 bp, Chicken  19866894311747_6
ttctacaaaggcacagaaaagaatgaaaagagtgaaatcacatttccttycatgcatataaaatgatcagaagtggactaaaatgttctcctgcatgtaggataaagctgtttaatatagagctttttttttttactgtaacttacctgggtccatgtccttacaggtagctctgtaatttctacagtgttcctgtccaccacaaatatttcaccactgactacatactggttttgaccaagttcttgaatggttcctctgaagtttttgtagtttgggagctgaaatkgcaataaaaamcagtggaatgctaagaaactttgtaataagacacggaagatatttttttctcatgcaccatacagctatcactttatattgtgctaatccatcaaccagcctctcatgctggtgataactttatgtcatagtaaaatcattacaaaaaaaaaaaaaccaacaagatacacacatgcaagtgacagaagcaattaccttattatctaaagagtagatacgtaattaagatatagctgaacccaggaaggggggtgtttctctttgttcggtttgttggttgtgagattctttttgtttgtt

SEQ ID NO: 56740 - DNA, 600 bp, Chicken  19866894311752_1
ttaagtgttctgaaattcttttgcaaaacaaagtatgtcagaagatattccttagccagatgacaagccaatctgcaaagtgatgcggacttctacagcttccagcctctgagtttcaggagtttgttcaagataggggttgaatagtttgtcattcttccttctgttccatttttttgatgttgaaaatgtctgaaggatttttctttctgccatttatttttatgaggcgctgtcatagtcttcattcagttcagagtttacactggcagccttctgctagcatgtagagttattcckgttggtggtaattctttcatgcagtgtggcagattccatttgaatttttcaccaagtgaagttccaagagaatcactatgaaaggactgccaccacttgctggtgagtcagccctcactggtaggggaatgcttccaagtgactcagcagattgttcgtaaaggagaagggtcagattctttctggattgccttagtacaaaagatgtacagaatgagacatcatgtcacatcaaatgagacttcaatagaaatttaatcgagttttatgaaaaggcaaaattgtgattaaatgcaattt

SEQ ID NO: 56741 - DNA, 428 bp, Chicken  19866894311757_1
taaaagctctttgctaatcagcatcgttggttaggagggctgtgttaggctgaggacatcaggagggcacccagcccaaccagtgccttcagaaaggtgctggaggtatcccaggtcgtttcttcctgcagttttgctattattcctacccagggtgtgggaaacggttattacctcgttgaaattaatgcctgtgtgctgtcgctctcccggtgtcagaagaactggtggtggtgtttaagggagatgagtgcagctcacggctcacccatcctggggcctcaaaaatgtaacccaggrttaagaatggaagctagcagggtgttgtaatgaatgaggtactgctgacccgtgggctttcagtctcttctggataattgcagaggaataactgcataaatcttagctggatttcctgcccccttttt

SEQ ID NO: 56742 - DNA, 600 bp, Chicken  19866894311761_1
acctttgttactgatgtttcgcacagttattttacacaataatacagaaacatgcagtacatgcaagaagcaatgatgaagtgaacaaccacttaaatgaatagtccttcccaaattatctccaaagaattcatgcttcagttcatccttctaccatctaaaacacctcatatgacttataagacaaactttgaggtttctgctttggggaaaaacaaacaagaacaggaaaccaccaaggtaacaatatacgcatagctcatttctgagtcagtttggaccattcttgcagatcgttaycagttgctatgggacactagsatctcgtaacacagagttacacttctgagaggacaacccacactaccagccatgcaaacctrttatgtagtaaggattaccttaagtgatagcatatctctgggagctgtttgtctaaagcaaacaaaaatctcagtaaatttggcaaggcaaacaggtacagaatatactgtacttagaacaaatgaacagaggtgggaccgtgatcatgtgcaagtttaaatgcagytggatatctcaacagctctgatatttctacataagcaggtttgggatgat

SEQ ID NO: 56743 - DNA, 600 bp, Chicken  19866894311761_2
cacagttattttacacaataatacagaaacatgcagtacatgcaagaagcaatgatgaagtgaacaaccacttaaatgaatagtccttcccaaattatctccaaagaattcatgcttcagttcatccttctaccatctaaaacacctcatatgacttataagacaaactttgaggtttctgctttggggaaaaacaaacaagaacaggaaaccaccaaggtaacaatatacgcatagctcatttctgagtcagtttggaccattcttgcagatcgttaycagttgctatgggacactagsatctcgtaacacagagttacacttctgagaggacaacccacactaccagccatgcaaacctrttatgtagtaaggattaccttaagtgatagcatatctctgggagctgtttgtctaaagcaaacaaaaatctcagtaaatttggcaaggcaaacaggtacagaatatactgtacttagaacaaatgaacagaggtgggaccgtgatcatgtgcaagtttaaatgcagytggatatctcaacagctctgatatttctacataagcaggtttgggatgatattagactagtcatgggaatg

SEQ ID NO: 56744 - DNA, 600 bp, Chicken  19866894311761_3
aacaaccacttaaatgaatagtccttcccaaattatctccaaagaattcatgcttcagttcatccttctaccatctaaaacacctcatatgacttataagacaaactttgaggtttctgctttggggaaaaacaaacaagaacaggaaaccaccaaggtaacaatatacgcatagctcatttctgagtcagtttggaccattcttgcagatcgttaycagttgctatgggacactagsatctcgtaacacagagttacacttctgagaggacaacccacactaccagccatgcaaacctrttatgtagtaaggattaccttaagtgatagcatatctctgggagctgtttgtctaaagcaaacaaaaatctcagtaaatttggcaaggcaaacaggtacagaatatactgtacttagaacaaatgaacagaggtgggaccgtgatcatgtgcaagtttaaatgcagytggatatctcaacagctctgatatttctacataagcaggtttgggatgatattagactagtcatgggaatgtagtattcaaaacagctgcctgacttaggttcactgctagtggctgacaacataaatacagg

SEQ ID NO: 56745 - DNA, 600 bp, Chicken  19866894311761_4
acgcatagctcatttctgagtcagtttggaccattcttgcagatcgttaycagttgctatgggacactagsatctcgtaacacagagttacacttctgagaggacaacccacactaccagccatgcaaacctrttatgtagtaaggattaccttaagtgatagcatatctctgggagctgtttgtctaaagcaaacaaaaatctcagtaaatttggcaaggcaaacaggtacagaatatactgtacttagaacaaatgaacagaggtgggaccgtgatcatgtgcaagtttaaatgcagytggatatctcaacagctctgatatttctacataagcaggtttgggatgatattagactagtcatgggaatgtagtattcaaaacagctgcctgacttaggttcactgctagtggctgacaacataaatacaggatgaatagtgtccatgtgctgcaatttcacttttggcaacatttcttcttggagttggagtttgatgatctttaaggtctcttccaacttaagcctcttgaatgaaatgacacaactgcatatgaagtgcacagagaactaagatcaaagttggtggaactgaaatg

SEQ ID NO: 56746 - DNA, 600 bp, Chicken  19866894311762_1
ggatataacagaaagtagatgtttcactttaaagttcagctgtctgcaggtattgctaatttctaaggttaatttaaaagctgttatttagtttcacaagtaggcaagagttgtctgctcttgaattgctttgcattttaaaaaacagattgaaaatgctgttgagtctccgctgcctgtcaggtcagctattagtttaatgttctactcagcagcagaacagagtgattgagaaattaagtggtaactaagagtttaggttcaactgacaccgttgtgagcttcaggtaacaatatttygttgcttgggattttataatggatgatactgagtcgagtagtggcgcgtggaaggaggtgccttgaacttgtccataaccctctactataggttgtgggatggtgyttcatccttggctgctctctggaagtctgactggggtcatttccctctcagcactgttcagcccaacgagttcagtcaaacatcttaaatacttttcttgttatttgaaactaaaatattaacacgtggactggagtggctgaggtgggtgtagttttctctttgctaagactgtgatggagatggtctccatc

SEQ ID NO: 56747 - DNA, 600 bp, Chicken  19866894311762_2
agagttgtctgctcttgaattgctttgcattttaaaaaacagattgaaaatgctgttgagtctccgctgcctgtcaggtcagctattagtttaatgttctactcagcagcagaacagagtgattgagaaattaagtggtaactaagagtttaggttcaactgacaccgttgtgagcttcaggtaacaatatttygttgcttgggattttataatggatgatactgagtcgagtagtggcgcgtggaaggaggtgccttgaacttgtccataaccctctactataggttgtgggatggtgyttcatccttggctgctctctggaagtctgactggggtcatttccctctcagcactgttcagcccaacgagttcagtcaaacatcttaaatacttttcttgttatttgaaactaaaatattaacacgtggactggagtggctgaggtgggtgtagttttctctttgctaagactgtgatggagatggtctccatccagcaagtggatgaaggctgctggtggcaatgagtactcaaatggcagcagctagattaccagatcaattctatccaagctgtaagcgtgtattcacaagctgggt

SEQ ID NO: 56748 - DNA, 600 bp, Chicken  19866894311764_1
tggctgatgaaatcctcaccgaccttcccagctacggtaatcctgaaaggaaagggatgtgctgagttttgagctcctttggagccacatgagtactagtactagatgatgaaatccaggagcataagcacccagatgagcacagacaggctttttgaaatctgtggaagaactgtgcagatccaactccatctaaaattctcagcacagcaacagtatttatttttaatagcttcatgagaagcaaaagcttttctgctctgtcacatgggtgcatttttaatacagaaatggatgccrcaagcaaaaaaataaatactttgctgtctctaagtgaatgcccacacaccagttacaccagtatgaaaaccttgtggcacaatgtaatgcagaccaatcactcctgtagtgcacatcacttcacacaaatctctgataaagtttacagcatcatagttaaggaaatattcctactcctggggtgcagttgtaaagaggcagaaacttgcaagttgaaatatagctgcaaacattgggttttggcccctgccttctaccagtgatgccagatttacaaacataagaagcaaaatgtcagac

SEQ ID NO: 56749 - DNA, 600 bp, Chicken  19866894311772_1
agctgcttgccttctccagctggctgagatccaggaggcctgctgcgagttccttaagagacagttggacccttccaattgcctgggcatccgagcttttgctgacactcactcatgccgtgaactgctgaggattgctgacaagttcacccagcataatttccaggaggtaagaggcccctctgctgaagagtttagagggctgtggtctactcttacttcatgtttctttccaaaccctgccttcagttctgctgatagaaaaggatattggcctcagtggggggaagagagcccctrcacggctgtgtttcactgttgttttgtatatcagaaatatgacctgtggcatttcttggagttctgtgttgaatactgcatggaaggcagggccacagacataggtggtggttgacgttgcaactgatgtagctgcaccatggtgtactgcaatacagtatttgggattctacgtgattggaggggagaagagtcctaaagcgaggataatatacgagaataaaaatgtgctgagtgtagggatagggagtctgggggaactgggggagcatatgtctgtatcaagtgaagtcttcaact

SEQ ID NO: 56750 - DNA, 600 bp, Chicken  19866894311773_1
tttcattcatggcttattccaggttgttttctttcttcctctgtgggctgtgctaaggtagcacaacacatccatgctaaatagttctggtaagcactcataagaatagagcactgtcctaggtgttttaaattttcagtagaagcctgtacacaacagttcatgaatcttatttagtccttcttttgcaacattaatgtcaaggttctgctaagaaaaagaatgtttcccctgtagtccttttttcttccaagagatggttttaatgttacaggaaatattatcttcctgaggaattaytccattattttatcttcttaacgtgcagtgttttttccccctgacactcaacctgtgtttttctttttcttgatttaccggtcccttcctgagctctttctcatatgttgcataccagcgacagctaaagctttgtaactgttttgagttctgcaagaatcctcaagctattttaaaatttgcaaatggttttccaaccgacttgctagtcatagaaaaactgtgttactgcttttcccctcaaagttattcctcatacgtatgcaagcatattctcctgggattcaaatatgtgtctgt

SEQ ID NO: 56751 - DNA, 600 bp, Chicken  19866894311774_1
agaactgcatgggagttcggcttctttgccctccctcagtggactccatgagcactcccaaggaatttatcgccacccccagcttcctcctaggatgaagagttttgccatggcagatgcagggaacagatgtggaggggaagagttagaacgggacagtgacccaaagtgtttgttgggctcttccttgaggtgactgaactgttcccagtgtcaaaaaaggaaaggaaaaaaaggagtgtttaacaccatggcttccctattcctcctcctgttctcccccacctttccaccactccrcctgtagcatcctcatctctaagcacccsagtgagctcatctaggagcagtcatcaatgcaccttggttaacagtggtcatgagactgttagtgttactgcaggaaaaaagcctttccagcacttctgttatcagcatagagcacatgagatgttttttttttctccctctctctcattctctctttaaaaaacacttctgctccttgttgagcttgatgctgatgtgctgtgaaggggctgcaaggtaaggcagcctcctgctgggggtgggattccggacagcccccgttttccttag

SEQ ID NO: 56752 - DNA, 600 bp, Chicken  19866894311774_2
cctccctcagtggactccatgagcactcccaaggaatttatcgccacccccagcttcctcctaggatgaagagttttgccatggcagatgcagggaacagatgtggaggggaagagttagaacgggacagtgacccaaagtgtttgttgggctcttccttgaggtgactgaactgttcccagtgtcaaaaaaggaaaggaaaaaaaggagtgtttaacaccatggcttccctattcctcctcctgttctcccccacctttccaccactccrcctgtagcatcctcatctctaagcacccsagtgagctcatctaggagcagtcatcaatgcaccttggttaacagtggtcatgagactgttagtgttactgcaggaaaaaagcctttccagcacttctgttatcagcatagagcacatgagatgttttttttttctccctctctctcattctctctttaaaaaacacttctgctccttgttgagcttgatgctgatgtgctgtgaaggggctgcaaggtaaggcagcctcctgctgggggtgggattccggacagcccccgttttccttagcttagtctggctcaggagactgtgaataa

SEQ ID NO: 56753 - DNA, 600 bp, Chicken  19866894311774_3
ggacagcccccgttttccttagcttagtctggctcaggagactgtgaataatgatgtttgttagtgaaaggagatcagccatccatagaagcctgagaatttttatggctcatgaaatgggaaactaagtatttgaaatactgtaagaatgtgacagttgtgagcttgtttctctcttataactgctggcttctgttttgttaacaagtttttccatggggcggatttgcactattcttttcctagccttgagacagaggttgggctaaatcctgaggtccctttcctcctgagctgctkttacacgtcattaatgtgcacatctattgcttcctgcctttaattttgcatttgcactatttccaygtggcattacctgttacttgtaaacgtccacactgtgcccatagatgtccatgtgcccttaatatctcaaggcttcggtgtgcctgatgctcagagccaccttgtgaacacactacctgcctggggaggtaataccaaacaactgctggtaggactctgctgagaagcctgattgaggtagcactttcattttaattgattttattgtaattattattctttatttcctgggtg

SEQ ID NO: 56754 - DNA, 600 bp, Chicken  19866894311774_4
aaaggagatcagccatccatagaagcctgagaatttttatggctcatgaaatgggaaactaagtatttgaaatactgtaagaatgtgacagttgtgagcttgtttctctcttataactgctggcttctgttttgttaacaagtttttccatggggcggatttgcactattcttttcctagccttgagacagaggttgggctaaatcctgaggtccctttcctcctgagctgctkttacacgtcattaatgtgcacatctattgcttcctgcctttaattttgcatttgcactatttccaygtggcattacctgttacttgtaaacgtccacactgtgcccatagatgtccatgtgcccttaatatctcaaggcttcggtgtgcctgatgctcagagccaccttgtgaacacactacctgcctggggaggtaataccaaacaactgctggtaggactctgctgagaagcctgattgaggtagcactttcattttaattgattttattgtaattattattctttatttcctgggtgtactccagctctattaggtcttaaagtcagttccagcatttagaacaatgtgagccgtcagccctg

SEQ ID NO: 56755 - DNA, 577 bp, Chicken  19866894311774_5
gcattacctgttacttgtaaacgtccacactgtgcccatagatgtccatgtgcccttaatatctcaaggcttcggtgtgcctgatgctcagagccaccttgtgaacacactacctgcctggggaggtaataccaaacaactgctggtaggactctgctgagaagcctgattgaggtagcactttcattttaattgattttattgtaattattattctttatttcctgggtgtactccagctctattaggtcttaaagtcagttccagcatttagaacaatgtgagccgtcagccctgacstgcaaaggtcagaggacttagcactgcacaaagtgatcgtcttctgcaggagagagaagtgagcccctacagttttggtgatgttgtcacttgggtcagtgtctcaaccttttcctaagcaatttagtccatctgtatagttttcaagtcaacgtgtcttatgctggctaaacccttgtcagtttatatactttataacatgcttgaaaggttatctgctatggaaaaaagcaatcatgttatccttctcttattctggattattacgacttcgttc

SEQ ID NO: 56756 - DNA, 600 bp, Chicken  19866894311781_1
attataaagtattataagatggagctatgaaggtagcagtaaacacacatttttaaaatatatttttaagcacttgtcagaaacgttaacctggtgagatgtggaaatgtcagacacattacatgctcaggacgtgcatttggcatttcgctgtcagcaggggagttcttctacaactaattcctcaggaaccgcacgctgagtctgtctgcagggaggaagaaggactaggggtagaaatgtatattgtttattttgtgaagatgtattatgggatattttctccttgagagaagaccrtgagttgtgtcgctcatgccctgtgataatttttgggagttagagtaaaatctgtgttttccatgaaatatcagtcaaatggtgcaggtcattggttttccaggtacaggagggtaaataactagaatgctacttataaaaaaggttaaaatagcttatcttgcagattgtgtgtgtttagtaaccatgacctgatgtgaaatcttggctgttamagagaaacctgcacagtgttgctatactgtgatctcccttcagacatgagaagagggaaaagaaaaaaatcagtgtttagaccct

SEQ ID NO: 56757 - DNA, 600 bp, Chicken  19866894311781_2
gaggaagaaggactaggggtagaaatgtatattgtttattttgtgaagatgtattatgggatattttctccttgagagaagaccrtgagttgtgtcgctcatgccctgtgataatttttgggagttagagtaaaatctgtgttttccatgaaatatcagtcaaatggtgcaggtcattggttttccaggtacaggagggtaaataactagaatgctacttataaaaaaggttaaaatagcttatcttgcagattgtgtgtgtttagtaaccatgacctgatgtgaaatcttggctgttamagagaaacctgcacagtgttgctatactgtgatctcccttcagacatgagaagagggaaaagaaaaaaatcagtgtttagaccctgttttagctgctttatgtgtttccctcrtatcccacccgttctgctgggtcacaataaagctgcttgccttattattgcatttaagcagaaaggccaactcccagaaatactactgataaaattgtggttgtttttcagtcatggatatttaattaaayactgtcggtgttgttcatagtgtaacaaccacattagtgaaatggagtttaagtat

SEQ ID NO: 56758 - DNA, 600 bp, Chicken  19866894311781_3
atttttgggagttagagtaaaatctgtgttttccatgaaatatcagtcaaatggtgcaggtcattggttttccaggtacaggagggtaaataactagaatgctacttataaaaaaggttaaaatagcttatcttgcagattgtgtgtgtttagtaaccatgacctgatgtgaaatcttggctgttamagagaaacctgcacagtgttgctatactgtgatctcccttcagacatgagaagagggaaaagaaaaaaatcagtgtttagaccctgttttagctgctttatgtgtttccctcrtatcccacccgttctgctgggtcacaataaagctgcttgccttattattgcatttaagcagaaaggccaactcccagaaatactactgataaaattgtggttgtttttcagtcatggatatttaattaaayactgtcggtgttgttcatagtgtaacaaccacattagtgaaatggagtttaagtatgatcataagctcgaaatcagcaggatcatatcaaatcaatatattaatgaatacatagatgatggtaagtagttagcatgtcagtttatacccttgtatttcccataaagaat

SEQ ID NO: 56759 - DNA, 559 bp, Chicken  19866894311781_4
cttgcagattgtgtgtgtttagtaaccatgacctgatgtgaaatcttggctgttamagagaaacctgcacagtgttgctatactgtgatctcccttcagacatgagaagagggaaaagaaaaaaatcagtgtttagaccctgttttagctgctttatgtgtttccctcrtatcccacccgttctgctgggtcacaataaagctgcttgccttattattgcatttaagcagaaaggccaactcccagaaatactactgataaaattgtggttgtttttcagtcatggatatttaattaaayactgtcggtgttgttcatagtgtaacaaccacattagtgaaatggagtttaagtatgatcataagctcgaaatcagcaggatcatatcaaatcaatatattaatgaatacatagatgatggtaagtagttagcatgtcagtttatacccttgtatttcccataaagaattcacaggtaaagcagagctgtgacttgtaacctcttttagactatagcatctgaacttgaaattcattaaaaactacaatccacatttaa

SEQ ID NO: 56760 - DNA, 600 bp, Chicken  19866894311785_1
tacccaataagactcacaacctcaatgactattcattccctgctgctcacccacacatagatgtctgatttcagatggaactgtactcagaggtgtcatttgtgttctgccaataaataaaccttttcatctttcctcagtttagtgtttctctttccaaaacaaaaattctcctccctggcctttccaggaggtgagtgggttgctctagttctttctgctcttgtttcttctgtgatgtgatgtactgtgccatgccttgcagaaccatcagttggctcttcttcccaaccttcagasgatcatgaagtaaaacttccttatgctttctccacactctggaagatgccaggaagcccagaggatttctgtttcatccttctttcctcagggcagatgggataggaaagaacaaggctgacaaagacatctggaaaggatctgtctacctcactgttgctcaaaacaacattgagtcaggattatataaagcacattcaaatcagcatcttattcaattcagatgaacttaagattcaactcaaacatttaacacagttctaactctctgcgtcctgcctatgtaatccattcatctta

SEQ ID NO: 56761 - DNA, 600 bp, Chicken  19866894311786_1
tttttttggtgttcttatttaggttgctatattactttagaatgatcttgaaaactaatgattcttcccagtaatgatagcttccagatgttgagtttgaaggctagttacatgatgccattattaaattcatgtaggattattggatgctttccttttccccagaatttcttctgtttaatgatgttggagagctgaatgagtcatttggggaataagaagggggcataggtaagaagctgtatgaatttggttccttggaggcatttaaggccgggttggagggggccctgggcagtytgatgtagtactcgatctagaggctggcagccctgcctgtagcaggggcgttggaacttggtgattcttgaggtttcttccaaccaaggcaatctatgattctgtgattcattgcactgcagtccttgctgaaagaggtacaaagtaactttgtatttgaaatgtgtgcaggctttaggtgagtggattgtttacgatgagatgatacctgcaatttttttctggaaagaaagcccagcaggcagctgttaatcctgtaatttagcctaggggascaactttaccatggttaccgtgtgt

SEQ ID NO: 56762 - DNA, 545 bp, Chicken  19866894311786_2
gggttggagggggccctgggcagtytgatgtagtactcgatctagaggctggcagccctgcctgtagcaggggcgttggaacttggtgattcttgaggtttcttccaaccaaggcaatctatgattctgtgattcattgcactgcagtccttgctgaaagaggtacaaagtaactttgtatttgaaatgtgtgcaggctttaggtgagtggattgtttacgatgagatgatacctgcaatttttttctggaaagaaagcccagcaggcagctgttaatcctgtaatttagcctaggggascaactttaccatggttaccgtgtgttttaaggtatatttttgtttatgaaaaaacaatgaacaagctaaagctgtgagtagggctgggaaagaattcaaattgtgctttaagcagagtgctttctgagtcagttagttatatttgtgtccttagccatagtactttcatttccctgggtttactgtaccagaattattcataaattttcaatcaggtctgagcacaggtttgggtttttgttttt

SEQ ID NO: 56763 - DNA, 600 bp, Chicken  19866894311788_1
cacagacaagaagagtacaattttaatgagtacaagatgcccgtgaagtgctccgagttcatctgtaaatggactgtcccagcctctgcaccagtattcggcatttcggagcttcgtggaaggcgcggggtcattgggcgatgaagctgcttggagaagggatggttttctgccagatgtgcgtgcggaagcggctgagcatagggctgggagaccgactggggctgcagtcgcaaatgtgatgatttggtatttttgctgctgcagaaaggagaaaggttctatcgtcccgggtgacgsgggccagatgaatcaattactttggcatatggagccatctggtaagcgtcagggccagcagaggagaggaggtgggacgtcccacctggggctgggaggaagctgggagtgggggaagagaagggcaagatggagcagaggagccggccttcccaggcagcggggcgctgttagggccttgcagcaccctgaggaaccacattttgtggtatgtgccaggcctggaaacaaggatgtggctcttctccctcagcggaggaggccaggttactgggggcaggaagatgccatgggaggaca

SEQ ID NO: 56764 - DNA, 522 bp, Chicken  19866894311789_1
  misc_feature (1)..(60): n is any nucleotide
nnnnnnnnnnnnnnnnnnnnnnnnnnnnnnnnnnnnnnnnnnnnnnnnnnnnnnnnnnnntcttatgtggctgagtccaaccttgggttcattttcccagcatgtaccagtgccagaagttgcccatgtatctccccaaactcaagcccttccctccccccagctgcaggtcctgtgacagatatgcttatcttagaaatctgcagttttcacattcattatttgtttaaatgggattatcagactaactcaaatggctttttcccccagtcactagtgaagacaatctttgatttttgygttccttctttcatggaactaaagctggatgatggggtaacaccgagttcctttgaaatgactgccagcacaagcactggcacccttgcaaaggtaccctgcatcaaatccatctttttaaaatttttctcctgtgcatcggccatgcattacttaaagcctgttatagttagtcgagggtagcttgtgtagttgattggcctgcatacattttatcttctg

SEQ ID NO: 56765 - DNA, 600 bp, Chicken  19866894311791_1
tttctgtaaagaagtgtttcctaatatccaacctaaacttaccccaatgcaactcgaggccatttccccttgtcctgtcacctgtcaccagtgagaagagacgaacccagctctcgctgtaagcacctttcagacattggaagagagcaataaggtctcccctcagcctccttggctgtggtgtgctcagtccatgagagcctgtgttaacagctcagcaaagaacagggttggctgagcttgtttaactttgagtccacttagataaacaacaagatgctcactgttatgtccatctgytgtgaatgaaggcatatcaaaaattcattgatctaaaatcccaaatttagcttgcaaaatgtttccactgctccascgtgagtaatatgaactagcctggccaaaacagaagataaaatgtatgcaggccaatcaactacacaagctaccctcgactaactataacaggctttaagtaatgtatggccgatgcacaggagaaaaatttaaaaaagatggatttgatgcagggtacctttgcaaggtgccagtgcttgtgctggcagtcatttcaaaggaactcggtgttaccccatcatc

SEQ ID NO: 56766 - DNA, 600 bp, Chicken  19866894311791_2
gtcacctgtcaccagtgagaagagacgaacccagctctcgctgtaagcacctttcagacattggaagagagcaataaggtctcccctcagcctccttggctgtggtgtgctcagtccatgagagcctgtgttaacagctcagcaaagaacagggttggctgagcttgtttaactttgagtccacttagataaacaacaagatgctcactgttatgtccatctgytgtgaatgaaggcatatcaaaaattcattgatctaaaatcccaaatttagcttgcaaaatgtttccactgctccascgtgagtaatatgaactagcctggccaaaacagaagataaaatgtatgcaggccaatcaactacacaagctaccctcgactaactataacaggctttaagtaatgtatggccgatgcacaggagaaaaatttaaaaaagatggatttgatgcagggtacctttgcaaggtgccagtgcttgtgctggcagtcatttcaaaggaactcggtgttaccccatcatccagctttagttccatgaaagaaggaacacaaaaatcaaagattgtcctcactagtgactgggggaaaaagccattt

SEQ ID NO: 56767 - DNA, 600 bp, Chicken  19866894311802_1
gcagaagatgacagccctctttgtgtgttgtctgtgacagccccgtatacttctagtgtttttttttttcatgtgagcatttattcagagtagacaacccagtaatacttccatggacagcttgaaaccctcctgaggcaccgaatggctgaaatacagcaccaatttattcagctacccactcccaactaccaaagaagcaaaatagaaagagtaaatttaacacagcagtagtcctggtgaacagcaattcagtagcaattcatagggttaaaaatatctttcaatagttttaaaaargtatttaaaaaaagacctttctgccttgttcatcactacagtatttaaatatgtatttacaagccatttgttaaataattctgaaacatagacaagaggaaaggctttataaattactggacaagaaccaaggaaaagggattcactttctggcttaccctcaaaactgcagtgtgaccctggggaagctgctgtagctgtctagcccaacctcctatttaccataggtctctacttcttggcctgcttaccccacactggcatttgactgaattgcaacctctgttgagctaaggaaat

SEQ ID NO: 56768 - DNA, 600 bp, Chicken  19866894311803_1
tttaaccagaacaatatggagatagcagtgtgctcacctcaagctgcaccacgtgagaatgaaaaacaggaatgcttcaccagtacaaatatagttgttgtattaaccatattagtatgttctcctggaaaccgctcacaaacattcaggctggtcctagcagttgacagacataaatcttagcaagttcagactcaggatcattttagaaaactgttcacaaagatggccctgcctcccattctctccactctctcggacaggtccacatcatggaagctacagatgtgggttccaacygctaatgcttgaatacatgcagctgactgctatttcatgttattttaaaatcaaaagcttagctacccttacttgataaatatttctgagtatagatgcatatatatatacacacacaacacatacatattcattcaaattccacccacctgcaggatagcaagactagagcatggaaaagcaatctggtatgagaagatgtatcacgagtgaaaacatttgctgtgggatgcatgcagagcacacatcttaaagaattagtgttagcgtaagatgaataacgctcatctcacttatgcg

SEQ ID NO: 56769 - DNA, 599 bp, Chicken  19866894311816_1
  misc_feature (1)..(107): n is any nucleotide
nnnnnnnnnnnnnnnnnnnnnnnnnnnnnnnnnnnnnnnnnnnnnnnnnnnnnnnnnnnnnnnnnnnnnnnnnnnnnnnnnnnnnnnnnnnnnnnnnnnnnnnnnnnttcttcacaattattttgttctaaataattacacactaggaagagagaaccacagctttgcttagccacattattccaatccccctgaagtaatgggagcagataggttacacaagagtagactaacctaaaagcactgagataggattaagtagaagcaagtttagattaaatagctccgaaaaaacttccygagaaacctagcactactccaccacacaagtctatacgcatacatatggctgagcactaagacmgaaaactgcaatacaactgagaaaggcacaagtctcatcagacactggagaaatacagtactggtagtattcatacaattaatttcagtaagtaagcagctttatcaactcaggttttaactatatatatgtatatatgtatgtatatatatagttaacattaactgcttacaattttgatagcaagtctatcagacaacaggatttcttatctttaacagaaattactgacaga

SEQ ID NO: 56770 - DNA, 599 bp, Chicken  19866894311816_2
  misc_feature (1)..(43): n is any nucleotide
nnnnnnnnnnnnnnnnnnnnnnnnnnnnnnnnnnnnnnnnnnnttcttcacaattattttgttctaaataattacacactaggaagagagaaccacagctttgcttagccacattattccaatccccctgaagtaatgggagcagataggttacacaagagtagactaacctaaaagcactgagataggattaagtagaagcaagtttagattaaatagctccgaaaaaacttccygagaaacctagcactactccaccacacaagtctatacgcatacatatggctgagcactaagacmgaaaactgcaatacaactgagaaaggcacaagtctcatcagacactggagaaatacagtactggtagtattcatacaattaatttcagtaagtaagcagctttatcaactcaggttttaactatatatatgtatatatgtatgtatatatatagttaacattaactgcttacaattttgatagcaagtctatcagacaacaggatttcttatctttaacagaaattactgacagaacaatttcacaaagctagcttctaacatttagagtgtggaaactacattatttaaaactcaact

SEQ ID NO: 56771 - DNA, 599 bp, Chicken  19866894311817_1
  misc_feature (1)..(85): n is any nucleotide
nnnnnnnnnnnnnnnnnnnnnnnnnnnnnnnnnnnnnnnnnnnnnnnnnnnnnnnnnnnnnnnnnnnnnnnnnnnnnnnnnnnnncaaaacatcacagcttgtctgtaaagccatagcaaaagccctactctagcttcactttctacactgaagcgtttacaccattcaatggtgcatttacctcaacttttccctccacgtccacagctttgggttggattaattatttgagaaattcgaaggatatgcttagaagaagagtaccttctaataaatttcacacactattttctgcagcrctttagtcagtattgaaacaagcaaacacacaccagattttcaaaaaggtctgtagtcagaaaactgtaagtcacttgtcaagaagcaaaggccaaacttcaaacctcagccttttaaaatattataggtgggcactaagagactgagatacttctgaaaatcttggtatgtgtgatctgattatggagcctgttttctttggatgaaacacagtatttctgaatagtctcaatcccatgacattgggagtacccttcatgttgttcgcaaggcttttctggacagcttcragatggca

SEQ ID NO: 56772 - DNA, 600 bp, Chicken  19866894311817_2
tctgcagcrctttagtcagtattgaaacaagcaaacacacaccagattttcaaaaaggtctgtagtcagaaaactgtaagtcacttgtcaagaagcaaaggccaaacttcaaacctcagccttttaaaatattataggtgggcactaagagactgagatacttctgaaaatcttggtatgtgtgatctgattatggagcctgttttctttggatgaaacacagtatttctgaatagtctcaatcccatgacattgggagtacccttcatgttgttcgcaaggcttttctggacagcttcragatggcatggtataccaatgcatgttcttcactgtgtgttgccacactccaaaaagatascagatttctaaggactggtctgccagcctgaacagggggttggtaaccagctcctctgcatgatgactggactgcctgccataggataagcactattactataaattaattttatattcttattgagatctttattctgttacgattagatttaaatgaataattttatattatataaacatctttcacttaagactcagcaataataattacgtcaattgaggcatggcactcataac

SEQ ID NO: 56773 - DNA, 600 bp, Chicken  19866894311817_3
gtagtcagaaaactgtaagtcacttgtcaagaagcaaaggccaaacttcaaacctcagccttttaaaatattataggtgggcactaagagactgagatacttctgaaaatcttggtatgtgtgatctgattatggagcctgttttctttggatgaaacacagtatttctgaatagtctcaatcccatgacattgggagtacccttcatgttgttcgcaaggcttttctggacagcttcragatggcatggtataccaatgcatgttcttcactgtgtgttgccacactccaaaaagatascagatttctaaggactggtctgccagcctgaacagggggttggtaaccagctcctctgcatgatgactggactgcctgccataggataagcactattactataaattaattttatattcttattgagatctttattctgttacgattagatttaaatgaataattttatattatataaacatctttcacttaagactcagcaataataattacgtcaattgaggcatggcactcataaccaggacggttttctcccattggaacatctgagaaggcaaatcaaatttatttcatctgtat

SEQ ID NO: 56774 - DNA, 599 bp, Chicken  19866894311824_1
  misc_feature (1)..(134): n is any nucleotide
nnnnnnnnnnnnnnnnnnnnnnnnnnnnnnnnnnnnnnnnnnnnnnnnnnnnnnnnnnnnnnnnnnnnnnnnnnnnnnnnnnnnnnnnnnnnnnnnnnnnnnnnnnnnnnnnnnnnnnnnnnnnnnnnnnnnnnctatttttgcttatttattaacaacaaataaattgaactttctatttttccaaaaacttggtcttacttgctctagctagagatctctaatctgaagttataaacagtcactaccgatcagttcactgattccagtaaatttaattccttgacctgggcagcagtytccaggtttgccctagcaattagggagctataaaaatcagagacctttcattttcaaaactatctctcgtttcactcggtagtttttcattaccagtgaacttaaaaacacttttaaagactgctggcagaccttttgctgttaggctgtccacttgcagagaaaaagaaagtatctcgtctccttatactctccaggtggtaagttaccacwgtcaagatgtgaagagatgcatctctcctttcctgatctttggctttattcaggatacagactaagaagaaaagatacagcacaac

SEQ ID NO: 56775 - DNA, 600 bp, Chicken  19866894311824_2
gagatctctaatctgaagttataaacagtcactaccgatcagttcactgattccagtaaatttaattccttgacctgggcagcagtytccaggtttgccctagcaattagggagctataaaaatcagagacctttcattttcaaaactatctctcgtttcactcggtagtttttcattaccagtgaacttaaaaacacttttaaagactgctggcagaccttttgctgttaggctgtccacttgcagagaaaaagaaagtatctcgtctccttatactctccaggtggtaagttaccacwgtcaagatgtgaagagatgcatctctcctttcctgatctttggctttattcaggatacagactaagaagaaaagatacagcacaacctccttaaatcatacatgagttccttcaaaagtgtsaagtaacccaacatgaagggggtaaaaaattggagggatgaatgggtgatcctgctgattcatcagaggactgaattaagcagtggcaaggttatggtgaaaaagcacagcatgcactgatgtactttcacatttaaaatgtaaggtcatttggacgtgtgagtcaggcctggtgcta

SEQ ID NO: 56776 - DNA, 600 bp, Chicken  19866894311824_3
atcagagacctttcattttcaaaactatctctcgtttcactcggtagtttttcattaccagtgaacttaaaaacacttttaaagactgctggcagaccttttgctgttaggctgtccacttgcagagaaaaagaaagtatctcgtctccttatactctccaggtggtaagttaccacwgtcaagatgtgaagagatgcatctctcctttcctgatctttggctttattcaggatacagactaagaagaaaagatacagcacaacctccttaaatcatacatgagttccttcaaaagtgtsaagtaacccaacatgaagggggtaaaaaattggagggatgaatgggtgatcctgctgattcatcagaggactgaattaagcagtggcaaggttatggtgaaaaagcacagcatgcactgatgtactttcacatttaaaatgtaaggtcatttggacgtgtgagtcaggcctggtgctagcaatgtgcttctctccaaaatgagctcaatttaattgttaaacctaggtctgagaacttcttttttttctcaaaaactgcatttgttcacttaaaaaaatctttaagtaaaacttactggt

SEQ ID NO: 56777 - DNA, 600 bp, Chicken  19866894311825_1
tccactctccccgggggaactgctcccttgaagggcagcgggcagcagggctcagcattacggcgagtaatccccagtaaagccgcatctcagaagggagcactgaccgcggggattaggattgaggcatccatcctcaccttcctgccctgccccctatggatggggacaggggttgcccacgctcccagcagccgctgcccagcaccctgcgattggtgtgagctgtgcgtgttccccagcgcctcccagcagtggtgctcatagtggtaccgagtatttgttgagcagcactcagtrttgttgcccaattccttgagtcgcttcctggtgctggggctgccccctcccagcagtaccgggttctggtgcccgtgctggtgctctgtacccagtactggtgccatcacccttcagtgggtacccagactggtgccctgtgcctggcatcagtaccggtgcccatacctggtactggtggactgtcctgaggccttggtgaccgtgccctaaccccagtgcccagtactggagccccgtgccccgtactgctaccccacaccagtgcccacagagcacagcattgctgccagcacttgg

SEQ ID NO: 56778 - DNA, 600 bp, Chicken  19866894311826_1
gactaaatcaatagaggtacacttttaagtatacagtgagtcagataatgcagcctaatggaatacatcattccagggacactgaaaacagtgcagctgaaacttgctagtgaagggttcaaccgagtacaaaaagttattattagctttgaaagagccattaccagaagttggaaaaaacaaactcacattcagatgatttcttattgtaataaatgtgattatctatagctgtgcatgcacaactcttcctaagttcagaaataatagaaacatccactctgcccagaatgacatctrtgccataatctgacctgtgatcgctcatagatgagaacttcagttcatgcatacatttcagaaaaggactgagtatattttaagaccgtgttggggaatttccagtactcttttgagtaacctaccactggccagattttgcttaatttaatttttaggtttttctagcttttattactgtctgtggaatttcattgtagtttttatactaaaacaaacaaacaaaacaaacaaacaaacaaaaaacccaggctgcaataagtctctagcagtcaggtcataagcaagtgaattattaag

SEQ ID NO: 56779 - DNA, 600 bp, Chicken  19866894311829_1
taattatgttaatacgttgctgagcttctaagtgtaccctgtgggatgatagatgtttacaaaaccctgagcaagctttttctcagctaggtactcatgtactcaaaaaaaaaaaaaaaaaaaaaaaagtcaacgaatcttctctgaaccaaagattcttgcttgctaacagcagattagtgcttgctaacagcaggaccaatggggaaatttctggggatactcgatcacctgagatatttgcaccaatacttatactctcagtcaaaagtcaatgaatcgtcctaccctcaaaaaaamcaaacaaataaaaaaaaccccaccaaataaacctagacattaatatatatatatattaaagcatcacaaaaactttctttcccctatttcttctggcttcttcagttgaactctttttcctagtttcagatgtattgtatgctacaccttagcagactgcccaaagatttctgcagtccctggaaacaagcctttgcctgtctgtctcaaggtgagatgagctgtgtcctagcaccacctgtttcccattcttgactactgtggaagccaagatgtctatcatccatatccctactggaa

SEQ ID NO: 56780 - DNA, 380 bp, Chicken  19866894311829_2
gtgtgtcatattgccactttcttagatcaaataccttccatttttaggcaaaaggctgcatactgaatgcctacaggaactctgccagttttacaagtgaccctgagcagctggtgggatagatttcggcagaagctctgttcttcctttgtggctctgggctgagaatgctcagtccagatggaatctgcaaaccattcagatgccaagctcaaataagcttttagtgtgcatgtgtaaaataggacttttctagatttggaaactgaaaattttggcagcttttcctggaaacagaaraactcaatacccctccaaaatcaagctatttctcaaaagtgagcaggcctttttttttttttttttgaaaaatgagaaat

SEQ ID NO: 56781 - DNA, 599 bp, Chicken  19866894311832_1
  misc_feature (1)..(67): n is any nucleotide
nnnnnnnnnnnnnnnnnnnnnnnnnnnnnnnnnnnnnnnnnnnnnnnnnnnnnnnnnnnnnnnnnnnatgttttctctgcactgagctttgcttctgagcaccactcagagctctgcaccaaccccgtgttggagccactgacccaacagcagctcagggaggggaatcacagtcgccccagctcctctccctcagtgatgagaaacccccagcactatttccaccccagtcaggtttccaagctcacagcattggtcccatccaccccagcgtcccttggagctgccagccctgctcaraggaggcttagcaggtgcccagaaggaaagacaggagggctttttgggctgcagaacagtggttttccttccaaactggaaggacatataaatagcttcctccagcaataatytcctcctagaaamcatcctcattgcctttacccatgtaatgaaaagggagctctggctcctgcctggtaggctgctggtgcagagccattggttcctatcactcctggagaagacgtgggtacagggcaggctgtaccatgttcagcatttggcagattaagaattttgcaagctggagctgctcc

SEQ ID NO: 56782 - DNA, 600 bp, Chicken  19866894311832_2
ctgcaccaaccccgtgttggagccactgacccaacagcagctcagggaggggaatcacagtcgccccagctcctctccctcagtgatgagaaacccccagcactatttccaccccagtcaggtttccaagctcacagcattggtcccatccaccccagcgtcccttggagctgccagccctgctcaraggaggcttagcaggtgcccagaaggaaagacaggagggctttttgggctgcagaacagtggttttccttccaaactggaaggacatataaatagcttcctccagcaataatytcctcctagaaamcatcctcattgcctttacccatgtaatgaaaagggagctctggctcctgcctggtaggctgctggtgcagagccattggttcctatcactcctggagaagacgtgggtacagggcaggctgtaccatgttcagcatttggcagattaagaattttgcaagctggagctgctccaaacacagcccactggaacagtgctcagcctggtggaaaggatgggcagagaaggactgtttttcacatcatttgtgactgtgtgtgctctcagtcctggactcccagccagac

SEQ ID NO: 56783 - DNA, 600 bp, Chicken  19866894311832_3
gtgttggagccactgacccaacagcagctcagggaggggaatcacagtcgccccagctcctctccctcagtgatgagaaacccccagcactatttccaccccagtcaggtttccaagctcacagcattggtcccatccaccccagcgtcccttggagctgccagccctgctcaraggaggcttagcaggtgcccagaaggaaagacaggagggctttttgggctgcagaacagtggttttccttccaaactggaaggacatataaatagcttcctccagcaataatytcctcctagaaamcatcctcattgcctttacccatgtaatgaaaagggagctctggctcctgcctggtaggctgctggtgcagagccattggttcctatcactcctggagaagacgtgggtacagggcaggctgtaccatgttcagcatttggcagattaagaattttgcaagctggagctgctccaaacacagcccactggaacagtgctcagcctggtggaaaggatgggcagagaaggactgtttttcacatcatttgtgactgtgtgtgctctcagtcctggactcccagccagaccgtagaatcaaag

SEQ ID NO: 56784 - DNA, 600 bp, Chicken  19866894311835_1
cagttctgcacagaggaggcccttcagatacggtccccatcccgagggcagtggggcaccccaggctgggggggacgatgcagagcagtgggactgcagatgctcccagcacggcaggatggggacatactgtgccatcaccccacagctgtgccctgccaccaccctgccaccacagcaggctctccctgtcccaccctccctatgtgcccctccagcctcgcaggatcctgcctggcactcacgggcttcttggagtcctccacctcacggatgctcaggttctccagggggatgatrccacgtggctctttatcctgatggggccaagcaaaggttttcattacagacacctccaaccccttcccagtgccccataggaagggctgagtgctcccagcactctgtccaacactccctgcgcggaggcagccggcactgccctgccccatgtctgcaccccacacccctggggccacgggcacggtgcggtgcacaccacccccccggaggtccccagcccgcacccactgctctgccccagcccctgctcagctcactgaccgtcgtgtattcaaagtagtaaaggcagttgtctgt

SEQ ID NO: 56785 - DNA, 600 bp, Chicken  19866894311838_1
cagcagcaaagtgaatagcaagcaaacaatataagaggaatagttaactaatacctgtcacattacatagcagtaaagacttatgtccttgaagttttccctcctggaacttgcaattgtgcaaatgcacattcacatgtacgttcataggtcccatgtgattttgatataattacatcttgcattacacttatttgtagatttttattcctctttcctggttcattgtagctgaacttcagggcttcatagtacattttcagacattttcaaatgcctgcatgattcccactaaacttsaaacaactctctttttctcttcagaaagaatgtaacctttactatttccaattttattgtgaccataaaattaatttcatttattgaaattctayagctagagttattcaccatgattactaccaagtatcttccagcatttcaccctgccttgctcttgtctttttaatagaaagctctttttttgctatgctgttaatagaatctaacgatgatagagggtctgtcctttggaaaggtttcaccatcagtggacagattgtatctctcacagtgtttactgcttttaaaagcaacagt

SEQ ID NO: 56786 - DNA, 600 bp, Chicken  19866894311838_2
tttccctcctggaacttgcaattgtgcaaatgcacattcacatgtacgttcataggtcccatgtgattttgatataattacatcttgcattacacttatttgtagatttttattcctctttcctggttcattgtagctgaacttcagggcttcatagtacattttcagacattttcaaatgcctgcatgattcccactaaacttsaaacaactctctttttctcttcagaaagaatgtaacctttactatttccaattttattgtgaccataaaattaatttcatttattgaaattctayagctagagttattcaccatgattactaccaagtatcttccagcatttcaccctgccttgctcttgtctttttaatagaaagctctttttttgctatgctgttaatagaatctaacgatgatagagggtctgtcctttggaaaggtttcaccatcagtggacagattgtatctctcacagtgtttactgcttttaaaagcaacagtaatctttctcacatttgctgtgtcaataatgaagtctttattaacacctcaccctttttatagacctgatagaaacagatgctccatctgcttaa

SEQ ID NO: 56787 - DNA, 600 bp, Chicken  19866894311838_3
tgtcctgtggagttttgtctttgagggaaaacaacaaaagggctctttgtctgcctcatgcgactaaggtaccttcagaagaaaggtttgagcagccctctctaaaacaaggttaatggttgcaaaaatgacatttcctattcacctttgtgattttgtattcaaatgcacacactttatcatactcgaaatctggtggcatacacaaatcccattcttggatgtgtaacttggctcacgcataggattcaattaaggcctaagagaaatatgtcacactgttaaccctgccacttgtarcagtccttgagacttcacaaagctcttctgagtctgtgatgcaccatttaaaccacttgactttcactccatacagcgccgagtgtgcctccagggaaggttcacagtgctctagggacaaattctttttcaccactgctccctgaataacaaaacacacaaaaaagggagagaaagacaagtatttatgtctcttcctagaacacagacaaatttaggaagtagagaaatcaatagaaaataaataaaggtgaaaaatagtataataatagaaagtggacattttatattttgtcttca

SEQ ID NO: 56788 - DNA, 600 bp, Chicken  19866894311838_4
gggaaggttcacagtgctctagggacaaattctttttcaccactgctccctgaataacaaaacacacaaaaaagggagagaaagacaagtatttatgtctcttcctagaacacagacaaatttaggaagtagagaaatcaatagaaaataaataaaggtgaaaaatagtataataatagaaagtggacattttatattttgtcttcatgttatgttaaacttttttcacaaaatcacagaatggctggagttggaaggagcctccagggatggtctagtccaaccacctgctcaaagcaygatctgaagtgagctgctgaggaccatgtcctgttgggttttgagtatctccaaggatggatactccataacctatctgggcaacataattgacttgatcttttaaagttttcagctcttttattttatatttcaaaatcaaatatttattccatcttgaccaaaatgaattttcttctttattaaaaggcaaagatgacattaaggttagttggaaaggactgagcgcagcattgccaaagaagacctgggggtattggtggatgggaagctggaaatgagccagcaatgtaccctcac

SEQ ID NO: 56789 - DNA, 600 bp, Chicken  19866894311845_1
ctgacaactacagctcttaaacagctgctggggtaatttgcataaaggagattgtaaatgtctcattggaacgcatgcagcgcaatccacccaaaaaccactgcctgaacaccaggaaaagaagattgtagtcataaaaattgtggctctcatgattttagattatggtctccacagtcttacagcttttgcaaataccaagcttttgttcaaaaaaaaagtttcatttaccgatacagaacaatacaaacagatgccgtgttgctctcttgactcagtctagcagaaaattgacttctrcagcaaaggtaggtgttgacccctcttcagttcttcaccccagtgatgagtgaattggtccaatttaaattatttataataaaactggttaaaaaaaaaactttatggtagcaaaagggaaacaaaggaaatgcaaaataaagttaatttaataagaggattcgataaagagtaaacaatgcagaagttgatacaatatgttaattgtctgcctgcatctgctatgttttatgatgcatattttaatagaaattaatattaaagctatgcatattttcatgaaaatcagaattaaaagag

SEQ ID NO: 56790 - DNA, 599 bp, Chicken  19866894311853_1
  misc_feature (1)..(139): n is any nucleotide
nnnnnnnnnnnnnnnnnnnnnnnnnnnnnnnnnnnnnnnnnnnnnnnnnnnnnnnnnnnnnnnnnnnnnnnnnnnnnnnnnnnnnnnnnnnnnnnnnnnnnnnnnnnnnnnnnnnnnnnnnnnnnnnnnnnnnnnnnnnagtttaaaaagggatccaacccacgcccgtaaaatgggacctgtagacttggtttcctaacgccctgctatggcatagtgccatctcgtgggcaccagcggtttctagcagaaagtagaggaggcaaggagggtggaaatgaaatgacaacaggttgttakagaaaagaaatgaaaccccgtttcatctgctatgttcctgatgtagtagaacattcaaagcaacttgtttacttaattgccacttcacgttattatccttgggtgctttcatgttcttttcagacaacatgtgttaaatctggacatgaccactccagaaatctcatacgtaaaaaatagttaaaattttggacccaaatatgaagcttgaccatgcgtaactctaacaaaaagagtaaaaaataaataattttttaaaaatctaatgttaatagaatgtcytaatttactcataaatc

SEQ ID NO: 56791 - DNA, 600 bp, Chicken  19866894311853_2
ctgtagacttggtttcctaacgccctgctatggcatagtgccatctcgtgggcaccagcggtttctagcagaaagtagaggaggcaaggagggtggaaatgaaatgacaacaggttgttakagaaaagaaatgaaaccccgtttcatctgctatgttcctgatgtagtagaacattcaaagcaacttgtttacttaattgccacttcacgttattatccttgggtgctttcatgttcttttcagacaacatgtgttaaatctggacatgaccactccagaaatctcatacgtaaaaaatkgttaaaattttggacccaaatatgaagcttgaccatgcgtaactctaacaaaaagagtaaaaaataaataattttttaaaaatctaatgttaatagaatgtcytaatttactcataaatcaactctgtgagcgaggtattagaaaaaaagaacaagaaaaaatatttgttttacttcacaaatctggtggtctgagaaaggcaatatgccatttttttccttatgaagtgatttcacagaatggtttcatattatttccatataatcctattctgctccagtaggaagtgaaacaatgtt

SEQ ID NO: 56792 - DNA, 600 bp, Chicken  19866894311853_3
atgacaacaggttgttakagaaaagaaatgaaaccccgtttcatctgctatgttcctgatgtagtagaacattcaaagcaacttgtttacttaattgccacttcacgttattatccttgggtgctttcatgttcttttcagacaacatgtgttaaatctggacatgaccactccagaaatctcatacgtaaaaaatagttaaaattttggacccaaatatgaagcttgaccatgcgtaactctaacaaaaagagtaaaaaataaataattttttaaaaatctaatgttaatagaatgtcytaatttactcataaatcaactctgtgagcgaggtattagaaaaaaagaacaagaaaaaatatttgttttacttcacaaatctggtggtctgagaaaggcaatatgccatttttttccttatgaagtgatttcacagaatggtttcatattatttccatataatcctattctgctccagtaggaagtgaaacaatgttgatctataatgatttggaatcaagagttgcagtggaaagctaatctgttgtgcttctgaatgctttggctatgcataagcattattttatcagtccagtatga

SEQ ID NO: 56793 - DNA, 599 bp, Chicken  19866894311854_1
  misc_feature (1)..(87): n is any nucleotide
nnnnnnnnnnnnnnnnnnnnnnnnnnnnnnnnnnnnnnnnnnnnnnnnnnnnnnnnnnnnnnnnnnnnnnnnnnnnnnnnnnnnnnntgcctcctgtttatttccatggaaactacaacagctacaaagaacacagtaacgctacttgatagagcagtttctcaacaacagaacaatatatttcaatatagtcaccaccattagctatgcattttcaaccatgatgaacaagaggttcttgggttgtaacctgctgagtagtgtaggtcagctgttcaaaatactcttcctttcatggtrtgacagctgtgcatcgccatccagaatgtggcttgtctttcacactgctgttgccaccattgacacacatcacccaccacctcactacacycatatccagtggctggtctccagaaacatccagcaagtgttgatgaatgccattggatgcaatttttttccacatggaaaaattcagtggtacacctttgcttcatgtgcatttccatgtcagacaccattctgtcagagtgccccactgctgccatctgtcatacagaaagtaagtataatggattattggagggaaggctcaactt

SEQ ID NO: 56794 - DNA, 600 bp, Chicken  19866894311854_2
tcctgtttatttccatggaaactacaacagctacaaagaacacagtaacgctacttgatagagcagtttctcaacaacagaacaatatatttcaatatagtcaccaccattagctatgcattttcaaccatgatgaacaagaggttcttgggttgtaacctgctgagtagtgtaggtcagctgttcaaaatactcttcctttcatggtrtgacagctgtgcatcgccatccagaatgtggcttgtctttcacactgctgttgccaccattgacacacatcacccaccacctcactacacycatatccagtggctggtctccagaaacatccagcaagtgttgatgaatgccattggatgcaatttttttccacatggaaaaattcagtggtacacctttgcttcatgtgcatttccatgtcagacaccattctgtcagagtgccccactgctgccatctgtcatacagaaagtaagtataatggattattggagggaaggctcaacttctactgtcataccaccaacatccacctttgatgtcatgggccagcataataaaataggggatattacttctggagtagccacgtgtatttca

SEQ ID NO: 56795 - DNA, 600 bp, Chicken  19866894311855_1
acttaagtggtactaaaactttgcctttcaatctacaatgttatatgattctgtaaacaacatatagaatctgtatgaatttttaactacaatgcaagccttgataaaaacaacaaataaacttttatctttttttgtttgttttcctattgctgtaagagtgaatagaataaaaagtttcggttctgctacagaaagttaatttactcactttctatattccatcaagttaaactgaatcacattcttagtttcttatttgattgacaaagcttacatagcttaaatgcttctcaaagyaaaaaaaactttgaagtggtcctatttaaaggcagaatcgtctgtaatgaccttgttaacttgcttgtatcctcctggttgattgcatatgttctatattatttaaaagtcaagtgtttacattaaataagatttttatttctgttattgtttcatatttttctttttaattttatatatttctcagtacagaccaattgattcattagcttcatttgggaacctaaagtgtgattgagggctataaggtttttcaaaagtaatgggcagggaaggacgggtgggagatttgctctctac

SEQ ID NO: 56796 - DNA, 600 bp, Chicken  19866894311862_1
aagcttggtgaagctccttatgtaggtaactgcagatctcatatagctcttggtttcttcccctctagcaatagtagttctaatactcctttccccactagcaaatgattttaggggctgattttgttttgttttgttttgatattcaagtgtatagaaacgtgaaacaataaccttcagtagatattttgttgctagtaaccgctgaggtatttattgttattcatggtacatcactgtcctttttgctcacttttttcaggctttgagttcattggtatatttggtacatattttccyttggaaaaaatttagctttgtttccttccttcattaatattttgtgaggatgtataaaatgtatgctgatttcttttaacaagcgtttaggatgtggcatggctgcaaaagactgttattgctaggcgtgagaagaaaatgggaactgtttgaaagagcagacccagtctctgtgctttaattcatttgaggtgtgaggcccacttatattcctttcccaatcaatagcaaggctgtcattcttttgaatgggatttgaaataagcccagactgagcctgtattcattaaagcaccagca

SEQ ID NO: 56797 - DNA, 600 bp, Chicken  19866894311862_2
atattttgtgaggatgtataaaatgtatgctgatttcttttaacaagcgtttaggatgtggcatggctgcaaaagactgttattgctaggcgtgagaagaaaatgggaactgtttgaaagagcagacccagtctctgtgctttaattcatttgaggtgtgaggcccacttatattcctttcccaatcaatagcaaggctgtcattcttttgaatgggatttgaaataagcccagactgagcctgtattcattaaagcaccagcacatgttgatttactgtgtgtttggggatggagggartagatttaataacttgttctaggattttgccatctgctacatgcaacaccatgagcagttgcagaactaccttcaataaaaatcttatgaaagcaaatggaataggaagagactgatgttcctcaaatgaactggtagggaaaaatggggaaaagctgatcttaattagagaagagtcagaaggaagaacagcttctgctatgacacatactgcttatttttattacctccacgaatttgtttaaaagagaaaagattacagtggatgctgacctgaagagtaggcaagtagacagaatt

SEQ ID NO: 56798 - DNA, 599 bp, Chicken  19866894311863_1
  misc_feature (1)..(23): n is any nucleotide
nnnnnnnnnnnnnnnnnnnnnnnaatatctcatgcattgctgacatgcactttcaagttttgatctgatttaataatccataggaaaggactaatgactattccatctacctcagtgccatgaagaaatatatgtaacttaccccattgatatcagagtcagtttgcttccacttgccattaacacagggtttaagtcagagattgggcttgctgtcattatgttcccaccaagagcctaaagtgatagtaaatgaaacagaaaaatattaaaaaaatctcaacatctaacaataacacyttgcaatcctacattaycccacgcagagygcactaatgattagctgcacttgagtttgctttgataagctctttctgcttactcagcaactctaggctgttaatgaattagggatatataaaatccaccaaaacagctgtcgccccattgatgctaacatttgtctgagacagttttagcagtactctttgggtaatgcatcaaaactaccttatgctcaagccacacatgcccagcaatgtcaaaattcaattggtgtagatgcaattatggaaagatccacggagaaattttcagta

SEQ ID NO: 56799 - DNA, 599 bp, Chicken  19866894311863_2
  misc_feature (1)..(6): n is any nucleotide
nnnnnnaatatctcatgcattgctgacatgcactttcaagttttgatctgatttaataatccataggaaaggactaatgactattccatctacctcagtgccatgaagaaatatatgtaacttaccccattgatatcagagtcagtttgcttccacttgccattaacacagggtttaagtcagagattgggcttgctgtcattatgttcccaccaagagcctaaagtgatagtaaatgaaacagaaaaatattaaaaaaatctcaacatctaacaataacacyttgcaatcctacattaycccacgcagagygcactaatgattagctgcacttgagtttgctttgataagctctttctgcttactcagcaactctaggctgttaatgaattagggatatataaaatccaccaaaacagctgtcgccccattgatgctaacatttgtctgagacagttttagcagtactctttgggtaatgcatcaaaactaccttatgctcaagccacacatgcccagcaatgtcaaaattcaattggtgtagatgcaattatggaaagatccacggagaaattttcagtaacattcaaaaagcacag

SEQ ID NO: 56800 - DNA, 600 bp, Chicken  19866894311863_3
tcatgcattgctgacatgcactttcaagttttgatctgatttaataatccataggaaaggactaatgactattccatctacctcagtgccatgaagaaatatatgtaacttaccccattgatatcagagtcagtttgcttccacttgccattaacacagggtttaagtcagagattgggcttgctgtcattatgttcccaccaagagcctaaagtgatagtaaatgaaacagaaaaatattaaaaaaatctcaacatctaacaataacacyttgcaatcctacattaycccacgcagagygcactaatgattagctgcacttgagtttgctttgataagctctttctgcttactcagcaactctaggctgttaatgaattagggatatataaaatccaccaaaacagctgtcgccccattgatgctaacatttgtctgagacagttttagcagtactctttgggtaatgcatcaaaactaccttatgctcaagccacacatgcccagcaatgtcaaaattcaattggtgtagatgcaattatggaaagatccacggagaaattttcagtaacattcaaaaagcacagtattttgactgca

SEQ ID NO: 56801 - DNA, 599 bp, Chicken  19866894311867_1
  misc_feature (1)..(60): n is any nucleotide
nnnnnnnnnnnnnnnnnnnnnnnnnnnnnnnnnnnnnnnnnnnnnnnnnnnnnnnnnnnnctcccaccacagcatggggtacgttgaactgccagagacgctggggaggatggagagttcatagcagccctgcagacagctcagctcagaaaccagaccagaacgtggtgtcccatcacaaagcagatggtgctgcagtgggctctgccaatggcacctgtcacatcacagcgtgccgtgagcccacaccgaatggcaccagaagatgaagcctcacaaagccagcaaccagattccccraaaactcctttctgttaatgctcacaaagttctcctcgcaagcaaaactaaccagcaaagcttctgctgagaggaggcagtattggtaagctgggatcctgctgtggttacaggtattgcaggcagcaaagcagcttgagctcagtgcaagacttcactactgctttacttgctttgaattcacttgttgtagctttcaaatgaatatattagcctttagagctaaccattttggtggcacgattgcccagtggtgctgctatagaattattacaaatgatggcttctgcagctagaaa

SEQ ID NO: 56802 - DNA, 599 bp, Chicken  19866894311869_1
  misc_feature (1)..(112): n is any nucleotide
nnnnnnnnnnnnnnnnnnnnnnnnnnnnnnnnnnnnnnnnnnnnnnnnnnnnnnnnnnnnnnnnnnnnnnnnnnnnnnnnnnnnnnnnnnnnnnnnnnnnnnnnnnnnnnnncagggtcgccaaccagcagaccaggctgcccagagccacatccagcctggccttgaatgcctacagggatggggcatccacacctccttgggcaacctgttcagtgcgtcaccaccctctgggggaaaaacttctcctcatatccaacctaaagctcccctgtctcccccttgtcctatcactatcarcccatgtaaacagtcatcataaactttcacccattgctctggcaagcagcccacctgtacataaagcaagaagttgtttgtgctcaactgagaccagaaaagtgaacaaagtctaaaggacattgatttgcttcaaagagtatgcaaggcaacaggcacatcaccagtatgggccagactgggccactcgtacatgagtggccacaccagctgcgtggtgagctgagcctgcctacaaaatgacatcagaaacaccaagtttgggcatgcatgcaacagaacctggtgtggaaagagta

SEQ ID NO: 56803 - DNA, 600 bp, Chicken  19866894311870_1
agagccacatccagcctggccttgaatgcctccagggatggggcatccacacctccttgggcagcctgttccagtgcgtcaccaccctgtgtatgaaaaacgtcctcctaatatctaacctaaacctccgctgtctcaggggagacatgccataaccaatcaagcccaaaatacaacatagcagagaataaatcatggcacaaagttgatttctataataattacaagaagtagatagtttcagctctaagacttgttacaaactggcatgaaaatgatactgatgatacattcgtcaaktagattaataaagccatgccaaccttctcccactccagaagtgccaagcaagggaacctccccacagtttttaaaacacaggaaagagtgctacaggataaaaagccactttctggggggcatgacatttaaaatgtattttgacacatttaaaacagtgccctcaaccttattctctaaatggatgaactggtctataaagactgttaaacagaacaactaagagaggaatccagagccacagaaaatatgaagagctaaaaatacacaaatacattcattttcagcatcagaaatctg

SEQ ID NO: 56804 - DNA, 600 bp, Chicken  19866894311873_1
atgatatcagattgttgttggactgcccggggttgctttggttgctgcttgacccaggaattggagacactggtggtggttcgtatgttaccccagctaacccatgttcctctcagctggacgcagacctctctgagggattaggcaaggtggcaactggtgcctcagagtctgggagaggttctgtcttgattgttgtaaaacacactgttagcctctgcagtgggtaatgtcctttctgaccaatggccagagctgcatctgcaaggtacagctgagttattttaatatctgtccccktgagcagagtaagactgagtagtgtgtcttgctattaacatacttaaagtaactgaggtccttcatctacatttgctttatgaggaggaagtccctgayttgaattttcccatcttcttgccaagataaagagcagccagcagttgttgtgactgttggtaactggcctgctggctggtttgcagtagcagagatttgggatatgcctcaaaaagacctccatgttcttagggagaacaacaataggttggaattaagggatggaagacagaagcttagtgctgatctcagtgaatgctg

SEQ ID NO: 56805 - DNA, 600 bp, Chicken  19866894311873_2
acccatgttcctctcagctggacgcagacctctctgagggattaggcaaggtggcaactggtgcctcagagtctgggagaggttctgtcttgattgttgtaaaacacactgttagcctctgcagtgggtaatgtcctttctgaccaatggccagagctgcatctgcaaggtacagctgagttattttaatatctgtccccktgagcagagtaagactgagtagtgtgtcttgctattaacatacttaaagtaactgaggtccttcatctacatttgctttatgaggaggaagtccctgayttgaattttcccatcttcttgccaagataaagagcagccagcagttgttgtgactgttggtaactggcctgctggctggtttgcagtagcagagatttgggatatgcctcaaaaagacctccatgttcttagggagaacaacaataggttggaattaagggatggaagacagaagcttagtgctgatctcagtgaatgctgtttttctcagaggcatcttttttcccaaagtttgttggcagatctgaacctttctgcttgtcagctagtgcttgctacagttttcagtagcagggtgat

SEQ ID NO: 56806 - DNA, 599 bp, Chicken  19866894311893_1
  misc_feature (1)..(193): n is any nucleotide
nnnnnnnnnnnnnnnnnnnnnnnnnnnnnnnnnnnnnnnnnnnnnnnnnnnnnnnnnnnnnnnnnnnnnnnnnnnnnnnnnnnnnnnnnnnnnnnnnnnnnnnnnnnnnnnnnnnnnnnnnnnnnnnnnnnnnnnnnnnnnnnnnnnnnnnnnnnnnnnnnnnnnnnnnnnnnnnnnnnnnnnnnnnnnnnnnattaagatgcataatgacatatgctattttataggcctttttaaattagtcttggttatggaaatgttttcatcatacatgtgattaatattgattaacatcaacaktaacttctaagtagtatcaaggacaagtcaagcatcattatttatgacagtatgcgaacacaggggaatggccaattgtacaatcaaacagtgtatctcggggaacctctaatgatgctaactcctattagtaaatttatggaacatcgtgctacatggagaaaataataaaataacacaagcactattcgttaacgtttataacttcaaggggacaattctcatggagagtcattataatttcagaaaaatagaaagtgaattgctaatcttactaaaaactctacgtttacatatgc

SEQ ID NO: 56807 - DNA, 600 bp, Chicken  19866894311894_1
aaagtgtataaaggaattaggagaaaaaatgtcctcagattgctttcagttctagaaaaacaagatctgaaaagtaagatatcaggtctgaaaactgtagcagcacaaatcatactacattgaaggaaataagccagtgctgtgaagcaggcataagcacccatttaactctcaaatcatacatgattctctaacgatctccaaaattgcacaggttcttgctactgggggtaacatactaatgtatttctcaacttctatctgcagctgagttgattctcagcaggactaaggatcaaracgacataaacattgtttaaaatcaccattccattcaacacattgacttgtgcatcacaaatgtctttgactagggccttggagttaactgacagtaaataatatcttatttactaaaaattataaccacaaaaaataatatcttgattcagttatcaacacaacatttaatttgaaaatatatttccaggcaatagattggaacattccaaaatgtgaaagtaactttgcctttagaaaattattatttatcactgatcattcatgttctcagtgagaatgaaattcttacgtatttaa

SEQ ID NO: 56808 - DNA, 600 bp, Chicken  19866894311898_1
cctttctgatctgtgcagaattcaatccctttcctgcagtaatttgaaatgcgggagccttagcttcgctttgaagctaattttgtacttgtaattcaaagcatatcacccctttggttaggtgcgaattctactcctaatgcatttcatgcctttcatattccgcttttgaaaagctgcatttaaatactgctctgcggatcaggcagcgtgtgctacaggtgccatccggagcacctggccttacagatcgcctcgttgcacgctcagatttggtgtttcagccctttaaatgccacygttggtttgggaagctgaaagacttcacgtgattttcgggtttgaagccatgcgctgcgccttgcagaatggccaccgcctgattccgtcccatccttgggtgcagagctttgagactcaggcaggagtctgctatgatttcatatgcttacctattacagcttcgaccgaggaaggaattgcaggcgctgtgttattaatcagtcagtcgtgaaaacgaaataggtatgctaatatattcctgtacaactgcattctccaatttcaagagggtaaatgcaggcgtgcttctgcctaatg

SEQ ID NO: 56809 - DNA, 600 bp, Chicken  19866894311907_1
gaggaatacagaataactgttaatgaaaaaatatggatttcaagtagatgaactacaactaactcagtttattgctttgtaagatcttttggaaagctgattgaatgaaagaatgtagttagaacaatctggcaattcttttaagtcgtattgacatgggcacaaattatttctgattatggaggaaatataggaaatgtaataagagagtaatttgtctgaagtcattgatttaggaacaacaaccaagaagaggatgaatgcaaaagcatatagaggaacactataaaagtggctaayggaatttttcatctaggagggacaaaaactacaagaagaaattgtcctgaagcatattgactgcaagaggaaaaacagtacagaaaacattctttactaataatcaaggagggatagctataaataaatgatattaagaaggctgaatcatttaacgtctttatagcatatagtcaggccattatactgatccactgacagaaggaaagatcacagcatttggttgtgggatggacagtggcccaatggagtggccatgaggacagttagggagttagagtaaagaacatctgggagcta

SEQ ID NO: 56810 - DNA, 600 bp, Chicken  19866894311907_2
tttactaataatcaaggagggatagctataaataaatgatattaagaaggctgaatcatttaacgtctttatagcatatagtcaggccattatactgatccactgacagaaggaaagatcacagcatttggttgtgggatggacagtggcccaatggagtggccatgaggacagttagggagttagagtaaagaacatctgggagctagctgtatttaacctgaagaaaagaataagagagtatctaatgacagttttacagaaaaaagtggaaccagattcacattgggaagctttggwgaggaggggcacagctggaggatgaaataagagaaataagagagactgcaattgcatttaaggaaaaaactgtttatcttgagatgttgtccagagtggttgggtcatctctgtccttggaggttttatacacccaagggcaaggcaatccaatcttaatctgcattttgctctgagcaggagactgtactaaatcctggtactagatcgtcatctagacactagatttytggtgatcccctccatcctgttttttgatatggttctgtgattatatgaccttaataagtcagatgtttg

SEQ ID NO: 56811 - DNA, 600 bp, Chicken  19866894311907_3
gaataagagagtatctaatgacagttttacagaaaaaagtggaaccagattcacattgggaagctttggwgaggaggggcacagctggaggatgaaataagagaaataagagagactgcaattgcatttaaggaaaaaactgtttatcttgagatgttgtccagagtggttgggtcatctctgtccttggaggttttatacacccaagggcaaggcaatccaatcttaatctgcattttgctctgagcaggagactgtactaaatcctggtactagatcgtcatctagacactagatttytggtgatcccctccatcctgttttttgatatggttctgtgattatatgaccttaataagtcagatgtttgcagacaaagctgaatttgattatctatatctacctatatctatctaatgatcccataggtaaccaccaaggaaatgagttcaaatgaatgaaatctggaaagacataaaggcagtccagtcacttatcagatagaatcagtactgtctttgcatactgcatcctgctacccagaagggacttattttaacaaaaggttgtcacacaaatatttttgttttaatctctgat

SEQ ID NO: 56812 - DNA, 599 bp, Chicken  19866894311913_1
  misc_feature (1)..(1): n is any nucleotide
ngggccaaatgcgtttgccttgctcaatggcataatcccactgaaaactacactgactatgcaaatatgaacagcaaaatttggccccaaataaacatccccataactagggaaaacactaatcaccaaagtgcacttaacaccatagtaactacagtttctttatacatgcacaatttgtgcgacactttgtacatgaaactagccagtggaatataaataaagagtgctgcttccttttaaatatgaacattaataatgaagcacattcacatttttgcctttcaaagtccttttggyaaaaaaaaataaaaataccttccccaagtaacctggaacatattgttaaatatagcacatacgaatcaaagaacggtattaaggtagaagaacttccacacacaaaattggtatttgctatataattggagtgacttatgaaaaatccaagaaaagataatcctctcaccaggagaggaagataacagytgtagtgttagttccatttcttctgcaggggcttgtttttatcttcagcattttcagggctgaagtcagtacagataccatttggagcagaaagagatgaagtctccaat

SEQ ID NO: 56813 - DNA, 511 bp, Chicken  19866894311913_2
ttgtacatgaaactagccagtggaatataaataaagagtgctgcttccttttaaatatgaacattaataatgaagcacattcacatttttgcctttcaaagtccttttggaaaaaaaaaataaaaataccttccccaagtaacctggaacatattgttaaatatagcacatacgaatcaaagaacggtattaaggtagaagaacttccacacacaaaattggtatttgctatataattggagtgacttatgaaaaatccaagaaaagataatcctctcaccaggagaggaagataacagytgtagtgttagttccatttcttctgcaggggcttgtttttatcttcagcattttcagggctgaagtcagtacagataccatttggagcagaaagagatgaagtctccaatccactctcagctaccatctgatcaggatagagatagtcttctgcaaagtgtggctgcaattcagcaaatctggtagaagtcatctaaaaaaaataatgtta

SEQ ID NO: 56814 - DNA, 599 bp, Chicken  19866894311916_1
  misc_feature (1)..(1): n is any nucleotide
ngaacttaggtgttatgtttcaattcaagacttagaagttaaaaacttcctatatagctcggatacatcagattcactgaaatgcgttggtgacgtaacagaactgcatgcatgcaaaaagatctacaaatttttaaggccaaagcaaagcctgatttttaccacaacataccacatttcaatgcgcatttcccagatcaaagccaacaggcttaattagtacaaacagtgaataaaaccgggttaaaactagcccatagtactgcagaacagcaaaggtttttctaatgtttcttttgmaaagcaatttmtgacagccatttctctgggagaggtaagacratatccttagaagcacgctgctgaatgcaaagcatatcctgagtcagcatttactacttactagcaatgtttacataccatgccacctaatttacagactgttgtaccattaaatattacatattatcccttgtttaacaagtaccaagcaagcataagctgactgtggctacattaaattggggtacctagaagacttttagtgttagtgaagttgcaaactgtgggcataccctgatttcatgcctgaaacacca

SEQ ID NO: 56815 - DNA, 600 bp, Chicken  19866894311916_2
gttatgtttcaattcaagacttagaagttaaaaacttcctatatagctcggatacatcagattcactgaaatgcgttggtgacgtaacagaactgcatgcatgcaaaaagatctacaaatttttaaggccaaagcaaagcctgatttttaccacaacataccacatttcaatgcgcatttcccagatcaaagccaacaggcttaattagtacaaacagtgaataaaaccgggttaaaactagcccatagtactgcagaacagcaaaggtttttctaatgtttcttttgmaaagcaatttmtgacagccatttctctgggagaggtaagacratatccttagaagcacgctgctgaatgcaaagcatatcctgagtcagcatttactacttactagcaatgtttacataccatgccacctaatttacagactgttgtaccattaaatattacatattatcccttgtttaacaagtaccaagcaagcataagctgactgtggctacattaaattggggtacctagaagacttttagtgttagtgaagttgcaaactgtgggcataccctgatttcatgcctgaaacaccaaataagggccag

SEQ ID NO: 56816 - DNA, 600 bp, Chicken  19866894311916_3
aaacttcctatatagctcggatacatcagattcactgaaatgcgttggtgacgtaacagaactgcatgcatgcaaaaagatctacaaatttttaaggccaaagcaaagcctgatttttaccacaacataccacatttcaatgcgcatttcccagatcaaagccaacaggcttaattagtacaaacagtgaataaaaccgggttaaaactagcccatagtactgcagaacagcaaaggtttttctaatgtttcttttgmaaagcaatttmtgacagccatttctctgggagaggtaagacratatccttagaagcacgctgctgaatgcaaagcatatcctgagtcagcatttactacttactagcaatgtttacataccatgccacctaatttacagactgttgtaccattaaatattacatattatcccttgtttaacaagtaccaagcaagcataagctgactgtggctacattaaattggggtacctagaagacttttagtgttagtgaagttgcaaactgtgggcataccctgatttcatgcctgaaacaccaaataagggccaggatgttgtggtgtgtcatagtatgctcttgt

SEQ ID NO: 56817 - DNA, 600 bp, Chicken  19866894311916_4
ctgactgtggctacattaaattggggtacctagaagacttttagtgttagtgaagttgcaaactgtgggcataccctgatttcatgcctgaaacaccaaataagggccaggatgttgtggtgtgtcatagtatgctcttgtaggccagactatgcacttagccttctgagtgcacatgcagctatagcagaccactcctttctaacaccaaactagttgctggagccaaagtagtaaggattctgggtcatttacccaccattcaggctgcatgtttgacctctacagctcaactcacarggtcaaaacaattcaacgacataccttgtctccagccatgggcataagacataraagaaccagggccaggagaaaatacttccccagctttttctctgctttcatttattctcagatcagattttcctattttgttcatctacatttataactgaaactctctactgccactctattttctttcaaagtaacgctcagcaccttattaaacattttaggcatgtactgttgttattctgttgatgctttcatcctttgtattgtgttggttattattagagtaaatgcttttatttccag

SEQ ID NO: 56818 - DNA, 600 bp, Chicken  19866894311916_5
gttgcaaactgtgggcataccctgatttcatgcctgaaacaccaaataagggccaggatgttgtggtgtgtcatagtatgctcttgtaggccagactatgcacttagccttctgagtgcacatgcagctatagcagaccactcctttctaacaccaaactagttgctggagccaaagtagtaaggattctgggtcatttacccaccattcaggctgcatgtttgacctctacagctcaactcacarggtcaaaacaattcaacgacataccttgtctccagccatgggcataagacataraagaaccagggccaggagaaaatacttccccagctttttctctgctttcatttattctcagatcagattttcctattttgttcatctacatttataactgaaactctctactgccactctattttctttcaaagtaacgctcagcaccttattaaacattttaggcatgtactgttgttattctgttgatgctttcatcctttgtattgtgttggttattattagagtaaatgcttttatttccagtggctcttggttatctctgacaggttttactctttactagttcacatcagttcc

SEQ ID NO: 56819 - DNA, 599 bp, Chicken  19866894311925_1
  misc_feature (1)..(118): n is any nucleotide
nnnnnnnnnnnnnnnnnnnnnnnnnnnnnnnnnnnnnnnnnnnnnnnnnnnnnnnnnnnnnnnnnnnnnnnnnnnnnnnnnnnnnnnnnnnnnnnnnnnnnnnnnnnnnnnnnnnnnnagaggggagcagaaaaaaaatctttagttcaggacaaatggagcctgtccagtggcttccagtgcagatgtgcattctgtaaggtctctgttctgcagctggtctgtagtgcaagacaggccaacctagaagctttgaaaggagtgcttcagcaaatacaggaattttacatccacctctgytcttctgtagaatcctgttttgaaaagcatactacatgaagatgtaaatacatggataacttcagctttcacttggaagcctgtttacatgagtggcaggaaaaaggtattgctgtgtactgcagctccaaaccacagaactgagaactctcctttatctgaaaaaggagctgagcattcctggaaggcacaggagggtaaatagagcagctggaaaaggctgcagagagattatcagtgacctacgcagcacagcagaacaaaggcagcaatygcagcaatcgagactgaggagcttt

SEQ ID NO: 56820 - DNA, 600 bp, Chicken  19866894311925_2
tacaggaattttacatccacctctgytcttctgtagaatcctgttttgaaaagcatactacatgaagatgtaaatacatggataacttcagctttcacttggaagcctgtttacatgagtggcaggaaaaaggtattgctgtgtactgcagctccaaaccacagaactgagaactctcctttatctgaaaaaggagctgagcattcctggaaggcacaggagggtaaatagagcagctggaaaaggctgcagagagattatcagtgacctacgcagcacagcagaacaaaggcagcaatygcagcaatcgagactgaggagctttttgtgctaatacccttttccaaattgtttttcgtgtcagagggagatagtggaagttcagaaaccggtcttggcactctctgatgtcagggcagataagagtggaacagaagtttttaagcattcagagaaggtactttaatggaacttctgcacggtcttgcaatatcgtatttctttctcgagctgtaaagttcagcatttgcattaagaatgtcatgctccaatgctttgggctttgtcttggcacttactgggtgtggtcctctatatgcg

SEQ ID NO: 56821 - DNA, 522 bp, Chicken  19866894311929_1
aactctctgcatccaagatgaattcaaagctttctaagagctattggtgggtaagagaggcaaccagtcacttcagtaatcaatagatttatctacgctgtgtaaatacaaatctattgcctctactatctttccaaaccatttgtgacttaaaattcaaacaaacaaaaatgaaacaatacaaaaatattagataaatgattcatattttgttatttttatatttgggggggaaaaaggaaaatggaggggaattatgtctaagatgtagttttagtcttatgcctttaacccttgggytgttaaggtgaagaatggatgaggttttgtggtctcagcctaatggagaactgaagagttacattggggtttatttgcgtgacttaccttgagctttgcatctttcacttagtgctgtgcttagcactgtgcttttgagaagcatttgatgcctttctcatcatccgaatgcctgagagatacctaattgtgatatgaaacaggtgtatttagctattacat

SEQ ID NO: 56822 - DNA, 585 bp, Chicken  19866894311937_1
cacactggccgttctcaggggcagaggaagatgacctccgggcagagcccaggggactttgctatccggtcgcacggagccggagctctgtgccgtaactcgctgggctgcgcaggagttgccccacggcctgctttgccgaccgctgcccctctttgccctgcaagcacagcaagccacaagccctcccgccgcggtgacatcggctcagcagagccagtgacggcaccggggaggaattttctggtgcaagttgtgagctcagacaaagaggctgcttaattttctctttgtgcaacsaaatcctcggggctcgtgcacgtccgtgtgcttcctgcgctgtataaaggagcgtgcgtggtggtggcggagcgtgttgcatcttgctcagtgtgctaaggagacagacatgtgccacaagcgaaaatcggtttctacttaattacatggtttgttaattgttctccagattgctcgtctctcttcgctgcctcggtttctcgctggcgttgcaggcggaaggtgcgaggcaggcaacagccggtccgtgtgccgcctttccccgggctccgcacctcgcggctc

SEQ ID NO: 56823 - DNA, 600 bp, Chicken  19866894311938_1
ctctttttttttaatagcaataatatatagaaacactagagatgctaatgggaggatgatggagatttgatcataggattatctaagtctttggcctgaaagtgagatgacaagtagaagtgatgattgaattatctagattttctcataatacaagaacagaaaaaccacctagtttaattttcagacagctgttgtttatcttattcctgagccttttgtattgttgctctctgcaacttactgggacaataatttttctaatttgtttgttttatggaaatttacttcctttatatwagagtaggaattaaattgaatgttcctcatggaatgtgatatacatgctgtttccattgcactctcttgcacaattaatcactgattatcaaacactgagggcacgataggaactagataggaacacttatgtttccttatttcttawcttctttccctatccatctgccatttgccataaacaaagctgagatagaagttaactgtgcctttgatctgatccagcatggctattgctaggcactgagctacaagcttaggacggagatgtaggccctaacttggtccaccctgctgtta

SEQ ID NO: 56824 - DNA, 600 bp, Chicken  19866894311938_2
taatacaagaacagaaaaaccacctagtttaattttcagacagctgttgtttatcttattcctgagccttttgtattgttgctctctgcaacttactgggacaataatttttctaatttgtttgttttatggaaatttacttcctttatatwagagtaggaattaaattgaatgttcctcatggaatgtgatatacatgctgtttccattgcactctcttgcacaattaatcactgattatcaaacactgagggcacgataggaactagataggaacacttatgtttccttatttcttawcttctttccctatccatctgccatttgccataaacaaagctgagatagaagttaactgtgcctttgatctgatccagcatggctattgctaggcactgagctacaagcttaggacggagatgtaggccctaacttggtccaccctgctgttaacatgaaacctactcagtagctgtgacaattcctgctcatactgaatggtgtggcaaccttatcattttctgtgatgtctctcctccaacacaaggagtctgatattttattctgcagtctcagcaaatgctgtgggatcctggtctg

SEQ ID NO: 56825 - DNA, 600 bp, Chicken  19866894311940_1
gctgcataaatggtatggcgaatggcatgattgaaaacactttccattcttcccatcagcacctgaagacctttgatcatggcaatcacctggaaaaaaaaaatagtttttttaaattttgtttgtatatttgttcaaaaagtcatttttttttttcaatataggaaaggaaagaagaggaattaacaagttcaaaaaggcaaaggagaaagtcactctgaagaggctagtcttcctgtaccccttctgtgttttgaatgaaggaaaacatacactttcagaatcaacacaggcacaaaraatgctttcagagaaagttctcccttttgtatggaattaatctttggaaaatccctatctaaaaagaaaaaggaaratttcttacctcaaccagagcaaacttctcctcactagtataattgtatcttgttgctctttcatactcttccgcgttgtcaggacaatctttattagagtatttgtcagtygggtgtaccagcttccatgaatactgcagttcatgaagtggaatagggagaagaaagakggaaataaaaaaggcctgataaacaaagcatatctgaacacaaataatatgct

SEQ ID NO: 56826 - DNA, 600 bp, Chicken  19866894311940_2
tcatggcaatcacctggaaaaaaaaaatagtttttttaaattttgtttgtatatttgttcaaaaagtcatttttttttttcaatataggaaaggaaagaagaggaattaacaagttcaaaaaggcaaaggagaaagtcactctgaagaggctagtcttcctgtaccccttctgtgttttgaatgaaggaaaacatacactttcagaatcaacacaggcacaaaraatgctttcagagaaagttctcccttttgtatggaattaatctttggaaaatccctatctaaaaagaaaaaggaaratttcttacctcaaccagagcaaacttctcctcactagtataattgtatcttgttgctctttcatactcttccgcgttgtcaggacaatctttattagagtatttgtcagtygggtgtaccagcttccatgaatactgcagttcatgaagtggaatagggagaagaaagakggaaataaaaaaggcctgataaacaaagcatatctgaacacaaataatatgcttataaaatactctgatgttttcaagaacatctgaaaaatatttggtgctattctcaaaacctgcataaattctgaa

SEQ ID NO: 56827 - DNA, 600 bp, Chicken  19866894311940_3
agttcaaaaaggcaaaggagaaagtcactctgaagaggctagtcttcctgtaccccttctgtgttttgaatgaaggaaaacatacactttcagaatcaacacaggcacaaaraatgctttcagagaaagttctcccttttgtatggaattaatctttggaaaatccctatctaaaaagaaaaaggaaratttcttacctcaaccagagcaaacttctcctcactagtataattgtatcttgttgctctttcatactcttccgcgttgtcaggacaatctttattagagtatttgtcagtygggtgtaccagcttccatgaatactgcagttcatgaagtggaatagggagaagaaagakggaaataaaaaaggcctgataaacaaagcatatctgaacacaaataatatgcttataaaatactctgatgttttcaagaacatctgaaaaatatttggtgctattctcaaaacctgcataaattctgaaacagaacacartgtatgtaacaaggttaacggatactgagtgaattcagaaaacagatcaataagtgagatactccgtgccagaagaaaatctcagtgggagggcagaagaa

SEQ ID NO: 56828 - DNA, 600 bp, Chicken  19866894311940_4
tgtgttttgaatgaaggaaaacatacactttcagaatcaacacaggcacaaaraatgctttcagagaaagttctcccttttgtatggaattaatctttggaaaatccctatctaaaaagaaaaaggaaratttcttacctcaaccagagcaaacttctcctcactagtataattgtatcttgttgctctttcatactcttccgcgttgtcaggacaatctttattagagtatttgtcagtygggtgtaccagcttccatgaatactgcagttcatgaagtggaatagggagaagaaagakggaaataaaaaaggcctgataaacaaagcatatctgaacacaaataatatgcttataaaatactctgatgttttcaagaacatctgaaaaatatttggtgctattctcaaaacctgcataaattctgaaacagaacacartgtatgtaacaaggttaacggatactgagtgaattcagaaaacagatcaataagtgagatactccgtgccagaagaaaatctcagtgggagggcagaagaacttacatgacaagaacttaagggaatccatacaaatcaggaagacaaagaaaagcacgg

SEQ ID NO: 56829 - DNA, 600 bp, Chicken  19866894311940_5
caaccagagcaaacttctcctcactagtataattgtatcttgttgctctttcatactcttccgcgttgtcaggacaatctttattagagtatttgtcagtygggtgtaccagcttccatgaatactgcagttcatgaagtggaatagggagaagaaagakggaaataaaaaaggcctgataaacaaagcatatctgaacacaaataatatgcttataaaatactctgatgttttcaagaacatctgaaaaatatttggtgctattctcaaaacctgcataaattctgaaacagaacacartgtatgtaacaaggttaacggatactgagtgaattcagaaaacagatcaataagtgagatactccgtgccagaagaaaatctcagtgggagggcagaagaacttacatgacaagaacttaagggaatccatacaaatcaggaagacaaagaaaagcacggacctaaaattggcagtagtaagagctaaaacaaacaaacaaacaaaaaactacaaaaaaaaccaacaaaacaactgctgtggttttttctggaactgggaatacagagacagaggtaaaaatgagagatttctacagagg

SEQ ID NO: 56830 - DNA, 599 bp, Chicken  19866894311941_1
  misc_feature (1)..(99): n is any nucleotide
nnnnnnnnnnnnnnnnnnnnnnnnnnnnnnnnnnnnnnnnnnnnnnnnnnnnnnnnnnnnnnnnnnnnnnnnnnnnnnnnnnnnnnnnnnnnnnnnnnnaacatctcccatgagcaaatgttcttgttttatttacactaagagaaaaagttaagctttctcgactatatatccgctatgggtaactttcaagctggggaagagatgatgatattcaaagtgtgtcctatccattggttacacacaccctaagggaaaggaaaaacctccagtgtatggtctgagtacctaactagtaaygttcctctttcgcatccargctttgaaggctggtgactaacatggactgggacaaagcccccaggaaggaatggcaaagttataacgacaagcatgctaccacgtttatctggctgttcatgcacattctgcaaatcaaagggacaacattcagctacgttgaaatgttcttcatgctttttcgtgttacctctgcttgtaacaaaatacaagctgataaatttataaataacatctctttaattagaacaagataatgaattacctgatggtgtttcgtggatgaccattcctccgga

SEQ ID NO: 56831 - DNA, 599 bp, Chicken  19866894311941_2
  misc_feature (1)..(80): n is any nucleotide
nnnnnnnnnnnnnnnnnnnnnnnnnnnnnnnnnnnnnnnnnnnnnnnnnnnnnnnnnnnnnnnnnnnnnnnnnnnnnnnnaacatctcccatgagcaaatgttcttgttttatttacactaagagaaaaagttaagctttctcgactatatatccgctatgggtaactttcaagctggggaagagatgatgatattcaaagtgtgtcctatccattggttacacacaccctaagggaaaggaaaaacctccagtgtatggtctgagtacctaactagtaaygttcctctttcgcatccargctttgaaggctggtgactaacatggactgggacaaagcccccaggaaggaatggcaaagttataacgacaagcatgctaccacgtttatctggctgttcatgcacattctgcaaatcaaagggacaacattcagctacgttgaaatgttcttcatgctttttcgtgttacctctgcttgtaacaaaatacaagctgataaatttataaataacatctctttaattagaacaagataatgaattacctgatggtgtttcgtggatgaccattcctccggagagtgtccggatgggtgac

SEQ ID NO: 56832 - DNA, 599 bp, Chicken  19866894311947_1
  misc_feature (1)..(222): n is any nucleotide
nnnnnnnnnnnnnnnnnnnnnnnnnnnnnnnnnnnnnnnnnnnnnnnnnnnnnnnnnnnnnnnnnnnnnnnnnnnnnnnnnnnnnnnnnnnnnnnnnnnnnnnnnnnnnnnnnnnnnnnnnnnnnnnnnnnnnnnnnnnnnnnnnnnnnnnnnnnnnnnnnnnnnnnnnnnnnnnnnnnnnnnnnnnnnnnnnnnnnnnnnnnnnnnnnnnnnnnnnnnnnnttaagaattaatacagcaaggcagcatgctgagagtgagctgatcagtacagtcacactgaaagagccccagcatccratggatatagcaactattagccactgagtcaacatttagagcggcttttcagcaaccaacttccattgcctacaatgagaattacacctcagacgttcagtgctctattaaacctccaaaaaactattaaacctctgtgtcatggttttatggttttttgcatcagtattccacgttcatagcaccatgccatggtgggagttgaagagttcacgtggcagctccgtcttctgaagagaagaaagaaccacagcttccacgggccaggaaaagactcagcaccagaagacttcattttg

SEQ ID NO: 56833 - DNA, 446 bp, Chicken  19866894311950_1
aaagaaaacatgcagctccgaacaactctcatgtgaatgattaacacagaacgtaaagcctgagtttaaacaaggatgcacaacacagtgacagagaaacacctcaagtagctacagtgctccaaaagaggcagagcaagtggatgatacatctccttaggaaggaggaggagtttcactccaacttgaagaagtttctgtatttggtaaatccaggtcacgcacctccaggaacttggaacagatttaacttcatcctggtggcttcagcaaccagtgtttgcttattttgctaacacrtctaattgcgcagaggcagaaaccaaatactggaagagtacacagtgacaagatacctcacattctgaaacaccaacagtccatgtgagaaagcaacaacaccaggttacactcagcttcagcttcccccttgctctcccaaacca

SEQ ID NO: 56834 - DNA, 471 bp, Chicken  19866894311951_1
gttcatttattggagtagttgaactaggagaactgtaaggcaaccaagaacatcggcttaattttccttacatataatagtgacctttagctttatattgaaaaaagttacctattatagactggtaaattaaatgagaagttcctctaatgcaaaataaactaagtgactgagctatgttaaacggctcttgagcatatgagttttttggcagaaacaaatcctctttttcttgctctttgtaacgtggtttgatgtctaatcagtcagagaaaacaatacagagtgggatgctaaaawgttgtcagaagtccatcccaaaggataataagatgattggaatcttgggataggattacaacacttcagatattgcaagtgtggctttgcttgaaaactttcaaatgttctctatacattttctttacctttccacaaattcaaaacaccatagatcaatttattttaaaa

SEQ ID NO: 56835 - DNA, 579 bp, Chicken  19866894311955_1
tctataatttgtcattaaaaaatgagctagtaatatttctgaataaagaaaacagtcataattttgacaatgggcagtgacaccttaagaaaactgagattattgaaactccaagttgacttgatacatattagttgcagtagttagactgtaaattgtacacagggagaaacaggattgaaaagttgattagcagtggaaatacagtaaaaggggcttgaaagttttcaacagaaacatttttgaagttacttatgaagaagacaaagcaagatttgactgtgacaactatttcaatcycctagctgctgttttcttttatttttctgaaattagtcctgagtacttttcaggactagaggaatttgttgcttaaaaacaaaaagaaagctttgaattatatcttcatgtaggtcaagaagttattactaatgttgctattgttactgtcttatctactgttattttattgccattatcatcatcatgacatcagaatacaagttacattatgtacaactcaaatttctgcagtagttttcattaagtgttgaaacacagaagcacccactcaaacat

SEQ ID NO: 56836 - DNA, 600 bp, Chicken  19866894311968_1
agcatgggaatggctcaggggtgagctctccagtgagagctgcagggaggatcgcggagcacaaagagaagcaggaaatctgacagggctctctccctggtgacagcagttttaagggaggaaaggctcctccatccgaaagaaagcactagaaggatggttgcagataattcatagctctgagtaaaccaaaattatttatacatcagtccttccagtacttctcattaaatcatgacgagatgagaagaaagaaggggaaggaaggatttccttcctaactgacctctgctgtgcagytgactggctaaatcctcagttccctcttccaggtttaagacctggaaaaaaaaaacttctggggttttacagtcagagattctcatttccaaggactctgagattttttggtaagtggcacaggcataagtagttccagctttttttttyctcccatctatctgctgtatttcagctgccagatggaaacaagaagtyccaaaatgtgcaggacagcttgatctttttgaactcttcagtccatcttatgagattcacttgttagacacagaacagaaaagctgcaagaagactatttcc

SEQ ID NO: 56837 - DNA, 565 bp, Chicken  19866894311968_2
agaaggatggttgcagataattcatagctctgagtaaaccaaaattatttatacatcagtccttccagtacttctcattaaatcatgacgagatgagaagaaagaaggggaaggaaggatttccttcctaactgacctctgctgtgcagytgactggctaaatcctcagttccctcttccaggtttaagacctggaaaaaaaaaacttctggggttttacagtcagagattctcatttccaaggactctgagattttttggtaagtggcacaggcataagtagttccagctttttttttyctcccatctatctgctgtatttcagctgccagatggaaacaagaagtyccaaaatgtgcaggacagcttgatctttttgaactcttcagtccatcttatgagattcacttgttagacacagaacagaaaagctgcaagaagactatttcccctggagggaagtggagaggagagctctataaaaatacgtttgggaagattatcagctgaaaatcaggatccagcttctcttcatatatacaaacgtgtctcctactgaggggga

SEQ ID NO: 56838 - DNA, 517 bp, Chicken  19866894311968_3
ttatacatcagtccttccagtacttctcattaaatcatgacgagatgagaagaaagaaggggaaggaaggatttccttcctaactgacctctgctgtgcagytgactggctaaatcctcagttccctcttccaggtttaagacctggaaaaaaaaaacttctggggttttacagtcagagattctcatttccaaggactctgagattttttggtaagtggcacaggcataagtagttccagctttttttttyctcccatctatctgctgtatttcagctgccagatggaaacaagaagtyccaaaatgtgcaggacagcttgatctttttgaactcttcagtccatcttatgagattcacttgttagacacagaacagaaaagctgcaagaagactatttcccctggagggaagtggagaggagagctctataaaaatacgtttgggaagattatcagctgaaaatcaggatccagcttctcttcatatatacaaacgtgtctcctactgaggggga

SEQ ID NO: 56839 - DNA, 600 bp, Chicken  19866894311977_1
aacatgtccaactgcctcttaataaaaggatgataaagagaaggctaggtaagatataccagatttattccaaggcactttgtgtaccatggggttaggtagatagaagactccctgtattttacagctgagaggggtatcaaaatcttctgctgctgctctttcacttccttcatacatacactaggacttttaccccatgctacctgccccaagcgatagtgctgtattgcagccaattaatgaaccattgaaatgagtccttctagtacaaaaaccaggttggattatatgagttawttatattgtattatagattatcttcagggttccttccaacccaggccctttatgattctacgataccagttttgtttggtgtaagatttattgtttttcttttaacatatgccgggtgagatgctctccaaatctccaacactttctgcttatatagtcttcatctttccagaagagcagtgctctatttgactgcagagttggatcacccacctggatcttggatcctgcccatttttgctgctgttcgtgctttaaatcattagcagagcatttttatgaacacaggagtaccaatct

SEQ ID NO: 56840 - DNA, 600 bp, Chicken  19866894311977_2
caggccctttatgattctacgataccagttttgtttggtgtaagatttattgtttttcttttaacatatgccgggtgagatgctctccaaatctccaacactttctgcttatatagtcttcatctttccagaagagcagtgctctatttgactgcagagttggatcacccacctggatcttggatcctgcccatttttgctgctgttcgtgctttaaatcattagcagagcatttttatgaacacaggagtaccaatctccttccaagcaggaggctatctctctggttgaaataaaatyagtttaatctggtcaaaggcaggaatttttgagcttcagctccagaacttgccttgctgctgctgtcaggcatgcctcgtcaccattttgctgtgggatgctttgtactggctgtctccccagtttcagtccttgctcatcaaggtctcttctgtcactgtcaggtcactgccaggctatacttgacctggctgaactgtcagaaaactgctggcatccaaagggagcaggtgacccttcctccctacccagcccctcagccccacacaactggtgtggtttatgtgtgctcacgtcact

SEQ ID NO: 56841 - DNA, 599 bp, Chicken  19866894311978_1
  misc_feature (1)..(31): n is any nucleotide
nnnnnnnnnnnnnnnnnnnnnnnnnnnnnnngattagatatgcatctttgagcagcatgagttaagcttcagtgcaaaggactaaaactgaaattagtctcaagccccttaaaataatcaagcctaggatgtctacttttctgcaaaagcaaatgttttactttgaatatcttctctgggaatcagttttaatcaatttcctgtagttgtgttctcttacgagcaaaaggagctgatactgcagcccttgggtagttgtgggctagggagtagtgtacagacaaggttctggtagaatgytgacttgatatgagataatgatggatgtaatgttccagggtaagcattctggatgtggactgtctttttggggtttcgttttcaaaactctgcttttttatgtgcttattgaaccttttaagtttggacacagcacttactgtttttcatttatttcatacagggtacggacgcttctcctgaaygcgaatttcctctaggttgtcaggtgctttcttgttttcagtacatcattgcgcttcaattgtggtatcctycttatgtgttcctttataagttcttcctttctcaaattcgta

SEQ ID NO: 56842 - DNA, 600 bp, Chicken  19866894311978_2
gttttaatcaatttcctgtagttgtgttctcttacgagcaaaaggagctgatactgcagcccttgggtagttgtgggctagggagtagtgtacagacaaggttctggtagaatgytgacttgatatgagataatgatggatgtaatgttccagggtaagcattctggatgtggactgtctttttggggtttcgttttcaaaactctgcttttttatgtgcttattgaaccttttaagtttggacacagcacttactgtttttcatttatttcatacagggtacggacgcttctcctgaaygcgaatttcctctaggttgtcaggtgctttcttgttttcagtacatcattgcgcttcaattgtggtatcctycttatgtgttcctttataagttcttcctttctcaaattcgtatgcaggtgataaaaatgcacgtatgtatatgtgccctgttcttacattcttcatttatgtgctccttaaaagcaagccctgcggaacccctaacaatatttttattcatttgtttttagcaggtctattagagaactgtcacagatttaatatatatttacctgtgtgtgtatatatctgtgcaga

SEQ ID NO: 56843 - DNA, 596 bp, Chicken  19866894311978_3
gtgggctagggagtagtgtacagacaaggttctggtagaatgytgacttgatatgagataatgatggatgtaatgttccagggtaagcattctggatgtggactgtctttttggggtttcgttttcaaaactctgcttttttatgtgcttattgaaccttttaagtttggacacagcacttactgtttttcatttatttcatacagggtacggacgcttctcctgaaygcgaatttcctctaggttgtcaggtgctttcttgttttcagtacatcattgcgcttcaattgtggtatcctycttatgtgttcctttataagttcttcctttctcaaattcgtatgcaggtgataaaaatgcacgtatgtatatgtgccctgttcttacattcttcatttatgtgctccttaaaagcaagccctgcggaacccctaacaatatttttattcatttgtttttagcaggtctattagagaactgtcacagatttaatatatatttacctgtgtgtgtatatatctgtgcagaagcagccaccctaagagatacgaatgtgtttcttcatgagtttcttggggcttgtgcagctttttttc

SEQ ID NO: 56844 - DNA, 600 bp, Chicken  19866894311979_1
gaaatgttgagtcgcagcatgctcctttttttttttttcctttggcttggcatgtacttctcagagctcccagacagctttgaccttcatttttgtcatgcttttcactgtgcatgtacagttaccacgagtcagagaggtgacagagagaaagcagtgccttgtctttttggaccctcctcccagtaaagttctaacaagccatatgaattgaagtaggaatcaaaaatattttctttttctttattaaagaatctaagatattgccctctgcttccaggagaaagaacctactcaaaragatatgctgtatgctttttstctaaaaatagacttgtcataacagttacaagaaaaatgtcttccctctaacatatctactgttaaataatgcaagtagggcaatattttactgagtgacagacatctcactcttgacaatcctaactgaaatccacagcatcacatagacagggcactgagtgatcctattcaaccacagccaagcttatcctagagaaatcacttgaaatatctgttttcccattgcaattagtgaaaaagatgacctaaagagggtaatgacgccaaatgattctg

SEQ ID NO: 56845 - DNA, 600 bp, Chicken  19866894311979_2
ctcctttttttttttttcctttggcttggcatgtacttctcagagctcccagacagctttgaccttcatttttgtcatgcttttcactgtgcatgtacagttaccacgagtcagagaggtgacagagagaaagcagtgccttgtctttttggaccctcctcccagtaaagttctaacaagccatatgaattgaagtaggaatcaaaaatattttctttttctttattaaagaatctaagatattgccctctgcttccaggagaaagaacctactcaaaragatatgctgtatgctttttstctaaaaatagacttgtcataacagttacaagaaaaatgtcttccctctaacatatctactgttaaataatgcaagtagggcaatattttactgagtgacagacatctcactcttgacaatcctaactgaaatccacagcatcacatagacagggcactgagtgatcctattcaaccacagccaagcttatcctagagaaatcacttgaaatatctgttttcccattgcaattagtgaaaaagatgacctaaagagggtaatgacgccaaatgattctgaacaccaagttacagtaggat

SEQ ID NO: 56846 - DNA, 600 bp, Chicken  19866894311984_1
tggtctctctaattcaaacaaaaggtttcctaaccaagccaaagaaagcaagcagagtctgtattcagaagatgagtatttttctagtgaatttcatttcaggaagaggtgtgcttcacattccattgaccatatcaaccacacatttatttatactttttcaatcttcttttaatcttacatggatgaaagtaacatttctagcacccactattgacatgtcaatactcaggtgtgctgaaaacactttaagacatcaggcacaccttcttgtcaacagtaagaaacaggagtctcgtmctgaagtgctgtgggtaccgagccacgtgttaaccacagactaacactaagtatggctttggaaatctgtacaaagccataaatctcaaagacatctgacatttmtgttggtacacaaaggtaccattttgtcgtacttggaacttggtgtgcagataaatcttgtttttctagagactggctgagcgtggcatattcaatatagttacctcaaataccaaggaayggcagtacttccttattggccagcttaactaataacaggtcatattctctatcacagccatcattagcagagac

SEQ ID NO: 56847 - DNA, 600 bp, Chicken  19866894311984_2
gaggtgtgcttcacattccattgaccatatcaaccacacatttatttatactttttcaatcttcttttaatcttacatggatgaaagtaacatttctagcacccactattgacatgtcaatactcaggtgtgctgaaaacactttaagacatcaggcacaccttcttgtcaacagtaagaaacaggagtctcgtmctgaagtgctgtgggtaccgagccacgtgttaaccacagactaacactaagtatggctttggaaatctgtacaaagccataaatctcaaagacatctgacatttmtgttggtacacaaaggtaccattttgtcgtacttggaacttggtgtgcagataaatcttgtttttctagagactggctgagcgtggcatattcaatatagttacctcaaataccaaggaayggcagtacttccttattggccagcttaactaataacaggtcatattctctatcacagccatcattagcagagactactaattggaatagtgacagtggcttgtagctgaaaatacacagcgcgtgacatacagaaaaagtaaatcagattagttactacagctctgtaggacaactcag

SEQ ID NO: 56848 - DNA, 600 bp, Chicken  19866894311984_3
actcaggtgtgctgaaaacactttaagacatcaggcacaccttcttgtcaacagtaagaaacaggagtctcgtmctgaagtgctgtgggtaccgagccacgtgttaaccacagactaacactaagtatggctttggaaatctgtacaaagccataaatctcaaagacatctgacatttmtgttggtacacaaaggtaccattttgtcgtacttggaacttggtgtgcagataaatcttgtttttctagagactggctgagcgtggcatattcaatatagttacctcaaataccaaggaayggcagtacttccttattggccagcttaactaataacaggtcatattctctatcacagccatcattagcagagactactaattggaatagtgacagtggcttgtagctgaaaatacacagcgcgtgacatacagaaaaagtaaatcagattagttactacagctctgtaggacaactcagataatgaactccttattacagagagccatttaatatggaaaagaagatgaaatgctgctgaacattttacccagcctctgccatttctgcagcgtccactgctgttattcattagatcaat

SEQ ID NO: 56849 - DNA, 599 bp, Chicken  19866894311988_1
  misc_feature (1)..(66): n is any nucleotide
nnnnnnnnnnnnnnnnnnnnnnnnnnnnnnnnnnnnnnnnnnnnnnnnnnnnnnnnnnnnnnnnnncttggtgcagaaggacttgtctccagctttcacccccattttatgtgctgttagttctatttattgctgtcgtcgtgctctgggcccaagtgaggagctgacgccaagctgtgctcagagctgtgcgaagcacggagccgtccctgcgccatccagctgacaaacagcgctgttggctctgtgtgctgagtactgcctgtagtggtgggaaaagataatgacataatatctgcyggggagtgctggaagcactggtggtacaaagctgtcgtgtaagggtgcctgtatttccagtgtcagtctcaggggggtcagtgctgaatctaatggttcggatgcttgcaggactgccttgcttggggtgattgctgttgactgttggcagcattggagtgtgtatgctgctacatcaggccccagaacggagcctcgagcatttggccatcgggggcagctgttgcctttcccttagtggagggttctgaattattgagcgtgaaaatctgagtcaagagtctaaagtcctacctttg

SEQ ID NO: 56850 - DNA, 600 bp, Chicken  19866894311991_1
gtgtatgcaagtaagatcttatttttttctgtagttatgcatcattcatattcactatactccataagttttgagctgtttttcagtttcttaaaccactctgttaactctgcagagatgcaagtctattctgtcaggagaaaaatgactgattttcagatcattgcctgcttgtggctcattcacagacataaaaaaataatatcattggaaaacatattttgcatttgctagatttctctcaaccaattactttgggcagaaattctatcctacaaatatccaaactagcaagataayataaaaatgcatttatcttatgaagaaagattcatgaattccttttcccagatattagggacagttatccactattcattcttttatatatcatctgattttttttattattattattttaatataccttatattttgcaaattcattcagagtaactatttatggcagataaaacttttacttgcttaatgtaaaatagtcaacagctacacaatgcctacaaatgcaaagcaaattctcactcttttttttttttctaatgaaatattttctatattccttttcattgcttcagcaac

SEQ ID NO: 56851 - DNA, 600 bp, Chicken  19866894311997_1
ctcatcccctgcagagactggacaagttcctgagatcattggataaactaggagcaatgctgaaagccttggtggtgactatctcccttgctttttatgattctatccttgcttttatttcctacctttttctattgctcgtcttcccttccccatctccctaaacaactagtatttgttgtaaaattgttgggcaaacatgtgaccaacatttgtgttttaatcttgctgttgggtacacaagtgcagtgtccagtttcaggctccccagtacagggaagatctggacatactgtatakaatcccacatagtgtcaccaatgcagtcaatggactggtgcatcacacttaagaggagaggctgagagacttgggacttttcagtctgcagaagaggagtctcaagagaatactgagaaagacaggaccacaaagatgatgaaaggcctggagaatttccctgatgaggaaaggctgagagacttggggttgttcagcctggagaagagaagactgagggggtatcttatcagtgcttataaatacttaaaagacgggagtcaagcgaatgcgtaaaggctcttttcattgatgtgcatc

SEQ ID NO: 56852 - DNA, 600 bp, Chicken  19866894311997_2
aaaggctcttttcattgatgtgcatcaagagaacagctggcaatgagcacaaacaggaaggttgtacttgatttctagaggtccattccaacccctatgattctttgattctgtgtcatcaatgcctacaaatacctgaagggagaatgcaatgacagtgaaaccagactcttttcactggtgctgtaagacagaagacagtgagcacaaactggaacacaagaggttatttgaacaccaggaagcacttttgtgacattgatggtttctaatagcatattgactgcatttagttgtatrttttccaagcatagtaacttaaatataaatattaatgtaattggtgactttatatatagcaatgatggtacgatatggttgcataacctcttctattgtgaagatctttttcagtattaactttacagaatatttaagtctaaaatctagcagttttccaggctctaatacataatctccaggctccatacatttccaggctccatacataatctcagtttttaaggaaccctaaatttattatacagttacttaattctatgtttttaataaatttaatatctgtttttaataatctta

SEQ ID NO: 56853 - DNA, 599 bp, Chicken  19866894312004_1
  misc_feature (1)..(45): n is any nucleotide
nnnnnnnnnnnnnnnnnnnnnnnnnnnnnnnnnnnnnnnnnnnnnattacattttttcaaccccccagtaaggtgtgcaaagattgtgtctgtacagattttaactacagcaaaggagaagggagtcttaaagctgggtctgcaatgctgcaagaaaggttgacagcaataaaacaaaaagcatttttcagcagttgctgttgatgtgatctatgctcacattgaatttaacagtggatttaacagcagaataaaaaatgacatctattaatgtatctttatttgtgttttgttctcaasgatttagtctgaaaaaacaacgagctgggaagtaaatcagatggatggtgtactygttattctcagatcaggagaaccacatagctttgctgagtaaccccgtgttctgcaagatgtgattgcttttcagacaaaacacacttgattgcttccagagttacagctgaatttggaaggtgtccacctgcagtacttgtgtctatgagtgccaaaatacttcaaccaagacagatttcttcctttaagacagctaaaaatcattggctgaacactcagaggagtaactttactatttaaga

SEQ ID NO: 56854 - DNA, 600 bp, Chicken  19866894312004_2
ttcaaccccccagtaaggtgtgcaaagattgtgtctgtacagattttaactacagcaaaggagaagggagtcttaaagctgggtctgcaatgctgcaagaaaggttgacagcaataaaacaaaaagcatttttcagcagttgctgttgatgtgatctatgctcacattgaatttaacagtggatttaacagcagaataaaaaatgacatctattaatgtatctttatttgtgttttgttctcaasgatttagtctgaaaaaacaacgagctgggaagtaaatcagatggatggtgtactygttattctcagatcaggagaaccacatagctttgctgagtaaccccgtgttctgcaagatgtgattgcttttcagacaaaacacacttgattgcttccagagttacagctgaatttggaaggtgtccacctgcagtacttgtgtctatgagtgccaaaatacttcaaccaagacagatttcttcctttaagacagctaaaaatcattggctgaacactcagaggagtaactttactatttaagactacctaagtcttagccttattttgctgatgcccaccaaaagcctctgacataatt

SEQ ID NO: 56855 - DNA, 600 bp, Chicken  19866894312007_1
gtactggtttctgattctgctattgtacacttttcaagatgcttgtgtaagctatccatcggaatagtgcagtttctttaaaaaacaaagccatgaaatattatcccctggatagtcctaatgttggtgtgtagaattacaatgggaaaatgataggcctgatctcattaaaacgctagtgcaacaatatgcatgcttaggagtagtgccagggaacattgtataaagcagtacagcatcaggacctgtgttagtcaaccaccccagttttcctctccttgttgcaaaccattctccatkcatacagctttccagaagtaactgggataattcagctctatctgtacttcattatggcaatgttaaatgcagcgtatttccttattaccccacacgcgtcctggacaccactggttcagttccatacaccttgctttcttttctctgaagagtcagacttatgcactagatgtgaattttcatgcatatgcactgtgaggtttatgatacagatttcccagtacataaaaatacatcagcattggagttcactgacatctttattaaacttgtcatttacaaaacatcctgtgagtagct

SEQ ID NO: 56856 - DNA, 600 bp, Chicken  19866894312016_1
aatattctattctattgatcccactgtttctagaagtggtttttgtcagcagcagtgcaagtatgaaactgtgtctatgaaacagagcacaagtgatctaagtctgacatctcctgtctgcctctttctgcctcctgtctacatctcctttgcccaggtggaggacaaggattagaccttaagctctgagcacaaactttgttccatgtttatatgatgccaagcacaaggatgaagtcccattgtattggagatgatgatgatacaacatgcagcttctctgtgctgcccagcaacagwcctcagccctgaactcagaggctgttactgtaggggaagatacattagcccacactatctctgcagtccttgacatctctactgtgactgttaataacgcagcttccaatgaacgctaagagcagtggctgcttttagcaactagataaatttccagtaaactgaaatcaccatagtctatgcaatgtttcaaatgcaatctctggcccttttttgctgagaaaacgtgtaacatgagtctgctaaaagcagaaaactattcttaatatttaacaataaaagtacaaatcttatgtataa

SEQ ID NO: 56857 - DNA, 599 bp, Chicken  19866894312022_1
  misc_feature (1)..(112): n is any nucleotide
nnnnnnnnnnnnnnnnnnnnnnnnnnnnnnnnnnnnnnnnnnnnnnnnnnnnnnnnnnnnnnnnnnnnnnnnnnnnnnnnnnnnnnnnnnnnnnnnnnnnnnnnnnnnnnnnaaattctgtcctattactgagctggcgctctttttattctttagtcccaacccttttcaaaattagaacgtaccctgaagaaaaacaggctaatatcagacattccagctccatgcatacatacacgcatatataaaattcagatactcttttccacatgtaacaagccatggacagaggaaatattytttgatagaagccaagcttgataaaagaagtgcacattgtcgtgcctgaaagtacggtattaataattaagccttgcaatcattacctcaggatattatttcttaaatatctcttgcaaaggcaatacgattacatatgaattatatcaattttctaccaacaaaaaaaaaatccacagaaataggaattgaattacactgtccaatttgctgtaaagttcactgtacgtgaagaaattaatcaaagctaccaccacccatttttatgggaacataaaatgatgtgaacttccattttt

SEQ ID NO: 56858 - DNA, 599 bp, Chicken  19866894312027_1
  misc_feature (1)..(61): n is any nucleotide
nnnnnnnnnnnnnnnnnnnnnnnnnnnnnnnnnnnnnnnnnnnnnnnnnnnnnnnnnnnnnacttatctgagggatacatctaccttgaattactccacatttatcacaggatgagggtacgagcacctcaaggggcacacagaatcacagaatggcctgggttggaagggacctcaaggatcatgaacctccaacccgcctgccacaggcagggccaccaacctccacatgtaatactagaccaggctgcccagggccccatccaacctggccttgaacacctccagggatgggaactyatygccccatactgcccagctctctgcaaagactggctgatataccccagagctcaaaaagtgtgttgtggctaacaaatgtgagaagccatggagtttccaaaaggcatttgcatttcaaaacaagaagcccagctgcaaaacatactttgagcggtcagaatgaaccccacaggctcttgaatcttcaatagraaacaattttgccttcaagtattgggagagaccagtacaagtyagcataaaaagtattgcgacatccctggttcaacaaagggataataaatacatcagctgta

SEQ ID NO: 56859 - DNA, 599 bp, Chicken  19866894312027_2
  misc_feature (1)..(58): n is any nucleotide
nnnnnnnnnnnnnnnnnnnnnnnnnnnnnnnnnnnnnnnnnnnnnnnnnnnnnnnnnnacttatctgagggatacatctaccttgaattactccacatttatcacaggatgagggtacgagcacctcaaggggcacacagaatcacagaatggcctgggttggaagggacctcaaggatcatgaacctccaacccgcctgccacaggcagggccaccaacctccacatgtaatactagaccaggctgcccagggccccatccaacctggccttgaacacctccagggatgggaactyatygccccatactgcccagctctctgcaaagactggctgatataccccagagctcaaaaagtgtgttgtggctaacaaatgtgagaagccatggagtttccaaaaggcatttgcatttcaaaacaagaagcccagctgcaaaacatactttgagcggtcagaatgaaccccacaggctcttgaatcttcaatagraaacaattttgccttcaagtattgggagagaccagtacaagtyagcataaaaagtattgcgacatccctggttcaacaaagggataataaatacatcagctgtatcc

SEQ ID NO: 56860 - DNA, 600 bp, Chicken  19866894312027_3
cccgcctgccacaggcagggccaccaacctccacatgtaatactagaccaggctgcccagggccccatccaacctggccttgaacacctccagggatgggaactyatygccccatactgcccagctctctgcaaagactggctgatataccccagagctcaaaaagtgtgttgtggctaacaaatgtgagaagccatggagtttccaaaaggcatttgcatttcaaaacaagaagcccagctgcaaaacatactttgagcggtcagaatgaaccccacaggctcttgaatcttcaatagraaacaattttgccttcaagtattgggagagaccagtacaagtyagcataaaaagtattgcgacatccctggttcaacaaagggataataaatacatcagctgtatccctataccatacaamtgcaccctgccaaggactacaaaccaaaaatcaatctgggtgctgaacggcagttgaaaagccagcagacaaggttcattgggcgcatcgctcaacaatttgtggaagatctaatctaggaatgctctttaaaataatcctccggaaatcacatcaagcaccttgtctccaaaactagg

SEQ ID NO: 56861 - DNA, 600 bp, Chicken  19866894312027_4
tagaccaggctgcccagggccccatccaacctggccttgaacacctccagggatgggaactyatygccccatactgcccagctctctgcaaagactggctgatataccccagagctcaaaaagtgtgttgtggctaacaaatgtgagaagccatggagtttccaaaaggcatttgcatttcaaaacaagaagcccagctgcaaaacatactttgagcggtcagaatgaaccccacaggctcttgaatcttcaatagraaacaattttgccttcaagtattgggagagaccagtacaagtyagcataaaaagtattgcgacatccctggttcaacaaagggataataaatacatcagctgtatccctataccatacaamtgcaccctgccaaggactacaaaccaaaaatcaatctgggtgctgaacggcagttgaaaagccagcagacaaggttcattgggcgcatcgctcaacaatttgtggaagatctaatctaggaatgctctttaaaataatcctccggaaatcacatcaagcaccttgtctccaaaactaggtattagacctctaggtcaaaattcatcatttttaataagaatt

SEQ ID NO: 56862 - DNA, 529 bp, Chicken  19866894312027_5
cagctctctgcaaagactggctgatataccccagagctcaaaaagtgtgttgtggctaacaaatgtgagaagccatggagtttccaaaaggcatttgcatttcaaaacaagaagcccagctgcaaaacatactttgagcggtcagaatgaaccccacaggctcttgaatcttcaatagraaacaattttgccttcaagtattgggagagaccagtacaagtyagcataaaaagtattgcgacatccctggttcaacaaagggataataaatacatcagctgtatccctataccatacaamtgcaccctgccaaggactacaaaccaaaaatcaatctgggtgctgaacggcagttgaaaagccagcagacaaggttcattgggcgcatcgctcaacaatttgtggaagatctaatctaggaatgctctttaaaataatcctccggaaatcacatcaagcaccttgtctccaaaactaggtattagacctctaggtcaaaattcatcatttttaataagaattttgggat

SEQ ID NO: 56863 - DNA, 599 bp, Chicken  19866894312033_1
  misc_feature (1)..(88): n is any nucleotide
nnnnnnnnnnnnnnnnnnnnnnnnnnnnnnnnnnnnnnnnnnnnnnnnnnnnnnnnnnnnnnnnnnnnnnnnnnnnnnnnnnnnnnnntttacggtgggaatataagtagtggatgtatagactttaagcaaaaaaaccccggctatccctgcatattagaaggagaggatcatacatactaaatatatatgaatatgtatctcagtttatatgcatatgtgcctgcacacataaaaaaatatgtattttgtatgattatatatattcatttactgcaatgtacataatcatgctatatsagtgggtttgtgtgtctatattmatgtaattttaaatgtgctgccttggagccatgcttatcttttaatccttcttttcagaggcatatcctaaactgagggcattttccctgagtttatatctaaaaaactcaacrtctgtgctctcacctccacaccctttgttttctcccccgaacagaggaaattgtgtgatttccttaacatgctgtgtagcagtgstatcatctagatggcacaaaattgatgtttttctgcagctgtgaagctgaagtgtaacgtgagctgcaggaaacaca

SEQ ID NO: 56864 - DNA, 599 bp, Chicken  19866894312033_2
  misc_feature (1)..(65): n is any nucleotide
nnnnnnnnnnnnnnnnnnnnnnnnnnnnnnnnnnnnnnnnnnnnnnnnnnnnnnnnnnnnnnnnntttacggtgggaatataagtagtggatgtatagactttaagcaaaaaaaccccggctatccctgcatattagaaggagaggatcatacatactaaatatatatgaatatgtatctcagtttatatgcatatgtgcctgcacacataaaaaaatatgtattttgtatgattatatatattcatttactgcaatgtacataatcatgctatatsagtgggtttgtgtgtctatattmatgtaattttaaatgtgctgccttggagccatgcttatcttttaatccttcttttcagaggcatatcctaaactgagggcattttccctgagtttatatctaaaaaactcaacrtctgtgctctcacctccacaccctttgttttctcccccgaacagaggaaattgtgtgatttccttaacatgctgtgtagcagtgstatcatctagatggcacaaaattgatgtttttctgcagctgtgaagctgaagtgtaacgtgagctgcaggaaacacaatgtgtcaatactgactttggtg

SEQ ID NO: 56865 - DNA, 600 bp, Chicken  19866894312033_3
ccccggctatccctgcatattagaaggagaggatcatacatactaaatatatatgaatatgtatctcagtttatatgcatatgtgcctgcacacataaaaaaatatgtattttgtatgattatatatattcatttactgcaatgtacataatcatgctatatsagtgggtttgtgtgtctatattmatgtaattttaaatgtgctgccttggagccatgcttatcttttaatccttcttttcagaggcatatcctaaactgagggcattttccctgagtttatatctaaaaaactcaacrtctgtgctctcacctccacaccctttgttttctcccccgaacagaggaaattgtgtgatttccttaacatgctgtgtagcagtgstatcatctagatggcacaaaattgatgtttttctgcagctgtgaagctgaagtgtaacgtgagctgcaggaaacacaatgtgtcaatactgactttggtgccagccctgtctcgccttttcattcattcccactgtcgtctttgtgtgtcatttttccagcatttcctcaccattcagatctctgacatacccaatagaatggaacaatgtcagt

SEQ ID NO: 56866 - DNA, 600 bp, Chicken  19866894312033_4
cctgcacacataaaaaaatatgtattttgtatgattatatatattcatttactgcaatgtacataatcatgctatatsagtgggtttgtgtgtctatattmatgtaattttaaatgtgctgccttggagccatgcttatcttttaatccttcttttcagaggcatatcctaaactgagggcattttccctgagtttatatctaaaaaactcaacrtctgtgctctcacctccacaccctttgttttctcccccgaacagaggaaattgtgtgatttccttaacatgctgtgtagcagtgstatcatctagatggcacaaaattgatgtttttctgcagctgtgaagctgaagtgtaacgtgagctgcaggaaacacaatgtgtcaatactgactttggtgccagccctgtctcgccttttcattcattcccactgtcgtctttgtgtgtcatttttccagcatttcctcaccattcagatctctgacatacccaatagaatggaacaatgtcagtttagcttctggaaactacraagtacatgcttctgtttcacagcataactgctaagatttcagaaagcccagtgctcgggtattaa

SEQ ID NO: 56867 - DNA, 410 bp, Chicken  19866894312033_5
accctttgttttctcccccgaacagaggaaattgtgtgatttccttaacatgctgtgtagcagtgstatcatctagatggcacaaaattgatgtttttctgcagctgtgaagctgaagtgtaacgtgagctgcaggaaacacaatgtgtcaatactgactttggtgccagccctgtctcgccttttcattcattcccactgtcgtctttgtgtgtcatttttccagcatttcctcaccattcagatctctgacatacccaatagaatggaacaatgtcagtttagcttctggaaactacraagtacatgcttctgtttcacagcataactgctaagatttcagaaagcccagtgctcgggtattaatctctgcagcccactgagcacctctgtcatacacagtccaaacc

SEQ ID NO: 56868 - DNA, 586 bp, Chicken  19866894312036_1
ccacgccgtgaccggtcatctcggtgagcacctgctggataggcttcttgaagtcctgagggttgatgcactcggtggctcccatctctttggccttggcaaacttgtccttgttgatatcaatggcaatgatgcgggacgctccagctgccttgcagcccatgactacagagaggccgactcctccaaggccaaagacagcacaggtggagcccggttttacctgcatgacatggggctgggttggtctcctgtgtgaggaggatgcttctattgcttttttgagggtgtgagagtgcwgtggtgtgcttatttttgacacgtctgaataccaaccttggcggtgttgacagcagccccatagcctgtggagaaaccacaggcaaacacacagactttgtccagaggtgcagcagcatctatcttggccagggtgtactcaggtacaacagtgtattccgcaaaagtgctgttccagaggaagtgttggatctgtttccctttgcaagtgaacctggtggtcttgtcaggcatcaggttttgggttcagtgaggctgtggaaggatgtgcatgtgttgtgcatta

SEQ ID NO: 56869 - DNA, 599 bp, Chicken  19866894312037_1
  misc_feature (1)..(208): n is any nucleotide
nnnnnnnnnnnnnnnnnnnnnnnnnnnnnnnnnnnnnnnnnnnnnnnnnnnnnnnnnnnnnnnnnnnnnnnnnnnnnnnnnnnnnnnnnnnnnnnnnnnnnnnnnnnnnnnnnnnnnnnnnnnnnnnnnnnnnnnnnnnnnnnnnnnnnnnnnnnnnnnnnnnnnnnnnnnnnnnnnnnnnnnnnnnnnnnnnnnnnnnnnnnnnnnncacctgtttatacacagagcctcaaatgacatcaatgcaccttaaaaatcttttgcaaacacctaacagcagttctgctcctacaggaacayttgtgtccaacataactactaatagatcctgctggaatgttcacaacaaactgatgcaactcttactgactgtaactggacatacacacatttggatctgaggcttaaggtagacaagtttgtgcaagtctgccaaaacacctacaacatgcatttgcacatagcctacaaacattttctaagcaaacagatataatctgaaagttgtcttggtggaaacctggtayatgcaccagccatcactgagtgggagtttatctcttcataatattcacaacaagcaagggcttctcagacta

SEQ ID NO: 56870 - DNA, 600 bp, Chicken  19866894312037_2
cctcaaatgacatcaatgcaccttaaaaatcttttgcaaacacctaacagcagttctgctcctacaggaacayttgtgtccaacataactactaatagatcctgctggaatgttcacaacaaactgatgcaactcttactgactgtaactggacatacacacatttggatctgaggcttaaggtagacaagtttgtgcaagtctgccaaaacacctacaacatgcatttgcacatagcctacaaacattttctaagcaaacagatataatctgaaagttgtcttggtggaaacctggtayatgcaccagccatcactgagtgggagtttatctcttcataatattcacaacaagcaagggcttctcagactatatgtatatataacttctactgtattcaataaaagaaaataattttctcctccctgttttttttttctccccccaatagctatgcataatatagatgaaaaactacctctatcaggacagaaaaaaaaaaamcaatctgaacatgaattttcagatacaaatgcataatttattttcagagcagttgaaacttgagtactgtgggctccaaacacacttacagtcacc

SEQ ID NO: 56871 - DNA, 600 bp, Chicken  19866894312037_3
gccaaaacacctacaacatgcatttgcacatagcctacaaacattttctaagcaaacagatataatctgaaagttgtcttggtggaaacctggtayatgcaccagccatcactgagtgggagtttatctcttcataatattcacaacaagcaagggcttctcagactatatgtatatataacttctactgtattcaataaaagaaaataattttctcctccctgttttttttttctccccccaatagctatgcataatatagatgaaaaactacctctatcaggacagaaaaaaaaaaamcaatctgaacatgaattttcagatacaaatgcataatttattttcagagcagttgaaacttgagtactgtgggctccaaacacacttacagtcaccatctctaggttgaaatctcrtacaataggctaaactccaaagcttaagaaacagagcagaagcatgagaaacatctcttacttacaccactgtgtttctgtaacttagcgtaactatccatttccttctttggaaagctgaccttttgaaaaaaatgtagcaaaaaatgttggttgtgctatttatttcagtgttttgaaattt

SEQ ID NO: 56872 - DNA, 600 bp, Chicken  19866894312037_4
tgggagtttatctcttcataatattcacaacaagcaagggcttctcagactatatgtatatataacttctactgtattcaataaaagaaaataattttctcctccctgttttttttttctccccccaatagctatgcataatatagatgaaaaactacctctatcaggacagaaaaaaaaaaamcaatctgaacatgaattttcagatacaaatgcataatttattttcagagcagttgaaacttgagtactgtgggctccaaacacacttacagtcaccatctctaggttgaaatctcrtacaataggctaaactccaaagcttaagaaacagagcagaagcatgagaaacatctcttacttacaccactgtgtttctgtaacttagcgtaactatccatttccttctttggaaagctgaccttttgaaaaaaatgtagcaaaaaatgttggttgtgctatttatttcagtgttttgaaatttcaagatgaatgttggcttccaacaaataattgtgagagctaaagagcaggttaaagataagaatggactgaaatctgaatgcaaaagctcaccacgttaaaaaagcaactcatcat

SEQ ID NO: 56873 - DNA, 600 bp, Chicken  19866894312038_1
aggacaaaagctgctatatgataattcatggaggatattctccaaaccattttaattttgtttacaatgcttcttctttcattcacaagaggttattattattgatgttgccttgcctgaaggggttaaaaaacaagcttactcctcctccacttgcaacttcacatagaatcgtttatacttgtttctactataaacctgacaatagcatttcttctatggctgggagaccttgacaaatctcctgaatattgtctgtttctactttccctcttagaaatcaaattaattacttgcagygtattcattcttcttgtctttgttttatcacatcaataacttcccatttggatttcttttgacttcagaattaccagtgggtggctttggattctctccaatatttagtgaagatgagatataacgatccgatcagtgttagaaaaagaaactgagtaagaagaaaacagcaaaatattggattttcagaaataaatgcatctggaaaattaaagcttaactttgtcaccagttttctcctttggcttagtagccagaggtagtaggtgcttgcaattcaatcattcttctctcctataa

SEQ ID NO: 56874 - DNA, 600 bp, Chicken  19866894312044_1
agagatgccaaaacaatttcctcctggctgagtcagtagaatggcttagatcatatttttatctcataacttactttctgcatgatttcacattcacaaatagcacgtatcgagcacacggaaagcaaatcacttatgggacaagacacagccagcactcacagcagcttccgtgtgccaccatgtcctgttaaaggactgctttgcagcacagaggcaaagggaacatcaggtactgtgctgctgtctgacagaccaaagctagctagtgtcagttgctctgtttatcctcagtgcctyctgcaaggagggttgcctgctttycctgcagctctaacctgtcagctgctaaataaagaaattacaacattactggctaatattattactaactatagctattcctccattaaaattcttcacacacacagcatagagccatcaactgatctcattagaggagaaagcagtaccatctctgttgataattatgctgatcagttggctgcttttttgaagcctgaacagacacgtaagctatattacaatggaaaacatttagcatctccaractcygtgatctaccttaaggagcttcag

SEQ ID NO: 56875 - DNA, 600 bp, Chicken  19866894312044_2
tggctgagtcagtagaatggcttagatcatatttttatctcataacttactttctgcatgatttcacattcacaaatagcacgtatcgagcacacggaaagcaaatcacttatgggacaagacacagccagcactcacagcagcttccgtgtgccaccatgtcctgttaaaggactgctttgcagcacagaggcaaagggaacatcaggtactgtgctgctgtctgacagaccaaagctagctagtgtcagttgctctgtttatcctcagtgcctyctgcaaggagggttgcctgctttycctgcagctctaacctgtcagctgctaaataaagaaattacaacattactggctaatattattactaactatagctattcctccattaaaattcttcacacacacagcatagagccatcaactgatctcattagaggagaaagcagtaccatctctgttgataattatgctgatcagttggctgcttttttgaagcctgaacagacacgtaagctatattacaatggaaaacatttagcatctccaractcygtgatctaccttaaggagcttcagtgcttgcatgtatttaataaacta

SEQ ID NO: 56876 - DNA, 549 bp, Chicken  19866894312044_3
tcagttgctctgtttatcctcagtgcctyctgcaaggagggttgcctgctttycctgcagctctaacctgtcagctgctaaataaagaaattacaacattactggctaatattattactaactatagctattcctccattaaaattcttcacacacacagcatagagccatcaactgatctcattagaggagaaagcagtaccatctctgttgataattatgctgatcagttggctgcttttttgaagcctgaacagacacgtaagctatattacaatggaaaacatttagcatctccaractcygtgatctaccttaaggagcttcagtgcttgcatgtatttaataaactacttcataatgagcataccattcactgtatttatatgggtgaacaagcaattacagatgcaagctatcttcctgattaatctccaaattatgcagatttggggtttttgtacagtcagtgggtgcacataccctctggatttcttcataattacctcatacattcctgccttaagatgcacagatgctttcttgatg

SEQ ID NO: 56877 - DNA, 544 bp, Chicken  19866894312044_4
tgctctgtttatcctcagtgcctyctgcaaggagggttgcctgctttycctgcagctctaacctgtcagctgctaaataaagaaattacaacattactggctaatattattactaactatagctattcctccattaaaattcttcacacacacagcatagagccatcaactgatctcattagaggagaaagcagtaccatctctgttgataattatgctgatcagttggctgcttttttgaagcctgaacagacacgtaagctatattacaatggaaaacatttagcatctccaractcygtgatctaccttaaggagcttcagtgcttgcatgtatttaataaactacttcataatgagcataccattcactgtatttatatgggtgaacaagcaattacagatgcaagctatcttcctgattaatctccaaattatgcagatttggggtttttgtacagtcagtgggtgcacataccctctggatttcttcataattacctcatacattcctgccttaagatgcacagatgctttcttgatg

SEQ ID NO: 56878 - DNA, 599 bp, Chicken  19866894312048_1
  misc_feature (1)..(81): n is any nucleotide
nnnnnnnnnnnnnnnnnnnnnnnnnnnnnnnnnnnnnnnnnnnnnnnnnnnnnnnnnnnnnnnnnnnnnnnnnnnnnnnnnagtaacttgaaataacagtgcagaaactgggagtgcctccttagacaggctgaggtgtgggtgatttgagttgttcccagcatgtagcgggggtcggtttctctagatgctcccaagttttctctgcatgcctgtgctgcttttccctgctgctgccctcctgcagcaaggcactgggtggcaagagcccaggctgcccctgagcacggctctgtgtcmctggcctgctctcctacctcctgggagacctggctgctggtggtgcttgtgttgctggacaatttgagcaaaaaactaatgttttgagtggtgattggcaaaggaaggcattctgtttgtttgagggctttcgggaatagatttktgcatcacttagcagcacctgagcttatagcttatttgaaacatttttacgttcccacactgggagtatagcctaactcttcttaccattaggagaagtccttaaaagacatgggcattgctgccctgtacagtgcaacagccatttgctgtta

SEQ ID NO: 56879 - DNA, 600 bp, Chicken  19866894312048_2
tttgagttgttcccagcatgtagcgggggtcggtttctctagatgctcccaagttttctctgcatgcctgtgctgcttttccctgctgctgccctcctgcagcaaggcactgggtggcaagagcccaggctgcccctgagcacggctctgtgtcmctggcctgctctcctacctcctgggagacctggctgctggtggtgcttgtgttgctggacaatttgagcaaaaaactaatgttttgagtggtgattggcaaaggaaggcattctgtttgtttgagggctttcgggaatagatttktgcatcacttagcagcacctgagcttatagcttatttgaaacatttttacgttcccacactgggagtatagcctaactcttcttaccattaggagaagtccttaaaagacatgggcattgctgccctgtacagtgcaacagccatttgctgttaacatgaatgttagctatttatcattgcttctttctgctttctctccccctgcctgcatttttttgagcagaaagaaaggttcagatgtgtctgagtgttagcagtgtttcttgtctcatgtgaattggtgtgactggctggaactg

SEQ ID NO: 56880 - DNA, 567 bp, Chicken  19866894312057_1
cagcccgagttgtttattctagtgatctacagcgatgctttccttgtcctaacacagaatacataaaagatcctctcttgtttaacatgctactgattagatctatttttttaaaagaaggaagaatcaaattggggggggttgatagagtaagtttggggggaaaactgaaaaaaatagatgagaagaggcaccatctgcaaaactttccatgtgtgactgaaagtttaaataaataaatttcacatggcatcagtaccagatgcaaacagatttgattgacaacatctaaatgatagytaatgagaacatgtacgttttttgaaattttttttcatgtcatttcctaaatctgaggcttattcaggttttcatttaaaaataaatcttagatttgaagaagaaatatttcaaatcgctgttttactgccattaaaaatataaagtgctggataattaaattactcttattgaccctttgttttcatttataacaatagatttaacagaacagaacaaaacaatattcagattgcatgtgcaaaggataacccgcaactggcatta

SEQ ID NO: 56881 - DNA, 599 bp, Chicken  19866894312067_1
  misc_feature (1)..(14): n is any nucleotide
nnnnnnnnnnnnnnaatagtgatgtattacaggaagttggtactagcttgctgtacaggcacgagaggaaaaagtttgttgtggcagctacattactaatggcttttaaaataaatggattacagtactttttaactttcttacagtatttcatctttatgaagtaatttgctctattaatgaacggactcacattcagcatttattttgtgtctgcagcaagctattgaagagaagaaaggtatttctggatatagttacactcaggaggagctggaaagagtatctgcagtgaagagygaagtggatggaatgaaaggccaaacgctggacaacatgtctgaaatggtgatgtttgtctttggctsttgtattgcctcagtttcgatatctgcttcctcrgagtataaaaccaagttgaatattttggttgggtttttcacttttaatataggcttatatagaaaaacaggtactttcaaacagtatagataacargtttgtctattttttttgtctattttgactatttttgcctgttatttgaccwgatgaattgtttgaatcttttacagcatcattttctaaaatgtatgtaa

SEQ ID NO: 56882 - DNA, 600 bp, Chicken  19866894312067_2
aaaaagtttgttgtggcagctacattactaatggcttttaaaataaatggattacagtactttttaactttcttacagtatttcatctttatgaagtaatttgctctattaatgaacggactcacattcagcatttattttgtgtctgcagcaagctattgaagagaagaaaggtatttctggatatagttacactcaggaggagctggaaagagtatctgcagtgaagagygaagtggatggaatgaaaggccaaacgctggacaacatgtctgaaatggtgatgtttgtctttggctsttgtattgcctcagtttcgatatctgcttcctcrgagtataaaaccaagttgaatattttggttgggtttttcacttttaatataggcttatatagaaaaacaggtactttcaaacagtatagataacargtttgtctattttttttgtctattttgactatttttgcctgttatttgaccwgatgaattgtttgaatcttttacagcatcattttctaaaatgtatgtaaatcactggagttaagtattcatttaaaaatacttcatttgtctgaagaactaaatgttatttcttctct

SEQ ID NO: 56883 - DNA, 600 bp, Chicken  19866894312067_3
cttttaaaataaatggattacagtactttttaactttcttacagtatttcatctttatgaagtaatttgctctattaatgaacggactcacattcagcatttattttgtgtctgcagcaagctattgaagagaagaaaggtatttctggatatagttacactcaggaggagctggaaagagtatctgcagtgaagagygaagtggatggaatgaaaggccaaacgctggacaacatgtctgaaatggtgatgtttgtctttggctsttgtattgcctcagtttcgatatctgcttcctcrgagtataaaaccaagttgaatattttggttgggtttttcacttttaatataggcttatatagaaaaacaggtactttcaaacagtatagataacargtttgtctattttttttgtctattttgactatttttgcctgttatttgaccwgatgaattgtttgaatcttttacagcatcattttctaaaatgtatgtaaatcactggagttaagtattcatttaaaaatacttcatttgtctgaagaactaaatgttatttcttctctttagcctaattttcagttgtccttagatytgtag

SEQ ID NO: 56884 - DNA, 600 bp, Chicken  19866894312067_4
gcatttattttgtgtctgcagcaagctattgaagagaagaaaggtatttctggatatagttacactcaggaggagctggaaagagtatctgcagtgaagagygaagtggatggaatgaaaggccaaacgctggacaacatgtctgaaatggtgatgtttgtctttggctsttgtattgcctcagtttcgatatctgcttcctcrgagtataaaaccaagttgaatattttggttgggtttttcacttttaatataggcttatatagaaaaacaggtactttcaaacagtatagataacargtttgtctattttttttgtctattttgactatttttgcctgttatttgaccwgatgaattgtttgaatcttttacagcatcattttctaaaatgtatgtaaatcactggagttaagtattcatttaaaaatacttcatttgtctgaagaactaaatgttatttcttctctttagcctaattttcagttgtccttagatytgtagtgttttaagttaccacgtagccatagaagcaaaatattataaaggagccaaaagccaaatagcattctttaaaatcattagggcactttaaaaata

SEQ ID NO: 56885 - DNA, 600 bp, Chicken  19866894312067_5
gatatagttacactcaggaggagctggaaagagtatctgcagtgaagagygaagtggatggaatgaaaggccaaacgctggacaacatgtctgaaatggtgatgtttgtctttggctsttgtattgcctcagtttcgatatctgcttcctcrgagtataaaaccaagttgaatattttggttgggtttttcacttttaatataggcttatatagaaaaacaggtactttcaaacagtatagataacargtttgtctattttttttgtctattttgactatttttgcctgttatttgaccwgatgaattgtttgaatcttttacagcatcattttctaaaatgtatgtaaatcactggagttaagtattcatttaaaaatacttcatttgtctgaagaactaaatgttatttcttctctttagcctaattttcagttgtccttagatytgtagtgttttaagttaccacgtagccatagaagcaaaatattataaaggagccaaaagccaaatagcattctttaaaatcattagggcactttaaaaataaagtggtagaatcaaaacggaatgaatctcaaatagaaagctgggcagaatt

SEQ ID NO: 56886 - DNA, 600 bp, Chicken  19866894312067_6
cctcrgagtataaaaccaagttgaatattttggttgggtttttcacttttaatataggcttatatagaaaaacaggtactttcaaacagtatagataacargtttgtctattttttttgtctattttgactatttttgcctgttatttgaccwgatgaattgtttgaatcttttacagcatcattttctaaaatgtatgtaaatcactggagttaagtattcatttaaaaatacttcatttgtctgaagaactaaatgttatttcttctctttagcctaattttcagttgtccttagatytgtagtgttttaagttaccacgtagccatagaagcaaaatattataaaggagccaaaagccaaatagcattctttaaaatcattagggcactttaaaaataaagtggtagaatcaaaacggaatgaatctcaaatagaaagctgggcagaatttgaattttcagtataaatattttgaagtgattctgttttagcaagttcaaactttatttcacctatgcagggttttttttttttggttggtttgtttattcaaagatctcttctgtcagtccaactctgtgcagcacctttgttttc

SEQ ID NO: 56887 - DNA, 600 bp, Chicken  19866894312069_1
gtttctgaatggttttgacatctggtattaactgtgcatgtacaagcatattaagagagatcttttactagggaatgtgaaaagaaagtcacacacaccagtggttttcaaaagaaacaaaggaagctcatcagtactgacagaattctcaattcacttgaaacatccttgaaaatgttgttgggaagagctgacgaaagaaaccaatttggggaaggacaaaaggtggcatgaggttcactttacctctgggagaatgaaggcttgggaaggagagccgcactcaggcactgcctcgcrtgatggcagtgtcaatgaaaaaatgcattatgcagttggggttctggagctcacacatttatttacagatactggtgagaaacraggcaaataacaattcttttataggattcttttctgcaggcggttatctaggacagggtaaataccacctaatccgcatctagaaatactgaggaattaatgtcagtagatgtctttggtactacatttgctgagatactgctgtcttgaagtactgcagcatgaaccccacaaattttgcagtcatgtaagcactgaactgcttacttcttaaac

SEQ ID NO: 56888 - DNA, 583 bp, Chicken  19866894312069_2
aaagtcacacacaccagtggttttcaaaagaaacaaaggaagctcatcagtactgacagaattctcaattcacttgaaacatccttgaaaatgttgttgggaagagctgacgaaagaaaccaatttggggaaggacaaaaggtggcatgaggttcactttacctctgggagaatgaaggcttgggaaggagagccgcactcaggcactgcctcgcrtgatggcagtgtcaatgaaaaaatgcattatgcagttggggttctggagctcacacatttatttacagatactggtgagaaacraggcaaataacaattcttttataggattcttttctgcaggcggttatctaggacagggtaaataccacctaatccgcatctagaaatactgaggaattaatgtcagtagatgtctttggtactacatttgctgagatactgctgtcttgaagtactgcagcatgaaccccacaaattttgcagtcatgtaagcactgaactgcttacttcttaaactgctatttgggaagacagacattatgaactacttttacttaaactttctaaaccctttttcaagcag

SEQ ID NO: 56889 - DNA, 600 bp, Chicken  19866894312073_1
agaggccagccgtggtcatgtcgtagcttccaccgcctcccatccccctcagctttttcttctgtcacaaaacactcactgtctagcttcaatgaagtacctcaccgaaggcttactaaacagcggttcaactctttctaagctcttcagctctttagcaggaatcctattacatcagaaaaaaaaaaggaaagcaacaacagaaaaagctgcaaactcacacggagcggctcaactagcttcatgaaacacattttctgcattcatctagatgtcagttattgtatcataagattctgwtcacccaaatgccacagcagaaaatactagcagcaytgaggcaaacgttttacagaagaagtacattagaaatatcaacgatgcaacaaaatctgagccaagctgacaggagatacttttcttgctcaaataggagcttttacaaacatcaatatccatgtgttacattgcatgtctaycaaatttcagaagcactaaacttaaagttaggtaccattacactctcttttcagtttaatgagtctcaaatgcattttatgaggactaatgcaatctttcataccacagcaatctccttcc

SEQ ID NO: 56890 - DNA, 600 bp, Chicken  19866894312073_2
ctcccatccccctcagctttttcttctgtcacaaaacactcactgtctagcttcaatgaagtacctcaccgaaggcttactaaacagcggttcaactctttctaagctcttcagctctttagcaggaatcctattacatcagaaaaaaaaaaggaaagcaacaacagaaaaagctgcaaactcacacggagcggctcaactagcttcatgaaacacattttctgcattcatctagatgtcagttattgtatcataagattctgwtcacccaaatgccacagcagaaaatactagcagcaytgaggcaaacgttttacagaagaagtacattagaaatatcaacgatgcaacaaaatctgagccaagctgacaggagatacttttcttgctcaaataggagcttttacaaacatcaatatccatgtgttacattgcatgtctaycaaatttcagaagcactaaacttaaagttaggtaccattacactctcttttcagtttaatgagtctcaaatgcattttatgaggactaatgcaatctttcataccacagcaatctccttcccagaagcagaaatgtgattagtttttgcagaaattc

SEQ ID NO: 56891 - DNA, 600 bp, Chicken  19866894312073_3
aaaaaaaaaggaaagcaacaacagaaaaagctgcaaactcacacggagcggctcaactagcttcatgaaacacattttctgcattcatctagatgtcagttattgtatcataagattctgwtcacccaaatgccacagcagaaaatactagcagcaytgaggcaaacgttttacagaagaagtacattagaaatatcaacgatgcaacaaaatctgagccaagctgacaggagatacttttcttgctcaaataggagcttttacaaacatcaatatccatgtgttacattgcatgtctaycaaatttcagaagcactaaacttaaagttaggtaccattacactctcttttcagtttaatgagtctcaaatgcattttatgaggactaatgcaatctttcataccacagcaatctccttcccagaagcagaaatgtgattagtttttgcagaaattcaagtgacactgtatcctatccatcctcttctacagtctgatgtatattagatgataactgcaagttttcacattataaaaatcaatgttgtaaatgctcataacgccccttgaattctcaaagaatatctcctgatacctctt

SEQ ID NO: 56892 - DNA, 527 bp, Chicken  19866894312078_1
tcaatctctttctcatagattcccaaattcacttcaaggcagcactttccaagataacagtgccactttggtccttgtttcttgtttttcctgtttatctctcctcagcagcaatttcagatctgttttgtttgtgcttcactgtgtgacctgtagatattaaaacaccccaatgcccacttcactgtaaggtcaccaggagacccagagactgtcagcagcactttgctcacagaccttcttattttactgtgccggattgagtaaccatgcactgcagatacttttaaataaaatggraagaatgactctagtaaagattaagcccgtaaaatagaaaatgttacaacaaaagcaataatgatagagggcaattacagtatacctttgcacacacaggcacagcctttcctgctatcctctctctgttgtaaaccaaaggacaaagatgaaagaaaacctggtaaaactgggttgaagctgcatctgcagctggccaggatagccccatgttctgggagctgata

SEQ ID NO: 56893 - DNA, 599 bp, Chicken  19866894312079_1
  misc_feature (1)..(206): n is any nucleotide
nnnnnnnnnnnnnnnnnnnnnnnnnnnnnnnnnnnnnnnnnnnnnnnnnnnnnnnnnnnnnnnnnnnnnnnnnnnnnnnnnnnnnnnnnnnnnnnnnnnnnnnnnnnnnnnnnnnnnnnnnnnnnnnnnnnnnnnnnnnnnnnnnnnnnnnnnnnnnnnnnnnnnnnnnnnnnnnnnnnnnnnnnnnnnnnnnnnnnnnnnnnnnntctgaaagagtcctattcctatggacttcagtggaataggacttgtatccgaccacttgatttgtggaggccgaaattcgcgtttgtgctgctyaatgccaaacaagaaccagtttgtatgttcaggtgtttctggcattgacccagcatagaaggggtccacattttcctttttctgtttcttaagatcttccaagctctgaggggaaccaacacttagaaagagggaacggggaggagggtttatttatagatgtagttgttgcctgtgctggctgtttgccaacataggtcaccatgcccttyctgagcactgcatgtgtctggaagctgtgggcgctgcgtgacccgcagggaactgtggccaagcccctgtgcttctgcctcttgctg

SEQ ID NO: 56894 - DNA, 600 bp, Chicken  19866894312079_2
agagtcctattcctatggacttcagtggaataggacttgtatccgaccacttgatttgtggaggccgaaattcgcgtttgtgctgctyaatgccaaacaagaaccagtttgtatgttcaggtgtttctggcattgacccagcatagaaggggtccacattttcctttttctgtttcttaagatcttccaagctctgaggggaaccaacacttagaaagagggaacggggaggagggtttatttatagatgtagttgttgcctgtgctggctgtttgccaacataggtcaccatgcccttyctgagcactgcatgtgtctggaagctgtgggcgctgcgtgacccgcagggaactgtggccaagcccctgtgcttctgcctcttgctgtaaggaaactgctgctgttggtgtgaggcagctgcagtgagaccccagcccagctgagctttaccttcctcccagcgagaccccctctctgctgctagtgagccctgggtgagtgcaggcgtggcaagagggaggggccagattcttcaaaaatagttttgtttttttccccccaagattagcataagagcttatgttttctcatcaatcgca

SEQ ID NO: 56895 - DNA, 600 bp, Chicken  19866894312079_3
ttcaaaaatagttttgtttttttccccccaagattagcataagagcttatgttttctcatcaatcgcaccaagtctgagatttaataccttcagtatataaatcaggtactttccctacactgttttatttgagactctcgtgacctgagtctggactgtcttcgggggtggcaagccatcctctgtggggcagcagcaccaggctgcagcagtagctgtgtgacactgggttggaaatgcccatggtgaggcagggaacagtgagccaaccctgcaggcagtgccgcttggcagacccrtgcccctctcgctcccagcagccctggctgatgtcagggctccygaggcatgtgccattttggcatggacacactgctggcagagagcggaggtcatgcttggaggctgagccacccttccttcagtggggcgctgctggatggggaaggaaaggggctcccttaggaacctgctatccaataggtctggctgagcagagctgtttcgagggctgggcccagctgctttgccttgggtgctgcctccacactccctgcttcacaccctactcttttaggcctgaagtgaccttacaatga

SEQ ID NO: 56896 - DNA, 600 bp, Chicken  19866894312079_4
gcttatgttttctcatcaatcgcaccaagtctgagatttaataccttcagtatataaatcaggtactttccctacactgttttatttgagactctcgtgacctgagtctggactgtcttcgggggtggcaagccatcctctgtggggcagcagcaccaggctgcagcagtagctgtgtgacactgggttggaaatgcccatggtgaggcagggaacagtgagccaaccctgcaggcagtgccgcttggcagacccrtgcccctctcgctcccagcagccctggctgatgtcagggctccygaggcatgtgccattttggcatggacacactgctggcagagagcggaggtcatgcttggaggctgagccacccttccttcagtggggcgctgctggatggggaaggaaaggggctcccttaggaacctgctatccaataggtctggctgagcagagctgtttcgagggctgggcccagctgctttgccttgggtgctgcctccacactccctgcttcacaccctactcttttaggcctgaagtgaccttacaatgacaatgtaccctggcatggcagactatgaatgttttgttcctcct

SEQ ID NO: 56897 - DNA, 320 bp, Chicken  19866894312081_1
ggaaaaccagctggcaccctgatggattttaattattaagaacacctcatcagcagctcctgagcagcctctgggacaaaaagtgctctgggaataattttcagatgtgaataaattcaggacaatggagcactgcttacagaaaacgaggctgaatttggtgaataaattatttgctatgaataattcactccgacctagttgtaattattctgctctgctttaactcttctctcagcttcagagaggctgcccaagccttcctcccttcgatggtaagggtggatttagatacagggragaaattcttcatgatgagt

SEQ ID NO: 56898 - DNA, 533 bp, Chicken  19866894312088_1
agagcagcgctgatgagaattaaattcggggagggggagcagagggcagagcccccccagcaccgcggcccaccctgccagctccaaacgctgctcccaccgcggggtgcatggggctctcggaatattccgtaggagaaagcaaggcttctgctctcggggaagcgtggctcagggatgctccgaagcaccgagagagctcagccacagaacgcagcgctccaacagcctgccagcgggtccccttcccagcacacgctgctccttaggaagcactgcaccctctgatctcagcgatcygcacagctccggaacgaggggtcccctcgggggcatggaggaacccaaacggagctctgctgctcaaagagcaccgagcggagccccccagcagcgccgcaccgccgtcacttcccgactattccccacatacggagttgtttatggaagtcctattattttttttttccccttcgaaagacccgaaacagagcagaaaggaaaaaaagccgccaccgcagccggggcgcgga

SEQ ID NO: 56899 - DNA, 600 bp, Chicken  19866894312097_1
tttaggacagaaaaaatgcatttgatacaggagctacatttaatacaggaaaaaggttaacctaaggaagaaaaattgctgaaggtctttaccctactgaagtcctacttttcttttgtcttctgtgcaggagtcagttccagcttggttttgtcattagattcctttttgcttacactaagatgcctttggggcaaggattgtcttttctggtttgtttgcactgtacctaggataatgtggtccttgtccctgatggggctacctacgtgatgttgtgaagcaggtaatgggttactscaattaygyggaggacagatcaggctgctctgtggcttatttacttctttatgaggaaagytatcaccagacagaagatgtaaagaggcgagtggtgatgaccattaatgatgatatttttatagaaccagactacaacagatagcatagctactataatttayggcttaagatataaagttgctgatttaagctctgaaagagataaacaatttataagtcttttcacttctcttccaggaagtcttgtttttaggataagtggtgagctgtaactgaagaagtgcagaacagttcttt

SEQ ID NO: 56900 - DNA, 600 bp, Chicken  19866894312097_2
cagaaaaaatgcatttgatacaggagctacatttaatacaggaaaaaggttaacctaaggaagaaaaattgctgaaggtctttaccctactgaagtcctacttttcttttgtcttctgtgcaggagtcagttccagcttggttttgtcattagattcctttttgcttacactaagatgcctttggggcaaggattgtcttttctggtttgtttgcactgtacctaggataatgtggtccttgtccctgatggggctacctacgtgatgttgtgaagcaggtaatgggttactscaattaygyggaggacagatcaggctgctctgtggcttatttacttctttatgaggaaagytatcaccagacagaagatgtaaagaggcgagtggtgatgaccattaatgatgatatttttatagaaccagactacaacagatagcatagctactataatttayggcttaagatataaagttgctgatttaagctctgaaagagataaacaatttataagtcttttcacttctcttccaggaagtcttgtttttaggataagtggtgagctgtaactgaagaagtgcagaacagttctttcctcatt

SEQ ID NO: 56901 - DNA, 600 bp, Chicken  19866894312097_3
gaaaaaatgcatttgatacaggagctacatttaatacaggaaaaaggttaacctaaggaagaaaaattgctgaaggtctttaccctactgaagtcctacttttcttttgtcttctgtgcaggagtcagttccagcttggttttgtcattagattcctttttgcttacactaagatgcctttggggcaaggattgtcttttctggtttgtttgcactgtacctaggataatgtggtccttgtccctgatggggctacctacgtgatgttgtgaagcaggtaatgggttactscaattaygyggaggacagatcaggctgctctgtggcttatttacttctttatgaggaaagytatcaccagacagaagatgtaaagaggcgagtggtgatgaccattaatgatgatatttttatagaaccagactacaacagatagcatagctactataatttayggcttaagatataaagttgctgatttaagctctgaaagagataaacaatttataagtcttttcacttctcttccaggaagtcttgtttttaggataagtggtgagctgtaactgaagaagtgcagaacagttctttcctcattgc

SEQ ID NO: 56902 - DNA, 600 bp, Chicken  19866894312097_4
ctaaggaagaaaaattgctgaaggtctttaccctactgaagtcctacttttcttttgtcttctgtgcaggagtcagttccagcttggttttgtcattagattcctttttgcttacactaagatgcctttggggcaaggattgtcttttctggtttgtttgcactgtacctaggataatgtggtccttgtccctgatggggctacctacgtgatgttgtgaagcaggtaatgggttactscaattaygyggaggacagatcaggctgctctgtggcttatttacttctttatgaggaaagytatcaccagacagaagatgtaaagaggcgagtggtgatgaccattaatgatgatatttttatagaaccagactacaacagatagcatagctactataatttayggcttaagatataaagttgctgatttaagctctgaaagagataaacaatttataagtcttttcacttctcttccaggaagtcttgtttttaggataagtggtgagctgtaactgaagaagtgcagaacagttctttcctcattgcaaaggatwacagtataagcatttgtacttcaataccaaaatgctctcttaaa

SEQ ID NO: 56903 - DNA, 600 bp, Chicken  19866894312097_5
ctttttgcttacactaagatgcctttggggcaaggattgtcttttctggtttgtttgcactgtacctaggataatgtggtccttgtccctgatggggctacctacgtgatgttgtgaagcaggtaatgggttactscaattaygyggaggacagatcaggctgctctgtggcttatttacttctttatgaggaaagytatcaccagacagaagatgtaaagaggcgagtggtgatgaccattaatgatgatatttttatagaaccagactacaacagatagcatagctactataatttayggcttaagatataaagttgctgatttaagctctgaaagagataaacaatttataagtcttttcacttctcttccaggaagtcttgtttttaggataagtggtgagctgtaactgaagaagtgcagaacagttctttcctcattgcaaaggatwacagtataagcatttgtacttcaataccaaaatgctctcttaaacatgttgtcttctgtcttctccatccaggcatgcatataccgaaagtgcaaatttgcgatttccagaaaaaaaaactgttgcctgttagtggccaagggctga

SEQ ID NO: 56904 - DNA, 600 bp, Chicken  19866894312097_6
gatcaggctgctctgtggcttatttacttctttatgaggaaagytatcaccagacagaagatgtaaagaggcgagtggtgatgaccattaatgatgatatttttatagaaccagactacaacagatagcatagctactataatttayggcttaagatataaagttgctgatttaagctctgaaagagataaacaatttataagtcttttcacttctcttccaggaagtcttgtttttaggataagtggtgagctgtaactgaagaagtgcagaacagttctttcctcattgcaaaggatwacagtataagcatttgtacttcaataccaaaatgctctcttaaacatgttgtcttctgtcttctccatccaggcatgcatataccgaaagtgcaaatttgcgatttccagaaaaaaaaactgttgcctgttagtggccaagggctgatgtaatggcagactgatgaaatcaagatgtcatttgcaccatctttgctatttctagttgacattcattgtgctgttatctacttttacctctgtgcaaatgttactgataatcttcctaatataaatcagttcttagtctcccattcgtctt

SEQ ID NO: 56905 - DNA, 600 bp, Chicken  19866894312099_1
agttaattatcccagcatccacacgtttttgtctgcaaaattctctgatactgggggtggggttgggaccccgcatacggctctggtttgctgtgcttcaaacccagagcgatcctcctgatgtcattgtctgtgtctgaaccaagacctttgcaacaggcaagaaagggaggatgcaaccctcaagcaaaacttaaccttgtaccacttgtccaagagaaaagaaaaggctggatgtggctctgggcagcctggtctggtggttggtgaccctgcacgtagcagggggattgaaactcratgatcattacggtccttttcaacccaggccattctatgattctatgaaagggaagcaacaamaaaataacaacacagccaaactgtataaagaaaatcaactcagcaatgggcttttcttcctgccctccaatgtcttgcatggccacaacagcatcctgcagttatgcacggagcttcaaraytgcttctttgttttatacggtgccacaaataaacagcacacgaaaaaaccaccaaaataaacgaggtgatgaaggaargagcagaacacagcaaaaggaagagcraacagacaga

SEQ ID NO: 56906 - DNA, 600 bp, Chicken  19866894312099_2
tgggaccccgcatacggctctggtttgctgtgcttcaaacccagagcgatcctcctgatgtcattgtctgtgtctgaaccaagacctttgcaacaggcaagaaagggaggatgcaaccctcaagcaaaacttaaccttgtaccacttgtccaagagaaaagaaaaggctggatgtggctctgggcagcctggtctggtggttggtgaccctgcacgtagcagggggattgaaactcratgatcattacggtccttttcaacccaggccattctatgattctatgaaagggaagcaacaamaaaataacaacacagccaaactgtataaagaaaatcaactcagcaatgggcttttcttcctgccctccaatgtcttgcatggccacaacagcatcctgcagttatgcacggagcttcaaraytgcttctttgttttatacggtgccacaaataaacagcacacgaaaaaaccaccaaaataaacgaggtgatgaaggaargagcagaacacagcaaaaggaagagcraacagacagatataagcaagagtgaacaagtagggaagcctgaatgagagagaagacggcaaagagattcaag

SEQ ID NO: 56907 - DNA, 548 bp, Chicken  19866894312099_3
caagcaaaacttaaccttgtaccacttgtccaagagaaaagaaaaggctggatgtggctctgggcagcctggtctggtggttggtgaccctgcacgtagcagggggattgaaactcratgatcattacggtccttttcaacccaggccattctatgattctatgaaagggaagcaacaamaaaataacaacacagccaaactgtataaagaaaatcaactcagcaatgggcttttcttcctgccctccaatgtcttgcatggccacaacagcatcctgcagttatgcacggagcttcaaraytgcttctttgttttatacggtgccacaaataaacagcacacgaaaaaaccaccaaaataaacgaggtgatgaaggaargagcagaacacagcaaaaggaagagcraacagacagatataagcaagagtgaacaagtagggaagcctgaatgagagagaagacggcaaagagattcaagggggacaggtggcatgatgtgaagtgagccattttctccctcttatacaagcagctcattttttattt

SEQ ID NO: 56908 - DNA, 546 bp, Chicken  19866894312099_4
agcaaaacttaaccttgtaccacttgtccaagagaaaagaaaaggctggatgtggctctgggcagcctggtctggtggttggtgaccctgcacgtagcagggggattgaaactcratgatcattacggtccttttcaacccaggccattctatgattctatgaaagggaagcaacaamaaaataacaacacagccaaactgtataaagaaaatcaactcagcaatgggcttttcttcctgccctccaatgtcttgcatggccacaacagcatcctgcagttatgcacggagcttcaaraytgcttctttgttttatacggtgccacaaataaacagcacacgaaaaaaccaccaaaataaacgaggtgatgaaggaargagcagaacacagcaaaaggaagagcraacagacagatataagcaagagtgaacaagtagggaagcctgaatgagagagaagacggcaaagagattcaagggggacaggtggcatgatgtgaagtgagccattttctccctcttatacaagcagctcattttttattt

SEQ ID NO: 56909 - DNA, 468 bp, Chicken  19866894312099_5
ttggtgaccctgcacgtagcagggggattgaaactcratgatcattacggtccttttcaacccaggccattctatgattctatgaaagggaagcaacaamaaaataacaacacagccaaactgtataaagaaaatcaactcagcaatgggcttttcttcctgccctccaatgtcttgcatggccacaacagcatcctgcagttatgcacggagcttcaaraytgcttctttgttttatacggtgccacaaataaacagcacacgaaaaaaccaccaaaataaacgaggtgatgaaggaargagcagaacacagcaaaaggaagagcraacagacagatataagcaagagtgaacaagtagggaagcctgaatgagagagaagacggcaaagagattcaagggggacaggtggcatgatgtgaagtgagccattttctccctcttatacaagcagctcattttttattt

SEQ ID NO: 56910 - DNA, 441 bp, Chicken  19866894312099_6
ttgaaactcratgatcattacggtccttttcaacccaggccattctatgattctatgaaagggaagcaacaamaaaataacaacacagccaaactgtataaagaaaatcaactcagcaatgggcttttcttcctgccctccaatgtcttgcatggccacaacagcatcctgcagttatgcacggagcttcaaraytgcttctttgttttatacggtgccacaaataaacagcacacgaaaaaaccaccaaaataaacgaggtgatgaaggaargagcagaacacagcaaaaggaagagcraacagacagatataagcaagagtgaacaagtagggaagcctgaatgagagagaagacggcaaagagattcaagggggacaggtggcatgatgtgaagtgagccattttctccctcttatacaagcagctcattttttattt

SEQ ID NO: 56911 - DNA, 599 bp, Chicken  19866894312100_1
  misc_feature (1)..(102): n is any nucleotide
nnnnnnnnnnnnnnnnnnnnnnnnnnnnnnnnnnnnnnnnnnnnnnnnnnnnnnnnnnnnnnnnnnnnnnnnnnnnnnnnnnnnnnnnnnnnnnnnnnnnnnagacagaagtgctgtgagcccacggagagctgcaatacagagaggcactgagctcctcgagatgctgcggcttcccagcggggagcggagcggtgtcctttctgggctggctccgtgcagccgagggttgggccgtacagcccccgcactgaatcgcgggcattgtgtgcaaatgaatgagcgcacattgtttcgcakcgctgctattgtgcctgggctatgggggggaggcggtggcagcgttctgtgcgagcgtggccgcgtgtttcctaaaggtgagcgcggattgcaagagttgctgctctgttgttgtttgtcaaacagggcccttctccagggagaggggcatgtggcggatcccagcccaggattacattaatcaaagcattatttccccagggatgcccagcacaaatgatagtaaatcctaataaaattggatcgctgagaaatggaacgcttaaagtaatctgctctgcctgataaaaacttcaaat

SEQ ID NO: 56912 - DNA, 600 bp, Chicken  19866894312100_2
cgtggccgcgtgtttcctaaaggtgagcgcggattgcaagagttgctgctctgttgttgtttgtcaaacagggcccttctccagggagaggggcatgtggcggatcccagcccaggattacattaatcaaagcattatttccccagggatgcccagcacaaatgatagtaaatcctaataaaattggatcgctgagaaatggaacgcttaaagtaatctgctctgcctgataaaaacttcaaatttagaagatattatgcatccccacccccaaacaccttaggtatcatcgccgtgtgygtgcrttatacatctatctggaggagagaaatcaccgctctgcttaccagggccgccgctattggatatatgcatatccacagacatgtgtgcttgtgcacatgtgtttcgcacgcaggcacgggcacaaataagctgtgagcacacagcagtgatgacggtggtcagygtgggggatatgccccctttgcattggcaggtgctcaccgtgggcctccatgatggcacctgcgatccccactcagagcagcctgaccgaatgctgggctggggaaataaatacaaatacgcggaggtgaa

SEQ ID NO: 56913 - DNA, 600 bp, Chicken  19866894312100_3
ccgcgtgtttcctaaaggtgagcgcggattgcaagagttgctgctctgttgttgtttgtcaaacagggcccttctccagggagaggggcatgtggcggatcccagcccaggattacattaatcaaagcattatttccccagggatgcccagcacaaatgatagtaaatcctaataaaattggatcgctgagaaatggaacgcttaaagtaatctgctctgcctgataaaaacttcaaatttagaagatattatgcatccccacccccaaacaccttaggtatcatcgccgtgtgygtgcrttatacatctatctggaggagagaaatcaccgctctgcttaccagggccgccgctattggatatatgcatatccacagacatgtgtgcttgtgcacatgtgtttcgcacgcaggcacgggcacaaataagctgtgagcacacagcagtgatgacggtggtcagygtgggggatatgccccctttgcattggcaggtgctcaccgtgggcctccatgatggcacctgcgatccccactcagagcagcctgaccgaatgctgggctggggaaataaatacaaatacgcggaggtgaatgctt

SEQ ID NO: 56914 - DNA, 600 bp, Chicken  19866894312100_4
aaatcctaataaaattggatcgctgagaaatggaacgcttaaagtaatctgctctgcctgataaaaacttcaaatttagaagatattatgcatccccacccccaaacaccttaggtatcatcgccgtgtgygtgcrttatacatctatctggaggagagaaatcaccgctctgcttaccagggccgccgctattggatatatgcatatccacagacatgtgtgcttgtgcacatgtgtttcgcacgcaggcacgggcacaaataagctgtgagcacacagcagtgatgacggtggtcagygtgggggatatgccccctttgcattggcaggtgctcaccgtgggcctccatgatggcacctgcgatccccactcagagcagcctgaccgaatgctgggctggggaaataaatacaaatacgcggaggtgaatgcttcaaaaagcctttgggaggatgtgctccagagggaaaaatgccttcagctgggggaatgaatgaaggaagggaacagtcgttttgctggggacacgtggcttgctacgcatggcccctgtggccataccaccgccatccctgcccctcacaagggtctcggggcc

SEQ ID NO: 56915 - DNA, 599 bp, Chicken  19866894312105_1
  misc_feature (1)..(88): n is any nucleotide
nnnnnnnnnnnnnnnnnnnnnnnnnnnnnnnnnnnnnnnnnnnnnnnnnnnnnnnnnnnnnnnnnnnnnnnnnnnnnnnnnnnnnnnnttcggggaggttcccgggatctgtgatgaaatctctggttcatggcacaaggaagcagggatttgccaatatggatgcttggcacatttgcatgccaagtgctctcgttaggagcggggcatttggaaacacttaactccctgtcagcccaaccccagctggaaatgtaaggggaaatgtggggtctccatcagcagatcttcagccaaccytctccactatcagctaccaaagcaamaagctcmtgcccatggctccctacmtgctccagtgatccccaaggaacaaagatacagatcttccccctcatgaatttgctatcaagataaccactgtagttaatgagcagagacaaagtggatctttctaacaccctcgccaaattacagctgaaggaagctcctgatagcactgcttgacttattctgactttcttagatgtttatgataattgtctcctgggtaatttgtttaaatttgtatgtaaacaaagaagagtttgcacacatct

SEQ ID NO: 56916 - DNA, 599 bp, Chicken  19866894312105_2
  misc_feature (1)..(62): n is any nucleotide
nnnnnnnnnnnnnnnnnnnnnnnnnnnnnnnnnnnnnnnnnnnnnnnnnnnnnnnnnnnnnnttcggggaggttcccgggatctgtgatgaaatctctggttcatggcacaaggaagcagggatttgccaatatggatgcttggcacatttgcatgccaagtgctctcgttaggagcggggcatttggaaacacttaactccctgtcagcccaaccccagctggaaatgtaaggggaaatgtggggtctccatcagcagatcttcagccaaccytctccactatcagctaccaaagcaamaagctcmtgcccatggctccctacmtgctccagtgatccccaaggaacaaagatacagatcttccccctcatgaatttgctatcaagataaccactgtagttaatgagcagagacaaagtggatctttctaacaccctcgccaaattacagctgaaggaagctcctgatagcactgcttgacttattctgactttcttagatgtttatgataattgtctcctgggtaatttgtttaaatttgtatgtaaacaaagaagagtttgcacacatctactgcctcacaaaatgcatgtgtcat

SEQ ID NO: 56917 - DNA, 599 bp, Chicken  19866894312105_3
  misc_feature (1)..(55): n is any nucleotide
nnnnnnnnnnnnnnnnnnnnnnnnnnnnnnnnnnnnnnnnnnnnnnnnnnnnnnnttcggggaggttcccgggatctgtgatgaaatctctggttcatggcacaaggaagcagggatttgccaatatggatgcttggcacatttgcatgccaagtgctctcgttaggagcggggcatttggaaacacttaactccctgtcagcccaaccccagctggaaatgtaaggggaaatgtggggtctccatcagcagatcttcagccaaccytctccactatcagctaccaaagcaamaagctcmtgcccatggctccctacmtgctccagtgatccccaaggaacaaagatacagatcttccccctcatgaatttgctatcaagataaccactgtagttaatgagcagagacaaagtggatctttctaacaccctcgccaaattacagctgaaggaagctcctgatagcactgcttgacttattctgactttcttagatgtttatgataattgtctcctgggtaatttgtttaaatttgtatgtaaacaaagaagagtttgcacacatctactgcctcacaaaatgcatgtgtcatttctcaa

SEQ ID NO: 56918 - DNA, 599 bp, Chicken  19866894312105_4
  misc_feature (1)..(37): n is any nucleotide
nnnnnnnnnnnnnnnnnnnnnnnnnnnnnnnnnnnnnttcggggaggttcccgggatctgtgatgaaatctctggttcatggcacaaggaagcagggatttgccaatatggatgcttggcacatttgcatgccaagtgctctcgttaggagcggggcatttggaaacacttaactccctgtcagcccaaccccagctggaaatgtaaggggaaatgtggggtctccatcagcagatcttcagccaaccytctccactatcagctaccaaagcaamaagctcmtgcccatggctccctacmtgctccagtgatccccaaggaacaaagatacagatcttccccctcatgaatttgctatcaagataaccactgtagttaatgagcagagacaaagtggatctttctaacaccctcgccaaattacagctgaaggaagctcctgatagcactgcttgacttattctgactttcttagatgtttatgataattgtctcctgggtaatttgtttaaatttgtatgtaaacaaagaagagtttgcacacatctactgcctcacaaaatgcatgtgtcatttctcaaaggcatttctgccatagc

SEQ ID NO: 56919 - DNA, 600 bp, Chicken  19866894312105_5
gtttatgataattgtctcctgggtaatttgtttaaatttgtatgtaaacaaagaagagtttgcacacatctactgcctcacaaaatgcatgtgtcatttctcaaaggcatttctgccatagcttattcttttcatttttccctacagaatattgatctgggggtaaaattacagcagaatagctacagcagaagccaatgcagtgtcataaccttctgcaaatcaagtgactggttttagtattccctaaagtggccctcaagtgagaaaagccttctgtttccctattactctgaatgyccttgggcaaccactcaagaggtataactcaactgcacagaaggccattggccatrcctacgtgcaccagcaaaagacctctgccaagtacatccamctttttaaggtcatttcactcaattctgcttctcatcatctcacctggaactccattcctttactgaggatgtaaagacccaccaactagtatccatccacctttctctaacaggcttcagctggagcatttatctttccgccctcacctccaaagtgttttctttgtgacaagctcaggaaggaagaaaaatgggaaccaag

SEQ ID NO: 56920 - DNA, 600 bp, Chicken  19866894312105_6
agtttgcacacatctactgcctcacaaaatgcatgtgtcatttctcaaaggcatttctgccatagcttattcttttcatttttccctacagaatattgatctgggggtaaaattacagcagaatagctacagcagaagccaatgcagtgtcataaccttctgcaaatcaagtgactggttttagtattccctaaagtggccctcaagtgagaaaagccttctgtttccctattactctgaatgyccttgggcaaccactcaagaggtataactcaactgcacagaaggccattggccatrcctacgtgcaccagcaaaagacctctgccaagtacatccamctttttaaggtcatttcactcaattctgcttctcatcatctcacctggaactccattcctttactgaggatgtaaagacccaccaactagtatccatccacctttctctaacaggcttcagctggagcatttatctttccgccctcacctccaaagtgttttctttgtgacaagctcaggaaggaagaaaaatgggaaccaagcacttggaaagctgcaaactcttcgttttcctgagagaaatgcagagcaaagagca

SEQ ID NO: 56921 - DNA, 600 bp, Chicken  19866894312105_7
ttctcaaaggcatttctgccatagcttattcttttcatttttccctacagaatattgatctgggggtaaaattacagcagaatagctacagcagaagccaatgcagtgtcataaccttctgcaaatcaagtgactggttttagtattccctaaagtggccctcaagtgagaaaagccttctgtttccctattactctgaatgyccttgggcaaccactcaagaggtataactcaactgcacagaaggccattggccatrcctacgtgcaccagcaaaagacctctgccaagtacatccamctttttaaggtcatttcactcaattctgcttctcatcatctcacctggaactccattcctttactgaggatgtaaagacccaccaactagtatccatccacctttctctaacaggcttcagctggagcatttatctttccgccctcacctccaaagtgttttctttgtgacaagctcaggaaggaagaaaaatgggaaccaagcacttggaaagctgcaaactcttcgttttcctgagagaaatgcagagcaaagagcaagccaagcccaccgcaagaggggcagctggatgtcacagca

SEQ ID NO: 56922 - DNA, 600 bp, Chicken  19866894312112_1
tgcagggctggctggaattcacagtcatgtggagcagagcccagcagttctttcccccatgaggatgggagatgctgtgagttcctggggatgccaaatggacgtggctgtgctcatacatccagcatcttgtgtgcatcctgagctaaggggctgcattcaaaggaactaggaagctatggccaaagagtccagcacaaaccctgaaggcagcactgatctagtagggctggagcctttctgcagggcatagggcattcagatggttgcaggccagttaattttacctcttattctctycttctgatccaacycccctccaagcatgctttttgggcccagattcagtgtccttcttcagtactgcattcgattgcatccagcgctgatccctgagtttctgagtggtgaatttcaccccgggtacgtgtggggaaagcaggaaggctgcactttgcattttaaatcctgaaaacatattttaagggctctgcttctgtctcctctccagttcttgagaaaaactcagctaaggaaagattttggtagaagcccaaaagtgacattcgcctgctttttccaggtaatgcatatgcatgc

SEQ ID NO: 56923 - DNA, 600 bp, Chicken  19866894312112_2
gaattcacagtcatgtggagcagagcccagcagttctttcccccatgaggatgggagatgctgtgagttcctggggatgccaaatggacgtggctgtgctcatacatccagcatcttgtgtgcatcctgagctaaggggctgcattcaaaggaactaggaagctatggccaaagagtccagcacaaaccctgaaggcagcactgatctagtagggctggagcctttctgcagggcatagggcattcagatggttgcaggccagttaattttacctcttattctctycttctgatccaacycccctccaagcatgctttttgggcccagattcagtgtccttcttcagtactgcattcgattgcatccagcgctgatccctgagtttctgagtggtgaatttcaccccgggtacgtgtggggaaagcaggaaggctgcactttgcattttaaatcctgaaaacatattttaagggctctgcttctgtctcctctccagttcttgagaaaaactcagctaaggaaagattttggtagaagcccaaaagtgacattcgcctgctttttccaggtaatgcatatgcatgcatgcaaaactcagg

SEQ ID NO: 56924 - DNA, 598 bp, Chicken  19866894312115_1
ctttcatgtccttttatcttcacactaggatttctttttaaattccaagccgtgcatttggtttcattatataacactggcttttacaaaacattggctcttcatattctttggtttcatatttgtcggcatcgggctgaaatagtaaacccgctacgtctattttatcttgttgaagataaaaacaatatggcaaatgaactatttggggaacactactttcaaattaaaggaaaggaaaaagtattaagtgtcaccgctgagttgaactatattgaaatgttgaaccgaagtgatttwaaaaaaaagaattgaataaaaaggtgacccaaaatgttacaactgtcatgcaggactgtgttatcttaaattatttatttaacatctggtaaatattatccaagctatagtacagataaattgaataaaagaataccaatgccaggggaaaagaggaattgcttaatactgtaagtatatagaactgttccacaaagcagttcattctctctctgcaagggaagatgagaagcatggtactgggctaaaatgcatctgcttcgtttcacccaaagtatgaagctatcaaagcagtttt

SEQ ID NO: 56925 - DNA, 600 bp, Chicken  19866894312116_1
aaggagctcttcttcacaggagaagatcaaaaaggtaattcaatatatggcctgaatattttagtaacagaaattctcaatttgctttgctatgatatgcctcagtggaatattcttctgactatggtttttggttctgatctcccaccccatgaaggacatagaaagatttggaagtatctggagaatgaaaatggcaatgattaaatcacaacagaagcaaatacatgtgcagcaagtagcaaccttttctttcttgtagaaaatacttagattttgagtaacttttttttgaactcygaaagtaagtttccacaggtcaatttgaagaaattacactgcagaaaaaaatatataccttttttttcacctttgtatcttgtttattggctcgaacatctgcctgacaccctggactcctcagagaagtagcagcttgtcctaaaatctgctagttttgagmaattcaggtgcctaggcacgtacttctagtgcctcattagatgttctcagattttcaagattggtaggtgctgtgggccactgaagcagcagctggcagccacagacgatgtcaggaggagtttaaaatggtcttgc

SEQ ID NO: 56926 - DNA, 600 bp, Chicken  19866894312116_2
gaaagatttggaagtatctggagaatgaaaatggcaatgattaaatcacaacagaagcaaatacatgtgcagcaagtagcaaccttttctttcttgtagaaaatacttagattttgagtaacttttttttgaactcygaaagtaagtttccacaggtcaatttgaagaaattacactgcagaaaaaaatatataccttttttttcacctttgtatcttgtttattggctcgaacatctgcctgacaccctggactcctcagagaagtagcagcttgtcctaaaatctgctagttttgagmaattcaggtgcctaggcacgtacttctagtgcctcattagatgttctcagattttcaagattggtaggtgctgtgggccactgaagcagcagctggcagccacagacgatgtcaggaggagtttaaaatggtcttgctgaaacacaacccaagggtgtaaggaccccactkaaaaccgaaagcatgaagagaagtacgggctgcctggtcatgctggtagctgcagagtgaggaaattatattctgagggaaaatcaagctgatgcttcaaaatcaatatcttctctcagaaaaggattt

SEQ ID NO: 56927 - DNA, 451 bp, Chicken  19866894312116_3
tacactgcagaaaaaaatatataccttttttttcacctttgtatcttgtttattggctcgaacatctgcctgacaccctggactcctcagagaagtagcagcttgtcctaaaatctgctagttttgagmaattcaggtgcctaggcacgtacttctagtgcctcattagatgttctcagattttcaagattggtaggtgctgtgggccactgaagcagcagctggcagccacagacgatgtcaggaggagtttaaaatggtcttgctgaaacacaacccaagggtgtaaggaccccactkaaaaccgaaagcatgaagagaagtacgggctgcctggtcatgctggtagctgcagagtgaggaaattatattctgagggaaaatcaagctgatgcttcaaaatcaatatcttctctcagaaaaggatttttttggaatgtaagatattttt

SEQ ID NO: 56928 - DNA, 600 bp, Chicken  19866894312132_1
gacatcacctccagaacttcaggaggcagcactcaaacaccaagttttctaacaccaatccagctacctctccaaataatagccaaataccagcttgaagttgtcactgatgctccttactcttctaaactgctgtttggtggcttccaacttctgttttgcacacccctataagttctcaaatgtcaaaaattgctgaacaggcccacactacatatatactgctctaccacataggaacccacagaaacaatccaccaatactacaaatatgagcggaccatgactaaagttccctayagcagtggaaagaaataaagaggacagcagtacatacacttgatatcatgtggacttccaayattcaactcagatgttgctccatgtgtcatcaggggcatccctctcgccaggcttattcagctacttaaataaactcctttgagctatgcagcttaggttctcctagttcactaaatcattccagaagcaaagcaactgcttttcttgtctgaacattcagccttcaactacacactgaacagcttaatcagaaaatgctctgttaaagaactcaagatgcaaactaagggggggtaa

SEQ ID NO: 56929 - DNA, 600 bp, Chicken  19866894312132_2
gctacctctccaaataatagccaaataccagcttgaagttgtcactgatgctccttactcttctaaactgctgtttggtggcttccaacttctgttttgcacacccctataagttctcaaatgtcaaaaattgctgaacaggcccacactacatatatactgctctaccacataggaacccacagaaacaatccaccaatactacaaatatgagcggaccatgactaaagttccctayagcagtggaaagaaataaagaggacagcagtacatacacttgatatcatgtggacttccaayattcaactcagatgttgctccatgtgtcatcaggggcatccctctcgccaggcttattcagctacttaaataaactcctttgagctatgcagcttaggttctcctagttcactaaatcattccagaagcaaagcaactgcttttcttgtctgaacattcagccttcaactacacactgaacagcttaatcagaaaatgctctgttaaagaactcaagatgcaaactaagggggggtaagacaactgcagcagggtatttaggaaaaacttttgtaacaattagagctaatggaaatctca

SEQ ID NO: 56930 - DNA, 599 bp, Chicken  19866894312133_1
  misc_feature (1)..(159): n is any nucleotide
nnnnnnnnnnnnnnnnnnnnnnnnnnnnnnnnnnnnnnnnnnnnnnnnnnnnnnnnnnnnnnnnnnnnnnnnnnnnnnnnnnnnnnnnnnnnnnnnnnnnnnnnnnnnnnnnnnnnnnnnnnnnnnnnnnnnnnnnnnnnnnnnnnnnnnnnnnnnnnncccccaccccccccagaaggcactgaggacaggggacagccagggcacagcctggagccctgcccaggtcaacacggggacgttttgtttgcttcacatcccctatttttccaagtcttgaactcccaatgactcatcttyggcttyatgccgttctccttcccatccttacaggttctccaggtctgatcccagtgcttgggaacagggacacacagtggggtgtttccatgcctgcccccgacttatttacccagcaaatgcccaagcacagagtttgctccctggmtcatcctgycacaccaggaccaacactggggttagggatcagggctccccatagctcarggggtgctctgggggcagtcagtgctgagcccacycatccccaccgtgcagctcttccttccctcccagctcagtgagcaacgtgtgaacct

SEQ ID NO: 56931 - DNA, 599 bp, Chicken  19866894312133_2
  misc_feature (1)..(153): n is any nucleotide
nnnnnnnnnnnnnnnnnnnnnnnnnnnnnnnnnnnnnnnnnnnnnnnnnnnnnnnnnnnnnnnnnnnnnnnnnnnnnnnnnnnnnnnnnnnnnnnnnnnnnnnnnnnnnnnnnnnnnnnnnnnnnnnnnnnnnnnnnnnnnnnnnnnnnnnnncccccaccccccccagaaggcactgaggacaggggacagccagggcacagcctggagccctgcccaggtcaacacggggacgttttgtttgcttcacatcccctatttttccaagtcttgaactcccaatgactcatcttyggcttyatgccgttctccttcccatccttacaggttctccaggtctgatcccagtgcttgggaacagggacacacagtggggtgtttccatgcctgcccccgacttatttacccagcaaatgcccaagcacagagtttgctccctggmtcatcctgycacaccaggaccaacactggggttagggatcagggctccccatagctcarggggtgctctgggggcagtcagtgctgagcccacycatccccaccgtgcagctcttccttccctcccagctcagtgagcaacgtgtgaacctctgaga

SEQ ID NO: 56932 - DNA, 599 bp, Chicken  19866894312133_3
  misc_feature (1)..(11): n is any nucleotide
nnnnnnnnnnncccccaccccccccagaaggcactgaggacaggggacagccagggcacagcctggagccctgcccaggtcaacacggggacgttttgtttgcttcacatcccctatttttccaagtcttgaactcccaatgactcatcttyggcttyatgccgttctccttcccatccttacaggttctccaggtctgatcccagtgcttgggaacagggacacacagtggggtgtttccatgcctgcccccgacttatttacccagcaaatgcccaagcacagagtttgctccctggmtcatcctgycacaccaggaccaacactggggttagggatcagggctccccatagctcarggggtgctctgggggcagtcagtgctgagcccacycatccccaccgtgcagctcttccttccctcccagctcagtgagcaacgtgtgaacctctgagacctcaacaactccaccaggttcagctgggaccagaaagaagcaccggagtcgcaacgaggcaatgacagacaaggggactgcacagaggccgagccttttggacaccaggcacgcaacccgagggrcatttcatccccaraa

SEQ ID NO: 56933 - DNA, 599 bp, Chicken  19866894312133_4
  misc_feature (1)..(2): n is any nucleotide
nncccccaccccccccagaaggcactgaggacaggggacagccagggcacagcctggagccctgcccaggtcaacacggggacgttttgtttgcttcacatcccctatttttccaagtcttgaactcccaatgactcatcttyggcttyatgccgttctccttcccatccttacaggttctccaggtctgatcccagtgcttgggaacagggacacacagtggggtgtttccatgcctgcccccgacttatttacccagcaaatgcccaagcacagagtttgctccctggmtcatcctgycacaccaggaccaacactggggttagggatcagggctccccatagctcarggggtgctctgggggcagtcagtgctgagcccacycatccccaccgtgcagctcttccttccctcccagctcagtgagcaacgtgtgaacctctgagacctcaacaactccaccaggttcagctgggaccagaaagaagcaccggagtcgcaacgaggcaatgacagacaaggggactgcacagaggccgagccttttggacaccaggcacgcaacccgagggrcatttcatccccaraagagctgacc

SEQ ID NO: 56934 - DNA, 600 bp, Chicken  19866894312133_5
agcctggagccctgcccaggtcaacacggggacgttttgtttgcttcacatcccctatttttccaagtcttgaactcccaatgactcatcttyggcttyatgccgttctccttcccatccttacaggttctccaggtctgatcccagtgcttgggaacagggacacacagtggggtgtttccatgcctgcccccgacttatttacccagcaaatgcccaagcacagagtttgctccctggmtcatcctgycacaccaggaccaacactggggttagggatcagggctccccatagctcarggggtgctctgggggcagtcagtgctgagcccacycatccccaccgtgcagctcttccttccctcccagctcagtgagcaacgtgtgaacctctgagacctcaacaactccaccaggttcagctgggaccagaaagaagcaccggagtcgcaacgaggcaatgacagacaaggggactgcacagaggccgagccttttggacaccaggcacgcaacccgagggrcatttcatccccaraagagctgacctggctgcaggaaaaccacagggagcaacgccaaggagcaactccagcgaga

SEQ ID NO: 56935 - DNA, 600 bp, Chicken  19866894312133_6
tttgtttgcttcacatcccctatttttccaagtcttgaactcccaatgactcatcttyggcttyatgccgttctccttcccatccttacaggttctccaggtctgatcccagtgcttgggaacagggacacacagtggggtgtttccatgcctgcccccgacttatttacccagcaaatgcccaagcacagagtttgctccctggmtcatcctgycacaccaggaccaacactggggttagggatcagggctccccatagctcarggggtgctctgggggcagtcagtgctgagcccacycatccccaccgtgcagctcttccttccctcccagctcagtgagcaacgtgtgaacctctgagacctcaacaactccaccaggttcagctgggaccagaaagaagcaccggagtcgcaacgaggcaatgacagacaaggggactgcacagaggccgagccttttggacaccaggcacgcaacccgagggrcatttcatccccaraagagctgacctggctgcaggaaaaccacagggagcaacgccaaggagcaactccagcgagaggaaagacctcggagagcagcggcatcccacccgc

SEQ ID NO: 56936 - DNA, 600 bp, Chicken  19866894312133_7
agagtttgctccctggmtcatcctgycacaccaggaccaacactggggttagggatcagggctccccatagctcarggggtgctctgggggcagtcagtgctgagcccacycatccccaccgtgcagctcttccttccctcccagctcagtgagcaacgtgtgaacctctgagacctcaacaactccaccaggttcagctgggaccagaaagaagcaccggagtcgcaacgaggcaatgacagacaaggggactgcacagaggccgagccttttggacaccaggcacgcaacccgagggrcatttcatccccaraagagctgacctggctgcaggaaaaccacagggagcaacgccaaggagcaactccagcgagaggaaagacctcggagagcagcggcatcccacccgccttccccaaaggattctgccggggggttctgcctcctcggagcctaatgtcacagggagagcgctttccttgacttaaccttgacagctcaaagcaaaataactcccaaatcatttctaaagggacataatagagacaatcaaatggccgctgttcagaagctgcgattatgcctcgcagcgtgaactc

SEQ ID NO: 56937 - DNA, 600 bp, Chicken  19866894312133_8
ggmtcatcctgycacaccaggaccaacactggggttagggatcagggctccccatagctcarggggtgctctgggggcagtcagtgctgagcccacycatccccaccgtgcagctcttccttccctcccagctcagtgagcaacgtgtgaacctctgagacctcaacaactccaccaggttcagctgggaccagaaagaagcaccggagtcgcaacgaggcaatgacagacaaggggactgcacagaggccgagccttttggacaccaggcacgcaacccgagggrcatttcatccccaraagagctgacctggctgcaggaaaaccacagggagcaacgccaaggagcaactccagcgagaggaaagacctcggagagcagcggcatcccacccgccttccccaaaggattctgccggggggttctgcctcctcggagcctaatgtcacagggagagcgctttccttgacttaaccttgacagctcaaagcaaaataactcccaaatcatttctaaagggacataatagagacaatcaaatggccgctgttcagaagctgcgattatgcctcgcagcgtgaactccgcgaagcatttaa

SEQ ID NO: 56938 - DNA, 558 bp, Chicken  19866894312134_1
acagaactcagctttggagcaccaaacagacttctgtggctccaaacattcatctgtcttcttatctctttgtttttctgctctagcttattaatagtccatgcagaaatccaccactgaaactgtcagtggaacaacgttgatgcactgagtccaaatccagatctagtctttgatgccagctgcttgtggattttacccagtgtaaacccaaaacgttaagatgaactcttcctgcatctttgtaccttacctgcaatcctttatcatgaccaatggaaggctcatctccccaaagamacattcaggcagaccacattccctttcccaaatccttccttgcagagtacaggtgggaagttctgcctttaagtacaaatcatggttcttccctcctacaatgctcccaggaaggagtactgggactttcattaacgcatttctactaaattcagaatgtaagagaaaatgttcacttctatgcacttctactcatttgtcattttctgttccttgtgtctttggatcttctgtgaccaaacacattcattaccccaa

SEQ ID NO: 56939 - DNA, 544 bp, Chicken  19866894312136_1
ttctcttatttcagtctacgttagctcaaatggtataacattgatagtttaatagacgtcataattccaaagataacaaccatcgtaatgttttcagccagactaatgttgcaaaatcttaacttcttctgggtgacaagtatgatttttagcagcttgattatgtttttaaaagaaagttgcaaattttgcacagatagccaccctaattacacttgcttaaatgggagcaccaaagaaagtacacaacagaaaatgttattccattctcgtgaactcaaatttctatacattcatacraaagatggctgcaaccttattttaaaccaatatgctcgtacaccttctctttctgtatctagggggacaacagaggaaatgcactgaacatgacaaccacagctcataaatcaggacatttggccatttccccaagttgacagagacagatgtcagtttatttggtttggtctgacgaagtctccctgagagaataaattcatattaggagcatcagggaaacaacaaaaaaggagcaaataaa

SEQ ID NO: 56940 - DNA, 448 bp, Chicken  19866894312140_1
acactgttttggcatattaatcatagaaagtccaaagttggaagagctccacaattctacaatttttttagtgctttaagaccttgcagaagatgaatatgtattctgatgtactgaaatgtcagataggtgagcaagaatcctgacagcttagcagatactgtgtttgggagtgctatactttgcaagcatatatatatttttaacataactatagatgaacgattcagatagtctatgtctttctgtgggaatcgtagaatcatagaatctcaaggttggaaaggacctataagatcwttaagtccaactgtgctctcattacccttgctactacaagccactaaaccatatctcggagctcctcatctggacgcctcttgaacactgccagggacagcgactccaccacctccctgtgcgggccattccagtgcctgaccactct

SEQ ID NO: 56941 - DNA, 600 bp, Chicken  19866894312141_1
tgagatgactatgttttgcaaagtaaccagttctccttggtacttttcagcttctttgaataactttcagcccattttttaagacaagtttgctttaaagggaaaaaaaagtcttcaagtcatatgatgcatgcaacttgtcttttcttgatggagaaaaaaaagtgaggaactttttgcccataaaaatccctgccaggaagattagtggttactgcacagatctgttagtttggaaagttgggatgtattcctgagaatgttgctggctatgtagatgaccttggagaagttgatggrctggcagtgagctgacctttcgaatgagccaagcctgctcgtctgcattttgatggaagagggggtgttttctcctgggttttgttatcgtggctgtttccaactttactgggaagtcccacagacagagcagcttggctgtgctggtccttttgcagcactgcatgaagcacggggccgggggcacctcatgtgggcttgagaacctcagaggaacctggaaggcatgtggtcctgcccaacaaaccacttacacggacatttccaagagctgctgagactctggcatgtggatctctg

SEQ ID NO: 56942 - DNA, 600 bp, Chicken  19866894312146_1
gaatcttcagggatgagacagtgtaggaccatcaccacttgggaggatgatagtgcaatggttatgggctgtgctctcacataaacccatggagagccttgaggagaaagggaaggaggtttctgcagtccactgatgctctcatgggaccagaggccctcttttccagtagtttgcagctttcctcacatatcctgtccactagaaacacctgatcaacccccaagaccccacataatgtggagtttgaggagcagcccccctcctctgacacctcttgctctcctagagaggaaacaytgcctgacagtggatttatcatttctcagctggcttttagaacacagaaaagccaggaaccccaccaacaactgaatatcaacagcaagtatgattaaatgagatacaggcagctgaggcatcatcttatttttactsctgcatacccttatattagcagctgagcatttttggttgcaaaataacatttaaaactcttcacagggagaaattcatggcttagcagctaagctgacatagtgaaggtctgccaagtgtttgggagtttgaaatgcagtaggcacaactttgcaatgataa

SEQ ID NO: 56943 - DNA, 600 bp, Chicken  19866894312146_2
ctctcatgggaccagaggccctcttttccagtagtttgcagctttcctcacatatcctgtccactagaaacacctgatcaacccccaagaccccacataatgtggagtttgaggagcagcccccctcctctgacacctcttgctctcctagagaggaaacaytgcctgacagtggatttatcatttctcagctggcttttagaacacagaaaagccaggaaccccaccaacaactgaatatcaacagcaagtatgattaaatgagatacaggcagctgaggcatcatcttatttttactsctgcatacccttatattagcagctgagcatttttggttgcaaaataacatttaaaactcttcacagggagaaattcatggcttagcagctaagctgacatagtgaaggtctgccaagtgtttgggagtttgaaatgcagtaggcacaactttgcaatgataaaagaaagcttctttttttactttttctcagcctgtcagaggatacagtcttcactcttcctaggagtcagctgggataaagtgcctccaacagttaatgtttcttacagcgtagtcattccacctctgatctctctgc

SEQ ID NO: 56944 - DNA, 600 bp, Chicken  19866894312147_1
aattccctgtactacatacccttcatcattagggcccaaaggctctttacacacataatgtgatgcacaaatgcacaaacattttctaggaatacacaaaccaatacttgcatgacaatctggcagaggaagaagcagagcaagctatttccacatgaaatatgataggaagaatgcaactattgtggctgaacagttcagtagaacagtagagagatgaagccatggcttcacgcagaccaagcacatcaaagaaatgtgtacagaactcttgaggcagaacctgtccttgggggcacygacactcaattcatagccattaaacctcacagcaggcataaaaagtgcatgttacaggatagagattccataggaatgagtccctgaaaatgatggtggacagagataaaaaccaggaaccatccacaaagactctacatggagaacaggcgcaggaatcaccacccttgtagttcagtgcaatgaaaaagggtgagctgtgatcttgatggatggttttctggagataaaccaatcccaatggccaggttagaaggtcagacaacaccccagtggtcctcaggggttcagtgcactcct

SEQ ID NO: 56945 - DNA, 599 bp, Chicken  19866894312152_1
  misc_feature (1)..(64): n is any nucleotide
nnnnnnnnnnnnnnnnnnnnnnnnnnnnnnnnnnnnnnnnnnnnnnnnnnnnnnnnnnnnnnnnaaaaataacaggcatcagcattctgtgtcattgtttgaggctgatgccctagtttgctgtctcagattcattttaagaggtcaatagatactcacataactctactacccagaccagatgacgtatgtgaaccccacattgcctcaattgctgctgtccagtgatctggaggagtgaaaaggttcttggacattctttctctactatgatgttagatgtgtgggtttcagagctaytcatttagaatcagtttcctcacagagaacttagctgaacctaaaagctggtgagccagctggaaaggaggctggctaattgcccagatgctcttttacttattgttacttgtttgtactgtagcagagccaaagagtcttcatctggaacccagctaggagcaattaacaaccacatctgagggatggggaggagacagagatgaaattaagtcttctaccaattatgccaattgagttgctcacctcagtaagttcactgcaccaccagcactttgccyagtgctgctcacacaggc

SEQ ID NO: 56946 - DNA, 600 bp, Chicken  19866894312152_2
gtgtgggtttcagagctaytcatttagaatcagtttcctcacagagaacttagctgaacctaaaagctggtgagccagctggaaaggaggctggctaattgcccagatgctcttttacttattgttacttgtttgtactgtagcagagccaaagagtcttcatctggaacccagctaggagcaattaacaaccacatctgagggatggggaggagacagagatgaaattaagtcttctaccaattatgccaattgagttgctcacctcagtaagttcactgcaccaccagcactttgccyagtgctgctcacacaggctttcagcatgtgagaggcacaagaaacactctgctgcgtgtgagctgctgaacagggactgagcctgaaggtgggattctttctatacttgtacaaagaccatctctacaaaatacatattaaattacaaagaaaaagcacactttctggtatttacatacagtcaaatacatacatgatccctcttatcaggtctacagacactactgcaacattttatcctctacttcttttatccatttgtgtaacgttacaacgttcaggagtgcaattagcaaatgc

SEQ ID NO: 56947 - DNA, 599 bp, Chicken  19866894312155_1
  misc_feature (1)..(5): n is any nucleotide
nnnnnaattttgtagtagtttttccaactcctggagaatgtcatggttctaacagacatttctatggctagctatgttgtctgctgtgaatccatgaaaatacaaaggcgtgtccaaaaagatgttaatccatttcatagcagaaagaatctgaagacgtttccaagcattagaggtaatttttggactttaacagagcattggcctgttgcaatttgaacgttcattaggaaaggtgaagatggggtcacagggaggtatgataagtaacagaatattacttgtttttcttttacagcrtgccagcagtcttgtatgacatcatcttaaagtaacaatctgatttttgtttgctaaaacatatgatatatcgcattaaccggaggctaaatgataagaaaggattcgttcttttccacatgtgttttatttaaaataacattgtagaaaacagaaaagtggaaaagaattaattcaggtttaacgtgctacgtgctcaattttaatttcattaaatttaaacattgtccaagtctactttaagagatttaattgaagagaaacttgacttttcagaaatctgtgttactgaaatttca

SEQ ID NO: 56948 - DNA, 599 bp, Chicken  19866894312156_1
  misc_feature (1)..(76): n is any nucleotide
nnnnnnnnnnnnnnnnnnnnnnnnnnnnnnnnnnnnnnnnnnnnnnnnnnnnnnnnnnnnnnnnnnnnnnnnnnnngctgactctagtagtaccatttcaagtgggaaaacgctagcttggacctgaagcatatcagagcacataaaaatatatagaagcatctctaaaacaactgaaaaatttgggggatttattttccattcagttttgcatgagaatggggaaagactcacagtgaataacagcatttaggcaacgaatgatcattactacagtgtggctagagaagggaagatggkgagtgatgttgcctcagcatggatgaagattgatagagagattcacaatgagtgaacttaggatcacagaatagaatcactaaggttggaaaagacttctaagatcatccaatccaaccgtccacctatcaccaataacttaaaactcttcctctgcttagaaatgatcgaaagcaaggacaggaggaaatctctgttgttcacttccttgcaagctgcttagtagtttgaatcccagcaaaactgcccaaatccaccccatgtaagagactgaacatccagcccagatccagctacac

SEQ ID NO: 56949 - DNA, 600 bp, Chicken  19866894312158_1
tatcaaacaggaattcaagaaaagcaagtctggatactccaccccaaaatacaagtcattgttacactgaaaggccaagtgcattacaccaatgtatatgtttggcattcctatagcttcacatgtccatgagatgcttgctttaagaggctggtattgatacacttctgcagttcctttactggaaagttcctgtacttataagcaaggctgtgagctgtaatctattaatgaagaaagagttatgcttcttttaaggtttacatctcaaaaactgccatgggatcaggaaatactctsacaccactgctaactgactgaaagtcacaatattttcattagaggaaaagaaagaatagatattgggattaaaaagaatctgaacttaagtctttctgaaattactcaataaagcgtgttacgattttagttctccttgtgcatggtagctrtgggcagacctgcagttagtattttgccagatgtaaagtaattcagagatttacacrtctcaaactgtcatatatgaccacttcttcactcagagtggatgaagattgacttaagcaagctttgtatttcctatagcctcaagtccca

SEQ ID NO: 56950 - DNA, 600 bp, Chicken  19866894312158_2
ggtattgatacacttctgcagttcctttactggaaagttcctgtacttataagcaaggctgtgagctgtaatctattaatgaagaaagagttatgcttcttttaaggtttacatctcaaaaactgccatgggatcaggaaatactctsacaccactgctaactgactgaaagtcacaatattttcattagaggaaaagaaagaatagatattgggattaaaaagaatctgaacttaagtctttctgaaattactcaataaagcgtgttacgattttagttctccttgtgcatggtagctrtgggcagacctgcagttagtattttgccagatgtaaagtaattcagagatttacacrtctcaaactgtcatatatgaccacttcttcactcagagtggatgaagattgacttaagcaagctttgtatttcctatagcctcaagtcccagactacatctgttttctttgatacacaaaaccagagttaaaatagctccatttatcacagcatgattgtaggcagacaaaccagcctgtctgcttccagatagtgaaaacaactgttattaatcacaattacaagacaaatactaaaataaa

SEQ ID NO: 56951 - DNA, 600 bp, Chicken  19866894312158_3
gctgtgagctgtaatctattaatgaagaaagagttatgcttcttttaaggtttacatctcaaaaactgccatgggatcaggaaatactctsacaccactgctaactgactgaaagtcacaatattttcattagaggaaaagaaagaatagatattgggattaaaaagaatctgaacttaagtctttctgaaattactcaataaagcgtgttacgattttagttctccttgtgcatggtagctrtgggcagacctgcagttagtattttgccagatgtaaagtaattcagagatttacacrtctcaaactgtcatatatgaccacttcttcactcagagtggatgaagattgacttaagcaagctttgtatttcctatagcctcaagtcccagactacatctgttttctttgatacacaaaaccagagttaaaatagctccatttatcacagcatgattgtaggcagacaaaccagcctgtctgcttccagatagtgaaaacaactgttattaatcacaattacaagacaaatactaaaataaactgcaccagtattttcttttaacacccccgcccccaacagactgattatagcagggc

SEQ ID NO: 56952 - DNA, 600 bp, Chicken  19866894312160_1
gatagtcacacaaactgtcacaatgcagaggataaccagaaccaacatcataaagccataaacatagtagatcttgtaagcccagaatgaagtaaaaatgaaatacctgcagagagtaaataaaatatgcagataatattgcaattcgacttaacttactgtttttaatcaaatgggcaaatagctgtcaaactcacatttcaataaaaattgatccaaaggggaggattccacctaggcaaacaataacagctggttccatgaacctgaaagatattaagactagtttagggacaatartaatatttctaraaatatattgcaacatataattaggtactttataaagcccagaaaattatttaaaggcatgctaasaagaatacgtctcataccagtatattagaaagaaggcatccccaaggatgttgtatatgggtagaatgacaagccattcttagggaaacatgaaacaaatgtaagactcacaccaatctacaagcatagaggcatgcatctaagcagccttaacagctactgaaagaatttctctcgccaggaaaaggcctaagcaatcaaaccccacaacatccaccagcc

SEQ ID NO: 56953 - DNA, 600 bp, Chicken  19866894312160_2
aactgtcacaatgcagaggataaccagaaccaacatcataaagccataaacatagtagatcttgtaagcccagaatgaagtaaaaatgaaatacctgcagagagtaaataaaatatgcagataatattgcaattcgacttaacttactgtttttaatcaaatgggcaaatagctgtcaaactcacatttcaataaaaattgatccaaaggggaggattccacctaggcaaacaataacagctggttccatgaacctgaaagatattaagactagtttagggacaatartaatatttctaraaatatattgcaacatataattaggtactttataaagcccagaaaattatttaaaggcatgctaasaagaatacgtctcataccagtatattagaaagaaggcatccccaaggatgttgtatatgggtagaatgacaagccattcttagggaaacatgaaacaaatgtaagactcacaccaatctacaagcatagaggcatgcatctaagcagccttaacagctactgaaagaatttctctcgccaggaaaaggcctaagcaatcaaaccccacaacatccaccagcctcaaatgaagtc

SEQ ID NO: 56954 - DNA, 600 bp, Chicken  19866894312160_3
agcccagaatgaagtaaaaatgaaatacctgcagagagtaaataaaatatgcagataatattgcaattcgacttaacttactgtttttaatcaaatgggcaaatagctgtcaaactcacatttcaataaaaattgatccaaaggggaggattccacctaggcaaacaataacagctggttccatgaacctgaaagatattaagactagtttagggacaatartaatatttctaraaatatattgcaacatataattaggtactttataaagcccagaaaattatttaaaggcatgctaasaagaatacgtctcataccagtatattagaaagaaggcatccccaaggatgttgtatatgggtagaatgacaagccattcttagggaaacatgaaacaaatgtaagactcacaccaatctacaagcatagaggcatgcatctaagcagccttaacagctactgaaagaatttctctcgccaggaaaaggcctaagcaatcaaaccccacaacatccaccagcctcaaatgaagtcattaaaactcagtgctgttgctgacaacagatactgcaaatacccaaatgaaaattccacagggtc

SEQ ID NO: 56955 - DNA, 600 bp, Chicken  19866894312175_1
cctatcacctttgctttcagaagagaacaggctctagaattatgaaatagaagttcattgctcatttttgatcctgagttatttcttttctgaacttctcatctgatttgtctgtaactgaggctggaaagagagtccaggtggatccttgaaggacctactggcatgtaaaacgacaggactttctggggaaatttagattgggaaaagacctttggttaagccttctcaaacattacagggttgattacagttttgaagagctggtctccacagtccaaggtactttatttgtgtgaygttggtgaggagagttaacctcaaactagaccctcagtctcaatgaaagtcaataggtcttcagttcttctcggccacttggtttcttaggtctttttttttaaagcctctataatgcttattttcattttaaattcttttgaaatgaaacagaaggacctttgaaaactggtgctctttctttttttagactgtgtggaccagtacattttgtacatcaggctaaataaatacattaatttgtttcagcccatgtgtttcagggttcctcatgtcttacgctctgctaatgtccctgaa

SEQ ID NO: 56956 - DNA, 600 bp, Chicken  19866894312181_1
cagggcagtgttttatccaaccaacaggctctcttcccctggtctttcactggcccttctctgtatgtttcccgattgaagtttttgagcaaaggtatccatagtttattttagatgaaattttaactgatatcttatgcagtggcactgctacttccatcacctggtgcacgctaggatagcatctctcacatatgaatttagctgataactggtaatacttttgcaagcaaccaaaatcccagcttcatcttccacagttgctgtcaactcatattcccatgccatgtcctgaggcaygtggtttccttcttctgygctcctctgttccaaactatttcatcctcttcaggaagttcayatgtgccraaaacagaatttaagcaactggagtatgtcgtgaaagtctgacagttgatgcaattctaaccttacgaaaagcagcagttaattttttacagttctcgatataatttgtatctgtcgttactagaaacaccacgtgacctcacatttcatagtctttttttttttttttttttggtagtcaaaggaagctcagccgattctgataatacgaagtatctaaaacaaatgctt

SEQ ID NO: 56957 - DNA, 600 bp, Chicken  19866894312181_2
aaccaacaggctctcttcccctggtctttcactggcccttctctgtatgtttcccgattgaagtttttgagcaaaggtatccatagtttattttagatgaaattttaactgatatcttatgcagtggcactgctacttccatcacctggtgcacgctaggatagcatctctcacatatgaatttagctgataactggtaatacttttgcaagcaaccaaaatcccagcttcatcttccacagttgctgtcaactcatattcccatgccatgtcctgaggcaygtggtttccttcttctgygctcctctgttccaaactatttcatcctcttcaggaagttcayatgtgccraaaacagaatttaagcaactggagtatgtcgtgaaagtctgacagttgatgcaattctaaccttacgaaaagcagcagttaattttttacagttctcgatataatttgtatctgtcgttactagaaacaccacgtgacctcacatttcatagtctttttttttttttttttttggtagtcaaaggaagctcagccgattctgataatacgaagtatctaaaacaaatgcttgcattccaaaaaaagcaa

SEQ ID NO: 56958 - DNA, 600 bp, Chicken  19866894312181_3
tgtatgtttcccgattgaagtttttgagcaaaggtatccatagtttattttagatgaaattttaactgatatcttatgcagtggcactgctacttccatcacctggtgcacgctaggatagcatctctcacatatgaatttagctgataactggtaatacttttgcaagcaaccaaaatcccagcttcatcttccacagttgctgtcaactcatattcccatgccatgtcctgaggcaygtggtttccttcttctgygctcctctgttccaaactatttcatcctcttcaggaagttcayatgtgccraaaacagaatttaagcaactggagtatgtcgtgaaagtctgacagttgatgcaattctaaccttacgaaaagcagcagttaattttttacagttctcgatataatttgtatctgtcgttactagaaacaccacgtgacctcacatttcatagtctttttttttttttttttttggtagtcaaaggaagctcagccgattctgataatacgaagtatctaaaacaaatgcttgcattccaaaaaaagcaatattgcctactgatatatttcaagtgaattttaagtaagtttt

SEQ ID NO: 56959 - DNA, 600 bp, Chicken  19866894312181_4
tcccgattgaagtttttgagcaaaggtatccatagtttattttagatgaaattttaactgatatcttatgcagtggcactgctacttccatcacctggtgcacgctaggatagcatctctcacatatgaatttagctgataactggtaatacttttgcaagcaaccaaaatcccagcttcatcttccacagttgctgtcaactcatattcccatgccatgtcctgaggcaygtggtttccttcttctgygctcctctgttccaaactatttcatcctcttcaggaagttcayatgtgccraaaacagaatttaagcaactggagtatgtcgtgaaagtctgacagttgatgcaattctaaccttacgaaaagcagcagttaattttttacagttctcgatataatttgtatctgtcgttactagaaacaccacgtgacctcacatttcatagtctttttttttttttttttttggtagtcaaaggaagctcagccgattctgataatacgaagtatctaaaacaaatgcttgcattccaaaaaaagcaatattgcctactgatatatttcaagtgaattttaagtaagttttctataatt

SEQ ID NO: 56960 - DNA, 600 bp, Chicken  19866894312184_1
tttctctcttgtaagtatttcagtgggttctggtgtcttggctctgaaaacaagactggtttgtttcttcatatgggaagcaaatggttttatttatttactgttaattgaaatacaatgtatatataaagaaatcattatgtttttgaagcagttgccttgtgggtttctgtgttagtcttaaccaccagcctactgaagttacacggagcaaaacaaggctgaggtttaactgaggaaacttcatcccctctgggcatcagaactactgcttttttgctgttttcttacttccatctrtgtgaactctcagctcactgcacagggggaaatgggagatgaatgtgtactttttcttcctaagtaaaagtgttattgtaggaaaagaagagagtcattttgtctctaaagctgtgtttgctctgcagacactaagggagaatccagggagagtttttgtttttgtgatcagcagatggggcttgtgcaacctggttacacagaagctccttttttcagtggcctttgaaaagtgaagatcgctgtcttaaaagctgctagtttgtgattttggtgtaatttgaaattaaaacacttttt

SEQ ID NO: 56961 - DNA, 600 bp, Chicken  19866894312185_1
aaggtgaaaaaaacgttcagcccatgtgacttctttttattatggccgtgataccttccagctcagacggccgattggtgcttgttgagggcatggccgtgatttgtaatcttttcaaatatgatgaccaaggggatgaggtaccaggaaataagaaatgacctgcggctttaaagctgaagggaaatatggtcttcatcctgtttttgctcctgcacctggaattttaaaattaaggccactggagtgcagttcaccagctttataatctgttttgcaaggtggctttcagtcccattyttctgttgttactgaaacactgtttaaacctcagttcactgcggtaattaaggatgtgcygaagtccagtgacttgctgactgcagttaaactgcatctatttaattgtcttcttactagwaacctctgtagtgaagctttgcagctactgtgctaactgttactaatagagcagtgattggattttatgagctctatttattctagcacttttggctactggattttggatttgatagtctgttagtggttgtgtgtacagaaggaagaatttttttgtcttctcactgatgatgcttt

SEQ ID NO: 56962 - DNA, 600 bp, Chicken  19866894312185_2
gctcagacggccgattggtgcttgttgagggcatggccgtgatttgtaatcttttcaaatatgatgaccaaggggatgaggtaccaggaaataagaaatgacctgcggctttaaagctgaagggaaatatggtcttcatcctgtttttgctcctgcacctggaattttaaaattaaggccactggagtgcagttcaccagctttataatctgttttgcaaggtggctttcagtcccattyttctgttgttactgaaacactgtttaaacctcagttcactgcggtaattaaggatgtgcygaagtccagtgacttgctgactgcagttaaactgcatctatttaattgtcttcttactagwaacctctgtagtgaagctttgcagctactgtgctaactgttactaatagagcagtgattggattttatgagctctatttattctagcacttttggctactggattttggatttgatagtctgttagtggttgtgtgtacagaaggaagaatttttttgtcttctcactgatgatgctttggcttctgctttgcttggttcctgctagtttctttagtgttcagcttaggggcagaattg

SEQ ID NO: 56963 - DNA, 600 bp, Chicken  19866894312185_3
tgatgaccaaggggatgaggtaccaggaaataagaaatgacctgcggctttaaagctgaagggaaatatggtcttcatcctgtttttgctcctgcacctggaattttaaaattaaggccactggagtgcagttcaccagctttataatctgttttgcaaggtggctttcagtcccattyttctgttgttactgaaacactgtttaaacctcagttcactgcggtaattaaggatgtgcygaagtccagtgacttgctgactgcagttaaactgcatctatttaattgtcttcttactagwaacctctgtagtgaagctttgcagctactgtgctaactgttactaatagagcagtgattggattttatgagctctatttattctagcacttttggctactggattttggatttgatagtctgttagtggttgtgtgtacagaaggaagaatttttttgtcttctcactgatgatgctttggcttctgctttgcttggttcctgctagtttctttagtgttcagcttaggggcagaattggcagaactgttgtgaagttattgttagatgctgatttcttccctggcaaccctgcactttt

SEQ ID NO: 56964 - DNA, 495 bp, Chicken  19866894312193_1
gggtgattcaagtccacttatctcagacacctctctcagaggggctgaaatatccctatctctttccacagtgtggagataggggtgaagccaacaactgagaaaagaattggaacttgcagacaggaagaattagcagaagtgcatttggcctcgggaaccctgttcagaacctctgcaggctcaggtgaagacttggctacgttgtgtctcaatgatttccaaccagctatacagatgcaagccttttcctttgagtgcaaatgagatcacccttgcaccactttccatttgacttaytgcctctccttcctgcagaattatagaatcattaaggttggaaaagaccactaagatcatcaagtccaactgtccaccagtattgcccactaaccatgtccctcaataccacatctccgcatttcttgaacaccttcagggactgttttcaccatctccctgggtagtctgttccaatgcattaccacccttttg

SEQ ID NO: 56965 - DNA, 600 bp, Chicken  19866894312194_1
aattagcccctggcttttgtggaaggctgggtttccacctccaagtactgtgtgccagcagcagcttcacagccctgctggtgggtgacttgttacaacctgatgtattcacaagactttccccaaaagcctttttttaaaaaaacaattctactgcttgggaaagttgtttggaaagacttggaaagatatttgatataaatatcagggattctggagatgaggaatggcatgctgcttttaacggtgcttgagactgactactgccttgcttctaaggcaaggcttggtccgaccccrttttgtgtctctggggttgatcctgtcacaygtaatgtggatctccacgattttggacagctatgtaaggctacagtaaatgtctttgtaaactctgattagatcaaaatgatgtttgtgctgtgtgtgacagttcttgtggtgacttgatgaaccgaaggctttgtttccacagacaggctccttgctatctctggtttggctgattaacaaatacatttagtaactggaaaaatatgttgctgctttgctgatgtgttgattcatttgatgtatttaaaaaacaacaacaacaaaaac

SEQ ID NO: 56966 - DNA, 600 bp, Chicken  19866894312194_2
tttccacctccaagtactgtgtgccagcagcagcttcacagccctgctggtgggtgacttgttacaacctgatgtattcacaagactttccccaaaagcctttttttaaaaaaacaattctactgcttgggaaagttgtttggaaagacttggaaagatatttgatataaatatcagggattctggagatgaggaatggcatgctgcttttaacggtgcttgagactgactactgccttgcttctaaggcaaggcttggtccgaccccrttttgtgtctctggggttgatcctgtcacaygtaatgtggatctccacgattttggacagctatgtaaggctacagtaaatgtctttgtaaactctgattagatcaaaatgatgtttgtgctgtgtgtgacagttcttgtggtgacttgatgaaccgaaggctttgtttccacagacaggctccttgctatctctggtttggctgattaacaaatacatttagtaactggaaaaatatgttgctgctttgctgatgtgttgattcatttgatgtatttaaaaaacaacaacaacaaaaacaaacaacaaactgatttgcctgtccaaacta

SEQ ID NO: 56967 - DNA, 600 bp, Chicken  19866894312195_1
aggttcttttgctaccatttccaaaagacaataaatcatgtaacccctttttggagaaaatgggaagctaacagaaaaagaaaacaaaacataaaactagaaaaataaccgagaatgtttactgctaaacatcccataaattattgtgtatgtaatgtagggtgcacataatgttttttcttccatgcgtaacataatcatgcaataggctcaatccagacaatttccttctctaccatccttctcaacatttttattttgatctatgataaaattatgtttgattgtatctctgttcargagctttcaagtaattaattgtatttaagtaatgtggatcttaggacaaacacaagcaaaatataagtcttgggcaagtggaaaaagtctctttaataggaaactctgaagctggtgatcagttttgaatatacacattcccaaatagctgatactctgtgtcaaaccctagccctatacggccaaaattcaatgcaaaatattttgctaaaaggaaagacatttggtgtttaagtagatttaggaggttcctttacctcaagctgagctgtctttttggtatgggtctcagtcttggtt

SEQ ID NO: 56968 - DNA, 600 bp, Chicken  19866894312202_1
ttttattactaactctgagaaaagaacttgactaggactgtgtgtatacaattttagaaaaccttgttatttgtatgttctcccattacgtcttaccatcatatgcacaataaagatgcacccttagttgtaaattacactctggtaggtacactatgcataactcagcatatacgtattgactccacaaaataactctaagcacattagtgggtttctctgaaaagtagaactatagtgaaaaagttgtaagtgtgttcatacttccataacatctgatgatctgtggtttctaaacaygagttctastgcaagcataatccttatcaaatctcaatgatattgtatgaatcttaacccaggcattccagttttataagttaattataaaaacactacactacattgtaatcctttgagcataactgacttaaatactgaaaataatacatgcataacacttttaaacataaccagagaaaagcagttcttcaatatttcttttacaaatggtataaaaaggaattactgtaaaatataccattacactagggtaatgactatataacatggtacttgcatacatacttagggtaaaca

SEQ ID NO: 56969 - DNA, 600 bp, Chicken  19866894312202_2
taactctgagaaaagaacttgactaggactgtgtgtatacaattttagaaaaccttgttatttgtatgttctcccattacgtcttaccatcatatgcacaataaagatgcacccttagttgtaaattacactctggtaggtacactatgcataactcagcatatacgtattgactccacaaaataactctaagcacattagtgggtttctctgaaaagtagaactatagtgaaaaagttgtaagtgtgttcatacttccataacatctgatgatctgtggtttctaaacaygagttctastgcaagcataatccttatcaaatctcaatgatattgtatgaatcttaacccaggcattccagttttataagttaattataaaaacactacactacattgtaatcctttgagcataactgacttaaatactgaaaataatacatgcataacacttttaaacataaccagagaaaagcagttcttcaatatttcttttacaaatggtataaaaaggaattactgtaaaatataccattacactagggtaatgactatataacatggtacttgcatacatacttagggtaaacagctgatttc

SEQ ID NO: 56970 - DNA, 600 bp, Chicken  19866894312205_1
ctgttgtctttataattatgcttttgtctatgagtatggggatgtctgggttcaagggatcagcactaggagggaaaggcatacctgcatgtgtggagcctcactgcctggagcagctgtgtggagtgaggtctgcatttgaacatcaaagactggaaagtatttcatcaatgtgtggcagctgtaaaactgtgtgccagtgttcaacgcacctctcacttctgggaatctgatcagcaggtttatctgtagtaatgactcttattcaaacgtactttaccttggaacttggcttccacygaggctgtaaagcacaggaggaagcacgtgtgttagttgtaaatggacttaaaaagcgaatgcttttakgtaggtacgagaagggataagttaaagcttttgtgttggmgttccaccttgagaaacaaacaagatgaactgagcccaaaaggtcaagcaactccaatagtgggaattacctcccccttgacagcaaagagttgtaaagcaatgccagcaatcatgtccggaagaaggcttttctgtgatgaaaccttgaattgttcctcttggtgtgtggtggcaactgaataaccaagg

SEQ ID NO: 56971 - DNA, 600 bp, Chicken  19866894312205_2
gagggaaaggcatacctgcatgtgtggagcctcactgcctggagcagctgtgtggagtgaggtctgcatttgaacatcaaagactggaaagtatttcatcaatgtgtggcagctgtaaaactgtgtgccagtgttcaacgcacctctcacttctgggaatctgatcagcaggtttatctgtagtaatgactcttattcaaacgtactttaccttggaacttggcttccacygaggctgtaaagcacaggaggaagcacgtgtgttagttgtaaatggacttaaaaagcgaatgcttttakgtaggtacgagaagggataagttaaagcttttgtgttggmgttccaccttgagaaacaaacaagatgaactgagcccaaaaggtcaagcaactccaatagtgggaattacctcccccttgacagcaaagagttgtaaagcaatgccagcaatcatgtccggaagaaggcttttctgtgatgaaaccttgaattgttcctcttggtgtgtggtggcaactgaataaccaaggccatttcctctcttgatgtgattgccatgagaccagtgatgctgtgtcactgtctgacagaaaggtatc

SEQ ID NO: 56972 - DNA, 600 bp, Chicken  19866894312205_3
ggagcagctgtgtggagtgaggtctgcatttgaacatcaaagactggaaagtatttcatcaatgtgtggcagctgtaaaactgtgtgccagtgttcaacgcacctctcacttctgggaatctgatcagcaggtttatctgtagtaatgactcttattcaaacgtactttaccttggaacttggcttccacygaggctgtaaagcacaggaggaagcacgtgtgttagttgtaaatggacttaaaaagcgaatgcttttakgtaggtacgagaagggataagttaaagcttttgtgttggmgttccaccttgagaaacaaacaagatgaactgagcccaaaaggtcaagcaactccaatagtgggaattacctcccccttgacagcaaagagttgtaaagcaatgccagcaatcatgtccggaagaaggcttttctgtgatgaaaccttgaattgttcctcttggtgtgtggtggcaactgaataaccaaggccatttcctctcttgatgtgattgccatgagaccagtgatgctgtgtcactgtctgacagaaaggtatccaacacacgagttcctctcacccccttcaataacagactt

SEQ ID NO: 56973 - DNA, 600 bp, Chicken  19866894312209_1
ctgctttcatttcccactccatgagaaagtcatacattttgcagtattcttaaaacattgtggaatttggaaaggcaaaagatgtgataatattttcaaacatgatttcctttaaaggcctcatttaaaaaaatgtcacggacatttctgcagttagttacagaagtttatgtcaacagcttttttatcagagctctgttttaaaagaatatgtttttcattagattgttttccttgttctcatttccatcattcccagtcttaaatcatgtccctcaacacaacgtccaaacattcctygaacacctccaggstcggtgactcyaccacctctctgggcagcccattccagtgcctgaccaccctttcagagaagtagtatttcctaacgtccagcctgaaccttccctggcgcagcttgaagctgttccctctagtcctatcactagtcacacgagagaagaggccgacccccagctcactacaaccggagaagcyccatccttcttrctccagggatgaacagccagaggtcaggctaggacccattgtgctcatcctcttgttggaggcagtgtgctgaggcagttgtacttccag

SEQ ID NO: 56974 - DNA, 600 bp, Chicken  19866894312209_2
cactccatgagaaagtcatacattttgcagtattcttaaaacattgtggaatttggaaaggcaaaagatgtgataatattttcaaacatgatttcctttaaaggcctcatttaaaaaaatgtcacggacatttctgcagttagttacagaagtttatgtcaacagcttttttatcagagctctgttttaaaagaatatgtttttcattagattgttttccttgttctcatttccatcattcccagtcttaaatcatgtccctcaacacaacgtccaaacattcctygaacacctccaggstcggtgactcyaccacctctctgggcagcccattccagtgcctgaccaccctttcagagaagtagtatttcctaacgtccagcctgaaccttccctggcgcagcttgaagctgttccctctagtcctatcactagtcacacgagagaagaggccgacccccagctcactacaaccggagaagcyccatccttcttrctccagggatgaacagccagaggtcaggctaggacccattgtgctcatcctcttgttggaggcagtgtgctgaggcagttgtacttccagtaatgctggatgct

SEQ ID NO: 56975 - DNA, 600 bp, Chicken  19866894312209_3
aaagtcatacattttgcagtattcttaaaacattgtggaatttggaaaggcaaaagatgtgataatattttcaaacatgatttcctttaaaggcctcatttaaaaaaatgtcacggacatttctgcagttagttacagaagtttatgtcaacagcttttttatcagagctctgttttaaaagaatatgtttttcattagattgttttccttgttctcatttccatcattcccagtcttaaatcatgtccctcaacacaacgtccaaacattcctygaacacctccaggstcggtgactcyaccacctctctgggcagcccattccagtgcctgaccaccctttcagagaagtagtatttcctaacgtccagcctgaaccttccctggcgcagcttgaagctgttccctctagtcctatcactagtcacacgagagaagaggccgacccccagctcactacaaccggagaagcyccatccttcttrctccagggatgaacagccagaggtcaggctaggacccattgtgctcatcctcttgttggaggcagtgtgctgaggcagttgtacttccagtaatgctggatgctttccatatggg

SEQ ID NO: 56976 - DNA, 600 bp, Chicken  19866894312209_4
ttttaaaagaatatgtttttcattagattgttttccttgttctcatttccatcattcccagtcttaaatcatgtccctcaacacaacgtccaaacattcctygaacacctccaggstcggtgactcyaccacctctctgggcagcccattccagtgcctgaccaccctttcagagaagtagtatttcctaacgtccagcctgaaccttccctggcgcagcttgaagctgttccctctagtcctatcactagtcacacgagagaagaggccgacccccagctcactacaaccggagaagcyccatccttcttrctccagggatgaacagccagaggtcaggctaggacccattgtgctcatcctcttgttggaggcagtgtgctgaggcagttgtacttccagtaatgctggatgctttccatatgggaagaaaatctagtatgggctaaaatctggtaaaaaaaacctcttctgaatcacaagtaatatatgcttttcatgttttaaytcaagagcagttggacaaaaagctctgatctcatgctgctgtggatcagaagtaaatatttacacagcatgtcaggcagctttggtatgaga

SEQ ID NO: 56977 - DNA, 600 bp, Chicken  19866894312209_5
atgtttttcattagattgttttccttgttctcatttccatcattcccagtcttaaatcatgtccctcaacacaacgtccaaacattcctygaacacctccaggstcggtgactcyaccacctctctgggcagcccattccagtgcctgaccaccctttcagagaagtagtatttcctaacgtccagcctgaaccttccctggcgcagcttgaagctgttccctctagtcctatcactagtcacacgagagaagaggccgacccccagctcactacaaccggagaagcyccatccttcttrctccagggatgaacagccagaggtcaggctaggacccattgtgctcatcctcttgttggaggcagtgtgctgaggcagttgtacttccagtaatgctggatgctttccatatgggaagaaaatctagtatgggctaaaatctggtaaaaaaaacctcttctgaatcacaagtaatatatgcttttcatgttttaaytcaagagcagttggacaaaaagctctgatctcatgctgctgtggatcagaagtaaatatttacacagcatgtcaggcagctttggtatgagaccagtgttaggg

SEQ ID NO: 56978 - DNA, 600 bp, Chicken  19866894312209_6
ccctggcgcagcttgaagctgttccctctagtcctatcactagtcacacgagagaagaggccgacccccagctcactacaaccggagaagcyccatccttcttrctccagggatgaacagccagaggtcaggctaggacccattgtgctcatcctcttgttggaggcagtgtgctgaggcagttgtacttccagtaatgctggatgctttccatatgggaagaaaatctagtatgggctaaaatctggtaaaaaaaacctcttctgaatcacaagtaatatatgcttttcatgttttaaytcaagagcagttggacaaaaagctctgatctcatgctgctgtggatcagaagtaaatatttacacagcatgtcaggcagctttggtatgagaccagtgttagggagacccaagcttggctgtcccacttgcccattttgggaggttgtcagcttccccagcaagcagagggtgagcaagacctgcagatgaataatataaccatagaatcacagattgcgttggagggacctcaaagtccactcagccacaatctcctgctgtgggcagggctgccacctaccaaccagaccaggctgta

SEQ ID NO: 56979 - DNA, 599 bp, Chicken  19866894312212_1
  misc_feature (1)..(186): n is any nucleotide
nnnnnnnnnnnnnnnnnnnnnnnnnnnnnnnnnnnnnnnnnnnnnnnnnnnnnnnnnnnnnnnnnnnnnnnnnnnnnnnnnnnnnnnnnnnnnnnnnnnnnnnnnnnnnnnnnnnnnnnnnnnnnnnnnnnnnnnnnnnnnnnnnnnnnnnnnnnnnnnnnnnnnnnnnnnnnnnnnnnnnnnnnntttttttcaagttctaggaattttaggttgtgaagaaagttgaaaccagtcacttgatctctactaaaaaaatcaactgtgaatcagtactttattatttttaagaaaatgtcrttttttttaagagtacatcagttcacagaagtcccttgtttttatgcaagtcatcccttttaattctaagtgtgtacattggttgaacactgttgcctggtacttgctaagtgggaaaggagctgggcaaaactagctccttgtccctgttaggcttctgtttcatagccgagcagaggcaaggtgggctgctgtgcacctgcaggacccacagccaggtgcccactgytgtgtgcccagctgaggggggcagtcctccaggagcttaagctgagaaatcatacccttctgctgctctc

SEQ ID NO: 56980 - DNA, 600 bp, Chicken  19866894312212_2
aaccagtcacttgatctctactaaaaaaatcaactgtgaatcagtactttattatttttaagaaaatgtcrttttttttaagagtacatcagttcacagaagtcccttgtttttatgcaagtcatcccttttaattctaagtgtgtacattggttgaacactgttgcctggtacttgctaagtgggaaaggagctgggcaaaactagctccttgtccctgttaggcttctgtttcatagccgagcagaggcaaggtgggctgctgtgcacctgcaggacccacagccaggtgcccactgytgtgtgcccagctgaggggggcagtcctccaggagcttaagctgagaaatcatacccttctgctgctctctttatttcttctataaaagcatatggtctgagaaactggggcagctgggttaaggaatccccatttatacttggtttaaaaaaaaaaaaagtaaacagtaaatggagagtagtgtaacaaacacttggggtatcaagaaacaactgtgaaaagaatctgtcttaatgtgctagcctattgcagtcgaacatattgcttacaaccttcacaatggagtttgagtgactgct

SEQ ID NO: 56981 - DNA, 600 bp, Chicken  19866894312219_1
atttgttttcacagtgtttcatgaacagaagaaaatactatacaaataaaacaaggggagttaaatacatgcaaccatcatagtaagtcaaaacttgaagaaaaacaaacagctgtaataattgtttcaatttgttggaatactcactcgcaaccacttattaatattaaataatatttcaaatacttcctatacaacctagtaggaaattccattgaatgatacttcttcatagcacttcactgcttttgatgaatgtttttaccttccacggtcaaatcaaatgttacagggttaacytgcctttcacagaacaccactatttaaatgcttgcagagaatccaagtaattttgagctaaatcctttgatttacacagctgttattatccttccaaagacagaaatttgaatttttgttcttcaataatcctacaatttctgaagtcaccgtatctatagggtttacactgcaaggtcctgttagtggggaagagccacaggagtacagtgcgcacagtgcctaacagctgacccatgtyagatcagagycagctccagatggctccaaaagagacccactgctgccagagttgagcca

SEQ ID NO: 56982 - DNA, 600 bp, Chicken  19866894312219_2
actgcttttgatgaatgtttttaccttccacggtcaaatcaaatgttacagggttaacytgcctttcacagaacaccactatttaaatgcttgcagagaatccaagtaattttgagctaaatcctttgatttacacagctgttattatccttccaaagacagaaatttgaatttttgttcttcaataatcctacaatttctgaagtcaccgtatctatagggtttacactgcaaggtcctgttagtggggaagagccacaggagtacagtgcgcacagtgcctaacagctgacccatgtyagatcagagycagctccagatggctccaaaagagacccactgctgccagagttgagccacaagcaatgctgggtgtgcctctgggagagcagattgaagraagaaactgctgcatgacagtagtggggagaaaggagtgagagaaacagccttccagtcagcaaggtcagtgtagaagtagggtaggtgttccaggtgcaaagcagaagttccctgcagcccaggagaggccctggaaggagcaggctgtcctttgcagcccatgggcaccacatggagcagatttccacacgcagccat

SEQ ID NO: 56983 - DNA, 600 bp, Chicken  19866894312219_3
atgaatgtttttaccttccacggtcaaatcaaatgttacagggttaacytgcctttcacagaacaccactatttaaatgcttgcagagaatccaagtaattttgagctaaatcctttgatttacacagctgttattatccttccaaagacagaaatttgaatttttgttcttcaataatcctacaatttctgaagtcaccgtatctatagggtttacactgcaaggtcctgttagtggggaagagccacaggagtacagtgcgcacagtgcctaacagctgacccatgtyagatcagagycagctccagatggctccaaaagagacccactgctgccagagttgagccacaagcaatgctgggtgtgcctctgggagagcagattgaagraagaaactgctgcatgacagtagtggggagaaaggagtgagagaaacagccttccagtcagcaaggtcagtgtagaagtagggtaggtgttccaggtgcaaagcagaagttccctgcagcccaggagaggccctggaaggagcaggctgtcctttgcagcccatgggcaccacatggagcagatttccacacgcagccatggaggaggtt

SEQ ID NO: 56984 - DNA, 600 bp, Chicken  19866894312219_4
tccaagtaattttgagctaaatcctttgatttacacagctgttattatccttccaaagacagaaatttgaatttttgttcttcaataatcctacaatttctgaagtcaccgtatctatagggtttacactgcaaggtcctgttagtggggaagagccacaggagtacagtgcgcacagtgcctaacagctgacccatgtyagatcagagycagctccagatggctccaaaagagacccactgctgccagagttgagccacaagcaatgctgggtgtgcctctgggagagcagattgaagraagaaactgctgcatgacagtagtggggagaaaggagtgagagaaacagccttccagtcagcaaggtcagtgtagaagtagggtaggtgttccaggtgcaaagcagaagttccctgcagcccaggagaggccctggaaggagcaggctgtcctttgcagcccatgggcaccacatggagcagatttccacacgcagccatggaggaggtttacacagtttagcaggggacacggcccaaaggagccacaacccatggagcgcccccacaagagcaatcccagacctacgctgcagcccat

SEQ ID NO: 56985 - DNA, 600 bp, Chicken  19866894312220_1
ttttgagggaactggtggatgaagttgccaagccagtatccattatatttgaaagttcacgacagtctgatgaacttctcactgactgaaaaaggggaagaataaccacattttcaagaagggaaaaaaaagagatccaaggaactacaggccagtcagtctcaccactgtgcctggcaagatcatgcagcagatcatgctgaaggccctactcaggcacacagaaaataaagatgaggtgactggtggtaaccaatgtggattcaccaagggcgagttatgcctgatgaactgagtggycttttatgatggagttacactgtcagtggataaaggaagagcacctgatgtaatctacctgaacttgtgcaaagcatttgacactcccacacaacatcctggtcaccaaattggagaaaaaaggatttgatgtgctcactggataaaattggctggatggctgcactcttagagatgcagttgatggctcaatgtccaattggagatgagtgaygagtggtgttcctcatggatctgtgctgggactggtgctgtttaacatccttgtaggtaacatggagtgtgggattgagtgcactc

SEQ ID NO: 56986 - DNA, 600 bp, Chicken  19866894312220_2
aggcacacagaaaataaagatgaggtgactggtggtaaccaatgtggattcaccaagggcgagttatgcctgatgaactgagtggycttttatgatggagttacactgtcagtggataaaggaagagcacctgatgtaatctacctgaacttgtgcaaagcatttgacactcccacacaacatcctggtcaccaaattggagaaaaaaggatttgatgtgctcactggataaaattggctggatggctgcactcttagagatgcagttgatggctcaatgtccaattggagatgagtgaygagtggtgttcctcatggatctgtgctgggactggtgctgtttaacatccttgtaggtaacatggagtgtgggattgagtgcactctcagcaagtttgcagctaacaccaagctgagtggtgcagttgccaaactagagagaaargccatcagaaggacaggcttgaraggtgrgcccatgccaaacttgagttcagtatgaccaagtgcaaggtcctgcacatggattggggcaaacccaagcacagatacaggttgagtggagaatggcttgacgtcaggcctgagaagaaggattta

SEQ ID NO: 56987 - DNA, 600 bp, Chicken  19866894312220_3
tgaacttgtgcaaagcatttgacactcccacacaacatcctggtcaccaaattggagaaaaaaggatttgatgtgctcactggataaaattggctggatggctgcactcttagagatgcagttgatggctcaatgtccaattggagatgagtgaygagtggtgttcctcatggatctgtgctgggactggtgctgtttaacatccttgtaggtaacatggagtgtgggattgagtgcactctcagcaagtttgcagctaacaccaagctgagtggtgcagttgccaaactagagagaaargccatcagaaggacaggcttgaraggtgrgcccatgccaaacttgagttcagtatgaccaagtgcaaggtcctgcacatggattggggcaaacccaagcacagatacaggttgagtggagaatggcttgacgtcaggcctgagaagaaggatttaggggtatcagttaatgaaagactcaacacgagccagcactgtatgcttgcagcccagaaggccaattgtatcctgagttgcatcaagagaagcatgaccagcagattgagggcggtaattctgccactctgctctcatgatttcc

SEQ ID NO: 56988 - DNA, 600 bp, Chicken  19866894312220_4
actcccacacaacatcctggtcaccaaattggagaaaaaaggatttgatgtgctcactggataaaattggctggatggctgcactcttagagatgcagttgatggctcaatgtccaattggagatgagtgaygagtggtgttcctcatggatctgtgctgggactggtgctgtttaacatccttgtaggtaacatggagtgtgggattgagtgcactctcagcaagtttgcagctaacaccaagctgagtggtgcagttgccaaactagagagaaargccatcagaaggacaggcttgaraggtgrgcccatgccaaacttgagttcagtatgaccaagtgcaaggtcctgcacatggattggggcaaacccaagcacagatacaggttgagtggagaatggcttgacgtcaggcctgagaagaaggatttaggggtatcagttaatgaaagactcaacacgagccagcactgtatgcttgcagcccagaaggccaattgtatcctgagttgcatcaagagaagcatgaccagcagattgagggcggtaattctgccactctgctctcatgatttcccacctggagtactgcatccactt

SEQ ID NO: 56989 - DNA, 600 bp, Chicken  19866894312220_5
acacaacatcctggtcaccaaattggagaaaaaaggatttgatgtgctcactggataaaattggctggatggctgcactcttagagatgcagttgatggctcaatgtccaattggagatgagtgaygagtggtgttcctcatggatctgtgctgggactggtgctgtttaacatccttgtaggtaacatggagtgtgggattgagtgcactctcagcaagtttgcagctaacaccaagctgagtggtgcagttgccaaactagagagaaargccatcagaaggacaggcttgaraggtgrgcccatgccaaacttgagttcagtatgaccaagtgcaaggtcctgcacatggattggggcaaacccaagcacagatacaggttgagtggagaatggcttgacgtcaggcctgagaagaaggatttaggggtatcagttaatgaaagactcaacacgagccagcactgtatgcttgcagcccagaaggccaattgtatcctgagttgcatcaagagaagcatgaccagcagattgagggcggtaattctgccactctgctctcatgatttcccacctggagtactgcatccacttctaggg

SEQ ID NO: 56990 - DNA, 600 bp, Chicken  19866894312228_1
ggctccctgcagagcccctcctcgctcccctggatccgcagccggcacctgcggggatcactttgcattgctccgatttgcaactcaatttctgagttttccctgaagaaaagctatagtacatcttagtgagcaacattaatacacagcgttcacctactgaaagtaagacaaggggaccggaatgtattaaagccatgtattagacaacaccaaagttataaattcatgtggatgtgccgcaggtcagactccgggaacagttaatacatcttggctgacctaaacatagtaaatctyacctccaccaacactattttctcggtaagttacaacccctttctcttactttggcatagagtaygcagcttactttcattaaacaatcacatgttttcaagcacagcctgaattaaacttcgctatgagctgacaagaactgcatttaccaggcgtgaactcagagtgccaatccgaggacaaacacaaatgctgccatcatgtgatattattatgattggatcaactctcgatgaaacacttactgcagcctgtgcctgcagtccatgccaacgagcagcacgacgcagcggagcactg

SEQ ID NO: 56991 - DNA, 600 bp, Chicken  19866894312228_2
gcattgctccgatttgcaactcaatttctgagttttccctgaagaaaagctatagtacatcttagtgagcaacattaatacacagcgttcacctactgaaagtaagacaaggggaccggaatgtattaaagccatgtattagacaacaccaaagttataaattcatgtggatgtgccgcaggtcagactccgggaacagttaatacatcttggctgacctaaacatagtaaatctyacctccaccaacactattttctcggtaagttacaacccctttctcttactttggcatagagtaygcagcttactttcattaaacaatcacatgttttcaagcacagcctgaattaaacttcgctatgagctgacaagaactgcatttaccaggcgtgaactcagagtgccaatccgaggacaaacacaaatgctgccatcatgtgatattattatgattggatcaactctcgatgaaacacttactgcagcctgtgcctgcagtccatgccaacgagcagcacgacgcagcggagcactgggcaaatcctccccccacacaggagctctccagacaggaacacgccaacttgtacctaccacga

SEQ ID NO: 56992 - DNA, 600 bp, Chicken  19866894312242_1
gcacacggagggctttgtagaacaaagggacccccaaacgatgccatgggaatagatatcgccctgctgcaggaacgggaaaacgaggatgatgaaggaggtgttcccaccctgatggcagattgcgggttgctcaacagcgagcggggaagcacctgcagcctttgaagggaaaaggacggctgagtggattttccgtttatttacccctcggagataaggggagggctgtgctctcgcactgcggtaacctcgagcggggaggggaggaatggggctgagccgctgccccgtcggacmccctgccccgattccacatctccaatccacatcgcggcggcggggaaacaaagcgcgtctgtgtcccctctccgtcattagagggtcatttgcgcgagctgttaagcgctgggagagggcggccgtgctgctaacccccggcggggggcagacacccgtggtctgggctctgcgctctgcctgcaatgggccccacttcattcctcccttcctttgcattctaggaatgtgctctcaaatactgagagggccagcgtctctcccttgcctgccagctccctgccctctgcccctcgcagc

SEQ ID NO: 56993 - DNA, 600 bp, Chicken  19866894312244_1
cctgtgcatttatgcacatagatggtgactcaactgcttcagataaaagggtcttcccaaattgctgtctgatatgggagaggggagaaatttagcaagcaatgctcagtgtgatgcaaaattaaagaagtagcaaaatagcaattctaactaccctcctctaaagtatcagatgcatgtattgatgcaaacaagagaacagggcttaaccagtattcactccagttatctcacagtgcataatgttggaatatctcaaaatacaattgcttttgtcctgattgggataggttttatctyggcataagcaggagtagatagtgcagtacgggtgatactgttcatggatggtaaccagcttcaacagccacctgactgtgtgatttctgcaggtccctggtcaagcagagggtaagcagaggagtaacgctgcggtttccctgcctgagctgatttactgcgctggtaagtctgtcactaataatagagcaactgaagccaaggggaactctaaggcaaagcagggatttacagtaacgagaaagcaagggtttaaagcagccagaaagagagataattgcaagttgcagcgttcttaaa

SEQ ID NO: 56994 - DNA, 600 bp, Chicken  19866894312244_2
tggatggtaaccagcttcaacagccacctgactgtgtgatttctgcaggtccctggtcaagcagagggtaagcagaggagtaacgctgcggtttccctgcctgagctgatttactgcgctggtaagtctgtcactaataatagagcaactgaagccaaggggaactctaaggcaaagcagggatttacagtaacgagaaagcaagggtttaaagcagccagaaagagagataattgcaagttgcagcgttcttaaattgtaatatcaggtgcaaagcattaaggggctaacctaacagcrtgcatccatgcagatctgcacaaaacgcttgcctgttcctcaacggttttgttggcattacctcagcaatccccaaatgcagcctgagcatagatctaatccagcaaggaaatgcttggaggtgagatctcttggcatcttgcagtggatttagaactgatctgagtaccgaaacttccgttccaaatgctttgctaagagtcccatttggacaggtgagagctttatttaccaggcagacactcctcctctgccatgcacagtctgagtttctgtatgtggtgagacagtgcaagatgt

SEQ ID NO: 56995 - DNA, 599 bp, Chicken  19866894312245_1
  misc_feature (1)..(88): n is any nucleotide
nnnnnnnnnnnnnnnnnnnnnnnnnnnnnnnnnnnnnnnnnnnnnnnnnnnnnnnnnnnnnnnnnnnnnnnnnnnnnnnnnnnnnnnntaggtgaagactgaggatcaggttgcactggtcttgtctgatacaggagtgagaatgctgacaagggagcacctacaaactctatatttatgtatgaaagacttaacggggctcagctaaccaactgtgtctgtcctaacaacaggaaaggaacataaacacgttgttagaatgtttcatctgagcagcagcaatctctagctataggaggytttttcttagagcaagctggctctcccttaagatcacataaacatgctctcagaaataagtagaatttgactcaaaccctgagagttatctaaactctaatcactgatgagacaattaagtaggggaaaagaataccatgcagtaaaaaggacttaccatttggaattgaagaatttaagagaattcaagagaagagatgagaattaggaaaggggagggagggagagaagggaagggaaagggaaaggagtggaggggaagggaggaggctcaaaattggctttttgattttgatgca

SEQ ID NO: 56996 - DNA, 600 bp, Chicken  19866894312249_1
tttgctgaatgattttaagtatactttgcataaactgaatgtaataaaagaaatattggtgtagcaggcttttgaccccaggatacttttatggtctagaatgttttgagttcttgctttttctttgtaaatttttcttctctgttgatccagataattgaggagatggtgtaaagtgtagcagaagtcaggagactttgtgttgtactcattctacaataaatctagagcgtgatctctggggtcatccatgatccctgcgttttctcttcttaaaaataagggttatgtagtctcttyggagttggatttaactcatggatttttaaaaggcaatttgataaccttactcagaatttaccaaagagcttcagactttcttaactgtctttactgccgtgatttccaagccgtttttatcttgttttggtcattgcttattctctgctgttacagtcactagatttccccgacctgcatcacctcttcaggatgtggctatcatcatcggaagccgtgaacaattggcagtactgttgcaactttacaaccatcagctagaacatgaggggaccacaggctgggagactttgctatggg

SEQ ID NO: 56997 - DNA, 600 bp, Chicken  19866894312249_2
aagaagattgggttttttaatagtttttcttaaatatcattctgtattgactttattgatattattcagaagatatcatctagctaatggaatgtatagacgatgctcactccagaaaaattttttcagcactgactaatgtagtcaattctctgttgaagagaagtttcttgtattctgattatttcattaggtattctgttcctcagtaacagatatttgaaaatttatgtcaggctttccttgcatttaaaccttgctttcttcaaggtttcggaattgtacagaacatttaggtarttttattagtagtttatatatttacttattagcatatagagtaaatcggtactaatataactgcagagaaacaaaagatgaggatagtrtctaatatccttctttttttcccactttgcaggttaccacagcttatagaaatagttggcaaaatcaatgtagcatcaactgcatgtgtccatgagttctccagatttttctggcgactttgtaggacatttgggaagatttttacaaacactaaggtaaggtaataccttaaatgttatgttttaaattttatggtatgtttgagtactc

SEQ ID NO: 56998 - DNA, 600 bp, Chicken  19866894312249_3
gaatgtatagacgatgctcactccagaaaaattttttcagcactgactaatgtagtcaattctctgttgaagagaagtttcttgtattctgattatttcattaggtattctgttcctcagtaacagatatttgaaaatttatgtcaggctttccttgcatttaaaccttgctttcttcaaggtttcggaattgtacagaacatttaggtarttttattagtagtttatatatttacttattagcatatagagtaaatcggtactaatataactgcagagaaacaaaagatgaggatagtrtctaatatccttctttttttcccactttgcaggttaccacagcttatagaaatagttggcaaaatcaatgtagcatcaactgcatgtgtccatgagttctccagatttttctggcgactttgtaggacatttgggaagatttttacaaacactaaggtaaggtaataccttaaatgttatgttttaaattttatggtatgtttgagtactcatattttgtgtgacatttgtatttatgttccataccgatgcttttccataagtactgttaaacctgatgtatttaaaccttcatgtgca

SEQ ID NO: 56999 - DNA, 599 bp, Chicken  19866894312253_1
  misc_feature (1)..(64): n is any nucleotide
nnnnnnnnnnnnnnnnnnnnnnnnnnnnnnnnnnnnnnnnnnnnnnnnnnnnnnnnnnnnnnnntgtcctttcttcccgtaacctgtccccatgaactgaagaacgtggtaagagcagctttaattgctgctcctatgagagaggctctgcaggcagcggctgtaggaattgtgcagccgccttgtgaggagaaatctgtgggctctctctcacaggaggcattactggctggggaaaaggcagagctgcagccattcactcttcgtgggctgggagacttctttcaaaagagccctgargtatttaggatttggggraaaacccttgtaccggaagaaaatggcctaaacacaataggactcgccattttctccttccaaagcacaaagcagctccgcggcttcagcaccacacaaagaaagcccggaccctctgaattctcttacattttcccccaccgtttcaaaagcctttccctctgcccgatctgctttcccaggaatgctcacatatgtaaagaaaggaagaaaggaggggagggggagaaaagcagctggctgaggagagcgtaaggcagtttttatcttggttatttaaa

SEQ ID NO: 57000 - DNA, 599 bp, Chicken  19866894312253_2
  misc_feature (1)..(46): n is any nucleotide
nnnnnnnnnnnnnnnnnnnnnnnnnnnnnnnnnnnnnnnnnnnnnntgtcctttcttcccgtaacctgtccccatgaactgaagaacgtggtaagagcagctttaattgctgctcctatgagagaggctctgcaggcagcggctgtaggaattgtgcagccgccttgtgaggagaaatctgtgggctctctctcacaggaggcattactggctggggaaaaggcagagctgcagccattcactcttcgtgggctgggagacttctttcaaaagagccctgargtatttaggatttggggraaaacccttgtaccggaagaaaatggcctaaacacaataggactcgccattttctccttccaaagcacaaagcagctccgcggcttcagcaccacacaaagaaagcccggaccctctgaattctcttacattttcccccaccgtttcaaaagcctttccctctgcccgatctgctttcccaggaatgctcacatatgtaaagaaaggaagaaaggaggggagggggagaaaagcagctggctgaggagagcgtaaggcagtttttatcttggttatttaaatcaagtcctgccggggaa

SEQ ID NO: 57001 - DNA, 600 bp, Chicken  19866894312260_1
tgccctccagacccttcagcatcctcatagcccccttttggacactctctgatagctttatgtcctccttaccttgtgacacccatagctgcactcagtgcaggaggtgaggccacacagagcagagaaggacagtcgtgcctcccacccagtggatcacattcaacttgccaacagccagatccctttctatggggctgcccagcctctcatcccccagtttgttcagatatccagggttgtcccatctcagcaacagaatctggcacttgttgaacttcatgtgtttggtcattgcgytgccctctagttttcaagatctgtctagtattcctgttgagtttgtactagcaaataytactgaaagactcttagtttagatataaataagtttgaatgggcrtacaatacatgtaagatatgtagacagcatatagacagttcctggagaaagctgagctcagcagatcagacctgtgaccttcaggggaggacagctgtgccagcagttgtcacatctaaatactcagctttattctacactttggttaggattttttttttttccagactggtgtcaccagctgacagctacctgag

SEQ ID NO: 57002 - DNA, 600 bp, Chicken  19866894312260_2
tatgtcctccttaccttgtgacacccatagctgcactcagtgcaggaggtgaggccacacagagcagagaaggacagtcgtgcctcccacccagtggatcacattcaacttgccaacagccagatccctttctatggggctgcccagcctctcatcccccagtttgttcagatatccagggttgtcccatctcagcaacagaatctggcacttgttgaacttcatgtgtttggtcattgcgytgccctctagttttcaagatctgtctagtattcctgttgagtttgtactagcaaataytactgaaagactcttagtttagatataaataagtttgaatgggcrtacaatacatgtaagatatgtagacagcatatagacagttcctggagaaagctgagctcagcagatcagacctgtgaccttcaggggaggacagctgtgccagcagttgtcacatctaaatactcagctttattctacactttggttaggattttttttttttccagactggtgtcaccagctgacagctacctgagaatggacagaagatacgtagttaccacatgtttgagacctcctgtctctacaggggtt

SEQ ID NO: 57003 - DNA, 591 bp, Chicken  19866894312260_3
gaggtgaggccacacagagcagagaaggacagtcgtgcctcccacccagtggatcacattcaacttgccaacagccagatccctttctatggggctgcccagcctctcatcccccagtttgttcagatatccagggttgtcccatctcagcaacagaatctggcacttgttgaacttcatgtgtttggtcattgcgytgccctctagttttcaagatctgtctagtattcctgttgagtttgtactagcaaataytactgaaagactcttagtttagatataaataagtttgaatgggcrtacaatacatgtaagatatgtagacagcatatagacagttcctggagaaagctgagctcagcagatcagacctgtgaccttcaggggaggacagctgtgccagcagttgtcacatctaaatactcagctttattctacactttggttaggattttttttttttccagactggtgtcaccagctgacagctacctgagaatggacagaagatacgtagttaccacatgtttgagacctcctgtctctacaggggttcagtgagggatttgtagaccatcatatccaatcttg

SEQ ID NO: 57004 - DNA, 600 bp, Chicken  19866894312262_1
gctgtatttcagaatattttttttaatgcagagcaggaataagctgcaatacttctctcccatacttctccagcctcgggatatatacacaaaatataaagcaatttgacacacatggaaacattccacaagggacttgttgttctcacaccccgatgcagtaaaatccttccaaatctctgcagacacattttgcttttgcactgctcctcagttacttatggcttgaagaagaaacaggcagaaatcatgcagctccaaacaaaaccagctcctaagaacaggcacgtttagggaggwatggaaagggtaaaacgaaagcaaggacttttccttgaagagtccaattgtgcagaaggcaatttctcttgtactgaaacaagaaaaaaggtcaaggttacgcatgtgcctctaccccagctgcctgctcaattcagagccctgttccagcactgcataaagcttttccactttgttttcattaagctgtaaagcacttcccatttccttctcatattacatacaaaagtagcactgttacaaaattacacttctatggagaaaaataatgaatacgagagaaacagagcacacaaaacc

SEQ ID NO: 57005 - DNA, 600 bp, Chicken  19866894312268_1
ctctcaaggacaaaaaaagttcgtcttcacatttaaatttctaaatgagcctggcttgtttgggaaagttcacatgggattcacagagcaaatatctcttgcaggttctgatattgcgttcatttctgtagtacctaaacactttcttctgctttaactaatattctcctgtaaggaagaaaagcttgtaaagtggagtgtttcattttccctgttttttgtctgattatttttcacatatatatgctatcacatattgatgctagagaaaaaaatgtaagattagtgaaggtgttataytcattcttcatcccctggccaccttgtgcttaatctaagcacatactatagtaagcatgtcctgaactagcgtatagatgattcttggctttcataaaaggaagacaagaaaataacgtacatcttctttacactgctctgtggacaaataacagctctaatatcggttatcgtaaaacattaactcaaaaaaggagaggtattttgaatgcaaagataggttaatagacatggttttgacatagcagaggaaaagactttaaaatcctgaaggggtgtagtatttccctgtcgagtaga

SEQ ID NO: 57006 - DNA, 599 bp, Chicken  19866894312269_1
  misc_feature (1)..(224): n is any nucleotide
nnnnnnnnnnnnnnnnnnnnnnnnnnnnnnnnnnnnnnnnnnnnnnnnnnnnnnnnnnnnnnnnnnnnnnnnnnnnnnnnnnnnnnnnnnnnnnnnnnnnnnnnnnnnnnnnnnnnnnnnnnnnnnnnnnnnnnnnnnnnnnnnnnnnnnnnnnnnnnnnnnnnnnnnnnnnnnnnnnnnnnnnnnnnnnnnnnnnnnnnnnnnnnnnnnnnnnnnnnnnnnnnatgctgttcctaaaacggatgaaaattttcacattctatttactctaaaaaccccatctctcttcacaaaagcctyatcgggaaacctccgagacgtgcagataaagaaaaacactgcctggaaacagcatctttttttttttgctttctgtgtgcaaatgagttggaatttgaatgcaagggggatttctactatctcagttatttcataatactcrgtgcttaattaacttttttttcagaacacagcattggaaagggcagttaaagtgctgggtggggtgaaagatggtcaaatgcccgcaggtgatgaatcttcccctacatgtcaaaaggctccttctgcttacttctgctgcgtactccctatgaaaa

SEQ ID NO: 57007 - DNA, 599 bp, Chicken  19866894312269_2
  misc_feature (1)..(82): n is any nucleotide
nnnnnnnnnnnnnnnnnnnnnnnnnnnnnnnnnnnnnnnnnnnnnnnnnnnnnnnnnnnnnnnnnnnnnnnnnnnnnnnnnnatgctgttcctaaaacggatgaaaattttcacattctatttactctaaaaaccccatctctcttcacaaaagcctyatcgggaaacctccgagacgtgcagataaagaaaaacactgcctggaaacagcatctttttttttttgctttctgtgtgcaaatgagttggaatttgaatgcaagggggatttctactatctcagttatttcataatactcrgtgcttaattaacttttttttcagaacacagcattggaaagggcagttaaagtgctgggtggggtgaaagatggtcaaatgcccgcaggtgatgaatcttcccctacatgtcaaaaggctccttctgcttacttctgctgcgtactccctatgaaaatacttctgctgcttctatccattgggccttcttcctgccacagagatgactgctgtatattgtataattgtataattaaaatatgcaacaaagagttgggctgtccaggcaatgcattggctataataaaacaaaacagcat

SEQ ID NO: 57008 - DNA, 599 bp, Chicken  19866894312280_1
  misc_feature (1)..(87): n is any nucleotide
nnnnnnnnnnnnnnnnnnnnnnnnnnnnnnnnnnnnnnnnnnnnnnnnnnnnnnnnnnnnnnnnnnnnnnnnnnnnnnnnnnnnnnnttctctacccaggcagcaatatctttctatgctgcagtggcccagataggcttacctctgtgctgccagttgttctgctttcattgctgtacccacccccccctatggcatttggcaccatccttgaatcagtgtagaggtagggcactggccacttctctaagcaatatctaaagacagctggatggccctcacttctatgaattgtctcarttcaccttctccttaaaaacatggttagatggcatgaagtaggtggcagtgccttattcttacatgtgtggtgcaggccactaaggcatcttccgtcctcatccagggaagtgctaaccttttcttccttcatacaacataccaggacagaagtttacacaggtacatcctcagctgctagttctgtaaataagttaataagaaaacatctgagtgatgcccagtttggtactttaagtctagtcacattcaatacatgaactattacgattatagattcataactagcacactgtccc

SEQ ID NO: 57009 - DNA, 455 bp, Chicken  19866894312281_1
ataaattaccctctgtgggagaaaacaatagaatgggaccttgactttaccagttggataaagataagtattcagactgggacaactaaagcttaggaacataatagcttgtccatcaggggcaatgttgcctattaatgttaatagcagcatatagatctcttcagtattgccattgggcttgctgggaatattgttaacaccagtgcacccatctgctattaaggaactgaaagggcaaaagtaagtgggaaagagcaaaacagaatgaggatcaacttctcagtgaagataaaattktgttatgttatttaattaagcaacattttttcaggtccgaaacaaagcaagtgtatctgcatttatgatgtgcctcctccaccaccatgccacttcttaaaacccaggactagaagagatatcatttatgctccttactaaacgttgctataaca

SEQ ID NO: 57010 - DNA, 600 bp, Chicken  19866894312286_1
cttcctgagtttttggctgttggccgtactcctaaaacaaaaggaaaggaaaaggagaacaaatacacacatgtaataacaggttgcatgatttccattcttttataatgctgtattgaatcttaaggcccgggaaggcaagaaagaacctcttcagcctgtctcaaaggccaggctcacagctgtaccatacaagtaccacacaaagagccgacacagaggttcatagcaaagtgtacaactgagagcatcacgcagaactcagaagcgtgatgcctgctgtcttccctttcccacctrtatcccaatgcaccttagaattcagcatcaacgtgttaagataaatattcgcattccatttacacaaactttccaaccagaaatgctctgcagtccttacccttactcttggaaacaagctctattttccaattcatagatgacaataacagaacagaaaccaagccctagctggtgagaagtgctctgtgctgaactctgaggggaacgacctgggaggagtccaaggtgaagcttgacagcacattaagaaaccttaagctgagacaaccacattctgccccatcctgaaccaggacc

SEQ ID NO: 57011 - DNA, 600 bp, Chicken  19866894312290_1
tgcctagcagagcaggtgccactagatggctgtcaggcaaaaggagtgcgtgcctctgggtggcattcagggcagatcgggattcaaggcaggacctctatggagtggttttgtggcagggtcttaactctcaaaaagtttaggaggtggagagagacttaatcatgatgaattgtgtttctgtgatgtgaaacattgctgttaattaaatgaacctcttggtgtggatgaaccttggtgtgtatgaagtctgatttagtaattaatacgttggagaggcagaattcccaaaggcaaaakgggcttcatcactggattatcgtgctttttttcaacttactgttataatttattttgcaccattagaagtgcatcttaaaggtactttgcaataatacaatgccttcatcttggaaggcaataacaaaatagggaagatgctgagcaagaaggggtccagcacagtgacgtggcagtggggtcctgcttgggctttggctcagacctagatggaacagagctggaacacagccattaaagactgagcacatcatctgtccatgtatgcatcacttcctcgatagactggaagagtgggag

SEQ ID NO: 57012 - DNA, 596 bp, Chicken  19866894312290_2
ggggtccagcacagtgacgtggcagtggggtcctgcttgggctttggctcagacctagatggaacagagctggaacacagccattaaagactgagcacatcatctgtccatgtatgcatcacttcctcgatagactggaagagtgggagaagatcctgaatgctgatatctgaatattggctccacaccaaagctgtgttcctgcagattcaattactctcatctgaacttctggcacatactttgatgtttcttcaataattttcttcagttagtaaaagtacacacagtgactgcatwgggagggagaccaaagcaatgttacagagatgcccttaaatcctcagatgtgaaactgcaggctataaytgggggaaggtgttagcttaaaaactatcggcaacagcacagcctatttactgatcctcctaaagcctatgaataaaacgtggatagcaactgtgcagcacaaaagacatgaaagggaagaggaagctagacctgtggcagccaatgagctgtggaaactggagtaatttcctacaggtacacccccaagtttcctgaggaaaaaccctccattaatactcgttctt

SEQ ID NO: 57013 - DNA, 527 bp, Chicken  19866894312290_3
ctggaacacagccattaaagactgagcacatcatctgtccatgtatgcatcacttcctcgatagactggaagagtgggagaagatcctgaatgctgatatctgaatattggctccacaccaaagctgtgttcctgcagattcaattactctcatctgaacttctggcacatactttgatgtttcttcaataattttcttcagttagtaaaagtacacacagtgactgcatwgggagggagaccaaagcaatgttacagagatgcccttaaatcctcagatgtgaaactgcaggctataaytgggggaaggtgttagcttaaaaactatcggcaacagcacagcctatttactgatcctcctaaagcctatgaataaaacgtggatagcaactgtgcagcacaaaagacatgaaagggaagaggaagctagacctgtggcagccaatgagctgtggaaactggagtaatttcctacaggtacacccccaagtttcctgaggaaaaaccctccattaatactcgttctt

SEQ ID NO: 57014 - DNA, 599 bp, Chicken  19866894312292_1
  misc_feature (1)..(209): n is any nucleotide
nnnnnnnnnnnnnnnnnnnnnnnnnnnnnnnnnnnnnnnnnnnnnnnnnnnnnnnnnnnnnnnnnnnnnnnnnnnnnnnnnnnnnnnnnnnnnnnnnnnnnnnnnnnnnnnnnnnnnnnnnnnnnnnnnnnnnnnnnnnnnnnnnnnnnnnnnnnnnnnnnnnnnnnnnnnnnnnnnnnnnnnnnnnnnnnnnnnnnnnnnnnnnnnnnggctcgcaaaactgaaagacaaggaaggagggactttttagaaacagagcaatgaaatttatcaaagtggttacctgaccaattttttgtrttgttttgctaataatatcagtaaggttttgtttagctaattcagaagatatagataaacagacttaattgtctataagaaataacacttctgctctcattctgattttattattcttttggtctgaggatcatgctagcagagtggagcttaagaaaacaaagactatctgcactccatttgctgcttcactttaagcagtttaaaaatatacacccagttactgtaaaacaggataagggaggagagaaaataagaccartggaaaaaaataatactgaaggacttggtattatagg

SEQ ID NO: 57015 - DNA, 600 bp, Chicken  19866894312292_2
gaaatttatcaaagtggttacctgaccaattttttgtrttgttttgctaataatatcagtaaggttttgtttagctaattcagaagatatagataaacagacttaattgtctataagaaataacacttctgctctcattctgattttattattcttttggtctgaggatcatgctagcagagtggagcttaagaaaacaaagactatctgcactccatttgctgcttcactttaagcagtttaaaaatatacacccagttactgtaaaacaggataagggaggagagaaaataagaccartggaaaaaaataatactgaaggacttggtattataggtcagtggctttgtatctcaaatgaaaataagagcttggaagattaggatgaartatagaaagggtctttatttgctatcagactagagctaagtatttgtactttaaaaaactgaattataaatggaaatgtggaattgaacactgttcagtcccttaaaagctgaccactacatgttaattaaatcataaatgcattttagaatttattttcatgcttctgtgctctcaatgtagctgcagaaatcctcagaaacagatgga

SEQ ID NO: 57016 - DNA, 600 bp, Chicken  19866894312292_3
agataaacagacttaattgtctataagaaataacacttctgctctcattctgattttattattcttttggtctgaggatcatgctagcagagtggagcttaagaaaacaaagactatctgcactccatttgctgcttcactttaagcagtttaaaaatatacacccagttactgtaaaacaggataagggaggagagaaaataagaccartggaaaaaaataatactgaaggacttggtattataggtcagtggctttgtatctcaaatgaaaataagagcttggaagattaggatgaartatagaaagggtctttatttgctatcagactagagctaagtatttgtactttaaaaaactgaattataaatggaaatgtggaattgaacactgttcagtcccttaaaagctgaccactacatgttaattaaatcataaatgcattttagaatttattttcatgcttctgtgctctcaatgtagctgcagaaatcctcagaaacagatggaaagatattccttcctcagcattcaaccttttagcatttacctgtaagttaaaatccatttataactaatgcatcgtcatttcatactagt

SEQ ID NO: 57017 - DNA, 600 bp, Chicken  19866894312296_1
ggcttccagcttgcttttccctcctgctctctccttgggagcttgcacgtgaacccccttttctgtctgttttagaacagtggaaccgctggaatattacagaagatttttggtgagtaaaaggtgatatgcgtgtacgcatcgatgcttgcagctttcttttgcgtgcatatggtctttaaacttagaatcataaaatcataaaggttagaaagacctctaagatcatctaatccagccgtccacctaccaccagtactgcccactacaccacgtcgctcggtgccttgaatgtgtccrcacgtttcttgaacgcctctgggggcggtgactgcaccacctcccgggcagccccgttctggcacctcagcactctttctgagaagaaatttcctgctaccctcccctgcagcagtttaaggccaccccctctcatcctgtcactactgtctgtaagaagaggccgacccccacctccccacaacctcctttcaggtagttgtagagagcagtaaggtctcccctgagcctcctcttctccagactgaacaatcccagctccctcagctgctccccatcaaactggtgctccagctttgt

SEQ ID NO: 57018 - DNA, 600 bp, Chicken  19866894312306_1
gggcaaaatgcaaggaagagacagcttattctcagaaattggctcacctcctctctcagactgtcccaggaggaaaaaggaccacggcctcagaggctgtacctttaaaaacactttcagtctgcaagtaatagtcgtgcttcagtgtgttcaacattttggctgagctcagtacaaagtgcagtgatttagaggtgggagatcaggcgggattcagcaaattcagaattatttatttctttagagcagaaagtctggctacagattatttactgcaaatgggtctgtttgggggagggraagaaggtgagagggtagagaggaggcaaattgatggactgaaatttttcaattaaaacaagcagtttttgaaaaagatttaaggttttattgaaaaaaaaagtaaaataattcaagagtctggagccctgctaaagtgaagatcataaagatctagggggagaagaaaagaaaatcctattctgtgtaatacaaggaggaaggaaaaaaaagtaagaaaaacatcattatctttgtttcttctgctatgttaatgtatttctctccctgagttatctccagcatctgcaagtattgatt

SEQ ID NO: 57019 - DNA, 600 bp, Chicken  19866894312314_1
gcacagcagcgctcaggacagcaggcagacagcagaggcactgcagccactccagcaaaggctgctctgctggtaccggtgggctccatgctcccttctgggcagcagcagtccctgctaatccctcccaaagcattgggtcacgtaattctttctttgaactcatttactccttggcaaaggctccttgtgccaccagaggagcattacaagaacagtgatggacgaaggactccagaaggacgctcagtgctgccaggctgggaaggaaactgtaggcaatgcactgcagggcaggargggtgtgagggcctgtgggactggacaggctgcactgtgcacccacagcttcactatgggaaacgaagggctcctggagggacacatccttcaacgcggccgtgctgccatgaacagcattcacagacattttcagcatcctgacaaaaatgaaaatttacatggaatcactgagctgaagtatgggaagcgggggaccacttaccccgacctggtttctgttgctctccttgacactgacggatttcccagtgcagacatttctcactccattaaaagtggaatccgagcggcgctggg

SEQ ID NO: 57020 - DNA, 485 bp, Chicken  19866894312314_2
acattttcagcatcctgacaaaaatgaaaatttacatggaatcactgagctgaagtatgggaagcgggggaccacttaccccgacctggtttctgttgctctccttgacactgacggatttcccagtgcagacatttctcactccattaaaagtggaatccgagcggcgctgggcattatgctcatataacccctccatgacctcagcaaagtccttcagcacagctcagattgaaatgctgacacattttctttgcctctcccctccaaggaaacccatttgctgcaacacgatgttcyagctgccccaggagcagctaaagccgtgcatgcccatgtaaagcacacaatgcagcacatcgccgccatgcccacaacaagggcatccctctgtccacagctaccagagggcagaacgaatgcatctccttgctaacgagaaataacaatgctgcaaggtgcagagagcctcgggcatcgggaaa

SEQ ID NO: 57021 - DNA, 600 bp, Chicken  19866894312317_1
gctgtagatctgagcagctctctgaaaagatgagagtgggccaatggtgtagctaccagaacaacgatgtaaccctgcaaggctagaagcctcactggacactgggtttgtgaagacagaagagcagtcagtggctgtgctctggctctgggaggaaggtagggaagatgaggaatgaattagccttagaccacttggaggagtcggcaatgaacagtgaccaggcacctgtggatttccagaggctgtaggttgagatggtaactgggaactggtacttctccggaacgtggcaccagwagcagaggaagcagcactaggagggcagcaccgaggtaatttcacttcagcatttaaagagaaggtggatttttctggcactacaaaaagacagtgagtacaytacatgagagaagctacctttgaggtccttcaggtaataacaacaaactcaagatagctctgttcatagactcactgaagacaaagtgacttcatctataagtaaaaaaaaagaggcagctctacataataaacgtcttctttcaaagcttgtcatatctagatttttccccacagaagagcagctaactcacttac

SEQ ID NO: 57022 - DNA, 566 bp, Chicken  19866894312317_2
gggtttgtgaagacagaagagcagtcagtggctgtgctctggctctgggaggaaggtagggaagatgaggaatgaattagccttagaccacttggaggagtcggcaatgaacagtgaccaggcacctgtggatttccagaggctgtaggttgagatggtaactgggaactggtacttctccggaacgtggcaccagwagcagaggaagcagcactaggagggcagcaccgaggtaatttcacttcagcatttaaagagaaggtggatttttctggcactacaaaaagacagtgagtacaytacatgagagaagctacctttgaggtccttcaggtaataacaacaaactcaagatagctctgttcatagactcactgaagacaaagtgacttcatctataagtaaaaaaaaagaggcagctctacataataaacgtcttctttcaaagcttgtcatatctagatttttccccacagaagagcagctaactcacttacactgctcaccctacagtacctcttggctttaaaagaaacgatgcagattcttccccaaaactgagcatt

SEQ ID NO: 57023 - DNA, 445 bp, Chicken  19866894312331_1
gagaaaagtacagggttggcttaagcacgtgtgatagcatcagctgtgctgttctccctgtactggaaaaggattcacgcttcccttttcccttttgtcacctgcagggtagccatgggatggaatatctttttcccttcttaccatttcctgataggggtgatgtgaatgtcacgtccccacatccagggtacggggttggcaagggatttcccctttcccataaggtggatgaggtggtgtgttctccttccgtgctttacagggctgaggaatggactccatctccttaacacactycttttttttccagggcatctttatttcccgtgtgtcagaggagggacctgcagctcgcgcaggggttcgtgttggggacaagcttctggaggtaagagcctggctgctgtgaggacataaatagttttaatgagtggaggggtgt

SEQ ID NO: 57024 - DNA, 600 bp, Chicken  19866894312333_1
gagaaggcaacctcttagggcaacctaagaagtgcacttttctcatattaagagtttttgagagagagggaaatcatcctagaatactgtaaattgtttccacttcttaatctctctctgtagtagataattgcttgcaaatagacaggatgggaataaccagctgacaggcattcagtttccaaaggaaccatatttttagcttatcataaaatgaccactgaataattgcactgctgacgtttcttgaaacttaaaggccatataaatgaccagatctatagagaatattctacacaktatacacacatgtgggaagggcaatcacaagagaagatcacaagacatcatgtcttaagtttaataacccatttaatattgcctttcaattccatttcatgctcagtaaagcaagaataactgaacctttcactgatgttggccttagatgaacagcttttgttttgatggctttggttgtaatgccttatcaaggatgacaactgccttgtagcaagggccagtgctagtgttagaggaacttttttttcagcacctgaataaggatatttctttaatggactatttttcttaactagg

SEQ ID NO: 57025 - DNA, 599 bp, Chicken  19866894312334_1
  misc_feature (1)..(59): n is any nucleotide
nnnnnnnnnnnnnnnnnnnnnnnnnnnnnnnnnnnnnnnnnnnnnnnnnnnnnnnnnnntcaacagctgggggaaaataaagaaccagagcagtgctggatgctccccatgtccctccagagaggagcttaacaaaacaacgttttaaaataatacatcctattgtgtgggttagaataagatatgaatcccacaccagaaaattataaatggacaaaagctattatgaaatgataatctagagagccacgaacacctcatctcaaatggcatttgtagttattcttggtgcaaaataartgtagttggagagagggaatttttctttacatatagtgtaaactgggctatggaacggagacactgcatggagtttagtcctgatttttttttttttcctgaatgttccctgctgagcagtgccacaattaatcaggctttctaggttttagttaattgctggaccccaataaattggtttgtactggcattggtccaggtctgataatttcacagccttggaaattgctgcatgttcacacaagaactgtgcaagtggggagctgggataaaaagaataaaagaaactcttgttctgc

SEQ ID NO: 57026 - DNA, 600 bp, Chicken  19866894312334_2
attggtccaggtctgataatttcacagccttggaaattgctgcatgttcacacaagaactgtgcaagtggggagctgggataaaaagaataaaagaaactcttgttctgcgaggttccagtaatacttacaaagccagcccactagcaacagcgtcttcactgtttgtttattttctccatgtgttttatactgattttttttttttttaacaattaagggaaatccccccttttccttactagaaacttctacagataattgctctcaatgagctatttccaatttcagcagtatcctygtggaaatttccactctacccatcctctgctgaaaactcattgtggctttttgtggaagctcagctgtcttttccctctttctgcagctttgtttgtgaggaagaatcaccaccctctggggaagaaaggctttacgcaggctggctgacccagagaggagaggagcagcgctgtgctctgggtcccacagtcccctcgtggtcrgtcgggtgctgagggaggacaacagggctgtcccacggcatgcaggcagaacgaggcagcccactgtcatggtgcattggtgctggcccggtgca

SEQ ID NO: 57027 - DNA, 600 bp, Chicken  19866894312334_3
ttttaacaattaagggaaatccccccttttccttactagaaacttctacagataattgctctcaatgagctatttccaatttcagcagtatcctygtggaaatttccactctacccatcctctgctgaaaactcattgtggctttttgtggaagctcagctgtcttttccctctttctgcagctttgtttgtgaggaagaatcaccaccctctggggaagaaaggctttacgcaggctggctgacccagagaggagaggagcagcgctgtgctctgggtcccacagtcccctcgtggtcrgtcgggtgctgagggaggacaacagggctgtcccacggcatgcaggcagaacgaggcagcccactgtcatggtgcattggtgctggcccggtgcaccagggcctgttagaagtaagcacacagtgctgttctcaaagggaacggcagctccacagccaccagttcattttacagttgggctcagttatgtgaaggactttgcgtcctcaagtctcactggtagccgtgggatttgtgaaggctcagcctccggcaggcgctggctccatgctggcacacgtttgactttgttccccccag

SEQ ID NO: 57028 - DNA, 467 bp, Chicken  19866894312338_1
agaaagtaatcctgagcatatctgttgtgtaggaactgccccaaatgtatccagcaacttctcatccagacggcaaggtttgaagtggatctgccagtgcactgaccttgactttgcccttattccaagtatatgtattgctagatgtcaacaatctaaacagaactaaaaccctaagcaaccgaaatataaacaatcaaaacaacaaatgcatttgttgtattagctgacagcacccataatgtcactggacaaatatgtaaatactgacctaaatctctttgctagagactttggatwcactttaaatgttggaatagacagcagcctgactagcctgcagcccaaccagaaacctctgtgcccacacagccccaggtgcagagctgagccatggttcctcttcctgagagctcaggcctatgggtatgctatgggaagcagggatctgtgacaggaagaggatt

SEQ ID NO: 57029 - DNA, 600 bp, Chicken  19866894312339_1
caggagaagctgctgtcttgcctagagtattctgattgatgttcaggaagaaacttcatctggttcatggaagctgtgttatcacacaaagccgttgctttggtaaagcagcagtgtagtacaagtagcatatgcagtaactggactgtgccttgacctgttggaccagcttggtgatgatctcccagggtgtggtgaaagcaaaactttggtgatccactgcatgcatttgggttgatatggttatctgcagaatggaaagctataaatacagtaacagattgctgataagttgttggkttttttttttttcccatttggagggaaaagggtatgaatatatcatcatctagttcacacagacagcgaaaacagttaatagaaagcaagtctgaagagatctaagctaatgtacctgaaggttgattgcttataagtatggcttgttgcattctagcaatattataccaatactgcgcctttcactcttgcctaaggagctctctgcagttacattcatgttatggagttgtagtttggcatcaaacacctgcagaagaacaggtaccccttttctgcagagaccctctggtgttggtg

SEQ ID NO: 57030 - DNA, 600 bp, Chicken  19866894312349_1
gtttatgaataagataggatttttattaccaaactggaaccagcactgactaaatcccactgcatttttccatctataagtggcagtcaaacatgcaaattaacgaaatgcagctagaatgatccttttttgccagttgagctccttcagcacattgtgcagaatatcagtacattaatgtgctgtgcgtgcctctacttatgaacagaacctctggcacagcaggcaggagaacacctgatagactgatatctgaccagaccacaatatctgagttttatgagtgcaggcagaacagayaatcctctctgtccttgttttaatagtttcctcagaggctgggaaactacagagaaagtaaacagcaaggtaattaaaatgtacagtgcttacttcattaccgtgggttgacagtttttttggacaaaatagtttttctctatgaagtgcttgtgatttgaacagaaaactgtctgtgagaaatagccatgtttcacaaattattttcacagtctcattaaatatttctccaaaaatccaattttgacatttttttaatatagaagctcaattttgtctcaaataaatatttcagtacat

SEQ ID NO: 57031 - DNA, 600 bp, Chicken  19866894312357_1
acgtctgcgccgaactcttcggcatctccgcgggtcactccgggctgctgcccgcacgcagtgccgggtcggacaggtaacagcaagaagtgaaaagaggaaaagcagaggagtgattcatcgctccgccctgccccacctgcggtcacatgctgcctgcacattcccagcttggctcggccattaactctttcagccggctccgctctccgcgctccgggaccccgagagctcctctaaaacatcagctctgcgctgaaatgccctctttccttccgtgcctgccgggatggcacttgkttctggggaaagaagcggctgtgccccgtgtttgagccctcctgcgccgcacgtggcggcccccgcgctgctgggagagggtcgggatgcggggagggctctgctgggtgcggggtttgcggtagggacgcggcactgcgctggcagagcgtgataggaactgggagatggattaaaaatccccccctgcgttggccaggcggtgatcgcggggaacgcggagctttttgggcaaaggagaatttcgcgaattgggatcagatgtcggaaaggaaaacgccacgggctgcgtctcgctga

SEQ ID NO: 57032 - DNA, 600 bp, Chicken  19866894312359_1
ccatgttggctggggctctaatgttgccatgatagccatatagaaaaatggcgtggaaaggaaagcttgagcgtagtcgggagttctcacagtcctgattttgtgttatttgtgtttgtgacagtatcagctttttccacataaatacccggaaggcaaaatttcattttttttctgcaaaagctccaataaacaatcgcttggtgcctgctctgcaaactgaccctcttcctgagatagaaatgtgagggctttgcttgttgtcaatgagcctgtcatggttttcaacatgttactttrcaagaaattcatttccagtgatcagcttataaacctgccataaggaagtgtgttttcacactagtctagtgtacttcttgttttcaaactctcagggacgtagaaatacaccagatttttggcagcacatggtttaaaaatcagcaccaacgtatctattgaacatctcaaatgggtaaaggaaagggcaggtttcatcaggggtcagtaaacaacgaacatctgccttgccaatcttttcttctacagttttgtgcagtcccaaaaatccttcagacatatgttgaacagagtttcaaa

SEQ ID NO: 57033 - DNA, 599 bp, Chicken  19866894312360_1
  misc_feature (1)..(164): n is any nucleotide
nnnnnnnnnnnnnnnnnnnnnnnnnnnnnnnnnnnnnnnnnnnnnnnnnnnnnnnnnnnnnnnnnnnnnnnnnnnnnnnnnnnnnnnnnnnnnnnnnnnnnnnnnnnnnnnnnnnnnnnnnnnnnnnnnnnnnnnnnnnnnnnnnnnnnnnnnnnnnnnnnnnnaaaaggcagaggtgtgtggaggtgaccagctgcagacagccctgctgcgctgcaccatcttcccttcctcccaggtaggataacctctgggtttttcatcaaggtccctcataaccatcttgaactgcagtctttrttggataaatcagcgtggggctgcacacatccacatggagatttcagctaaacagggaatcgatctggtgttgctggtgggactgggacgtgctgccttgctggctcagattttggaagagacaacacaaggaggtgccatgtggacagtaggatccatcccatgggtgtcacctcccctccatgtccctgtaccctcagcagcaaactgaaaatcctggcgctttgcaggctgataacgcctctaagggacaactggatcatagcacatcactgcatgcagacattagatactacaga

SEQ ID NO: 57034 - DNA, 600 bp, Chicken  19866894312364_1
gcaggatagtattgaaccttctaaacaaaagacaaaatgctgcctcttgcataattgccgtggttacagtggtagatggcaaccttctcagctaattaaatccttcaagaacaatataaatgttgagtactgaaagcatttactagtggctttgtttcccactcgtggactttcacaggaatgtacattcctgcgaaagagctgtatttgtgggaggcagggcttgagtcaaagtaagctaaccattcctttggtgaaccagaaatagcgttcattctagttgcatgcagccattcattraggattattttacagatactatgcaacattcctgaagtgccttaaaaaaaaaaaaaataaacagaaaaacatattgaagcctgggtacaagtttagttgtgcattgtttctccagcattttgaatcaaaagttcttgccagctatacttagccttaatctagattttagtagcctctgtaattagctatccagttcctaattactctaggagaaggccctgataaacaacatactggcaaggataaatgttttttttagtcatatttcaatttacacaagtaaaattactagtattgaaa

SEQ ID NO: 57035 - DNA, 599 bp, Chicken  19866894312368_1
  misc_feature (1)..(23): n is any nucleotide
nnnnnnnnnnnnnnnnnnnnnnngtgttttttttgctctgtgacaatcagtctgctctgtaatcctttctcatctgttacttaatgtttgtgatcagtgctgctttggttacctcctgaagtttaaactaccttgaccatttgtaacatggctagagcccatcaatacagaatattagaagctccctttcaagcagagaagttgcacattaacatatcttggatatatatggttgtatatgtgctcacatccttattttgttatttgttgtgctggaatcttgagttcaaccagttcacraggaggtctgagaacctcagcagcaacacccccatcttctgctttaacacagagccttgctcctggaaaagcaatcacatgcagcatttttagtgtgtacctggcagaggtttcagtcatttttcaaatacaaaacacttacaaaagaaaatgatacttgtttctccaacctgaattctcaygaagggaaaaacactaacctatgtatttcacatgaccagaatgctttctctaacaactaggattctgactgctgttgcaggcagtgcatctgcgtgatcttcctgcctttctyctct

SEQ ID NO: 57036 - DNA, 600 bp, Chicken  19866894312368_2
tccctttcaagcagagaagttgcacattaacatatcttggatatatatggttgtatatgtgctcacatccttattttgttatttgttgtgctggaatcttgagttcaaccagttcacraggaggtctgagaacctcagcagcaacacccccatcttctgctttaacacagagccttgctcctggaaaagcaatcacatgcagcatttttagtgtgtacctggcagaggtttcagtcatttttcaaatacaaaacacttacaaaagaaaatgatacttgtttctccaacctgaattctcaygaagggaaaaacactaacctatgtatttcacatgaccagaatgctttctctaacaactaggattctgactgctgttgcaggcagtgcatctgcgtgatcttcctgcctttctyctctggatgtgatttgggaattttcctctctttttcatgcagactttagatwttttttttcctcctttatttctttctattcttatctaaagatttggtttgttgtttggttgggtttttgtttggttaggttattttgccttgtttcttcactccttctcttatatcttctcaggtttttttcctt

SEQ ID NO: 57037 - DNA, 600 bp, Chicken  19866894312368_3
tcacraggaggtctgagaacctcagcagcaacacccccatcttctgctttaacacagagccttgctcctggaaaagcaatcacatgcagcatttttagtgtgtacctggcagaggtttcagtcatttttcaaatacaaaacacttacaaaagaaaatgatacttgtttctccaacctgaattctcaygaagggaaaaacactaacctatgtatttcacatgaccagaatgctttctctaacaactaggattctgactgctgttgcaggcagtgcatctgcgtgatcttcctgcctttctyctctggatgtgatttgggaattttcctctctttttcatgcagactttagatwttttttttcctcctttatttctttctattcttatctaaagatttggtttgttgtttggttgggtttttgtttggttaggttattttgccttgtttcttcactccttctcttatatcttctcaggtttttttccttttttacctgcttatttctttgttctcttctttattcatttgcttttgagtcgagtccgatgcagtgcaaaaccccctagcatttctgagttttagtgcccactgtatgctctg

SEQ ID NO: 57038 - DNA, 600 bp, Chicken  19866894312368_4
cacagagccttgctcctggaaaagcaatcacatgcagcatttttagtgtgtacctggcagaggtttcagtcatttttcaaatacaaaacacttacaaaagaaaatgatacttgtttctccaacctgaattctcaygaagggaaaaacactaacctatgtatttcacatgaccagaatgctttctctaacaactaggattctgactgctgttgcaggcagtgcatctgcgtgatcttcctgcctttctyctctggatgtgatttgggaattttcctctctttttcatgcagactttagatwttttttttcctcctttatttctttctattcttatctaaagatttggtttgttgtttggttgggtttttgtttggttaggttattttgccttgtttcttcactccttctcttatatcttctcaggtttttttccttttttacctgcttatttctttgttctcttctttattcatttgcttttgagtcgagtccgatgcagtgcaaaaccccctagcatttctgagttttagtgcccactgtatgctctgcaacaaggttgccctggaactaagggaagactgaattttggaatctgtaaag

SEQ ID NO: 57039 - DNA, 599 bp, Chicken  19866894312370_1
  misc_feature (1)..(19): n is any nucleotide
nnnnnnnnnnnnnnnnnnnaatcccagaagggcttttgtttgtttgtttgacaaatgaactgttaaatgtgttacttacattgctcagttctcaacctctcttgaaaaggacattcactttgcatgaactaatcatctactacatctacatgctgaacttttgagcattgctattgctgcacaaaaacataaaaaacatgcataaaatccactttgttttcccatggaaatgagattttgtgtaaataaattctgttattttttagcacgaatgatttgcagggaaaaattgtccataartaaatatgtctgtgtgaagaaaatatggcaaaaagtgttttaagaatacgttggttgctttacattttgtaatggttccagaggaagtcaagtatcctaatctgtgacactcacaaatacaaattaggtcacatgcaacaggtgacaagttttaattgaatgtcttctgtctgcaattctgacaaaaggtgaatggaaataaatgagtctggcaagacagccctgagccttacaatacccaatatctcattatttttaaacagctatctataaactgatgctgacaagccttgaacctt

SEQ ID NO: 57040 - DNA, 600 bp, Chicken  19866894312372_1
ggcataggacgtaactaggaaaaaaatcctcacagttatctcctgacttctgcaagaacttgaacaagactggaaaaactaatagaaaacaaagaaataaaaggaattaaggaaaagaaggtcacttgaaggcctgtgtgtgcattctctcatatgtaggaagggaagagagacctcattgctccctacaaatccctgacaggagatcagggtgaggtgggggtcaacctctgcccacgggtaacagcaatgtgctgtgcagtgtgaactgagctggagttgtctccacctgcatctttrctgcagttgtttccaattgcttggccacttagttctattttagtgattccttcgaaggcattttgcttgcacaggtgtcactaaagattaaggtgagagtataaggtgtattatttggagcttgtacttcccccacccccaggaagaaatgtggcccaactgtcaaagctttgcagagctggcagctaggaataaaaacatgttttaacagctcttttagtctaaagaaagccaaacagtgaaagttaaaaacctagtgaactctgactagaaagaagaagcaggtctttaaaagggact

SEQ ID NO: 57041 - DNA, 600 bp, Chicken  19866894312374_1
tatctagtctaaatccaggctcttccagtttaaagccatttccccttctcctgtcactacatgcccttccaagaagttcttccccagccttcctgtacattcctaaacataataaataaatacataaattcctaaatataactaaggattaccataatgtgcttaagaggacaaagatgaattagaattgtctcttataaacagtattcaaatttatttttaaagtacactacatacagaaatacattcagaagacagagtggacaatgacccattaggaaataaaatgttactcgaaaygtactcatatataacattgcatgaacaactctatggagagtttactacaggcaacgtttgtaacwgggataagacattcaaaatgtttcaagttctcagtgcactctcattatgactgagcacagagtatttatttcagaaaactgtatatgcatggcaatctccattcttaattccctcaattgcggatacacttcagagaaccacggactgcataatctaagctgggcaaagcaaagggaaatgtgcctgtctcttaatgctgctctgaaaatctccttcaacatcttctaagaggta

SEQ ID NO: 57042 - DNA, 600 bp, Chicken  19866894312374_2
cttccaagaagttcttccccagccttcctgtacattcctaaacataataaataaatacataaattcctaaatataactaaggattaccataatgtgcttaagaggacaaagatgaattagaattgtctcttataaacagtattcaaatttatttttaaagtacactacatacagaaatacattcagaagacagagtggacaatgacccattaggaaataaaatgttactcgaaaygtactcatatataacattgcatgaacaactctatggagagtttactacaggcaacgtttgtaacwgggataagacattcaaaatgtttcaagttctcagtgcactctcattatgactgagcacagagtatttatttcagaaaactgtatatgcatggcaatctccattcttaattccctcaattgcggatacacttcagagaaccacggactgcataatctaagctgggcaaagcaaagggaaatgtgcctgtctcttaatgctgctctgaaaatctccttcaacatcttctaagaggtacgtaattggcttgttcattcttccctccatttccaagatgcaggaaagcaaaatgttacagcctt

SEQ ID NO: 57043 - DNA, 599 bp, Chicken  19866894312378_1
  misc_feature (1)..(15): n is any nucleotide
nnnnnnnnnnnnnnnctcccagcaggagatgccttgtataacgggcagcgtggaatcaagaaacatggctcacacaataaggcaaagaactgaaatgtgtagggctgggtgatagccacttaggtgtagaaatcaggtctgtggcagaggacagcagtgtgggagcaaagcttttagcagctaggagaggcacaggccccttgtgtggctggatgtcccaggaggggaagtcatgaaacagatgagcttcttctaactcatgggtcacagtgtgggggttgtggggctgctctgttcacrsatgagctctgcacccagcagtgagtgggcacarccagtgtggctgtccagatctgtacatggtgctgctactgcctcaggagggtgaacactaatccaaaagtgttttataagcacagtcccaactgcggtggtacttagctaggattgggatgatttacactgctatgagcaatagcagtgcagatggggcacaaggcacctcttagtgctttcctgtgaggatcatatgctctctgcacactaatttccttgcagaatggatatccatcaccatcttccctgctgctcactgcaac

SEQ ID NO: 57044 - DNA, 599 bp, Chicken  19866894312378_2
  misc_feature (1)..(14): n is any nucleotide
nnnnnnnnnnnnnnctcccagcaggagatgccttgtataacgggcagcgtggaatcaagaaacatggctcacacaataaggcaaagaactgaaatgtgtagggctgggtgatagccacttaggtgtagaaatcaggtctgtggcagaggacagcagtgtgggagcaaagcttttagcagctaggagaggcacaggccccttgtgtggctggatgtcccaggaggggaagtcatgaaacagatgagcttcttctaactcatgggtcacagtgtgggggttgtggggctgctctgttcacrsatgagctctgcacccagcagtgagtgggcacarccagtgtggctgtccagatctgtacatggtgctgctactgcctcaggagggtgaacactaatccaaaagtgttttataagcacagtcccaactgcggtggtacttagctaggattgggatgatttacactgctatgagcaatagcagtgcagatggggcacaaggcacctcttagtgctttcctgtgaggatcatatgctctctgcacactaatttccttgcagaatggatatccatcaccatcttccctgctgctcactgcaaca

SEQ ID NO: 57045 - DNA, 600 bp, Chicken  19866894312378_3
tgtataacgggcagcgtggaatcaagaaacatggctcacacaataaggcaaagaactgaaatgtgtagggctgggtgatagccacttaggtgtagaaatcaggtctgtggcagaggacagcagtgtgggagcaaagcttttagcagctaggagaggcacaggccccttgtgtggctggatgtcccaggaggggaagtcatgaaacagatgagcttcttctaactcatgggtcacagtgtgggggttgtggggctgctctgttcacrsatgagctctgcacccagcagtgagtgggcacarccagtgtggctgtccagatctgtacatggtgctgctactgcctcaggagggtgaacactaatccaaaagtgttttataagcacagtcccaactgcggtggtacttagctaggattgggatgatttacactgctatgagcaatagcagtgcagatggggcacaaggcacctcttagtgctttcctgtgaggatcatatgctctctgcacactaatttccttgcagaatggatatccatcaccatcttccctgctgctcactgcaacaacataatgcttgtgaatcagcagcaagaagtaat

SEQ ID NO: 57046 - DNA, 600 bp, Chicken  19866894312383_1
gcaaggaatttgtttgctgcttatcaacaccaggcagatgtttgtccacttcaaggaaaacagggctcatcttgcataactgtgtattgggagaacaaataccttcactttttatgtctcctctttctccttctttatcctagttttgttgctgagcataatatcatatggtatgggatatccctttggataagttatcctggttttgtcactgaccagcttcttgcacagttccaattccttgctgtgtgtgagaagctgaaaaactgtgtaagcactgccctgcaacaactaaaacaktggcatgttatcatcactgttgtcatcctaaatctaaaatacagcacaatacaaacctctacaaagagagttaactttatcccagcataaaacaggacactgcctcagttctcacacctcccagggaacactttgcactttccaagaaatttaattcacccatctgtccacctctgccttgctaaaccccatgtgtccccttacaaccagagatgaccagaaaaatactacagacaaatcctctaaatccactgcctccttcagaagcactgagctaactgaatgtctaccacactgtca

SEQ ID NO: 57047 - DNA, 599 bp, Chicken  19866894312387_1
  misc_feature (1)..(59): n is any nucleotide
nnnnnnnnnnnnnnnnnnnnnnnnnnnnnnnnnnnnnnnnnnnnnnnnnnnnnnnnnnntgacacgaagcactgcatctagcctgcacaagagccagagtaatctgggaaaagctttgccggatgtgggtttaggcttagtagagttgaagctacataacaaataacagaaattgtcctctgggatgtagtattgccatcgtacaacttccacatgagcagtttcttctattaatgcctgatggagcttctgtctgacggttagcacgcagcctggccactgcgaggctcgggcttcgcktttggttttgctccagttctgtctgtagagagatctcttaggtggagttttcacaaatgatactgacacagaagcgcaagtctgattcattttctaccagattcagtctttgaagtcacaaaagcacaagtgagaacctctccttcataagccacctcctatttcttacatctggaaaaggaaaccaatctgacgcattaggcaatcttagatcattaagggtaagtttgctgacagttgtaaagggctttttggttgtttgtttttaaaatgttgaacttgccaagtgtggctcttgc

SEQ ID NO: 57048 - DNA, 600 bp, Chicken  19866894312399_1
agaagccactgaatccaaattaattcaaagaaaagacatatcaaacaccaagcaagcaggcaaacagaggcaggtgacattcccttttcttttttccatattttttctttggatctaatcaaacacaaagcttcaaatgagttgtgggatctgcctacatggaattaattgcactgccagggccattttttgagaaacacttaattaggatgatacgctgtccctgaaggggagccctaaatgctgtttttttctgctattgtcatagatttctttgagagcgtgaagacagaacccacrggggacaaggcatagttgtcttggggaagaatgaaaatgctgtaagaagcagcactgaacaggatggagatgcgggattgccccaggcgtatctttccccatgcagacaatgactaatagaagaaataaagatggcatgaatgactggtattactgcaattccttttaagtctcagtaaagctagcttcagggtctagcaatcccaatttgctgctggcagtttcatccctgatgtcttgggatccaatgcatgccagacttccaagccattcttaactgaagtgttcagcatggtgtaa

SEQ ID NO: 57049 - DNA, 600 bp, Chicken  19866894312403_1
gataactgccagtgtgaaattactgctgtgtgcttatatggctaggtttgacttgtcgtcccctacttatgaatctgttggatgtgtgttatttcaaaacaaaatctagccaagggctcagacttttcattgttgctgctctgtagcatccttctcttcatttttgttcttccactgcatttaaaagtaaatatattcaaggctattctttttgctaccttctggtatcaaactggctgttctgttgcattgttttctgctcagctgctttgaataactcctattcaagatctgtcttgytattttctccatgtgcctctgwataccccaaattaattgcacaaatacttgcaaagtattaggaaatarttgttctatagacttcaaccttgtttttttttaatgtctaatgtgacatcttaaggaaytgtakttgcaagtggacttggacagtgcatcccatatattttcattgcttcattgtcttccatttagtgtcaggatgctgagatctgtgtttaaattgggcacctgtcctacctcagctttccttctagccagacttactctgttcattctgtgttcctgccagatgtcagc

SEQ ID NO: 57050 - DNA, 600 bp, Chicken  19866894312403_2
ctgctgtgtgcttatatggctaggtttgacttgtcgtcccctacttatgaatctgttggatgtgtgttatttcaaaacaaaatctagccaagggctcagacttttcattgttgctgctctgtagcatccttctcttcatttttgttcttccactgcatttaaaagtaaatatattcaaggctattctttttgctaccttctggtatcaaactggctgttctgttgcattgttttctgctcagctgctttgaataactcctattcaagatctgtcttgytattttctccatgtgcctctgwataccccaaattaattgcacaaatacttgcaaagtattaggaaatarttgttctatagacttcaaccttgtttttttttaatgtctaatgtgacatcttaaggaaytgtakttgcaagtggacttggacagtgcatcccatatattttcattgcttcattgtcttccatttagtgtcaggatgctgagatctgtgtttaaattgggcacctgtcctacctcagctttccttctagccagacttactctgttcattctgtgttcctgccagatgtcagcctaataaaggtgcataatctat

SEQ ID NO: 57051 - DNA, 600 bp, Chicken  19866894312403_3
tgaatctgttggatgtgtgttatttcaaaacaaaatctagccaagggctcagacttttcattgttgctgctctgtagcatccttctcttcatttttgttcttccactgcatttaaaagtaaatatattcaaggctattctttttgctaccttctggtatcaaactggctgttctgttgcattgttttctgctcagctgctttgaataactcctattcaagatctgtcttgytattttctccatgtgcctctgwataccccaaattaattgcacaaatacttgcaaagtattaggaaatarttgttctatagacttcaaccttgtttttttttaatgtctaatgtgacatcttaaggaaytgtakttgcaagtggacttggacagtgcatcccatatattttcattgcttcattgtcttccatttagtgtcaggatgctgagatctgtgtttaaattgggcacctgtcctacctcagctttccttctagccagacttactctgttcattctgtgttcctgccagatgtcagcctaataaaggtgcataatctatttcaattaatgaactgcaaccttggaactattaatacatgcagaaca

SEQ ID NO: 57052 - DNA, 600 bp, Chicken  19866894312403_4
attgttgctgctctgtagcatccttctcttcatttttgttcttccactgcatttaaaagtaaatatattcaaggctattctttttgctaccttctggtatcaaactggctgttctgttgcattgttttctgctcagctgctttgaataactcctattcaagatctgtcttgytattttctccatgtgcctctgwataccccaaattaattgcacaaatacttgcaaagtattaggaaatarttgttctatagacttcaaccttgtttttttttaatgtctaatgtgacatcttaaggaaytgtakttgcaagtggacttggacagtgcatcccatatattttcattgcttcattgtcttccatttagtgtcaggatgctgagatctgtgtttaaattgggcacctgtcctacctcagctttccttctagccagacttactctgttcattctgtgttcctgccagatgtcagcctaataaaggtgcataatctatttcaattaatgaactgcaaccttggaactattaatacatgcagaacatcatggtttatggaaacaaaatctgcctgtcccaattaaaacattaagtcgagacaaat

SEQ ID NO: 57053 - DNA, 600 bp, Chicken  19866894312403_5
tgctgctctgtagcatccttctcttcatttttgttcttccactgcatttaaaagtaaatatattcaaggctattctttttgctaccttctggtatcaaactggctgttctgttgcattgttttctgctcagctgctttgaataactcctattcaagatctgtcttgytattttctccatgtgcctctgwataccccaaattaattgcacaaatacttgcaaagtattaggaaatarttgttctatagacttcaaccttgtttttttttaatgtctaatgtgacatcttaaggaaytgtakttgcaagtggacttggacagtgcatcccatatattttcattgcttcattgtcttccatttagtgtcaggatgctgagatctgtgtttaaattgggcacctgtcctacctcagctttccttctagccagacttactctgttcattctgtgttcctgccagatgtcagcctaataaaggtgcataatctatttcaattaatgaactgcaaccttggaactattaatacatgcagaacatcatggtttatggaaacaaaatctgcctgtcccaattaaaacattaagtcgagacaaatctggt

SEQ ID NO: 57054 - DNA, 599 bp, Chicken  19866894312414_1
  misc_feature (1)..(232): n is any nucleotide
nnnnnnnnnnnnnnnnnnnnnnnnnnnnnnnnnnnnnnnnnnnnnnnnnnnnnnnnnnnnnnnnnnnnnnnnnnnnnnnnnnnnnnnnnnnnnnnnnnnnnnnnnnnnnnnnnnnnnnnnnnnnnnnnnnnnnnnnnnnnnnnnnnnnnnnnnnnnnnnnnnnnnnnnnnnnnnnnnnnnnnnnnnnnnnnnnnnnnnnnnnnnnnnnnnnnnnnnnnnnnnnnnnnnnnnnttactttgtcacagttaaacttaccaagatgttttttatagtttgaatcaatgtgtttttttttttcmcgtttctctcattacaggctgaaaattacctgactaaactctttccacttttgttggtgtcatagttcatactgaaaagtaaacatgttttctgcaactaacagcaatgacttggggatgttgctgagtaacaagatgaatgcctacccacctgttttgtaaatggccactgctcagaccaactctatatttagagatcatatctagattttgtgctttttttttgtgtgtgtgtgattgtgactttaaaatttgataacatgacatgcatatcaagttgcattgggccgtgctgcctt

SEQ ID NO: 57055 - DNA, 442 bp, Chicken  19866894312415_1
tgcattatagaattagcaggaaaataaaaataagtatgaatgaaactactgatgttttagaaaattatgtagaaaataaagggtagcttaataattctttctttcatatgctactccagattctttccagacagaattttggctatctcttgtctgttaatctacttctccgattaattctgttagtatactgaaaataaatccaatagagatgcctaaaggtgttaacttcttatactttgcacactggagggaagttgttaccctgttcttcatagtctgatggtgtctcgctccaayttaytggagagagatgaggttctttgatgtgtgtatacccagcatgagattaagaaacaacggttcaaatgttggtccgaccagtttattacaaatcctagtcattcacggagatggggaaggggagaagggcgatagaaaa

SEQ ID NO: 57056 - DNA, 438 bp, Chicken  19866894312415_2
ttatagaattagcaggaaaataaaaataagtatgaatgaaactactgatgttttagaaaattatgtagaaaataaagggtagcttaataattctttctttcatatgctactccagattctttccagacagaattttggctatctcttgtctgttaatctacttctccgattaattctgttagtatactgaaaataaatccaatagagatgcctaaaggtgttaacttcttatactttgcacactggagggaagttgttaccctgttcttcatagtctgatggtgtctcgctccaayttaytggagagagatgaggttctttgatgtgtgtatacccagcatgagattaagaaacaacggttcaaatgttggtccgaccagtttattacaaatcctagtcattcacggagatggggaaggggagaagggcgatagaaaa

SEQ ID NO: 57057 - DNA, 600 bp, Chicken  19866894312418_1
tatttaattcattatttttggaactggaagttgctcagagatggctggtggagcatgatgtcttcctttgtaacaagagatacttatgcagcttgatggagaggataagaaggggctctctgctctcatgtgggatcagagttgtggtggctgcctgtgtggactccaggtgtgtggggtatgttgcccatgactgggtacactgtcagtaggtaactgttcatgttgtgtcttgataaaattttcaaatatgatgtgtcatacagctggtgggtgacataacttgtagttattcttatkctgtataggatctggaggctaaaatggtgcaggatgtcaaggtcttcagggaagtatttttggagttcagttttcttctaggctggcatttttaatgtcaagtttactggcttaagttcaagttgtaggacaaatcctggatgctatagcttgaaggatgaatgaatgtatccttttctgggataggagaccttgaggttttcctctgcraaaagaggatttgtatctattatttccctgatgaaagatttatttttgtaaarattattgttaagaaagaacacaactgcatcctgcctg

SEQ ID NO: 57058 - DNA, 600 bp, Chicken  19866894312418_2
aggtaactgttcatgttgtgtcttgataaaattttcaaatatgatgtgtcatacagctggtgggtgacataacttgtagttattcttatkctgtataggatctggaggctaaaatggtgcaggatgtcaaggtcttcagggaagtatttttggagttcagttttcttctaggctggcatttttaatgtcaagtttactggcttaagttcaagttgtaggacaaatcctggatgctatagcttgaaggatgaatgaatgtatccttttctgggataggagaccttgaggttttcctctgcraaaagaggatttgtatctattatttccctgatgaaagatttatttttgtaaarattattgttaagaaagaacacaactgcatcctgcctgttgttttactaaccaatttctatgggcatctgtccttgttaaacacacttgggagttaaggggagaggaaaaggaaagattgcattgatcctgaatgctgtgtgcctgtaaattgtttctgkaaggagtcatttcatgtgacagataggaactaaccgtaacctttgtaattggttgctcactgattgttctcaggagatgcatgttttt

SEQ ID NO: 57059 - DNA, 600 bp, Chicken  19866894312418_3
cagctggtgggtgacataacttgtagttattcttatkctgtataggatctggaggctaaaatggtgcaggatgtcaaggtcttcagggaagtatttttggagttcagttttcttctaggctggcatttttaatgtcaagtttactggcttaagttcaagttgtaggacaaatcctggatgctatagcttgaaggatgaatgaatgtatccttttctgggataggagaccttgaggttttcctctgcraaaagaggatttgtatctattatttccctgatgaaagatttatttttgtaaarattattgttaagaaagaacacaactgcatcctgcctgttgttttactaaccaatttctatgggcatctgtccttgttaaacacacttgggagttaaggggagaggaaaaggaaagattgcattgatcctgaatgctgtgtgcctgtaaattgtttctgkaaggagtcatttcatgtgacagataggaactaaccgtaacctttgtaattggttgctcactgattgttctcaggagatgcatgttttttataggaggaagggacttgccttcaattcatttatagtgtgcaaacaaagttc

SEQ ID NO: 57060 - DNA, 600 bp, Chicken  19866894312418_4
ttgtaggacaaatcctggatgctatagcttgaaggatgaatgaatgtatccttttctgggataggagaccttgaggttttcctctgcraaaagaggatttgtatctattatttccctgatgaaagatttatttttgtaaarattattgttaagaaagaacacaactgcatcctgcctgttgttttactaaccaatttctatgggcatctgtccttgttaaacacacttgggagttaaggggagaggaaaaggaaagattgcattgatcctgaatgctgtgtgcctgtaaattgtttctgkaaggagtcatttcatgtgacagataggaactaaccgtaacctttgtaattggttgctcactgattgttctcaggagatgcatgttttttataggaggaagggacttgccttcaattcatttatagtgtgcaaacaaagttcagggtttatccaaaggaggttggaaaaagtggtggggaaatgttcacagcttaagttctcttctgaggagggctagagagagatgattgatttttttttttttttttttacttaatacctaccaatgcacagaacattagaaaatgtaagtttgaagac

SEQ ID NO: 57061 - DNA, 600 bp, Chicken  19866894312420_1
ccctctgctttgctgggtgatgtgaaaaagaatctcaagcactctcaataaaccccaacaaagtctgtgagttcctcacttccatctgctgccttaatccctgctgcatctcacagcaaagcttacaggcaatacctggcaatgttttgcttctgaaccagttcctgtcttctggccacagcctccatggattctggttggagaaagccatatccttaaaggaaagggggaaaaaaatccttagtctttttcctcaagcaaacacacaatccccaaagccatgcagaagcactataaaargcttttcaagactcaaactgtgtgctttgccaggaagccagaatgacttaaagttaatttaaatactgtctgtgttcattgcttccatgggaatatgcaggagaagcaygaagcctgcaccgggtgtgtagttaggtgcacctgccattgtctgtaaaggaaagggacagcagggctgtgctgcaggcaatgcttcactacctgggcctgggtagatgcggttggacagcaggttgggcatgctgctgtgctgtgggaccgtgggccccaggtgggatgcgatatgaatttgtckcgggt

SEQ ID NO: 57062 - DNA, 600 bp, Chicken  19866894312420_2
ctcacagcaaagcttacaggcaatacctggcaatgttttgcttctgaaccagttcctgtcttctggccacagcctccatggattctggttggagaaagccatatccttaaaggaaagggggaaaaaaatccttagtctttttcctcaagcaaacacacaatccccaaagccatgcagaagcactataaaargcttttcaagactcaaactgtgtgctttgccaggaagccagaatgacttaaagttaatttaaatactgtctgtgttcattgcttccatgggaatatgcaggagaagcaygaagcctgcaccgggtgtgtagttaggtgcacctgccattgtctgtaaaggaaagggacagcagggctgtgctgcaggcaatgcttcactacctgggcctgggtagatgcggttggacagcaggttgggcatgctgctgtgctgtgggaccgtgggccccaggtgggatgcgatatgaatttgtckcgggtcggctgtggccgtcatttcagttgaaggtaacaaatctctgaaagagaaacatacattcagacgcaggaagggcattctttagttaataataatctaagatttgtatgt

SEQ ID NO: 57063 - DNA, 600 bp, Chicken  19866894312420_3
aaaargcttttcaagactcaaactgtgtgctttgccaggaagccagaatgacttaaagttaatttaaatactgtctgtgttcattgcttccatgggaatatgcaggagaagcaygaagcctgcaccgggtgtgtagttaggtgcacctgccattgtctgtaaaggaaagggacagcagggctgtgctgcaggcaatgcttcactacctgggcctgggtagatgcggttggacagcaggttgggcatgctgctgtgctgtgggaccgtgggccccaggtgggatgcgatatgaatttgtckcgggtcggctgtggccgtcatttcagttgaaggtaacaaatctctgaaagagaaacatacattcagacgcaggaagggcattctttagttaataataatctaagatttgtatgtactcaaggacagcacatgactctttgttctgtatctgcagtattgctgtagagaggcgttgcagaatacctgtctaccagccgaggctcgaactgggaggggatcgcttgcattctctgctgggctgtgcccatcagctgagggttcactgccattagctggttcctcatgagcatctcctgtcgc

SEQ ID NO: 57064 - DNA, 600 bp, Chicken  19866894312425_1
gaatgatctctataaatctagatgtcttaaaaaaaaagaagagtcacttctatgtattttgtcagtttgtctgaagaaagtataaataaaaaaatctgtaggatacctacttaatattacattctacttatcagtagatcacactgaacagtaaacatgaggcccggaagaacaaaaaacagcactgtgtggggaacacccactcacctgctgtactgccacattataaaggaaatatctgttcactgatcaaacacattacatagcctggcccaataaacacttaaacacttaatttcytaagcgttctcctctcacataaactaaggttaagtttggaccagtgttgttgtgtttctgttaacaagagtactatttgtgcagcagttttcctcaactctgccactttacaatgacctacagagagtgcattgcaaatgggtagatatggaaaacaaaactcaacaccacccaaccaaacaccttgcacctgaaatgggtgcagctgcttttgttcggggaagacagaatagtcagttattccataaaacaagtttgctttttattgtggaagcaaaaagtaatcatttgccattcata

SEQ ID NO: 57065 - DNA, 600 bp, Chicken  19866894312429_1
tcacggtgcccccctatgggcaccattggcttccactggacatgggaagcaccggttgtgttcaaaaccaagggaaaaagcagaaaagtctattagacatcatacatttaaccaattctgacttgaccggaatccaataaaatgcagttcatacaacatttttattgctaattggtttgactcttaaaatttaaatgcatgaagttactttaatgacagacagagtggaccttgttaacctttaaaagggccttaattcatttatatactcctaaaatgctttgcacttctctggtgcayggcccctgctgccttggccagctgccgggtgagtgtgtcagcagtgcatccctcggcacgggctgttcgcacgcggtgcaggctcagctccgagcagctccagccagagccacgcaggcagcagctgggtgccctctccaggctgcacaggaggagatgggggtccagcagagccccagctcccatgtgcagcctgccctagacgcacagttccacactgggcttccatccaagtccctcttccaaccataaaacccatgtgaagcagaagctctgccagctccagtggctttactccgc

SEQ ID NO: 57066 - DNA, 599 bp, Chicken  19866894312441_1
  misc_feature (1)..(85): n is any nucleotide
nnnnnnnnnnnnnnnnnnnnnnnnnnnnnnnnnnnnnnnnnnnnnnnnnnnnnnnnnnnnnnnnnnnnnnnnnnnnnnnnnnnnncagttctcagtgacattttcaaagaattagtaggatttggcagtacagcaatgctgcaaaaccctctgaggattaacagtgatctattgaggcaagaaattaggaagtgctgagaaagctgctgagacccacagtgactgcagctctttccacgtggtcttcctgggctgaatgtgctgttactgctccacaaccagcagcacagtgcgggcacragctggcaccagagacttctcagggmtcatcactgctcayatttgctctcacctcctccagggctgtccagccccactgctctgctccatcctgcaaacacagttactcctgagaacagaccaagacccctcctgcatccttccatgcctgcccagtcaggtcatcatgcttttttaattctgttggaagacagaattgtaatctttcagcctgtgatggctgggaaggtgttgtgccaggccagcagggaagaggtgatgcacagctgccccattttagcactttgcacaagaaatat

SEQ ID NO: 57067 - DNA, 599 bp, Chicken  19866894312441_2
  misc_feature (1)..(59): n is any nucleotide
nnnnnnnnnnnnnnnnnnnnnnnnnnnnnnnnnnnnnnnnnnnnnnnnnnnnnnnnnnncagttctcagtgacattttcaaagaattagtaggatttggcagtacagcaatgctgcaaaaccctctgaggattaacagtgatctattgaggcaagaaattaggaagtgctgagaaagctgctgagacccacagtgactgcagctctttccacgtggtcttcctgggctgaatgtgctgttactgctccacaaccagcagcacagtgcgggcacragctggcaccagagacttctcagggmtcatcactgctcayatttgctctcacctcctccagggctgtccagccccactgctctgctccatcctgcaaacacagttactcctgagaacagaccaagacccctcctgcatccttccatgcctgcccagtcaggtcatcatgcttttttaattctgttggaagacagaattgtaatctttcagcctgtgatggctgggaaggtgttgtgccaggccagcagggaagaggtgatgcacagctgccccattttagcactttgcacaagaaatatgccagaggaggaagcaagtgtagcag

SEQ ID NO: 57068 - DNA, 599 bp, Chicken  19866894312441_3
  misc_feature (1)..(45): n is any nucleotide
nnnnnnnnnnnnnnnnnnnnnnnnnnnnnnnnnnnnnnnnnnnnncagttctcagtgacattttcaaagaattagtaggatttggcagtacagcaatgctgcaaaaccctctgaggattaacagtgatctattgaggcaagaaattaggaagtgctgagaaagctgctgagacccacagtgactgcagctctttccacgtggtcttcctgggctgaatgtgctgttactgctccacaaccagcagcacagtgcgggcacragctggcaccagagacttctcagggmtcatcactgctcayatttgctctcacctcctccagggctgtccagccccactgctctgctccatcctgcaaacacagttactcctgagaacagaccaagacccctcctgcatccttccatgcctgcccagtcaggtcatcatgcttttttaattctgttggaagacagaattgtaatctttcagcctgtgatggctgggaaggtgttgtgccaggccagcagggaagaggtgatgcacagctgccccattttagcactttgcacaagaaatatgccagaggaggaagcaagtgtagcagccaggaattccccg

SEQ ID NO: 57069 - DNA, 550 bp, Chicken  19866894312441_4
cctccagggctgtccagccccactgctctgctccatcctgcaaacacagttactcctgagaacagaccaagacccctcctgcatccttccatgcctgcccagtcaggtcatcatgcttttttaattctgttggaagacagaattgtaatctttcagcctgtgatggctgggaaggtgttgtgccaggccagcagggaagaggtgatgcacagctgccccattttagcactttgcacaagaaatatgccagaggaggaagcaagtgtagcagccaggaattccccgcagtgcctgctagckagctaacaagctgccaaaaggaaggtcagctggcaattacagccagctccctgcatgggttcaattcaggtacaagcaggatttaaagaagtctacctttgcatgcacaatccatccacagggcaagagctgtgtgcgcagctggagacagagcatggccaaagcaaacagccctgtgcaggctcatggcagacctgctcctctctgtctgaacgaggccggagctgcagaaggggaggggagaggagca

SEQ ID NO: 57070 - DNA, 600 bp, Chicken  19866894312467_1
ggaggaacgccgggcacagccaaaccaacaccgctgcacaaggggagctccccattgcctggaacacagcactgggagctcacagcagccagcccctgctcgagggccgagttctgattccgatgcgcttctcccacatctttcagtcacttcaaagcaccatcatgcaattggaatttcttctgtatcaaattatttaataaaaggcatcgggaatcactgtgacgctgtcatcaccgttcgcgtttatcatttttaaaccagagattagcactgctgattgaagtaagctttcaaacwctgctttgcatactacctacatccgacagacagctgcgatgcacaaaggccttccgatctctcctgcagtgagcagaagtaccrctcctgcccctgcttcagcgccaagaaaacaaatgctgtgcckttgaggaacagtggttagcaatagaggtcctcckctgagcagagcggttctcagcagctcacagacgccttccacacactgcctgtgtgcacggagaggccacaggcagtgctggaattctgcagcatgtttccaaacatcatcgttcacctgctttcctttcctgcctgttt

SEQ ID NO: 57071 - DNA, 600 bp, Chicken  19866894312467_2
gcagccagcccctgctcgagggccgagttctgattccgatgcgcttctcccacatctttcagtcacttcaaagcaccatcatgcaattggaatttcttctgtatcaaattatttaataaaaggcatcgggaatcactgtgacgctgtcatcaccgttcgcgtttatcatttttaaaccagagattagcactgctgattgaagtaagctttcaaacwctgctttgcatactacctacatccgacagacagctgcgatgcacaaaggccttccgatctctcctgcagtgagcagaagtaccrctcctgcccctgcttcagcgccaagaaaacaaatgctgtgcckttgaggaacagtggttagcaatagaggtcctcckctgagcagagcggttctcagcagctcacagacgccttccacacactgcctgtgtgcacggagaggccacaggcagtgctggaattctgcagcatgtttccaaacatcatcgttcacctgctttcctttcctgcctgttttcactgctgcggcagcccacttccctgctgtctgtggagctgggaggttcggggggcttctctttaaggcagagctgcaaaatc

SEQ ID NO: 57072 - DNA, 600 bp, Chicken  19866894312467_3
cttctcccacatctttcagtcacttcaaagcaccatcatgcaattggaatttcttctgtatcaaattatttaataaaaggcatcgggaatcactgtgacgctgtcatcaccgttcgcgtttatcatttttaaaccagagattagcactgctgattgaagtaagctttcaaacwctgctttgcatactacctacatccgacagacagctgcgatgcacaaaggccttccgatctctcctgcagtgagcagaagtaccrctcctgcccctgcttcagcgccaagaaaacaaatgctgtgcckttgaggaacagtggttagcaatagaggtcctcckctgagcagagcggttctcagcagctcacagacgccttccacacactgcctgtgtgcacggagaggccacaggcagtgctggaattctgcagcatgtttccaaacatcatcgttcacctgctttcctttcctgcctgttttcactgctgcggcagcccacttccctgctgtctgtggagctgggaggttcggggggcttctctttaaggcagagctgcaaaatccatgagagggaattcaaacacagccccagtcagartcccacga

SEQ ID NO: 57073 - DNA, 600 bp, Chicken  19866894312467_4
atcatgcaattggaatttcttctgtatcaaattatttaataaaaggcatcgggaatcactgtgacgctgtcatcaccgttcgcgtttatcatttttaaaccagagattagcactgctgattgaagtaagctttcaaacwctgctttgcatactacctacatccgacagacagctgcgatgcacaaaggccttccgatctctcctgcagtgagcagaagtaccrctcctgcccctgcttcagcgccaagaaaacaaatgctgtgcckttgaggaacagtggttagcaatagaggtcctcckctgagcagagcggttctcagcagctcacagacgccttccacacactgcctgtgtgcacggagaggccacaggcagtgctggaattctgcagcatgtttccaaacatcatcgttcacctgctttcctttcctgcctgttttcactgctgcggcagcccacttccctgctgtctgtggagctgggaggttcggggggcttctctttaaggcagagctgcaaaatccatgagagggaattcaaacacagccccagtcagartcccacgaaacaaagtgcctcccacaatatgatgatgtgata

SEQ ID NO: 57074 - DNA, 444 bp, Chicken  19866894312467_5
ctgtgcckttgaggaacagtggttagcaatagaggtcctcckctgagcagagcggttctcagcagctcacagacgccttccacacactgcctgtgtgcacggagaggccacaggcagtgctggaattctgcagcatgtttccaaacatcatcgttcacctgctttcctttcctgcctgttttcactgctgcggcagcccacttccctgctgtctgtggagctgggaggttcggggggcttctctttaaggcagagctgcaaaatccatgagagggaattcaaacacagccccagtcagartcccacgaaacaaagtgcctcccacaatatgatgatgtgataaatgaataaataagcagccctggaaactcgagagcgttgccagctaaacaagaactacctttaaaatgcaggtgacaagctttaaaaacttgaatgctttaa

SEQ ID NO: 57075 - DNA, 474 bp, Chicken  19866894312474_1
accacgactcagacacagacacgaccaccaatcagaaggccatgggaaccgtagctactgccaccgatccagcagctgcgggaggcacagccatggccaccgataagacaataacgtctcaccaaatactttccactctgctgagaacaggaagaggccaagacgttcctgcttttcagaaaataaaattctacgtacatcccagctgagggtttctgcatctctttctttgggtgcttagcgattgacaaacccgtgttctcctccagtgtctgacacctgaaaagagcacagtcctgygggtctttctgtgaaagtgcagctatgcaagaaaaagcagacactgaattcctgctgcatttggtttcacagatgtttcctccagcagtggctctggagtatccactgtcatgccaaacgcaggttcacagatcagagggtaggctaggttgcaagagagccaaggagttcatg

SEQ ID NO: 57076 - DNA, 600 bp, Chicken  19866894312479_1
gctctcttgcaacctagcctaccctctgatttgtgaacctgcgtttggaatgacagtggatactccagagccactgctggaggaaacatctgtgaaaccaaatgtagcaggaattcagtgcctgctttttcttgcatagctgcactttcacagaaagacccgcaggactgtgctcttttcaggtgtcagacactggaggagaacacgggtttgtcaatcgctaagctaaatcactgccaaacgttggtctacaatcaaattgttgcactgacactcaagggcaaggtcacatccatctgsccctcgcgcctctccacggcacccaaagaaacagatgcagaaatcctcagctaggatgtacgtagaattttattttatgaaaagcaggaacgtcttggcctcttcctgatctcagcagagtggaaagtatttggtgagacgttattgtcttatcggtggccacggctgtgcctcccgcagctgctggatcggtggcagtagctacggctcccatggccttctgattggtggtcgtgtctgtgtctgagtcgtggtctgagcagcggctggagctgtggtcccgcagctgcctgtttggtg

SEQ ID NO: 57077 - DNA, 600 bp, Chicken  19866894312488_1
attttggccttttcttgttcttccaaggaggtattcccataaaagccagctcaatctggagttgtggggttgaggtacaaagtgccttcagttggtatggcgagctgcgctgtgttttgtgtgatccttcagttaatgtgtgactgttctcttttggttgaggtctagtattaatgaggtgttgacccttcccattggcgtaggcatggtttggccagcagtccaacggtgtatccctattgttcgggtttctgctctttgcattggctaatcagacaaactgatcaagttttgtgcagkctccgagygcagaaatgccaaagcaccaggggaaggggtaatcccatcccctgcttaagtaagcacctctcacactgtggggaaactccggcccaaaaagctttgagagagctggaggactccaagagggatatttatctcaactcaaatccttcagggctttcttatcgcttctggttaaagattttgttctgctctttgtgcatctgcatcgtttttaataaatcctacatggtatttttttttccccctatctgcaatgcctggtgggctgatgtccaattagacagcagcccatgt

SEQ ID NO: 57078 - DNA, 600 bp, Chicken  19866894312488_2
cttttcttgttcttccaaggaggtattcccataaaagccagctcaatctggagttgtggggttgaggtacaaagtgccttcagttggtatggcgagctgcgctgtgttttgtgtgatccttcagttaatgtgtgactgttctcttttggttgaggtctagtattaatgaggtgttgacccttcccattggcgtaggcatggtttggccagcagtccaacggtgtatccctattgttcgggtttctgctctttgcattggctaatcagacaaactgatcaagttttgtgcagkctccgagygcagaaatgccaaagcaccaggggaaggggtaatcccatcccctgcttaagtaagcacctctcacactgtggggaaactccggcccaaaaagctttgagagagctggaggactccaagagggatatttatctcaactcaaatccttcagggctttcttatcgcttctggttaaagattttgttctgctctttgtgcatctgcatcgtttttaataaatcctacatggtatttttttttccccctatctgcaatgcctggtgggctgatgtccaattagacagcagcccatgtgggtgctg

SEQ ID NO: 57079 - DNA, 600 bp, Chicken  19866894312497_1
ataataataaaaacagaaaagagaggggggagtggatgcagtaaatactgagatcctgtgaggcctctgcgggtcacacggacgcacacaactcctgatgagacccccagcccagcagacatctccgaagaattgttcactgacctttgcaggagatattgtcagagggtggaaaaaaaaagaaaaaaagagaaaaaaagaggacggccctttgtctgggttatgacacgacttgaaattaattataaaacaggcgttgcaagtgcacgcaagggagcagaaggtattcttaagatttcratgagtttgggggtagcgaggtaaggtttcccagcaggtgcagcctgacgtggagcggtgtcctcttgaaaccagatgatgacaggaggaaaaaataaaggaagaaatgaaaaggtgcagttgcgccaggctgaccggtgggaggggtacagaagggcgctttcgctcttcaagtgctggcatggagataaacttgatccaatgatgacggtggctgttttttttttgttcagcgttgaatatctttaccatgacctactgatatgtttgctattgaacttctgggaatgcattcatgct

SEQ ID NO: 57080 - DNA, 599 bp, Chicken  19866894312499_1
  misc_feature (1)..(61): n is any nucleotide
nnnnnnnnnnnnnnnnnnnnnnnnnnnnnnnnnnnnnnnnnnnnnnnnnnnnnnnnnnnnnccaggaaaagcaaagagtatcggactctcagatggagctgctgttgcatctaaatacagccttgttttcatctgcagggcgatcaacacatcactcatccttgtgcttattaccaacccttccagccactacggcagccgctgctccgtacttggcaagctgcagggctggtttctgggtgtcacgcatgcagggcaaggccttctctcaccagctggtttgtttgtctgctgcgatgygccctactcctgcttcctgctgctggctgcgtagggcaagcccagccccgagtggggcgggagtggtggactcaccccactgagtcactgagtaaggcttcccgggggactccagaggaaccgtctccctggagagcccttcgcagatatgcacgcttgataagaaacaggaaattggaggggaactgcggagtcaacaggagggctcaataaggaagcagcagtatttctggacacctgggggaaggcgcctgcaggaaaggttcccagagtcaggcagacatcggaatgaacagagg

SEQ ID NO: 57081 - DNA, 600 bp, Chicken  19866894312500_1
agtagttgactttactgacagatgcaaaactagcctgggtatgtcagtgtgtgcttatttttgcacaatgagggaacgagcaattcattattcataaaaaataaatgcaataaataaaatctaggaaatactgtatattcacaaaggatctgaggtccctaggtaactgtactgtgtgtcggatacccaagaagtggatgctggtacacaaaattgataaagaggaaactaaactaaaatatatggaacactttcttgtatacatgtcacatctactttcttagccaaaataaatttgayagatcacaatgtaatgtcaatggcttcagaggtgcaatttagcaggtactgactgccactgtgacaacaattttatgcaaaactttatcaaggaaaataaagcacaagatgagaagatatccctttcagtatctgtagaacattcctgctactctagtatcactggttttcttgcaagtgctttgtagcacagtaacagaacatgtagagtggagcaaacagtgatgcacctggtgatcctgaagtaaaactgaattcaaatgtgtcacttcattttgaaaataagtttttatttttttt

SEQ ID NO: 57082 - DNA, 600 bp, Chicken  19866894312506_1
cactaaaagatggtgaaagactggaactgtctgctccaaactgcaagtattcagcacagctgaactgctctgaaacccatccaccgcttccagcagaactgcctctatttgacaaagcctcccagaggaagcaggcagacacaaaccagaaggacattatttccaagctgaccattcttcattttgccacaaagtcgttccaaatccactctgctctcagtgtctccaaacccacagagcctgtcctgtacagccagcgagcaaaggtggaaaaaagggtttagcagaaatattaaaackcgttaagtttaaagctgcaacaatacacagatccattacagtactgctggtgccactgatgcacgcatttttgcacttaatctgagaaaaatgcattaatatcttaaatggccaattaaggaaggtgtttttgaactacctacacattcaataactgggtaagtaacaccagctgcccccagcccccagtctacccaccaaggtattctgtactaaatgttaacctgctggtcacaccaaactagcatatattaccttttctgtatctactgatatgtrtgtgcgcttgaaggttaaaac

SEQ ID NO: 57083 - DNA, 600 bp, Chicken  19866894312506_2
tttagcagaaatattaaaackcgttaagtttaaagctgcaacaatacacagatccattacagtactgctggtgccactgatgcacgcatttttgcacttaatctgagaaaaatgcattaatatcttaaatggccaattaaggaaggtgtttttgaactacctacacattcaataactgggtaagtaacaccagctgcccccagcccccagtctacccaccaaggtattctgtactaaatgttaacctgctggtcacaccaaactagcatatattaccttttctgtatctactgatatgtrtgtgcgcttgaaggttaaaaccaaacacatttgctgtggattactgctacgttcccttgcaaacaagccagtgctttcctccttcacaatcagccccagcatacaaagctgaatcagaactcagcygagacccctcacagcgcagtgggaagcatacgatgctcacttgcaaatgcacggccattgaagaaaagcgggtgcttcaccagcyctgaaccagctcattttcacccttaccccaaatattgagtgatgtcacacgtgatgtactggctgaactggtttggctgctgcgggctg

SEQ ID NO: 57084 - DNA, 600 bp, Chicken  19866894312506_3
aaatggccaattaaggaaggtgtttttgaactacctacacattcaataactgggtaagtaacaccagctgcccccagcccccagtctacccaccaaggtattctgtactaaatgttaacctgctggtcacaccaaactagcatatattaccttttctgtatctactgatatgtrtgtgcgcttgaaggttaaaaccaaacacatttgctgtggattactgctacgttcccttgcaaacaagccagtgctttcctccttcacaatcagccccagcatacaaagctgaatcagaactcagcygagacccctcacagcgcagtgggaagcatacgatgctcacttgcaaatgcacggccattgaagaaaagcgggtgcttcaccagcyctgaaccagctcattttcacccttaccccaaatattgagtgatgtcacacgtgatgtactggctgaactggtttggctgctgcgggctggatgcaccctgcagatactttgtggtaagttactctgcagctggaatctgctccgctgcctcaaaccccacctctggctgcatcttaaatttggggttgcactacttacacacacacagctcgctc

SEQ ID NO: 57085 - DNA, 600 bp, Chicken  19866894312506_4
ctacccaccaaggtattctgtactaaatgttaacctgctggtcacaccaaactagcatatattaccttttctgtatctactgatatgtrtgtgcgcttgaaggttaaaaccaaacacatttgctgtggattactgctacgttcccttgcaaacaagccagtgctttcctccttcacaatcagccccagcatacaaagctgaatcagaactcagcygagacccctcacagcgcagtgggaagcatacgatgctcacttgcaaatgcacggccattgaagaaaagcgggtgcttcaccagcyctgaaccagctcattttcacccttaccccaaatattgagtgatgtcacacgtgatgtactggctgaactggtttggctgctgcgggctggatgcaccctgcagatactttgtggtaagttactctgcagctggaatctgctccgctgcctcaaaccccacctctggctgcatcttaaatttggggttgcactacttacacacacacagctcgctccattatgaacacagtgacctggtgtggagggcagcaatgtcacctttgctctgagtccagccagtaaaactggaaagaagggaag

SEQ ID NO: 57086 - DNA, 600 bp, Chicken  19866894312506_5
gcaaaggctgtatttcccagctgcattctcagctagggaagctgctgccttcagctgaaaggacacaactctcgttacagttctcgtaaagtttctctgtccaggtatcactgcagccatcactaaggataaggctgatttcaaacaacatccatgggaaggctgaacacaccgattcataacatcaccctgccctggctggtgagcctgcatcacacagaggtgtctcacagggacacaccacagcacggctgtcagggcttctttagctcaggatgcacagacccagaggcctccttygcacagagcgtgctgctcctgtccggcactgctcccactcacatcagcacgagcagccaggagtgcagccacagggacagggcagagacacaaacacacacaaggctgcggacactcagaacatcagatccaattcagtccagaggagtttaaccacctgcttttatcactgcttccaagagagctaccttactcattaaacatggttcgtcccgttggctgtatggagaacatgcaaaccctcaccgaattcagacccaagatgtgcgattttccactgtgcattcttcacatacctcc

SEQ ID NO: 57087 - DNA, 599 bp, Chicken  19866894312511_1
  misc_feature (1)..(95): n is any nucleotide
nnnnnnnnnnnnnnnnnnnnnnnnnnnnnnnnnnnnnnnnnnnnnnnnnnnnnnnnnnnnnnnnnnnnnnnnnnnnnnnnnnnnnnnnnnnnnnnctgagcctgagtgtgctgccttcccagagtctgcctgctgacatacagctttcccattccccgtgcagaagcataggtcaccttgtaaagaggaaaataaaagagagccttagcatatcaccagctggaaaagggtcagcctctctcatatctttataggaaggttttgttctaccttctgtcctcacattgcttttacagagcyggatacctacctgtggtgcagagctgagccctgaaaaccctgcccttggaatgggcagagctgtagtgccaagcaaagacagcagcccacagagaacacctccctgcacactrttagtgtccccattacttgtgcatgacgtgaagatacattgttgtatctatgytgtgcagtccccttcyttgtgtggggtattgaaatgaatgccaaaccatctcttcttgccttcacctctgctccctgcagggatataatccatattctccttcaagcaaaagcagagccggaggtgcaccctt

SEQ ID NO: 57088 - DNA, 600 bp, Chicken  19866894312511_2
ccttcccagagtctgcctgctgacatacagctttcccattccccgtgcagaagcataggtcaccttgtaaagaggaaaataaaagagagccttagcatatcaccagctggaaaagggtcagcctctctcatatctttataggaaggttttgttctaccttctgtcctcacattgcttttacagagcyggatacctacctgtggtgcagagctgagccctgaaaaccctgcccttggaatgggcagagctgtagtgccaagcaaagacagcagcccacagagaacacctccctgcacactrttagtgtccccattacttgtgcatgacgtgaagatacattgttgtatctatgytgtgcagtccccttcyttgtgtggggtattgaaatgaatgccaaaccatctcttcttgccttcacctctgctccctgcagggatataatccatattctccttcaagcaaaagcagagccggaggtgcacccttctctcctcgttcactaaagcttccagcctaaatccctgctgtttgtttctgaactagccgacctttcagctaagctgggctcgttttaatatattttgtatgtgtgtgtctgtg

SEQ ID NO: 57089 - DNA, 600 bp, Chicken  19866894312511_3
cataggtcaccttgtaaagaggaaaataaaagagagccttagcatatcaccagctggaaaagggtcagcctctctcatatctttataggaaggttttgttctaccttctgtcctcacattgcttttacagagcyggatacctacctgtggtgcagagctgagccctgaaaaccctgcccttggaatgggcagagctgtagtgccaagcaaagacagcagcccacagagaacacctccctgcacactrttagtgtccccattacttgtgcatgacgtgaagatacattgttgtatctatgytgtgcagtccccttcyttgtgtggggtattgaaatgaatgccaaaccatctcttcttgccttcacctctgctccctgcagggatataatccatattctccttcaagcaaaagcagagccggaggtgcacccttctctcctcgttcactaaagcttccagcctaaatccctgctgtttgtttctgaactagccgacctttcagctaagctgggctcgttttaatatattttgtatgtgtgtgtctgtggcttagaacagaaaagaatcatggaaaccaacaggctcctcatctcaaatgtt

SEQ ID NO: 57090 - DNA, 600 bp, Chicken  19866894312511_4
aagaggaaaataaaagagagccttagcatatcaccagctggaaaagggtcagcctctctcatatctttataggaaggttttgttctaccttctgtcctcacattgcttttacagagcyggatacctacctgtggtgcagagctgagccctgaaaaccctgcccttggaatgggcagagctgtagtgccaagcaaagacagcagcccacagagaacacctccctgcacactrttagtgtccccattacttgtgcatgacgtgaagatacattgttgtatctatgytgtgcagtccccttcyttgtgtggggtattgaaatgaatgccaaaccatctcttcttgccttcacctctgctccctgcagggatataatccatattctccttcaagcaaaagcagagccggaggtgcacccttctctcctcgttcactaaagcttccagcctaaatccctgctgtttgtttctgaactagccgacctttcagctaagctgggctcgttttaatatattttgtatgtgtgtgtctgtggcttagaacagaaaagaatcatggaaaccaacaggctcctcatctcaaatgttacagcaaggcatttac

SEQ ID NO: 57091 - DNA, 600 bp, Chicken  19866894312516_1
gtactcctcctgtagatggctgtgttgggagggtacgttgcacctgtgcagggctggttgtgagtcagtgtccctgagagccacttgtctgtcaacaccgatggctcctcggacttgaggatttgctgaatgcgccccaaaggtaacagccataaccacaggcttgtccagagagctgcagctatcgatgcattatcttctctttttttttttaagtatgttgattctttttcttgctgcttgttagcaaggccaagaattgtgagactcattccctgagcaccatgttgcagagggctrctttgttcctgaaatagaacagcagtcatggcagccagatgtctgctgtagttaccctgctcacagcaggccgcccgcgcagaagggcagtctctgcaatagaccatttttagcatccctttcggcagaagaaatggaggcacacgaggcaagttttgttaggactcgttcccagcagcttgttgaacgtaagcactgcagcggcccggcagctgmgggacctgggacatgttaacccgcctcatactcagcactcctgccaaaacaaatgcactcgtatggtgggaaagcataggactg

SEQ ID NO: 57092 - DNA, 600 bp, Chicken  19866894312516_2
tatgttgattctttttcttgctgcttgttagcaaggccaagaattgtgagactcattccctgagcaccatgttgcagagggctrctttgttcctgaaatagaacagcagtcatggcagccagatgtctgctgtagttaccctgctcacagcaggccgcccgcgcagaagggcagtctctgcaatagaccatttttagcatccctttcggcagaagaaatggaggcacacgaggcaagttttgttaggactcgttcccagcagcttgttgaacgtaagcactgcagcggcccggcagctgmgggacctgggacatgttaacccgcctcatactcagcactcctgccaaaacaaatgcactcgtatggtgggaaagcataggactgcgttccaggggtgagcccttccctcacagaaccctttctgggcatcaagttttcatggcagaatgagatgtgtttttaccacactgggtgttccaaaaagacaaggtgcccaacatgagggtgcagttaaagcctctctgaygtgtcctcaccagttgctcttcacctaaatgaataaacaattactagaaagtagtagaggtaagggtgaataca

SEQ ID NO: 57093 - DNA, 600 bp, Chicken  19866894312516_3
cacgaggcaagttttgttaggactcgttcccagcagcttgttgaacgtaagcactgcagcggcccggcagctgmgggacctgggacatgttaacccgcctcatactcagcactcctgccaaaacaaatgcactcgtatggtgggaaagcataggactgcgttccaggggtgagcccttccctcacagaaccctttctgggcatcaagttttcatggcagaatgagatgtgtttttaccacactgggtgttccaaaaagacaaggtgcccaacatgagggtgcagttaaagcctctctgaygtgtcctcaccagttgctcttcacctaaatgaataaacaattactagaaagtagtagaggtaagggtgaatacagggttatgcactaagaaagcacaacagaaaacagtgtgagtcaacagcaaagcagctgcggaaaggagaataaaaataattctggtaacggcacagagcatcagaagtgatatgtggaggggagaggtggtggagagtgagctcatattgagataaaagcgtgcctgggggacagggagaaaggagagcgtggagtgcaggtgcagcaggtggggagcaggccctg

SEQ ID NO: 57094 - DNA, 600 bp, Chicken  19866894312518_1
gggcgcggcgtgttcttcctcggaaggaaaaacggcttttcgttgtgaattggaaaagcgtaaaatatttaatcgtccctttgtattgtggctctgcaagggcagctctgtggctctacggcccgttttgcgcactggtgtgggggagtgggcggagcagggagcagggcggagcagggaggcaggatggaggcaggaggaaggattgtgcaacaatccttcgttgcacagaattgaacacaaacgtgcatcctcgagtacagaatgtgctgaaaattgcacagaatgggatggtgatcrtaggatgccgatcataagatgccttcaggtggaggggatgcagaaggtgacggagcccttggattgctcactcccctctcacctgtgtccacccaaagtccatgcctgagggaaatgccgaccagagagcagcaaaggaactgctgcacgcgcctcagccgggagttttgcactaaatctttgcttcttatttcatccttcctttattcatacctctctctggtgttttctcagctgtcctccaggatttgctgtctcttttcctcagtcctgcctccaatgccacacaaaggacttctg

SEQ ID NO: 57095 - DNA, 600 bp, Chicken  19866894312521_1
catttagaagtaggacaaaatgacaataatcatctctactcacagttgttttcttgaacactggatgcccaactccgcagcgtaagggtaagtctgcagaagtgaatggtattggttggccacagtgaatagcaggagaggatggctgccaacagaataggaacactttaatgttgaataaaaatagattgggaagctcaactgcgtctgctcccataaaatgaattaggtgcatgtagcccaataaaagactgggagtcttaaatcagcagttcaagctgtagtcctaacaaccaaaayrctgtcyctaccctgacctgcctcagcatttgcttggatagcaaatgaaccagagcccgagctgttttctttgagcattctgcccctaactgaacagttggctgttctgcaatcttacctcagccatcaccttcttaaaagggagattttcaggacagctcaagacacagctctcatgtgtgagtcatccccgctgtcagtggagcattcgcttcctcagaatggcccaccactgcttcctgccctgaagtagacagaaaaatcagacaggttacgtatattttctaatcttatttaata

SEQ ID NO: 57096 - DNA, 600 bp, Chicken  19866894312521_2
atttagaagtaggacaaaatgacaataatcatctctactcacagttgttttcttgaacactggatgcccaactccgcagcgtaagggtaagtctgcagaagtgaatggtattggttggccacagtgaatagcaggagaggatggctgccaacagaataggaacactttaatgttgaataaaaatagattgggaagctcaactgcgtctgctcccataaaatgaattaggtgcatgtagcccaataaaagactgggagtcttaaatcagcagttcaagctgtagtcctaacaaccaaaayrctgtcyctaccctgacctgcctcagcatttgcttggatagcaaatgaaccagagcccgagctgttttctttgagcattctgcccctaactgaacagttggctgttctgcaatcttacctcagccatcaccttcttaaaagggagattttcaggacagctcaagacacagctctcatgtgtgagtcatccccgctgtcagtggagcattcgcttcctcagaatggcccaccactgcttcctgccctgaagtagacagaaaaatcagacaggttacgtatattttctaatcttatttaataa

SEQ ID NO: 57097 - DNA, 600 bp, Chicken  19866894312521_3
aagtaggacaaaatgacaataatcatctctactcacagttgttttcttgaacactggatgcccaactccgcagcgtaagggtaagtctgcagaagtgaatggtattggttggccacagtgaatagcaggagaggatggctgccaacagaataggaacactttaatgttgaataaaaatagattgggaagctcaactgcgtctgctcccataaaatgaattaggtgcatgtagcccaataaaagactgggagtcttaaatcagcagttcaagctgtagtcctaacaaccaaaayrctgtcyctaccctgacctgcctcagcatttgcttggatagcaaatgaaccagagcccgagctgttttctttgagcattctgcccctaactgaacagttggctgttctgcaatcttacctcagccatcaccttcttaaaagggagattttcaggacagctcaagacacagctctcatgtgtgagtcatccccgctgtcagtggagcattcgcttcctcagaatggcccaccactgcttcctgccctgaagtagacagaaaaatcagacaggttacgtatattttctaatcttatttaataactgagt

SEQ ID NO: 57098 - DNA, 600 bp, Chicken  19866894312523_1
gtaagctttggctttcttgtctccatccctggcattctcaggcagtgtctgtatattcctcctgggtaccctcctcctgcttctaaattctgcatgctcccccttttttttttttcatgtgagcacagtgaagagttctctgctcctccctgtgagctttctgctgcagaatatgatgtttgctgcagccttggctgtccctgacctttgtgttgcccagctagtcatcctttttcatgaataacagattgaatgcctgccctagtcaactcattgatagtctgcatcaagaaagtgtcrtcrgcatcttcatgtgattattcatgagaaggatttcatctcatgatatgtgttgttcaaaattacagattagagaagtttgagcaagtctccaaaatgactgggtaattatccagactgaactgtttaaagttctcccactctttttattaataggagccacaatattcccatgctgactatgaagggaaaaatcgatatcagcaaacgtacattcatattgatttatcttcccttttggttttctaatttagtaaaggctactaatgcagcattacataaagattctcaggagagtaa

SEQ ID NO: 57099 - DNA, 600 bp, Chicken  19866894312523_2
agctttggctttcttgtctccatccctggcattctcaggcagtgtctgtatattcctcctgggtaccctcctcctgcttctaaattctgcatgctcccccttttttttttttcatgtgagcacagtgaagagttctctgctcctccctgtgagctttctgctgcagaatatgatgtttgctgcagccttggctgtccctgacctttgtgttgcccagctagtcatcctttttcatgaataacagattgaatgcctgccctagtcaactcattgatagtctgcatcaagaaagtgtcrtcrgcatcttcatgtgattattcatgagaaggatttcatctcatgatatgtgttgttcaaaattacagattagagaagtttgagcaagtctccaaaatgactgggtaattatccagactgaactgtttaaagttctcccactctttttattaataggagccacaatattcccatgctgactatgaagggaaaaatcgatatcagcaaacgtacattcatattgatttatcttcccttttggttttctaatttagtaaaggctactaatgcagcattacataaagattctcaggagagtaaaaa

SEQ ID NO: 57100 - DNA, 600 bp, Chicken  19866894312532_1
aaaaatacaggggtttgaagacagagaaagtctctgctaagtgacaatgtaaatattatcagctgcaaagctgcaagtgtttttccagtatattatgctgggaatacagctggagacaaggacgactgtgatgatataatacaaattaacatgccccctactcaagtgaatctgaagcagagatttcactggtattaacttgcagcttggagtaaacttttatcacaattatcctttgaatcctccaaaaggaagaaggtagttggtggccaaagactacagaccacccttttaccaagkgtgtatggaaaacttcctgctggaggtctgcccttggcatcttgtccatctctgtctgaacttggtatcactaaatactacgcagtctctctttcagttggtttatcctaatttaagtgaactaaacaatgtctcttgctgctatgaaattgaaataattatgtctctgctaacttcacttgagtatgaaagaagtctttgggaccctgaaaagagaacggtcagrctcacagcggtcctaaagacataacctgtaccagaggagagcgagaaaggatcagaaaggcagcaaaatgcatc

SEQ ID NO: 57101 - DNA, 600 bp, Chicken  19866894312532_2
aattatcctttgaatcctccaaaaggaagaaggtagttggtggccaaagactacagaccacccttttaccaagkgtgtatggaaaacttcctgctggaggtctgcccttggcatcttgtccatctctgtctgaacttggtatcactaaatactacgcagtctctctttcagttggtttatcctaatttaagtgaactaaacaatgtctcttgctgctatgaaattgaaataattatgtctctgctaacttcacttgagtatgaaagaagtctttgggaccctgaaaagagaacggtcagrctcacagcggtcctaaagacataacctgtaccagaggagagcgagaaaggatcagaaaggcagcaaaatgcatctggacacctggacagaatttaatgcaaagcagggacggggcatggggacagctgcttcctgtctgctgggaacagagtagggaatatctgatgctccactgcttcctgtccagcacctgcagaccaggctggttggtcctgcacctgaagagatggaaatagagcaatcttgtgagctgtctgcaagataagaacagcaaggatgacagaagcagggtgaaggact

SEQ ID NO: 57102 - DNA, 599 bp, Chicken  19866894312533_1
  misc_feature (1)..(24): n is any nucleotide
nnnnnnnnnnnnnnnnnnnnnnnnaataacttgccaaccatgtttcttactgggtaaacattttcttcctttcaagtgcgctcaagagatgtacgggttgtggggagaggtaatatcttttattagaccaaactgatagaggtggaaaaaaacaggctggctcttaggtacataagcccttcttcagaggcggcagaatttaagcaaagctggaaaaatggctggaaaaactgccgtaggttcagtttaattatgttaattcattacaggaaaaggtaagtagtgtctttggagccaagrgagcgggttagcaaaaaaaaaagctgtgaaaggaggttgtggatggagggagagaaaccaggacctttgaagtggtgaggagttctgcaggcagatgctaagggagaaaatgcatcatgccataaaaccagacagctcccgaattttcttttttcctctcagtggaactgtgggcttraaagaatttcttaacgtgtggttattttggttctgtggcagttgagtccttgcttgcgtgtctctcagaagcctcgtgagagtaatctgygatcacaaatgagggtcaactggtttgtcca

SEQ ID NO: 57103 - DNA, 600 bp, Chicken  19866894312533_2
cttcttcagaggcggcagaatttaagcaaagctggaaaaatggctggaaaaactgccgtaggttcagtttaattatgttaattcattacaggaaaaggtaagtagtgtctttggagccaagrgagcgggttagcaaaaaaaaaagctgtgaaaggaggttgtggatggagggagagaaaccaggacctttgaagtggtgaggagttctgcaggcagatgctaagggagaaaatgcatcatgccataaaaccagacagctcccgaattttcttttttcctctcagtggaactgtgggcttraaagaatttcttaacgtgtggttattttggttctgtggcagttgagtccttgcttgcgtgtctctcagaagcctcgtgagagtaatctgygatcacaaatgagggtcaactggtttgtccaagaggcagagatgtagcgtggtttatctcaaaggcgctctgtgccttaacaggaaggccctaaatcttgctgctgcattcctttccctgcctccagtcttcctgagggctgcaactgggagctgcccagtgcaggagccggttcatggctaggaagcattcggcagctggagcggtcaa

SEQ ID NO: 57104 - DNA, 600 bp, Chicken  19866894312533_3
ggaaaaggtaagtagtgtctttggagccaagrgagcgggttagcaaaaaaaaaagctgtgaaaggaggttgtggatggagggagagaaaccaggacctttgaagtggtgaggagttctgcaggcagatgctaagggagaaaatgcatcatgccataaaaccagacagctcccgaattttcttttttcctctcagtggaactgtgggcttraaagaatttcttaacgtgtggttattttggttctgtggcagttgagtccttgcttgcgtgtctctcagaagcctcgtgagagtaatctgygatcacaaatgagggtcaactggtttgtccaagaggcagagatgtagcgtggtttatctcaaaggcgctctgtgccttaacaggaaggccctaaatcttgctgctgcattcctttccctgcctccagtcttcctgagggctgcaactgggagctgcccagtgcaggagccggttcatggctaggaagcattcggcagctggagcggtcaaggttgggttaagtttcactttggtgctccatggggtaaatgcttgctctttggctaacagagataggcttgtttaatctttgctgtgctt

SEQ ID NO: 57105 - DNA, 600 bp, Chicken  19866894312538_1
accaataagtgtcgcctgatacatatgacccatcacacatcacagatggttttagattaacaactacacttctaaaagagtcaaaactgaagcaatagaaagagatgctggcagcacccacactgattcttcaaattgtgattattaacagggaatttctgcacataagttatcactccattcctgttttggctttttcaacagcgtccaagagtttttctgccaaaaagtttatccaaactgattaatatactacaggatatggtccacaacatctcaaagaaaaagctcattagcccwgtatcttcatcatcagcactttttaacttctgagaatttaaacctggcacaagttttagctagggaaaatagttttagccccttgtgataggataggtatgcattgccaagtattttttctctttcgcacatttttatcatagcatttttgaagaytgaggttatagcttgagaacactcaattagttttctgtacataaaaatagacctattccgctgaaggcaacactcaaaatgcagtgtattgagaactaactctcatagagcaaaaatgtgctgtaggtacaacgtaaaaccaga

SEQ ID NO: 57106 - DNA, 600 bp, Chicken  19866894312538_2
ttctgcacataagttatcactccattcctgttttggctttttcaacagcgtccaagagtttttctgccaaaaagtttatccaaactgattaatatactacaggatatggtccacaacatctcaaagaaaaagctcattagcccwgtatcttcatcatcagcactttttaacttctgagaatttaaacctggcacaagttttagctagggaaaatagttttagccccttgtgataggataggtatgcattgccaagtattttttctctttcgcacatttttatcatagcatttttgaagaytgaggttatagcttgagaacactcaattagttttctgtacataaaaatagacctattccgctgaaggcaacactcaaaatgcagtgtattgagaactaactctcatagagcaaaaatgtgctgtaggtacaacgtaaaaccagaataatctctcctttgaaggatgatttgatatccctgaacaggtgtgaatcaaatttactcctgatggtctgtgactgattactggagaaaacctttgaagcctttcatttttgtttgtctgagataatagtatctaatcaatgtcttgccacagcc

SEQ ID NO: 57107 - DNA, 599 bp, Chicken  19866894312553_1
  misc_feature (1)..(82): n is any nucleotide
nnnnnnnnnnnnnnnnnnnnnnnnnnnnnnnnnnnnnnnnnnnnnnnnnnnnnnnnnnnnnnnnnnnnnnnnnnnnnnnnnnttctgcagctcatgaatgctgtgccctcctttcctcagctgattgattagatccttaatttcctccagggaagagaacagatatttcatgtgataggtttatttcaggactgtgaactttaccaagtgcgccagacagattctttgaatagaaatggcatgaaatggctccagtcacttcacattagctgccctttttctcattgctaactattatcytggatttctgaatgagccctgctagctctatgtaatcatggaggcagaagagtgaagcccattaaatcacgagaaattttttccagtttttagcctagtcttcccctctcccattttcagatggctgctcatacaaaatgcaaataggattccacgttgtctctatgcaacagaatgaggcactttgccaggtgatgtaggccagagtaataggttgggagagacagcccaggaagcgctggatctctgccagggactccatcaccattttctcttggctgcaaaggcaagcagattct

SEQ ID NO: 57108 - DNA, 600 bp, Chicken  19866894312564_1
accttgtccgatggttctataatactgaacggtggacgctctcggaggggaaaattacgcggcccaccagagagcagagaatggggtaacgcattaaaggggtgcgacgatcccctgttccttgactttttaaaacagtgtttagaatgggatcctgctatccgaatgacacccagccaggctttgcgacatccctggctaaggcgacggttgccgaagcctccgactggggagaaggcctcagcaaagagaattacagagagcactggtgctataacgtcgatttccaagttacctccracttcaagctcagcttcaaaactgaggactaatttggcacagatgacagatgccaatgggaatattcagcaaagaacagtattgccaaaactcgttagctgagtttgaaaaacccaatgctgttaatacgagagatacaatgtggctgagccttatttgtatgaaaaaaaaagtagctcagatatacgtttttatttgctcaataactttattcatttgtatctttcagcactcattttaaatgtaagaaatgttgattttgtttttataaaaacatggggacaatgctttaagttttta

SEQ ID NO: 57109 - DNA, 600 bp, Chicken  19866894312564_2
acatggggacaatgctttaagtttttatacttattttttaaaatgtttgtcttctacagtacaaatagccttactgtaactagtgtgacacagtaataaacatcagtggctggccactggttacaacgtgactgtcatgcattgcagcgtggtgtcgaaggtattacctttctcttccatggttcatagtaagtttcaactggggtaaaattctaagactctaactgtacgggtatgggtcttgatcctgcaaacaataacacttaggcctgactggactccagggagaatgcagttaarcacctgtaaactagttatctgaagtggagccgtagcatgaagtactgtcattttctatatggtagcccagaaaaaatgtagtggtatcacttagtaatgatgcagtcacctcctgcagaatgttttctctaattcataataatggttttgattaaaatawgcatttaaatataatgcaaaaaaaaaaaaaaaagaaaagaaaaattcaaaccagagaaacaaaaaaagaacttctagggctacagtgactttcaccttacatgccatgtgctagagtttgaagaacaggcagactcagaa

SEQ ID NO: 57110 - DNA, 515 bp, Chicken  19866894312564_3
gtattacctttctcttccatggttcatagtaagtttcaactggggtaaaattctaagactctaactgtacgggtatgggtcttgatcctgcaaacaataacacttaggcctgactggactccagggagaatgcagttaarcacctgtaaactagttatctgaagtggagccgtagcatgaagtactgtcattttctatatggtagcccagaaaaaatgtagtggtatcacttagtaatgatgcagtcacctcctgcagaatgttttctctaattcataataatggttttgattaaaatawgcatttaaatataatgcaaaaaaaaaaaaaaaagaaaagaaaaattcaaaccagagaaacaaaaaaagaacttctagggctacagtgactttcaccttacatgccatgtgctagagtttgaagaacaggcagactcagaatggcaatggaggtgtgtctgttcctctaaatctgaaagttgtttcttaaaccgaagtcgggcaaagcaaaacatt

SEQ ID NO: 57111 - DNA, 600 bp, Chicken  19866894312567_1
agcaggggagaaatatgaacactcagcactaagttgtgctgtattccacatgcattcgttagcacgtagctaatgaagcagcttatttgaagcctatcagctctgcaaagttttgtggctgcactctggagatcaccattagaaccagcgtttgcgccgggcaaacgttcagcccagcaaatgtcggagaaacgacagccaaaaacatgtaatgcagaaccactgcgttttgtacatgactctcagacacagcacacctcctgcacaaaccaaaaacgtctgagcgcttcctcccattcrgagcagatagagcacgaggagacaggtttaacaggtttctaagttaatgacacctacccttggctcagcagataacaccatgttagtacagggtgctgcacaggcaacaggaggggggtgtgggggacagaagtaggaaagagataactaggaaagagataactgggcttcttttacctttacccatccagatcatgcctatcgtccgcacagctccagtttttctttccaggtggatgtaatttaacatccagatcaacacacaaactacacaagggggactcatctggctttgtctgg

SEQ ID NO: 57112 - DNA, 600 bp, Chicken  19866894312573_1
atgatgtgccacctctacgtggcctcggtcaagagggactggcgcgtgcacctggccctggacgtcgccaacatggcggccatgctcaacaccaccctcaacttcttcctctattgctttgtcagcgacacgttccgccgcgccgtcagcgaggtgctccgtgcccacgcgtggcatggcccccgccacggcggcgcccgcctcgtgtccccaaccctgagcccatcgcagctgctgggcacggcgtgctcagcaagggggtgccgccatgcaggggtctcggtgctcacccagcacccrgtggggccgtgcccaagggatgccgccccactgygcccacagagctgcggtgctgggggcggggggagctcacagcccctctccagctccaacagygcagcaaagccgcccccagggttgggcccgggtgagctccgcagccccggggaggaggcaatgtgatgggggttgagctctcctgcataaactctgatgtttggtctgcaatgctgtgtgggtctggctccatctgagtccctctgctcagcctggtgccctcggggtgctgcagtcctgtgtgacccggctcccacccacgtc

SEQ ID NO: 57113 - DNA, 600 bp, Chicken  19866894312573_2
gggactggcgcgtgcacctggccctggacgtcgccaacatggcggccatgctcaacaccaccctcaacttcttcctctattgctttgtcagcgacacgttccgccgcgccgtcagcgaggtgctccgtgcccacgcgtggcatggcccccgccacggcggcgcccgcctcgtgtccccaaccctgagcccatcgcagctgctgggcacggcgtgctcagcaagggggtgccgccatgcaggggtctcggtgctcacccagcacccrgtggggccgtgcccaagggatgccgccccactgygcccacagagctgcggtgctgggggcggggggagctcacagcccctctccagctccaacagygcagcaaagccgcccccagggttgggcccgggtgagctccgcagccccggggaggaggcaatgtgatgggggttgagctctcctgcataaactctgatgtttggtctgcaatgctgtgtgggtctggctccatctgagtccctctgctcagcctggtgccctcggggtgctgcagtcctgtgtgacccggctcccacccacgtccccactgcgtggcacgcacacagttcagagccac

SEQ ID NO: 57114 - DNA, 600 bp, Chicken  19866894312573_3
ctcaacttcttcctctattgctttgtcagcgacacgttccgccgcgccgtcagcgaggtgctccgtgcccacgcgtggcatggcccccgccacggcggcgcccgcctcgtgtccccaaccctgagcccatcgcagctgctgggcacggcgtgctcagcaagggggtgccgccatgcaggggtctcggtgctcacccagcacccrgtggggccgtgcccaagggatgccgccccactgygcccacagagctgcggtgctgggggcggggggagctcacagcccctctccagctccaacagygcagcaaagccgcccccagggttgggcccgggtgagctccgcagccccggggaggaggcaatgtgatgggggttgagctctcctgcataaactctgatgtttggtctgcaatgctgtgtgggtctggctccatctgagtccctctgctcagcctggtgccctcggggtgctgcagtcctgtgtgacccggctcccacccacgtccccactgcgtggcacgcacacagttcagagccacgatcccgcttacaccaccacgccgctgcgatgctgagcgagcagccggggccgtgccagcct

SEQ ID NO: 57115 - DNA, 600 bp, Chicken  19866894312573_4
accaccacgccgctgcgatgctgagcgagcagccggggccgtgccagcctgcctgtccccagctgccaccagagggcagggacaggacgcccagcagagctggcacaggcagcagcagggagctggcaccctacaccccatgggagcaggcgggtccagagcaacagccctgcctgcccccactttccatcctaattctcccataaggtccttactataatcccccccaaacagagcggcctttccgctgtaattcctcataaagcagcacccatggagctgccccagtgctggggctcrgctggccctggagtatttgggctgccccaagcagggcacagagagcagcccagtgccctgtgcccatcaggctgagccyggcactgtgttgggatggggcacagtaggctgcccacccacctttgtgtccactgcatataaggtgagcccaggatgacctcgtgatgtggggctgacccacatgggcacaggcacacatccagggcaacgcacctcgcactctgcagccctgggcacgatgccgacccctgcattacaccggggggatctgacccccactgccctgctcacaccgacggg

SEQ ID NO: 57116 - DNA, 600 bp, Chicken  19866894312573_5
ggacaggacgcccagcagagctggcacaggcagcagcagggagctggcaccctacaccccatgggagcaggcgggtccagagcaacagccctgcctgcccccactttccatcctaattctcccataaggtccttactataatcccccccaaacagagcggcctttccgctgtaattcctcataaagcagcacccatggagctgccccagtgctggggctcrgctggccctggagtatttgggctgccccaagcagggcacagagagcagcccagtgccctgtgcccatcaggctgagccyggcactgtgttgggatggggcacagtaggctgcccacccacctttgtgtccactgcatataaggtgagcccaggatgacctcgtgatgtggggctgacccacatgggcacaggcacacatccagggcaacgcacctcgcactctgcagccctgggcacgatgccgacccctgcattacaccggggggatctgacccccactgccctgctcacaccgacggggctcagccccagcctcgctggggtgggtgcaagctgggaggtgctcgctccattaattctggcatttcaggagagcacg

SEQ ID NO: 57117 - DNA, 599 bp, Chicken  19866894312575_1
  misc_feature (1)..(85): n is any nucleotide
nnnnnnnnnnnnnnnnnnnnnnnnnnnnnnnnnnnnnnnnnnnnnnnnnnnnnnnnnnnnnnnnnnnnnnnnnnnnnnnnnnnnnaagtcattaccacctacaaagccgttgtacaattgtgagaataaatgggtcaattgtgccccaaactcgcagttttattcagctgggagaatattcccatccttcttgcagaaaagagacctaccattctgccttccctaacaacactgagcagttagagcagtgagggcaacagcagtgtgtcccatagctcccaggtacaagagtcacttccyaaaggcaggtgaaagccaccgaggacaaccaggtctcctaatggggaccgtgaccagccatttcctatctgacacctacaatatctcaggctcccttaaagccaggcagctccaataagctccagrgtgatcaatcctccgctctctgtaaaccattgctgcacagagaataaaccatagaayatctcagcaaagaatttgtggtcagaaatttttctacactaacaattagtagaaagcctctgtgtgctcctccagcagctactgagcatggtgggaagcagaggggtcacagcctt

SEQ ID NO: 57118 - DNA, 600 bp, Chicken  19866894312575_2
taaatgggtcaattgtgccccaaactcgcagttttattcagctgggagaatattcccatccttcttgcagaaaagagacctaccattctgccttccctaacaacactgagcagttagagcagtgagggcaacagcagtgtgtcccatagctcccaggtacaagagtcacttccyaaaggcaggtgaaagccaccgaggacaaccaggtctcctaatggggaccgtgaccagccatttcctatctgacacctacaatatctcaggctcccttaaagccaggcagctccaataagctccagrgtgatcaatcctccgctctctgtaaaccattgctgcacagagaataaaccatagaayatctcagcaaagaatttgtggtcagaaatttttctacactaacaattagtagaaagcctctgtgtgctcctccagcagctactgagcatggtgggaagcagaggggtcacagccttaattccagacacacattggccacctgttctccaccgctgaaagggggagaggggggtacagccacagagtaatgagtgagattagactgcaatcagggaacagagatgtgagttggacagacgtgct

SEQ ID NO: 57119 - DNA, 600 bp, Chicken  19866894312575_3
atccttcttgcagaaaagagacctaccattctgccttccctaacaacactgagcagttagagcagtgagggcaacagcagtgtgtcccatagctcccaggtacaagagtcacttccyaaaggcaggtgaaagccaccgaggacaaccaggtctcctaatggggaccgtgaccagccatttcctatctgacacctacaatatctcaggctcccttaaagccaggcagctccaataagctccagrgtgatcaatcctccgctctctgtaaaccattgctgcacagagaataaaccatagaayatctcagcaaagaatttgtggtcagaaatttttctacactaacaattagtagaaagcctctgtgtgctcctccagcagctactgagcatggtgggaagcagaggggtcacagccttaattccagacacacattggccacctgttctccaccgctgaaagggggagaggggggtacagccacagagtaatgagtgagattagactgcaatcagggaacagagatgtgagttggacagacgtgctgaaggcagagaaagcattccttaaattaaacctctaccattcacctggtcgctgact

SEQ ID NO: 57120 - DNA, 599 bp, Chicken  19866894312578_1
  misc_feature (1)..(138): n is any nucleotide
nnnnnnnnnnnnnnnnnnnnnnnnnnnnnnnnnnnnnnnnnnnnnnnnnnnnnnnnnnnnnnnnnnnnnnnnnnnnnnnnnnnnnnnnnnnnnnnnnnnnnnnnnnnnnnnnnnnnnnnnnnnnnnnnnnnnnnnnnnctcttagcaaggagaaaagaaagttaatgggcagagggggcttttctaagtaacaaagaacaaatcaaaaatcttctcagtgatagcaagcagacaagaagaaatgagcacaaacttccattttaatataagaaaacattttttccccacctctctcccctrtaaaggtgactgagcaatagaacaagctgcccatagacactgtaacagctctatctatggatatgcttaaaatctgctctagctggctctgctttgagttagagttggactggccatcttcagagatgttatctgcgtacttcaggctctaaagcgtacatcaagatacagccaggagttgattggaaaatgtcagtgtaatgttactgcctgtgctgatctccrctggcagtccaacgctccagaataagaaagcaactcctcaacaaaatgctctgcagcaagagcacctatgttct

SEQ ID NO: 57121 - DNA, 600 bp, Chicken  19866894312578_2
aagcagacaagaagaaatgagcacaaacttccattttaatataagaaaacattttttccccacctctctcccctrtaaaggtgactgagcaatagaacaagctgcccatagacactgtaacagctctatctatggatatgcttaaaatctgctctagctggctctgctttgagttagagttggactggccatcttcagagatgttatctgcgtacttcaggctctaaagcgtacatcaagatacagccaggagttgattggaaaatgtcagtgtaatgttactgcctgtgctgatctccrctggcagtccaacgctccagaataagaaagcaactcctcaacaaaatgctctgcagcaagagcacctatgttctcaagccctgctaaaaaacagatgagggccctcaagcttgttggctataaaagagtacaatcaaacatgaactcaaggagggaggtcaactactagatcttcttgacacacaaaagcatattgttagtttcaactaaatgctagcattgctaactggaaatgaaatcccactgctctgaggcttttatttatacctctcaataaatccaacggttccaaaaattcta

SEQ ID NO: 57122 - DNA, 470 bp, Chicken  19866894312579_1
cttcaaagacctaccagtagtccactgtacatagggactgcaattttccaatgcaatgaagttttggaagagagtaactgcattaaaatattcacttacacaaagcatcttgaagagtgtgataccataagttattgctttcaagtcacctgcactgctcctttggacatctgaacatttctttaaactatgagtaaaaatctccagtgaacttctggaaaaaaatgaggaatatattttcttcatgtagatgccaaagcttttttccccaaaatccctcagtcaagtttctctttccarttgtcagagttccattttcattattatttaggtgaaattaatcttcaatatatactatatttaatattatatttaatattatagatattctgctaaataaaatatgactaggaaattcagttcacattgcttctggccccacattgtgcccccgtggctataagatacta

SEQ ID NO: 57123 - DNA, 600 bp, Chicken  19866894312585_1
tcagagcaggagatcttggaaagggcatttagttataagaatagcaagagtcctgatatggaacacaggaaaaatttgtgaaatgcaataattgcatagttaagatttttaaacagtcataaagattgcattcggatagctagggtatcattcccctccaccctattttcaccgaaactgcctctatcaatccccctggagataacagattgctgatacagagctgtttcacctgaaagacatccaacaaaaatgctacatgatttgcataaaaacattatgaaagtgtttcaaaaaaamctggtattttaatagattctctaaacaaaagcatatctttctatataaacgtatttgatgaaaattacgtacatacctctgtatggtgttccaactgatgtgacatacattttcttctcataatttttcagtctgtcttccagtacatgaatctaaacagagaacagttaagatcggaaccgttaaaagtaagttaaaagtaagcataagaaattccagctaaacatcctgacattctagtagaggaaaacatatttgccctgaaatacgttattaacaactgtgcctaactaaggaaaa

SEQ ID NO: 57124 - DNA, 600 bp, Chicken  19866894312585_2
ttctatataaacgtatttgatgaaaattacgtacatacctctgtatggtgttccaactgatgtgacatacattttcttctcataatttttcagtctgtcttccagtacatgaatctaaacagagaacagttaagatcggaaccgttaaaagtaagttaaaagtaagcataagaaattccagctaaacatcctgacattctagtagaggaaaacatatttgccctgaaatacgttattaacaactgtgcctaactaaggaaaattgtgtatatgtgtatatagacacatgagaatatctasatatatacatatttatatacatatawacacgtgatatatacatgtatatgcatatacatacacatactcatataaaaacacagatataaaattatttacttattttacctaaaaccagaagatctagttcagaaaaagtgaggaaccataatttcaaaaaggacattcatgcatttttcattccacaaatgcttttgataacctgcaccacaaacatttggtattttcatactgaggagtattttgaaaatgtgcacagatgtatgagtcaaaactattttacatgtattagtatcatac

SEQ ID NO: 57125 - DNA, 600 bp, Chicken  19866894312585_3
ttacgtacatacctctgtatggtgttccaactgatgtgacatacattttcttctcataatttttcagtctgtcttccagtacatgaatctaaacagagaacagttaagatcggaaccgttaaaagtaagttaaaagtaagcataagaaattccagctaaacatcctgacattctagtagaggaaaacatatttgccctgaaatacgttattaacaactgtgcctaactaaggaaaattgtgtatatgtgtatatagacacatgagaatatctasatatatacatatttatatacatatawacacgtgatatatacatgtatatgcatatacatacacatactcatataaaaacacagatataaaattatttacttattttacctaaaaccagaagatctagttcagaaaaagtgaggaaccataatttcaaaaaggacattcatgcatttttcattccacaaatgcttttgataacctgcaccacaaacatttggtattttcatactgaggagtattttgaaaatgtgcacagatgtatgagtcaaaactattttacatgtattagtatcatacttgctggtatagagttgtgctgcatc

SEQ ID NO: 57126 - DNA, 600 bp, Chicken  19866894312592_1
cttggccaggctaaaggaacacaattccagatcaataagaagacattggctcctctcctcttgctctcttcccaagcacataagagtttttttcttgagcaggctggtaacattaaattggtattacatacaccaacatattaaaaatgagtttaagctaaacactcctctaagctgttaactgcctgctactgtgtggcacctacagaaaaggtctcactgaagtcaggaggatttaaagtgcaatgatttgttttgcttcaacatacgtctaacaatataaaaagtctctacctcccygccaacagcaaaagttgtcagaattctcctagaactttttaaagcacccattacaagtttcagtggtttggctactaaatgcctctgtgttttgttgagcacaagcttccacatttcacctatctaggcacttagcatgccagctttgaacatgtatataaaatatactacaaaactactcagcacagatcaagagcattacaggtaatttaagagactgagaatttatagggaacgatgaagactccctccaaagcttaggcggcacattgaagtagctccaaaactaaataataaact

SEQ ID NO: 57127 - DNA, 599 bp, Chicken  19866894312594_1
  misc_feature (1)..(45): n is any nucleotide
nnnnnnnnnnnnnnnnnnnnnnnnnnnnnnnnnnnnnnnnnnnnncatccctcctgttcataagctcctgttaagtactggaaggccgcaatgaggtctccctggagccttctccaagcttagcaagcccagctgaaccagtccgtaaaccgttgatatgcccccaccctttctttgcaggagtgttgctccagccctctcagcaccctcatggcctcctctggacccactccaacagctccacacctttcttgtgcgggaggccccagacctggatgcagtactccagatggggcctcrtgaaggcagagcagaagagaagaatcccctccgttgccctgctggtcacactgcttttgatgctgcccaggatacagcgggctttctaggctgcaagcacacctgccagttcatgttgagtttttccatccatcactgctcccaaagcccttcccccaacagggctgctctcaatccacccattggccatgctgacctaggtgcaggaccctgcacttggccttgttgaactttatgagttcaacagctcaacccctcaagatttcccagttccctaggtgacaacccttcccaccagc

SEQ ID NO: 57128 - DNA, 600 bp, Chicken  19866894312598_1
gtgaacacttgctccacagctccctagccacacgtatgagcagtgactcacaacctctttttggaataatacagatttctcactagtgatagggagggtttattactgcctatttgtaatgccactgggacggcatgctcacatggactccattgggtttcctccattttccctcaattcttcttcccatccttccggctgcgttgcctgccatcttccttttccactgcagtaggcactaagaagtggcctcacctgcttgtagcaatagagctggatgggatccagtgagcaccttgrgggccgaaggaaatcatgtcagggactcagccccatggaagcagttgggctcattttcctgaatcaataaagaggaaaaacaccacggtccttcaaaatataaatcactagcagaaagcctccaacagggacagaatacctgctccatacaaaaagwatacacttgtttttcaagcttatgaacatatttcaggaaggcttcagaacgaaagatgatgcggaaaaataatggagtattatgctattaatttgcatcaatttcttagagagataattcaattaaacatttcagccttcagc

SEQ ID NO: 57129 - DNA, 600 bp, Chicken  19866894312598_2
tttcctccattttccctcaattcttcttcccatccttccggctgcgttgcctgccatcttccttttccactgcagtaggcactaagaagtggcctcacctgcttgtagcaatagagctggatgggatccagtgagcaccttgrgggccgaaggaaatcatgtcagggactcagccccatggaagcagttgggctcattttcctgaatcaataaagaggaaaaacaccacggtccttcaaaatataaatcactagcagaaagcctccaacagggacagaatacctgctccatacaaaaagwatacacttgtttttcaagcttatgaacatatttcaggaaggcttcagaacgaaagatgatgcggaaaaataatggagtattatgctattaatttgcatcaatttcttagagagataattcaattaaacatttcagccttcagcaaccatcttttttttaatcatatctctttttgaactgtcaaccacttgcaggaacagcccttgattctttcttgattgtatgcaagatgaggcaatttttccttggggaataacattagctaaattaggaacactgtaatttaaaggtgattaagta

SEQ ID NO: 57130 - DNA, 564 bp, Chicken  19866894312602_1
gactagaactctaacaccgttcctgcaggccatgtagattcactcagagccaggcacatggcagttggagtttaagacgtgattcaggcatggtttggaacggtaggcaggcactcagcctgtcagcctttatgccctgacctcccttagaaatacatgcagcgacagttttctattactgtcacattttgaggcctatcattacactagagtctgagcaattaagcctttgacatttttctatataatgtaatatacattgttgtcattattcaagaggcatctggatgaggagctacragatgtggtttagtggcttgtggtagcaagagtaaygggaggacggttggcctagatgatcttgtaggtcctttccaaccttgagattctatgattctatgctgcacagactttcaagaatgttttgcatctcgtgaggacttccaagaatttcagtgtaactagtcccgacaagtaacttgtatcatatggccttatgggaaatggccttaagttgcaccagggtaagtttaggttggatatcaggaaacacttctttacagg

SEQ ID NO: 57131 - DNA, 528 bp, Chicken  19866894312602_2
gattcactcagagccaggcacatggcagttggagtttaagacgtgattcaggcatggtttggaacggtaggcaggcactcagcctgtcagcctttatgccctgacctcccttagaaatacatgcagcgacagttttctattactgtcacattttgaggcctatcattacactagagtctgagcaattaagcctttgacatttttctatataatgtaatatacattgttgtcattattcaagaggcatctggatgaggagctacragatgtggtttagtggcttgtggtagcaagagtaaygggaggacggttggcctagatgatcttgtaggtcctttccaaccttgagattctatgattctatgctgcacagactttcaagaatgttttgcatctcgtgaggacttccaagaatttcagtgtaactagtcccgacaagtaacttgtatcatatggccttatgggaaatggccttaagttgcaccagggtaagtttaggttggatatcaggaaacacttctttacagg

SEQ ID NO: 57132 - DNA, 600 bp, Chicken  19866894312610_1
agatgactgatataataatctctgtccctcagcagggataatgtgttaagatgcaactataccaacacaatcaaaaatgcttttaatttcaaattcagttctcttaaggaaaatttctatactccacatttagggcgatgcctttattccatttgaaccatgacaaaacattcatttgtgtttggaaatcccaaactttcacctgaagatccagtattttttatacatacttctgaattttgttacatttggagaggtagaaatcaataaataaacttcttcagtatgtattagggacaytgtcccactgaacttctatttgcttaaaataaataattcggagttcaatccaacctttacatccaacttatttctgaaagatggataatattttatcaaagtatgatgttgcattagttacagcagcataattgtgacatcagtgaggtatgaatgcgtgcctaattatcataattgaagcttctgcacttatactgtcacttcatttatattaacatatttggttgatttatgaaactatccaggttttataggttaaatcaagatttacttttctgcattcactttgttaaaccatac

SEQ ID NO: 57133 - DNA, 599 bp, Chicken  19866894312617_1
  misc_feature (1)..(95): n is any nucleotide
nnnnnnnnnnnnnnnnnnnnnnnnnnnnnnnnnnnnnnnnnnnnnnnnnnnnnnnnnnnnnnnnnnnnnnnnnnnnnnnnnnnnnnnnnnnnnnnaacttgcacactgtccggagaaatcgtgctatagatataggtaaactaatacataattaatagttgacaggaattcagaaacatattaattacattcccgagagcccattagcatgcagtccctcccccccttgcacgtgtgtagtaggttgtgatgatgaaggctcatagtcttcctcgccaaggcttgtagtcttcctcgctrcaaacatctgaccccaaaggaggggcatcccccaaactggtttcaacttrccctgtagacatctaatcacctccctgccaaatgttttcgagctgctctccagtccttatcttcatggccttcatcctccctgttattccagacctagtgtctgtgaaagtgcttgaaatcccttgttttctaacactctcaacataaactatctctatttgccccttatttctactttgtgaagctactttcccttttcttgctgtgaggcccttctctctataactgcagggtcctgttctcactct

SEQ ID NO: 57134 - DNA, 599 bp, Chicken  19866894312617_2
  misc_feature (1)..(45): n is any nucleotide
nnnnnnnnnnnnnnnnnnnnnnnnnnnnnnnnnnnnnnnnnnnnnaacttgcacactgtccggagaaatcgtgctatagatataggtaaactaatacataattaatagttgacaggaattcagaaacatattaattacattcccgagagcccattagcatgcagtccctcccccccttgcacgtgtgtagtaggttgtgatgatgaaggctcatagtcttcctcgccaaggcttgtagtcttcctcgctrcaaacatctgaccccaaaggaggggcatcccccaaactggtttcaacttrccctgtagacatctaatcacctccctgccaaatgttttcgagctgctctccagtccttatcttcatggccttcatcctccctgttattccagacctagtgtctgtgaaagtgcttgaaatcccttgttttctaacactctcaacataaactatctctatttgccccttatttctactttgtgaagctactttcccttttcttgctgtgaggcccttctctctataactgcagggtcctgttctcactcttcaacaccaacaaatatatctcttggctaaagtgtgtactttgaaccgaa

SEQ ID NO: 57135 - DNA, 600 bp, Chicken  19866894312617_3
aactttttgtatattttcacagaaatgttttcagaacactgagtgattgagttccatcagtaattgaagttgttggagttggtgcagaggagggccatgaagatggtcagagggctggagcacctcaccttcagggacacactgggagagttagggttgttcagcctggataagagaaggctctggggagaccttacagcggccatcagtacctgaagggggcctatagggaagctggagagggacttttataaggtcatgtaccaacaggacaaagggaaatgtctttaaactggaagrgggtagatttagactaaatattaggaagaaattcttcactgtgagacactggaagagtttgcccagagaggctgtgcacgagcccaccctgaaggcgtccaaggccaggctggatggggctttgagcaacctgctctggaggggaggagtccctgcctatagcagggtgttggaactagactatattaaatgtcccttccaacccaaaccattctatgattctatgattcttaacgtgatttgtgatcccttatcttttcaatatatgcaaatatatttaaatatataaacatgcacacg

SEQ ID NO: 57136 - DNA, 600 bp, Chicken  19866894312618_1
ctgccgtgattcccatcagataggagtgcacagatctctggcttcagctcctttcaaacattcatctctgtagaactggaaagctgcactctttgctcctatgggggtgacacgtagtaagagttcacacggagtggctgatgaggaagctctgccttatgtttggttctctgctaatgaccttttagtgcacctttcctccttgtattgcttctgcactggttctgcatcaccctttgcaattaggtagctctgtcccgttagctttaatgaagccatttcctctgcttttggtgtgcyrgactgatgagaagttctttacaggtgtgtattttgtgcccattgccaggtgattgtgtttacctgatgagagacagccgcagaactccagatggacacccggtccggcagtcctacaggctgctgtcccacatcaacagggagaaactcgatatcttccgcattgaaaagctctggaaaaatgagaagtacgttgaaggcaccttttgaatgtgaggcattcccacctatcagagcacagcagttttgtggaggccttagcttaaaaacacaggactgagcacagttaacttgccaagg

SEQ ID NO: 57137 - DNA, 600 bp, Chicken  19866894312618_2
tgccgtgattcccatcagataggagtgcacagatctctggcttcagctcctttcaaacattcatctctgtagaactggaaagctgcactctttgctcctatgggggtgacacgtagtaagagttcacacggagtggctgatgaggaagctctgccttatgtttggttctctgctaatgaccttttagtgcacctttcctccttgtattgcttctgcactggttctgcatcaccctttgcaattaggtagctctgtcccgttagctttaatgaagccatttcctctgcttttggtgtgcyrgactgatgagaagttctttacaggtgtgtattttgtgcccattgccaggtgattgtgtttacctgatgagagacagccgcagaactccagatggacacccggtccggcagtcctacaggctgctgtcccacatcaacagggagaaactcgatatcttccgcattgaaaagctctggaaaaatgagaagtacgttgaaggcaccttttgaatgtgaggcattcccacctatcagagcacagcagttttgtggaggccttagcttaaaaacacaggactgagcacagttaacttgccaaggc

SEQ ID NO: 57138 - DNA, 600 bp, Chicken  19866894312623_1
agaagaggagttggttcagctgtgattggctgtggatttccagctctgtgtggtttgagcagatgaccttaggaaggagttctgttgcttatgcttccacgtgcctgtgagtgtatgaaagtgattaggtattgtttatgaaggtctgagagagtaaaaggaaagaggcagactttgcttgtaacccaacgacacatggatggaaaagtaaggcctgggatggagcttcagcaaggctggaacaacaaatactttgttgttttgcttcagccctttgctgatgagtggagctttgccctraaaagacagtgtgtccttccagtgctggcaaataggcagctgtcttctaggtgtgcaggctgctgcttagctgccgagctctctgatgctgctctagcacccctcctgctctctaggctgcagtggacgcctgcagattctgattgcctctttcagggagtgggagtagagggaattttatgagtaagtgagagtaaaaatagggacctctgacaaggaggaaaagcagttgtccttctttcaagccattttaggatgatttgttgtgcgtgccaagctgcttgttgtggttaatgctgt

SEQ ID NO: 57139 - DNA, 599 bp, Chicken  19866894312631_1
  misc_feature (1)..(32): n is any nucleotide
nnnnnnnnnnnnnnnnnnnnnnnnnnnnnnnntctgtcttccgttctgtttctccgagtgacatcagtgctggctattagcacaaaaactgggtggatctttgaaccttgaaaccaaatcaaagaccaatttagggaaagagataattacatatcagctcttcttccttccaatatgttcaaacagattagattattttaataaatgttgaattgtggtggaaacatttttgaataatattgtcatgtgaatatccagtgcctgtatttgaatcataaaagctagttaaaaaataaaaawaaaaaaaaaaaaaaacaacttatctctctctgtagaattgtgtagtattctttgagaaccaaacagagatattccttgggaatcacaggaagactacagaagctaactgggaagaaaggctggtgcactttcctcatcacaagtgatccttactaattttacttggcacgctktgcatagctttgtgtgcgctgagtaagcgaagttgccattagctttactaggatttgaaacaagactatatacttttgtttatggtgctggacaaggctcaggaactagaacattagctttttgct

SEQ ID NO: 57140 - DNA, 600 bp, Chicken  19866894312631_2
tatgttcaaacagattagattattttaataaatgttgaattgtggtggaaacatttttgaataatattgtcatgtgaatatccagtgcctgtatttgaatcataaaagctagttaaaaaataaaaawaaaaaaaaaaaaaaacaacttatctctctctgtagaattgtgtagtattctttgagaaccaaacagagatattccttgggaatcacaggaagactacagaagctaactgggaagaaaggctggtgcactttcctcatcacaagtgatccttactaattttacttggcacgctktgcatagctttgtgtgcgctgagtaagcgaagttgccattagctttactaggatttgaaacaagactatatacttttgtttatggtgctggacaaggctcaggaactagaacattagctttttgctttggcacagatttcctgactaaattacctaatttctctctgcctcatttcataagaacagtcaaatctgttcaaaccaaaggctcatttagcccagtaccttggttctcacaagggccaataatggatgccactggaagagaatgagaaggcaagcatgcagcagtgcttagtg

SEQ ID NO: 57141 - DNA, 600 bp, Chicken  19866894312634_1
agacatcccccaacgttgagcatccagatttgaacccatcggctcccacctacactttcattacattgtttgctcgttatcagagaaactaagttaacacattagtttgtggaagcgactcagacaagaaaaataaagatatcaaattattaccagtaactttcagcacagtcgggaatagaataaacgcagcttcatttatactgccggagagtcaaagctatttccaagttcatgtaagagaatggattaaagcacaccaaatcctcccagtctgcaaaagtcaaggagcttgaaaartctctycatgtcagtgaacccagctgatactgaggtgcttttaacgttggaggatttggctcacacagcagggaaaggcagagcattaatgagagcatcatttgttyggtcacttctgcattgtgagcagcagctctgaagcacttctcaaagttttgttgcagaataatactaattgacttccagtctacgcaagatgtaagcctggaagcagcaaggatatctttacctttgcaggagtaagaagttatgtgaaaagatggagacaaagggctgcgatccacaacccttaaggtagaa

SEQ ID NO: 57142 - DNA, 600 bp, Chicken  19866894312634_2
cccccaacgttgagcatccagatttgaacccatcggctcccacctacactttcattacattgtttgctcgttatcagagaaactaagttaacacattagtttgtggaagcgactcagacaagaaaaataaagatatcaaattattaccagtaactttcagcacagtcgggaatagaataaacgcagcttcatttatactgccggagagtcaaagctatttccaagttcatgtaagagaatggattaaagcacaccaaatcctcccagtctgcaaaagtcaaggagcttgaaaartctctycatgtcagtgaacccagctgatactgaggtgcttttaacgttggaggatttggctcacacagcagggaaaggcagagcattaatgagagcatcatttgttyggtcacttctgcattgtgagcagcagctctgaagcacttctcaaagttttgttgcagaataatactaattgacttccagtctacgcaagatgtaagcctggaagcagcaaggatatctttacctttgcaggagtaagaagttatgtgaaaagatggagacaaagggctgcgatccacaacccttaaggtagaagaaatc

SEQ ID NO: 57143 - DNA, 600 bp, Chicken  19866894312634_3
tgtggaagcgactcagacaagaaaaataaagatatcaaattattaccagtaactttcagcacagtcgggaatagaataaacgcagcttcatttatactgccggagagtcaaagctatttccaagttcatgtaagagaatggattaaagcacaccaaatcctcccagtctgcaaaagtcaaggagcttgaaaartctctycatgtcagtgaacccagctgatactgaggtgcttttaacgttggaggatttggctcacacagcagggaaaggcagagcattaatgagagcatcatttgttyggtcacttctgcattgtgagcagcagctctgaagcacttctcaaagttttgttgcagaataatactaattgacttccagtctacgcaagatgtaagcctggaagcagcaaggatatctttacctttgcaggagtaagaagttatgtgaaaagatggagacaaagggctgcgatccacaacccttaaggtagaagaaatctttctctactggcttggattggagctgtagagtaactcgcacagtagatctgtcctgacttattttcagcaagcaaagttcgtactgcggtaggaagacaa

SEQ ID NO: 57144 - DNA, 600 bp, Chicken  19866894312636_1
ttggtattgctggggagagctgaggatgcaggtacctggtgacaagaacctcactgctgatgggttgcacagaggtcctgaatgaagctgctgcagcagctgccagggcagtgaatccagactttgccctgcaggccattttcttacatttccaagtcaccttgagtaagtacagctatctggagcataagcagatgtattatactgggggcccagatccaacctctgtgctgcaacttgaacagaataaaattcgtgattctttcagcctctttctgaatgaatctaatgcttgtgatrctgtgatttgcagatactaggtgcacaaaaggaagaggcagaagatggaggaagccaatgtggatacttctttgtagcttaaagttctttgtatgcctgataattacctttgctgtttcatcaaaaactttttctgagttagccttggttaatgatagtcaacactgactatctgatagtcagactgtgcctgtaagcattatggcatttattccctgcagcgtttcaagttcttttaggaagtaagccaggaagcaattgcttcttttccaaagtttatgttgtgcttttgtgtgttaa

SEQ ID NO: 57145 - DNA, 600 bp, Chicken  19866894312637_1
aggctaatgtaagatggttttagcaaaatgaagaaaatatattgagagaaatattaggtagatattctggatgaataatgctttttatacttaatgaaaggaaatactgtgctacctgcattacttctgtttggccagtgaatccaaaccagatggggctcatctgaacatctggccaattgttctgatcagtgtgctcagaaaaatgagatctaattgatagaaaagcattaccatttcgctccgggtaggcagtttttaaatttccaaagattaagctgaataacagatgctcatgtrttatatctatgtccagagagatgtgctcagctccagatgttatccaactcaaaacttcttaactttcctgttactactcctcagagaagtatgaggtaaaatgtccattgtgtcctgggactttacaagttcactgaagtccaatgggttcaccctaaactttatcatgtgttgagatgtaagaaaggggcatttgcctgtcttatatctactttttaactctttcaatgagtcttatttttatggtgtgatctgctgcctgattgtttatgtagtggtaactattttaaatatagcatg

SEQ ID NO: 57146 - DNA, 599 bp, Chicken  19866894312651_1
  misc_feature (1)..(11): n is any nucleotide
nnnnnnnnnnngagagtttaaatgagggatgtgctcctaacatcctgtttaagaatcagtgggaaatgcatccatcctgctgcatgggacacggctttgtggcagcgtgtgctgagcaccaccaaccctctgtgctgggattcggctgtggggtcgggcggtggttgttggggaagggtttggggtccatctatgaagaggaggctgcaggccagcagcctggggtgctgcgctggggcattctcatgcagagcattgctgatgggctcggagctgcgggtggcatctgggtgctgtgcrtaggtgatgttaaccacaggcactgcagcaggagcagcagcaaaaagcaatgggaggaggaggacaggtgaggacgcagggcgttccagtggggagctccaaaacgagctgcaggaacgatgtgctcttcttaagatgcttctttcagcttcatttcacctgtccgccctgggcttcctccccatccttcccctctgtatggagagcatcacttcaggaaggctccttcctgtgcgttcccaaaagatcaaatcccagctgacacatcctgctccgggcatctcacatccctccatgca

SEQ ID NO: 57147 - DNA, 600 bp, Chicken  19866894312653_1
tatcaaagcttcctctcctttcttttcatcctttccttgcccattctcccatttatgctccattcctgttagattttgccccccttgacagattgatcaccccttaaccccccccataacacagctcataaattatttctttaaaaaatattatggcccctccattttcaaatgggaatggcccaaatgatctgtcactcatggccgaatcagggagagatttctattttcacactttaaaagaccacaacaaatccagagaataggttcctgcctgtctggcatcgatcacagctgagygtttatcatgcttacagatacaacagatttaagggaaagctttaccaaccagacctggccattgtttttccttctccacattcattccaagtgcaggactgtttatataccacaaagatgtgaattaagaaaaagagtacgtatagaattttccagctgttgaagtcttattgttatcttctgtatcgaccaaacccgttgtctcttaattggttattgactgttgtgaggcaaataaggcaagctgtcatagaggggagggttagggtgcacggtttatcttaatggtatgttgatcat

SEQ ID NO: 57148 - DNA, 600 bp, Chicken  19866894312654_1
ctgggttttatagaaccttgactcagcttcagggaaggaggaatgaagaagcagaagagtgaagtggcagctgaaaccctcctttctctgtgtttgagcaatctgtgctcttatgaaaccttttgaaatctcagttgctgatgtctttctgacccccaaaattattcttgtgcaaatgttgacacccagcagagatgaaatcattgacttaggaaaacacatccagcttatcagaagctgcaggattccagcaacgtactggcaacaccggcctttgttttttctctttccttttaaacrtttgcagttagtagacaagtggcattctgaattgggctgtgygtatctgagggagcagagtagtttttcagttcatacggagctgagcccatgtctcttgggttcatggttttgtgttctgatcttctactcgtgaattttctgtgagcttacgattttgctctgttcactaattttacgttgacagttttaattacacactcgtggagtgtataaacagaacaaggactagatatgacccagaagtgggtctcagtgcaagcaggcacattttccaattgagtgcaggctttgtgtaaa

SEQ ID NO: 57149 - DNA, 600 bp, Chicken  19866894312654_2
atgaagaagcagaagagtgaagtggcagctgaaaccctcctttctctgtgtttgagcaatctgtgctcttatgaaaccttttgaaatctcagttgctgatgtctttctgacccccaaaattattcttgtgcaaatgttgacacccagcagagatgaaatcattgacttaggaaaacacatccagcttatcagaagctgcaggattccagcaacgtactggcaacaccggcctttgttttttctctttccttttaaacrtttgcagttagtagacaagtggcattctgaattgggctgtgygtatctgagggagcagagtagtttttcagttcatacggagctgagcccatgtctcttgggttcatggttttgtgttctgatcttctactcgtgaattttctgtgagcttacgattttgctctgttcactaattttacgttgacagttttaattacacactcgtggagtgtataaacagaacaaggactagatatgacccagaagtgggtctcagtgcaagcaggcacattttccaattgagtgcaggctttgtgtaaatcttctttgtggtttggacctgtagctcaccaaaatcaaagg

SEQ ID NO: 57150 - DNA, 599 bp, Chicken  19866894312664_1
  misc_feature (1)..(4): n is any nucleotide
nnnnatatgttgaggtatggtattatgactgctgtgaagctggaggacaccttttgcagtgagtttcttcatcgttgcaagcttttttcccagcattttttgaggtgtacagggaaagggcatccttactgtagcataatgtgcattttaatactatgctgtgctcttactacacttaaaacttgatttttttgttttgacatggactatgtgtgatcttactaatgtactgtcaattatgttataatttacagcacaaatttaaaagcttggcaagaattagggcagtcagcttctaaygttgaatcagttatcctctgagaagartattagcaagcatctcagaaccatcaggagggtatagaaaagtgccagggaaatttaaatcttacaggaagccttttatctgcagaaaagactgtacactgtgggaactgttttgcctgattggmtcttgatattatctgatatcattagctttctagaaatctttccacaccttacttaaaggtagtttaamtttgcaatggtgtcatgttaggtaaattgttatttggtgttgtgctgcacaaggcttaaatgtgattgtgtgaacaaaa

SEQ ID NO: 57151 - DNA, 600 bp, Chicken  19866894312664_2
actgctgtgaagctggaggacaccttttgcagtgagtttcttcatcgttgcaagcttttttcccagcattttttgaggtgtacagggaaagggcatccttactgtagcataatgtgcattttaatactatgctgtgctcttactacacttaaaacttgatttttttgttttgacatggactatgtgtgatcttactaatgtactgtcaattatgttataatttacagcacaaatttaaaagcttggcaagaattagggcagtcagcttctaaygttgaatcagttatcctctgagaagartattagcaagcatctcagaaccatcaggagggtatagaaaagtgccagggaaatttaaatcttacaggaagccttttatctgcagaaaagactgtacactgtgggaactgttttgcctgattggmtcttgatattatctgatatcattagctttctagaaatctttccacaccttacttaaaggtagtttaamtttgcaatggtgtcatgttaggtaaattgttatttggtgttgtgctgcacaaggcttaaatgtgattgtgtgaacaaaaggaactttttgttgtagaggcttttttt

SEQ ID NO: 57152 - DNA, 600 bp, Chicken  19866894312664_3
actatgctgtgctcttactacacttaaaacttgatttttttgttttgacatggactatgtgtgatcttactaatgtactgtcaattatgttataatttacagcacaaatttaaaagcttggcaagaattagggcagtcagcttctaaygttgaatcagttatcctctgagaagartattagcaagcatctcagaaccatcaggagggtatagaaaagtgccagggaaatttaaatcttacaggaagccttttatctgcagaaaagactgtacactgtgggaactgttttgcctgattggmtcttgatattatctgatatcattagctttctagaaatctttccacaccttacttaaaggtagtttaamtttgcaatggtgtcatgttaggtaaattgttatttggtgttgtgctgcacaaggcttaaatgtgattgtgtgaacaaaaggaactttttgttgtagaggctttttttttaagtgaatgaatagcaaataagcaatgccttttatttcctagcgtgactgtgaaatactttggaaaagcttctcatgctgctgcttatccttgggaaggagttaatgcattagatgcctgctg

SEQ ID NO: 57153 - DNA, 600 bp, Chicken  19866894312664_4
actaatgtactgtcaattatgttataatttacagcacaaatttaaaagcttggcaagaattagggcagtcagcttctaaygttgaatcagttatcctctgagaagartattagcaagcatctcagaaccatcaggagggtatagaaaagtgccagggaaatttaaatcttacaggaagccttttatctgcagaaaagactgtacactgtgggaactgttttgcctgattggmtcttgatattatctgatatcattagctttctagaaatctttccacaccttacttaaaggtagtttaamtttgcaatggtgtcatgttaggtaaattgttatttggtgttgtgctgcacaaggcttaaatgtgattgtgtgaacaaaaggaactttttgttgtagaggctttttttttaagtgaatgaatagcaaataagcaatgccttttatttcctagcgtgactgtgaaatactttggaaaagcttctcatgctgctgcttatccttgggaaggagttaatgcattagatgcctgctgttcttgcatacaacaatctgtctgttttaagacagcaaatgaaacctacctggagagttcatggtgag

SEQ ID NO: 57154 - DNA, 599 bp, Chicken  19866894312678_1
  misc_feature (1)..(17): n is any nucleotide
nnnnnnnnnnnnnnnnnagtgaactatttcttatttcttacctacctaactttctgcattggtagatccaagcttattgttagtactctcaagtcattcccatgaaacctgaggggaaaacaaacaaacaaacaaacaaaaaccacaaaacaaaacaaaaaaccatcacagttctattccagaaaatctcaacattaattaatgctgatgtggattgtatgggaaacatgaaggcactttacttgtccattgaatggccaacagaagaaaaggacacaagtttcacattttccatgtgtygacgggaacatttacattaattttmgtagactgggatcatactttgcattcgtgttttcacaaatgatgttttaaagcctggttctactgacagataagagcttcacagatattttcaactgatttcaatttaagcaggtgaaagtacatggtgttttgttggtcaaattcattggcagatctaatgagtacatttgcagcacatttttgtaataggattatagcagtacagaaaattattaattattttttttctggcatctaacaactttaattgttaaatcactttaaaaaaaagt

SEQ ID NO: 57155 - DNA, 600 bp, Chicken  19866894312678_2
atttcttatttcttacctacctaactttctgcattggtagatccaagcttattgttagtactctcaagtcattcccatgaaacctgaggggaaaacaaacaaacaaacaaacaaaaaccacaaaacaaaacaaaaaaccatcacagttctattccagaaaatctcaacattaattaatgctgatgtggattgtatgggaaacatgaaggcactttacttgtccattgaatggccaacagaagaaaaggacacaagtttcacattttccatgtgtygacgggaacatttacattaattttmgtagactgggatcatactttgcattcgtgttttcacaaatgatgttttaaagcctggttctactgacagataagagcttcacagatattttcaactgatttcaatttaagcaggtgaaagtacatggtgttttgttggtcaaattcattggcagatctaatgagtacatttgcagcacatttttgtaataggattatagcagtacagaaaattattaattattttttttctggcatctaacaactttaattgttaaatcactttaaaaaaaagtacctatgctaagatgggttgggtttt

SEQ ID NO: 57156 - DNA, 600 bp, Chicken  19866894312683_1
acgaaggtgcagaactggctggggcactgcagacctcccacagagctgccaaccagctgctctgcttcgggctctggtgtgcaagcaaacctcagggcttcctgaaacagggacagaaaaagctgggggaaaaggcagatttattctgcctatgcaagcttatgcatggagtaacctatgctagtgttaatttggactatgttttctcagtatccccccaggcaaaccactggtaacacaacattggctggctctttatagggaactgatggacctacagacaagtatttagtgaacttyagaaaagctttgcaatttacatttttttatttaaaagaaaaactcccagacaagcaatttaatactatgttcataaatctcatgcacaattaagagacacatttaagccctgtagattagaagtcaatacacaaagtatagcactgataattcattctgtcatagccgtaccgagcacaactttggtaggaaaaaacacatgccatctctaccactgtaattgtcacagttgtgctaacaatttaaagaacaatttaagtacagaatcaccaaggttggcaaagatctcagtgatgcccc

SEQ ID NO: 57157 - DNA, 600 bp, Chicken  19866894312684_1
gtggatgccccatccctggaggcattcaaggccaggctggatgtggctctgggcagcccggtctggtggttggtgaccctgcacatagcaggggggttgaaactagatgatcattgtggtccttttcagcccaggccattctatgattcctgtcagtagctattggccagacaatcaaggaggcaatggtcacacaaggttgtaagtgccacttccttaggagaccacactaaaacagtgctgtacttgtagatgccccctccctggaaatattcaaggccaggctggatggggctttgrgcaaccttgtctagagcgaggtgtccctgcctacagcaggggggttggaactagatgatctcaaaggacccttccaacccaaaccattctgtgattctatacttctgctctagtgcacaatggccttgagtggtgtgatcacttaagttataatacaccaacttctcactcagggtgatattgaaataagccttttgcaaaatgggtaccagagctaaacaatatggcatgaaagatggttaattcaatatcttagagctgtactatatatatatggtaatgaagcacattttagttaaa

SEQ ID NO: 57158 - DNA, 600 bp, Chicken  19866894312691_1
ctttacaaatcacacaaaagtatgttacaaaaacatctaaaattggaattaagttaaattatagacgcaactaaataactgaagaataaaagattattcattaactttagaaatatctctgtacagtatctgcttcactgaagtgcaatcttggagattgtataggattagatcatcaatcctttcatataccacagaaatttaataacacattctgcaaggaagaagaagctcctctgtccggcagttttttctattttgttgatcctgtccttcagcatagatttttaataggttttyttggtttgaggaaaatatcagaaaaatattctttagggttaggaaaagaatgcaagtcatcaggacatttgtcattgattaataaaatatgcttatatcttcaatcatcttccttgaggaactttcaaaaactaaaaagcattatgtggttccactgtggaactcctgaagtctttcaccattcttataaaatcctgcatactaaagttacagaagcctctgaatgtgtagttcagataccaggattcccttcatctacgcaatagttttttttttttttttttttttgcatgatttttc

SEQ ID NO: 57159 - DNA, 599 bp, Chicken  19866894312692_1
  misc_feature (1)..(24): n is any nucleotide
nnnnnnnnnnnnnnnnnnnnnnnnatgaacactgagcctacaattaataactgtacttatttataatattgcttcccagaaatgtttaaataactaactgatataattaaagcctaattaaatattttattcttgacttgaaccaccatcaacacacagaataaaatgacaacagtatctgtctccagagattacagggaagcagcactgagtagcatagttacattggtctgtattttctttttccaatctgtcttttgacagacaacaatgtaagtaatcatttgccatggcacttcyatcacaataacaatctacacaaaacattagcatgatataatcctcaatatgccaaagcagagtgaaaaaaataaactaatcagtctattactatttttcagtaygtgatgtgtttgctcagtatgctaacaaagactactcwctagtccagtgtgtgctgcctcacagaaatctttctgcacagagtttttgtgagaaagatgcccagaaccaagagccagtgacacctcctacagccatgacattgatgcrtacttccctgctttccttcctgaggaatgccaaamtttaatatcaag

SEQ ID NO: 57160 - DNA, 600 bp, Chicken  19866894312692_2
aattaaagcctaattaaatattttattcttgacttgaaccaccatcaacacacagaataaaatgacaacagtatctgtctccagagattacagggaagcagcactgagtagcatagttacattggtctgtattttctttttccaatctgtcttttgacagacaacaatgtaagtaatcatttgccatggcacttcyatcacaataacaatctacacaaaacattagcatgatataatcctcaatatgccaaagcagagtgaaaaaaataaactaatcagtctattactatttttcagtaygtgatgtgtttgctcagtatgctaacaaagactactcwctagtccagtgtgtgctgcctcacagaaatctttctgcacagagtttttgtgagaaagatgcccagaaccaagagccagtgacacctcctacagccatgacattgatgcrtacttccctgctttccttcctgaggaatgccaaamtttaatatcaagcttctgatacttgacaaaaagtacacmataagttattacatgctttaaaaagaactaccagggttaaatataacacaggcatatttaatttttcaacacatcccc

SEQ ID NO: 57161 - DNA, 600 bp, Chicken  19866894312692_3
ccaccatcaacacacagaataaaatgacaacagtatctgtctccagagattacagggaagcagcactgagtagcatagttacattggtctgtattttctttttccaatctgtcttttgacagacaacaatgtaagtaatcatttgccatggcacttcyatcacaataacaatctacacaaaacattagcatgatataatcctcaatatgccaaagcagagtgaaaaaaataaactaatcagtctattactatttttcagtaygtgatgtgtttgctcagtatgctaacaaagactactcwctagtccagtgtgtgctgcctcacagaaatctttctgcacagagtttttgtgagaaagatgcccagaaccaagagccagtgacacctcctacagccatgacattgatgcrtacttccctgctttccttcctgaggaatgccaaamtttaatatcaagcttctgatacttgacaaaaagtacacmataagttattacatgctttaaaaagaactaccagggttaaatataacacaggcatatttaatttttcaacacatccccaaacattctcaaagctggttctgttcagctatatgttg

SEQ ID NO: 57162 - DNA, 600 bp, Chicken  19866894312692_4
gtcttttgacagacaacaatgtaagtaatcatttgccatggcacttcyatcacaataacaatctacacaaaacattagcatgatataatcctcaatatgccaaagcagagtgaaaaaaataaactaatcagtctattactatttttcagtaygtgatgtgtttgctcagtatgctaacaaagactactcwctagtccagtgtgtgctgcctcacagaaatctttctgcacagagtttttgtgagaaagatgcccagaaccaagagccagtgacacctcctacagccatgacattgatgcrtacttccctgctttccttcctgaggaatgccaaamtttaatatcaagcttctgatacttgacaaaaagtacacmataagttattacatgctttaaaaagaactaccagggttaaatataacacaggcatatttaatttttcaacacatccccaaacattctcaaagctggttctgttcagctatatgttggtggacctcgctgatgtgcttttttacttgctatacaactgccaggtcccctgcatttattccattccgattctgcactttcatatcacccccacagctccctttccaag

SEQ ID NO: 57163 - DNA, 600 bp, Chicken  19866894312692_5
ccatggcacttcyatcacaataacaatctacacaaaacattagcatgatataatcctcaatatgccaaagcagagtgaaaaaaataaactaatcagtctattactatttttcagtaygtgatgtgtttgctcagtatgctaacaaagactactcwctagtccagtgtgtgctgcctcacagaaatctttctgcacagagtttttgtgagaaagatgcccagaaccaagagccagtgacacctcctacagccatgacattgatgcrtacttccctgctttccttcctgaggaatgccaaamtttaatatcaagcttctgatacttgacaaaaagtacacmataagttattacatgctttaaaaagaactaccagggttaaatataacacaggcatatttaatttttcaacacatccccaaacattctcaaagctggttctgttcagctatatgttggtggacctcgctgatgtgcttttttacttgctatacaactgccaggtcccctgcatttattccattccgattctgcactttcatatcacccccacagctccctttccaagcttctgaacatacttcaaaatgccacacggtttca

SEQ ID NO: 57164 - DNA, 600 bp, Chicken  19866894312692_6
ttagcatgatataatcctcaatatgccaaagcagagtgaaaaaaataaactaatcagtctattactatttttcagtaygtgatgtgtttgctcagtatgctaacaaagactactcwctagtccagtgtgtgctgcctcacagaaatctttctgcacagagtttttgtgagaaagatgcccagaaccaagagccagtgacacctcctacagccatgacattgatgcrtacttccctgctttccttcctgaggaatgccaaamtttaatatcaagcttctgatacttgacaaaaagtacacmataagttattacatgctttaaaaagaactaccagggttaaatataacacaggcatatttaatttttcaacacatccccaaacattctcaaagctggttctgttcagctatatgttggtggacctcgctgatgtgcttttttacttgctatacaactgccaggtcccctgcatttattccattccgattctgcactttcatatcacccccacagctccctttccaagcttctgaacatacttcaaaatgccacacggtttcattatccctttacgaaatctaaatacagtttgtgagcaat

SEQ ID NO: 57165 - DNA, 599 bp, Chicken  19866894312702_1
  misc_feature (1)..(55): n is any nucleotide
nnnnnnnnnnnnnnnnnnnnnnnnnnnnnnnnnnnnnnnnnnnnnnnnnnnnnnntgaagatacatttgaaacacagactgaaatgcagtgtggaaacacagagatttgcaaaaggtgttgggagaggccttggggaggagcagtgactcaggatgacacagccaggccttgccccacagcctcccagccgtgccagggccaggcccacatgtcccagtggggtgcaggacacacaagctcacagtgtgggatgggacaaggaagtctgtcctcagtgcacacaggagccatgctgcagycttatggggtgcaggcggcagggaggtgtgcagcagagagcaccccatccctggaggagctgtatcaggtggacacaaacttctcaaagggtttgcaagcacactgtctggaaggrttgcagaccatgattctgctctgtggctttgtgcagattaattatggaaaatcgcttataagtgtgttgatgtttattaacgttctgtagtgtctagtattgtggtttttttctgttgcactgctggtatcgatcctgaatgtatagttcacttattaccagttaattacatctcactaataa

SEQ ID NO: 57166 - DNA, 600 bp, Chicken  19866894312702_2
tgttgggagaggccttggggaggagcagtgactcaggatgacacagccaggccttgccccacagcctcccagccgtgccagggccaggcccacatgtcccagtggggtgcaggacacacaagctcacagtgtgggatgggacaaggaagtctgtcctcagtgcacacaggagccatgctgcagycttatggggtgcaggcggcagggaggtgtgcagcagagagcaccccatccctggaggagctgtatcaggtggacacaaacttctcaaagggtttgcaagcacactgtctggaaggrttgcagaccatgattctgctctgtggctttgtgcagattaattatggaaaatcgcttataagtgtgttgatgtttattaacgttctgtagtgtctagtattgtggtttttttctgttgcactgctggtatcgatcctgaatgtatagttcacttattaccagttaattacatctcactaataaatccataagctgctttgagtctgatctaagcagctttctcctgtggcaaatattatttaaaaaatgttaaataggtaaagaaatgacagtgtaagatgcattgagtttcctatacta

SEQ ID NO: 57167 - DNA, 595 bp, Chicken  19866894312706_1
gatgcagaagaattctcctttgtcttaggctgcaaatgaccacccagtgtgtactgctccggtactctgtacggcttatctgggctgtgcgcaacttcttcttgcgttgccatcagggagcgctcagacagtacgggggagttgttgtcatacggggagacatctccgcttgaagctttgttggagtcggtggaagagtgtctttctcctgtggagtaggaaccttccgaccgcagcatctcagggcttctgggaaatgttgttaaacaaatgatgttaatgaaaaatgcttcgcgttcrcagctacgcgtgcacttcaacatcacgcaaataaattaaaatgcaacagtatgggcacagctgctgacatgaaaacacttcagaagcagtagaaatgaattttccacgagtaaaacttacgccatgaagtggccagcagaggccactaaaaatcaaaagatgctgctatcaggaacraaaacaataaaaaccaaacgctgtacagttcgccacaggaaattaaacagtgaatcaattccttatgttaccttgaccactctgcttgttgcaacaataaatctgagggcatgatagg

SEQ ID NO: 57168 - DNA, 418 bp, Chicken  19866894312706_2
ttgttggagtcggtggaagagtgtctttctcctgtggagtaggaaccttccgaccgcagcatctcagggcttctgggaaatgttgttaaacaaatgatgttaatgaaaaatgcttcgcgttcrcagctacgcgtgcacttcaacatcacgcaaataaattaaaatgcaacagtatgggcacagctgctgacatgaaaacacttcagaagcagtagaaatgaattttccacgagtaaaacttacgccatgaagtggccagcagaggccactaaaaatcaaaagatgctgctatcaggaacraaaacaataaaaaccaaacgctgtacagttcgccacaggaaattaaacagtgaatcaattccttatgttaccttgaccactctgcttgttgcaacaataaatctgagggcatgatagg

SEQ ID NO: 57169 - DNA, 600 bp, Chicken  19866894312717_1
aatagatcaccgtacagtgaggtcagagctgctcgctgctccgcagtgactgtcccactgccatctgctggtcaccattcagcagggttagcagtgaccgtgacctaaaaacaccccacgggcagctgcttcctatcagggagctgtgctgctgtgctcctgcagctgaactgtggggagaggggaagcacagagcagcctcaaagctacaagcaaaggtccaacgtcagcatcattcctgtgctgtgggttctctccttgcactgtgggtgctgtgatattctgcaggctgtggggaarggatagggrggacattgcatttagcttctttcattgctgcaaagacgaagacgtgctggggtgggaggaggctgcttggcctcrtagcagggaaccagaagcactccagtattaatttcatcttggtttttttttgctctgagctcccttccgtctagctttccttgcccaaaaattcctgctggagacacatttttgctcagcactcagctgggagctggaggaatattccctccatcatgctgaatgtcctcctcctcctcctgcttttaaatgggctaaaaacataaatcacagaat

SEQ ID NO: 57170 - DNA, 600 bp, Chicken  19866894312717_2
atcaccgtacagtgaggtcagagctgctcgctgctccgcagtgactgtcccactgccatctgctggtcaccattcagcagggttagcagtgaccgtgacctaaaaacaccccacgggcagctgcttcctatcagggagctgtgctgctgtgctcctgcagctgaactgtggggagaggggaagcacagagcagcctcaaagctacaagcaaaggtccaacgtcagcatcattcctgtgctgtgggttctctccttgcactgtgggtgctgtgatattctgcaggctgtggggaarggatrgggrggacattgcatttagcttctttcattgctgcaaagacgaagacgtgctggggtgggaggaggctgcttggcctcrtagcagggaaccagaagcactccagtattaatttcatcttggtttttttttgctctgagctcccttccgtctagctttccttgcccaaaaattcctgctggagacacatttttgctcagcactcagctgggagctggaggaatattccctccatcatgctgaatgtcctcctcctcctcctgcttttaaatgggctaaaaacataaatcacagaatcatgg

SEQ ID NO: 57171 - DNA, 600 bp, Chicken  19866894312717_3
ccgtacagtgaggtcagagctgctcgctgctccgcagtgactgtcccactgccatctgctggtcaccattcagcagggttagcagtgaccgtgacctaaaaacaccccacgggcagctgcttcctatcagggagctgtgctgctgtgctcctgcagctgaactgtggggagaggggaagcacagagcagcctcaaagctacaagcaaaggtccaacgtcagcatcattcctgtgctgtgggttctctccttgcactgtgggtgctgtgatattctgcaggctgtggggaarggatagggrggacattgcatttagcttctttcattgctgcaaagacgaagacgtgctggggtgggaggaggctgcttggcctcrtagcagggaaccagaagcactccagtattaatttcatcttggtttttttttgctctgagctcccttccgtctagctttccttgcccaaaaattcctgctggagacacatttttgctcagcactcagctgggagctggaggaatattccctccatcatgctgaatgtcctcctcctcctcctgcttttaaatgggctaaaaacataaatcacagaatcatggctta

SEQ ID NO: 57172 - DNA, 600 bp, Chicken  19866894312717_4
gggttagcagtgaccgtgacctaaaaacaccccacgggcagctgcttcctatcagggagctgtgctgctgtgctcctgcagctgaactgtggggagaggggaagcacagagcagcctcaaagctacaagcaaaggtccaacgtcagcatcattcctgtgctgtgggttctctccttgcactgtgggtgctgtgatattctgcaggctgtggggaarggatagggrggacattgcatttagcttctttcattgctgcaaagacgaagacgtgctggggtgggaggaggctgcttggcctcrtagcagggaaccagaagcactccagtattaatttcatcttggtttttttttgctctgagctcccttccgtctagctttccttgcccaaaaattcctgctggagacacatttttgctcagcactcagctgggagctggaggaatattccctccatcatgctgaatgtcctcctcctcctcctgcttttaaatgggctaaaaacataaatcacagaatcatggcttagattggaggggaccttaaagatcatcgagttccagaagataaaaaagctgcagtcctgcagaaatcagcacccag

SEQ ID NO: 57173 - DNA, 600 bp, Chicken  19866894312717_5
gcttcctatcagggagctgtgctgctgtgctcctgcagctgaactgtggggagaggggaagcacagagcagcctcaaagctacaagcaaaggtccaacgtcagcatcattcctgtgctgtgggttctctccttgcactgtgggtgctgtgatattctgcaggctgtggggaarggatagggrggacattgcatttagcttctttcattgctgcaaagacgaagacgtgctggggtgggaggaggctgcttggcctcrtagcagggaaccagaagcactccagtattaatttcatcttggrttttttttgctctgagctcccttccgtctagctttccttgcccaaaaattcctgctggagacacatttttgctcagcactcagctgggagctggaggaatattccctccatcatgctgaatgtcctcctcctcctcctgcttttaaatgggctaaaaacataaatcacagaatcatggcttagattggaggggaccttaaagatcatcgagttccagaagataaaaaagctgcagtcctgcagaaatcagcacccaggtgcttttggaaagccaataaataacaacaacattaagcactg

SEQ ID NO: 57174 - DNA, 600 bp, Chicken  19866894312717_6; identical to SEQ ID NO: 57173

SEQ ID NO: 57175 - DNA, 600 bp, Chicken  19866894312717_7; identical to SEQ ID NO: 57173

SEQ ID NO: 57176 - DNA, 600 bp, Chicken  19866894312736_1
ttattattaatgtattacagttccaaatggcctgtagttagcgtttggaggccagcttgttgattattcaggtggcactgaagaacctgtgatgaatacagggaaagaatactgggctgtgttgggactccatagctttagactgttcatggagtaggatgcactgcaaagttcactggggcttcaaggtgcatgggccaggtgttaggagaaacaggtgcatactgcctcaggtcatgctagtaaaggaactgtgagcatcttcatcctatctctacatctgctcctaatgtgccccarcatggcacttcatgtttcccaggagatgcaaatgatccagcagcgtatgaactctgttttttcctcttcagcaaagcagagaggaattacaacttcacyacgaaggcctcatctgtatctttcctgaaggatctgttaccatttgtttaaaatgtctgcgtgcactgtcattaacagcaactcagtagtgccgtagccttaccagccagtggcatgaggagtggcattcagctcgccacttgcactaaattggctaactgttgaagagaaataagatgttgtggttaagagcagctggct

SEQ ID NO: 57177 - DNA, 600 bp, Chicken  19866894312736_2
agggaaagaatactgggctgtgttgggactccatagctttagactgttcatggagtaggatgcactgcaaagttcactggggcttcaaggtgcatgggccaggtgttaggagaaacaggtgcatactgcctcaggtcatgctagtaaaggaactgtgagcatcttcatcctatctctacatctgctcctaatgtgccccarcatggcacttcatgtttcccaggagatgcaaatgatccagcagcgtatgaactctgttttttcctcttcagcaaagcagagaggaattacaacttcacyacgaaggcctcatctgtatctttcctgaaggatctgttaccatttgtttaaaatgtctgcgtgcactgtcattaacagcaactcagtagtgccgtagccttaccagccagtggcatgaggagtggcattcagctcgccacttgcactaaattggctaactgttgaagagaaataagatgttgtggttaagagcagctggctcagagctcaggcaagacaaaaatgctctgtccttgtctgaatgggagagcacttcaagagccctctaaagcagaactgcattcacattttggtttttga

SEQ ID NO: 57178 - DNA, 600 bp, Chicken  19866894312739_1
ccagcttccagctaaataaaattaaaccttttctgctcccaaacaaattccaacaaccccttttatccaaatcacagctctagcaagagcttggcagaggcacagctggctcagcacgctgaccccccacgcctgctgcttgagctcttaacctacagtgctccaaagccttcctgagaatggcagggtccatctgcttgcatttaacctgctgcttctcgagtctgggctagtggttcattctctgagacaaatgcaagggccttgcatggagtaagtgcatcaggaagcccccccccyygctttacctgacctgagtaatgagtgccagtttgtggcacgtccagcactgcagctttgtgcttgtctccttgtgggctcggtcccatttctgcctttgtgcagcttttcactgctcggtttccacccagtaagaaaccagaccatctcctgggaaaggaaaaagaaatactcctgcagaggcagccgcccgctgagggtatgacggtcactaatctgactggcacttttaatgttccttttatgctcccctggggtttgcttttaaagatgatttacgtgggtgtcaagtgaagagta

SEQ ID NO: 57179 - DNA, 600 bp, Chicken  19866894312739_2
cagcttccagctaaataaaattaaaccttttctgctcccaaacaaattccaacaaccccttttatccaaatcacagctctagcaagagcttggcagaggcacagctggctcagcacgctgaccccccacgcctgctgcttgagctcttaacctacagtgctccaaagccttcctgagaatggcagggtccatctgcttgcatttaacctgctgcttctcgagtctgggctagtggttcattctctgagacaaatgcaagggccttgcatggagtaagtgcatcaggaagcccccccccyygctttacctgacctgagtaatgagtgccagtttgtggcacgtccagcactgcagctttgtgcttgtctccttgtgggctcggtcccatttctgcctttgtgcagcttttcactgctcggtttccacccagtaagaaaccagaccatctcctgggaaaggaaaaagaaatactcctgcagaggcagccgcccgctgagggtatgacggtcactaatctgactggcacttttaatgttccttttatgctcccctggggtttgcttttaaagatgatttacgtgggtgtcaagtgaagagtat

SEQ ID NO: 57180 - DNA, 600 bp, Chicken  19866894312743_1
tgaattcacggcattccggcactatacctggtgcaaagaggaagacagcaaaacattcccctgtagatgccactgctgtgaccagcgaacgtcttttgtcaaaatactgtgataaaatggtgacagtcgggaggaaagagaggcagtacccgaggcctgtgaataaatgccaaaaattgccataacaacaagtaagggagggggaaacaccgatgcaagaacacgttaagtcagctttccccatggcgagattacacagtatcatttcggccaactcagcaagtcaccctggaaaaaaartcattggggaaaccagaatgttatttttttaaattggaagagaagaaaaataacaaaagcaaaacccaagaaaaaacaaaacgcccaaaaccccaaacctgttcccaaacagccagcagcgtcacttggaggaccccatctgctcaaggactcagcctgtagcaatcgctcccgtaagcaaggcaagctcactggcagcagatgtgagcaggacacccaggccagatgggaacaagagaaaaataacagggagaaaaaggagaagagagaacgtgatcccacgaagggcgttcctctcga

SEQ ID NO: 57181 - DNA, 600 bp, Chicken  19866894312743_2
gaaaccagaatgttatttttttaaattggaagagaagaaaaataacaaaagcaaaacccaagaaaaaacaaaacgcccaaaaccccaaacctgttcccaaacagccagcagcgtcacttggaggaccccatctgctcaaggactcagcctgtagcaatcgctcccgtaagcaaggcaagctcactggcagcagatgtgagcaggacacccaggccagatgggaacaagagaaaaataacagggagaaaaaggagaagagagaacgtgatcccacgaagggcgttcctctcgagcccagcrctcccagcagtcagagctcctgcccgagcrtggcagcattccccagcagagcttgctggaagcagcaggagcaagccaagcgtatggcagatctgagaagaggagaactcaccagaaatgatgccgatggtgatgtacatgtgaacaacactgtgggcaaaggaggcggtgatcatgccggtgctgaccagcacccctccagccatcacgacgaagcggtgaccaaagcggttggtgagcaccgtcgacagaggagctggatgggaagagagctgtggtcagcacaggtcagcaacacaa

SEQ ID NO: 57182 - DNA, 600 bp, Chicken  19866894312743_3
agagaagaaaaataacaaaagcaaaacccaagaaaaaacaaaacgcccaaaaccccaaacctgttcccaaacagccagcagcgtcacttggaggaccccatctgctcaaggactcagcctgtagcaatcgctcccgtaagcaaggcaagctcactggcagcagatgtgagcaggacacccaggccagatgggaacaagagaaaaataacagggagaaaaaggagaagagagaacgtgatcccacgaagggcgttcctctcgagcccagcrctcccagcagtcagagctcctgcccgagcrtggcagcattccccagcagagcttgctggaagcagcaggagcaagccaagcgtatggcagatctgagaagaggagaactcaccagaaatgatgccgatggtgatgtacatgtgaacaacactgtgggcaaaggaggcggtgatcatgccggtgctgaccagcacccctccagccatcacgacgaagcggtgaccaaagcggttggtgagcaccgtcgacagaggagctggatgggaagagagctgtggtcagcacaggtcagcaacacaaacagcagctcctccaccagccacctcctgc

SEQ ID NO: 57183 - DNA, 600 bp, Chicken  19866894312744_1
cctggtgattcggtcagctgggactccaaacccacctcagtgcactaaagatggcaacagaaattgaagtgagaatgagcagacttcttaccctggtaagtcaaacatgggtacaccaatatgtgggagtccagaaaggcctaggacattgggaatcagggcacaacactggtctggatcaatattagaatcgtcccaagagatttacatctaaactgttggttggaggcttctctacatctttcccacatcggcagctattgtgaagcactacatgaggcttctttttgtgtgttgggwagctytmagggacccttattttatctaaataaggacaaagagcttgtgctgtgccagtgctgccccactggagtccaaaggcagccctgctccaacgccagtggcgtgaggcctgaagatgtgcagcactggccagaagctgggaggcaacagtctgctccttccagccaacaacgggcttgtttatccaaaggaacagcactctctgtgaacgatgataggtttattttgcagccagcgtcacaaattatggcacttttccatctattgtcccatatgctaagtaaacatcataaaccg

SEQ ID NO: 57184 - DNA, 600 bp, Chicken  19866894312744_2
tgattcggtcagctgggactccaaacccacctcagtgcactaaagatggcaacagaaattgaagtgagaatgagcagacttcttaccctggtaagtcaaacatgggtacaccaatatgtgggagtccagaaaggcctaggacattgggaatcagggcacaacactggtctggatcaatattagaatcgtcccaagagatttacatctaaactgttggttggaggcttctctacatctttcccacatcggcagctattgtgaagcactacatgaggcttctttttgtgtgttgggwagctytmagggacccttattttatctaaataaggacaaagagcttgtgctgtgccagtgctgccccactggagtccaaaggcagccctgctccaacgccagtggcgtgaggcctgaagatgtgcagcactggccagaagctgggaggcaacagtctgctccttccagccaacaacgggcttgtttatccaaaggaacagcactctctgtgaacgatgataggtttattttgcagccagcgtcacaaattatggcacttttccatctattgtcccatatgctaagtaaacatcataaaccgttctg

SEQ ID NO: 57185 - DNA, 600 bp, Chicken  19866894312744_3
attcggtcagctgggactccaaacccacctcagtgcactaaagatggcaacagaaattgaagtgagaatgagcagacttcttaccctggtaagtcaaacatgggtacaccaatatgtgggagtccagaaaggcctaggacattgggaatcagggcacaacactggtctggatcaatattagaatcgtcccaagagatttacatctaaactgttggttggaggcttctctacatctttcccacatcggcagctattgtgaagcactacatgaggcttctttttgtgtgttgggwagctytmagggacccttattttatctaaataaggacaaagagcttgtgctgtgccagtgctgccccactggagtccaaaggcagccctgctccaacgccagtggcgtgaggcctgaagatgtgcagcactggccagaagctgggaggcaacagtctgctccttccagccaacaacgggcttgtttatccaaaggaacagcactctctgtgaacgatgataggtttattttgcagccagcgtcacaaattatggcacttttccatctattgtcccatatgctaagtaaacatcataaaccgttctgcg

SEQ ID NO: 57186 - DNA, 600 bp, Chicken  19866894312746_1
tgggacagtgccgtagcaggaggccatgggaaagctgtagggttcccattcagaattcaaagccccatcagagaagctcaaaaagaaaaacgaggctgcgtttgttccttaaggcatggcattcccactgctacttttatttttaaatgcaggaaaagaagaatttctctttttctgttttcagtacaggaaatttcgtacagcatttccaactcagagaaggtcaacgatggtttgctctcagtggcagaagatgttcccttggttaaaaaaaaacccacgtaatttaacagcctaaasacaacctacttgtgctttgccattgattaaaaatgtgcacgcactgctgccatacgtcagccaaggaacggaggtacaacagaaacacggaatgcattaggaagtgacctgacgttcacagcatctttatgggggcccgggagttcttcactgaccgaatgaggcagggaaggggaaaaagctaaaacgcgtgttttacacagctctgtgtttgattccaaaagaccctataaaaatgacaaggggagaaaataagaaaggtcacatcgctgggatccccttgtcccggctgtgctggaa

SEQ ID NO: 57187 - DNA, 600 bp, Chicken  19866894312751_1
tctgtaacatcttgtgttttaaaccacttcgtgtaccctggggccaaaaatctagcataaacagcttaacccaaaccttgtgtttgtgggaaagctttattggatgtgtcacgatagttaatatggaggcacatttttagtacatttgttttggaagaccagaagctcatgatagctcaggaatgaagctccactggcaattgaatttacagagtagttctgcctcagcaaacagcatcagcagacaataatctggaaatgggaggtgagcaaatgtggcctttctcatagtgggcagcraagggctgcacattcaggaggaaatgagcagtgtagcaagggagaaggtatgggagaaagaatccaggtggaagaagagctcagaaggagcaaaacagagataaaagagctgggaagggctggaacaagcaggtccgtggtctaggcctgtggattcaggcttgcagatggctgtgtgtcctgggtctgttggctcctctggaggctgaagtctacagccagctcctgccctctcttaaggttatatagcacaatgggaaagagccacttggtcttgaggtctgtaaagcagagaaggtg

SEQ ID NO: 57188 - DNA, 600 bp, Chicken  19866894312761_1
attcaatcttcgtgaagctgttgcacaagaattaatctttgagttacaattctgcatgtaatgatttgaagcttgagctgtaaggtaaagctgtccatatagtttgtgaatgttcctgcgtagatgctgaaactcttgtaggaaatgatcactttttcagctgtggtaaaagcgtgcagagaatctttatgtacctctatgtagtgaacttaattgtgaaacaactgcggcatggattaaatgactcatgccctttttttaaatgggcatggaaaaagtcacggtacatagtctccaccyatacgtgtatctgtttctacaggtactagatgtgagcaactgagtcattgctttagctctgcccttctcaaccttttccaastgcacttttcccaaagtgccatttcttaatacttcaaggattgagaggacagggtrgcaccttaaaatcaagcaagctggggggggaagaacaattgtttcagacactgagctgtatgttgtagctggatcatatcagtgcaacagtgttgaggaacagggtttatttacctggttaaatatgaggctaggagtagtcccagcttttggaacctgtgc

SEQ ID NO: 57189 - DNA, 600 bp, Chicken  19866894312761_2
aggtaaagctgtccatatagtttgtgaatgttcctgcgtagatgctgaaactcttgtaggaaatgatcactttttcagctgtggtaaaagcgtgcagagaatctttatgtacctctatgtagtgaacttaattgtgaaacaactgcggcatggattaaatgactcatgccctttttttaaatgggcatggaaaaagtcacggtacatagtctccaccyatacgtgtatctgtttctacaggtactagatgtgagcaactgagtcattgctttagctctgcccttctcaaccttttccaastgcacttttcccaaagtgccatttcttaatacttcaaggattgagaggacagggtrgcaccttaaaatcaagcaagctggggggggaagaacaattgtttcagacactgagctgtatgttgtagctggatcatatcagtgcaacagtgttgaggaacagggtttatttacctggttaaatatgaggctaggagtagtcccagcttttggaacctgtgctggtacctatgcgctgcctggcacggtgcygtatagcatgtaaacatargtccttcaggggagctttggtagtgctgtgtga

SEQ ID NO: 57190 - DNA, 600 bp, Chicken  19866894312761_3
taggaaatgatcactttttcagctgtggtaaaagcgtgcagagaatctttatgtacctctatgtagtgaacttaattgtgaaacaactgcggcatggattaaatgactcatgccctttttttaaatgggcatggaaaaagtcacggtacatagtctccaccyatacgtgtatctgtttctacaggtactagatgtgagcaactgagtcattgctttagctctgcccttctcaaccttttccaastgcacttttcccaaagtgccatttcttaatacttcaaggattgagaggacagggtrgcaccttaaaatcaagcaagctggggggggaagaacaattgtttcagacactgagctgtatgttgtagctggatcatatcagtgcaacagtgttgaggaacagggtttatttacctggttaaatatgaggctaggagtagtcccagcttttggaacctgtgctggtacctatgcgctgcctggcacggtgcygtatagcatgtaaacatargtccttcaggggagctttggtagtgctgtgtgagctgctgtattgtctagaagtacctcagcctttgacttttcggagattgtgttctt

SEQ ID NO: 57191 - DNA, 600 bp, Chicken  19866894312761_4
tgtgagcaactgagtcattgctttagctctgcccttctcaaccttttccaastgcacttttcccaaagtgccatttcttaatacttcaaggattgagaggacagggtrgcaccttaaaatcaagcaagctggggggggaagaacaattgtttcagacactgagctgtatgttgtagctggatcatatcagtgcaacagtgttgaggaacagggtttatttacctggttaaatatgaggctaggagtagtcccagcttttggaacctgtgctggtacctatgcgctgcctggcacggtgcygtatagcatgtaaacatargtccttcaggggagctttggtagtgctgtgtgagctgctgtattgtctagaagtacctcagcctttgacttttcggagattgtgttcttgctgaagtttgtatttgaaaaggctggtacatatttgaagtgcagacattctaataactgtacttacccatgcctttatctgtaaccatcaggactgtatgacgtctgtacttgtcaaaaggctggaaaatgagaaataagttgctcttccttgggctagaacagcagtaatgataagctgttgatttctta

SEQ ID NO: 57192 - DNA, 600 bp, Chicken  19866894312761_5
gctttagctctgcccttctcaaccttttccaastgcacttttcccaaagtgccatttcttaatacttcaaggattgagaggacagggtrgcaccttaaaatcaagcaagctggggggggaagaacaattgtttcagacactgagctgtatgttgtagctggatcatatcagtgcaacagtgttgaggaacagggtttatttacctggttaaatatgaggctaggagtagtcccagcttttggaacctgtgctggtacctatgcgctgcctggcacggtgcygtatagcatgtaaacatargtccttcaggggagctttggtagtgctgtgtgagctgctgtattgtctagaagtacctcagcctttgacttttcggagattgtgttcttgctgaagtttgtatttgaaaaggctggtacatatttgaagtgcagacattctaataactgtacttacccatgcctttatctgtaaccatcaggactgtatgacgtctgtacttgtcaaaaggctggaaaatgagaaataagttgctcttccttgggctagaacagcagtaatgataagctgttgatttcttacgttgtcctctatctgggc

SEQ ID NO: 57193 - DNA, 600 bp, Chicken  19866894312773_1
cactgaaagaagaaaagtgtgatgcacccagagagcaacctcagagtcattgcaaagatgaacattcaaagaatgaaaaagcagaggactataacgaagtgcttggcgaaccccaagatacctgggatttgctgagtggagggaacccctttgggttttttctcactaaagtcaggggaattgagcagagctataattcgggagccctgcacataaaaggtgagcaagtggctctcacagaagtgggcttttggatgggagggtcttgtgtgcatgaggacacttaatcttagtttatgkktttttttaaatgcaaagattccttggtttaaacgaggcttcatgctccaagtatgaatattttaggagctggttctgttacctcttgtttgtgcttgtctttatactgccaaatagtttggacctagtaagtcactgttacttgacacggtacatggtactgcttgtgaatttcgatgacttgggctcgcagtcacacatcagtgcaactggaagcgagtgtaagtcagaggtggaatagtccatggtgtatgacgctgatggtttgggaatgccacgtgactgaaattaattttactt

SEQ ID NO: 57194 - DNA, 600 bp, Chicken  19866894312773_2
actgaaagaagaaaagtgtgatgcacccagagagcaacctcagagtcattgcaaagatgaacattcaaagaatgaaaaagcagaggactataacgaagtgcttggcgaaccccaagatacctgggatttgctgagtggagggaacccctttgggttttttctcactaaagtcaggggaattgagcagagctataattcgggagccctgcacataaaaggtgagcaagtggctctcacagaagtgggcttttggatgggagggtcttgtgtgcatgaggacacttaatcttagtttatgkktttttttaaatgcaaagattccttggtttaaacgaggcttcatgctccaagtatgaatattttaggagctggttctgttacctcttgtttgtgcttgtctttatactgccaaatagtttggacctagtaagtcactgttacttgacacggtacatggtactgcttgtgaatttcgatgacttgggctcgcagtcacacatcagtgcaactggaagcgagtgtaagtcagaggtggaatagtccatggtgtatgacgctgatggtttgggaatgccacgtgactgaaattaattttacttt

SEQ ID NO: 57195 - DNA, 600 bp, Chicken  19866894312775_1
ttagtttcaatttcctcatttgtcttatgtgaaagttaaatgtgatggtgtcaaaagccttcctgagccaagatatatgatgtccactgctacccttttcctgcacactaatcatcttgctataggagggaggtaggttggtttgctgtgagttgctgtgaaatttgttggccatttcccaccttcttactgatgggctacgcatagggcattgggttgttgtccctgttgtttttgcaggtggtaggttgtgcagcaggtctgcacttcccaaggtgcctcctgcacaggcaggtaacrttgtcctctgcatccccggaggagagctgatgcttctggattaacttcagagccatatctggaaatgccatcctcttccttatcccttaggaatacattaatggatgtttattcagttgcttgtttaaattaagtcattcttgctacttattttatttttagtcttcaacataagctatttctgttttctcaccattctttcatcgagtccaagatcaggtcaagagcctcagagctgatgtgtcattttgctcatgacagcaccctgacaagcggatgcggcagtgtgtttgaggcatc

SEQ ID NO: 57196 - DNA, 600 bp, Chicken  19866894312777_1
ctcctctgcataaattcagggcttcaccagattggggaaagaatagagatggagcagcttgactgccagcatttaaaattatcctctgcaggtgctttgaattcttcggaaggattctagttctgaaagggtaggctaggtttgctttctgaaatcacagatatccaaaaaagtgtgtaggggtgcatcaactgagacacacctggcttgcttctattttgccaggtgtagacacagtttagctgtgcttttcaagaaatgttttcttactctgttggattagcttctagcactgatccrcctggatgtcagatagacrtgtctgaactgcccagtgccttttcawaacatcattaatattggaagtgtttgtcattcacagatacatacagttcaatataatattcatatgtcttcatatacgcatataatatccaccattaaaaataaagctaagcagctcacagatttttgaaagtcctgttttccaggaacttgaatttatgaaattacctgcatttattctcacatttcagtaaatttgtagcaaaagtagtgccctggttgcagcaggataaaaatgtatatttatacatgcat

SEQ ID NO: 57197 - DNA, 600 bp, Chicken  19866894312777_2
ggcttcaccagattggggaaagaatagagatggagcagcttgactgccagcatttaaaattatcctctgcaggtgctttgaattcttcggaaggattctagttctgaaagggtaggctaggtttgctttctgaaatcacagatatccaaaaaagtgtgtaggggtgcatcaactgagacacacctggcttgcttctattttgccaggtgtagacacagtttagctgtgcttttcaagaaatgttttcttactctgttggattagcttctagcactgatccrcctggatgtcagatagacrtgtctgaactgcccagtgccttttcawaacatcattaatattggaagtgtttgtcattcacagatacatacagttcaatataatattcatatgtcttcatatacgcatataatatccaccattaaaaataaagctaagcagctcacagatttttgaaagtcctgttttccaggaacttgaatttatgaaattacctgcatttattctcacatttcagtaaatttgtagcaaaagtagtgccctggttgcagcaggataaaaatgtatatttatacatgcatgttactatgattgcataac

SEQ ID NO: 57198 - DNA, 600 bp, Chicken  19866894312777_3
agatggagcagcttgactgccagcatttaaaattatcctctgcaggtgctttgaattcttcggaaggattctagttctgaaagggtaggctaggtttgctttctgaaatcacagatatccaaaaaagtgtgtaggggtgcatcaactgagacacacctggcttgcttctattttgccaggtgtagacacagtttagctgtgcttttcaagaaatgttttcttactctgttggattagcttctagcactgatccrcctggatgtcagatagacrtgtctgaactgcccagtgccttttcawaacatcattaatattggaagtgtttgtcattcacagatacatacagttcaatataatattcatatgtcttcatatacgcatataatatccaccattaaaaataaagctaagcagctcacagatttttgaaagtcctgttttccaggaacttgaatttatgaaattacctgcatttattctcacatttcagtaaatttgtagcaaaagtagtgccctggttgcagcaggataaaaatgtatatttatacatgcatgttactatgattgcataactttcaaaaagcaaaccccacaacactg

SEQ ID NO: 57199 - DNA, 600 bp, Chicken  19866894312777_4
aaagaactgcagaaaggtcttcttccagctctaatgcttctgtggaaggctgtctggaaagtagattaaatggcaaacaacccaatgtactcatggtgttgctgaaaatagcgaacagtatttggtttcagttaaaagctacatggaaagttgtgtatgctggaactgtgggattatggatgacagcaattgctcatcccagtgagtcctgaaacatctctatgttggaaaaaaaaaaaaaaatcttatacctataccttatatgaagtttagtgcccagctgtatgtgccaagagaagrcaaggttgtctgtccataaacattttccaacaaaagaaagcaaaagcttgggttgtcagactcacatcaggctcctcaaatggcaaatacagtgtggagcaaatcctgtgaactgatgtgacttaggctaatggtgtgtgcagaaaaggacttcaacatttagctgctctgaatttttatctgtagaaatttaaattgaattattaatacattttagaagaagggaaagatgtgttgtgacttccttctggaatggccccatttcatttgaaagggtatccgctgtggaaaggagaaagg

SEQ ID NO: 57200 - DNA, 600 bp, Chicken  19866894312777_5
tctgggtaaggctgtcttttgtatgttgttttctccaccagtctttcaatgtatggaatatgcaagatattgcaaaacgtgtggcaaaataccatgtatttgcaacctccctgcagcaactgcagctgtttcttatgtggaaaagtgatatatcctgttagctatgctaaatctgatgtaactaggggaaattcttctcggactgccagcagcatataaatgtcctgctccaaggaatgaaagaaaatacaaaaaagctgggaatacctctggtgatagccaaataataataataataawttttttctccaaaatgtacatccctttcgtacatggtttcccttttcatcacgggtacggttcagaactccagtaacaacctttccatctattctagtgatgtcagtagattttgctcattattcgtatgacctgtagaatctgtttcccagctaatttctctggaggtttctgaaaatcaatgttttataaaactgtgagctgacgtgattcttacccttaccttccatgctggtgcaccaacattttcacagtttcttcacctaactcagctgatatttcctcagatgtatgaagtac

SEQ ID NO: 57201 - DNA, 600 bp, Chicken  19866894312779_1
cagctggtaagtactccaccaaaagatccctcagcactgggggtactaatgaaaggtttcactttacatgttatttcactatcaggaagcccgaaagcaatgacagggaatggcctgctgcagaagagccccttgaccagctgcattgacagccaaagagacaagcagcaaggatcagcaaggatctgacctccccacgcacccactgtttacttggcacggacagcaagcaggaagtacagcctgcgcagagacccaggaaagcacactgccatcagctccacttcaataatttcaagrgctctccaccccccagcttcccccagcaaaacgtgacactgcagcacttcctgacagatgtccataagatcccacagtgaccacatgcatcctgctgctgctcttcagaaagcagcctggggctagaactygcagcagtgaagggcagatttactcagcttctggtgagcctcagatctcagagctgaataattgcggctgaagctgtgcagtggttttctgataaaataatttattgccagaaaaaaaaaaaaaagtagatttggtgaaacaacatttggcagagatgcaccagttatg

SEQ ID NO: 57202 - DNA, 600 bp, Chicken  19866894312779_2
cttgaccagctgcattgacagccaaagagacaagcagcaaggatcagcaaggatctgacctccccacgcacccactgtttacttggcacggacagcaagcaggaagtacagcctgcgcagagacccaggaaagcacactgccatcagctccacttcaataatttcaagrgctctccaccccccagcttcccccagcaaaacgtgacactgcagcacttcctgacagatgtccataagatcccacagtgaccacatgcatcctgctgctgctcttcagaaagcagcctggggctagaactygcagcagtgaagggcagatttactcagcttctggtgagcctcagatctcagagctgaataattgcggctgaagctgtgcagtggttttctgataaaataatttattgccagaaaaaaaaaaaaaagtagatttggtgaaacaacatttggcagagatgcaccagttatgatgaagcattagctggaagactccttgggttggattttctagtgaaaacaggatgctgggggagaaaaatccactgcagaacatcaaagaggcacagaagtacctcagactytcttgatacgattaatatc

SEQ ID NO: 57203 - DNA, 363 bp, Chicken  19866894312779_3
cagcctggggctagaactygcagcagtgaagggcagatttactcagcttctggtgagcctcagatctcagagctgaataattgcggctgaagctgtgcagtggttttctgataaaataatttattgccagaaaaaaaaaaaaaagtagatttggtgaaacaacatttggcagagatgcaccagttatgatgaagcattagctggaagactccttgggttggattttctagtgaaaacaggatgctgggggagaaaaatccactgcagaacatcaaagaggcacagaagtacctcagactytcttgatacgattaatatccttgtttaacactgttctctcccacgtcagacaacaatgaccaa

SEQ ID NO: 57204 - DNA, 600 bp, Chicken  19866894312780_1
gctcatcaatgaagcatgttttttcaaaccgtaatatggagtcaacacactccagaagcaaagacaaaataaggaacattaaaaccatactggtgaaatgcagaattgtatgtgctccactgggagcttcagtgaagcttgcaagaacattctccccagcagttcaacaatttatgcaaagtatatttcaacatacattcaactgataaaaatgagtggtctgaagtgttttacattcagaatggaaacaccaattgcttttgctgttctctcttgcaaggaaagactgcaatattcaayctgaaggcaaaaattaaagtaggttaaagggaaacatctaatcgcagagggctgacaccaagtcaggaagggattaaaaggctgaagatgccaaagcatcccacattctctcttctgctcagtgtcaggtaaagcagtatgaaaattgatttgtcttctcaactactgttgtgtttcctgggaatgaacacctagaaaacatcagaaaccagctcccacctctgctgcactgccccatccccacaggctgacagtgmtagacatgaagatgggggtggacagtagagccctggcaccacc

SEQ ID NO: 57205 - DNA, 572 bp, Chicken  19866894312780_2
cttttgctgttctctcttgcaaggaaagactgcaatattcaayctgaaggcaaaaattaaagtaggttaaagggaaacatctaatcgcagagggctgacaccaagtcaggaagggattaaaaggctgaagatgccaaagcatcccacattctctcttctgctcagtgtcaggtaaagcagtatgaaaattgatttgtcttctcaactactgttgtgtttcctgggaatgaacacctagaaaacatcagaaaccagctcccacctctgctgcactgccccatccccacaggctgacagtgmtagacatgaagatgggggtggacagtagagccctggcaccaccaccagtggagatacaagtccccgtcccttttaataaacacatatcctgaagaaaaaaaaagcataattacattttttccccatttctccctacctctccaaagtttatgctttgacaagatgacaataaaatgatttttgagactatctggagaaaatggatttgctcactgatcattttgagcaagtaattagtcacagccgctattaatgatggcagggatggggga

SEQ ID NO: 57206 - DNA, 600 bp, Chicken  19866894312782_1
ttcaaatttaagattaaatcttacacaaaagtaatgcttaaaaaaaaatagacagtaaatggatttatattagcataaaaatgtcactgttcctaaataaacctttcctaggtacatcaacagaaagaacataagtttacaagaccataaactgacatttagtaaaagcctacaggatgaaacctacttaaaactgcaactcttaatctccaaacaatatatggttcctctctacagttatttatctgcaatagtcaggacggcaatacacttgtacaaagggagctttgtgtttgtatrctgcgtaagataacatgcacttctttcaatttcctaagtaacactacttatgttacagtacaataacaactccagacaaataaatagtttcttttttcagccctcataatattcaagagttatgaaagaagacatacctctcagtgctttttcacagtacaattttaacttacctttcttctgagttgtacagccgagcaagcccaaaatctgcaagctttatctgccccctggtggaaaaaggaaagaattatttaggagttaaccctgccaaaaccagctgaagtttcagattttcag

SEQ ID NO: 57207 - DNA, 600 bp, Chicken  19866894312795_1
gactatgtagagtggttcaaatgtgtacctgctttaagtgcttgccacctgaaacacaagggggtgaacctaaactgcccgccacaaatgcatgaagggaagttttggatttgagcccagatatgaatatacaaatagataaagtttatagaattgtgacacgaagtctcaggggttttgtgggaatgtcaaaaaagcacttcacaaccagaacatatgccttccatgctaagatgtcggatgcctttgtctccagaacaggtcatggagataagagctacctttgcatattttttccaracttatctaaagctactcaaatggagcatcagcctaggatttcctttaagaagggttttagcacgagagatgtaagccttctattttgcatctggcaaagtggagtgatcactacggaaataggcagtgtagtctacatttccgcatggtgatcaaactaaagctcttctaaattgctgacctgcttcccttgttacagatgaatacatcagaggaaagtcggcagaagttgcctggcttaatgacagactggcacaagattctgcaatgagacaaactttgattcttacccatgcactt

SEQ ID NO: 57208 - DNA, 599 bp, Chicken  19866894312796_1
  misc_feature (1)..(64): n is any nucleotide
nnnnnnnnnnnnnnnnnnnnnnnnnnnnnnnnnnnnnnnnnnnnnnnnnnnnnnnnnnnnnnnnttgacaaccaaagtttgatttaaaaaaaaattttaatatctttgtgtaaatggtatgttcctgaaaaatccacaaattcctctgctaaaatattaaggcttttagaaacatgggacttgtttacaaggccaggctctgagtctgcaagcttgtactgctcttagctcacagcctcagcttgctcaggaacccgtcacccacacgcaggaggcttttctctgaacttcagacccatmcttgtcttttcactgctgtttatcctcagtgctggataaggagcaatggaaataaatcaccaaaatcactggtatttcgtaattacataaaggcatcctcgctgcagtatgcacttatgtcttgtgaatagctaatggctgctcaaactgacagcaggtcaaaagtgcacagcagccatctcagggtcttaaaaataaacaaatagctgattctgttgattctagtgtagagaartgctcatctgaactccctgttgtgtgcaggaggtgtttcctcatttaccagaaggaaaaatttg

SEQ ID NO: 57209 - DNA, 600 bp, Chicken  19866894312796_2
cctcagcttgctcaggaacccgtcacccacacgcaggaggcttttctctgaacttcagacccatmcttgtcttttcactgctgtttatcctcagtgctggataaggagcaatggaaataaatcaccaaaatcactggtatttcgtaattacataaaggcatcctcgctgcagtatgcacttatgtcttgtgaatagctaatggctgctcaaactgacagcaggtcaaaagtgcacagcagccatctcagggtcttaaaaataaacaaatagctgattctgttgattctagtgtagagaartgctcatctgaactccctgttgtgtgcaggaggtgtttcctcatttaccagaaggaaaaatttggatgaacttcctgtggtgacgcatctctcggtagagcttagcagataataacagggaaggaggctgtgatttgggattagtacgatacaagcagggtcctgtttcagtgggacttgttgcaccagtgatgctgcaaacacttcagcagcccagggcaaaaaagactaccatatgcaaacatcagtgagaagaaaaggaggaaagcttgaggaaagcagcatttttatattgcgtat

SEQ ID NO: 57210 - DNA, 599 bp, Chicken  19866894312798_1
  misc_feature (1)..(49): n is any nucleotide
nnnnnnnnnnnnnnnnnnnnnnnnnnnnnnnnnnnnnnnnnnnnnnnnntatattacagttatacatataagtaggaatttctttgctattttttctagattatatttaagcctacctacttgtgggctatatgttggttttaaaaaaagagatttgctaggtaagcatctagctatgaattatttcttaaatgttatttgtacttgtaatgtgaaaggaatacagcagtacttcaggcaatacaaacaatcctgttacttctatgattttatccattaataaatccttctcagaaaagyaaggatgtgtcttgtatttcctcacatttcttcagaatattattgcttgaagccaaaggaatgcaataaggtatttactgctaaatttacttgattatatcagctcgatcagggatttattagaggatctgatgacttttatggaatgtctggtaaggcaacttaactgaaaatggtgaagtattttttggttactgtcygtactctgtgagctttgtaaaacartaaaaagctgtgaaactgatcagtaaggaactmaataggagaaatgacagagctgtggtagcaggtgcctggag

SEQ ID NO: 57211 - DNA, 600 bp, Chicken  19866894312798_2
gtacttgtaatgtgaaaggaatacagcagtacttcaggcaatacaaacaatcctgttacttctatgattttatccattaataaatccttctcagaaaagyaaggatgtgtcttgtatttcctcacatttcttcagaatattattgcttgaagccaaaggaatgcaataaggtatttactgctaaatttacttgattatatcagctcgatcagggatttattagaggatctgatgacttttatggaatgtctggtaaggcaacttaactgaaaatggtgaagtattttttggttactgtcygtactctgtgagctttgtaaaacartaaaaagctgtgaaactgatcagtaaggaactmaataggagaaatgacagagctgtggtagcaggtgcctggagaarctaagtaccagaattatgaagaagaaactaagacttaatgccccatcaagggaggccacctaaaatgtacagtgatatcaggtgcaggggaatagtactgttccattatcatttttaacagcagtctcagaccagaccaacataggtttggacaggagactggagcccctctcagctcaggggaatgccctttctgtc

SEQ ID NO: 57212 - DNA, 600 bp, Chicken  19866894312798_3
gcagtacttcaggcaatacaaacaatcctgttacttctatgattttatccattaataaatccttctcagaaaagyaaggatgtgtcttgtatttcctcacatttcttcagaatattattgcttgaagccaaaggaatgcaataaggtatttactgctaaatttacttgattatatcagctcgatcagggatttattagaggatctgatgacttttatggaatgtctggtaaggcaacttaactgaaaatggtgaagtattttttggttactgtcygtactctgtgagctttgtaaaacartaaaaagctgtgaaactgatcagtaaggaactmaataggagaaatgacagagctgtggtagcaggtgcctggagaarctaagtaccagaattatgaagaagaaactaagacttaatgccccatcaagggaggccacctaaaatgtacagtgatatcaggtgcaggggaatagtactgttccattatcatttttaacagcagtctcagaccagaccaacataggtttggacaggagactggagcccctctcagctcaggggaatgccctttctgtctgccctccaaaagataagtgaaata

SEQ ID NO: 57213 - DNA, 600 bp, Chicken  19866894312798_4
cttctatgattttatccattaataaatccttctcagaaaagyaaggatgtgtcttgtatttcctcacatttcttcagaatattattgcttgaagccaaaggaatgcaataaggtatttactgctaaatttacttgattatatcagctcgatcagggatttattagaggatctgatgacttttatggaatgtctggtaaggcaacttaactgaaaatggtgaagtattttttggttactgtcygtactctgtgagctttgtaaaacartaaaaagctgtgaaactgatcagtaaggaactmaataggagaaatgacagagctgtggtagcaggtgcctggagaarctaagtaccagaattatgaagaagaaactaagacttaatgccccatcaagggaggccacctaaaatgtacagtgatatcaggtgcaggggaatagtactgttccattatcatttttaacagcagtctcagaccagaccaacataggtttggacaggagactggagcccctctcagctcaggggaatgccctttctgtctgccctccaaaagataagtgaaataacctgagggaggcggtctgagtagtcctaagct

SEQ ID NO: 57214 - DNA, 600 bp, Chicken  19866894312798_5
ggatgtgtcttgtatttcctcacatttcttcagaatattattgcttgaagccaaaggaatgcaataaggtatttactgctaaatttacttgattatatcagctcgatcagggatttattagaggatctgatgacttttatggaatgtctggtaaggcaacttaactgaaaatggtgaagtattttttggttactgtcygtactctgtgagctttgtaaaacartaaaaagctgtgaaactgatcagtaaggaactmaataggagaaatgacagagctgtggtagcaggtgcctggagaarctaagtaccagaattatgaagaagaaactaagacttaatgccccatcaagggaggccacctaaaatgtacagtgatatcaggtgcaggggaatagtactgttccattatcatttttaacagcagtctcagaccagaccaacataggtttggacaggagactggagcccctctcagctcaggggaatgccctttctgtctgccctccaaaagataagtgaaataacctgagggaggcggtctgagtagtcctaagctttagcagtttacagagaaggttgtgctactgtgcagtgactggc

SEQ ID NO: 57215 - DNA, 600 bp, Chicken  19866894312798_6
tggctgtactctggccttaaaacacttcaactcttaaagaaatcacagcacaactaaattttacctctaagaactatgaacaagcaccaagagtgtaacatcaaagtctgtttaccctgtgtggtggaggacagtgccagagctgggctgagcgctctccagaatgaggagtacccaaggttcttcaggtcatgtgctatgtctagcaatgctgctttccttccttggcagctgagcagcagctttgctttgtgctggatcttcagtacctatgcagtgagtgtacagcttctctgaagygctggaagttagagaaaaccagcacggatgtggtctgggaatcaatccaaatttcctccatatgtgcaatgtggtactgtctgtatataggtgaccatgtgggatctatcttcagagatccccgttgctctgaagcaagtgttgaaggagagttaatgccatctattgtgtgcatcaataccctcgtgttagtgtycacrttgtttttatggtgtttccttattcttcacatcagcatcgctgttggaaagagtttgaggaaggtgctagtagagaggtgtttgtttacatgatttctaa

SEQ ID NO: 57216 - DNA, 600 bp, Chicken  19866894312798_7
ctatgtctagcaatgctgctttccttccttggcagctgagcagcagctttgctttgtgctggatcttcagtacctatgcagtgagtgtacagcttctctgaagygctggaagttagagaaaaccagcacggatgtggtctgggaatcaatccaaatttcctccatatgtgcaatgtggtactgtctgtatataggtgaccatgtgggatctatcttcagagatccccgttgctctgaagcaagtgttgaaggagagttaatgccatctattgtgtgcatcaataccctcgtgttagtgtycacrttgtttttatggtgtttccttattcttcacatcagcatcgctgttggaaagagtttgaggaaggtgctagtagagaggtgtttgtttacatgatttctaagtttgcctgcagcaaattgaaatgtttttggcaagtttagtaattcttttgagcctccaccagttgctgtgctgcctgttgggtttcaggtcttgcatttatattgcttaaaggactgtggtgtgattcttaccacttgcacttcatcttttgccagcccagctgcgttgcactgaccttcctgagactgttccaa

SEQ ID NO: 57217 - DNA, 600 bp, Chicken  19866894312798_8
gtctagcaatgctgctttccttccttggcagctgagcagcagctttgctttgtgctggatcttcagtacctatgcagtgagtgtacagcttctctgaagygctggaagttagagaaaaccagcacggatgtggtctgggaatcaatccaaatttcctccatatgtgcaatgtggtactgtctgtatataggtgaccatgtgggatctatcttcagagatccccgttgctctgaagcaagtgttgaaggagagttaatgccatctattgtgtgcatcaataccctcgtgttagtgtycacrttgtttttatggtgtttccttattcttcacatcagcatcgctgttggaaagagtttgaggaaggtgctagtagagaggtgtttgtttacatgatttctaagtttgcctgcagcaaattgaaatgtttttggcaagtttagtaattcttttgagcctccaccagttgctgtgctgcctgttgggtttcaggtcttgcatttatattgcttaaaggactgtggtgtgattcttaccacttgcacttcatcttttgccagcccagctgcgttgcactgaccttcctgagactgttccaagtga

SEQ ID NO: 57218 - DNA, 600 bp, Chicken  19866894312803_1
ttaagtactctgggatcattcacagcaatcagacaagagccgaggatgtgcaccacatatacatcttatcttcaaaagatactcctgtttcttggaaagcaagagtctgccttcactgtggggccctaaaggtggaagcttgcttgaactcccaaataggagaaaggagtaaccagtagcagcaccaaccctccacaaaagaatcttgacaagatcagcaagttaactctgctgtgttcctcctcagtgttggcatgcgttaccatttctgcttgatcaggacttctgaagttcatcatyttccctccctctcctttggttatcagtggggagaggtgtcagagttttaggtgaaactagaccagaaatcgtgtcctgaatgtgtacctaataatgtaatggggctttaacccatggatggacaccagagtgattctgaagcaaaccagccacttggaaagtaagtgctccatgttctcagaccttattatctatatcagcctaatgttatagaatagcacagtttgctgatgcagataaagaagtatggcgatgtaaacgcaagataaaccttggtctcttgtcaagaacagattgaaa

SEQ ID NO: 57219 - DNA, 600 bp, Chicken  19866894312803_2
taatgtaatggggctttaacccatggatggacaccagagtgattctgaagcaaaccagccacttggaaagtaagtgctccatgttctcagaccttattatctatatcagcctaatgttatagaatagcacagtttgctgatgcagataaagaagtatggcgatgtaaacgcaagataaaccttggtctcttgtcaagaacagattgaaaatttatcaagtatttttaacaatgatgtgctgcaaactgaacaggtattttattttactatagatggcagaggagaccctttaagaacaaygtattttatagattcttgggattctgactgtggttaatcctctacaccctgtaaaagatttgacttgctcctraagacattatttgttgcttgcagctagctgcagatgagatccatataaacttggatttataacwccaaggtagctcaggagcactgatctcccaagagcagttaaggagtgggctgataagaacagcagcttactgaactatgccattctgggaatattcaaggtgttcccaagaagtttctctgcaagtaatacaaatactggcttcacttaccttatgaggtcag

SEQ ID NO: 57220 - DNA, 600 bp, Chicken  19866894312803_3
aatgtaatggggctttaacccatggatggacaccagagtgattctgaagcaaaccagccacttggaaagtaagtgctccatgttctcagaccttattatctatatcagcctaatgttatagaatagcacagtttgctgatgcagataaagaagtatggcgatgtaaacgcaagataaaccttggtctcttgtcaagaacagattgaaaatttatcaagtatttttaacaatgatgtgctgcaaactgaacaggtattttattttactatagatggcagaggagaccctttaagaacaaaytattttatagattcttgggattctgactgtggttaatcctctacaccctgtaaaagatttgacttgctcctraagacattatttgttgcttgcagctagctgcagatgagatccatataaacttggatttataacwccaaggtagctcaggagcactgatctcccaagagcagttaaggagtgggctgataagaacagcagcttactgaactatgccattctgggaatattcaaggtgttcccaagaagtttctctgcaagtaatacaaatactggcttcacttaccttatgaggtcaga

SEQ ID NO: 57221 - DNA, 600 bp, Chicken  19866894312803_4
gtgctccatgttctcagaccttattatctatatcagcctaatgttatagaatagcacagtttgctgatgcagataaagaagtatggcgatgtaaacgcaagataaaccttggtctcttgtcaagaacagattgaaaatttatcaagtatttttaacaatgatgtgctgcaaactgaacaggtattttattttactatagatggcagaggagaccctttaagaacaaagtattttatagattcttgggattctgactgtggttaatcctctacaccctgtaaaagatttgacttgctcctraagacattatttgttgcttgcagctagctgcagatgagatccatataaacttggatttataacwccaaggtagctcaggagcactgatctcccaagagcagttaaggagtgggctgataagaacagcagcttactgaactatgccattctgggaatattcaaggtgttcccaagaagtttctctgcaagtaatacaaatactggcttcacttaccttatgaggtcagaaggagtcacggaacaaaatggctcagctgatgatatggtgaataacttccagttatttgtctggcatgactg

SEQ ID NO: 57222 - DNA, 600 bp, Chicken  19866894312803_5
tgatgcagataaagaagtatggcgatgtaaacgcaagataaaccttggtctcttgtcaagaacagattgaaaatttatcaagtatttttaacaatgatgtgctgcaaactgaacaggtattttattttactatagatggcagaggagaccctttaagaacaaagtattttatagattcttgggattctgactgtggttaatcctctacaccctgtaaaagatttgacttgctcctraagacattatttgttgcttgcagctagctgcagatgagatccatataaacttggatttataacwccaaggtagctcaggagcactgatctcccaagagcagttaaggagtgggctgataagaacagcagcttactgaactatgccattctgggaatattcaaggtgttcccaagaagtttctctgcaagtaatacaaatactggcttcacttaccttatgaggtcagaaggagtcacggaacaaaatggctcagctgatgatatggtgaataacttccagttatttgtctggcatgactgtgctgcctcttcagcctccggagaataagtaaatgtcaaagcatctttaatccaacagctgaac

SEQ ID NO: 57223 - DNA, 600 bp, Chicken  19866894312803_6
taaggagtgggctgataagaacagcagcttactgaactatgccattctgggaatattcaaggtgttcccaagaagtttctctgcaagtaatacaaatactggcttcacttaccttatgaggtcagaaggagtcacggaacaaaatggctcagctgatgatatggtgaataacttccagttatttgtctggcatgactgtgctgcctcttcagcctccggagaataagtaaatgtcaaagcatctttaatccaacagctgaacattatcaaaaactggtgttcaatatattcatgccaaastgaaaaggaagggtgacatgggtaatctgacttcatctgctgtgcctaaggaccatctggcagtgtaatgaggaagggcaaamtaaaaccagattacatttacctgaaaaaaaaaacgatgcctgaaatctagaccaggcattcaaagggcaatccttttcttattgacttcaggccagaatgagtttatgagctgtcttaatttgtcttacttccccttcatgtaagcggggaaatagaagcatgcataaactgagtagtaaataccttttgtgatgtgtgagagctctctcctcccct

SEQ ID NO: 57224 - DNA, 600 bp, Chicken  19866894312803_7
caagtaatacaaatactggcttcacttaccttatgaggtcagaaggagtcacggaacaaaatggctcagctgatgatatggtgaataacttccagttatttgtctggcatgactgtgctgcctcttcagcctccggagaataagtaaatgtcaaagcatctttaatccaacagctgaacattatcaaaaactggtgttcaatatattcatgccaaastgaaaaggaagggtgacatgggtaatctgacttcatctgctgtgcctaaggaccatctggcagtgtaatgaggaagggcaaamtaaaaccagattacatttacctgaaaaaaaaaacgatgcctgaaatctagaccaggcattcaaagggcaatccttttcttattgacttcaggccagaatgagtttatgagctgtcttaatttgtcttacttccccttcatgtaagcggggaaatagaagcatgcataaactgagtagtaaataccttttgtgatgtgtgagagctctctcctcccctctgccctcacaagtatcttttgaaatagaattaacttggctcccaggtttctaagtgtatccagaaaaagccattaggtgctg

SEQ ID NO: 57225 - DNA, 454 bp, Chicken  19866894312803_8
gcattcaaagggcaatccttttcttattgacttcaggccagaatgagtttatgagctgtcttaatttgtcttacttccccttcatgtaagcggggaaatagaagcatgcataaactgagtagtaaataccttttgtgatgtgtgagagctctctcctcccctctgccctcacaagtatcttttgaaatagaattaacttggctcccaggtttctaagtgtatccagaaaaagccattaggtgctggcagggtcatcctgctgaagacatcagagactgcaaacgagctacaaattagtgrgattagtggagaagctggtgcttgtgtgaggaggactgggagtgcccagggacccataatttaccaactgctccagtgccccgcactacaggagtccctctactgaaaggtgagaacagacatgatctgcttcccttgaaggttctccagtagt

SEQ ID NO: 57226 - DNA, 600 bp, Chicken  19866894312813_1
tggagagcttatgagccagtggcatttctaccacctgaagcttctctgcctcatcatcatagtaattgtagagaccttgaagtcagaatcagagataggaaatggtgagatgtagagcatgggcaaatagccacaaacgttttgccagttcaccctgggctcccctgacactgagggaagaaagcctcagtgccattttgggaactggcccgtcttcattggagttggcaacaactcataactgtggttctcattcacgtcatgagctagtttattcctaacagcaagtctggattctcyctgccaacagagactgaatcagcagagcaagcatgccatgctttgttctktctcactcgttgcttatgaagcaaagttatcttggaagcagttagtggaaaactgagcagcagcaagctaatttcagctggtcttggggcatggggcaggtttgcaacttacctgtacgatgcatcattggaacgcccaccgtgtaggagcgggtcaccatgaagccacggttatccaccatcttatgatggaacttctcatcccagtgagctgcaggaaagagatattcagcatttgagaaaagggagc

SEQ ID NO: 57227 - DNA, 599 bp, Chicken  19866894312813_2
tcatcatcatagtaattgtagagaccttgaagtcagaatcagagataggaaatggtgagatgtagagcatgggcaaatagccacaaacgttttgccagttcaccctgggctcccctgacactgagggaagaaagcctcagtgccattttgggaactggcccgtcttcattggagttggcaacaactcataactgtggttctcattcacgtcatgagctagtttattcctaacagcaagtctggattctcyctgccaacagagactgaatcagcagagcaagcatgccatgctttgttctktctcactcgttgcttatgaagcaaagttatcttggaagcagttagtggaaaactgagcagcagcaagctaatttcagctggtcttggggcatggggcaggtttgcaacttacctgtacgatgcatcattggaacgcccaccgtgtaggagcgggtcaccatgaagccacggttatccaccatcttatgatggaacttctcatcccagtgagctgcaggaaagagatattcagcatttgagaaaagggagcagcagaaaaatatcatgctctgaaaaaccatatgcttccggtggaccca

SEQ ID NO: 57228 - DNA, 600 bp, Chicken  19866894312818_1
agcttgtcatgttgtagtcatgtgcattttaaaaggtgcatggcacacttcattatttacagcttaaattaaaaatatacatatattcaagtcaagcactggaatgcaattcaatccccactttgcagtcagaaatctttttctccatttaactggccagcactaccaaactatatttgcataggaaaaacaaacactttttactggagaggaaaaaaaaatgacaaattattataatttgagatttttttttctaatcttcagtaactacagtgattcaaccccatattaaacaagcayttcttctgcagcatattccattgcaatagggaatcctataatcaaaagaacattattcataacaaatgcagatgaattttcaaattgtcatagtactgatccaccaacatccagagacacctggtggatgctagaatctgagtccttagtcctcatacaggaatcctatttaaagccatcaacattgggaactctttgtacaaatactgttaagaaatacagcaaggatttgtgtgtcctgagatctcattttaaaataggaggaaaagcaattaaactcaaaagtaatgtttgaaatgc

SEQ ID NO: 57229 - DNA, 599 bp, Chicken  19866894312819_1
  misc_feature (1)..(114): n is any nucleotide
nnnnnnnnnnnnnnnnnnnnnnnnnnnnnnnnnnnnnnnnnnnnnnnnnnnnnnnnnnnnnnnnnnnnnnnnnnnnnnnnnnnnnnnnnnnnnnnnnnnnnnnnnnnnnnnnnnctcatttatggcttcttcaatcaacaggagggcagggtgcatttcatatggcttacgtgtagaacatatatagatcacgcatacacagcctatttccttctgcctgcagtgcctgacatagcactgtctgacaatgaatcatgcagattcaaacagttcacagtgtgccacagatttaaacgtgcragtgccatttcctattgtccccagtccaaggagttggtggaacatcatgttaaaataatagggctgctattaataaagccatcagagtctgaatttagcactgctacatgacaaaacgcatcagagaggcagaggttcccatctgctcatatagcrttgaacaaaaagctgaacccagcctgctaacatgcttcttagtttcactggaggccctgtagaaattcagatacaaataagagcagaacaatwctgratcacttcttacaaatgcagtcctgtgcatttctgctgatggaagg

SEQ ID NO: 57230 - DNA, 600 bp, Chicken  19866894312819_2
ttcatatggcttacgtgtagaacatatatagatcacgcatacacagcctatttccttctgcctgcagtgcctgacatagcactgtctgacaatgaatcatgcagattcaaacagttcacagtgtgccacagatttaaacgtgcragtgccatttcctattgtccccagtccaaggagttggtggaacatcatgttaaaataatagggctgctattaataaagccatcagagtctgaatttagcactgctacatgacaaaacgcatcagagaggcagaggttcccatctgctcatatagcrttgaacaaaaagctgaacccagcctgctaacatgcttcttagtttcactggaggccctgtagaaattcagatacaaataagagcagaacaatwctgratcacttcttacaaatgcagtcctgtgcatttctgctgatggaaggcagtctaactcgctggcactatttcaactggtcaccttatttgtattaagctgtgccaagtgaacaccatccccagagagygcatggagaacttcttcaaacctcacgaagaaaggagatgagggacacctattttgaacaggagtatcttgmaaaa

SEQ ID NO: 57231 - DNA, 600 bp, Chicken  19866894312819_3
gaatcatgcagattcaaacagttcacagtgtgccacagatttaaacgtgcragtgccatttcctattgtccccagtccaaggagttggtggaacatcatgttaaaataatagggctgctattaataaagccatcagagtctgaatttagcactgctacatgacaaaacgcatcagagaggcagaggttcccatctgctcatatagcrttgaacaaaaagctgaacccagcctgctaacatgcttcttagtttcactggaggccctgtagaaattcagatacaaataagagcagaacaatwctgratcacttcttacaaatgcagtcctgtgcatttctgctgatggaaggcagtctaactcgctggcactatttcaactggtcaccttatttgtattaagctgtgccaagtgaacaccatccccagagagygcatggagaacttcttcaaacctcacgaagaaaggagatgagggacacctattttgaacaggagtatcttgmaaaagcagcaatcccagcaggctgagacagtgtcagagcacggagagcagacctactatctctcaacagaagctgaaggtgtgagtgacaaaatgca

SEQ ID NO: 57232 - DNA, 600 bp, Chicken  19866894312819_4
catgcagattcaaacagttcacagtgtgccacagatttaaacgtgcragtgccatttcctattgtccccagtccaaggagttggtggaacatcatgttaaaataatagggctgctattaataaagccatcagagtctgaatttagcactgctacatgacaaaacgcatcagagaggcagaggttcccatctgctcatatagcrttgaacaaaaagctgaacccagcctgctaacatgcttcttagtttcactggaggccctgtagaaattcagatacaaataagagcagaacaatwctgratcacttcttacaaatgcagtcctgtgcatttctgctgatggaaggcagtctaactcgctggcactatttcaactggtcaccttatttgtattaagctgtgccaagtgaacaccatccccagagagygcatggagaacttcttcaaacctcacgaagaaaggagatgagggacacctattttgaacaggagtatcttgmaaaagcagcaatcccagcaggctgagacagtgtcagagcacggagagcagacctactatctctcaacagaagctgaaggtgtgagtgacaaaatgcagcac

SEQ ID NO: 57233 - DNA, 600 bp, Chicken  19866894312819_5
atcagagtctgaatttagcactgctacatgacaaaacgcatcagagaggcagaggttcccatctgctcatatagcrttgaacaaaaagctgaacccagcctgctaacatgcttcttagtttcactggaggccctgtagaaattcagatacaaataagagcagaacaatwctgratcacttcttacaaatgcagtcctgtgcatttctgctgatggaaggcagtctaactcgctggcactatttcaactggtcaccttatttgtattaagctgtgccaagtgaacaccatccccagagagygcatggagaacttcttcaaacctcacgaagaaaggagatgagggacacctattttgaacaggagtatcttgmaaaagcagcaatcccagcaggctgagacagtgtcagagcacggagagcagacctactatctctcaacagaagctgaaggtgtgagtgacaaaatgcagcacagctgaagggtcatttgaacctcattagtcaaccaaaggtgtcagatggaatatagatatttcatactgcacattgtagaagtctattataattaattatatctgactggaagggacacttggtgcc

SEQ ID NO: 57234 - DNA, 600 bp, Chicken  19866894312819_6
agcrttgaacaaaaagctgaacccagcctgctaacatgcttcttagtttcactggaggccctgtagaaattcagatacaaataagagcagaacaatwctgratcacttcttacaaatgcagtcctgtgcatttctgctgatggaaggcagtctaactcgctggcactatttcaactggtcaccttatttgtattaagctgtgccaagtgaacaccatccccagagagygcatggagaacttcttcaaacctcacgaagaaaggagatgagggacacctattttgaacaggagtatcttgmaaaagcagcaatcccagcaggctgagacagtgtcagagcacggagagcagacctactatctctcaacagaagctgaaggtgtgagtgacaaaatgcagcacagctgaagggtcatttgaacctcattagtcaaccaaaggtgtcagatggaatatagatatttcatactgcacattgtagaagtctattataattaattatatctgactggaagggacacttggtgccacagattgcgtttgcaaggctgagcttcacctgaggaaatgcaggagccacctgatgagcaattctcctcca

SEQ ID NO: 57235 - DNA, 599 bp, Chicken  19866894312823_1
  misc_feature (1)..(86): n is any nucleotide
nnnnnnnnnnnnnnnnnnnnnnnnnnnnnnnnnnnnnnnnnnnnnnnnnnnnnnnnnnnnnnnnnnnnnnnnnnnnnnnnnnnnnngacctgtcagaggaaaagaagtggtatatgagatgtattgggtaaatgtcagatgcagatacactgtgtgcactttgattatgagtctgtgccatccttcttggacactagggcacccgtatgagctgcagtctgggttagggagtacaggggtgtagcaaagagccccaaggaacagccctgctccatccttgttctatactcagctgtgggytccctgcccaggggcagattaggaccgagcacagacagagmactgaagtccaggacaggaattayataaatgatgggacaccacagatagctggrtaatcccacagcctctgcaagagtgtgtaaaatagatgcaaactgtgtttcagcctggaaagtgctcaaaaatccaaactcctggaacagaggataatgcgtaagtaatcttaacggtctaggccatgttcgctttagtcatttcctacctttatgtgctgtcatagagtctgagttcagaggagtgacttacttctgcagctg

SEQ ID NO: 57236 - DNA, 599 bp, Chicken  19866894312823_2
  misc_feature (1)..(45): n is any nucleotide
nnnnnnnnnnnnnnnnnnnnnnnnnnnnnnnnnnnnnnnnnnnnngacctgtcagaggaaaagaagtggtatatgagatgtattgggtaaatgtcagatgcagatacactgtgtgcactttgattatgagtctgtgccatccttcttggacactagggcacccgtatgagctgcagtctgggttagggagtacaggggtgtagcaaagagccccaaggaacagccctgctccatccttgttctatactcagctgtgggytccctgcccaggggcagattaggaccgagcacagacagagmactgaagtccaggacaggaattayataaatgatgggacaccacagatagctggrtaatcccacagcctctgcaagagtgtgtaaaatagatgcaaactgtgtttcagcctggaaagtgctcaaaaatccaaactcctggaacagaggataatgcgtaagtaatcttaacggtctaggccatgttcgctttagtcatttcctacctttatgtgctgtcatagagtctgagttcagaggagtgacttacttctgcagctgctgctgcactggaactgttggtgtacccttccctagagggg

SEQ ID NO: 57237 - DNA, 599 bp, Chicken  19866894312823_3
  misc_feature (1)..(21): n is any nucleotide
nnnnnnnnnnnnnnnnnnnnngacctgtcagaggaaaagaagtggtatatgagatgtattgggtaaatgtcagatgcagatacactgtgtgcactttgattatgagtctgtgccatccttcttggacactagggcacccgtatgagctgcagtctgggttagggagtacaggggtgtagcaaagagccccaaggaacagccctgctccatccttgttctatactcagctgtgggytccctgcccaggggcagattaggaccgagcacagacagagmactgaagtccaggacaggaattayataaatgatgggacaccacagatagctggrtaatcccacagcctctgcaagagtgtgtaaaatagatgcaaactgtgtttcagcctggaaagtgctcaaaaatccaaactcctggaacagaggataatgcgtaagtaatcttaacggtctaggccatgttcgctttagtcatttcctacctttatgtgctgtcatagagtctgagttcagaggagtgacttacttctgcagctgctgctgcactggaactgttggtgtacccttccctagaggggaccttggctaagggagcctattcc

SEQ ID NO: 57238 - DNA, 600 bp, Chicken  19866894312823_4
gaggaaaagaagtggtatatgagatgtattgggtaaatgtcagatgcagatacactgtgtgcactttgattatgagtctgtgccatccttcttggacactagggcacccgtatgagctgcagtctgggttagggagtacaggggtgtagcaaagagccccaaggaacagccctgctccatccttgttctatactcagctgtgggytccctgcccaggggcagattaggaccgagcacagacagagmactgaagtccaggacaggaattayataaatgatgggacaccacagatagctggrtaatcccacagcctctgcaagagtgtgtaaaatagatgcaaactgtgtttcagcctggaaagtgctcaaaaatccaaactcctggaacagaggataatgcgtaagtaatcttaacggtctaggccatgttcgctttagtcatttcctacctttatgtgctgtcatagagtctgagttcagaggagtgacttacttctgcagctgctgctgcactggaactgttggtgtacccttccctagaggggaccttggctaagggagcctattccttatgtggcactctcatgtcttgtgagtaag

SEQ ID NO: 57239 - DNA, 600 bp, Chicken  19866894312830_1
aatcagctcaccatctaatattaacagtgctgatggcattcatacctccaaaagatgtattaattcattaaaaagttcattaaagtaaggaaagtgaacttcctattacaagacaatgaagctgttgaggtgcaggtggccatggggtcagttggcactgaagaaaatatattaaagatgaaggaatttactaattaaaatgtgtatagtaaagcgaaggcctgaaaatgatgatagagacagatctacaagcctgaaccaaagaggtattcacagcttcccagctcagctgtggctgtraaaatgagaaytggagcctaagagagacagaatgaagaggggattctcaactgaatacctgcatttgggtcactatcactaccataaataaatgcacatactctttatcccaatttcttctggaactactccagtttcttacatgtaagggctgctagctcacattccctatgtaaaacaggtagaggatatggatccaggacgcagctggctgcattaaatttacacactggatgattttggtgttgtacctctaacagtaaatatcagaaactgcttccctggagagagagaactctg

SEQ ID NO: 57240 - DNA, 600 bp, Chicken  19866894312830_2
catctaatattaacagtgctgatggcattcatacctccaaaagatgtattaattcattaaaaagttcattaaagtaaggaaagtgaacttcctattacaagacaatgaagctgttgaggtgcaggtggccatggggtcagttggcactgaagaaaatatattaaagatgaaggaatttactaattaaaatgtgtatagtaaagcgaaggcctgaaaatgatgatagagacagatctacaagcctgaaccaaagaggtattcacagcttcccagctcagctgtggctgtraaaatgagaaytggagcctaagagagacagaatgaagaggggattctcaactgaatacctgcatttgggtcactatcactaccataaataaatgcacatactctttatcccaatttcttctggaactactccagtttcttacatgtaagggctgctagctcacattccctatgtaaaacaggtagaggatatggatccaggacgcagctggctgcattaaatttacacactggatgattttggtgttgtacctctaacagtaaatatcagaaactgcttccctggagagagagaactctgtacaggttagc

SEQ ID NO: 57241 - DNA, 600 bp, Chicken  19866894312830_3
agtaaatatcagaaactgcttccctggagagagagaactctgtacaggttagctatggcatcatgcaccctagccgtgtcttgtctgggtctcttgatatttcagtatgactctcagtaacttttcaaccttaaattctcggtgttccaaggcagtaatccagttcagcccacacagtttgtagatttatctatgacattatcactctttaaatctgagtttggttgacttgctccaggtaagagccactgaagatacaacaggctttgagcaggacagcaagactaacacatcgatacrgacacaccagctaaagttcaagacacgaccctcaggatccataactagattttcctctttaactccaacaacattagaaattcaggttaggagtaaacctaatcaggtccttatttaatctaagccctaaaactaccagattttttgtccttgtcctcatgtcctaaatacagaagtcataacaaatctctgtaactgctgagtaatggattgggtttatgtaaaattacttagctatataagacttaggaattttgatcaggttgcctgaatcaccaaagacaaagtcatactgctgat

SEQ ID NO: 57242 - DNA, 600 bp, Chicken  19866894312842_1
ctgaactatttcactactccatttaaacaagattctaatttagtttgcctgtctggcccacaagcatagtaattatacaactgatgttcaaaattaggctgcaagtgacccaatatcatcagaaagaaagagaggaagagaggaagaaaaagatcaatcatcaccaacatgtgttgaaaatccatccctctattgttattttacattttcccttctcttcatgtgatgatctagtgggcatggtggtgatgggtcgatggttgaactagatgattttagaggtcttttctaattctttgmttctataaacctatgcaaaaagcttacttaattctctgtacaactgtatatacagcctcaggaagtgtttggaracagaattccagtgytaacattctctgatatgcaaaaacaccaccaaatgagaagttttcctacactccagattctttccaacctgttcctgcagctgttggataaaaagtgtcaagaagttaaaayggagaagcacttggaatcatagtaagcattacctgacagtgctcrctatagagcagagagactgaaatttccaactgtggccagaaatagctattgctt

SEQ ID NO: 57243 - DNA, 600 bp, Chicken  19866894312842_2
atacaactgatgttcaaaattaggctgcaagtgacccaatatcatcagaaagaaagagaggaagagaggaagaaaaagatcaatcatcaccaacatgtgttgaaaatccatccctctattgttattttacattttcccttctcttcatgtgatgatctagtgggcatggtggtgatgggtcgatggttgaactagatgattttagaggtcttttctaattctttgmttctataaacctatgcaaaaagcttacttaattctctgtacaactgtatatacagcctcaggaagtgtttggaracagaattccagtgytaacattctctgatatgcaaaaacaccaccaaatgagaagttttcctacactccagattctttccaacctgttcctgcagctgttggataaaaagtgtcaagaagttaaaayggagaagcacttggaatcatagtaagcattacctgacagtgctcrctatagagcagagagactgaaatttccaactgtggccagaaatagctattgctttgatgaaaacttgcaaaaaagaaagaaacaacaaccaaaccttcctatttttcatttctgtttaccggtgatga

SEQ ID NO: 57244 - DNA, 600 bp, Chicken  19866894312842_3
aaaattaggctgcaagtgacccaatatcatcagaaagaaagagaggaagagaggaagaaaaagatcaatcatcaccaacatgtgttgaaaatccatccctctattgttattttacattttcccttctcttcatgtgatgatctagtgggcatggtggtgatgggtcgatggttgaactagatgattttagaggtcttttctaattctttgmttctataaacctatgcaaaaagcttacttaattctctgtacaactgtatatacagcctcaggaagtgtttggaracagaattccagtgytaacattctctgatatgcaaaaacaccaccaaatgagaagttttcctacactccagattctttccaacctgttcctgcagctgttggataaaaagtgtcaagaagttaaaayggagaagcacttggaatcatagtaagcattacctgacagtgctcrctatagagcagagagactgaaatttccaactgtggccagaaatagctattgctttgatgaaaacttgcaaaaaagaaagaaacaacaaccaaaccttcctatttttcatttctgtttaccggtgatgattaaaagcaccttac

SEQ ID NO: 57245 - DNA, 600 bp, Chicken  19866894312842_4
tacattttcccttctcttcatgtgatgatctagtgggcatggtggtgatgggtcgatggttgaactagatgattttagaggtcttttctaattctttgmttctataaacctatgcaaaaagcttacttaattctctgtacaactgtatatacagcctcaggaagtgtttggaracagaattccagtgytaacattctctgatatgcaaaaacaccaccaaatgagaagttttcctacactccagattctttccaacctgttcctgcagctgttggataaaaagtgtcaagaagttaaaayggagaagcacttggaatcatagtaagcattacctgacagtgctcrctatagagcagagagactgaaatttccaactgtggccagaaatagctattgctttgatgaaaacttgcaaaaaagaaagaaacaacaaccaaaccttcctatttttcatttctgtttaccggtgatgattaaaagcaccttacactggattatgcagctcagtgtgagcccctaataaaaagcttcattgcaaaattgccgtatgactgagtgaaacaatggctgctttattaatattttaaagactcctgaggg

SEQ ID NO: 57246 - DNA, 600 bp, Chicken  19866894312842_5
tgatgggtcgatggttgaactagatgattttagaggtcttttctaattctttgmttctataaacctatgcaaaaagcttacttaattctctgtacaactgtatatacagcctcaggaagtgtttggaracagaattccagtgytaacattctctgatatgcaaaaacaccaccaaatgagaagttttcctacactccagattctttccaacctgttcctgcagctgttggataaaaagtgtcaagaagttaaaayggagaagcacttggaatcatagtaagcattacctgacagtgctcrctatagagcagagagactgaaatttccaactgtggccagaaatagctattgctttgatgaaaacttgcaaaaaagaaagaaacaacaaccaaaccttcctatttttcatttctgtttaccggtgatgattaaaagcaccttacactggattatgcagctcagtgtgagcccctaataaaaagcttcattgcaaaattgccgtatgactgagtgaaacaatggctgctttattaatattttaaagactcctgagggaaatgctgtacagctgaaatgccctcagtgaaaggttcattgcca

SEQ ID NO: 57247 - DNA, 600 bp, Chicken  19866894312844_1
ttgccagagacctcctgactgcagagaaatctgtattctttcttcctcacagaagaccccattaccctcagcaaagatcccctctcaggtagcaaagcttcgagagctatgcttcagcccaccacccagctgctacccagctgccacagggtagtaattagcacccacttgcactactcctctttataagatggaagtaatcacaccctcagcatgatagctatgccccctgtcatgccatttgccatagtctgtgggggatggaaaaagatatttggcttttacacccgccaaacacgyttctgtgtccataacattttgttccagcactatctctggcaaacaggtggtcttgtttgcacaagcaagtaattagcagaggcggggttattaggtgagtatttttggcaggctgtttttctctgagtatgttttgctcttaagttaactaggcacctggcagcaattacagccaaagccaggcaacccacctaggctacccaggttaatgaaaaaaccataaccgcactgctttgaagggtgtgtaacagagggcaatcttcatgaagagggagaactgaactgataggatgaaaggtg

SEQ ID NO: 57248 - DNA, 599 bp, Chicken  19866894312847_1
  misc_feature (1)..(80): n is any nucleotide
nnnnnnnnnnnnnnnnnnnnnnnnnnnnnnnnnnnnnnnnnnnnnnnnnnnnnnnnnnnnnnnnnnnnnnnnnnnnnnnntaaaaattggtaccctgtattaactgcatacctactttagagtaacagtgttaacataggaacatctgtagaagtgacataattatagatgatgggtgctaacaatgtagctcttttcctgtaattctgcagcatattatttcatagcttaaggtagcacctgcaactgtctactgaaaagtaaacgtactgcagggaactctgagtattctcttccttycttattctgcacatagtgaagtctccttgaaaacaaatgctgcttgattctattcctgtatctttaagttgtaacagggtccagtgctctcttgatttcagacaacagcatcaattcagctgttatacacacagaaaatctcaatttcagtaaataactattaaacactcttgaactctcacaaataaatgaacactcctgtttcctacataagaatgtaaatcaaaygacataactgagtgctaccatgacctagaacgagggaattcctgccttagcttgtcaagcagatggatttg

SEQ ID NO: 57249 - DNA, 600 bp, Chicken  19866894312847_2
ttaaggtagcacctgcaactgtctactgaaaagtaaacgtactgcagggaactctgagtattctcttccttycttattctgcacatagtgaagtctccttgaaaacaaatgctgcttgattctattcctgtatctttaagttgtaacagggtccagtgctctcttgatttcagacaacagcatcaattcagctgttatacacacagaaaatctcaatttcagtaaataactattaaacactcttgaactctcacaaataaatgaacactcctgtttcctacataagaatgtaaatcaaaygacataactgagtgctaccatgacctagaacgagggaattcctgccttagcttgtcaagcagatggatttgaaactcttaattattttggatgattcttctttccacccatattgagaamatggagtaaatatacacaaatgaccacctckgtgagagcacagstttgcatagttcacttaacattggtccctagccattgtttaccaggatctgctgtgataggcagatgatttcaaactaaaagaggggaaatttgattagatataaaagtgcatttctcagaaaaaatatgttaatt

SEQ ID NO: 57250 - DNA, 511 bp, Chicken  19866894312847_3
tctattcctgtatctttaagttgtaacagggtccagtgctctcttgatttcagacaacagcatcaattcagctgttatacacacagaaaatctcaatttcagtaaataactattaaacactcttgaactctcacaaataaatgaacactcctgtttcctacataagaatgtaaatcaaaygacataactgagtgctaccatgacctagaacgagggaattcctgccttagcttgtcaagcagatggatttgaaactcttaattattttggatgattcttctttccacccatattgagaamatggagtaaatatacacaaatgaccacctckgtgagagcacagstttgcatagttcacttaacattggtccctagccattgtttaccaggatctgctgtgataggcagatgatttcaaactaaaagaggggaaatttgattagatataaaagtgcatttctcagaaaaaatatgttaatttaatcaatccttttcatctattccatacaaa

SEQ ID NO: 57251 - DNA, 480 bp, Chicken  19866894312847_4
tccagtgctctcttgatttcagacaacagcatcaattcagctgttatacacacagaaaatctcaatttcagtaaataactattaaacactcttgaactctcacaaataaatgaacactcctgtttcctacataagaatgtaaatcaaaygacataactgagtgctaccatgacctagaacgagggaattcctgccttagcttgtcaagcagatggatttgaaactcttaattattttggatgattcttctttccacccatattgagaamatggagtaaatatacacaaatgaccacctckgtgagagcacagstttgcatagttcacttaacattggtccctagccattgtttaccaggatctgctgtgataggcagatgatttcaaactaaaagaggggaaatttgattagatataaaagtgcatttctcagaaaaaatatgttaatttaatcaatccttttcatctattccatacaaa

SEQ ID NO: 57252 - DNA, 467 bp, Chicken  19866894312847_5
tgatttcagacaacagcatcaattcagctgttatacacacagaaaatctcaatttcagtaaataactattaaacactcttgaactctcacaaataaatgaacactcctgtttcctacataagaatgtaaatcaaaygacataactgagtgctaccatgacctagaacgagggaattcctgccttagcttgtcaagcagatggatttgaaactcttaattattttggatgattcttctttccacccatattgagaamatggagtaaatatacacaaatgaccacctckgtgagagcacagstttgcatagttcacttaacattggtccctagccattgtttaccaggatctgctgtgataggcagatgatttcaaactaaaagaggggaaatttgattagatataaaagtgcatttctcagaaaaaatatgttaatttaatcaatccttttcatctattccatacaaa

SEQ ID NO: 57253 - DNA, 600 bp, Chicken  19866894312857_1
tctccactgactatcagttctatcacagttcagttaaaatggatgcagtgtgcaacagaaaaccacagccagcaaacaaaaggaaggccaaacacccctccccccccccttcccccgacagaactgagcacagcagtgtgccctcgtggccaaaaaggccagtgttatcttgtggatgcattaaaaagatcatggccagcaggtcaaggaaggatctccttcccctctcctctgccctggtgaggccacatctggagtaccatgtccagttctgggctactcagttagaaaaaaaagacrggaagggaagaagaagggaacttctaaaagagagcctagggaggacaacgaagatgactggggtcctggaatttcttttatgaggaaaggctgagagacctgggactgttcagcctggagaagcctgagagggggtcttatcaatgtttatacatttctaaagggcaggtgtcaagtggatggggccaagctttttttggccatagttggcaactgaacaaggagcaatagacacatgctggtacacacaagaacatgaggaagaatttccctgtgagggtggcagagcactacaacaag

SEQ ID NO: 57254 - DNA, 599 bp, Chicken  19866894312864_1
  misc_feature (1)..(94): n is any nucleotide
nnnnnnnnnnnnnnnnnnnnnnnnnnnnnnnnnnnnnnnnnnnnnnnnnnnnnnnnnnnnnnnnnnnnnnnnnnnnnnnnnnnnnnnnnnnnnnacaggccccaaaagaacattgcgatactgcagaaaatgtcagatttgattgagcactatcccagtcctggcctctcacaaccatcaggaagaagggcatggtgagacctgcaaaggaagtgggtactttggactcccagctgccatgttggtgatttggaaccagggggtaagagctctgagaaacaatctttttttttttttttyctattaaaaaggcctacagctgtctgaggagggactgagagatgtagctatgggctcttcactacgctgtgccccccttggctctaacctaggattgattcttgactctcgtcctaaagtaaaccctgcaccaaggatgcctgatttagactatgcatatagctcagagctgaacaaatatcaagaatcaccaaaatagacgtatacatatttttagtgcatttctggatagcagcatggaggtgttaatcccttatgtacagccattagcaaagaattcattattctgcccagtgagt

SEQ ID NO: 57255 - DNA, 599 bp, Chicken  19866894312885_1
  misc_feature (1)..(20): n is any nucleotide
nnnnnnnnnnnnnnnnnnnnctcccattgagctcattagcaaagtcttgtttgcaaaaccctgcagtctcctccttccctgggtattccccccatatgcaccgcttctgcctcccttcctgcatccctgcatccatgccaccctgccagcaggacctgccctcccacaagaaatgctgaggagatgctcacatatgttcagctccactttgcgatgtaattaaggagaaggactcgccaacataggcagccctgactgctgctctgtgtgccgttgcaggtccctggctcagatcatcakcagcaagacagctggaatgttgctgcagtcctttgtgcctgacagcgagtgaggcaatgtagaaagacaccaagtctgcctctgatactgcataaatgtcacatcagaagctccagtaaatgtcttccatgggctcagcacctgtagcgccaccaagctccatctctcagctagaggacatagaagtcattgttgttcgatagatcgctgtaatggcagagggcaagggctgggccctgtgcaggtgggggctcggggcggctcctgactggcaccccctgcccctcggccttgcagag

SEQ ID NO: 57256 - DNA, 600 bp, Chicken  19866894312887_1
aggaactcacaggagacgaggggatcaagtcatagcatcatagaaccactgaggttggagaagacctctacgatgaccaagtccagccatcaacccatcaccaccatgccccctataccattgctcgtccatcccaatttctgctcactggacttccaacagcaattctcgtagcacgactcaccgtcagatcctggaactggctcatcatcttctcctttgctctttcaaacattgccctctgcacctccagatcaatgttattctccagcgtggctttgatccgcacagaggcatccytcccacgtatattagcagcctctgttatgcaatggtgggaaacatcaaaatcatagaatcatcgaattcaggttggaaaagacctctgagatccccaagtccaacctcagcccaccccaccgtgcccactgtccctcagtgccacatccccatrgtccttgaacacctccatggacggtgaccccaccacctccctgggcagctgtgccactgcagcactgctcttttggagaagaactttctcctaatatacagaaggcctttaaagaggagctggggtggtattcagatgtaaagcat

SEQ ID NO: 57257 - DNA, 600 bp, Chicken  19866894312887_2
tccaacagcaattctcgtagcacgactcaccgtcagatcctggaactggctcatcatcttctcctttgctctttcaaacattgccctctgcacctccagatcaatgttattctccagcgtggctttgatccgcacagaggcatccytcccacgtatattagcagcctctgttatgcaatggtgggaaacatcaaaatcatagaatcatcgaattcaggttggaaaagacctctgagatccccaagtccaacctcagcccaccccaccgtgcccactgtccctcagtgccacatccccatrgtccttgaacacctccatggacggtgaccccaccacctccctgggcagctgtgccactgcagcactgctcttttggagaagaactttctcctaatatacagaaggcctttaaagaggagctggggtggtattcagatgtaaagcatgcgttaaagcccatgaaccctctgttggtagacttctacctctcgatctccctcttcccagggttacgtgtgccatcctaaaatattcccatacccaacagcaaaacctcgttccacagcccttcaggctgtacccatcatgggatgggacaaa

SEQ ID NO: 57258 - DNA, 600 bp, Chicken  19866894312887_3
tattttcttccctgctaggatgattgtgacctgctgagtgcatcacacaatggcacggatttacacaccttccttcagagaattcaggctctgtactgagatgtctcatccaagctgggaaaacgtgtccatggccatacagtggactgacagcctcagacacagagttagttagctggagaaccagtcctaccttcgtaacacggcgacaggatgctttggatggtcaactcaagggattcatagatagccttctttttcaaaagaatttctctatctatagctctcatgatgatgtcrgtctgcaggaattaatgcagagcatttaccagcatctccaaaccttcagtggccagcagcaggagcaaacagtgagcctgtcttcaagctgttatttcaatagcatggcctccaaggcatgcatcacaccctgaacttgcaccccaagatggtctctttccccagaagcaccatgcagcatggggctttgttatcagttctacagcttggcatcagatccatcctgatctgctcacccggggttcccatttactttccactacctccaggcagggcatctgccaaaccatagtttgtcat

SEQ ID NO: 57259 - DNA, 600 bp, Chicken  19866894312887_4
ataagaccacaatgattgttagaccccagcaggctttccctaccttgttgtccctcctgggccctgcttggccaggcacaggagggttcatggggcagggcagctggtgagtcctgaggcaaggtatacagaggaagagagaggagaggagcaagttgctgtggcactgacatggtcagtgggcatggtgggaatgggttggggttggtcatggtgatcttagaggtcttctcccaacctgaatggttctatgattttatttatggacacgattagtgggcatggtgaggttgggctggyggttgaacttgatgactgtagaggtctttcycaactgtaatgattccataagtccatcaaatattttgtgtaagtaggtgaattatggtggggcatctttagcttgcccagtgactagacaacataatgctatcttgrgcttcctggggaggaagaaatatagacccttgtgcttcccaaaccacgttttctgcagatgactttccaggaaaactcttttctttgagtttccaggaaaacatggatcactccctgctcacccaccattctcacctgaatatgtttgcaaacatcacccca

SEQ ID NO: 57260 - DNA, 600 bp, Chicken  19866894312887_5
ggctttccctaccttgttgtccctcctgggccctgcttggccaggcacaggagggttcatggggcagggcagctggtgagtcctgaggcaaggtatacagaggaagagagaggagaggagcaagttgctgtggcactgacatggtcagtgggcatggtgggaatgggttggggttggtcatggtgatcttagaggtcttctcccaacctgaatggttctatgattttatttatggacacgattagtgggcatggtgaggttgggctggyggttgaacttgatgactgtagaggtctttcycaactgtaatgattccataagtccatcaaatattttgtgtaagtaggtgaattatggtggggcatctttagcttgcccagtgactagacaacataatgctatcttgrgcttcctggggaggaagaaatatagacccttgtgcttcccaaaccacgttttctgcagatgactttccaggaaaactcttttctttgagtttccaggaaaacatggatcactccctgctcacccaccattctcacctgaatatgtttgcaaacatcaccccaatttctgcatagatgggttcagccaggcagt

SEQ ID NO: 57261 - DNA, 600 bp, Chicken  19866894312887_6
gagaggagaggagcaagttgctgtggcactgacatggtcagtgggcatggtgggaatgggttggggttggtcatggtgatcttagaggtcttctcccaacctgaatggttctatgattttatttatggacacgattagtgggcatggtgaggttgggctggyggttgaacttgatgactgtagaggtctttcycaactgtaatgattccataagtccatcaaatattttgtgtaagtaggtgaattatggtggggcatctttagcttgcccagtgactagacaacataatgctatcttgrgcttcctggggaggaagaaatatagacccttgtgcttcccaaaccacgttttctgcagatgactttccaggaaaactcttttctttgagtttccaggaaaacatggatcactccctgctcacccaccattctcacctgaatatgtttgcaaacatcaccccaatttctgcatagatgggttcagccaggcagttgttgatgtctatgcgactgaagacacgggacacgtacactcccttcctcacacacacagctttcagggtcctgtggaagccagaggacgttctgccttgctgcaga

SEQ ID NO: 57262 - DNA, 600 bp, Chicken  19866894312895_1
tataacagaaggtagttttagggttaggcaacaaaaatgttagtattccagagcaaggacaaggagaacattagtgtctgaagacagcaatccatctgcaaaaaggaaatgcagcatagccagtttacacaaactgctgtgctcttgcactttaaaaacagcagtgcattgcaagtatttcccttgaatgaaagtgaactttgagcaaagtgttgtgatatctagtctttcagtgccctacctatgttgcatagactgtgatttcttttgggattgggaagaaaagtggaatatgtgtayattaggccgtggatgcctcagaaagtgctgcctacatgcagttcaatttaaatccttatgggtatcttaaatttcatatacttgctggtgcagtattagtaaaatgtatgaacctccgcagacccatcatgtttgctagttaatcaaaagtttgatgaaaataaagggcaacttytcagttgaagtattcaagaagtcatatggtttcacatttttggaaagacaaagtcagcatctacactaagccatgaagatcagtttaaggaattgcatagtttatgctcctctctgttcaagcag

SEQ ID NO: 57263 - DNA, 600 bp, Chicken  19866894312895_2
tatttcccttgaatgaaagtgaactttgagcaaagtgttgtgatatctagtctttcagtgccctacctatgttgcatagactgtgatttcttttgggattgggaagaaaagtggaatatgtgtayattaggccgtggatgcctcagaaagtgctgcctacatgcagttcaatttaaatccttatgggtatcttaaatttcatatacttgctggtgcagtattagtaaaatgtatgaacctccgcagacccatcatgtttgctagttaatcaaaagtttgatgaaaataaagggcaacttytcagttgaagtattcaagaagtcatatggtttcacatttttggaaagacaaagtcagcatctacactaagccatgaagatcagtttaaggaattgcatagtttatgctcctctctgttcaagcagaactttatttctgaccatgcaattaaaaagtagcatgattttgttattcccaaagtgttccctatgtgcttacagatttcacccttgatcaatgagtaacttgaaaatcagggctcagtcttggaactgcctgatgaattcccatctacgttgtcccactgatgatctctatctt

SEQ ID NO: 57264 - DNA, 599 bp, Chicken  19866894312906_1
  misc_feature (1)..(109): n is any nucleotide
nnnnnnnnnnnnnnnnnnnnnnnnnnnnnnnnnnnnnnnnnnnnnnnnnnnnnnnnnnnnnnnnnnnnnnnnnnnnnnnnnnnnnnnnnnnnnnnnnnnnnnnnnnnnntgcgtgacatcttgagctggaaatggacgactctacagtaaagcagctacaagagcaggcccacgtaagctctcagtgtgaaaatggagattccccagtgatgggcatcccctgcagacagctcctatcaccctggagaccggcagccatcagctttgtcctccaggtccccaaggctgccagcacagcarcggcgygttctcccacacatccacggggagatgagccatgagccatgagccatgagccagcctcctccgctctatctccattttccatcactgaatcagcagtggcctctgagtgtcacagagctgacgcctccgggacctggaaagcagagcactgcaaggcagcctgagcccccggcgccggcacagccgctcaccttcttgcctccggtgacggccaccttctggagtttgcggtagcagtatttggcgtacatgctgatgggcagacctggcaggaaggagaaaggagccgtcag

SEQ ID NO: 57265 - DNA, 599 bp, Chicken  19866894312906_2
  misc_feature (1)..(103): n is any nucleotide
nnnnnnnnnnnnnnnnnnnnnnnnnnnnnnnnnnnnnnnnnnnnnnnnnnnnnnnnnnnnnnnnnnnnnnnnnnnnnnnnnnnnnnnnnnnnnnnnnnnnnnntgcgtgacatcttgagctggaaatggacgactctacagtaaagcagctacaagagcaggcccacgtaagctctcagtgtgaaaatggagattccccagtgatgggcatcccctgcagacagctcctatcaccctggagaccggcagccatcagctttgtcctccaggtccccaaggctgccagcacagcarcggcgygttctcccacacatccacggggagatgagccatgagccatgagccatgagccagcctcctccgctctatctccattttccatcactgaatcagcagtggcctctgagtgtcacagagctgacgcctccgggacctggaaagcagagcactgcaaggcagcctgagcccccggcgccggcacagccgctcaccttcttgcctccggtgacggccaccttctggagtttgcggtagcagtatttggcgtacatgctgatgggcagacctggcaggaaggagaaaggagccgtcagcccgca

SEQ ID NO: 57266 - DNA, 600 bp, Chicken  19866894312912_1
tgttaaacacaatcagtgataataaaatatcctgagtgagctgtgtttaaaaaaatgttttgttgctgtttagacagagtggacgtggcctctgtaataatacctttatgtgtaagattattatcatagtatcagcaacagcactactacagtttctgctttagcatttaagaagggagagactattaggccagcaccagagttgtcattccaagaatcctgagctgtagaaagctgttttgcctctttcctcactgaaatctttccatatttgacatggtcaaatgtgaacctcacacrctctcccgtgtatgaaagagacgagcaaggtagggataagatgcatcctctagtcaaagtgaggaggctgagcatttaaagtgcttttcgttttcagagtactttgtgagtgctttctaaattactctgacttattgtattagcctcttgttacaaaaatatgtgagcaagcgcatatacaaatatccaagccatggaaagtaagctgtaatctgctgctcatgtttaagggagactcctcctgtttcccatctcaagcatgctgccagctgctgggatgtgaattggtctcactgatcc

SEQ ID NO: 57267 - DNA, 431 bp, Chicken  19866894312912_2
taaattactctgacttattgtattagcctcttgttacaaaaatatgtgagcaagcgcatatacaaatatccaagccatggaaagtaagctgtaatctgctgctcatgtttaagggagactcctcctgtttcccatctcaagcatgctgccagctgctgggatgtgaattggtctcactgatcctgggtttaggagtcaactggaactcagcaccccgtctgctctgcagctttggaagctgcgtgacaacgcaatgctgtcagtatgaaaacaacagcagcaaagctgtgttgtgcgtartgctctatgtatggctctggagatggagttctccaggctgggttctttaaaaagcaagaaaggtaaaagtgcattgcttaccttgcagcaggagcagagctgcgacatgcagcacccgtggtgaaagtcat

SEQ ID NO: 57268 - DNA, 599 bp, Chicken  19866894312921_1
  misc_feature (1)..(20): n is any nucleotide
nnnnnnnnnnnnnnnnnnnnttaaagaagaagtgatttgtattgagtagagaagagatcagacaccaggttcttccactatattcagttatgtctttgtggatgaatttgtcaggaaatccttctagcttgcctgggctgtactgagtgaagaggaattgtcttgggccacatataaaatgtgtaggtcactctgaaagtaatgcctcctatttgtttacatggaaactacaactgatacaagaagccctatagtattacttgatatagcacattcccagctgtgaaacattgattttcracatagtcagcgtcwttatctgtgcactttggccagtggtgaacaacagcttgcatgctgcacttgtaaaaatctgtaccagcagaagtgacccactgtttcatagctgctatgatagtgttgttgctagaaaaatgttgcccacatcagtctttcatcatcccaaacagatagaagtcaaaaagcaccaaatgaggactatttggtgrgtgtggtagggcagtgcagccaagattagtaatgtgctccttcgtcttcaaactgatatggaacctgacattattgtgttgcaagaggaa

SEQ ID NO: 57269 - DNA, 599 bp, Chicken  19866894312921_2
  misc_feature (1)..(5): n is any nucleotide
nnnnnttaaagaagaagtgatttgtattgagtagagaagagatcagacaccaggttcttccactatattcagttatgtctttgtggatgaatttgtcaggaaatccttctagcttgcctgggctgtactgagtgaagaggaattgtcttgggccacatataaaatgtgtaggtcactctgaaagtaatgcctcctatttgtttacatggaaactacaactgatacaagaagccctatagtattacttgatatagcacattcccagctgtgaaacattgattttcracatagtcagcgtcwttatctgtgcactttggccagtggtgaacaacagcttgcatgctgcacttgtaaaaatctgtaccagcagaagtgacccactgtttcatagctgctatgatagtgttgttgctagaaaaatgttgcccacatcagtctttcatcatcccaaacagatagaagtcaaaaagcaccaaatgaggactatttggtgrgtgtggtagggcagtgcagccaagattagtaatgtgctccttcgtcttcaaactgatatggaacctgacattattgtgttgcaagaggaagattctcttttttgc

SEQ ID NO: 57270 - DNA, 600 bp, Chicken  19866894312921_3
tatttgtttacatggaaactacaactgatacaagaagccctatagtattacttgatatagcacattcccagctgtgaaacattgattttcracatagtcagcgtcwttatctgtgcactttggccagtggtgaacaacagcttgcatgctgcacttgtaaaaatctgtaccagcagaagtgacccactgtttcatagctgctatgatagtgttgttgctagaaaaatgttgcccacatcagtctttcatcatcccaaacagatagaagtcaaaaagcaccaaatgaggactatttggtgrgtgtggtagggcagtgcagccaagattagtaatgtgctccttcgtcttcaaactgatatggaacctgacattattgtgttgcaagaggaagattctcttttttgctagtttgtctctggaggttcaagccttcaacttagtctgtgttgcaatgtagagtagtcagttgatgatttgtctgggttccaggaggttcagaaggatcatccctttcctatcccaaaagacagcaaacatcactgagggttacatcttgggcttttgattccagcttgtagtggtgacaccacgtctcttcac

SEQ ID NO: 57271 - DNA, 600 bp, Chicken  19866894312923_1
ttagtgcatgagctttttatttaggaattcatttttctagggggtccttaggaatggaacatcactctccttaaggcgtgtctgaaactgcagctgttcatccagtttattgcacttccggaggccgaaagtttgctttttgtagcttagaaaacctctttgtaggttttctatgtccggcagttgactgatggtcatcgttttctccattgtcccattaatgctcaaaggctttaatttggagatattttatttttttattattttatctttataaggaaaaacaatgatagagagctyraggctgtacatgtctttctaaacycagtaggaccagttttctgaactctagctctgtcaccaagatcatgggcagactctggtccaaatttcttacagccagctccctctraagcatgtgtcctggattcaggcagctggagtggtgcaaaccaaagcagaggaggaggctgccatctaagcagtgtgaagtccactgcatgagcctgctcagcttgttttggttgtttttgtgtttgctgtcttttttagtatttatttttttacttagcagtgtcaacaaaccttaagaaaacagac

SEQ ID NO: 57272 - DNA, 600 bp, Chicken  19866894312923_2
tagtgcatgagctttttatttaggaattcatttttctagggggtccttaggaatggaacatcactctccttaaggcgtgtctgaaactgcagctgttcatccagtttattgcacttccggaggccgaaagtttgctttttgtagcttagaaaacctctttgtaggttttctatgtccggcagttgactgatggtcatcgttttctccattgtcccattaatgctcaaaggctttaatttggagatattttatttttttattattttatctttataaggaaaaacaatgatagagagctyraggctgtacatgtctttctaaacycagtaggaccagttttctgaactctagctctgtcaccaagatcatgggcagactctggtccaaatttcttacagccagctccctctraagcatgtgtcctggattcaggcagctggagtggtgcaaaccaaagcagaggaggaggctgccatctaagcagtgtgaagtccactgcatgagcctgctcagcttgttttggttgtttttgtgtttgctgtcttttttagtatttatttttttacttagcagtgtcaacaaaccttaagaaaacagaca

SEQ ID NO: 57273 - DNA, 600 bp, Chicken  19866894312923_3
aattcatttttctagggggtccttaggaatggaacatcactctccttaaggcgtgtctgaaactgcagctgttcatccagtttattgcacttccggaggccgaaagtttgctttttgtagcttagaaaacctctttgtaggttttctatgtccggcagttgactgatggtcatcgttttctccattgtcccattaatgctcaaaggctttaatttggagatattttatttttttattattttatctttataaggaaaaacaatgatagagagctyraggctgtacatgtctttctaaacycagtaggaccagttttctgaactctagctctgtcaccaagatcatgggcagactctggtccaaatttcttacagccagctccctctraagcatgtgtcctggattcaggcagctggagtggtgcaaaccaaagcagaggaggaggctgccatctaagcagtgtgaagtccactgcatgagcctgctcagcttgttttggttgtttttgtgtttgctgtcttttttagtatttatttttttacttagcagtgtcaacaaaccttaagaaaacagacaaaatatgtatcacttttattctgc

SEQ ID NO: 57274 - DNA, 600 bp, Chicken  19866894312923_4
cacttccggaggccgaaagtttgctttttgtagcttagaaaacctctttgtaggttttctatgtccggcagttgactgatggtcatcgttttctccattgtcccattaatgctcaaaggctttaatttggagatattttatttttttattattttatctttataaggaaaaacaatgatagagagctyraggctgtacatgtctttctaaacycagtaggaccagttttctgaactctagctctgtcaccaagatcatgggcagactctggtccaaatttcttacagccagctccctctraagcatgtgtcctggattcaggcagctggagtggtgcaaaccaaagcagaggaggaggctgccatctaagcagtgtgaagtccactgcatgagcctgctcagcttgttttggttgtttttgtgtttgctgtcttttttagtatttatttttttacttagcagtgtcaacaaaccttaagaaaacagacaaaatatgtatcacttttattctgccagtacatacaaaatgccacctctgaatgtatttgtaccacttgcaaggcagcgtacctagtagatgtcaatacaagctcagttgga

SEQ ID NO: 57275 - DNA, 600 bp, Chicken  19866894312928_1
ttatttgatgaatctctgaagttaaatggcttgattcattccttttatctgtgtttattgggctacatttcagggggaaacaaaaacagaaacacaacgtggaggaaaagagcaaaaagcagatagaagttgtcaggcaagcaaaccgcagctagaagagtgctgtgatgttcaggaagtactttggagaaagttactgaggtctgcagtgcacgtaatcattgtaaaacatttcacagtgaattgaatctagcacatctgatccttctaaaggcaagagaaggcaaaagctccttttcyccccctaatacattgttgcacccctgaacattacctttgagtaatctgtgggcatatcgccactgcctgagatggagacggaggaggaggaatcgttgttttgagcctgtgttaaaatctttttggttctgttttgactacagcaattcaatataaaggtgctcatagtgaaaatgttattaaggaataagaagtgaggaggaagtgagagatttctgaaggttaactgtagaagcccaatcgaaaagtgcaccacagcaaaattcttccattcrgactgtgtggaatatctgatttcct

SEQ ID NO: 57276 - DNA, 600 bp, Chicken  19866894312928_2
aagagaaggcaaaagctccttttcyccccctaatacattgttgcacccctgaacattacctttgagtaatctgtgggcatatcgccactgcctgagatggagacggaggaggaggaatcgttgttttgagcctgtgttaaaatctttttggttctgttttgactacagcaattcaatataaaggtgctcatagtgaaaatgttattaaggaataagaagtgaggaggaagtgagagatttctgaaggttaactgtagaagcccaatcgaaaagtgcaccacagcaaaattcttccattcrgactgtgtggaatatctgatttccttttcagttcccactgtgctctgcaaagaaagttgcagaaggtgaaggtggaaggaaaaagtaagatccgagaaatgtgccctattagacagaagtgtatgttggaacaaaaataggtacagagctgtcgtcgcaccctcagtgatactttttttccatccactgatgtggtatacactttcaagtctattgtaaagcaattaaaggctttttgttctagcttacactacaagattttctgtgtgttcttaatgtgaagacagatctgttagatcc

SEQ ID NO: 57277 - DNA, 600 bp, Chicken  19866894312930_1
ttttgattgtcttcccatgcagtcttcagtgacgctcgtcatccttctctgcctgtctctcctcactgtgcaaaataaagggagcagtgcttcttccttaaaatgagcaagtcctttctaacaatacaaaacaacagaactcatttctgcagaggtgaattcagaagggtcagacaaatcccatgcccatcagtaactaggatgcactttttgtcccaggaagtcacagcagaacagaagagatctcgcccttctgacgcagtgatttcccagcccaggataccaaaccaggtcttgctmtgatcgcaggggcagcatcwctccttctcttctttcagctccaagctccttgtagccatgcattctggcagcaggcggtgggagcccagctctgcaggcgtaggggtgcagggcctggcaggaatacttgtcagccccagcacagggagctgcattaatgtggtgcacacttaatttattctgctcctcaggggtcgagttgcaagtcattattaagagagaatataaacacagaaattcaaggcatggttccaatagttattattattattatattttaaatcttaattccttcattct

SEQ ID NO: 57278 - DNA, 600 bp, Chicken  19866894312930_2
agtcttcagtgacgctcgtcatccttctctgcctgtctctcctcactgtgcaaaataaagggagcagtgcttcttccttaaaatgagcaagtcctttctaacaatacaaaacaacagaactcatttctgcagaggtgaattcagaagggtcagacaaatcccatgcccatcagtaactaggatgcactttttgtcccaggaagtcacagcagaacagaagagatctcgcccttctgacgcagtgatttcccagcccaggataccaaaccaggtcttgctmtgatcgcaggggcagcatcwctccttctcttctttcagctccaagctccttgtagccatgcattctggcagcaggcggtgggagcccagctctgcaggcgtaggggtgcagggcctggcaggaatacttgtcagccccagcacagggagctgcattaatgtggtgcacacttaatttattctgctcctcaggggtcgagttgcaagtcattattaagagagaatataaacacagaaattcaaggcatggttccaatagttattattattattatattttaaatcttaattccttcattctgctttcttaattcaaagcat

SEQ ID NO: 57279 - DNA, 600 bp, Chicken  19866894312933_1
aataaatgtttagatgctttcttttaataataaaataccatcattgtaatactgaagtactcagtagatttgactttatgtgatactgtactttttgggttcttttctgaatttgtttcttgctcaaacataatgagacatacaggaataggaccagtttaaagcacagcatgcctctgtggaagtacctcttttacaggaagacaggaaaccacagttagagaatcacagaacggtttgggttggaaaggaactcaaagcccactcggcccccacccatgccgtgggcaggtctgccasctaccagctcagctgcccagggcctcatccaacctggtcttgagtgcctccagggatggagcaccacagcttctatgggcaacccatctgatgctccaaggctgtttaagaccaggcagttggaaaactggacttttccttgaagtgattctgcagcatcatatgaaagcattttaaagtaatctttttaattatgcagtgttttaaaatttgcagcatgtgcacgtgtgttggaatgactaattggcgtccactacgtcttcataatactcacaggagtaggaagctgtgctctggcat

SEQ ID NO: 57280 - DNA, 599 bp, Chicken  19866894312945_1
  misc_feature (1)..(15): n is any nucleotide
nnnnnnnnnnnnnnnagttgcatgtaaatacatttttaagaattggttatgaatgtggatactgcaacccaagttcttttcaggtttttgttagaaggagaacgtatttgaggaattaaaaaacatgggaaaagctcaaataaacagaagaataatatgaatttgtgggtacctaatagcccaatatatgtggtgtgcatgtaagagatttacttcataactatattaatatttattattcatttagttctgtagatagaaggactgatagtatccagtcacacagtattaaaaactacrtgtgaaactatttccaatctttgtggctaaaaatgtatctggcgrggagggatccccaactggtgcacagctgacttagccatgtgttgttgctttctctttttctaggagaaagctatagggatgtctcacttaactgaattcctgatctctgaatacttaaaagggacctgtatacacaaagtgagttgaatcatctggatgcagcagctgagtcttaatttaattaactgaaggtacaagtagtgatgcttgggaagaagcactttggtcacaagatttttagagatgacaggaaa

SEQ ID NO: 57281 - DNA, 600 bp, Chicken  19866894312945_2
gttatgaatgtggatactgcaacccaagttcttttcaggtttttgttagaaggagaacgtatttgaggaattaaaaaacatgggaaaagctcaaataaacagaagaataatatgaatttgtgggtacctaatagcccaatatatgtggtgtgcatgtaagagatttacttcataactatattaatatttattattcatttagttctgtagatagaaggactgatagtatccagtcacacagtattaaaaactacrtgtgaaactatttccaatctttgtggctaaaaatgtatctggcgrggagggatccccaactggtgcacagctgacttagccatgtgttgttgctttctctttttctaggagaaagctatagggatgtctcacttaactgaattcctgatctctgaatacttaaaagggacctgtatacacaaagtgagttgaatcatctggatgcagcagctgagtcttaatttaattaactgaaggtacaagtagtgatgcttgggaagaagcactttggtcacaagatttttagagatgacaggaaaattttaaaggatgcaagtctatgtcaataaacaaaaagatctgtag

SEQ ID NO: 57282 - DNA, 599 bp, Chicken  19866894312951_1
  misc_feature (1)..(72): n is any nucleotide
nnnnnnnnnnnnnnnnnnnnnnnnnnnnnnnnnnnnnnnnnnnnnnnnnnnnnnnnnnnnnnnnnnnnnnnnacactatttccatttcaagccaagatacaattggccttcttggccacctgagcacacaagcagctcatgttcagatgagcattcactaacacctcccagatccttctcctatgcacagctttccagctactctgccccagccctgtagcattgaatagggttgttgtgatccaagtgcaggacccagtacttggtcttgttgaacttcatcccattggcttcagcccrttgatccagcctgtccagatccgtgtggagggccttcctaccctcaggtagttgaacgcttgcccccaacttggtgtcatctgcaaacttactgagggtgcactccatctcctcatctagatcatcaataaaggtatcaaacaggacaagctccagtactgacccctggggaacaccactcatgaccagtggatttaactcccttcagcagtactctctgggcctggccaaccagccagttttttacctagcacagactgtactcatccaagtcatgggctgccagattcctcaggaga

SEQ ID NO: 57283 - DNA, 599 bp, Chicken  19866894312954_1
  misc_feature (1)..(183): n is any nucleotide
nnnnnnnnnnnnnnnnnnnnnnnnnnnnnnnnnnnnnnnnnnnnnnnnnnnnnnnnnnnnnnnnnnnnnnnnnnnnnnnnnnnnnnnnnnnnnnnnnnnnnnnnnnnnnnnnnnnnnnnnnnnnnnnnnnnnnnnnnnnnnnnnnnnnnnnnnnnnnnnnnnnnnnnnnnnnnnnnnnnnnnncacctaaaataaacacacacttttgagcatttggggtttggggcctgtgtagttaatgtaacactaatgctgacaatacacttcaattactgatatattgctaacatcaagagaacwgataccagcacaacaagtgcaatacaataattagcgtttaatatttcatcaaaatgtttaatttttaaacactgaatttgtctttttttttttaatgtattattggtttcaattatgtagctgatttaacggcatcttagcagcatctgcagtgcctcagccactccaacaccagcttctctccaagtgatgctacaccacaggttttcaagatggttgccatcagcaagscccttagaaaaggcttgttaatgaaaaactctggtcttgactgccactcgcatttctttcatgagaag

SEQ ID NO: 57284 - DNA, 600 bp, Chicken  19866894312954_2
gtagttaatgtaacactaatgctgacaatacacttcaattactgatatattgctaacatcaagagaacwgataccagcacaacaagtgcaatacaataattagcgtttaatatttcatcaaaatgtttaatttttaaacactgaatttgtctttttttttttaatgtattattggtttcaattatgtagctgatttaacggcatcttagcagcatctgcagtgcctcagccactccaacaccagcttctctccaagtgatgctacaccacaggttttcaagatggttgccatcagcaagscccttagaaaaggcttgttaatgaaaaactctggtcttgactgccactcgcatttctttcatgagaagcatgtgctacaagtgcttccttccaggtgtcccaagggagcagcattggacaycgttggagggcagatggatgtgacctggctgtcacagaccctttggggttgacatatctccacaaaatggtggcagttattgaaatactcaatcactgctgtcagccaagaagtaacagcccaaaatatcctctccttactgaccttatccccagccctgggtgagggaacacaccttg

SEQ ID NO: 57285 - DNA, 600 bp, Chicken  19866894312954_3
aatgtttaatttttaaacactgaatttgtctttttttttttaatgtattattggtttcaattatgtagctgatttaacggcatcttagcagcatctgcagtgcctcagccactccaacaccagcttctctccaagtgatgctacaccacaggttttcaagatggttgccatcagcaagscccttagaaaaggcttgttaatgaaaaactctggtcttgactgccactcgcatttctttcatgagaagcatgtgctacaagtgcttccttccaggtgtcccaagggagcagcattggacaycgttggagggcagatggatgtgacctggctgtcacagaccctttggggttgacatatctccacaaaatggtggcagttattgaaatactcaatcactgctgtcagccaagaagtaacagcccaaaatatcctctccttactgaccttatccccagccctgggtgagggaacacaccttgcctatctccatcccctccctgatgcttctctctgatccctcaaccactcctcataaaatatgctctccagtcccctcactagcactgttgctcttctctgaacatgctccacagcctttat

SEQ ID NO: 57286 - DNA, 600 bp, Chicken  19866894312963_1
acacaatcggatcaggaaatgtgccttttgttttcctgcacctgttgctgtactacaaataaaatcatccaatgttttattaaataaaacgagaagtcctaatgaaattgtaccagccattaccaggaagtctattgaaaacattcagcagctgctcagcctgagtttgtttacactgataaggctgttttgtcccactccttatgtgtgaactgaagaagctacagtgcagtcctactgtgcagcagagccttggagcgtttcataccactctcctccaatgccttttaaagtatttgrtcgtgatctgtgatgttacgcagttgtggatctactgtgaggttattccatgaagaatttaaactcaagtacatgaaagcaatacgggcattccagaagttgagccaaagccatgagctccttcagcagggccggcccaaaaggccacgtgcagaggtgtctgttccatgagagaggggaggatgttgtgcaaatgagggtggactgaaaacctgtatttaaccccagctaatggcagtgcatagatcagaacaagggaaattctggaggaaggatgtagccctgttatgaggagccgga

SEQ ID NO: 57287 - DNA, 600 bp, Chicken  19866894312972_1
cctggtagaaagaaactagatctatttgagtgttttccacactcaggtggaagttttgggaaattgcacccgagtcataaaacatatttattgaaatagtgatatatggatattctgtggaaactgacctttcacttcttaccagaggtgcaccctaacactctcagttgtagtatgctgaaataggatgttatgcatatacatagttctcccatagaataagaatagcaataagaaatatgtgttgttgaatcagattttatttgtataacatatagctctactttctttccttcggtktgtttttaagtggtaattttaagaatgtcattcaataatacgcagtggatcagtggatatctccatctgcactttttccagcccaatagaaagtactgagaatcagcctgctgattttaagtctttcctctcagttggtgactgggatccacacaaaaggaggagagtgagtatgctgaatggatagctttgtgaatggtgttgcactcaggactttgggtacaatggtttgggacacagccttgagaaaggaggaatgctgatgacagatgggagccaactgactagaaggccacaaat

SEQ ID NO: 57288 - DNA, 600 bp, Chicken  19866894312980_1
tcctaactctacctacagcaaatctcaccaacatccaaggactggtagcagcagctgcagcaggaggcattatgactttgccattgcaaaatctacaaggtaagttgtgtttagtatttttctgacagagtcttttgtttgtttgtttcactttgtctcttttaaacagagctatctctttattcagtgaatgttgctcttgatactgaaagttaatgcttgggttagttttgaatacttgagagatacttaagggatatttgcatttttataaaactggagtggaggttgggctcttaygttctctaggtcagtactgtaaagtacttgaatgattcattaggcttttctgtcatcagtgatcaatgttctctactcagagttcactttggaatttcaaatggcaacatgaaaataagtattctgtttaaccattgctgattagagtagctgagtgaatagaggtaactaaaaacacagtattgcattaaaatcactttttaaatccttctattataaaatcagaactttggttagctgccactactgcccaggatgcacattctcattcttaatgtgggaggtctgctttatgagtaa

SEQ ID NO: 57289 - DNA, 600 bp, Chicken  19866894312990_1
acaggcacttaaacatatggatctgatttccgctgttactcaaagggacatcccactctccccataaaaaagcctgtatgcccaagtcagagctgaggatacaatgaggtgatagaggaggactcatgctctaattaacatccagtgccaactgtcttcacacgttcgtggtagctcacagccattggtgtcagccaacccagactcatttagagtgccaaacccaacatccatgctgatgcttaacctttcctgttccaaaacatgtcccagttttcagtgcttgtgatgagcaggctrtgttcaggcttttctgcttctcagtcctcactttgcaaagtgcattctcttcctgtggtgacagcatggctcacagaccacagctcattggggaaggtgttgcaacaagatcctctaataatcacaaccccaagaaaaggaggaaacaaacccaaacaaaatctgtggcttatctagatgtgaaattgacatattgccaacctgctgatatctgcctgtgtgtgattcccaaatggatatcatcgctttgygaagtcatagactcatagagaggtttgagttggaaggaacctttaaagg

SEQ ID NO: 57290 - DNA, 600 bp, Chicken  19866894312990_2
cctgttccaaaacatgtcccagttttcagtgcttgtgatgagcaggctrtgttcaggcttttctgcttctcagtcctcactttgcaaagtgcattctcttcctgtggtgacagcatggctcacagaccacagctcattggggaaggtgttgcaacaagatcctctaataatcacaaccccaagaaaaggaggaaacaaacccaaacaaaatctgtggcttatctagatgtgaaattgacatattgccaacctgctgatatctgcctgtgtgtgattcccaaatggatatcatcgctttgygaagtcatagactcatagagaggtttgagttggaaggaacctttaaaggccatcaggtctcactgccctgcagtgaactgggacacccacaggtccatcaggtgctcagagccccatccagcctgacctcagtgtctacaaggacagggcatccatcacttctatgtgcaacctgtgccagtgtctcaccaccctaagtgtaaaaaactttgcccctatatccaatctagatctcccctcttttagttggaaaccatttccccttgtcctatcacaacagaccccgcaaaagagcctgtt

SEQ ID NO: 57291 - DNA, 600 bp, Chicken  19866894312995_1
gcaacaacccgtctgaatcccttctcttatgagtatgaccaggaaatatcaacagatgttgacagctcctggcctacctcggctcttgctggccatcgggctgtggcctgggggctgaggaggctgctgaactgggtcaaagaagagtatggaaatcccccaatgtacatcattgagaatggagtggggataaagaccaaatcagatgtcgatgaccacaccaggatactttactacaaaacatacattgatgaagctttaaaaggtacaaatgtttgcttttattttgtgttgtatatytccccactacattcttgttactattttcctctgaggtgtattttttaaaagcatcttttgctgttctttaagtattctgagtgcagtataaacatagtgggtttttttatgatctcttttgtatagccctttgtattctgtatcctccagaggtgaagtctctcatggtctttctcgtccagagacagcttgatgaagctgaaagtgtttgcaagtgaattccttgtggtttgttaaatgtgtgaaacatcattgatgctctcccattgtttctggtctttcagcttacaaactggacgg

SEQ ID NO: 57292 - DNA, 600 bp, Chicken  19866894313001_1
cccactgttgaaatggcattttcaaattggaaaatatttatttacaaagtgcctgcccagcactaggaatacagtggagaaccagagaagcacaggtagaagacccaaccctaaggtaagagggtgcacttaaagtgagctaagcctgctcaagcatgaccaaccctgctgactgagcaatctcacccaactgtgttcattttatagaacagtaaggcacttttaatattctttgacttgtgacgtctttgttacaggtactggctttttaaattagttctgggcaggttccagaatcayggatttacagattatttgaacacactgagatattttaattggctaaaatgcaaacattttacatttaatgaagaataactgttgagcctgattttccactacctggtacagtaatacagccataactttacagcagaagtaaggcctcaatgcacagtttgacagctcactgctcgtgaccttctcatgacataaagcccactgggctttcagaaaccttctcctgtgtgactgcttctgatctggctcttcctttctattccagcagcatggtggagttcacagcaatgcaactactct

SEQ ID NO: 57293 - DNA, 600 bp, Chicken  19866894313008_1
tcagagcccttccgcaaaaccgttctgaaagaaccatcagctgcatttgcctcttctcatgactatattttcctggtcttgtgaccatgcaaagctgatagtgtggcgataccccatactgcagcactacttacaggcactgaaaatcttatcttgtgtatattgtcatccactatgatgctcaacttcatgttcctgaagaccacactgaaggaacatgttaaaccagtagctttctgcatgataatttccacttagtcttgctttccctaaagctggtttatactttttacacctttkctgactttttccactttttcccgagtagtgtatgtagtgcttcagcaaatgattgattaaaatctagattgattatatgtaaagcatttctcaggggaataaaatagagaagaaagattttgaactagtgttacatgatctgccttctgtaaatcacttgatttccttttgttttctatatyttcctcaagatttttctgaaagttctgtgtgttatctctggatgaccgacgtgtctgcactaccaaaatgtctttcttctctctgtctttcttctcaagtgcaggcaccattttggtt

SEQ ID NO: 57294 - DNA, 600 bp, Chicken  19866894313008_2
caacttcatgttcctgaagaccacactgaaggaacatgttaaaccagtagctttctgcatgataatttccacttagtcttgctttccctaaagctggtttatactttttacacctttkctgactttttccactttttcccgagtagtgtatgtagtgcttcagcaaatgattgattaaaatctagattgattatatgtaaagcatttctcaggggaataaaatagagaagaaagattttgaactagtgttacatgatctgccttctgtaaatcacttgatttccttttgttttctatatyttcctcaagatttttctgaaagttctgtgtgttatctctggatgaccgacgtgtctgcactaccaaaatgtctttcttctctctgtctttcttctcaagtgcaggcaccattttggttttctttagtcatatactactcctcatttgatggatttatttaatatccacgccatcggactttcaatttcatgttctttcggtgttctgtgattaagattattctgccacccagacttgacagcaataagctttttggattttacttctatctcagtaatttctgtctctgagaactcattc

SEQ ID NO: 57295 - DNA, 600 bp, Chicken  19866894313013_1
taatccctgtcagttggttttgaccatctcttgtcaaactgtgactcaaactatgcgcttctgtcaggcacagaagacacaatttggcaaactgaccccaatactgtgcaattgcataaaccttacttgcagcaaatgttatgtaagcacgtatttacaaatttatcatttaatagttttctttcttaggtgtatgctcctttgtggaggaaattatgctttgtgttgtagaagagggtgttggttgggtgtttggagtattaaagaaagtctgtgcacaaaccgaagaatcatcattascattttttatatcattggcttaatttctatttcttttggagagaacagaagagaaattctatctcaattcttagctgtgggacagcagtttttcaggactagttttttctgaatgggaatgccttcctttcacttgtttccccactgccattttggaggttgccttccgtcatcttccctgaggaattcaaaagcaaagagacataaatgtgatcactttgctgagattttcccaacccagagtcttccagtagaaaaggaagatcccagagacaggatgagaggttctggcacttcctg

SEQ ID NO: 57296 - DNA, 600 bp, Chicken  19866894313025_1
aatatcaacaacattcctgacttagttattttcttggcagtgtctctattagcttattggagggacatcctgtgtctggtccgtccaaccttttttaggttctgtgttctcctgaaatttccacttggcactgacttctttttaataactaaaaagagagaaagggaatagaaaaatgcaaaaaacatttattccgatataagttattagatatcaaatgagtaatctcttatgagaataacagttcagtgttttttattaccaggaaagggaagagttctattttgattcacctggcaragttcagaaaattgcaacatactatttaaccactcaaatacatmtcatcttgctgtgcaagctggaaaastttgctgtgtggataaaggccaggttttctccatcattccttcactgcaagttctttctttttctcgagaaatattgtcaaattctctgcagtattttttgcttttagtcctctaggccctccataaggttctctcacatgacagtgagaatattttctatattgctttatcagttatttcttgaatatcaagaatgacagaacaagggataatccagttgacgtgggaa

SEQ ID NO: 57297 - DNA, 556 bp, Chicken  19866894313025_2
tctattagcttattggagggacatcctgtgtctggtccgtccaaccttttttaggttctgtgttctcctgaaatttccacttggcactgacttctttttaataactaaaaagagagaaagggaatagaaaaatgcaaaaaacatttattccgatataagttattagatatcaaatgagtaatctcttatgagaataacagttcagtgttttttattaccaggaaagggaagagttctattttgattcacctggcaragttcagaaaattgcaacatactatttaaccactcaaatacatmtcatcttgctgtgcaagctggaaaastttgctgtgtggataaaggccaggttttctccatcattccttcactgcaagttctttctttttctcgagaaatattgtcaaattctctgcagtattttttgcttttagtcctctaggccctccataaggttctctcacatgacagtgagaatattttctatattgctttatcagttatttcttgaatatcaagaatgacagaacaagggataatccagttgacgtgggaa

SEQ ID NO: 57298 - DNA, 530 bp, Chicken  19866894313025_3
tgtgtctggtccgtccaaccttttttaggttctgtgttctcctgaaatttccacttggcactgacttctttttaataactaaaaagagagaaagggaatagaaaaatgcaaaaaacatttattccgatataagttattagatatcaaatgagtaatctcttatgagaataacagttcagtgttttttattaccaggaaagggaagagttctattttgattcacctggcaragttcagaaaattgcaacatactatttaaccactcaaatacatmtcatcttgctgtgcaagctggaaaastttgctgtgtggataaaggccaggttttctccatcattccttcactgcaagttctttctttttctcgagaaatattgtcaaattctctgcagtattttttgcttttagtcctctaggccctccataaggttctctcacatgacagtgagaatattttctatattgctttatcagttatttcttgaatatcaagaatgacagaacaagggataatccagttgacgtgggaa

SEQ ID NO: 57299 - DNA, 600 bp, Chicken  19866894313041_1
tagaggttttattttttaactaagtggtgaacgctaattctgtagatttccattacttcatagcagggaggagaaaaagagtcagcaacaacaaaaacccgctcttaataggacttgaacaaggatataggacttgaatcacacagaaaagaaggctgaaaggagtggacaaaatatatttaatgagaacctccagcaataatgagttctttcctctaaaaaaaataattatatgaagcattttcgttttaaaggatctttttataactgaaaaatagaaatgatcttctgagtccctcrtgctcttcctactgtttcatgaaaccaagatgaaaaaatagagaaatcgttaaagaagattaaacgttgaaaatactttagaagttttttttttttaaatatttgaaaactattcctctatccctgtatttttagaacaaatcatatctgttctcacaaggaaagattcctgcttgggacccaagtgcattatgaattgaacatcattcagttgatcactagaaagtaaaacattaagactcttcttggaatagtcagcactctatttaagcacacatctagagcttggttaaaaaaaaa

SEQ ID NO: 57300 - DNA, 412 bp, Chicken  19866894313046_1
tattctgggtcaacctctttttcaggcctggctgcctttggaggaagtttgagttgaaacggaggatcatttttctggaattcaaattgtaaatatcagcatcatcatttaacaaagcaaagataagaaattttaaaaagtaattatttcaacaggaaatgattgcattacttcacccagaacagaactcacgatgttactaaaaggtaggagagatggccagataaaacgtaaaaataaacacgaggatgagactcagcttcaatttacaagtaggatccaagttggaaggactgaagsaaagcagtargagagggccaagttcagtttatcacagagatctcacttgaaacgcataaactcaatatcttgaaaagatattaaaaaaaaaaaataaacgtaaaaacaggag

SEQ ID NO: 57301 - DNA, 402 bp, Chicken  19866894313046_2
caacctctttttcaggcctggctgcctttggaggaagtttgagttgaaacggaggatcatttttctggaattcaaattgtaaatatcagcatcatcatttaacaaagcaaagataagaaattttaaaaagtaattatttcaacaggaaatgattgcattacttcacccagaacagaactcacgatgttactaaaaggtaggagagatggccagataaaacgtaaaaataaacacgaggatgagactcagcttcaatttacaagtaggatccaagttggaaggactgaagsaaagcagtargagagggccaagttcagtttatcacagagatctcacttgaaacgcataaactcaatatcttgaaaagatattaaaaaaaaaaaataaacgtaaaaacaggag

SEQ ID NO: 57302 - DNA, 599 bp, Chicken  19866894313053_1
  misc_feature (1)..(78): n is any nucleotide
nnnnnnnnnnnnnnnnnnnnnnnnnnnnnnnnnnnnnnnnnnnnnnnnnnnnnnnnnnnnnnnnnnnnnnnnnnnnnntatacatacatgcgtacacacacacacacacactacgcacaaaaagaatgcactggctgaaaagtcctcttaaaaatatatcaccaattgtgaaaattcaggaagtaaaagatttaataccctgaactcagacaaattgtaatctatgcttggctttttcctcttcatctcactgtccactgtttggtactcagtaaacagtgatgcgttattcctaggatsttgcaatattaagttgttgtgatgctgcagttttgtttgggaagacaaataaatccccaaatactgtgattcccaagggaaaataaataaataaataaataaataatataaaataaaataagaaacaaccaagcaaaacaaaacaaaacaaaaccatcagaaatagtaaaacataataatcactgttgcttggatcagaaattgaatgctccagctgtggatggagctgtgctaactatcatctcctgatcttcacattctcagagttttacactaatccaaagcaattttactgagga

SEQ ID NO: 57303 - DNA, 599 bp, Chicken  19866894313057_1
  misc_feature (1)..(53): n is any nucleotide
nnnnnnnnnnnnnnnnnnnnnnnnnnnnnnnnnnnnnnnnnnnnnnnnnnnnnctccgcaccgctcaccgagcagagctcaccccaaccctgcacagagcagcgctgagctgagctggagagcagcacagttgcttctcgtgtctccagggcttttagtgctgaggctgtaaggctgatgtctggatacagatatgtgatcagcttggcgtgaacacatagtctcttacaattttttacctttttttccccccaaacatttagactaagcccatgatgtcatctctggaagagcattaargttcttcctcgagatgggtggtggtgcagagccaaaacaggctgtgttggttttgagattttgtcatctttatccatactggaaagcataaggcaagaacctgtaaattatttttgaattcattaattgagtaaaccgttatgactttgctacagacacaaaggttaaaagaaataaatattttctatcatattctatagggttctcaaacactgttagcataatccataacctattaacataatccatattacatttgccatattgtctattaaattgcacagccttaaggacacgtg

SEQ ID NO: 57304 - DNA, 600 bp, Chicken  19866894313057_2
aaccgttatgactttgctacagacacaaaggttaaaagaaataaatattttctatcatattctatagggttctcaaacactgttagcataatccataacctattaacataatccatattacatttgccatattgtctattaaattgcacagccttaaggacacgtgaaatcgacatgcactgtataagtcttacccaattttattttacaggtgtctcccaagactccttcttcacatttcacgtgcgcattttgaaaccattaccaggaatgaacatttgtactttaacagccacagarcgtgggctgccccactcttgagagaccgcctggtgctgtgtggagggaatgttctacgtggtcaaaaccacttcaaactgaactactgtaagtttctcagtcatcagttctcattgttytcactgcagtcctttggttcaggcaatcttgcaaattgttccatgtcttgtttccaatatctttccagtttatagattgcttcagttttgctgctttccagggtgacaacttcagtatattcacatttctgagagcagcacagttacctttttcctccagatctagtctttctcatgagaa

SEQ ID NO: 57305 - DNA, 600 bp, Chicken  19866894313057_3
acatttgccatattgtctattaaattgcacagccttaaggacacgtgaaatcgacatgcactgtataagtcttacccaattttattttacaggtgtctcccaagactccttcttcacatttcacgtgcgcattttgaaaccattaccaggaatgaacatttgtactttaacagccacagarcgtgggctgccccactcttgagagaccgcctggtgctgtgtggagggaatgttctacgtggtcaaaaccacttcaaactgaactactgtaagtttctcagtcatcagttctcattgttytcactgcagtcctttggttcaggcaatcttgcaaattgttccatgtcttgtttccaatatctttccagtttatagattgcttcagttttgctgctttccagggtgacaacttcagtatattcacatttctgagagcagcacagttacctttttcctccagatctagtctttctcatgagaattcctcctagaaggctccaaaactaaccatgaattcagaagaataaatgtggtttgggggaaatgttacacttttgagaaaggccaccttgttttatacttgtgttagagactcggttt

SEQ ID NO: 57306 - DNA, 600 bp, Chicken  19866894313065_1
taaaagtcaggctatttatatttaggcacccaaatttgggaagaaaactcggtcagactgtttatattaagcatgtaactaaatctctaagttctatggctgcttggtgcacataccagaatagtaatacacaatctatggagagatccaaactgcagcacagacagctcccaccccctacattaccttccttatgtggcacaatatcctgttcacctaggaagtcaattttaataacttgtctttcttcgaaagaatgcacaacataactgattatttccagtaaaaacatgactacaygaaaacatctgtattcagcaaggagtcctcctctcaaacacagagtacttctagaacatgctaagattacktctaagaatgaggtgatagtagatggagctgcataattttaaatcctctcctaccaaggctgccattttaaaaagaaaaacatcaaacaggaaaagaatggttcaattctaaagatggtggacaatttcagctcctacatattgctttatgcttccctaggagaaaaagcagtgctaagaagccttatgttctgaaaactacaattcaagatatacaacacaaataccc

SEQ ID NO: 57307 - DNA, 600 bp, Chicken  19866894313065_2
catgtaactaaatctctaagttctatggctgcttggtgcacataccagaatagtaatacacaatctatggagagatccaaactgcagcacagacagctcccaccccctacattaccttccttatgtggcacaatatcctgttcacctaggaagtcaattttaataacttgtctttcttcgaaagaatgcacaacataactgattatttccagtaaaaacatgactacaygaaaacatctgtattcagcaaggagtcctcctctcaaacacagagtacttctagaacatgctaagattacktctaagaatgaggtgatagtagatggagctgcataattttaaatcctctcctaccaaggctgccattttaaaaagaaaaacatcaaacaggaaaagaatggttcaattctaaagatggtggacaatttcagctcctacatattgctttatgcttccctaggagaaaaagcagtgctaagaagccttatgttctgaaaactacaattcaagatatacaacacaaatacccaaatgtctttaataacacaagtcactagaaagaaggagagccatactactgcctgttggtttcaaccacat

SEQ ID NO: 57308 - DNA, 599 bp, Chicken  19866894313068_1
  misc_feature (1)..(47): n is any nucleotide
nnnnnnnnnnnnnnnnnnnnnnnnnnnnnnnnnnnnnnnnnnnnnnncttggcttgcatcaagagaagtgtgaccaggaggttgggggaggtgattctgcccctctacactgttctcacgagaccccacctggagtaccgtgtccagttctggagcccccaacacaagaaggacatggagttgttggagctggtccagaggatggccatgaagatgatcagagggctggaggatggtcccctacaagggcaggctgagagagctggagaagagaaggctacaaggagaccttatagtggyctttcagtacttgaaggtagcctacaggaaagctgggaagggacttttcataaggggagatagcaacaggaaaagaggaaatggttttaaacagggagagggtatagactagatgttagaaagaaattctttactgtgagggtggtragacactggaacaggttgcctagtgaagttgtggatgccctttccctggaagcatttaaggccatgaggctttgagcagcctggtctagtgggaggtgtccctgcctatagcagtggggttgggactagatgggtctcttccaacccaaact

SEQ ID NO: 57309 - DNA, 600 bp, Chicken  19866894313068_2
ttctggagcccccaacacaagaaggacatggagttgttggagctggtccagaggatggccatgaagatgatcagagggctggaggatggtcccctacaagggcaggctgagagagctggagaagagaaggctacaaggagaccttatagtggyctttcagtacttgaaggtagcctacaggaaagctgggaagggacttttcataaggggagatagcaacaggaaaagaggaaatggttttaaacagggagagggtatagactagatgttagaaagaaattctttactgtgagggtggtragacactggaacaggttgcctagtgaagttgtggatgccctttccctggaagcatttaaggccatgaggctttgagcagcctggtctagtgggaggtgtccctgcctatagcagtggggttgggactagatgggtctcttccaacccaaactattctatgattctatgaaaatcgaacaatcaagagcagttaaaatkaaaaatatacacagttagtgaaaaaaagtcctgtagaatgaaacactccaagttatcataaaataaacaccctgctgtaactgttgatgtgtattttttttt

SEQ ID NO: 57310 - DNA, 600 bp, Chicken  19866894313068_3
tttcataaggggagatagcaacaggaaaagaggaaatggttttaaacagggagagggtatagactagatgttagaaagaaattctttactgtgagggtggtragacactggaacaggttgcctagtgaagttgtggatgccctttccctggaagcatttaaggccatgaggctttgagcagcctggtctagtgggaggtgtccctgcctatagcagtggggttgggactagatgggtctcttccaacccaaactattctatgattctatgaaaatcgaacaatcaagagcagttaaaatkaaaaatatacacagttagtgaaaaaaagtcctgtagaatgaaacactccaagttatcataaaataaacaccctgctgtaactgttgatgtgtatttttttttaattatttctatcttacatcttcagatgcagtttacaaagcaacaatagctacatattgtagataaaataactttctaattaccaaattcttttttacactacataatttgttcatcgaagatacacattatagtaaaagaagtactcagtagtaatgtagctgtcccagtaaagtcttgattaactttataatattg

SEQ ID NO: 57311 - DNA, 600 bp, Chicken  19866894313079_1
gatgaaagaacccttgagtcctttttatcagaatcttctgcaatgcagtggggaggttatctattgaatcggtcccttagaggaaaagctgagctctagtgaatggtagaagagaaaggggactttttaaattacaatatccaaacattccttctagtctgtcctgcagaagacccaaaaagttgagccctttgttactgcagtgaaagtttccctaggtagcataagtatttaaaacataaacataaaccaggaggatgcagctggaaatttccaaatgaatgctttcttttttttttyccactttctgtcttgtctgcacgcatctcgagcagcccacgttcctgtttgcctaccatcagggtgatgtcctgggaggatttcagctatttcatcaccttatacctgcggttcaacaggaacattcccaagtcttcaggaggcactttactctcaacattatacatccccttggctgcctatagatggaaagagatctataactaatatagctggtgtcacaaagctccaccagcacagcagtcaatacgaaatgcagcactaattacgaacagcaccaatctgctcaaattactgttg

SEQ ID NO: 57312 - DNA, 600 bp, Chicken  19866894313080_1
atccatacacaacacagctgcaggaaataattctgtttttacaaggcactccagcctgaagtagcaggttatttgaaacatcattgcttaatagaaaataggtgcaatatgtatgggtctacagttgtcacctacttgactttatttttcttgaagaaaaaaacaatatgtacaacaatgtctatttctttttttcaccaaccaagtctccttggcttctcaggcatgacttctagacccctgagacctactgcccagggccacgttatcgcctttctgtagattagcaatctagccacrtgttgacaacttctctcacagtgacccatctatttatagccctctatttagttagaccatgtatcagatatgaaaaaatacagaattatttttacaaaatgcgatagatgtctgttgcggaacagccgaagaaattatactgccatattctgtcacaaaaggaagacaaaaccaaagaccaccagtggtctcacaatggatctgcagctactcttttgggtttgtttgccttacaattcctgtcttaaactcttgtgtgtttccagatgttccacattgcttttgccaatgtctcggaga

SEQ ID NO: 57313 - DNA, 600 bp, Chicken  19866894313082_1
ccatatgccttttactttccatccctttgttttctgcccactttcttcttcctcccttctgttgtccctgtgatatttcagcagtgccccatcacgatctctccatctcttccataaacagcccacgaatcttattcttttcatcccttcttttacttcctttcttttttactagacagaatgtttagagcagccttcccaactggaccttaaagaccctcattaaagctcggccagctttctcaactcattttgaattccctgtgcacccgctcactgaaaggccagtggtttcgtacrgctgccctttccgcagaccctcctcggcacttcagctctgcagggaatataatcactgcatcctagatgctcttcaatttcaagtgtatttattacagctgctcaatttcctttaatctgctttttcttcttctcctccccctacgattgccttcttttcactgcagtagaagtacactgtaggaggtttttccctctgcccctcactgcctgctccagacccatccctgcactgactcacactcagtgccccatgcactgattatcattcgttacccatgtggcttcctgaatgtgctg

SEQ ID NO: 57314 - DNA, 600 bp, Chicken  19866894313085_1
ttctccaatttactgcaggaagacctatcatgaagcctacgtccaatgaggtaatcaccatgctttcttctggcctcaaaatccacaacctggtcctcacagatgttcataaacacagcactggcaagtacatgttgtgagccttgggattcctgcaaggagcaaacatcccagagctccctgttcagggccatctacacagccaggatctccaccttgtgcagaaatcatccaacgcatcctcaccaggcatccaggtaggcatcatatgctccagtactgctgggactgttcactacrtgtgcagaaaaattcctgtagaagaaacgtactgctgttggtagattttcacacgtaaagagctcatgtgtgacatttctttctccttgagcttcctttggttgcttgggtttttttttctcaactcagagagatgctgccaygacttggtggcagattataggagtcaagtgtcctcctagagcagattcttctgaagtgtgaagaagggagatagaaaagaaggcatcttagaaagcagatccyrgttgcatgcaccattcccaccttcgtgtggctgtgatgcttcgcttggtggga

SEQ ID NO: 57315 - DNA, 600 bp, Chicken  19866894313085_2
ttgggattcctgcaaggagcaaacatcccagagctccctgttcagggccatctacacagccaggatctccaccttgtgcagaaatcatccaacgcatcctcaccaggcatccaggtaggcatcatatgctccagtactgctgggactgttcactacrtgtgcagaaaaattcctgtagaagaaacgtactgctgttggtagattttcacacgtaaagagctcatgtgtgacatttctttctccttgagcttcctttggttgcttgggtttttttttctcaactcagagagatgctgccaygacttggtggcagattataggagtcaagtgtcctcctagagcagattcttctgaagtgtgaagaagggagatagaaaagaaggcatcttagaaagcagatccyrgttgcatgcaccattcccaccttcgtgtggctgtgatgcttcgcttggtgggaacacataggagatcagtggctgtgcccaaatcctacagacagcagctctgtgctaggagcctccatggcattccccatagcatcccacagaggacaggagagcccagagggggtgtccgggttaggctgtgtccaaaggcagt

SEQ ID NO: 57316 - DNA, 600 bp, Chicken  19866894313085_3
caggcatccaggtaggcatcatatgctccagtactgctgggactgttcactacrtgtgcagaaaaattcctgtagaagaaacgtactgctgttggtagattttcacacgtaaagagctcatgtgtgacatttctttctccttgagcttcctttggttgcttgggtttttttttctcaactcagagagatgctgccaygacttggtggcagattataggagtcaagtgtcctcctagagcagattcttctgaagtgtgaagaagggagatagaaaagaaggcatcttagaaagcagatccyrgttgcatgcaccattcccaccttcgtgtggctgtgatgcttcgcttggtgggaacacataggagatcagtggctgtgcccaaatcctacagacagcagctctgtgctaggagcctccatggcattccccatagcatcccacagaggacaggagagcccagagggggtgtccgggttaggctgtgtccaaaggcagtgcaaacagctctccatatgttgttttcttcaacagctaaatcacagatgatgcttcattaagcttgagattcatccgtcattgttagtgttgcactcagtaat

SEQ ID NO: 57317 - DNA, 600 bp, Chicken  19866894313085_4
aggcatccaggtaggcatcatatgctccagtactgctgggactgttcactacrtgtgcagaaaaattcctgtagaagaaacgtactgctgttggtagattttcacacgtaaagagctcatgtgtgacatttctttctccttgagcttcctttggttgcttgggtttttttttctcaactcagagagatgctgccaygacttggtggcagattataggagtcaagtgtcctcctagagcagattcttctgaagtgtgaagaagggagatagaaaagaaggcatcttagaaagcagatccyrgttgcatgcaccattcccaccttcgtgtggctgtgatgcttcgcttggtgggaacacataggagatcagtggctgtgcccaaatcctacagacagcagctctgtgctaggagcctccatggcattccccatagcatcccacagaggacaggagagcccagagggggtgtccgggttaggctgtgtccaaaggcagtgcaaacagctctccatatgttgttttcttcaacagctaaatcacagatgatgcttcattaagcttgagattcatccgtcattgttagtgttgcactcagtaata

SEQ ID NO: 57318 - DNA, 600 bp, Chicken  19866894313085_5
ggggaactggtttgtagtattccagctgttaattatccctccgcttttgttattctcatcccagctgtgcctcagcatttattatatgggactacatgcactaaaaagattctgatcgttttaaagtgtaaggaacaatttaccccttttgtgcaacaccacgcagctcaagggatcaagtggcaaggtttgatcaatgaggcatcactggattacaggcagcggagctcagacctcagagtgcatgtttgggagaagtgcagtcgagggaacacaccaagaatgttaagcacagacacrcatagcttccatcattcycctttccccatctcttccttcccaggccccagaaacgtcctcaaattaatccccatgctgagtgctgaagagaacatccaaagccagggcagcctggccctgccgtgctctgggaagagctgctcctgctcctcccagccaaagcaggtcagcctcgctgcaggctgagagcagcacccgcacactgcagggagctctgtgccatccctgctctgacccagctccctgacgccagcgctgcacaaggcccagcactctcagcactgcagaaatgatgctctt

SEQ ID NO: 57319 - DNA, 600 bp, Chicken  19866894313085_6
attccagctgttaattatccctccgcttttgttattctcatcccagctgtgcctcagcatttattatatgggactacatgcactaaaaagattctgatcgttttaaagtgtaaggaacaatttaccccttttgtgcaacaccacgcagctcaagggatcaagtggcaaggtttgatcaatgaggcatcactggattacaggcagcggagctcagacctcagagtgcatgtttgggagaagtgcagtcgagggaacacaccaagaatgttaagcacagacacrcatagcttccatcattcycctttccccatctcttccttcccaggccccagaaacgtcctcaaattaatccccatgctgagtgctgaagagaacatccaaagccagggcagcctggccctgccgtgctctgggaagagctgctcctgctcctcccagccaaagcaggtcagcctcgctgcaggctgagagcagcacccgcacactgcagggagctctgtgccatccctgctctgacccagctccctgacgccagcgctgcacaaggcccagcactctcagcactgcagaaatgatgctcttggcagtccccaggaaaca

SEQ ID NO: 57320 - DNA, 600 bp, Chicken  19866894313091_1
tcattggtgacccactggtgttaaaagcatggtttcagcatgtcattaggaatgtattcccgttcttaacagcaaatttctgctgacaaagtaattagaatgggagttaattcaacactggagcctatcccaatgtatttgtaatatcaaatctgcacttagtattttgtgggcttgaagattaaaaacgtcccagcatgtacttcttttgatttacagtgtatttgggaaagctttaaagaccaaagaaacaatgagattaaagctacagtaacatgaagtagagagtgagcaaaaagraaaatatagacacaagcacagttaaaagacaaaaaaaaggaagaaaatcaaatgattcaaaagtctgcttatcacaacagttttgtttgctgtttctaagctcatgtttttttttctttctgaatgcttcttccctttctattctcaccactgtgaccctttatgatattcagcagaacctactgcacacacctcgtgactaatatgacttaactggtagatagattccaagctgctaccagaatccatctgtatgccaaagactcaagcataagggttttatactgcttttggagaact

SEQ ID NO: 57321 - DNA, 599 bp, Chicken  19866894313094_1
  misc_feature (1)..(35): n is any nucleotide
nnnnnnnnnnnnnnnnnnnnnnnnnnnnnnnnnnnctgtattatggagtctttgtacgttattaaattgttacagaatgtactgaaaattataatatcaatattaacattccaacatttcacacagcagaattctgaaaattctcagtgtagcatgtgaggcatactgataattcttaaaaacaattatgcatacaacttaatttcaaagatattctgctctgtaagtaaattcagaaaattcccttcttgaggacaagatatttctgaaaggatctacaattattttggcaaattgtgrtgctctgagatgacaaccatgatgaaatcagagaaaacaatgatgcattattgaaatggcagtcatcccttaataactgtatatcctaaataattaaaccagttacagttacttattaacattaattggttttgtgcatattgggaaataaaagctctggtatatcaggctaatacatttctccttaaaagatttgggtagctcaggttttttttttttttttttttttaatttgttttgtttttttctcctttggtcagatcaagcaatgagtgaactatgtaacttgttttaaaagc

SEQ ID NO: 57322 - DNA, 599 bp, Chicken  19866894313098_1
  misc_feature (1)..(101): n is any nucleotide
nnnnnnnnnnnnnnnnnnnnnnnnnnnnnnnnnnnnnnnnnnnnnnnnnnnnnnnnnnnnnnnnnnnnnnnnnnnnnnnnnnnnnnnnnnnnnnnnnnnnnatattttctaggtaaacggttttttcgtggttgtgcgtgtgtggtgactatgtcgaaaaatagcattatgcagctaagaatttgctctatccttgtgctctttgtatttctgtgtaaactacaatggctaaataggagacattacctttggagctacccgtgtgcaacaatgaatttggtagtcagtgaaaagtttgcrttttttttttttttttctcctccttctcctcaataaaatctccattcctggagacattcagcatcaggttgcactccctgagtgctctcagcaccctgatctagctgtaggtattcctgttattgcaggggagttggatgacatgatctttatgggccatttccagttcaaacaattctgatacacacggaagatttcagtggcagtcactctggttgatcaaatcaacaaaagattagtcctgacttccacaatgccaagtgtggggaaaccatcactactactttactactactttt

SEQ ID NO: 57323 - DNA, 599 bp, Chicken  19866894313098_2
  misc_feature (1)..(100): n is any nucleotide
nnnnnnnnnnnnnnnnnnnnnnnnnnnnnnnnnnnnnnnnnnnnnnnnnnnnnnnnnnnnnnnnnnnnnnnnnnnnnnnnnnnnnnnnnnnnnnnnnnnnatattttctaggtaaacggttttttcgtggttgtgcgtgtgtggtgactatgtcgaaaaatagcattatgcagctaagaatttgctctatccttgtgctctttgtatttctgtgtaaactacaatggctaaataggagacattacctttggagctacccgtgtgcaacaatgaatttggtagtcagtgaaaagtttgctrtttttttttttttttctcctccttctcctcaataaaatctccattcctggagacattcagcatcaggttgcactccctgagtgctctcagcaccctgatctagctgtaggtattcctgttattgcaggggagttggatgacatgatctttatgggccatttccagttcaaacaattctgatacacacggaagatttcagtggcagtcactctggttgatcaaatcaacaaaagattagtcctgacttccacaatgccaagtgtggggaaaccatcactactactttactactactttta

SEQ ID NO: 57324 - DNA, 599 bp, Chicken  19866894313098_3
  misc_feature (1)..(99): n is any nucleotide
nnnnnnnnnnnnnnnnnnnnnnnnnnnnnnnnnnnnnnnnnnnnnnnnnnnnnnnnnnnnnnnnnnnnnnnnnnnnnnnnnnnnnnnnnnnnnnnnnnnatattttctaggtaaacggttttttcgtggttgtgcgtgtgtggtgactatgtcgaaaaatagcattatgcagctaagaatttgctctatccttgtgctctttgtatttctgtgtaaactacaatggctaaataggagacattacctttggagctacccgtgtgcaacaatgaatttggtagtcagtgaaaagtttgcttrttttttttttttttctcctccttctcctcaataaaatctccattcctggagacattcagcatcaggttgcactccctgagtgctctcagcaccctgatctagctgtaggtattcctgttattgcaggggagttggatgacatgatctttatgggccatttccagttcaaacaattctgatacacacggaagatttcagtggcagtcactctggttgatcaaatcaacaaaagattagtcctgacttccacaatgccaagtgtggggaaaccatcactactactttactactacttttat

SEQ ID NO: 57325 - DNA, 599 bp, Chicken  19866894313098_4
  misc_feature (1)..(98): n is any nucleotide
nnnnnnnnnnnnnnnnnnnnnnnnnnnnnnnnnnnnnnnnnnnnnnnnnnnnnnnnnnnnnnnnnnnnnnnnnnnnnnnnnnnnnnnnnnnnnnnnnnatattttctaggtaaacggttttttcgtggttgtgcgtgtgtggtgactatgtcgaaaaatagcattatgcagctaagaatttgctctatccttgtgctctttgtatttctgtgtaaactacaatggctaaataggagacattacctttggagctacccgtgtgcaacaatgaatttggtagtcagtgaaaagtttgctttrtttttttttttttctcctccttctcctcaataaaatctccattcctggagacattcagcatcaggttgcactccctgagtgctctcagcaccctgatctagctgtaggtattcctgttattgcaggggagttggatgacatgatctttatgggccatttccagttcaaacaattctgatacacacggaagatttcagtggcagtcactctggttgatcaaatcaacaaaagattagtcctgacttccacaatgccaagtgtggggaaaccatcactactactttactactacttttatt

SEQ ID NO: 57326 - DNA, 600 bp, Chicken  19866894313099_1
caattaattgtgagtattttaactaacacttatccttagttaacgtacagtaaaaagaaaatgtctaccctgggtactttcctaatgacagtgagggaataattattccacttctgctgtcatggttcaaatcccagagctcaggtaaggacgaaaatgaatttaggctatcttgcagttaaatttaaaataatataagtggtaattaaattaacaaaccactgcagaactacatatagaatgtgattccatttgtttaaggttttagcaccatgcagaaaaaaagctagcatttatgayatctgtaatacaaccccaacattcatctcttttgatataacaggtttatttacataatacttagctccctttccactgcaaaaattttccaaatacacaaaatatgaaggttttaataaaaataaaaataaataataataattaaaaaaaaacagaatgttccttataacaagagacataataaaaaaagggggggggggaggcagatgactggaagagttaacatttatattctacatatagaagtcattacacattaattgaccttacctgatcaaaagcagtttgggaccctcatta

SEQ ID NO: 57327 - DNA, 600 bp, Chicken  19866894313113_1
cacaaagccctgtgctctcatgggtcatccctgggaatccagaggagatgagcagaaggttcatgctgatttcctactggcagtcttctcccatgtcttggttccctctttgctttccccatatattctggccccattcctcttctctgttgtaccttttaaccccttccttctgcctgtcgtgtgtctgattgctttctttccaccttccccacacagctttcctctctgctctaccccatggcccagttttgtcccttgtcctctcgagctgcctcctgagtcctcccttacgcagtraggcacctgctgctgccttgtctagggagcagtgccacgaggtgccagcagttagtggcaggagatgtggccatgagcactccctcagtggggctgaagcagcacttgcttgccagagctttcccagaggctgggacttggtactgttatggtttgtgggtttttttctttccctttttagactccagcactgttctagagccttttccaagaggtgaggcaaaagtgattagtgttatgtttgctcaaccttaactacagctgtacaaactttgtttttcctccttaggaattattact

SEQ ID NO: 57328 - DNA, 600 bp, Chicken  19866894313114_1
ctcccaggctttcagttctcagagcaggatcttgcccgcaagtaatgaagagtttgtagggtttttgggagaacttttccagcctaggccttcagactcaaaacctatgtcctttcagatgctgcctacaatctgaataactattttttaatgaaggaagtgacattttttaattcctattttggcacaagtcaaccataagtgaattggcactaggaaatcaccattgcttccactggctgatgggtgcaggagataatgacagggtagtttgcatctccattgggaagcatctgccayggggaactgtcagaggaaggactgtggatattaaatgaaccrtttatctcttttgttataaaaactcctatttgaatgtgtcagcagagggtgacattgtgcaggtttgggatataatcttgagtgccatcaacaacaatttggaagtccgtgcgcttagaatggatcccagtttaaagaaggtaggttaagtgttatgaaaatcgatgacaaaatataaggaattattttgatgttgcataactctgaaatacaaagatagatattgaaaatctaaatctaatttctgagctgaaaaat

SEQ ID NO: 57329 - DNA, 600 bp, Chicken  19866894313114_2
taatgaagagtttgtagggtttttgggagaacttttccagcctaggccttcagactcaaaacctatgtcctttcagatgctgcctacaatctgaataactattttttaatgaaggaagtgacattttttaattcctattttggcacaagtcaaccataagtgaattggcactaggaaatcaccattgcttccactggctgatgggtgcaggagataatgacagggtagtttgcatctccattgggaagcatctgccayggggaactgtcagaggaaggactgtggatattaaatgaaccrtttatctcttttgttataaaaactcctatttgaatgtgtcagcagagggtgacattgtgcaggtttgggatataatcttgagtgccatcaacaacaatttggaagtccgtgcgcttagaatggatcccagtttaaagaaggtaggttaagtgttatgaaaatcgatgacaaaatataaggaattattttgatgttgcataactctgaaatacaaagatagatattgaaaatctaaatctaatttctgagctgaaaaattcttatttttagaaatcctgatacttcatttatttattttta

SEQ ID NO: 57330 - DNA, 600 bp, Chicken  19866894313120_1
taactttgataacacagattagtagccagagatatcacccattctagaaaaactacagcacattccaaattaatttaaaataggaagggtgacattcagtgctacaaaaaataacactgcattgcaatagatgcaatagaaatgttaaacagggtaggaaactacacaatagaaaggaaaaaatataaacgtgttttttattagataaattaaaatgctaatacttctgacaaagtaacatgaaacctgaaggatacatgaattaatatttacccacagctggtggtgaaaacaactgartgacatgggacaagagttccaactgtggaaagtcaaagttagcccttcatgaaatcaaatctcagctatttctttttcttaaatatctttgtaaggaacagcaagatatttgcctttttaaataacactcacatccaattatttaatacaaagagatgaaagaagccactgaaaaaatcaaactgctaaataatgcaatttactgggcttatttttggtaactgaagatcagctgaacagctaaatacctatccaacccaaggagaatgaaaaatagtgtgcaaaaacaccctgcagaga

SEQ ID NO: 57331 - DNA, 600 bp, Chicken  19866894313120_2
tctttttcttaaatatctttgtaaggaacagcaagatatttgcctttttaaataacactcacatccaattatttaatacaaagagatgaaagaagccactgaaaaaatcaaactgctaaataatgcaatttactgggcttatttttggtaactgaagatcagctgaacagctaaatacctatccaacccaaggagaatgaaaaatagtgtgcaaaaacaccctgcagagaaaatgtctccaaccagtattagatgtagaattatgaatcaaaatggaagtaacgaatttaaaatacactycaatatttttgtattgggaagttaaatgttcttggatttcagagcttagaagtacctgagagtatgagtgatcaaaagcaatttagtattgatgttataggatcaaggctgttctgaagtcacattgcatcttctacttcctgtttcagaaatccctctaatgatcaactataaagaatattgtagaattagttcaatttttgattatgcagaaagaagtcaacttgactctgatatgctacattgcacctggaaggattaaatagccataatttgatttaactagtgaaatgggaaagc

SEQ ID NO: 57332 - DNA, 600 bp, Chicken  19866894313121_1
tgttgaagttaccaatgactctgtaatccaatgataacatgatgtccaccaatgccaaacctgagctgtataaaatcaaagtccaaatgcactcaaagctttcagccaagttccttaacaacacactcaatatagagtcatctttattttgagttggttaggacaaagcagcaggaaaagtcacaataacgtatgacactgagtatctgagagggcagatggaagatgaatatttgttctcagcactgtagatcagtgcaggaaaaatcagtggtgcagatattcatctcatggttacargcacatacacttrgctttacaatgaaccaaacgttacgtttgttgtacttccatctcattgtctgtagaaggctctcaggttgctttagtagaaagcartattgctcacactgtgcatcactggacctctgttgtgccttcagcccagcccgatccccctgaagaacctaaagttttatgtacgagcagtcactctgtgactctgtcttggtacaagccgctgagcgacggtggttgcaacatcctaggctaccaagtggagagaaaaatcccaggcgttggctggcagtcatgcagcga

SEQ ID NO: 57333 - DNA, 600 bp, Chicken  19866894313121_2
aatgactctgtaatccaatgataacatgatgtccaccaatgccaaacctgagctgtataaaatcaaagtccaaatgcactcaaagctttcagccaagttccttaacaacacactcaatatagagtcatctttattttgagttggttaggacaaagcagcaggaaaagtcacaataacgtatgacactgagtatctgagagggcagatggaagatgaatatttgttctcagcactgtagatcagtgcaggaaaaatcagtggtgcagatattcatctcatggttacargcacatacacttrgctttacaatgaaccaaacgttacgtttgttgtacttccatctcattgtctgtagaaggctctcaggttgctttagtagaaagcartattgctcacactgtgcatcactggacctctgttgtgccttcagcccagcccgatccccctgaagaacctaaagttttatgtacgagcagtcactctgtgactctgtcttggtacaagccgctgagcgacggtggttgcaacatcctaggctaccaagtggagagaaaaatcccaggcgttggctggcagtcatgcagcgagagtacaattcaa

SEQ ID NO: 57334 - DNA, 600 bp, Chicken  19866894313121_3
tttcagccaagttccttaacaacacactcaatatagagtcatctttattttgagttggttaggacaaagcagcaggaaaagtcacaataacgtatgacactgagtatctgagagggcagatggaagatgaatatttgttctcagcactgtagatcagtgcaggaaaaatcagtggtgcagatattcatctcatggttacargcacatacacttrgctttacaatgaaccaaacgttacgtttgttgtacttccatctcattgtctgtagaaggctctcaggttgctttagtagaaagcartattgctcacactgtgcatcactggacctctgttgtgccttcagcccagcccgatccccctgaagaacctaaagttttatgtacgagcagtcactctgtgactctgtcttggtacaagccgctgagcgacggtggttgcaacatcctaggctaccaagtggagagaaaaatcccaggcgttggctggcagtcatgcagcgagagtacaattcaaagcatggagtttgtggtggacaatctcaccccaggagaaccctacagattccgcgtctcagctgtaaacaaagttggggccagcga

SEQ ID NO: 57335 - DNA, 600 bp, Chicken  19866894313126_1
ctgactcttttagtatctgcatagaaaagattaaaaatatgaatagtaacaagacaaataattcccattctaaggaaacaatcaactttaggctctgaaaacataaagaaaaaacaaattccatgacatgatgatgaaatcaaggaagctcaaaagccataattatcacaactatgaaattaaaatttaatgtgggatttttgaagtgaaaaatgagctgaaacaaagggctgccaacttggtttgtcagtgtattcataactttgatgccatctttgggtacagattgcatgggactastataggtggagaaaaagtaaatcacttaattttgcttttcagtacttttgagtttgacatgactgtaaaatgtgaaaggttggtcttattattgatgtgtttttgtctgatcttatgctgtttgcttctctctcctgtaaaggcatgaggctcagaaaacacaattttaacatgtccataatgacaatatactgaaggagtttggggagggggggggaagttggatgattatgttctactgatgagtacccttatcccaacatggagagacctctcccagctcaaagctgtttcacagca

SEQ ID NO: 57336 - DNA, 600 bp, Chicken  19866894313126_2
tgatgagtacccttatcccaacatggagagacctctcccagctcaaagctgtttcacagcatgactggtggttcactcaaattgaacattttaatgaaatttgccacgttcatttttcctgaaaatgtctgcttctgatcatattttgcttgaaatactaaaatgctgggattctaagtctatcagtatattctgtttctccaccttaagcacgagtgtattaattcaagaggctaggtaggatgagggcctacgagatatggtttcgtagcttgtggtagcaatggtaatgggaggacrgttggatcagtcctttccaaccttgtgattctatgattctaattgcctgtaggcataggatttgcaaggcagtattctttgaaacaatgaataaataactaagattaagtaagaagttctgtgatatctctcagcaaacagtaagccctacttccatcctggaatttggtaaacggcaattatcagctgtgtatagatttctgacaaagtgaggttaaaggttcttcagtgatttaatcagctgtatcatataggattcatacatggaagaggaaggaaggaaggaaaatttagatgaaa

SEQ ID NO: 57337 - DNA, 600 bp, Chicken  19866894313131_1
gaagcttagagtttaaagctgatcaagcactgaaactttaaccttgaccaaatatgctgcgtccagccatctagtttgctgttatctgtgacactccttaccatgatgttaaagttcccatcttgattctcctattgcaaagcagatgcaatgataagattcatgttggcctctatatcgttattttgccttagtctcatgaagtaactagctgcgctaattgaatgagcacagcagacactgaaagtcagattcctgaaatctgaattaaatttcttgtgctcagttctctatatatawaaaaaaaaagattgagttacttagactgtctgtgtctcagtgtcctcatcagtagtggcagtacttactcatatcacatggctcccactgtcacttaaacatgattggtaagaaagtggatcctctgcagatattagccattataaatattaaacctagacaggagaaagccccatgaacatccacttttctgagaaaaatggcccttttcatctgtttagcactgtgtgtacattttcaattttttaaaatgaaatcctaaattatttttccaactagtgcagaaaatgagtatttctg

SEQ ID NO: 57338 - DNA, 600 bp, Chicken  19866894313135_1
tgtatatatttgactgcttacactgtatgttgagaaagaaggagaaggtgtatttgaatttagaggatcattaaccaagctcatagcagttgctttatgatccttccagttgaattgtctgagagagagctgatattttcatgcttgctgcagaatttttctgttatttatcttagagatttgctgaatttgtaacatgaagaaggaaacatatcataaaaaagaaaagtcttgagatctttctgaaaaggtagctgtgtattccgaaagatgttatggaaatgtgcttttctttttttkgggggggaaattttgattacagaaagttatgactgtgcatggccctatttcttagttctttatttacagaaatgtaggaaaaaaaataaaaacatgtaagcatttatgaaatcattaacagcaagaattaaggaattatttttatacgaatagctcgtgcttctggcagtagtgctttctwaaaaaaaaaatcactgcatccttcataatgaattctattatgttttyagcagtagttgcatttttttttattattttgtttttaaatccccaacttggaataaatcattgaacaaacta

SEQ ID NO: 57339 - DNA, 600 bp, Chicken  19866894313135_2
tgctgaatttgtaacatgaagaaggaaacatatcataaaaaagaaaagtcttgagatctttctgaaaaggtagctgtgtattccgaaagatgttatggaaatgtgcttttctttttttkgggggggaaattttgattacagaaagttatgactgtgcatggccctatttcttagttctttatttacagaaatgtaggaaaaaaaataaaaacatgtaagcatttatgaaatcattaacagcaagaattaaggaattatttttatacgaatagctcgtgcttctggcagtagtgctttctwaaaaaaaaaatcactgcatccttcataatgaattctattatgttttyagcagtagttgcatttttttttattattttgtttttaaatccccaacttggaataaatcattgaacaaactagaaattagttcacaatctgtctgaataaaacctttgtttttttactaatatgaatgaaaatccaaggttaaaagatagtacaatgcagtttaataatgattataataaaaacacttcaggaggtatatctttcgattctataaaatatttcataaattttagttaaatggagtctgaattc

SEQ ID NO: 57340 - DNA, 600 bp, Chicken  19866894313135_3
gtcttgagatctttctgaaaaggtagctgtgtattccgaaagatgttatggaaatgtgcttttctttttttkgggggggaaattttgattacagaaagttatgactgtgcatggccctatttcttagttctttatttacagaaatgtaggaaaaaaaataaaaacatgtaagcatttatgaaatcattaacagcaagaattaaggaattatttttatacgaatagctcgtgcttctggcagtagtgctttctwaaaaaaaaaatcactgcatccttcataatgaattctattatgttttyagcagtagttgcatttttttttattattttgtttttaaatccccaacttggaataaatcattgaacaaactagaaattagttcacaatctgtctgaataaaacctttgtttttttactaatatgaatgaaaatccaaggttaaaagatagtacaatgcagtttaataatgattataataaaaacacttcaggaggtatatctttcgattctataaaatatttcataaattttagttaaatggagtctgaattcctcataataccttccgtctcgcatttcatatgttgctcgttgcatca

SEQ ID NO: 57341 - DNA, 599 bp, Chicken  19866894313140_1
  misc_feature (1)..(112): n is any nucleotide
nnnnnnnnnnnnnnnnnnnnnnnnnnnnnnnnnnnnnnnnnnnnnnnnnnnnnnnnnnnnnnnnnnnnnnnnnnnnnnnnnnnnnnnnnnnnnnnnnnnnnnnnnnnnnnnnatttttttttttttaaaacagattttgggtaaaaacacagccagttatattgcaatagtactacagggtctcacagcaatggcaatgaaatgttcaacacatgagtgaaatgacccaaggaagagctcttctctattatgatcatttgccagcttatctttgcattgcatcccattcatcactgggcyacactcttattaagaatataagttgaaaataagcaaataattaaaatatttgtaaaacagagtgatcaacacagcattgctatgtgcaggctggctttttgttgttgttgttgttgtttgttttgaacattatatattgaatgataaaaatcagataattaatcctcttatttcttagcttttttccttctttttttttttttccattctgaagctttgaaaggaaaataattttaccagttgtcagccaataaatgcttgttcagcaggtaatgcatgtactatttcctaattaaaca

SEQ ID NO: 57342 - DNA, 599 bp, Chicken  19866894313145_1
  misc_feature (1)..(62): n is any nucleotide
nnnnnnnnnnnnnnnnnnnnnnnnnnnnnnnnnnnnnnnnnnnnnnnnnnnnnnnnnnnnnncgtggaaaggtgctcatttcacagcatccacgtggtcactgtttcagaatcgtgccctgagaaaaccgtgccctaatagcactgctgttacaatttgggaaggtgcttctgctcgcagattcctcttttcttctgcaggcaatgcctctctcagcatcacacccaccgcctgcttcccagacccacctaacactgctatgcaggtccgtttgctaaactgtgctgtacacccagaagygttcaaagcataggaaaaacagggaagccaaagccattaaacaggggtgggatgccagctggttgctctcctgcaagctggacgtcggagtgcagcagagctctgtcccggtaatgcacaatrgctaattttccattgcacttcttgctgcctctttgccaagtctcagagatcaagtgaaaaaaggaacccacagagtgaaatccttgcaaggctgaagaataacccctcttgcacaatgggatttggcagaggaggtgcatttttcagctataatacgcccgctgttccccagggtt

SEQ ID NO: 57343 - DNA, 600 bp, Chicken  19866894313145_2
aaaaccgtgccctaatagcactgctgttacaatttgggaaggtgcttctgctcgcagattcctcttttcttctgcaggcaatgcctctctcagcatcacacccaccgcctgcttcccagacccacctaacactgctatgcaggtccgtttgctaaactgtgctgtacacccagaagygttcaaagcataggaaaaacagggaagccaaagccattaaacaggggtgggatgccagctggttgctctcctgcaagctggacgtcggagtgcagcagagctctgtcccggtaatgcacaatrgctaattttccattgcacttcttgctgcctctttgccaagtctcagagatcaagtgaaaaaaggaacccacagagtgaaatccttgcaaggctgaagaataacccctcttgcacaatgggatttggcagaggaggtgcatttttcagctataatacgcccgctgttccccagggttgggtctcacagccacttggccgtcccttccacaaacatccccacgccttccgggtgcagcgtgccacagccaggcctgctacaatgggggattcacggccacgcagctgccagccaccttggcc

SEQ ID NO: 57344 - DNA, 600 bp, Chicken  19866894313146_1
tatggaaacttcagatagaccctgaattagcatacatcgtatattagtctgactagtggtcttttacttctatactacatcaattcacctgtattcttattaaaaataaaactgaatgcaagaggtgaatgtctatgtaaatttaaatttccaagttttctatgttcaataatattctctacttttaaaaaatgttcttctaaaatgctacagttcataagaaagtagcaccatcttaatagaagcatggtctagacactgttggtgtgcactaacatcaacacaggcatcttcctgttrtagttttgttaatagcagttgatcaattctccaaaacagatcagaagtgctgaagtctggatttcctgttttagaaccaggcatgattctatgatactgtgatctcaaaagaactgcctctttttttattattattatttttatttatttattacagctgtaccctagtcttcctgctaatgtcataatgtctaaarcaaacatgctattgttttttgtgaagtgaaacaggatggccacttagaatctctatgcataataagcaagtaaagtcttaggaattcttacagaaaggccact

SEQ ID NO: 57345 - DNA, 600 bp, Chicken  19866894313146_2
ttctaaaatgctacagttcataagaaagtagcaccatcttaatagaagcatggtctagacactgttggtgtgcactaacatcaacacaggcatcttcctgttrtagttttgttaatagcagttgatcaattctccaaaacagatcagaagtgctgaagtctggatttcctgttttagaaccaggcatgattctatgatactgtgatctcaaaagaactgcctctttttttattattattatttttatttatttattacagctgtaccctagtcttcctgctaatgtcataatgtctaaarcaaacatgctattgttttttgtgaagtgaaacaggatggccacttagaatctctatgcataataagcaagtaaagtcttaggaattcttacagaaaggccactataagataataaactgaatagctattcagctatattattatacaaggacctataccaaagaggtttctatctttctgtgagaagactatggaagagttgagattttatagattttttactccctttaacggacagtatggattctcagtataatctcctctatatattgtctggtaaacgcacggtgggcctaaaag

SEQ ID NO: 57346 - DNA, 600 bp, Chicken  19866894313151_1
gtggtgtcagctctgtgaaagggctcaggtgcagcctggctgtgggtcggggcagacgggtgtcacacagctcaacccacaagcccattagtgaggggagcagtgctgggcatcctccagcacaccacccggccatgccctcacatgtgggctctctgcactcaaacaaaggctgctggaatcatccctccaacagcaggaggaattcatcactcaatccattcttcccaccctgtgccttccttcctgcttatgtagagttgggctatgaattatttactgcgggctttccctccatastggtggcactgcacccaaacccagcagcaatgtgggcacacagcactgctgggcaggacgctgctgcccggtgcggagctgcactgtgggacagtggaagctgccagcccggtgcacgcccgcagcatcctgtgcctgcacacctactgcagtctttcgtaaacggaagagctgtgctgtgcaggaggagtgccgacacaacaccggagcgcgttgccatgggaacgctgggcaatggatgcaccatcagtcacaatacacataattttctatatttgcagcgtttcccccccctccctg

SEQ ID NO: 57347 - DNA, 543 bp, Chicken  19866894313152_1
attttgaaattgtggctttctgagctggtttcttatttaatggaaagacagtaaaatattcagctttttaagccactgaagtttgcaaagaccttccagaggcactgaaaaataagggagttattactttctgcaaagatttctatggctgtggtaaatatagcttgcaaatactgatgctaatgtaagctgtgaagtgaacagtgcacagagtgctctttatttcagtggtactgtatgtactaactgctggctttcagcattcaccatgtctgttgctgaatgcagtcacataaccartaggcaatttgctggcatcctttttctccataacaaccttctgtaaatctgaaagtacctacattcatgtgggcactgtgatggctgcagtcttaggagaagactcagccacatgtgagggcaggacctagataacccaggtgcagtttatatggggcactctgactagtcactgctgactttctgtaagtcatttcttccttctttccatctcttttcttcttacatttcctgctcttgaca

SEQ ID NO: 57348 - DNA, 600 bp, Chicken  19866894313158_1
attgccatttcatcagtgtgtctgccagggatttcccttctgtgaacccaatttcctctcgcttttgaacaaaaaaagcatctctgacatggaggacgcaaagggagagacagcacagcttggtacagagcaacagggaatttgccaggcaacaacaaagtggagaacaagcaagagaaataagagacaatttagtgcagataaatgatcaaagaagcaaagatgtgtctcaagcagcgtcgccgaccacccttctgtggcaagcatgccaaggggactgcaacgattccgcaaacacasggagcagggtgggaaggagccacggagcctatgcaatgatgggacctcccccccgccccacccagctgctactgagcggctgcaacacctcacagcagactacagggaaccagcagaggctgctttatttctctctcaataacaactgacacctggcagcctttcgtatgtctgactgactgcaggtctcacagctaatagaacacgagccatggtgggaccacatctagcaaccgcagtgtctttttgctctccattttccccttggcatcaaagtctataaccaaacttcccaggagc

SEQ ID NO: 57349 - DNA, 600 bp, Chicken  19866894313162_1
gtgtataaacaattgcagcagaatctagatgcacattttttcaagcaaaggcacttttatactcttgagaatactggtatatattttttaaaaaactggtggtgaaagaatttagcattcaaaagcttctctctatttttctgtcccaattttacgtattctagtgtcttgtaatgatttttaaggaagttgtttctaatctgagccattcccatgatcagtttggcagggtcattgtcacatctgggtatgagcaaacagctgagaatagtcactacaccaatttggtctgtgtaatgygtaagttcaccctgagaatgaacttctgggaaatgcgttcttcacagcagatggaattcacttgtatactagacaatacgtaaatcatttacagctgcaaaataaaaawttacagaaattatggtaaatgttaatgctctgactcagtgacacggtgaagcttaccttatatgtgattggtgagacgttggtaaaaatggtattttgctctttccaaaagcaatttcaaacctgatgtctaccctaagaattcctgcagctactctgagtggaatttccattgtactaactggaggaaga

SEQ ID NO: 57350 - DNA, 600 bp, Chicken  19866894313162_2
atttagcattcaaaagcttctctctatttttctgtcccaattttacgtattctagtgtcttgtaatgatttttaaggaagttgtttctaatctgagccattcccatgatcagtttggcagggtcattgtcacatctgggtatgagcaaacagctgagaatagtcactacaccaatttggtctgtgtaatgygtaagttcaccctgagaatgaacttctgggaaatgcgttcttcacagcagatggaattcacttgtatactagacaatacgtaaatcatttacagctgcaaaataaaaawttacagaaattatggtaaatgttaatgctctgactcagtgacacggtgaagcttaccttatatgtgattggtgagacgttggtaaaaatggtattttgctctttccaaaagcaatttcaaacctgatgtctaccctaagaattcctgcagctactctgagtggaatttccattgtactaactggaggaagagaatagttgcttaatgcattagataacgtatcctcagaactgtttgctggtatttatccagacttttaaaagtatcaataatttcatggaaaacattaggcatttagaa

SEQ ID NO: 57351 - DNA, 600 bp, Chicken  19866894313162_3
tggtaaaaatggtattttgctctttccaaaagcaatttcaaacctgatgtctaccctaagaattcctgcagctactctgagtggaatttccattgtactaactggaggaagagaatagttgcttaatgcattagataacgtatcctcagaactgtttgctggtatttatccagacttttaaaagtatcaataatttcatggaaaacattaggcatttagaaaactatttgtataggtcatatatgaaatcctgactgtagtaagtcagctggagctcatgcacatcttggagcactaccwtgcctttacgcagcatacttcaacaacagtaattaacttcagggatttactgtgaagacaaatgtaagcttctgcttaagcttgagattctcaaggctgtaattgaactatgaatctaagggactcatttaagcatgtgttttaattcttttcagaacctgagtttttgacatttaatggctcagttaaaatattttctgaactagggacatacttctgatttgggattgacatttttctgaatgatcccacacttcttctatgagtaggatttaaacttagtggactttagtttgtctc

SEQ ID NO: 57352 - DNA, 544 bp, Chicken  19866894313167_1
  misc_feature (1)..(70): n is any nucleotide
nnnnnnnnnnnnnnnnnnnnnnnnnnnnnnnnnnnnnnnnnnnnnnnnnnnnnnnnnnnnnnnnnnnnnncccctcttccccccctcccccctcaaaaaaaggacgccccaagcccctctctgccatgattttgctgagcagcatcttgcacctgcggccccggcactgcggccccttggcagggctgggcagggggtcctgccccacagcggggtcccgcagggcgctgcgcgtgctggtggacatggatggggtcctggccgacttcgaaggaggattcctcaagaagttcagagccmggtatcccgacaagccctacattgccctggaggaccggaggggcttctgggtgtcggagcaatacgggcgcctggcagctgagctgagcgtgagtttgtgcatccccctgtgatctgtgcagggctgctcgtgggtgcagggagggtgatgggtaacaaccaaactcagggacatgtctgcatgcagcagtgccgtgtgtccccaaaatccagcatgtttaatgcacatctcctttccctgcat

SEQ ID NO: 57353 - DNA, 600 bp, Chicken  19866894313174_1
atgtgaaggcatagggatggactcattttcacagatgaaacttcaaatcaaaaaacagtaaaagcacatcgcaacaaggacaagcattttcctatgaactctttctccaaacaagagagtatgcaaaaaaagaacaagaaaaaaaaaaaaaaaacaacccaaccacttaacacaagactacttagtgcttcgttctaaaaaagcctgttgtcagcaggtaaggtcaaaggtaaagaacttactctgtatacaaattatggcttagtttattacaaacaaacagcagtaataatgttattmcatcatctatccaacaaaaagatacaaagttaaactaaaaagaatagtcagagatatctgcaacaccaggagagcaacactaatctagaaacasgagagtgcagatatagcctgaacatttcaaattatcaagaattaaaactagcctaagactctcaaaactgggccttcacttgaatgccagtcatcttaagtcattgtgttagatatacacaactaaaaatcatagaagattaaaaaaaaaaaaaaaagtattttaagcatgtacatagcaactttaggcctgaaaatagacactac

SEQ ID NO: 57354 - DNA, 600 bp, Chicken  19866894313174_2
tgaactctttctccaaacaagagagtatgcaaaaaaagaacaagaaaaaaaaaaaaaaaacaacccaaccacttaacacaagactacttagtgcttcgttctaaaaaagcctgttgtcagcaggtaaggtcaaaggtaaagaacttactctgtatacaaattatggcttagtttattacaaacaaacagcagtaataatgttattmcatcatctatccaacaaaaagatacaaagttaaactaaaaagaatagtcagagatatctgcaacaccaggagagcaacactaatctagaaacasgagagtgcagatatagcctgaacatttcaaattatcaagaattaaaactagcctaagactctcaaaactgggccttcacttgaatgccagtcatcttaagtcattgtgttagatatacacaactaaaaatcatagaagattaaaaaaaaaaaaaaaagtattttaagcatgtacatagcaactttaggcctgaaaatagacactacataaagcaatcrcaaagtaatggtgtcagcgtgtgaaaagagactatgttgactgaagtatcagaaggattgaaggcaatttttcaataagcat

SEQ ID NO: 57355 - DNA, 600 bp, Chicken  19866894313174_3
aacaaaaagatacaaagttaaactaaaaagaatagtcagagatatctgcaacaccaggagagcaacactaatctagaaacasgagagtgcagatatagcctgaacatttcaaattatcaagaattaaaactagcctaagactctcaaaactgggccttcacttgaatgccagtcatcttaagtcattgtgttagatatacacaactaaaaatcatagaagattaaaaaaaaaaaaaaaagtattttaagcatgtacatagcaactttaggcctgaaaatagacactacataaagcaatcrcaaagtaatggtgtcagcgtgtgaaaagagactatgttgactgaagtatcagaaggattgaaggcaatttttcaataagcataaaaaattgaattgcaagattattgcatgcacacttcagcaaacactcagtgaaaaacagctgacacttcaaaaaaaaaaaaaaaaccccaaaagacagcccattctaaatgccaatgctaagtgattgctactacatttctttttacaaatgtcacggttctttttaaaaatataaccggataataattcagaattgaaattatgtttaagaaatat

SEQ ID NO: 57356 - DNA, 600 bp, Chicken  19866894313174_4
tgatgcaaatccaaaatgcttgaagaaaattactcaacttaccgatgaatttaaccaccatatacacatcatttataaggcacatgtagcattttgtccaaaaactatgaaaacatacatagtgagcagaaatatatcagcagattttctggatgacaggatgtcaactatcaaagatgcagcaataagaattttattagcaatgctatttctaacataagtcaattcccattaatatcactttcaaaaatggtcccagatgtttaccataaacatcttaaaggcaacactactactttygacaacaaaattctccttctaaagagaactcatttgtgtgttgcactacaactagtgtggctttattattactgctaacctcatttaccaattagttcttttaagcttgaataagcatgctttaaggtgtatccagatgggctgctttcttgtggtgtccattttgcagattatactttattgttgaaggttgctttgcctacaaacattacctaatgccctgatgtgaacacatgcaccatggcttgtggcctcttaggaaacatggtacgtgatcaggtgacttattattaaataaga

SEQ ID NO: 57357 - DNA, 599 bp, Chicken  19866894313184_1
  misc_feature (1)..(83): n is any nucleotide
nnnnnnnnnnnnnnnnnnnnnnnnnnnnnnnnnnnnnnnnnnnnnnnnnnnnnnnnnnnnnnnnnnnnnnnnnnnnnnnnnnntcagaatctcagaagcagcactgaggttagctgttcttcaaaatctggccacagacagactgcagccaattcacagaaatgctgcagacattggacggcccaagcttgcccatattctgggtcctgcatggtttggagagaatattcttcagagaataaaattgccatccatttggatcaaaaaaagaacttggtaatattgtgcgctacctgaggraaaatttcaaaaaggagtacacattgttctttacaagccctaaagaatatccgcagtaattaagtgttcaagtgcttcttatacagaaacaatcataactttaggttaaaatacacatataaaccatctattaacagttgaatataattttatactctggtttgcctgtctgggatacctgctgcagcgtgacacaaaattcagtaagtagattcgtggaaaaagtaaccacatctaacaaaaataaaaataactacttgttgttcagttcttgtgctctcaaagttatgaggacaaaa

SEQ ID NO: 57358 - DNA, 599 bp, Chicken  19866894313188_1
  misc_feature (1)..(52): n is any nucleotide
nnnnnnnnnnnnnnnnnnnnnnnnnnnnnnnnnnnnnnnnnnnnnnnnnnnnaccccccaagtccttctctgcagggctgctctcaaggagatcttcccccagtttgtataagtacctgggattgccccgacccaagtgcagcgccctgcacttggccttattgaacctcattaggttttcatgggcccatttctccagcctgtccaggtccctctgcatggcttcccttccttctaatgaatcgactgcaccgctcagcttggtgtcattgaagagggtaaatgctaagcacatcataraagatcagccactcaacttgggaacttacaactatatgcaaacatagttattcttttttgagattcaagaagctggataggaactgatgcatcatcccaaacaaacagatgaaaaatcaggaatcccattaataagtttccctaaagagctgaagttatgaactgtgtcatgacctctgatcaggagtctgatttrattctggatttgtaccagaagatacrcatggacattggtagaagttgctgggtaattgccacttgaaaagtcaagccatttggacaccyagttcaaatatttt

SEQ ID NO: 57359 - DNA, 600 bp, Chicken  19866894313188_2
cagcctgtccaggtccctctgcatggcttcccttccttctaatgaatcgactgcaccgctcagcttggtgtcattgaagagggtaaatgctaagcacatcataraagatcagccactcaacttgggaacttacaactatatgcaaacatagttattcttttttgagattcaagaagctggataggaactgatgcatcatcccaaacaaacagatgaaaaatcaggaatcccattaataagtttccctaaagagctgaagttatgaactgtgtcatgacctctgatcaggagtctgatttrattctggatttgtaccagaagatacrcatggacattggtagaagttgctgggtaattgccacttgaaaagtcaagccatttggacaccyagttcaaatattttgacctacctcttcccaagcagcagctgctatcctggcaagacctgtgggttgttgttgtttggttttgttttacagcttagtgtgctttttacgggaatctggctaggtaattttattccattactctgttgggtttttttgtgaagcagactcttaagtggattgaattaaatgtttactactagagtaattacag

SEQ ID NO: 57360 - DNA, 600 bp, Chicken  19866894313188_3
cttcccttccttctaatgaatcgactgcaccgctcagcttggtgtcattgaagagggtaaatgctaagcacatcataraagatcagccactcaacttgggaacttacaactatatgcaaacatagttattcttttttgagattcaagaagctggataggaactgatgcatcatcccaaacaaacagatgaaaaatcaggaatcccattaataagtttccctaaagagctgaagttatgaactgtgtcatgacctctgatcaggagtctgatttrattctggatttgtaccagaagatacrcatggacattggtagaagttgctgggtaattgccacttgaaaagtcaagccatttggacaccyagttcaaatattttgacctacctcttcccaagcagcagctgctatcctggcaagacctgtgggttgttgttgtttggttttgttttacagcttagtgtgctttttacgggaatctggctaggtaattttattccattactctgttgggtttttttgtgaagcagactcttaagtggattgaattaaatgtttactactagagtaattacagcccttaaagaagccgtctgcattgta

SEQ ID NO: 57361 - DNA, 600 bp, Chicken  19866894313188_4
ctaagcacatcataraagatcagccactcaacttgggaacttacaactatatgcaaacatagttattcttttttgagattcaagaagctggataggaactgatgcatcatcccaaacaaacagatgaaaaatcaggaatcccattaataagtttccctaaagagctgaagttatgaactgtgtcatgacctctgatcaggagtctgatttrattctggatttgtaccagaagatacrcatggacattggtagaagttgctgggtaattgccacttgaaaagtcaagccatttggacaccyagttcaaatattttgacctacctcttcccaagcagcagctgctatcctggcaagacctgtgggttgttgttgtttggttttgttttacagcttagtgtgctttttacgggaatctggctaggtaattttattccattactctgttgggtttttttgtgaagcagactcttaagtggattgaattaaatgtttactactagagtaattacagcccttaaagaagccgtctgcattgtaaaatggtttctcctaggcttactttccctaaaatgcttctccagggctttgtcaagtgtgctg

SEQ ID NO: 57362 - DNA, 600 bp, Chicken  19866894313194_1
atatggcacgtctaaaagaatctggtcagatagtattggactgtaccattatccaaaggaaagaatatagagaagaaaacattttgagcaaggcttttctttttgttaaagatgaggcaagtgtaaaagagaaaaagcacaattctagagggtattttctcacgttaatggttacagagacagtgacaacagccatcttcatttaaggctgtaaattttatatgtttatctatgtatacagaagcaggtattttaattgccaagcaattaaattaacttcataatgttttatagcatgtmatgaataatatataagaaataaagtgaatcaaaccccatatttcctgttttggtgatgttgatggctttgaatactacatccaactgtagtagaggataaaactatgggcagtggtgatcaatgaggggaggccttgtagtgacccacaggaatggaggggcagcactgagctctgctcttcttgtgggtcccttccagctcaggatactctatggctctgtgattctaagactccaaaatgaataaaaagactccataattctaagactccactatgattctaatacttcatagagtat

SEQ ID NO: 57363 - DNA, 600 bp, Chicken  19866894313202_1
agtgacaaattgtcaagtagcagtcttagaggtttaaagtttctcattgataatctaactttcctgcaaattgttttaaagcatctgatggatatggaataagacttgtgaggtaacagagggaggctcatcagcatggagagagcgagggtaggcgctgtgtttgccatcctccctcagcccactcaccagcggtttgactgcaatatccgctacccaggcacacttcttaatgcatctgaaggtcttcagatgcacttacattgttagcaggaatatctgaagaatgcatatcctttyccacagaggaaaggtgggctaagaacactggactgggtggtactgctctccaagtcactgctataaagtaatctcgtgttccagacacttgaatgtgaggtctatattgatttttctccaacatgcttgcataggggaattatctaaacaactcccattaggccggcgagtgacagtgggaatcttcatttacaggaagataagcacataaaatagccaaaaaaaaaaaaaaaaaaaaaaaaggttttctttactggcatttcaacaacagcaggggccatactcagatcatagaacaat

SEQ ID NO: 57364 - DNA, 600 bp, Chicken  19866894313206_1
ccagcaagttgtatgagcacccacagtccctgccactgctggactcttggtttagaaaatcactcaatgttcagggctgcttctctggagcaaactcggctttgatccttgcaaaaatgtgcatgctgtgtatctgcacagtgacaggggttgtcacagggattacccgtgggtttgtagtgtaatttgacagtggtaaaagcccacgtaatgttgaattgcaaaaactgggaatgtctttgagaaagggaggtcattatctcctgtcacatatagcttgaaatattacattctgttccraaaactaggctagaaaatgacagctaatcagagggagagttagagatggggtatactgactttcaaggagacatctgcaaatttgatttgaaagtgtaactttggaaaagaggatacagaatcacaagagtggcttgggttgggttggacctcaaggatcatgaagctccaacccccctgctacaggcagggccatcaacctccccttttaatactagaccaggctgcccagggctccatccagcctggccttgaacacctccagggacggggcatccacaacctctctgggcagcccga

SEQ ID NO: 57365 - DNA, 600 bp, Chicken  19866894313210_1
ttcattattattcagtcttttacatttcaggttcctgattattttttgtaaaatgaagtaaaatgtatgttacagaaaaatgcataagcatgcaagtgcatggaagagtttaaaaagtgtcaggttaataaaaacctgaactagtgaaacaaaggttatttgcttctacaagttctaaccttcttcctatctgcttagtgtgacactgctcccatttcctgtcaaagtaaagcactgttcttagattatgcagtttgtgatggtaaaggaaatagctcgctgtacattgctcgtgttaaygtctatctcatcagcagcaaaagccttacccattaaatacctctttagctttcttttgtccaagacaacaaacacgaatatctctgacagcaaggtaatgtggccttaaaaaagcagcaactctctgaccttaaacagcctagccctacaaaatctggtgaaggaagtagggaagtttgctagggggagatggtgtgggttagggaaagcttcagagctactattgttttttttctgagtgttaactatcatttctgaatacagatatctaaaattaagcatctagtttagaaaaaagtg

SEQ ID NO: 57366 - DNA, 599 bp, Chicken  19866894313217_1
  misc_feature (1)..(152): n is any nucleotide
nnnnnnnnnnnnnnnnnnnnnnnnnnnnnnnnnnnnnnnnnnnnnnnnnnnnnnnnnnnnnnnnnnnnnnnnnnnnnnnnnnnnnnnnnnnnnnnnnnnnnnnnnnnnnnnnnnnnnnnnnnnnnnnnnnnnnnnnnnnnnnnnnnnnnnnnctgatttttttctttttcaaaacagctaccatatacctgattatttattagagccctaatgagaaaggcatgaattctctgttagacagtggaaaacacatgtttttctgctcagaacttctcaggaggcagtatttggtactttacmtgaatgtagagccagataaatagggaaggaatgtgacaaggggctttttaagtcttgacacaaattttgtaaagggtgacactacagagaataactccttcctgttcttcctggcctgcagagaagatttcctagactttagaagagttatgagacaaaagtcctttgaatacttacattattgataagaaagtaagatagctatgggtgaatcactgtgatgaatgtttttcttatccacctgctggtgcagtctgttttccttcttttgaaggatcctatgtatcagaggcatagtt

SEQ ID NO: 57367 - DNA, 600 bp, Chicken  19866894313226_1
tggattccagtgatttgttgctctcagtggtgagtatttattcccattcagctcttgtgcatactctctgactgcaaacatgagaacagttcaaacttccttgagtttggatctgatggttgaaatgtttctttgtagaaaagaatattttgctagctaagcctcagcttcaaaggtgcttttctctgcctctcagattgttcctgctgttgaccgtaatagactgctcgttagaaagacaccctgacagcaatggccacagatctatttcttctcctgtgatgtctggctaggctgttmcaaaagctgatggatctgggagaaacataagagcagttcagttcttgtggtgagaaggaaagcttgctggacaagtgtcatttccaatcctctatcagccacagccagtctggctgatggcagggggaggctatggctaagcaggtgtgggggggctgctccctctagaaacctygcaccaaagcaggcagcaggaaggaacatagcaaggtaattgattgcatggttccctctgtgagcaagccctgcagaatggcctcaggttttaaggctcccctgggcacctggagaaagccccat

SEQ ID NO: 57368 - DNA, 600 bp, Chicken  19866894313226_2
gtgcttttctctgcctctcagattgttcctgctgttgaccgtaatagactgctcgttagaaagacaccctgacagcaatggccacagatctatttcttctcctgtgatgtctggctaggctgttmcaaaagctgatggatctgggagaaacataagagcagttcagttcttgtggtgagaaggaaagcttgctggacaagtgtcatttccaatcctctatcagccacagccagtctggctgatggcagggggaggctatggctaagcaggtgtgggggggctgctccctctagaaacctygcaccaaagcaggcagcaggaaggaacatagcaaggtaattgattgcatggttccctctgtgagcaagccctgcagaatggcctcaggttttaaggctcccctgggcacctggagaaagccccatgaagcacagactcacaggctttggctaatgagactccttccatcaagtcccccattgcctgtggagcagcagcgtgctgctgtggaagaagtcactttagaaattccatttaggagctgcactggagacagtggctcgcagaagttgagctgagtgggtggctgctcctgccaac

SEQ ID NO: 57369 - DNA, 599 bp, Chicken  19866894313241_1
  misc_feature (1)..(68): n is any nucleotide
nnnnnnnnnnnnnnnnnnnnnnnnnnnnnnnnnnnnnnnnnnnnnnnnnnnnnnnnnnnnnnnnnnnntgctttcatgtaagcatcgggcatgatcttcagcgggacgtgcacctctgtgggacagaaagcatgacctggttctttagcacatcagtggcagaggcagcactggtggcagtgcctagtgatgctggtgggatgcggggtgaggcatatttgctgaggccgtcctgccctgcatacccacctcccccccgtgcaagtgctggctcagaaagcactagcagcaaagatatakatgtatatttttgggaagggtgactcatgcttggaatgagcaaatactgttaaatattcatcgctcgttagtgtgttgtttggcacattgcagtcatgctgctggggatcagctgtgtagcctaggttgctcaaagatatagagcaagcaacagatagatagccctgggggtaaatagcctataaaacatatcacaatttccatgcctaccagattggccttccaccttgacagtctgcttgacgtatccaagattggcatggactttcccagtgtaggactgcagttggcaggagctg

SEQ ID NO: 57370 - DNA, 600 bp, Chicken  19866894313241_2
acagaggcttctcgttggttatctccagctggaccccagacttgggcaccacctcgttttgaaccgtgtccttgtcactcacgtttcttaggctcacttccatggggactgcagcaaagcgtgaacgaggcgtcaaccccgagggctgcaggtaggatacagctctcttcatggatgccctttcctctgcagagcctgatgaaagaaaaaagctgcctcagagccgtatctcagtgccctcacccagaacgaccacccttccctgtatttgttcttctgctgctgagcagaaggtgtcarggcaccgactgcctccagcctcagcacaggagagccccacggtctgtgctaccgctgggagcggggcctcccttttgtctctgctttggaggatgggggcagtcaccttcagggaacttgtactgccaggtgatgtcctcccgcctgttctgccccacrgcctttgtgctgatgttggcgccgatgctctggctctccacgcccagcttggtgtacttgttcctgccgttctcctccttgacgcgccagtagaccttgtcggcrttcacttccgcgtacacaaacttgctgtcgtagggc

SEQ ID NO: 57371 - DNA, 600 bp, Chicken  19866894313241_3
cagctctcttcatggatgccctttcctctgcagagcctgatgaaagaaaaaagctgcctcagagccgtatctcagtgccctcacccagaacgaccacccttccctgtatttgttcttctgctgctgagcagaaggtgtcarggcaccgactgcctccagcctcagcacaggagagccccacggtctgtgctaccgctgggagcggggcctcccttttgtctctgctttggaggatgggggcagtcaccttcagggaacttgtactgccaggtgatgtcctcccgcctgttctgccccacrgcctttgtgctgatgttggcgccgatgctctggctctccacgcccagcttggtgtacttgttcctgccgttctcctccttgacgcgccagtagaccttgtcggcrttcacttccgcgtacacaaacttgctgtcgtagggcaaatacacgtctccctctttgacggccttcagtgggcacgggccacactggaaagtacctgcraagcacattcaatgctatttgctgtgccaaacatgacacacacacggttgtatttaaacattcatgcacccacagtgccctgcagggttggcttcc

SEQ ID NO: 57372 - DNA, 600 bp, Chicken  19866894313241_4
gtatttgttcttctgctgctgagcagaaggtgtcarggcaccgactgcctccagcctcagcacaggagagccccacggtctgtgctaccgctgggagcggggcctcccttttgtctctgctttggaggatgggggcagtcaccttcagggaacttgtactgccaggtgatgtcctcccgcctgttctgccccacrgcctttgtgctgatgttggcgccgatgctctggctctccacgcccagcttggtgtacttgttcctgccgttctcctccttgacgcgccagtagaccttgtcggcrttcacttccgcgtacacaaacttgctgtcgtagggcaaatacacgtctccctctttgacggccttcagtgggcacgggccacactggaaagtacctgcraagcacattcaatgctatttgctgtgccaaacatgacacacacacggttgtatttaaacattcatgcacccacagtgccctgcagggttggcttcctgcctgccaagaaacaccattccctgcttcctgggctcagacggcaggagtgagactgccagcctcaggagctcgcagctggctggagaccacagctccatacaa

SEQ ID NO: 57373 - DNA, 560 bp, Chicken  19866894313241_5
gggcctcccttttgtctctgctttggaggatgggggcagtcaccttcagggaacttgtactgccaggtgatgtcctcccgcctgttctgccccacrgcctttgtgctgatgttggcgccgatgctctggctctccacgcccagcttggtgtacttgttcctgccgttctcctccttgacgcgccagtagaccttgtcggcrttcacttccgcgtacacaaacttgctgtcgtagggcaaatacacgtctccctctttgacggccttcagtgggcacgggccacactggaaagtacctgcraagcacattcaatgctatttgctgtgccaaacatgacacacacacggttgtatttaaacattcatgcacccacagtgccctgcagggttggcttcctgcctgccaagaaacaccattccctgcttcctgggctcagacggcaggagtgagactgccagcctcaggagctcgcagctggctggagaccacagctccatacaaaacatccctgcctcccttgggagttgcagaagagcccttccaggtaaatcctaccttga

SEQ ID NO: 57374 - DNA, 599 bp, Chicken  19866894313244_1
  misc_feature (1)..(41): n is any nucleotide
nnnnnnnnnnnnnnnnnnnnnnnnnnnnnnnnnnnnnnnnnactgggcaagctctagacgatcactcagctgctagccaagccttgtgatttacaggttctgatctgaatgctcagaagaacattgttagtaactgcttttgcatagctactttaaaatatgggctgctacatgaacacttccactaccagcctttgttcgcatgctgtcaaatcagccaatatctaagtgatatgtcagttctgaagtttacagaaatctcttttgatcatacactaatctggttactggtcataatcytgagccaaaatccaatccatgtgccagaaaaacacatgctaaaaatgccatacaacattcttagcagacaaataaaaagctgtttcrctgaatagcacagaactgaaatgccacccaaacacacacccacctcaactctgttagcaataaatctgttatctccatcaacactgatagagaaatcataatatccacttgcaggtttgacattcatgaagttcagctcaaagacctccctacaattgaaaaaaaaaaagcaaagtgttaaggaccctttaggacatgaacagagtgcccta

SEQ ID NO: 57375 - DNA, 600 bp, Chicken  19866894313244_2
gatttacaggttctgatctgaatgctcagaagaacattgttagtaactgcttttgcatagctactttaaaatatgggctgctacatgaacacttccactaccagcctttgttcgcatgctgtcaaatcagccaatatctaagtgatatgtcagttctgaagtttacagaaatctcttttgatcatacactaatctggttactggtcataatcytgagccaaaatccaatccatgtgccagaaaaacacatgctaaaaatgccatacaacattcttagcagacaaataaaaagctgtttcrctgaatagcacagaactgaaatgccacccaaacacacacccacctcaactctgttagcaataaatctgttatctccatcaacactgatagagaaatcataatatccacttgcaggtttgacattcatgaagttcagctcaaagacctccctacaattgaaaaaaaaaaagcaaagtgttaaggaccctttaggacatgaacagagtgccctacaagtaagtaacacgtcttgctaccaagaaaagagaaatgccacacaaaagtaaaactaattagtgtgaggtgaaaaatgtgttcaaa

SEQ ID NO: 57376 - DNA, 599 bp, Chicken  19866894313250_1
  misc_feature (1)..(93): n is any nucleotide
nnnnnnnnnnnnnnnnnnnnnnnnnnnnnnnnnnnnnnnnnnnnnnnnnnnnnnnnnnnnnnnnnnnnnnnnnnnnnnnnnnnnnnnnnnnnnaaatgtgattaatttccaaaactgcatttatacatctttctttttattaatctcctcagaatttgattcttaaaatttagaaagaagttcaatgtacatttaaatttaaacatgtttttaatgcataaagtagctagtgcgactgttcgtatctgaaagctctataggactgagacccaggagttagctcaagatattattaaatcwctgaaaatctgtttgtcagttacaatgggctttaaatatttattttcaagttttatgcatcagaatagcttttttgtctgatactattataaacagattagattaatgatgaggctatttctttcactccatttcagtgacttaggtttatgtctaaaccgtatcatgatttaacagtggtacaggcagtagtaaagtatagatcctgttctagtttttcaacttaagtaratgtatactagtttgtttgtataccatcacacatgagaaaattacttacgtatagtgcaayaccagga

SEQ ID NO: 57377 - DNA, 600 bp, Chicken  19866894313250_2
gcgactgttcgtatctgaaagctctataggactgagacccaggagttagctcaagatattattaaatcwctgaaaatctgtttgtcagttacaatgggctttaaatatttattttcaagttttatgcatcagaatagcttttttgtctgatactattataaacagattagattaatgatgaggctatttctttcactccatttcagtgacttaggtttatgtctaaaccgtatcatgatttaacagtggtacaggcagtagtaaagtatagatcctgttctagtttttcaacttaagtaratgtatactagtttgtttgtataccatcacacatgagaaaattacttacgtatagtgcaayaccaggartctrtttggtgtctgggctaactcatttatagctatgtcagctagcatgagggtcactacacagaactcaagccakttttgtgatcatagcaatctccctaagaataaggcagcgcctttgttgtgtcactgaaagcctatgaaatgtgaaattatgcattctttaggactaacattggatgtcagtgttgcaccactaaattacagctccaagtgaaatagcaaaaagag

SEQ ID NO: 57378 - DNA, 600 bp, Chicken  19866894313250_3
ttaaatcwctgaaaatctgtttgtcagttacaatgggctttaaatatttattttcaagttttatgcatcagaatagcttttttgtctgatactattataaacagattagattaatgatgaggctatttctttcactccatttcagtgacttaggtttatgtctaaaccgtatcatgatttaacagtggtacaggcagtagtaaagtatagatcctgttctagtttttcaacttaagtaratgtatactagtttgtttgtataccatcacacatgagaaaattacttacgtatagtgcaayaccaggartctrtttggtgtctgggctaactcatttatagctatgtcagctagcatgagggtcactacacagaactcaagccakttttgtgatcatagcaatctccctaagaataaggcagcgcctttgttgtgtcactgaaagcctatgaaatgtgaaattatgcattctttaggactaacattggatgtcagtgttgcaccactaaattacagctccaagtgaaatagcaaaaagagagtttgatattatagttaagattataacaggactgaatgattacatagccactgcattatt

SEQ ID NO: 57379 - DNA, 600 bp, Chicken  19866894313250_4
ctgaaaatctgtttgtcagttacaatgggctttaaatatttattttcaagttttatgcatcagaatagcttttttgtctgatactattataaacagattagattaatgatgaggctatttctttcactccatttcagtgacttaggtttatgtctaaaccgtatcatgatttaacagtggtacaggcagtagtaaagtatagatcctgttctagtttttcaacttaagtaratgtatactagtttgtttgtataccatcacacatgagaaaattacttacgtatagtgcaayaccaggartctrtttggtgtctgggctaactcatttatagctatgtcagctagcatgagggtcactacacagaactcaagccakttttgtgatcatagcaatctccctaagaataaggcagcgcctttgttgtgtcactgaaagcctatgaaatgtgaaattatgcattctttaggactaacattggatgtcagtgttgcaccactaaattacagctccaagtgaaatagcaaaaagagagtttgatattatagttaagattataacaggactgaatgattacatagccactgcattatttgttgtta

SEQ ID NO: 57380 - DNA, 600 bp, Chicken  19866894313250_5
aaatctgtttgtcagttacaatgggctttaaatatttattttcaagttttatgcatcagaatagcttttttgtctgatactattataaacagattagattaatgatgaggctatttctttcactccatttcagtgacttaggtttatgtctaaaccgtatcatgatttaacagtggtacaggcagtagtaaagtatagatcctgttctagtttttcaacttaagtaratgtatactagtttgtttgtataccatcacacatgagaaaattacttacgtatagtgcaayaccaggartctrtttggtgtctgggctaactcatttatagctatgtcagctagcatgagggtcactacacagaactcaagccakttttgtgatcatagcaatctccctaagaataaggcagcgcctttgttgtgtcactgaaagcctatgaaatgtgaaattatgcattctttaggactaacattggatgtcagtgttgcaccactaaattacagctccaagtgaaatagcaaaaagagagtttgatattatagttaagattataacaggactgaatgattacatagccactgcattatttgttgttactac

SEQ ID NO: 57381 - DNA, 600 bp, Chicken  19866894313250_6
tctgatactattataaacagattagattaatgatgaggctatttctttcactccatttcagtgacttaggtttatgtctaaaccgtatcatgatttaacagtggtacaggcagtagtaaagtatagatcctgttctagtttttcaacttaagtaratgtatactagtttgtttgtataccatcacacatgagaaaattacttacgtatagtgcaayaccaggartctrtttggtgtctgggctaactcatttatagctatgtcagctagcatgagggtcactacacagaactcaagccakttttgtgatcatagcaatctccctaagaataaggcagcgcctttgttgtgtcactgaaagcctatgaaatgtgaaattatgcattctttaggactaacattggatgtcagtgttgcaccactaaattacagctccaagtgaaatagcaaaaagagagtttgatattatagttaagattataacaggactgaatgattacatagccactgcattatttgttgttactacaggtatgttttatggagatgtagraatcaaatctcatatatgagagcattacaaaaggcagaaaacacatta

SEQ ID NO: 57382 - DNA, 600 bp, Chicken  19866894313250_7
atagctatgtcagctagcatgagggtcactacacagaactcaagccakttttgtgatcatagcaatctccctaagaataaggcagcgcctttgttgtgtcactgaaagcctatgaaatgtgaaattatgcattctttaggactaacattggatgtcagtgttgcaccactaaattacagctccaagtgaaatagcaaaaagagagtttgatattatagttaagattataacaggactgaatgattacatagccactgcattatttgttgttactacaggtatgttttatggagatgtagraatcaaatctcatatatgagagcattacaaaaggcagaaaacacattatacccagtgaaaaaaaaaaaaaaaaaaaaaagaacagtactgtcagtcgctcccggtagagacaaggaaattgactccattgtttgatataataaaatccaccaagaagtcttatatttttcattttcccattttttaataagattttgaatgactaaatattttgatattttgatattttgaggtattgaagcaaaatagcattctatggattcctccaggccattgtatatttaaatccagcctattatg

SEQ ID NO: 57383 - DNA, 600 bp, Chicken  19866894313252_1
ggctgggaagaactgggatatcgtatatgtaagaacatagtgactcagaaagaggagagaggagaatgagagagcttaaaaaacagaaaaagggttaagggaagaaaggagattagttctgtgagcaattcaggcccctacgtgtaaacatttgttagatttatttacacacggcttaaaatagtttataatacaacatgtgcacaggtaatttaggagtattgatgaaaattacagggataagggctgcctttaaaagcatttaaaaatgctgcccagttcgtagcactaaaatttttygcgtcactaaaattttaatgggagaccatgaagaaaaacctatgtgttgcaagaataccactcgctatcaatgcagaaaacactgcttgtctgtcacattcagaacatgactttgtttaggtgaataagggtcccttcttcagattgctattgctttgttttttataggaccggagaattgtctgatattttggccacattcttggtgtaacgccagtgaaaattctccccgtcattctcattggctttgtctgggcaatcatctttcttttckcccttttcttcgcactcatgttccag

SEQ ID NO: 57384 - DNA, 356 bp, Chicken  19866894313252_2
cccagttcgtagcactaaaatttttygcgtcactaaaattttaatgggagaccatgaagaaaaacctatgtgttgcaagaataccactcgctatcaatgcagaaaacactgcttgtctgtcacattcagaacatgactttgtttaggtgaataagggtcccttcttcagattgctattgctttgttttttataggaccggagaattgtctgatattttggccacattcttggtgtaacgccagtgaaaattctccccgtcattctcattggctttgtctgggcaatcatctttcttttckcccttttcttcgcactcatgttccaggtgcaagaagcctacagctctggatgcagt

SEQ ID NO: 57385 - DNA, 600 bp, Chicken  19866894313254_1
cctgttaaggtagtggaagttccattgaacaaggtaacctgtgtagtctatttaactctcttaacagttatgtgttctttcaggctgttcctgaattttagctgtaatcattgctgttcagcctttctaataacattttgtcagaatgtcactgcttgatctgcccaccattctgccactgtcaagggatacgccaaccagtaccttaaatgttttgtggaatgtcttttcactgtcttcagatcttaaatattcactattgtgatcagatactaatgttattaaagtagtagataaatractgacaagactgatcctcattattgctgtcattctgctgaatacaagatccatgctgacttaggaactggtacttactgtgcagtatttgtggcttttactacttgggctcaaagtacttaattatcagcatttcccttttattcctgttaatcccaagggctgtgaatttcagcttattggcagaaactggtgaacttcacaatttggagctggtaaaaatgacatgatctatcctcatgaattttgctttcttaaagggatgaaatttgcaggtgtaaggcatatgcttatctgcat

SEQ ID NO: 57386 - DNA, 600 bp, Chicken  19866894313259_1
accgatatccagaagatctcaggttgtgttacagggtatgtttttgtagaacaaagggttttataaataatttcagcgagtttaaaagttttctatcctcttctgctgaaatcacagagatctttctttgaaaactcacatctgatttttaatcccttctctggtgtcccggtgttttcaggggcagtctgtactgacaggtagaacacttcgtcatcacatacagtatttatggaaagggttgttgtggttctgaatcagtgtggatcatttacattcatggaaatcatttactcaatygtgcttcatttggatttatggaacataagtgatttacccagaaagtacagaggtgtacataaaagcagtaagttgtagaaggaaaacttcactgataagttcaaatgtattttttccatttaaaatatgttaaatccccttcttgcttgagcagtcarttgacgttgtcatgaaatataaaattaagtcacccattcttgttgacagtcttttgtaactatgatccacaaatctttcgacttgttgaaaaaatttagccactgaaaaaagatcagtcagaaggataacagggcaaacaaa

SEQ ID NO: 57387 - DNA, 600 bp, Chicken  19866894313259_2
ctctggtgtcccggtgttttcaggggcagtctgtactgacaggtagaacacttcgtcatcacatacagtatttatggaaagggttgttgtggttctgaatcagtgtggatcatttacattcatggaaatcatttactcaatygtgcttcatttggatttatggaacataagtgatttacccagaaagtacagaggtgtacataaaagcagtaagttgtagaaggaaaacttcactgataagttcaaatgtattttttccatttaaaatatgttaaatccccttcttgcttgagcagtcarttgacgttgtcatgaaatataaaattaagtcacccattcttgttgacagtcttttgtaactatgatccacaaatctttcgacttgttgaaaaaatttagccactgaaaaaagatcagtcagaaggataacagggcaaacaaatgtggggggcttcaagaacttacttgtgtgcctgtcagtaagtgatgtgcttactgttgtgtgttgtgaagcagtttctgccttttcactgcatttattggtaccaccacgtctcatgttatatacacacatacatacttttatttcaaaggggtagg

SEQ ID NO: 57388 - DNA, 600 bp, Chicken  19866894313264_1
ttcaataaatgatgatcacaacgtatcataaattcaatccagacaaaaccaactggttgttcatacagatttttttttccatgtacgcatccactgatttaagcctttgctaacagagtcagcaatcagaaagataacaaaaggaccctacaggaagcaacttctgacatcatggctgcctcaagtattctgcattctgtcacactaggggcattttaaatggcaatttattgcatttggtaatttggtaattatgctcatgcagggcatacccatacatacacacacatactgatgttyctacatacatgtgtggaatatgtaaacataagcttacaactatagcagaatttttgaatctgtgcacaartgagtgcactctgtgctaactgctgtcccagaatcctaaggctgtttttccaacatagccaggaatttcctggaagcctgccagtcgcaggtcgcagcgcctagctttgcactcacacaaccaaagcctgtctacaaacacagtgtattacaggaaggccccagcagttatcccaacaacttccctgctcagctaaaagatcatctgtgcagcacagggagctcagaggg

SEQ ID NO: 57389 - DNA, 600 bp, Chicken  19866894313264_2
ttttttttccatgtacgcatccactgatttaagcctttgctaacagagtcagcaatcagaaagataacaaaaggaccctacaggaagcaacttctgacatcatggctgcctcaagtattctgcattctgtcacactaggggcattttaaatggcaatttattgcatttggtaatttggtaattatgctcatgcagggcatacccatacatacacacacatactgatgttyctacatacatgtgtggaatatgtaaacataagcttacaactatagcagaatttttgaatctgtgcacaartgagtgcactctgtgctaactgctgtcccagaatcctaaggctgtttttccaacatagccaggaatttcctggaagcctgccagtcgcaggtcgcagcgcctagctttgcactcacacaaccaaagcctgtctacaaacacagtgtattacaggaaggccccagcagttatcccaacaacttccctgctcagctaaaagatcatctgtgcagcacagggagctcagaggggctttagactatcagatatcgtatatcgacccagtgggaagaaaaagaaaagcccaacagacgacccaac

SEQ ID NO: 57390 - DNA, 599 bp, Chicken  19866894313270_1
  misc_feature (1)..(81): n is any nucleotide
nnnnnnnnnnnnnnnnnnnnnnnnnnnnnnnnnnnnnnnnnnnnnnnnnnnnnnnnnnnnnnnnnnnnnnnnnnnnnnnnnctctggtgggttttaggagaaaagttggaggttctctggggtggtaggagtaaattcacagcctggatctgtgctggagatacccactatctccaggccacactaaatctgagctaattgccaattactggcagggctggcacggtgtgcttggtaaccatagcacacagcagtgaagtgtttccacttctccagaggttggcacttaattgcccccaycygcccagtttctttgcaggtgccytcattgcttcccattgttttctcctctgtagttctgtgagcagtggcacattttgtgctgtcctgcagacagggatgccagtttcttacaaagcaaacatctcagcattttggatcttggtgcacatccttacgttgcagtggcagctatttggctgctgtgctggcactctgagcccggaatagaggcagccactgtctgtagctgcttaaaacttcctggcgcagttcagtctgcaagcatcagcttccagctgaccgagcagaatttgtct

SEQ ID NO: 57391 - DNA, 599 bp, Chicken  19866894313270_2
  misc_feature (1)..(79): n is any nucleotide
nnnnnnnnnnnnnnnnnnnnnnnnnnnnnnnnnnnnnnnnnnnnnnnnnnnnnnnnnnnnnnnnnnnnnnnnnnnnnnnctctggtgggttttaggagaaaagttggaggttctctggggtggtaggagtaaattcacagcctggatctgtgctggagatacccactatctccaggccacactaaatctgagctaattgccaattactggcagggctggcacggtgtgcttggtaaccatagcacacagcagtgaagtgtttccacttctccagaggttggcacttaattgcccccaycygcccagtttctttgcaggtgccytcattgcttcccattgttttctcctctgtagttctgtgagcagtggcacattttgtgctgtcctgcagacagggatgccagtttcttacaaagcaaacatctcagcattttggatcttggtgcacatccttacgttgcagtggcagctatttggctgctgtgctggcactctgagcccggaatagaggcagccactgtctgtagctgcttaaaacttcctggcgcagttcagtctgcaagcatcagcttccagctgaccgagcagaatttgtcttg

SEQ ID NO: 57392 - DNA, 599 bp, Chicken  19866894313270_3
  misc_feature (1)..(56): n is any nucleotide
nnnnnnnnnnnnnnnnnnnnnnnnnnnnnnnnnnnnnnnnnnnnnnnnnnnnnnnnctctggtgggttttaggagaaaagttggaggttctctggggtggtaggagtaaattcacagcctggatctgtgctggagatacccactatctccaggccacactaaatctgagctaattgccaattactggcagggctggcacggtgtgcttggtaaccatagcacacagcagtgaagtgtttccacttctccagaggttggcacttaattgcccccaycygcccagtttctttgcaggtgccytcattgcttcccattgttttctcctctgtagttctgtgagcagtggcacattttgtgctgtcctgcagacagggatgccagtttcttacaaagcaaacatctcagcattttggatcttggtgcacatccttacgttgcagtggcagctatttggctgctgtgctggcactctgagcccggaatagaggcagccactgtctgtagctgcttaaaacttcctggcgcagttcagtctgcaagcatcagcttccagctgaccgagcagaatttgtcttgggtgcactggaaccaggggagag

SEQ ID NO: 57393 - DNA, 600 bp, Chicken  19866894313271_1
agttgtcaaatagcaaatcttgcaaattcggttgatgcgaaaccagtgaataaccccgcaggcttcctcacatgaggaagataagcatatctgttatgttaatcatgactttcttgtcaagtttgggttgtttttgttttgtttgtgcttgtttttgttttgttttcttttgtgtttggttgtttttttttccaaagctcctagctattgaaaaaaatccagtttgatcagttatccaatgaaccagccttccaagaccacatagataattactcctcattacactagtgactctaaacractgggaagtccactgccttctacggaattttgacatctgggtgccactttgaaatgcagaaagggacataacctttggtatactgataatcccattaaagttagagattgatgtgctgatagctccccatrcaagtgttctcctggacagcccagacactacaaaactccctgcagattggtgtgatcaggtcaccactgcaccttgtttgagtatctgataagtgagggtgagagggtgaagcataccaaggtcttttggataatcaactgtaaaagtgagaaccactgtttaacaat

SEQ ID NO: 57394 - DNA, 600 bp, Chicken  19866894313271_2
tttgttttgtttgtgcttgtttttgttttgttttcttttgtgtttggttgtttttttttccaaagctcctagctattgaaaaaaatccagtttgatcagttatccaatgaaccagccttccaagaccacatagataattactcctcattacactagtgactctaaacractgggaagtccactgccttctacggaattttgacatctgggtgccactttgaaatgcagaaagggacataacctttggtatactgataatcccattaaagttagagattgatgtgctgatagctccccatrcaagtgttctcctggacagcccagacactacaaaactccctgcagattggtgtgatcaggtcaccactgcaccttgtttgagtatctgataagtgagggtgagagggtgaagcataccaaggtcttttggataatcaactgtaaaagtgagaaccactgtttaacaatctgttcattttattgggtgagtaggtgcatatcagagagcctctgagaataaggacttattaacacgttttctggatgctatttaaaaacaaccaaagagtacacaaaggggaaagcaagcacccacagata

SEQ ID NO: 57395 - DNA, 599 bp, Chicken  19866894313275_1
  misc_feature (1)..(167): n is any nucleotide
nnnnnnnnnnnnnnnnnnnnnnnnnnnnnnnnnnnnnnnnnnnnnnnnnnnnnnnnnnnnnnnnnnnnnnnnnnnnnnnnnnnnnnnnnnnnnnnnnnnnnnnnnnnnnnnnnnnnnnnnnnnnnnnnnnnnnnnnnnnnnnnnnnnnnnnnnnnnnnnnnnnnnnnattgatttcccctcccccccacccccccaagttatgaataaatcaaaaattaacgtgtctgttctgctccatgacaacagttactctgtaccatttgtgcccccattccagcttgccagaaacttcgtcattygtgacttgtcactgcaaacagcgactagacacccttcacaaagctactttyactcragataaaaaacaatccaaacatttgagagggtaccataaaggtattgctgtttgcttcaattacaagtctgattatctaagggacaaagaaggtcttttcaaagactaggtgagctccccaaaggtagctacgtgacctaggagtactccatccctggtttgccaaatcccatctgacacygttcctccacattaagatggaatatggaagcgctacaytgatctgtttggtgcatgwggaac

SEQ ID NO: 57396 - DNA, 599 bp, Chicken  19866894313275_2
  misc_feature (1)..(116): n is any nucleotide
nnnnnnnnnnnnnnnnnnnnnnnnnnnnnnnnnnnnnnnnnnnnnnnnnnnnnnnnnnnnnnnnnnnnnnnnnnnnnnnnnnnnnnnnnnnnnnnnnnnnnnnnnnnnnnnnnnnnattgatttcccctcccccccacccccccaagttatgaataaatcaaaaattaacgtgtctgttctgctccatgacaacagttactctgtaccatttgtgcccccattccagcttgccagaaacttcgtcattygtgacttgtcactgcaaacagcgactagacacccttcacaaagctactttyactcragataaaaaacaatccaaacatttgagagggtaccataaaggtattgctgtttgcttcaattacaagtctgattatctaagggacaaagaaggtcttttcaaagactaggtgagctccccaaaggtagctacgtgacctaggagtactccatccctggtttgccaaatcccatctgacacygttcctccacattaagatggaatatggaagcgctacaytgatctgtttggtgcatgwggaacagtacrattgcacagaacagacctgtatatatgtgtatttcttattgggtc

SEQ ID NO: 57397 - DNA, 599 bp, Chicken  19866894313275_3
  misc_feature (1)..(111): n is any nucleotide
nnnnnnnnnnnnnnnnnnnnnnnnnnnnnnnnnnnnnnnnnnnnnnnnnnnnnnnnnnnnnnnnnnnnnnnnnnnnnnnnnnnnnnnnnnnnnnnnnnnnnnnnnnnnnnnattgatttcccctcccccccacccccccaagttatgaataaatcaaaaattaacgtgtctgttctgctccatgacaacagttactctgtaccatttgtgcccccattccagcttgccagaaacttcgtcattygtgacttgtcactgcaaacagcgactagacacccttcacaaagctactttyactcragataaaaaacaatccaaacatttgagagggtaccataaaggtattgctgtttgcttcaattacaagtctgattatctaagggacaaagaaggtcttttcaaagactaggtgagctccccaaaggtagctacgtgacctaggagtactccatccctggtttgccaaatcccatctgacacygttcctccacattaagatggaatatggaagcgctacaytgatctgtttggtgcatgwggaacagtacrattgcacagaacagacctgtatatatgtgtatttcttattgggtcatatc

SEQ ID NO: 57398 - DNA, 600 bp, Chicken  19866894313275_4
atgacaacagttactctgtaccatttgtgcccccattccagcttgccagaaacttcgtcattygtgacttgtcactgcaaacagcgactagacacccttcacaaagctactttyactcragataaaaaacaatccaaacatttgagagggtaccataaaggtattgctgtttgcttcaattacaagtctgattatctaagggacaaagaaggtcttttcaaagactaggtgagctccccaaaggtagctacgtgacctaggagtactccatccctggtttgccaaatcccatctgacacygttcctccacattaagatggaatatggaagcgctacaytgatctgtttggtgcatgwggaacagtacrattgcacagaacagacctgtatatatgtgtatttcttattgggtcatatctccacctctgaagtgactgcagccacccagcactgggttcatctgagagcaccacacagcattgcaggtgaagtgccccatgatgcttgtcctttgctaaggttacctatagaagactttgggcagcaagaagaaaaggccaagctaataattagtttgcaaccattaattttctacctttt

SEQ ID NO: 57399 - DNA, 600 bp, Chicken  19866894313275_5
cagcttgccagaaacttcgtcattygtgacttgtcactgcaaacagcgactagacacccttcacaaagctactttyactcragataaaaaacaatccaaacatttgagagggtaccataaaggtattgctgtttgcttcaattacaagtctgattatctaagggacaaagaaggtcttttcaaagactaggtgagctccccaaaggtagctacgtgacctaggagtactccatccctggtttgccaaatcccatctgacacygttcctccacattaagatggaatatggaagcgctacaytgatctgtttggtgcatgwggaacagtacrattgcacagaacagacctgtatatatgtgtatttcttattgggtcatatctccacctctgaagtgactgcagccacccagcactgggttcatctgagagcaccacacagcattgcaggtgaagtgccccatgatgcttgtcctttgctaaggttacctatagaagactttgggcagcaagaagaaaaggccaagctaataattagtttgcaaccattaattttctaccttttttaagcaacttccttcctggaaactttcttcctgtgta

SEQ ID NO: 57400 - DNA, 600 bp, Chicken  19866894313275_6
tcattygtgacttgtcactgcaaacagcgactagacacccttcacaaagctactttyactcragataaaaaacaatccaaacatttgagagggtaccataaaggtattgctgtttgcttcaattacaagtctgattatctaagggacaaagaaggtcttttcaaagactaggtgagctccccaaaggtagctacgtgacctaggagtactccatccctggtttgccaaatcccatctgacacygttcctccacattaagatggaatatggaagcgctacaytgatctgtttggtgcatgwggaacagtacrattgcacagaacagacctgtatatatgtgtatttcttattgggtcatatctccacctctgaagtgactgcagccacccagcactgggttcatctgagagcaccacacagcattgcaggtgaagtgccccatgatgcttgtcctttgctaaggttacctatagaagactttgggcagcaagaagaaaaggccaagctaataattagtttgcaaccattaattttctaccttttttaagcaacttccttcctggaaactttcttcctgtgtacacgacaattagatattaa

SEQ ID NO: 57401 - DNA, 600 bp, Chicken  19866894313275_7
ttgtcactgcaaacagcgactagacacccttcacaaagctactttyactcragataaaaaacaatccaaacatttgagagggtaccataaaggtattgctgtttgcttcaattacaagtctgattatctaagggacaaagaaggtcttttcaaagactaggtgagctccccaaaggtagctacgtgacctaggagtactccatccctggtttgccaaatcccatctgacacygttcctccacattaagatggaatatggaagcgctacaytgatctgtttggtgcatgwggaacagtacrattgcacagaacagacctgtatatatgtgtatttcttattgggtcatatctccacctctgaagtgactgcagccacccagcactgggttcatctgagagcaccacacagcattgcaggtgaagtgccccatgatgcttgtcctttgctaaggttacctatagaagactttgggcagcaagaagaaaaggccaagctaataattagtttgcaaccattaattttctaccttttttaagcaacttccttcctggaaactttcttcctgtgtacacgacaattagatattaascagaacaatg

SEQ ID NO: 57402 - DNA, 600 bp, Chicken  19866894313275_8
gaacagtacrattgcacagaacagacctgtatatatgtgtatttcttattgggtcatatctccacctctgaagtgactgcagccacccagcactgggttcatctgagagcaccacacagcattgcaggtgaagtgccccatgatgcttgtcctttgctaaggttacctatagaagactttgggcagcaagaagaaaaggccaagctaataattagtttgcaaccattaattttctaccttttttaagcaacttccttcctggaaactttcttcctgtgtacacgacaattagatattaascagaacaatgagacatcagagcaagtattgttgccagggatgatgtattagcaagtagggggaagcctgagctttatacacaagctggcctgggtcagactgttatggactaagatgcaagttatgttcctaactaggcaccagcatcaagatcttgatagttcccatcatctgagtcagaaacaagagctaaagggacttcttcccaaggaaacaccacagccttcctagtttggcaggggctgagcaggaattttaaagagcaaaatggtggagttgaatggctaatacgtgattttg

SEQ ID NO: 57403 - DNA, 600 bp, Chicken  19866894313278_1
gtaatgcactgactctctcctatgccaacttaggcacccactattaccattgcagcactaagcttctttccagcttaaatgagaaggtagaggttcatccatggctgatggataacacaaaagcaagctggctaatggtctccagagaaatctgtctgaggtgtgggatgacgactctgtagcccataactttatatatacagaaacatgcaattctgactgaagaatgaagataacatgacaacccttttgcttttctcacttaaattttcagttctcactcatccttcactccttgargagagatatatgtatttacagaaaaaaatatggcccttaattggaacagctcagctagtgatagtaaatgtgatagctgcactcatgagatgtcatgaatatttactacaggttcattgataataaaatatttgcaaaatcttaatattcagaggcactgaatcttttttttatcgtagtaactcttaacagctgcatgttgcaggatatgaatagctgtattgagtgaagctcagtttgagtactttttccggtgaaacacatttagtttaagataatgcagtttttcactcagcaatt

SEQ ID NO: 57404 - DNA, 600 bp, Chicken  19866894313289_1
tttcgatatataaagcagaatataactaacaagaacatgtaatcagagtaggtgcaggacaggcacaagacgtttagtcttatgtgtactgtgaatgtaaaccaacttactgtagttgttttgtgtgttattgagcctggaaaatactctgcgttaaatggggaaggtaagcttgagggttttcatacaaacattttgcttgcttttccctttcagttttcctttctttatttttaagtcttaattctcagattctgctgtgtcctttctgctggtcccttctaactcaggatgttctgkgattcttctgtgttgtkttagagccagtgcttgtacagtccttcaccygatccctggactgtgtgctaaaagcttgcccgctgcctctaggacagcttattttttttctatacgttcatccagaaagggactttgcagtcttactgagtttcagttcaggactgtgggcagtggattagggctgtgtaagcagtgagactgcacgtggctgtcaagttctgagtgcactgaaataagagttctgtcctggcactaaggtggtaaactggtttttctgctgatgcttctgtttccttgttg

SEQ ID NO: 57405 - DNA, 600 bp, Chicken  19866894313289_2
gaatataactaacaagaacatgtaatcagagtaggtgcaggacaggcacaagacgtttagtcttatgtgtactgtgaatgtaaaccaacttactgtagttgttttgtgtgttattgagcctggaaaatactctgcgttaaatggggaaggtaagcttgagggttttcatacaaacattttgcttgcttttccctttcagttttcctttctttatttttaagtcttaattctcagattctgctgtgtcctttctgctggtcccttctaactcaggatgttctgkgattcttctgtgttgtkttagagccagtgcttgtacagtccttcaccygatccctggactgtgtgctaaaagcttgcccgctgcctctaggacagcttattttttttctatacgttcatccagaaagggactttgcagtcttactgagtttcagttcaggactgtgggcagtggattagggctgtgtaagcagtgagactgcacgtggctgtcaagttctgagtgcactgaaataagagttctgtcctggcactaaggtggtaaactggtttttctgctgatgcttctgtttccttgttgaatttgtgttccgaaaa

SEQ ID NO: 57406 - DNA, 600 bp, Chicken  19866894313289_3
taggtgcaggacaggcacaagacgtttagtcttatgtgtactgtgaatgtaaaccaacttactgtagttgttttgtgtgttattgagcctggaaaatactctgcgttaaatggggaaggtaagcttgagggttttcatacaaacattttgcttgcttttccctttcagttttcctttctttatttttaagtcttaattctcagattctgctgtgtcctttctgctggtcccttctaactcaggatgttctgkgattcttctgtgttgtkttagagccagtgcttgtacagtccttcaccygatccctggactgtgtgctaaaagcttgcccgctgcctctaggacagcttattttttttctatacgttcatccagaaagggactttgcagtcttactgagtttcagttcaggactgtgggcagtggattagggctgtgtaagcagtgagactgcacgtggctgtcaagttctgagtgcactgaaataagagttctgtcctggcactaaggtggtaaactggtttttctgctgatgcttctgtttccttgttgaatttgtgttccgaaaataatcaaacttagaatgaaataaagtattaa

SEQ ID NO: 57407 - DNA, 600 bp, Chicken  19866894313289_4
ggaaaatattaagctttatgggagtgaggtgaattctcaatttgggctagattcagtctgtttgcatcaaagaaaagagaaaatctgtctttatcagcaaacaagaaaactgttcaggcaacagtaacaataaaatgaactggccaagtaaaactaagtgaaactgtgtttttcttaagagagatgtcaagagtgctttacatatcatcttgcgaaaattagaagcatgctgcattggcaaagaagcagcaagcaatgatagtctttgaaaaataaaccatctaagtagaatcaaagggyaaaaaaaaascacatttaaaatcaatcagtaagataaaatgtgttctagatcatttttaaaatatttaaaggcgtgggattattattttgtagccttacatttatttacaaatggaatatttaaatgccttaattgtggatcttgcttgcctaagtagtttttttccgatatcttctgtttatgtgaattttaaaatatatttcttgttttgagacagatacgtggtgggaagctaatgatctccaacacacgaaaaagtgatgctggcatgtacacttgcgttggaaccaacatggtgg

SEQ ID NO: 57408 - DNA, 600 bp, Chicken  19866894313289_5
gaaaatattaagctttatgggagtgaggtgaattctcaatttgggctagattcagtctgtttgcatcaaagaaaagagaaaatctgtctttatcagcaaacaagaaaactgttcaggcaacagtaacaataaaatgaactggccaagtaaaactaagtgaaactgtgtttttcttaagagagatgtcaagagtgctttacatatcatcttgcgaaaattagaagcatgctgcattggcaaagaagcagcaagcaatgatagtctttgaaaaataaaccatctaagtagaatcaaagggayaaaaaaaascacatttaaaatcaatcagtaagataaaatgtgttctagatcatttttaaaatatttaaaggcgtgggattattattttgtagccttacatttatttacaaatggaatatttaaatgccttaattgtggatcttgcttgcctaagtagtttttttccgatatcttctgtttatgtgaattttaaaatatatttcttgttttgagacagatacgtggtgggaagctaatgatctccaacacacgaaaaagtgatgctggcatgtacacttgcgttggaaccaacatggtggg

SEQ ID NO: 57409 - DNA, 600 bp, Chicken  19866894313289_6
aagctttatgggagtgaggtgaattctcaatttgggctagattcagtctgtttgcatcaaagaaaagagaaaatctgtctttatcagcaaacaagaaaactgttcaggcaacagtaacaataaaatgaactggccaagtaaaactaagtgaaactgtgtttttcttaagagagatgtcaagagtgctttacatatcatcttgcgaaaattagaagcatgctgcattggcaaagaagcagcaagcaatgatagtctttgaaaaataaaccatctaagtagaatcaaagggaaaaaaaaaascacatttaaaatcaatcagtaagataaaatgtgttctagatcatttttaaaatatttaaaggcgtgggattattattttgtagccttacatttatttacaaatggaatatttaaatgccttaattgtggatcttgcttgcctaagtagtttttttccgatatcttctgtttatgtgaattttaaaatatatttcttgttttgagacagatacgtggtgggaagctaatgatctccaacacacgaaaaagtgatgctggcatgtacacttgcgttggaaccaacatggtgggggaacgaga

SEQ ID NO: 57410 - DNA, 600 bp, Chicken  19866894313294_1
ataccttcttaagcatatcatagcttgcttcaccatcgtgaatggtatctctctgaagcaaacaagttttacatatatggagcccagcccatatacatttggcagaggagattgtcatcacttgcttcttgaatgaggtaatgaacatgcccttcaatagataagggtaatccttttattctgtttctagtcttaataacaccttgtagcccgttgttctatatcaaggacatgggttttggcctagaaacaaagaaaaaggaagaaaaatgagtattgctattgctcatgggcttccayatcttaagaagtcttcattatgatatttgcaatcagcgtgttaatttaatacaagacccaaatgtctgcaccagtgaaaggattatcacttaaaatgaatagactactggtcaagttataggttttgccttaaattttacagatgaaatttaacagaacagactggaaaagctatacaaaagtattgggaaacgttagaatgttttaataaaccgttcgaggccctcttagagtaccagctcagagcaattaaactcacattttcttgtgaagttcaagcataacactggcacctatcca

SEQ ID NO: 57411 - DNA, 599 bp, Chicken  19866894313303_1
  misc_feature (1)..(80): n is any nucleotide
nnnnnnnnnnnnnnnnnnnnnnnnnnnnnnnnnnnnnnnnnnnnnnnnnnnnnnnnnnnnnnnnnnnnnnnnnnnnnnnncttttgcatttagagcctgttactgaggaactgcttcctcctttttgttttgttttgttttgtttttttttctaattcaaatgctctttttgctcagcagtgtatgggcaagtactggtgctgggatgcatccctgtagattgatgcctcttgcacgtgtgtttggccacaaccttacacactcatgggaaggcagcatgcagtgcatgagtctgagcasaccaatgcttgcagatacctcgctgcacatgccatacagcaacatatatattccataggaggatcagagctctacgtctctccatcatgcctgcatgcatccacatacatacacccactaaggttgcgtttccggagacattctcaaatagagcagtgtaatttctccgctgattttgattgacatgctgtccctgggatcatgtgttaatcccttcttcactcaagccttttcataactcatttctctctgctagatggagactctgatggttaccgaggcaacgatgatagcactaa

SEQ ID NO: 57412 - DNA, 600 bp, Chicken  19866894313303_2
cacccactaaggttgcgtttccggagacattctcaaatagagcagtgtaatttctccgctgattttgattgacatgctgtccctgggatcatgtgttaatcccttcttcactcaagccttttcataactcatttctctctgctagatggagactctgatggttaccgaggcaacgatgatagcactaagccatttccctctctgcacggagaccattattccgcatgcataggccatttgcaacaaaggtcgccacaaagtcatccacaacacagcacacgtttattaaacttttattcsttttttttttccttttcctccctccccctaacagaggaactggccagcatgtgtgttactgctctctctctccatctgtctctttcttttctttttttttttcttttcttttctttctctttttttttttttggaggtctttgtaatataggtaataataaccatagtagatattattgtacccaaactatatatcatacaaatcaggagcttagagttcctggtccagagagatcatgcttagatggtggagttttgcaccaatgattcctatttgccttttgttctcctatcaaagag

SEQ ID NO: 57413 - DNA, 600 bp, Chicken  19866894313308_1
tcaatcaaatttaaagttccattgttttcacctgttttctttgggcttcctttttccttgctctcatccaagctttgctgcgcagctcttggggatccaggctctgtgtcactttctgagctacttccatcttgggctgataatccaggactctgaggaaatgtactttcagcagctagtggttttcctgttcaaaatccaagaaaaacaggcaaaaatctctcaagcaaagtggacaaacaagaaaagcaagagcagcatttccacttatgtgatattagccttcaaactgtaccaaastacagaacccttccaccagtctgacttggtcttcagttgccacctgtcgtctacrtcctccagattccatcagaacagccagacactgtgaaaactatgcctgttcttgaagtattgcaactttcagcagcaagaatactcagctggctaataaagccaaaattcagccatgttacacgcgtcattctaagcacacttctaaaggaacaaatgaaagctgactcagcatgtctcatttcttygagagagatcttactgctgagaaaaacgtgcaaattcttaaacctctgcttactcagg

SEQ ID NO: 57414 - DNA, 600 bp, Chicken  19866894313308_2
ccttgctctcatccaagctttgctgcgcagctcttggggatccaggctctgtgtcactttctgagctacttccatcttgggctgataatccaggactctgaggaaatgtactttcagcagctagtggttttcctgttcaaaatccaagaaaaacaggcaaaaatctctcaagcaaagtggacaaacaagaaaagcaagagcagcatttccacttatgtgatattagccttcaaactgtaccaaastacagaacccttccaccagtctgacttggtcttcagttgccacctgtcgtctacrtcctccagattccatcagaacagccagacactgtgaaaactatgcctgttcttgaagtattgcaactttcagcagcaagaatactcagctggctaataaagccaaaattcagccatgttacacgcgtcattctaagcacacttctaaaggaacaaatgaaagctgactcagcatgtctcatttcttygagagagatcttactgctgagaaaaacgtgcaaattcttaaacctctgcttactcaggcttgcaaacagaagctgctccttcaatcaccttaagcataattaatgagcaagtg

SEQ ID NO: 57415 - DNA, 600 bp, Chicken  19866894313308_3
agaaaagcaagagcagcatttccacttatgtgatattagccttcaaactgtaccaaastacagaacccttccaccagtctgacttggtcttcagttgccacctgtcgtctacrtcctccagattccatcagaacagccagacactgtgaaaactatgcctgttcttgaagtattgcaactttcagcagcaagaatactcagctggctaataaagccaaaattcagccatgttacacgcgtcattctaagcacacttctaaaggaacaaatgaaagctgactcagcatgtctcatttcttygagagagatcttactgctgagaaaaacgtgcaaattcttaaacctctgcttactcaggcttgcaaacagaagctgctccttcaatcaccttaagcataattaatgagcaagtgtttctcctgtttaactactgcatcacacactcacctactagaggtatttggtggactgtcattgtctcatccttgtattctggctctgtgtgcaactgcacagctggggagagaacaaaaacaggcattaagaagttcataagagattcatagtctacaagaattactatcaggaaagcatcttttc

SEQ ID NO: 57416 - DNA, 599 bp, Chicken  19866894313316_1
  misc_feature (1)..(18): n is any nucleotide
nnnnnnnnnnnnnnnnnnttgtatgaatgtgttacaaaattaaataatgtggcattgtgctgtatgactagcacttacatactaaattatcacagctctccctgaccttggcagcatcatagggttcatattttcagaaagatgaattgttctcagaacagtttcttcagtgttttaaaggcacgcacttttctttaaccttatgggcacacggcttctgcctgcttgtactgactgggttttaaaaacaccaattccgatacaatgccatctgaagtcaatacaaaggctcttagtaamttctgtgctctggtactttactctcaaatgaaactaccagatttgagcctaaaatgggagaaagggatgcagtgcacagttttatggactttagaacaaaatcttctaactgtgtgttcaaattcttggccacctttttgtagggtctgcaagcgacacaggtcaggacatggtgattctgtttacaggctcaatagccacagatcaacacaacaaattccatgtaatgcacttgcaacttgtctgtagttgtcagtcccagagctggtctggggctttttgttcggttggttttcaca

SEQ ID NO: 57417 - DNA, 394 bp, Chicken  19866894313321_1
ctcattggtccttctgtcagtggtgtgagactactaactcagatcaaaaggaaataatgctggagacagaaaggggggaaactgtcaactagctgagaagtgcatctgaggagtactggaggaagaattcttctgtcctcactttccctcaaagaattcatgacttgcaaaccactgctactttattccatctttctgttcctaaaaggaacaagtcctttatttgtaggaaaaaagtagtgtttcctctaagttgagtttcagatcttggaaaattaagaccacagatgagtagagccytcaactattcacagcagtagtcatgaagcaactgtagattagatgtgtcacctatgcctgctgacttcacaggcaaacatcttttgcctgattt

SEQ ID NO: 57418 - DNA, 600 bp, Chicken  19866894313329_1
aacaggctttatgcagaaactgatctaaggctgccagtggcaccagagtttacctgttaaacttctggcattaaagaatgcgaactgggacttgaatcactgcaaaggtcattctgtagacgtgtgggtgctatcggagttgcccatcccagaccacctttctgcctgacaacagagcatggccaccgctagataaggtaccaggctgctccgctgcttttctcctcctagcctgaaactttaactcttcagtactgcagtggcacaatggaccaatttacttgtgttctgttcatatcrgcatactgtaaattagggctgacatgttcatattctttaagcctgtcaagtcacttatgctgctgcgaagaggagctctttagttctagaatttttgctgagctttcttgttgtgtgttgcacgtgcacatgacgttgctactatgggatacttccccctgttaatgttatcagtgaataaaaaagacagacactgtctgtagagctcagggtgtatggacaccaacgctaaacttatgaactgarcaattgatagtgataaattcttttcaaagtgcatgttggcactctttagttttc

SEQ ID NO: 57419 - DNA, 591 bp, Chicken  19866894313329_2
cttcagtactgcagtggcacaatggaccaatttacttgtgttctgttcatatcrgcatactgtaaattagggctgacatgttcatattctttaagcctgtcaagtcacttatgctgctgcgaagaggagctctttagttctagaatttttgctgagctttcttgttgtgtgttgcacgtgcacatgacgttgctactatgggatacttccccctgttaatgttatcagtgaataaaaaagacagacactgtctgtagagctcagggtgtatggacaccaacgctaaacttatgaactgarcaattgatagtgataaattcttttcaaagtgcatgttggcactctttagttttcaggacagcactgactttttcagttgcacgtccaaagagatcacagcctcgccctgtcacccttctcaattgttaagggctgtagaggcctttgaacttttcactcatttagctcaaagctgaaaggagggcagccttccttaataagtcctgtaaatgatgtaaatatcagtatagttcttctgacatagtcgcctatgtagaaacatcacgagaggtgaacaagtagagctttgct

SEQ ID NO: 57420 - DNA, 600 bp, Chicken  19866894313334_1
gaatatttaaaatgaaaactgttgtgttctccctctgttaattcccctttcattttggtgaagctgattgcttttctcagtataacagaaatcttgttaaattaatttaaacctgactccagctctagaagtacagttgcactggatgcacagaatgcattatagatttcatattcagaattctccctcccccgtgaaatgtgagtaacatttcatgtggctgtgacctttactctgagggatccttactcatgcaaagttcctgttgagctaactggattagcaacagtctgcagaackgggtttgttacgctgtggcccgcaggtttccttgtaggtttaagcagactcttgcttttggcaagaaaatgctacttgagatctacaccagactatggcactcccaaagttcggtactgagttccctttactctctattactcttgacctgcttataaatggaacggtttaatgagaaactggcatggactcagtactacttgtcagaaaagagatttatattttaatagctcttctggataaatattcccttagaacctttaaaggttcyacttaatgtcatgttcctaggtgctgcct

SEQ ID NO: 57421 - DNA, 600 bp, Chicken  19866894313334_2
taactggattagcaacagtctgcagaackgggtttgttacgctgtggcccgcaggtttccttgtaggtttaagcagactcttgcttttggcaagaaaatgctacttgagatctacaccagactatggcactcccaaagttcggtactgagttccctttactctctattactcttgacctgcttataaatggaacggtttaatgagaaactggcatggactcagtactacttgtcagaaaagagatttatattttaatagctcttctggataaatattcccttagaacctttaaaggttcyacttaatgtcatgttcctaggtgctgcctaattagttcattaactggagaagcattctggaaaaaaaatggattcygcagcttgaagtttctgaggatgatagcgtcaatgaaaataatctaaagtaattaaaatccttatttcatgatgtctgattcaaaacccattggattaaatkggaggcttctgtaacttttgaataacatgtattgaagagattacttggttcacagttttatgaataggcaggtggttggagatgctgcttttccaagcagcagtgggaaaatgtttattttg

SEQ ID NO: 57422 - DNA, 589 bp, Chicken  19866894313334_3
actcttgcttttggcaagaaaatgctacttgagatctacaccagactatggcactcccaaagttcggtactgagttccctttactctctattactcttgacctgcttataaatggaacggtttaatgagaaactggcatggactcagtactacttgtcagaaaagagatttatattttaatagctcttctggataaatattcccttagaacctttaaaggttcyacttaatgtcatgttcctaggtgctgcctaattagttcattaactggagaagcattctggaaaaaaaatggattcygcagcttgaagtttctgaggatgatagcgtcaatgaaaataatctaaagtaattaaaatccttatttcatgatgtctgattcaaaacccattggattaaatkggaggcttctgtaacttttgaataacatgtattgaagagattacttggttcacagttttatgaataggcaggtggttggagatgctgcttttccaagcagcagtgggaaaatgtttattttgaacattcagcattaagatataaatgaattgaaatggttctctcagtttacatatcatgtgctcta

SEQ ID NO: 57423 - DNA, 487 bp, Chicken  19866894313334_4
tgcttataaatggaacggtttaatgagaaactggcatggactcagtactacttgtcagaaaagagatttatattttaatagctcttctggataaatattcccttagaacctttaaaggttcyacttaatgtcatgttcctaggtgctgcctaattagttcattaactggagaagcattctggaaaaaaaatggattcygcagcttgaagtttctgaggatgatagcgtcaatgaaaataatctaaagtaattaaaatccttatttcatgatgtctgattcaaaacccattggattaaatkggaggcttctgtaacttttgaataacatgtattgaagagattacttggttcacagttttatgaataggcaggtggttggagatgctgcttttccaagcagcagtgggaaaatgtttattttgaacattcagcattaagatataaatgaattgaaatggttctctcagtttacatatcatgtgctcta

SEQ ID NO: 57424 - DNA, 600 bp, Chicken  19866894313351_1
tgctatggcatttttatgagcagctttttgatcttttcaggacttactcaggaataaaagttcttaaatcaatgaaatgcagtctttagacagcaatatttatgtgcaagattttaaagtggcactgctcgtatttaaagctgttggctcttttctccatacattgtgtgtggatttactgtgttgtgaatacacgaggtggatgcttggacaattccatgaaatttggccacacatacaaacatgtctttacaacttttttcacacttttcctcagctggaaatagattttcctagtgkttgattaacaaggagtgagttgttcctaactaggttgagggcaagaagagctgtgtggcattggattagtggaagaagcgaacagcttcagattaattcaactagtcttctatttgtaatctccaaggaaacagctgagttgaatgttaattaaacagcagtctttgatccacccagccactcccggaggcatgataataatatataagcgcgcacacagcaaatatataataggtgcatttaaaggagtgcatctcaccttgccatattcacacttgaaacattatctgctgaccagtt

SEQ ID NO: 57425 - DNA, 600 bp, Chicken  19866894313351_2
tgggatgggtctgagcaaaaggagattaagaggcgatgaccaatctaatgtacgtatagcagtaagaagccggcatccgtcatagactattgatggcaataagtattttaagccatgctgtgcatgtgttaattttttttttatacctcagtaaatgctaagctgaatgctgtaatcctgtattttttcagtttcccaaatctgatttcagtctcgcttttcttgtctcatgcttggcgctctcctctcgctctctgtctctgcctgtgggtgtgtgtctgtctccgtcttcgcctttcmctcagatcacaaacttgactgtttcctaattgtctactttcttctgtcctttctyggagacattaattatcgctacgacgactgctcataatcgtgtatgaaccgggctcagggcgggcacccggcatggtgccttcccttgggatggtgtgttgctttctgcagacccccggcagtgggtgggtgcccttgatgctggctgccatagggccaccatggtgaggctggggaccgccagcagcctggcaccgcccgcctgagtcagcccagggaattggctggagaggggccatcacctgc

SEQ ID NO: 57426 - DNA, 600 bp, Chicken  19866894313351_3
atagcagtaagaagccggcatccgtcatagactattgatggcaataagtattttaagccatgctgtgcatgtgttaattttttttttatacctcagtaaatgctaagctgaatgctgtaatcctgtattttttcagtttcccaaatctgatttcagtctcgcttttcttgtctcatgcttggcgctctcctctcgctctctgtctctgcctgtgggtgtgtgtctgtctccgtcttcgcctttcmctcagatcacaaacttgactgtttcctaattgtctactttcttctgtcctttctyggagacattaattatcgctacgacgactgctcataatcgtgtatgaaccgggctcagggcgggcacccggcatggtgccttcccttgggatggtgtgttgctttctgcagacccccggcagtgggtgggtgcccttgatgctggctgccatagggccaccatggtgaggctggggaccgccagcagcctggcaccgcccgcctgagtcagcccagggaattggctggagaggggccatcacctgcccccctctggtgcacagcctctttgctgcgagccacaaggctgtggcaggggctg

SEQ ID NO: 57427 - DNA, 506 bp, Chicken  19866894313363_1
aaagcactggaaagcaaaattctgtaacagctctgcaatttcaaatgactactgcgcctcttggaagtgactgtctcgagaacaggactactgaagattatctgcaagactgtgaggataaagctatggatgtgatagtgcagagagatggtagtcacagtagttcagccttctctgatcaggagcaaaaaggccaaggtggaaatgtgatggatatattgaactgggtcaggcctctccctgctctactttctccagtacagctttcaccagtatctacacaggtaagttcgagggtaygtctgacaactcatcattgacttggtcatataattacaacagaaataacaagttgatattcttgggcattttggggtaccagtgttgcttactcatacacttaaagaatctctgagtgtttagatttgtatatacattttttcatattctagcatactgcttgtggaaggctgcaaaaggcaattttctgaactgtatataagtga

SEQ ID NO: 57428 - DNA, 600 bp, Chicken  19866894313364_1
accatccctggaggtgttcaaggaacgtttagatgttgttctgagggacatggttcagtgagaaataggtggacatttggactagatgatcttggaaatcttttctaaccttggtgattctatgacacagggctaatccagacattgagtggaccagggttaggacatactggtgccgcgtgatatctcatttcatgcattttcccttgctaagatctgctcaggagcaagtcatcctttccagaggagctctgggtgatagatttgtgcacctattgttcaaagacaagatggtatttrcgttgcttgttactgcaccccttaggcaggtgatattctggactagcctgggcttcctagaatgacaaatgttacgctttttgtactgtctgtaagctagggctaagctgcaggccatcatttactctgaaacctgagaaatattctctgtgctctcagctttcctttatgctcgcttttggcaaagttagagtgcatgaaaaagatgatacaccaattacatccaccctgtctgctgttcgggggcaaacatgtcttatgcattatgattcagaagcttgcttgtgctttttttttacc

SEQ ID NO: 57429 - DNA, 600 bp, Chicken  19866894313372_1
agctctttcctgcagtcatttatcaagtgcttttcatctgaaacatgattctgggattcaattactttataaagtcaatattttaggtcacagcttatgcatcagcaaaggcatctctggggattcaagtttaacgcaacgcagctctaagtaatgttccctcaccgctccagctaaaaaaagtcaataaggtgcatttgtttcccccacatttcactcaaggaagctgtaaaattgttgttcacttttgtaaatttaaaccattgagaaggagcaaacgttcctggccatatttttcargagataaaagaagattgctcccctgcttcctctctacgacctcagcaggattttactcccactgagctgatgaacaggctcattccaagccattgcccacggggagggtcaaagcaagttctggagcatcccttagcccctgtgcagagatggattcctggtatcagaggtggattttcagtattggaggatcacccaaaccatccaatccatggactccattttctaagcctcccagcaaggctacgctccagctttgctatcagcaccggtagcctatttctaaacccagtgcaaatg

SEQ ID NO: 57430 - DNA, 600 bp, Chicken  19866894313372_2
gcagagatggattcctggtatcagaggtggattttcagtattggaggatcacccaaaccatccaatccatggactccattttctaagcctcccagcaaggctacgctccagctttgctatcagcaccggtagcctatttctaaacccagtgcaaatgagtaagggaacagaaccatagaatgacttgtgttggaagggacctcaaggatcatccagtcccaccaccaatagagcaggctgcccagggagcctcccaccccctgctccagcatctcagctttttccctaagcagcacaaayrgaattctccaggggtttaattaaatccttctggcagcctagaaaaagaaagttcctcatttcatttgggataggggttctttccctcctcattatgaaacttagctcaatattatatcaaacattccaaattgcttttttcccccttaaaatcatccaaacagtaaattttgagtctttgtttaacaggctatctattgatctttgccaaagccacagcacttcataaatctccacagaagccagaacagcattaaaaaaaaacccacaacagaaaagaaaaaggattaaaagttaata

SEQ ID NO: 57431 - DNA, 600 bp, Chicken  19866894313372_3
cagagatggattcctggtatcagaggtggattttcagtattggaggatcacccaaaccatccaatccatggactccattttctaagcctcccagcaaggctacgctccagctttgctatcagcaccggtagcctatttctaaacccagtgcaaatgagtaagggaacagaaccatagaatgacttgtgttggaagggacctcaaggatcatccagtcccaccaccaatagagcaggctgcccagggagcctcccaccccctgctccagcatctcagctttttccctaagcagcacaaayrgaattctccaggggtttaattaaatccttctggcagcctagaaaaagaaagttcctcatttcatttgggataggggttctttccctcctcattatgaaacttagctcaatattatatcaaacattccaaattgcttttttcccccttaaaatcatccaaacagtaaattttgagtctttgtttaacaggctatctattgatctttgccaaagccacagcacttcataaatctccacagaagccagaacagcattaaaaaaaaacccacaacagaaaagaaaaaggattaaaagttaatac

SEQ ID NO: 57432 - DNA, 600 bp, Chicken  19866894313372_4
taacaggctatctattgatctttgccaaagccacagcacttcataaatctccacagaagccagaacagcattaaaaaaaaacccacaacagaaaagaaaaaggattaaaagttaatacaattccaatcactttctgagaaaagcttccaaacacaggagtgtatttccaataaacagaccctggggaaacctgcctgctcagcactcaccagggccacgaggcttgaggagatccaggagcagctctcagagcacaggtgcatccattgcaacaccagagctggagttcaggctggtccyaaagaccccagctctcctgccctgaggctcagcaaggagaaagaggaaagatgaaggagcctttataccttcagcagaaagaagagcttcaccatgagagaccagaaagaatgcataacctgggatctttagaaagggaacrcaaatcctgataattagattaagtgttaaataggataccacacctgagctttcttaatgggcttgtttcagctgtggttaggactaagtcacctggagctgatcagcgctccccagggtggcacaaggaggaggccatccacccatccacccatccac

SEQ ID NO: 57433 - DNA, 600 bp, Chicken  19866894313372_5
gcttccaaacacaggagtgtatttccaataaacagaccctggggaaacctgcctgctcagcactcaccagggccacgaggcttgaggagatccaggagcagctctcagagcacaggtgcatccattgcaacaccagagctggagttcaggctggtccyaaagaccccagctctcctgccctgaggctcagcaaggagaaagaggaaagatgaaggagcctttataccttcagcagaaagaagagcttcaccatgagagaccagaaagaatgcataacctgggatctttagaaagggaacrcaaatcctgataattagattaagtgttaaataggataccacacctgagctttcttaatgggcttgtttcagctgtggttaggactaagtcacctggagctgatcagcgctccccagggtggcacaaggaggaggccatccacccatccacccatccacccatccacccatccacccatccacccatccacccatccacccatccacccatccacccatccccataatcagccctagcaggaagagatggaaatcctttggccctgcggtgggtctctgcgctggttttcaggagtgcttt

SEQ ID NO: 57434 - DNA, 600 bp, Chicken  19866894313376_1
atactttgtcttaagaacatccaaagtcaacctttggagagaagatgttgaagtgtagtttggcatgagtggacttcataagttcacttccccacctaagggtgttccagcctaaccataaaaggtgctctatctgccagcgtgtggatctgaagcttcggtgaagttacttgtacaagtgagaaatgtttgggatccctagttaggacctatctaactttaaaggtgaggaagagcagtttgtctcagatccttctcaagtgatagtctagctttaacttgattcacctaaaatagcamttttcmtaagtctttgtaggtaaagatttcagacataccatgatgattttaatgtttgtagtgcctagtttaattcaaagttgacaggaattcctcagaacaattacaaaagggtactgaaattcccattaactttctaaaattcaagtctgtcagtatttttttatttaccttttgccagggaaattggaattaccattgaaaagtggaccttgaccatcattcaggttccaaatactggctagaatttttatctcttgcttttaacacactttcttcctgactactgtgaaacctagc

SEQ ID NO: 57435 - DNA, 600 bp, Chicken  19866894313376_2
tgtcttaagaacatccaaagtcaacctttggagagaagatgttgaagtgtagtttggcatgagtggacttcataagttcacttccccacctaagggtgttccagcctaaccataaaaggtgctctatctgccagcgtgtggatctgaagcttcggtgaagttacttgtacaagtgagaaatgtttgggatccctagttaggacctatctaactttaaaggtgaggaagagcagtttgtctcagatccttctcaagtgatagtctagctttaacttgattcacctaaaatagcamttttcmtaagtctttgtaggtaaagatttcagacataccatgatgattttaatgtttgtagtgcctagtttaattcaaagttgacaggaattcctcagaacaattacaaaagggtactgaaattcccattaactttctaaaattcaagtctgtcagtatttttttatttaccttttgccagggaaattggaattaccattgaaaagtggaccttgaccatcattcaggttccaaatactggctagaatttttatctcttgcttttaacacactttcttcctgactactgtgaaacctagcaagtaa

SEQ ID NO: 57436 - DNA, 600 bp, Chicken  19866894313376_3
atttaccttttgccagggaaattggaattaccattgaaaagtggaccttgaccatcattcaggttccaaatactggctagaatttttatctcttgcttttaacacactttcttcctgactactgtgaaacctagcaagtaacaagtatccacgccatttggtagagattattgtatttcaggctccaagagctctcagttgctctcaagtaggactgattcatccaacaaaatattcagctgggttatctctctccactttcaccacctcttattcagtaaaaaaaaaaagaaaaaaaaraaaaaaaaaaggcagtgttgtctgtaatttaatagcatttaaaatcactatgctggataaaacatagctaatattgttgtcagaacaatatargttcaaaggctttcctcttgcagtttgtttgtagacagaaaattgcaaaggcttttctttttttcacttgctatcaaagaattatttctttgaagctactttcaatttgtaccatagcttccccttgtactttaaaagaaagatcctgtttcaccttctagcattataaggttttgcaaatgtttgctttcttcwtttttgtccccc

SEQ ID NO: 57437 - DNA, 600 bp, Chicken  19866894313376_4
tgcttttaacacactttcttcctgactactgtgaaacctagcaagtaacaagtatccacgccatttggtagagattattgtatttcaggctccaagagctctcagttgctctcaagtaggactgattcatccaacaaaatattcagctgggttatctctctccactttcaccacctcttattcagtaaaaaaaaaaagaaaaaaaaraaaaaaaaaaggcagtgttgtctgtaatttaatagcatttaaaatcactatgctggataaaacatagctaatattgttgtcagaacaatatargttcaaaggctttcctcttgcagtttgtttgtagacagaaaattgcaaaggcttttctttttttcacttgctatcaaagaattatttctttgaagctactttcaatttgtaccatagcttccccttgtactttaaaagaaagatcctgtttcaccttctagcattataaggttttgcaaatgtttgctttcttcwtttttgtccccctctaaaaactattttatgaaacttcctcctgaaataagtaacagacgttgactacaaaagctcttttaattataaatcaaataatcatataaa

SEQ ID NO: 57438 - DNA, 600 bp, Chicken  19866894313376_5
aagaaaaaaaaraaaaaaaaaaggcagtgttgtctgtaatttaatagcatttaaaatcactatgctggataaaacatagctaatattgttgtcagaacaatatargttcaaaggctttcctcttgcagtttgtttgtagacagaaaattgcaaaggcttttctttttttcacttgctatcaaagaattatttctttgaagctactttcaatttgtaccatagcttccccttgtactttaaaagaaagatcctgtttcaccttctagcattataaggttttgcaaatgtttgctttcttcwtttttgtccccctctaaaaactattttatgaaacttcctcctgaaataagtaacagacgttgactacaaaagctcttttaattataaatcaaataatcatataaatatattttaatgacttgaaaccagggaaaccgtgctcataaagctaagcttgtatgcaaatcttcatagcactagtcattaacaaggataaataagtactttttgttaaacattggggtacaatacgaacatcattggaactgtcttctttaattggagctaaagataccttgtgtagtttgccatatcatcaaa

SEQ ID NO: 57439 - DNA, 599 bp, Chicken  19866894313377_1
  misc_feature (1)..(143): n is any nucleotide
nnnnnnnnnnnnnnnnnnnnnnnnnnnnnnnnnnnnnnnnnnnnnnnnnnnnnnnnnnnnnnnnnnnnnnnnnnnnnnnnnnnnnnnnnnnnnnnnnnnnnnnnnnnnnnnnnnnnnnnnnnnnnnnnnnnnnnnnnnnnnnntttctccctgcttttcccccttttccagtccattttcagcaataaactacatatctgcatgtatatgtattcaaatgatttggaaagttttctggaatataaaaaataaaagcatgatcttcatctctattagacttgtaccaagtagaagtaattmatttgaagtggttgttctgagtggtaggtaaggttggaaatggcacactgtgtgtctacagcatacaaactgtagagctgctgcatttgtgactgggaagcaaaaagggtgatgaatggcataagcaattcaaaacagagatttagctttattagaaagttttcagcctgtggtagggcaaaccgtttttcacaaatgattgataatctgttttaatttttaaagactggtgaatgtacatgatgttgaagcttctttcagtattaggaaagattcctaagaaggaatcttcattattc

SEQ ID NO: 57440 - DNA, 600 bp, Chicken  19866894313377_2
ttgaagcttctttcagtattaggaaagattcctaagaaggaatcttcattattcaaaaactatatccctttttcacttttatgcttttatattctgttgtatcttgtgacagtgaattccacaattgtttggcagcaaaaggcattttgtactataaataataatatgaagcctttgattctttcttttgaaatgagtactcagtaaccagcaccagggatcattatcaggccagccaggttgctggcagcagggcaaagatcagtctcaataatgaaaataaaataaaaacagaaaaarccctacagtttcctaggcagaatattccagtgtcataatccagtgaactgtaagcatgtatgactatgcctgacctataagaggcaattagaatactcaattgcttgctccagctagtaattattgagcattcccttttaataacttatacagtggactgcttttggggcagaaggattattatccacacatcaatagcttaattccagagagagaagtaatgtttgtttttctcactctggataaattgtgcttaaagtgcttgggtacagctccctcccccagagcctgagaatattt

SEQ ID NO: 57441 - DNA, 600 bp, Chicken  19866894313381_1
aaacacatgttgctctgtcactattaatacactgggagtgtgaatggcatatgcatgtttgtttgcgtggggagcataaattatggagttcctgggtctgcagtcatcaccttgcagctacagtaaggtttctggggaaagcagggcatttggtctaggcataaaacagcaccagggcctgccagccacagtgacacatgtgagtgccaaatcagcacagcatccagctgaaggtttcaacgctccagtgacccagagggttcaccaactagggaagaaaacagacaaatcacgtcgccyccagacggcccgagtgaagtaatcctgccatcgacagcttcttcctgcattgctgcgtggaccagctgcttcctccctgcactgttaagtacaaggcaggagctgtttattgttttgagtgcaagactgaaaaactgcaagccaaaccgatttcctgggaagggaaaagaggagaaatacagtcaaacagttcctctacaaagcgctggctctctgtttaccatagcaaagacgtatcccatgtggtcaacagcagttgggtgatgtccctacatctgtattttacctgtgaagccatgc

SEQ ID NO: 57442 - DNA, 600 bp, Chicken  19866894313381_2
acagtcaaacagttcctctacaaagcgctggctctctgtttaccatagcaaagacgtatcccatgtggtcaacagcagttgggtgatgtccctacatctgtattttacctgtgaagccatgcagagcagaaaaataaggtctgctctgcagcaagaaagaaggagtactgactgaactcatggagagaaatcagggtacctgcacaaggcccaaaatgccattccctttcagcctgaccacacagctgctgcatgcacccgagccacacgtgctcacagcagatgagagaagggaagagrtgatatataaagtgaagtgctctgtgctcatttatttcaggacctctcagttttgtatgcagatgagaggaaacggtcgccccgaaacctttcccttacagctggaagatctctagaaggtgagaagggtgtagtttcaaacttccctgtgatcttatcagcttgtgttttcattgatgagacttcactgctcctgccacatgaaagagctggctgagtactgcagagcaaaaatagaaaacacgaggcagctagcactagtttttttcccctgaattcatacagctgtgctacaaatct

SEQ ID NO: 57443 - DNA, 501 bp, Chicken  19866894313381_3
ttgtgttttcattgatgagacttcactgctcctgccacatgaaagagctggctgagtactgcagagcaaaaatagaaaacacgaggcagctagcactagtttttttcccctgaattcatacagctgtgctacaaatctataccttctctaaattactggtgaaagagaaagattacccaaagtatatgcactcgccctagaccaagtgcacagggaccagagagcacaagccagaacaacaagcctgcatcctctacatctgtggagaaaatattaataaagcaaaccaaaaagaaaaamaaaacctttgctgacagcttaagggaagaaggactagctttttattgccccaaaggggttgtgtctgtgcttggtgaaaccatggccattagcaacagagagtaaatgtaggaagtgttaccacccatgatatcctttgcagccactggggagtccagacctcacacagggggttgcgttttctctgcacagagctccagt

SEQ ID NO: 57444 - DNA, 600 bp, Chicken  19866894313384_1
gatgaacacattcagagcctattaatgtcaatgagagttatgcttacatggcagagagagcagatctttttgttgtgcatgtccagagtctgactcatggcctcaatgcctatgccttgcaaatgatgacaagctaacaaggatttactttgtgcagtgtatttctacaaaagtcatcttttaaatagcataatgaattaataaatatttacttaatagcttctacattatttatttcttagcttctattttatagtcttctaggatagaaagatagaaatatttactcactcctcatgyatgcagtttattctagccagagctggagccagctctattcattgtgctgcctttcagctaaatgctgacattaggaaaggaaattaattgttgataaacttaggtgtgtgatttaaaaaaaaaaaaaagaaccacatactcctgcccccattttactacaaaccctctgctcccactcctgtctcctctgccaatgtgtgggggtgtatgtgtatgtaaaaattagactacctcaagctcattactgtccattgacagagwcctgttgtaaaaacttttgatgaatagtcagcatctaat

SEQ ID NO: 57445 - DNA, 600 bp, Chicken  19866894313384_2
taggatagaaagatagaaatatttactcactcctcatgyatgcagtttattctagccagagctggagccagctctattcattgtgctgcctttcagctaaatgctgacattaggaaaggaaattaattgttgataaacttaggtgtgtgatttaaaaaaaaaaaaaagaaccacatactcctgcccccattttactacaaaccctctgctcccactcctgtctcctctgccaatgtgtgggggtgtatgtgtatgtaaaaattagactacctcaagctcattactgtccattgacagagwcctgttgtaaaaacttttgatgaatagtcagcatctaattcctgagtaataaaaaaamcaaccaaaagttacttgcaatcattattccaaatggaaaaattaattgtaaataactggaagtcaattaaagctgggttctgccgggtaatgcaaatcttttatagttttgtttcagttaactgcctcattaatgatttatagatgtgtatacagctgtgggaaccatagcattatctaatgcactcagagaataattacatatgaaaagaactacgcagctcaagggaaaaactcagaaat

SEQ ID NO: 57446 - DNA, 583 bp, Chicken  19866894313384_3
gagctggagccagctctattcattgtgctgcctttcagctaaatgctgacattaggaaaggaaattaattgttgataaacttaggtgtgtgatttaaaaaaaaaaaaaagaaccacatactcctgcccccattttactacaaaccctctgctcccactcctgtctcctctgccaatgtgtgggggtgtatgtgtatgtaaaaattagactacctcaagctcattactgtccattgacagagwcctgttgtaaaaacttttgatgaatagtcagcatctaattcctgagtaataaaaaaamcaaccaaaagttacttgcaatcattattccaaatggaaaaattaattgtaaataactggaagtcaattaaagctgggttctgccgggtaatgcaaatcttttatagttttgtttcagttaactgcctcattaatgatttatagatgtgtatacagctgtgggaaccatagcattatctaatgcactcagagaataattacatatgaaaagaactacgcagctcaagggaaaaactcagaaattacttactgcctgaacttcaaccatattaagatgcaaagta

SEQ ID NO: 57447 - DNA, 436 bp, Chicken  19866894313387_1
acccaatttttgctggtgcaaaagagacttgcgtgggctgggagttttggggagtgactgatgtacctgtcaagcaggatagataaatacactgctaatgatacgcacacagaaatacctccctggcagctgcttgccttgccttgggaagccttcatgctgcagggtgcaggagaagttggtctgtgggattgaggcttcgcaagcttatccagtgcatgcagatggctgaacagggacagggagttgggttagcagctggagagccctccaggaccatgcagtgttcccagagttcakcttcagatgaggactaagcaaagcatttcccaggccatgttagatgtggcatggctcaatgccatcagtctccttgcaacctctcagcagctttttctgtctttccagaaggaatttttcccatggtgcctgatgt

SEQ ID NO: 57448 - DNA, 599 bp, Chicken  19866894313395_1
  misc_feature (1)..(16): n is any nucleotide
nnnnnnnnnnnnnnnntgaaaatactgtagcaattggacagatcaaccccaatgggaaaggtgttacaacaggggtgcaatgatggaaggaccagaaccaatagaaagatgctataagggaagagaagaagatcgctcacctgtatcagaagatttcaggatcacaagggaaagctgcatcaaggagggatccccagaaaaagattcttccccagcagtagtcagcccttaaatgggggtctaagagaggtgcagccaggctccaccctttggccacagctgaattgctttcacctgtgytcccagggctgactcgatcctttccacaggtgttcaatcagttgttcaggccatgactcaacagttcccacacaaatgtaacaaccaaaagaraaatattcatattaattgaaatacagygattagagaaacatgaccatctttaaaggatatttaaaacagaacttcacttkgatattaaaagkattaggtatttatttcataatgatcagttctcacgactaggaaatattttacaagatgcaagacaaatatcctatttagttaaggataaaaacacatgcagtgttgatcctacc

SEQ ID NO: 57449 - DNA, 600 bp, Chicken  19866894313395_2
agaaccaatagaaagatgctataagggaagagaagaagatcgctcacctgtatcagaagatttcaggatcacaagggaaagctgcatcaaggagggatccccagaaaaagattcttccccagcagtagtcagcccttaaatgggggtctaagagaggtgcagccaggctccaccctttggccacagctgaattgctttcacctgtgytcccagggctgactcgatcctttccacaggtgttcaatcagttgttcaggccatgactcaacagttcccacacaaatgtaacaaccaaaagaraaatattcatattaattgaaatacagygattagagaaacatgaccatctttaaaggatatttaaaacagaacttcacttkgatattaaaagkattaggtatttatttcataatgatcagttctcacgactaggaaatattttacaagatgcaagacaaatatcctatttagttaaggataaaaacacatgcagtgttgatcctacctagtaggtaaactttatttaagagaaggatctctctttctcaggcacaatgtgtgctccctaaaatattttgcaatacattacgtgtaatctga

SEQ ID NO: 57450 - DNA, 600 bp, Chicken  19866894313395_3
aagagaagaagatcgctcacctgtatcagaagatttcaggatcacaagggaaagctgcatcaaggagggatccccagaaaaagattcttccccagcagtagtcagcccttaaatgggggtctaagagaggtgcagccaggctccaccctttggccacagctgaattgctttcacctgtgytcccagggctgactcgatcctttccacaggtgttcaatcagttgttcaggccatgactcaacagttcccacacaaatgtaacaaccaaaagaraaatattcatattaattgaaatacagygattagagaaacatgaccatctttaaaggatatttaaaacagaacttcacttkgatattaaaagkattaggtatttatttcataatgatcagttctcacgactaggaaatattttacaagatgcaagacaaatatcctatttagttaaggataaaaacacatgcagtgttgatcctacctagtaggtaaactttatttaagagaaggatctctctttctcaggcacaatgtgtgctccctaaaatattttgcaatacattacgtgtaatctgaygctcacagaagaagctttttaaccaa

SEQ ID NO: 57451 - DNA, 600 bp, Chicken  19866894313395_4
gctgcatcaaggagggatccccagaaaaagattcttccccagcagtagtcagcccttaaatgggggtctaagagaggtgcagccaggctccaccctttggccacagctgaattgctttcacctgtgytcccagggctgactcgatcctttccacaggtgttcaatcagttgttcaggccatgactcaacagttcccacacaaatgtaacaaccaaaagaraaatattcatattaattgaaatacagygattagagaaacatgaccatctttaaaggatatttaaaacagaacttcacttkgatattaaaagkattaggtatttatttcataatgatcagttctcacgactaggaaatattttacaagatgcaagacaaatatcctatttagttaaggataaaaacacatgcagtgttgatcctacctagtaggtaaactttatttaagagaaggatctctctttctcaggcacaatgtgtgctccctaaaatattttgcaatacattacgtgtaatctgaygctcacagaagaagctttttaaccaagtaattaacttccaacaaaataccttgctaatcctagccttgctttaaatcaa

SEQ ID NO: 57452 - DNA, 600 bp, Chicken  19866894313395_5
agggatccccagaaaaagattcttccccagcagtagtcagcccttaaatgggggtctaagagaggtgcagccaggctccaccctttggccacagctgaattgctttcacctgtgytcccagggctgactcgatcctttccacaggtgttcaatcagttgttcaggccatgactcaacagttcccacacaaatgtaacaaccaaaagaraaatattcatattaattgaaatacagygattagagaaacatgaccatctttaaaggatatttaaaacagaacttcacttkgatattaaaagkattaggtatttatttcataatgatcagttctcacgactaggaaatattttacaagatgcaagacaaatatcctatttagttaaggataaaaacacatgcagtgttgatcctacctagtaggtaaactttatttaagagaaggatctctctttctcaggcacaatgtgtgctccctaaaatattttgcaatacattacgtgtaatctgaygctcacagaagaagctttttaaccaagtaattaacttccaacaaaataccttgctaatcctagccttgctttaaatcaagtattacagttt

SEQ ID NO: 57453 - DNA, 600 bp, Chicken  19866894313395_6
aatattcatattaattgaaatacagygattagagaaacatgaccatctttaaaggatatttaaaacagaacttcacttkgatattaaaagkattaggtatttatttcataatgatcagttctcacgactaggaaatattttacaagatgcaagacaaatatcctatttagttaaggataaaaacacatgcagtgttgatcctacctagtaggtaaactttatttaagagaaggatctctctttctcaggcacaatgtgtgctccctaaaatattttgcaatacattacgtgtaatctgaygctcacagaagaagctttttaaccaagtaattaacttccaacaaaataccttgctaatcctagccttgctttaaatcaagtattacagttttaaaaaaagacctgctaatagaaaattgagtgagctttgtttcgctttaatgcagaacaatagtgggatgactatcaggtatttacaaagcacagattcatcccttctgtaaccgaatgcagataaccacttaggccctccagttacttcttacatgaaatatcagtataaaaaaaaaaccctctaagcatacagacacatcaaagtct

SEQ ID NO: 57454 - DNA, 600 bp, Chicken  19866894313395_7
ctgtaaccgaatgcagataaccacttaggccctccagttacttcttacatgaaatatcagtataaaaaaaaaaccctctaagcatacagacacatcaaagtctttaacatactgtgttctaatttcacttgctacaacgaagcataaagtacctaagaactaataaaggatagtacagctatttgggttattattaacagtttctgttaaaagcaaacaagattttgcataatggagcacaaatagcctgcaacaactcttttacatgtgaaatgatactaagtcactggaaatgagaakgtcccaccatgaagtagcaaatgaaaacaaattcaaatgggaaggcagactttaaaaagcagattttaaaccaagctcgtccttcatgaaacaaacacatcaaggagctacatcagagacaacctcagagcaatttctcactcaactttccacaaatgttcacgttgtacttcccccctcccactcccagaaggcagaaagcacaaaaggaatatttctgaaagctggaaattgtagcgtgacaagaattccttatctcagtccakcccatagtggagtgtgttaaagtgatggatgaga

SEQ ID NO: 57455 - DNA, 600 bp, Chicken  19866894313395_8
tgtgaaatgatactaagtcactggaaatgagaakgtcccaccatgaagtagcaaatgaaaacaaattcaaatgggaaggcagactttaaaaagcagattttaaaccaagctcgtccttcatgaaacaaacacatcaaggagctacatcagagacaacctcagagcaatttctcactcaactttccacaaatgttcacgttgtacttcccccctcccactcccagaaggcagaaagcacaaaaggaatatttctgaaagctggaaattgtagcgtgacaagaattccttatctcagtccakcccatagtggagtgtgttaaagtgatggatgagaattcactttctacatttcctctgttagcattcacaacactccctatcagaactgaaacacacacagctgtgctcactttgattgaaacaggactaagttgaagacaatcccatggtaatagcacactttaaaatacatacttatgtatttttatactcacactttctaagctacttcagtgtaattaagacaataggggaagttaactatttgatcctctaacaacctctccctccttcccccccccccttttttttttttcttaa

SEQ ID NO: 57456 - DNA, 600 bp, Chicken  19866894313404_1
agacacctcatatgcatcttccatctcagtattttacacaagaatcatcacctcttcaggccattgcagtgaaaacagcatcattcatatcacagattttgacaccataaattgatttttagcaaaggctttctgtagcaaccattatttgtgtgaaaagcaaaatcctgttactgtgtgatgccaatagcctcctgagagatgctgagtgctgtcatttcccattatgctcagtggcaattgattagttcagagctttctggaggtgttcatacccctctgcccaaactggtaacattktcaccttactcaaaccaccatgttgagatttcttagaaacgcagactgcagactaagctaggaggatttgttggtgatcagagtgccatttggtagaggtattgtagagcaaagcctctgaattataatttgtgtttggtaagctgaacagatgtgtgcctatgtatctgtggtaactcgaaagcagggaataaaattcaaaaccagaaggatatctggagtaaggaaaatattatgtgtgaattcaaatacttctctgtttaactattcagattgtctcaaacctttcagacaaaacat

SEQ ID NO: 57457 - DNA, 523 bp, Chicken  19866894313410_1
gtgctgggtgctcaggctgaaggtctcagggtggtgcatctcagctggccatgcccaaatggtcacgctcaggggatttctagaggaagcagtcacatgaggtcctggccatgtgatgccagatggcagaactgaacccctaaagtcccctcgctgctgttcttggacttcatcaccccataaagagctgggagggttcaaggcaagggggaattgctcaagggcagtcggggacattaggaaagtacccgctgtctctgtgagcagagcttgcaacatccatcatcttcccttcatgcrcgttcatggaggctgtgaggatcaaaacagtagtgggagctggcaagctgaatatcttggggattttagagcccaggaattatagcaatcttctgtggaggtggttacttttgtgtctaacctctgatccaagacgaaaggtctgattttcagaacgtgctggaagtgcagattgcagtgccaacacagcaacctggaggctgtgatgtgcatggtgttagca

SEQ ID NO: 57458 - DNA, 400 bp, Chicken  19866894313415_1
aagtgacctctggagatcatctagttcaacctgcctgcttaagcaggttccctaaagtacattgcagagaaaagcatccagatgggttttataatatctccaaagaaggaggctctactatctctctagacagcttattccagtgctctgtcatcctcaaagtaaaaaagtttttcctcatgttaagatggagcttctcatgttccagtttgtacctgttgctccttgtcttgtcactgagcaccactaaaaagagcctggcctcattcccttgacacctgccctttagatacttataarcattgmtaagatcccctctcagtcttctctccttcagactaaacaatcccaagtctctcagacttcttcttcctttgttttttttttttttttttttttt

SEQ ID NO: 57459 - DNA, 394 bp, Chicken  19866894313415_2
cctctggagatcatctagttcaacctgcctgcttaagcaggttccctaaagtacattgcagagaaaagcatccagatgggttttataatatctccaaagaaggaggctctactatctctctagacagcttattccagtgctctgtcatcctcaaagtaaaaaagtttttcctcatgttaagatggagcttctcatgttccagtttgtacctgttgctccttgtcttgtcactgagcaccactaaaaagagcctggcctcattcccttgacacctgccctttagatacttataarcattgmtaagatcccctctcagtcttctctccttcagactaaacaatcccaagtctctcagacttcttcttcctttgttttttttttttttttttttttt

SEQ ID NO: 57460 - DNA, 600 bp, Chicken  19866894313417_1
gtggggatgggaggggttccaaatgctgctctaaacgtgtccaacgtgagtaatgtgccacttctgccaaggctgagaacacagactgtgcatttttggcagcctctcatggccattgagcacagagcaagggcaggtccctgtttaccttttttctggcatcaccaggagaggagtatgaccaaagaactccgtgtggtctttaacctctgtgaaagacgcttaaagccaactgactcggagtggctgcggacctccctttctccctccgtagaatccaatggcaaaatgttgaatgtraaaactaattaaactactcctcaaagggcacgtgctgcaaggggttgggattgtcattcaagatggccctgaagcactgctgccatgacttgtcagcttggagatgcttgtgccccaaagaggcttttatcacagccttgtgcgttctgcaaaggtccttctgttcgaatatttactgctggagataagcttgcaagcctgcacttaacttctttatgcatagctcaatggggttcctatgcccttggtagcagccagaccaaaatgttcagtttacttgctgttaggtctcactttgtc

SEQ ID NO: 57461 - DNA, 599 bp, Chicken  19866894313424_1
  misc_feature (1)..(43): n is any nucleotide
nnnnnnnnnnnnnnnnnnnnnnnnnnnnnnnnnnnnnnnnnnnaatttatggcacataagttttaatagcagctctactgtaatgtagctacaaatggcctcagccttattatttgagccacaaactccttcagtacaggactacccacaacagaagtgagaagggcaggcagggcatgtaggtcggtacaaaagaaactggatatacaggaaaaagacattcacatgcatgaacgtagttaaataaacaaacagtccgaacttgagagaaacccaacatccaaccccctgcaatgagcrgggacaactacagctccatcaggtgctcagaaccccatccagcctgaccctgggtgtctgcagggatggggcatccaccacctctctgggcaacacgtcccggggcctcagcattctcgctgtaaaagagtttttccttatatccaacctaaacytaccatcttctgatttgaaaccatttccccttgtcctgtcaccacagaccctgctacagagtctgtctactttcttacagcccctttagatactgacaggccactctcaggtctccccacagccttctcttctccaggctgcgc

SEQ ID NO: 57462 - DNA, 600 bp, Chicken  19866894313424_2
agtgagaagggcaggcagggcatgtaggtcggtacaaaagaaactggatatacaggaaaaagacattcacatgcatgaacgtagttaaataaacaaacagtccgaacttgagagaaacccaacatccaaccccctgcaatgagcrgggacaactacagctccatcaggtgctcagaaccccatccagcctgaccctgggtgtctgcagggatggggcatccaccacctctctgggcaacacgtcccggggcctcagcattctcgctgtaaaagagtttttccttatatccaacctaaacytaccatcttctgatttgaaaccatttccccttgtcctgtcaccacagaccctgctacagagtctgtctactttcttacagcccctttagatactgacaggccactctcaggtctccccacagccttctcttctccaggctgcgcagccccagctctcagcctgtccttgcaggagaggtgttctacccattgggtcttcctctggatatgctccaaaaggtccacgtctctcctgtactgaggactccacagtagtttcaatttaaatctacgctgaaataaaccatcatcgtatctaag

SEQ ID NO: 57463 - DNA, 600 bp, Chicken  19866894313425_1
ttccagactgcccctctgctgccatttgtcacatggcaacagaatgttatgaggtatttgtgggaagcttcaacttctattgccataccaccaacatttgcctctgatgtcatgggccaatataatagaataggaggcattatttttggagcagcccttgtagatcaagtccccagctgtaagaagtgcctgttggtgttttccctttatgataactaaaagtcaaggtccttagtatgtgaaaggcccaggagatggatctgcagaagtggataggagcttgttgcttaagcttagaaygttgttgcttaagcttagaatatgtttttctggaagatttcttacatctcttttttaaatagaaatgatcagcgtgggtgtctaaatagaagaatgggatctttatattaaaaaaaaaaaaaakaggacattttggacttgaacatcattcaaattattgacatctgcttagggaggaaaaatggattgttaatgtaaaaattaattgatatctctggcaataattggaccttaattagcatagaaagtagccatgggagtattagcctcaccagatgcttgctcgcttaagctagaatt

SEQ ID NO: 57464 - DNA, 600 bp, Chicken  19866894313425_2; identical to SEQ ID NO: 57463

SEQ ID NO: 57465 - DNA, 600 bp, Chicken  19866894313425_3
tcatgggccaatataatagaataggaggcattatttttggagcagcccttgtagatcaagtccccagctgtaagaagtgcctgttggtgttttccctttatgataactaaaagtcaaggtccttagtatgtgaaaggcccaggagatggatctgcagaagtggataggagcttgttgcttaagcttagaatgttgttgcttaagcttagaatatgtttttctggaagatttcttacatctcttttttaaatagaaatgatcagcgtgggtgtctaaatagaagaatgggatctttatatyaaaaaaaaaaaaaakaggacattttggacttgaacatcattcaaattattgacatctgcttagggaggaaaaatggattgttaatgtaaaaattaattgatatctctggcaataattggaccttaattagcatagaaagtagccatgggagtattagcctcaccagatgcttgctcgcttaagctagaattcttaaatcattcttggaaatcaaggaggtgggtggtgagggggaaatctgtcactttaactcacccttggatatacttaacaggttttactgttgtgagttacttctaa

SEQ ID NO: 57466 - DNA, 600 bp, Chicken  19866894313425_4
catgggccaatataatagaataggaggcattatttttggagcagcccttgtagatcaagtccccagctgtaagaagtgcctgttggtgttttccctttatgataactaaaagtcaaggtccttagtatgtgaaaggcccaggagatggatctgcagaagtggataggagcttgttgcttaagcttagaatgttgttgcttaagcttagaatatgtttttctggaagatttcttacatctcttttttaaatagaaatgatcagcgtgggtgtctaaatagaagaatgggatctttatattyaaaaaaaaaaaaakaggacattttggacttgaacatcattcaaattattgacatctgcttagggaggaaaaatggattgttaatgtaaaaattaattgatatctctggcaataattggaccttaattagcatagaaagtagccatgggagtattagcctcaccagatgcttgctcgcttaagctagaattcttaaatcattcttggaaatcaaggaggtgggtggtgagggggaaatctgtcactttaactcacccttggatatacttaacaggttttactgttgtgagttacttctaaa

SEQ ID NO: 57467 - DNA, 600 bp, Chicken  19866894313425_5
atgggccaatataatagaataggaggcattatttttggagcagcccttgtagatcaagtccccagctgtaagaagtgcctgttggtgttttccctttatgataactaaaagtcaaggtccttagtatgtgaaaggcccaggagatggatctgcagaagtggataggagcttgttgcttaagcttagaatgttgttgcttaagcttagaatatgtttttctggaagatttcttacatctcttttttaaatagaaatgatcagcgtgggtgtctaaatagaagaatgggatctttatattayaaaaaaaaaaaakaggacattttggacttgaacatcattcaaattattgacatctgcttagggaggaaaaatggattgttaatgtaaaaattaattgatatctctggcaataattggaccttaattagcatagaaagtagccatgggagtattagcctcaccagatgcttgctcgcttaagctagaattcttaaatcattcttggaaatcaaggaggtgggtggtgagggggaaatctgtcactttaactcacccttggatatacttaacaggttttactgttgtgagttacttctaaaa

SEQ ID NO: 57468 - DNA, 600 bp, Chicken  19866894313425_6
tgggccaatataatagaataggaggcattatttttggagcagcccttgtagatcaagtccccagctgtaagaagtgcctgttggtgttttccctttatgataactaaaagtcaaggtccttagtatgtgaaaggcccaggagatggatctgcagaagtggataggagcttgttgcttaagcttagaatgttgttgcttaagcttagaatatgtttttctggaagatttcttacatctcttttttaaatagaaatgatcagcgtgggtgtctaaatagaagaatgggatctttatattaayaaaaaaaaaaakaggacattttggacttgaacatcattcaaattattgacatctgcttagggaggaaaaatggattgttaatgtaaaaattaattgatatctctggcaataattggaccttaattagcatagaaagtagccatgggagtattagcctcaccagatgcttgctcgcttaagctagaattcttaaatcattcttggaaatcaaggaggtgggtggtgagggggaaatctgtcactttaactcacccttggatatacttaacaggttttactgttgtgagttacttctaaaag

SEQ ID NO: 57469 - DNA, 600 bp, Chicken  19866894313425_7
atagaataggaggcattatttttggagcagcccttgtagatcaagtccccagctgtaagaagtgcctgttggtgttttccctttatgataactaaaagtcaaggtccttagtatgtgaaaggcccaggagatggatctgcagaagtggataggagcttgttgcttaagcttagaatgttgttgcttaagcttagaatatgtttttctggaagatttcttacatctcttttttaaatagaaatgatcagcgtgggtgtctaaatagaagaatgggatctttatattaaaaaaaaaaaaaakaggacattttggacttgaacatcattcaaattattgacatctgcttagggaggaaaaatggattgttaatgtaaaaattaattgatatctctggcaataattggaccttaattagcatagaaagtagccatgggagtattagcctcaccagatgcttgctcgcttaagctagaattcttaaatcattcttggaaatcaaggaggtgggtggtgagggggaaatctgtcactttaactcacccttggatatacttaacaggttttactgttgtgagttacttctaaaagaccaaatgatat

SEQ ID NO: 57470 - DNA, 599 bp, Chicken  19866894313426_1
  misc_feature (1)..(76): n is any nucleotide
nnnnnnnnnnnnnnnnnnnnnnnnnnnnnnnnnnnnnnnnnnnnnnnnnnnnnnnnnnnnnnnnnnnnnnnnnnnnctttgggatcacctcatgtgtaactcttgatgttataaacacaacatctcacgccggtgttgcagcagcccagtgctcagggtgagaaggaacagcccgggctcaccctgcccagcagaaccgtgtgctgtggggcagcagcaggcgcagctgtggcagatccttgctgcaaatgttacagggatttccagatgagaattaatggactttccttggctagcatygaagaaaacattctacgtgcggttgtttattatttctgttacagtcactgtgcttgcttattgcttccatctgttggcatcacactattggctctggtctcatcgctgggacatgaacccttggcagcagggagcgtggtgtggtgagaggcagagcagcagtgcgggtgctcgcaggctgggatgcctcacagtctgtttcagagaggaactccggtacttcattcccagaggttgaattcgagaagaaatatgtttgatggcctgaagtattaaatgcataaatggttaccctttaa

SEQ ID NO: 57471 - DNA, 600 bp, Chicken  19866894313433_1
ttctctgcttccgtattgtcctcaatacattaatcacagtatttggggattttttttttttattgtcaagtattttgcaggtattttaaagtgaaaaacatcagtgacctattctttcccatactgatactgcccctaataaccttatactttattattaaatggcacctttttctggacgcacctttgtactgcaaggacttggcacaaacaaggattaatagtgaatttcctggagagaataagtgctcaggcaatagataagaggctatgataactatgtgagtacttaataaaaakaaataagcttggtttcaactgtggcagtcaatgagaaatatcatttcttstcttattatcatttttatggggctctaaattgtgaatggtgctttctgaataagtgacatgacaggttcctgtgatatcagacttgatttagcttggtaaggactataaactaaagaaattcatatagctatgatggtgaattggtaatgctgaatatacactattgtatggatcatgttgactcctttttcgctcttacatataatttatcaagtaacatatggagaaatatgaatgtggactgatgcc

SEQ ID NO: 57472 - DNA, 600 bp, Chicken  19866894313433_2
tttttttttttattgtcaagtattttgcaggtattttaaagtgaaaaacatcagtgacctattctttcccatactgatactgcccctaataaccttatactttattattaaatggcacctttttctggacgcacctttgtactgcaaggacttggcacaaacaaggattaatagtgaatttcctggagagaataagtgctcaggcaatagataagaggctatgataactatgtgagtacttaataaaaakaaataagcttggtttcaactgtggcagtcaatgagaaatatcatttcttstcttattatcatttttatggggctctaaattgtgaatggtgctttctgaataagtgacatgacaggttcctgtgatatcagacttgatttagcttggtaaggactataaactaaagaaattcatatagctatgatggtgaattggtaatgctgaatatacactattgtatggatcatgttgactcctttttcgctcttacatataatttatcaagtaacatatggagaaatatgaatgtggactgatgcccagcacagatctcattgctggaaagtgataagaagaaagtctccaagctg

SEQ ID NO: 57473 - DNA, 600 bp, Chicken  19866894313437_1
ctaattatgtactaattacatactctatactaatgccttaaacatatactgaaccaacgtgcaaaagttctggtccaagtagaagcaccattttgcaggagaaatgtgtacagatggtagagtgcccatcctgcattgtaacatcccccacattcattacagttgaaaatatggtaagcaatggaaaaatgaagaaaagtctaatttcacaaaaagcaaacaaaacaaaaacaaaaacaaaaaagaggctaaggtgtctctattaatacaaagtgtcagttgcctccctttgtcctcagmgtaacagaggtcttttggttgattcctgggagctgggagaataacaaccctgcactttattttcaagccacataatttcagatatactattttgtggctgcattacaaataccgagcatctgtatctccacccgattcacaaaygctgccaartacttaaatgtgctcatgtatgaaagaccgcagtccttttaagttcatatctgaagggaagatttcagcatacaaatgtaatgactccatagaaatgaaaggaataatatgatctacatagtggcagctcagaaaagaaggactgta

SEQ ID NO: 57474 - DNA, 600 bp, Chicken  19866894313437_2
cccccacattcattacagttgaaaatatggtaagcaatggaaaaatgaagaaaagtctaatttcacaaaaagcaaacaaaacaaaaacaaaaacaaaaaagaggctaaggtgtctctattaatacaaagtgtcagttgcctccctttgtcctcagmgtaacagaggtcttttggttgattcctgggagctgggagaataacaaccctgcactttattttcaagccacataatttcagatatactattttgtggctgcattacaaataccgagcatctgtatctccacccgattcacaaaygctgccaartacttaaatgtgctcatgtatgaaagaccgcagtccttttaagttcatatctgaagggaagatttcagcatacaaatgtaatgactccatagaaatgaaaggaataatatgatctacatagtggcagctcagaaaagaaggactgtatctctgactgttacaaaattcaaagtagatatttaacagtcttgaatkgggattgtacctgtaatattccctggtttgatgatgatgtacatactgcaatatttgtcataacatttgataggcaccgagaagagggaacastgc

SEQ ID NO: 57475 - DNA, 600 bp, Chicken  19866894313437_3
tcattacagttgaaaatatggtaagcaatggaaaaatgaagaaaagtctaatttcacaaaaagcaaacaaaacaaaaacaaaaacaaaaaagaggctaaggtgtctctattaatacaaagtgtcagttgcctccctttgtcctcagmgtaacagaggtcttttggttgattcctgggagctgggagaataacaaccctgcactttattttcaagccacataatttcagatatactattttgtggctgcattacaaataccgagcatctgtatctccacccgattcacaaaygctgccaartacttaaatgtgctcatgtatgaaagaccgcagtccttttaagttcatatctgaagggaagatttcagcatacaaatgtaatgactccatagaaatgaaaggaataatatgatctacatagtggcagctcagaaaagaaggactgtatctctgactgttacaaaattcaaagtagatatttaacagtcttgaatkgggattgtacctgtaatattccctggtttgatgatgatgtacatactgcaatatttgtcataacatttgataggcaccgagaagagggaacastgcagaacagca

SEQ ID NO: 57476 - DNA, 600 bp, Chicken  19866894313437_4
cctgcactttattttcaagccacataatttcagatatactattttgtggctgcattacaaataccgagcatctgtatctccacccgattcacaaaygctgccaartacttaaatgtgctcatgtatgaaagaccgcagtccttttaagttcatatctgaagggaagatttcagcatacaaatgtaatgactccatagaaatgaaaggaataatatgatctacatagtggcagctcagaaaagaaggactgtatctctgactgttacaaaattcaaagtagatatttaacagtcttgaatkgggattgtacctgtaatattccctggtttgatgatgatgtacatactgcaatatttgtcataacatttgataggcaccgagaagagggaacastgcagaacagcaaagcactattattattgctccaattttacatcaaattccacgtagttttctctaaaagaagaacatgcaagacctaaaaatagtgttgaaaagtaggagtaagggatgtctacatagttcttaaactctcctgagtacattaatgcttaacaggaaaggaaggccaccatcgtcttaaagtttcttaatcatcct

SEQ ID NO: 57477 - DNA, 600 bp, Chicken  19866894313437_5
aaygctgccaartacttaaatgtgctcatgtatgaaagaccgcagtccttttaagttcatatctgaagggaagatttcagcatacaaatgtaatgactccatagaaatgaaaggaataatatgatctacatagtggcagctcagaaaagaaggactgtatctctgactgttacaaaattcaaagtagatatttaacagtcttgaatkgggattgtacctgtaatattccctggtttgatgatgatgtacatactgcaatatttgtcataacatttgataggcaccgagaagagggaacastgcagaacagcaaagcactattattattgctccaattttacatcaaattccacgtagttttctctaaaagaagaacatgcaagacctaaaaatagtgttgaaaagtaggagtaagggatgtctacatagttcttaaactctcctgagtacattaatgcttaacaggaaaggaaggccaccatcgtcttaaagtttcttaatcatccttccagagctgagctatacagagagcaaagtctgaagattttgtcagtatttccatatttaaactacattctgtgtagtttaaaactttaagat

SEQ ID NO: 57478 - DNA, 600 bp, Chicken  19866894313438_1
aagtatgtacatgtttctgtggtttgaaaggctatcaacgtatttttgaagaacatgaacagttatgagtttgacttaaaaagaacaagggaaaaccatagcaccgaatatctccattgctaagtgatagtggctaaggtctcccctactctaaaatgcatcacaaacaagatgatcattttaggaaaacagaaacgcagacccttaaacatgcacctcacataaatatataatataaaaaagaatgataccatctacatgaggagctcaataaacttaaactctgaaactctcaaaacrtctgcgttcagagtcacaatcaaactttagggctctgaaatattgctgaatagtaaggcaaagtcacaactgccttgaaccccaaatacttctcctattattctagtatttctaagttttatataaattaatgataattgaatctcaggttcatggtctggtaccttactgtacctttagagaggctattaccgtggtgataagattgcttaaattaagctgtctttttcacagtgcttggctcattgccagtgcattgaagggagatttcagtccattcagcacagcattaaccttact

SEQ ID NO: 57479 - DNA, 600 bp, Chicken  19866894313446_1
cagaatcattctttcatcaggacagtgccggacacgtcagacacgcttcgctctattctcataatcctgtacagcattgacctagctgggggtactcttggtgtcattgtgatgtctcaccagttgtttcaaagaagatcccaatctgcgatgattgttatcataatcaacctcctagtgctgcacacctttctgttactcagcatccccttccgcctcagctattacattttaaaggaatggaaatttggggcattcacttgcaagctagtaagtgccaccatctacctccatatgtayatcaccttcaccttttatgttgctatcatcataatacgtctcttccgacttgagttcaacaagtgctacactacaatttgggtgacggctgtatggatgctaggagcactggtgattgctcctgtttttctctcttactatggcacctctagaatatacccttcctctcaatgctttcagttccagcaggagatggaagagacacccatggtggtagtaaactactgtctggttggagttctgctggcagtttgtggtttgctcactataatccagttatctgtgatgtgcagactgact

SEQ ID NO: 57480 - DNA, 600 bp, Chicken  19866894313448_1
ccacttttcctgagaacaaattcttccaaatatacaacctgaaatggagagccttccagacaagaaactgtggatggaccaggaggggagaataaaactttctcaaagtgatcttggccaacccttcctgagctgctccaacactaagtgcttctgcctcaagaagatgtatgtagggctgaaaccctaagggaaagcttcccgtttctcattctcctagaattatattaactctgaaattacttctactgcgatgatgtgatgggagaggaaggactgcattatgaaaatacaaaatartctatgtccattacagatcggttaataatgtatacggtgcctgcaacattcatacatctatagatttataattctgcttcaaaatgaggaacaaggataacattaatttttattactgtgtcaagagaaagaaattacttaaagggttttgctttaatattcttgtggcttgctaaaatctgaattacaccgaaagggcaaattttaaaatcaaaatgcttcctgggaaagaggtatcttgaagcactggactttttgtagtcagagagcagactgggattatgtgcaagaattacacct

SEQ ID NO: 57481 - DNA, 600 bp, Chicken  19866894313448_2
taataatgtatacggtgcctgcaacattcatacatctatagatttataattctgcttcaaaatgaggaacaaggataacattaatttttattactgtgtcaagagaaagaaattacttaaagggttttgctttaatattcttgtggcttgctaaaatctgaattacaccgaaagggcaaattttaaaatcaaaatgcttcctgggaaagaggtatcttgaagcactggactttttgtagtcagagagcagactgggattatgtgcaagaattacacctcctttctgagttttcctcagastttgttgtcctatttgtaaaaactgaaatttgcactgaacagccctgggggcactggcaacatttgctagcaatagacagcaactgaaatcagcctcctttcccacacagatgtgcatgcacttttttcaggagtggaaacgggaactgagatgttgtggaacgctcttttctaagagtttggccaggtgcttctgaattctttttttgacatcttgacctatgtttattttatggagaacgttaatgaaagccttcaaaccratccagatttttgctcgctcactacagccattcagag

SEQ ID NO: 57482 - DNA, 427 bp, Chicken  19866894313448_3
gcaagaattacacctcctttctgagttttcctcagastttgttgtcctatttgtaaaaactgaaatttgcactgaacagccctgggggcactggcaacatttgctagcaatagacagcaactgaaatcagcctcctttcccacacagatgtgcatgcacttttttcaggagtggaaacgggaactgagatgttgtggaacgctcttttctaagagtttggccaggtgcttctgaattctttttttgacatcttgacctatgtttattttatggagaacgttaatgaaagccttcaaaccratccagatttttgctcgctcactacagccattcagagcagacgccacagaggtgcattttgcaatgccttcaaagtttctctaaaaaagactctcagcagggagagagtaaaggcatggaatgagcc

SEQ ID NO: 57483 - DNA, 600 bp, Chicken  19866894313450_1
ctggagggacagcctggccctctcagaccgagcaaagacataggaaggcaggaggatggcacacgtacctctgggagctggctccaggtgacctgtgcgggccgatagctccgcaccacgatggcagcaccgggcagggacggctcctcggggatgggctcctccagcaaatcctcgtccgactcatggctgacggagttcagccctctctcacggatttcctggtacagccgtggctctgcgtggggagaggtgcagagtgagcacagcctcctgcagcccgcctcgccctgctgggayggactttgcacggcaccggccaagcagcagcttgcacgtccccagcagtgtttgctctgagcaaacagagccagggagcgttccagctgcaagtgcggctgcgccctccccagcaagcaggaatgcagtggcamacgtgcagcaaagggattggaaaagggggaacacacaacgacagcacagaggggaggccctgggatgagggcacgcagcactcacggtccttgaatgagcccgccgtgcttctgcacccgcttccgcccgagggttctctgcaggaggaagaagaggagctgccat

SEQ ID NO: 57484 - DNA, 530 bp, Chicken  19866894313450_2
cagggacggctcctcggggatgggctcctccagcaaatcctcgtccgactcatggctgacggagttcagccctctctcacggatttcctggtacagccgtggctctgcgtggggagaggtgcagagtgagcacagcctcctgcagcccgcctcgccctgctgggayggactttgcacggcaccggccaagcagcagcttgcacgtccccagcagtgtttgctctgagcaaacagagccagggagcgttccagctgcaagtgcggctgcgccctccccagcaagcaggaatgcagtggcamacgtgcagcaaagggattggaaaagggggaacacacaacgacagcacagaggggaggccctgggatgagggcacgcagcactcacggtccttgaatgagcccgccgtgcttctgcacccgcttccgcccgagggttctctgcaggaggaagaagaggagctgccatcgagctgccctgatggctgcagagctcacaccatgtgccccattgccaccagctgcgttcagtt

SEQ ID NO: 57485 - DNA, 599 bp, Chicken  19866894313452_1
  misc_feature (1)..(8): n is any nucleotide
nnnnnnnntttaaaaatgtggtatttttgaaaagcttttaagatttttttgtatctttttcttattttttttccctttgatattcaatattatcaaaagtgactggagtgacattaatggtagtgaaacagggtcttgaccttctccagaaggtccaaaacagcacttagagcctccacctcactgcccattagtgcggtttgaaaatgcctcctgtgtgatggctgggatgatacagtaacctctcagagaatttcttcacttgcacacaagtggtgggtttttaaagccaagaacttygctttttcttggtgcctgtttgagaacggttytctggctgatgcctgaggragtaggaggaggggacagcagcagagaacagccatgatgcactgtaagacagtgaaaggcacctccacatgcaaactcacggtgagaatggggtcattcagcattgaaactcagcttgaggtgcttctcatggacacaaagatttaattaagcctgtgatgggctaaataataccagattagtgctttgttttggagtactacagaccttccagactgaggagccacactgtggtatgttccacttga

SEQ ID NO: 57486 - DNA, 600 bp, Chicken  19866894313452_2
agcttttaagatttttttgtatctttttcttattttttttccctttgatattcaatattatcaaaagtgactggagtgacattaatggtagtgaaacagggtcttgaccttctccagaaggtccaaaacagcacttagagcctccacctcactgcccattagtgcggtttgaaaatgcctcctgtgtgatggctgggatgatacagtaacctctcagagaatttcttcacttgcacacaagtggtgggtttttaaagccaagaacttygctttttcttggtgcctgtttgagaacggttytctggctgatgcctgaggragtaggaggaggggacagcagcagagaacagccatgatgcactgtaagacagtgaaaggcacctccacatgcaaactcacggtgagaatggggtcattcagcattgaaactcagcttgaggtgcttctcatggacacaaagatttaattaagcctgtgatgggctaaataataccagattagtgctttgttttggagtactacagaccttccagactgaggagccacactgtggtatgttccacttgaagatttggcctttaaaactccactctcttatca

SEQ ID NO: 57487 - DNA, 600 bp, Chicken  19866894313452_3
tatctttttcttattttttttccctttgatattcaatattatcaaaagtgactggagtgacattaatggtagtgaaacagggtcttgaccttctccagaaggtccaaaacagcacttagagcctccacctcactgcccattagtgcggtttgaaaatgcctcctgtgtgatggctgggatgatacagtaacctctcagagaatttcttcacttgcacacaagtggtgggtttttaaagccaagaacttygctttttcttggtgcctgtttgagaacggttytctggctgatgcctgaggragtaggaggaggggacagcagcagagaacagccatgatgcactgtaagacagtgaaaggcacctccacatgcaaactcacggtgagaatggggtcattcagcattgaaactcagcttgaggtgcttctcatggacacaaagatttaattaagcctgtgatgggctaaataataccagattagtgctttgttttggagtactacagaccttccagactgaggagccacactgtggtatgttccacttgaagatttggcctttaaaactccactctcttatcacagtcttgtaaccaaatca

SEQ ID NO: 57488 - DNA, 599 bp, Chicken  19866894313457_1
acaccagcatagctgcccctagggtgaagtgggatgaggatggggaggagcaaggactacatccctccatgcagtgctctttatcccattccaacccacattcccaccacacaactatgctttctccccatgctctgaggtgttgagttggagccttgaatgagacctcacccaggggcaggaagtggcaggggcccagccatatccagcatgtttttcagggcagcacaaagagtggggaattaaacccactacaaacaaggccaagacataagctagtgctcttaaaaagtatttaakggaagagaaatataaatgtctttaatttagatgctctaaaattaggcgcatgggatttcctacatcctggcccttagttttgttttagctaccactaaacttcactagagcagctcaacgatgacatggaattttgttctcaaagattaatcatcgtcatttaaaaatactaccacaggtcataaggaagaaagaatcaaacttgaactaagtacagtttctcctttttcaagactgtagacacagatccacccccaggaggctgaggagaagttgaatggtgtgagaagagccgtggg

SEQ ID NO: 57489 - DNA, 560 bp, Chicken  19866894313468_1
gccccgcggctggcgtgccatggaacagagcagcgccgtgcctgcagagcacccaccgcagcgataaccagctggacgcaggctgctgccactcgcagagcgtgccgggtgcggagcgtgccgggccctgcgcacaccgagggacacgcagcacgctgggaaatgaagtcctgctgcgtcacctgtgctgcgtgctgctgggcacggcccggctgcgcgcagaccgccggggctgccgctttctcccatgtcctccgtgctctgcgcactgagcaggtcctcggtgggttgtggcagtcyctgctcttcctcatcagggctcgaggggctcgatttggggtttgctcagcccagccaggttgctgggcttgctggcgccaccgggggctgaaggcactggggaccttcgtgactgtgctaggcaggagcagaatggtgtggaaatagcacggcacagctaccagcgctgatgagagaagggactgaaaatcctgcagcagcaatttccacagtcagggctgtctccagggctttcatttatccgttacagcttaattgga

SEQ ID NO: 57490 - DNA, 600 bp, Chicken  19866894313473_1
aggttgtcaggtgagaagggtgaaaagagatactcgttgcttagagtcacagaaccattaaggttggaaaagacctctaacatcatttagtcccactgcccaccttccaccaatactgcccactaaaacatgtcccccagtgccacatctccacggctctggagcaccttcaggcacagtgaccccaccaccccctggggagctgtgccggtacctgaccactcttttggataggtttttcctaatatccaacctgaccctcccctggagcagcttaatgccatcacttctcatcctgtkgctgttayggggagcagaggccaacccccatcaccaccagctcctttcaggcagttgtagagagcagtgaggtctcccctgagcctcctctgctcaacgctgacccatcccagctccctcagccgctccccatcagatgtgtgctccagagccctcccagccttgtttacttcatacgtttactccgccatttgcctggtagtaaagactgcaatttccttcagggttagggagatttgtactctgcgttacggtctgctagcaggctttagtcacctaacgctggtgaggaggtggaaa

SEQ ID NO: 57491 - DNA, 600 bp, Chicken  19866894313473_2
aggtgagaagggtgaaaagagatactcgttgcttagagtcacagaaccattaaggttggaaaagacctctaacatcatttagtcccactgcccaccttccaccaatactgcccactaaaacatgtcccccagtgccacatctccacggctctggagcaccttcaggcacagtgaccccaccaccccctggggagctgtgccggtacctgaccactcttttggataggtttttcctaatatccaacctgaccctcccctggagcagcttaatgccatcacttctcatcctgtkgctgttayggggagcagaggccaacccccatcaccaccagctcctttcaggcagttgtagagagcagtgaggtctcccctgagcctcctctgctcaacgctgacccatcccagctccctcagccgctccccatcagatgtgtgctccagagccctcccagccttgtttacttcatacgtttactccgccatttgcctggtagtaaagactgcaatttccttcagggttagggagatttgtactctgcgttacggtctgctagcaggctttagtcacctaacgctggtgaggaggtggaaagctccatg

SEQ ID NO: 57492 - DNA, 600 bp, Chicken  19866894313478_1
atatgcagtaatatttacattagcattaggacaccatcaagcctttacttatccacatagttaaaattgttatctgtatatgaaccccagagatgatatatctagttgtcagcagtgacctgatgataatagcagtacaatttagttacaatatacaatatcattaatcatccaaatgtagcataaacagaatggaccatttgctaaggtcttgtcaggggtggaaagaaggtccctcacttataacagctgtatctgctataggcttccctaaggaaaggggctggcagagatgggggygaagggggcaggatgaagtgggtgagatcttcaatcgaaatcagaatcaccttcaagggtggtacatgcctctatttattagcattatgctacatatgctaatggcagactgtacactatttctgagcattaacatctgctcaaagcaacagactttcacttacagaaactgatttaaactcagtgaagcagataaacacagaaatctaagcaggtggctgcgactgaaggaagaattctcaattcctgcactcaaccgatgaacttcactaaaaccataattaatattcagataactat

SEQ ID NO: 57493 - DNA, 599 bp, Chicken  19866894313480_1
  misc_feature (1)..(131): n is any nucleotide
nnnnnnnnnnnnnnnnnnnnnnnnnnnnnnnnnnnnnnnnnnnnnnnnnnnnnnnnnnnnnnnnnnnnnnnnnnnnnnnnnnnnnnnnnnnnnnnnnnnnnnnnnnnnnnnnnnnnnnnnnnnnnnnnnnncattgcagcaaataataaagaataatgatagtaaacacgcatgcaagcaaatgagattcatcactacacgctgaagtgtagtgcttcccagtagagcctggattctccagccacaaatacactgaaaccttccacaaagaaattgataggatttatcttcccgtgcagrggaagggacatttcatggcccaaacaggttgattctgccccttatttataacccccagaaaaaaggcagatacattccagctaatgacgttagcaattctttcccttcccccgccttaaaggtggctcaggcctttatgcttataaatcattttattggtagttaaaatacagaggctagagcatctaactgtaacgcgaggcgcacttcaaagggaacctgctttcattgcacaacagttaaggttttatcagccactaaagattccccctgccagaggatcctgttacaccatggta

SEQ ID NO: 57494 - DNA, 600 bp, Chicken  19866894313480_2
cccgccttaaaggtggctcaggcctttatgcttataaatcattttattggtagttaaaatacagaggctagagcatctaactgtaacgcgaggcgcacttcaaagggaacctgctttcattgcacaacagttaaggttttatcagccactaaagattccccctgccagaggatcctgttacaccatggtaagcccggggtgaaggctatggctgctaaaagcagactggtgggaaggagctgaggaagaggaagaagttttggcgctgctggagcaaaactgcacggccaaagttttgtsctgggacaaatgcattgaaatgagcagggatacccacagccccatcagtgctcagagcccctccagcctgaccttgrstgtctgcacacctccctgggcaacctgtgsagtgcctcactgcccttagtgtaaaaaacctcttcctcttcatctgatgagaactctacgacaagagcagaactgctcatttgcaccgtgggctacgcttgcacagcaagcaaggatgctgctctgaggtccatgaccacacttctttattgcagagtgtctcctccagcatcccctacacagatagcagag

SEQ ID NO: 57495 - DNA, 592 bp, Chicken  19866894313480_3
taactgtaacgcgaggcgcacttcaaagggaacctgctttcattgcacaacagttaaggttttatcagccactaaagattccccctgccagaggatcctgttacaccatggtaagcccggggtgaaggctatggctgctaaaagcagactggtgggaaggagctgaggaagaggaagaagttttggcgctgctggagcaaaactgcacggccaaagttttgtsctgggacaaatgcattgaaatgagcagggatacccacagccccatcagtgctcagagcccctccagcctgaccttgrstgtctgcacacctccctgggcaacctgtgsagtgcctcactgcccttagtgtaaaaaacctcttcctcttcatctgatgagaactctacgacaagagcagaactgctcatttgcaccgtgggctacgcttgcacagcaagcaaggatgctgctctgaggtccatgaccacacttctttattgcagagtgtctcctccagcatcccctacacagatagcagagggaggcacagtgaagctaagaaacctccccagtccctcactgtcagctgattttggaagagcccatcct

SEQ ID NO: 57496 - DNA, 591 bp, Chicken  19866894313480_4
aactgtaacgcgaggcgcacttcaaagggaacctgctttcattgcacaacagttaaggttttatcagccactaaagattccccctgccagaggatcctgttacaccatggtaagcccggggtgaaggctatggctgctaaaagcagactggtgggaaggagctgaggaagaggaagaagttttggcgctgctggagcaaaactgcacggccaaagttttgtsctgggacaaatgcattgaaatgagcagggatacccacagccccatcagtgctcagagcccctccagcctgaccttgrstgtctgcacacctccctgggcaacctgtgsagtgcctcactgcccttagtgtaaaaaacctcttcctcttcatctgatgagaactctacgacaagagcagaactgctcatttgcaccgtgggctacgcttgcacagcaagcaaggatgctgctctgaggtccatgaccacacttctttattgcagagtgtctcctccagcatcccctacacagatagcagagggaggcacagtgaagctaagaaacctccccagtccctcactgtcagctgattttggaagagcccatcct

SEQ ID NO: 57497 - DNA, 561 bp, Chicken  19866894313480_5
acctgctttcattgcacaacagttaaggttttatcagccactaaagattccccctgccagaggatcctgttacaccatggtaagcccggggtgaaggctatggctgctaaaagcagactggtgggaaggagctgaggaagaggaagaagttttggcgctgctggagcaaaactgcacggccaaagttttgtsctgggacaaatgcattgaaatgagcagggatacccacagccccatcagtgctcagagcccctccagcctgaccttgrstgtctgcacacctccctgggcaacctgtgsagtgcctcactgcccttagtgtaaaaaacctcttcctcttcatctgatgagaactctacgacaagagcagaactgctcatttgcaccgtgggctacgcttgcacagcaagcaaggatgctgctctgaggtccatgaccacacttctttattgcagagtgtctcctccagcatcccctacacagatagcagagggaggcacagtgaagctaagaaacctccccagtccctcactgtcagctgattttggaagagcccatcct

SEQ ID NO: 57498 - DNA, 600 bp, Chicken  19866894313483_1
cctcttttgcccatgtagcaatggggactactgccattctgacttgggctattagttatacagcacaagttaaactcagtaggatccactagttgcaaactgcttcagagaaactcagatgacatgttaatgagtgtagtatataaatagatttggctgctgaatatctttgtaaattgtagaaagtaatgatgttcaaacacaatctcagttcagaaaaaataaatagtatgtgcttaacataacatttaaaaagataaaaagtttatattagtatcaacttttatttaaaatcatatwggtttaggaaaaatatgagtcataccataagaacatattctgagttcagtgcagaagggcttctgtaaggtttaacccctttgtcttgacacactgatgcaaaaccaacaagctttctggtacaactttaatcaaagtcatatgaaataagaatatttttacctcaaagaaataatactataagctataaccaacttgtcttcctcttaatttaagtaggtaattgttttttgttggttttgttgattttttttttttagttagtgacacaactatatggtatctgttattctggcttma

SEQ ID NO: 57499 - DNA, 362 bp, Chicken  19866894313483_2
wggtttaggaaaaatatgagtcataccataagaacatattctgagttcagtgcagaagggcttctgtaaggtttaacccctttgtcttgacacactgatgcaaaaccaacaagctttctggtacaactttaatcaaagtcatatgaaataagaatatttttacctcaaagaaataatactataagctataaccaacttgtcttcctcttaatttaagtaggtaattgttttttgttggttttgttgattttttttttttagttagtgacacaactatatggtatctgttattctggcttmacttgtctgcatcataatgtgtagcagttgaatgtgttttcctttccagtgtctctggtgcg

SEQ ID NO: 57500 - DNA, 563 bp, Chicken  19866894313484_1
ttatttacaatgcatagtctggcttcatctaaccatatttattttctgggaggttttttgtgtattagaggtgtgacttcagtgacaagaaatacaagtttcattcctgctacttgaaggaatgatatcgaatacagtgcttgaaactgaaggtatgaattcagagtgaaaattctagttgacctttccttgctgatcttaacatcttcaggcagcatcacaaagccttagtagtattttgattgctttgtggtgatccatccagtatggaagtgacgcattaagaataaatgctgtctkctgatcrggaaaagaccaaatcctagtgagatgwaaggtttgagtcttaaatctgactcttaaactgtttatggaggagtaaaaaactgggtagcatttcaaaatttggaaaggataaggttgaaggtgatgatcatgaaaacagccctcatgctttgttattgaagcgctcaagtatcggtctgactgctgtgtgtttggtttgtggctcaaagctgtgtttttgtgaattcagttttagatgaggcttttaaaatgaactg

SEQ ID NO: 57501 - DNA, 556 bp, Chicken  19866894313484_2
caatgcatagtctggcttcatctaaccatatttattttctgggaggttttttgtgtattagaggtgtgacttcagtgacaagaaatacaagtttcattcctgctacttgaaggaatgatatcgaatacagtgcttgaaactgaaggtatgaattcagagtgaaaattctagttgacctttccttgctgatcttaacatcttcaggcagcatcacaaagccttagtagtattttgattgctttgtggtgatccatccagtatggaagtgacgcattaagaataaatgctgtctkctgatcrggaaaagaccaaatcctagtgagatgwaaggtttgagtcttaaatctgactcttaaactgtttatggaggagtaaaaaactgggtagcatttcaaaatttggaaaggataaggttgaaggtgatgatcatgaaaacagccctcatgctttgttattgaagcgctcaagtatcggtctgactgctgtgtgtttggtttgtggctcaaagctgtgtttttgtgaattcagttttagatgaggcttttaaaatgaactg

SEQ ID NO: 57502 - DNA, 529 bp, Chicken  19866894313484_3
atatttattttctgggaggttttttgtgtattagaggtgtgacttcagtgacaagaaatacaagtttcattcctgctacttgaaggaatgatatcgaatacagtgcttgaaactgaaggtatgaattcagagtgaaaattctagttgacctttccttgctgatcttaacatcttcaggcagcatcacaaagccttagtagtattttgattgctttgtggtgatccatccagtatggaagtgacgcattaagaataaatgctgtctkctgatcrggaaaagaccaaatcctagtgagatgwaaggtttgagtcttaaatctgactcttaaactgtttatggaggagtaaaaaactgggtagcatttcaaaatttggaaaggataaggttgaaggtgatgatcatgaaaacagccctcatgctttgttattgaagcgctcaagtatcggtctgactgctgtgtgtttggtttgtggctcaaagctgtgtttttgtgaattcagttttagatgaggcttttaaaatgaactg

SEQ ID NO: 57503 - DNA, 600 bp, Chicken  19866894313486_1
gagccaaaccagctgtgtaggtgagggtgcagagccagcacagggaattggtcctaatgaatacaagattgatcaaactccctccaaaaaccaacccttttgatgatgtgaaacatggatttcctaaaatatgaaaggaatgatttgttctaccgttgttaatggctgaaggcaaataatcaggagactgaattaacaaaactactactaccttcatactgctgcggctgaaggctctcctgggagctcactgactcataagaatgttgctcatccttttcagcccatctaggagaacarcatgtgcagaggtatgacacactgcatttcaatcgcaagtaagtgggggaggtacaattgtttcaaatattaacctcggtgtcaggaacaaattgatatgctgattaatgccagtattttgaatgtgaatgtttgcatagtcaaacaggcagcttaatttttccatgaattttcattttcttgttttatttctcaacttttaaaaataaaatgtcatcagttgagctgagcgaggcacctggggtgatggaattggtagctgagccaaaaacttaaaaggggaaattggttctgttacac

SEQ ID NO: 57504 - DNA, 600 bp, Chicken  19866894313489_1
ccttgggcaggactttttggcagctggtctggtgcctgactgctaccctcctggggttacgtgatggtcagcaccaatgaccctcctggtcacagcaagagagcgcttccaactcatcactgtactcaacctacgttgttttgtacaattttaagaagtcctctgggacttctcgtggattaattcacggaattaaccttttgactcacaagctagagatttctctcaaataaatcagtgcagcagcagaggaggttcaggttgggtatcagggaaaatttcttctcagaaagagcagtsgggcattggtactgctgcccaggggggtgggggagtcattggccatgaaggtactcaagaaccgtggggatgtggcatcaagagacgtggtcagtgggcacggtgggctgggttggggttggacctggggatctgagaggtcttttccaatctgaatgactctatgattctatgaaggggatggcacaagtgctggaggcaatgtctgcagtgttaagtgggtgtgtttgaagcttggacattcagcgtcttcaaaggcaaaccctacagcagcagtcaccagactgcccagcaccgggg

SEQ ID NO: 57505 - DNA, 600 bp, Chicken  19866894313489_2
attggtactgctgcccaggggggtgggggagtcattggccatgaaggtactcaagaaccgtggggatgtggcatcaagagacgtggtcagtgggcacggtgggctgggttggggttggacctggggatctgagaggtcttttccaatctgaatgactctatgattctatgaaggggatggcacaagtgctggaggcaatgtctgcagtgttaagtgggtgtgtttgaagcttggacattcagcgtcttcaaaggcaaaccctacagcagcagtcaccagactgcccagcaccggggccayggtgcagcatgcccaaggatcccgaccctgctctgtgtcactgctgctgaaggcaaaggggatataccccacactcaagctcttccctcagtggggacccagctcagtcacccagaacagcccaggttccacatcccaagaacctactgacaagagtacacttttttgaatgagtttgtgaatggaaggtgcccacattcagaacaaagacatcaaggccccggaacgtgtccagagaggggtaatggagctgtgatgggtctggagcacgagtctgatggggagcagctgagggagctg

SEQ ID NO: 57506 - DNA, 600 bp, Chicken  19866894313490_1
gcccagaagaaaagttaattagtaattcatcataaggaaacaaagagacaaataaaataattaaatgtttgatgttcaaaaaggattttgttaatactcctgctaattaaaatgctgttgtttctcaacatacagcacagtacacagcctctggtgtatgctgtaagctaaaagaaaactaatgagaatgatcaactgatgaattctatttgaaaagctctaggttagtctggggaaaggatgcatttctgtgaatgctctggaagatgcctgaaaaggataggttttttattacatttygaaagttctggtatttcttttccatattacgcagtgagcaggacaactgaaaataaacaggactgtaagtattgatattgactgtagtcttgaagtctgtgaaacattaaaatatagatgctggcaatagctgttttatagcactgtctcttgtctgttagcatgctttgactttctctggtcagacaagaattgttattagtagcatttatgctataaataattttgaaaatacagcagtgcaagtggagaattgagtcagaaggaaaatgagaaagtctctctgacttccaaaccaga

SEQ ID NO: 57507 - DNA, 600 bp, Chicken  19866894313493_1
gtggtggttttgtaacagtcttgatgctcactttgctcattacggtgacaactggcaaaaatgaaaactaccaacatcagttctgactctactactgacaccagccaagctgataccatctccctaatctcatattttcttccatgtataaatttgatgctgatagatttttcctaacatgatgcttctcagggggtattttgctgtaccatgttgaaaactgcagtacagaaaacacacctcactgcatctgctatatttcagaacttacctggaacagccacctaacctcaagcaggrgacgttttaatcactaaggtccattcaaccaacagacacttttcttaatctcttattacctgaaggggtagctctgtcattatagagctgctgcttgcacaccattgacattaactgcaggggcacatcttccagctgtcacagttgtgatatagcttaaagcctttaaaacccatcattaaacactctttaacagtcattgcatctgtctcctgccagtatggctcctgggtccttagagcccttttatatctgcactgcttaattatccattcacaagatgttcctcataatgtgttg

SEQ ID NO: 57508 - DNA, 600 bp, Chicken  19866894313501_1
ctgctgctaggtgtctgctcttgcattaggagctggcttagcgaggtgcagacaaatcccttttgcttttatttcaggttttctttgctggaggatgctgtgatttttcttcctcttttgaaaaaacgcttttattagtttggtgctgcgatttgggccgctttacccagataatgaattctgactactttaagctatttaggctctgagtttttctttttcttgcattagcagaggacgatgccgagcattaccagggtaaccaaataaccagagaagagatctgagggttgcagctgyacgtaccagcagacagcggtgtgtggctcacagggagagcagctcctgctgcagccttgtgttgtgctggcgggaggaagcctgagctgtatcagggcgatcaaagactgacaatgagctaacagtgtgagatggccataaaaacgcaaggtatgatccaagggtgtattaggagatgaatttctagtagagattaatgctgccgtgccagacagtggtgcaacctcacttggaagagagtagcccgyttgattgcaaatattcagcaaaatgaattcaaactggaagagggacaagggc

SEQ ID NO: 57509 - DNA, 600 bp, Chicken  19866894313501_2
cattaccagggtaaccaaataaccagagaagagatctgagggttgcagctgyacgtaccagcagacagcggtgtgtggctcacagggagagcagctcctgctgcagccttgtgttgtgctggcgggaggaagcctgagctgtatcagggcgatcaaagactgacaatgagctaacagtgtgagatggccataaaaacgcaaggtatgatccaagggtgtattaggagatgaatttctagtagagattaatgctgccgtgccagacagtggtgcaacctcacttggaagagagtagcccgyttgattgcaaatattcagcaaaatgaattcaaactggaagagggacaagggcaatcaggggaatggaggagctgcctgtgacgggaagctgacaagagctctcaggacagacaccctcagggagaacttcttcagccaaaagatggaaggatgaagtaggtactgggcgctcactgaaaatgtgggctgccggccaggagatgctttctgagcatcagacaggtttggagcagcctccattgggctcctagctgggtcctcaaactgaatttgcaaaaacctctgcagaacgggagcgtg

SEQ ID NO: 57510 - DNA, 600 bp, Chicken  19866894313505_1
agtgacagatgacagtccccgagtgctgatcaagagtggccagaaaatgtgtgaaaaatcacagaatcacagaatggtttgggttggaagagacaccaaagcccacccataggcagggctgccccccaccagctcaggctgcccagggccccatccaacctggccttgagcacctccagggatggggaaaaatctcatctgtttgaaaacgagaggaagccagcttttcattcccagatgagcttgttgtgctaccaagagccatcattcgctttcaccaggtacgcaccttcttacccrtctgtgtcctcagtcccaaagtcatgcagatgctgcagaacatgtttcatgctgtggtaacaggcagtagatctctacacaaacataaagccttactcattgtgacttgcctgggagccagtgcctgggcatcacagatagtgtgggaattcccagaaatatttttaaagggggtacacagaaacaattcttgacaactgactcgtggttgcttttcaagtccccgcgatctgattgccactttgatcatgtcttgcaaataggttcatttccaaagttagtctggaaaacacgctgctg

SEQ ID NO: 57511 - DNA, 600 bp, Chicken  19866894313506_1
gactccctcctgagtatgtaataatatgcttcctgtttcccagtgatagctgaaacaaaagaagataaacatctgcaaaaatacaaatgtacgtatacatggggacagagcttaaagagataaatgcttttctaaccgaaacaacttctactcgtgtacaaaaacatatgtaaggctttcactactgctgcatttcacggttcagaacactttaaggaacactttaaggaacacttttcacttttgtgaagtggtatgagccactgagcatggatggagcacttctgttaatgtcttacrtgtcttatatcaaatcataaaccaggaggacattagtgaatctagtagttttcataagttttttgtagtaattgccaataatgtataaactatagtatttatgaaggagaatgttagcatgtttgctaaccatgtaagtgccagaggtactgtattgtctagttcattttacctctcagttaaatgctgttattttttttagatatgttgttactttctcggggcagaaagttagttttctcagtgagaatgggttccgtctgttatatggggctgaaaaatggtgttttgagattacat

SEQ ID NO: 57512 - DNA, 600 bp, Chicken  19866894313516_1
tcaaaatgcaaccaaagctgacacagcttgtgcattctgctttacattaaagctaaagatgcttcacgttcctctttctacagtgagtttcactactgcatagcaagttgaaacttcaacctaagatttttagacacaattctcttccaccaaaagtgagaactactgccccattgaagtcaacaacaatcttatcattgctagaacaggttcataagactgtatctttgaactgagacacttttgagggactactgaaaatgtttatgttcagaccgcatccagaaatttaaatgctcraagtccacaggcttctctctacaactgaggacagctggaggttgaagtggaaagactgtgtgcacaactggatgccagaggctaaaatcccttatccataggattctaagcttctcaaggccagatgctgtatttaagggtatttgtaaaggttcaaatacatcctccccagccttgctgcctggatcagtagagtgccctaactgggatttgtagcctctgaaagtcatgttttcaaccacgctgttttaaatgcattaggcagagcgtggacaggccaaagagaacttggaatatttg

SEQ ID NO: 57513 - DNA, 600 bp, Chicken  19866894313520_1
ttggtggagtaaaacagaatctagctgagtttcttgttcttgatccaagaacagagatggaattattcaggaagaaacttggatccatgcagaattaaaatataaataaaggttattactgatatctcccaacataattggaaaaactacattgcaacaacacagaattaaacgtgtgctatgctaacaatgcccacacacagatacagtttttatgagtaggagctgaaaatgaaaccaaataattatgtgttattatgacaatatctgtttctatatttatactatgccagatattcyttagtacatgtacacatagagctgtaaggagacgtgtgggtgtgtacatgtgtttgtgagtacttcaaaaatgttgaatgtaatttttttaaaatagtaaaagaaaaaagaatcactggcattcctagttccagcccgaagcacatttttacagctgaaaataaggtcttataatgaaaatgctgacacaaccttaactatagaggtgctagcaggcaatgcaataataaataatgtgggaaatattttacacttcaaggcaattacatgttcagccatctttaagatatctggcccatg

SEQ ID NO: 57514 - DNA, 600 bp, Chicken  19866894313520_2
tgacacaaccttaactatagaggtgctagcaggcaatgcaataataaataatgtgggaaatattttacacttcaaggcaattacatgttcagccatctttaagatatctggcccatgaagggtagggattaggtgtacttgacaagtgtaaaagacccatgactcatgactgctagaaggcacaaatgaattacaaaagctgagagaaagctttgtaatcacactgcataggtaaaatattttttatttgagggtagataaggatcaggtaaatgtaaagatacacactctagattccaytgagtttgctttttgaagaaatggtgaaagttgagttaaatccattgtcctaacttgcctgccatccatttgtgcatttctctatgccatataagtatgactgcagtatgctttgaaatgaaagttcatattactaagagaataggactgcataggaccaatgaggtcattgagttagctctcagagctgcagagaattgtgcaggagagtttaggtttgcaaagtcccctgaaaactacttcctcagtcttcacccaacagacatattcyaatgccaataataaactgaagcactggaa

SEQ ID NO: 57515 - DNA, 485 bp, Chicken  19866894313520_3
aatgtaaagatacacactctagattccaytgagtttgctttttgaagaaatggtgaaagttgagttaaatccattgtcctaacttgcctgccatccatttgtgcatttctctatgccatataagtatgactgcagtatgctttgaaatgaaagttcatattactaagagaataggactgcataggaccaatgaggtcattgagttagctctcagagctgcagagaattgtgcaggagagtttaggtttgcaaagtcccctgaaaactacttcctcagtcttcacccaacagacatattcyaatgccaataataaactgaagcactggaacaggttgcccaaggaggctgtggatgccccatccctggaggcattcaaggccaggctggatgtggctctgggcagcctggtctggtgttggtgaccctgcaaatagcaggggggttaaactagatgatcattgggtccttttcaatccagaccatt

SEQ ID NO: 57516 - DNA, 599 bp, Chicken  19866894313521_1
  misc_feature (1)..(166): n is any nucleotide
nnnnnnnnnnnnnnnnnnnnnnnnnnnnnnnnnnnnnnnnnnnnnnnnnnnnnnnnnnnnnnnnnnnnnnnnnnnnnnnnnnnnnnnnnnnnnnnnnnnnnnnnnnnnnnnnnnnnnnnnnnnnnnnnnnnnnnnnnnnnnnnnnnnnnnnnnnnnnnnnnnnnnnctggcagcggggggggctgcctggaggtggtgccggcagcgctgtgctgccctgcagcccttgctggtgcgggcagagctgcggtaaagactccagatgccacctgcaagtgctcgttcccatctcgtgcttckctgaccggctcgtagccgttcaattgatgagcggtttgttgcgatacatgtagcaaagcagtgcgatctggagctcactcagtcagacccctcctctgttcccaatagtacgcatccagtgctagcaggatgtgggccggaagagcgcrtggagcacaatacagaacgtaatttattcaagaatgacaaatatagtgccggctggggaaacgtgtgctttgttagtactttaccagaagagaatgagccttgattaggtagcggtggagtgcctgcagtrctggaaggggctaagacat

SEQ ID NO: 57517 - DNA, 599 bp, Chicken  19866894313521_2
  misc_feature (1)..(17): n is any nucleotide
nnnnnnnnnnnnnnnnnctggcagcggggggggctgcctggaggtggtgccggcagcgctgtgctgccctgcagcccttgctggtgcgggcagagctgcggtaaagactccagatgccacctgcaagtgctcgttcccatctcgtgcttckctgaccggctcgtagccgttcaattgatgagcggtttgttgcgatacatgtagcaaagcagtgcgatctggagctcactcagtcagacccctcctctgttcccaatagtacgcatccagtgctagcaggatgtgggccggaagagcgcrtggagcacaatacagaacgtaatttattcaagaatgacaaatatagtgccggctggggaaacgtgtgctttgttagtactttaccagaagagaatgagccttgattaggtagcggtggagtgcctgcagtrctggaaggggctaagacatcttgtcagtcagacattttctctctgcctgttagaaagacatggcatctgtctgaacccctggtaggtgtactgctgtttgtaaacaagtgcctgtgaattgacattccttttgtgctctctttagggactggttaccttaggttttaa

SEQ ID NO: 57518 - DNA, 600 bp, Chicken  19866894313521_3
cgttcccatctcgtgcttckctgaccggctcgtagccgttcaattgatgagcggtttgttgcgatacatgtagcaaagcagtgcgatctggagctcactcagtcagacccctcctctgttcccaatagtacgcatccagtgctagcaggatgtgggccggaagagcgcrtggagcacaatacagaacgtaatttattcaagaatgacaaatatagtgccggctggggaaacgtgtgctttgttagtactttaccagaagagaatgagccttgattaggtagcggtggagtgcctgcagtrctggaaggggctaagacatcttgtcagtcagacattttctctctgcctgttagaaagacatggcatctgtctgaacccctggtaggtgtactgctgtttgtaaacaagtgcctgtgaattgacattccttttgtgctctctttagggactggttaccttaggttttaattgggaaaaagggagtctgtttcttcaatctgaaaccatctgtgtctttcttgacatcttggctgaagagagaaaggtgttagactttcacagcaacctgtaggctgcctagaaaaccagcatcttgagcag

SEQ ID NO: 57519 - DNA, 600 bp, Chicken  19866894313522_1
gaagaattctcaaacatcttttattgaagcttcaattatttttatctcttatctcttctggtttttttttgtttgtttgtttgttttttggcctttccctggatcctgtctatttttgcagtttcttttttgaaacaagaatgccagaattaaacacatgacacatacaaggtcactggaagtcttgtacttccatcaaggcttcgcccctgggttggtctgcatatgctgactcagaacattctcctttctcaggctggctgcatccctatttatttcctctaatcagactgagtcaarcatacgctcttcatgctcccttcttctggaactctctcctctctgagattgttttggctgaggctttattaggcttttagatctatgctgtttgccctcttgttcaaatctgctttggggcttttgttttttatgcttgtctcccatcagttcttttaaaatgagtgagtgtcagagctctgtgatttatttctattcttaccatcggtttctgctaacagaatgacctgctcaataacatgttcctttggttgactttcttttctttctcaccataagaaataaatgctcaggagaatg

SEQ ID NO: 57520 - DNA, 600 bp, Chicken  19866894313532_1
ctgactctacagccagcaagctgagacctgtgttgatcccaaagtgaccatccatgtggatgcaatgctacatcttgggcatgctttgctgccttcacatctgttattacctccaacttttatgcaggttggatcacagaaaaaaaaatggggcacattctgggctcagacctgctcacaggaaggtggctaaggagctgttctgctccaccgaagagcagacaccatctttgttatcactctagattctctccccagtgaccctttccccacctatctccattgacagacatccagccrgtctggtactgctgacagtatgactggaaaactttctctccccaacgtgaagatgctcatggaatcctcaagcagtgccttggcaatatactcatcaagatgaagcagcttctgttcacctccttagcagacaagatgaaaaaaatgcatcagctaaagtcatggtctgagaaactccccacagttgaagaggtacccagttgttgcaactggtctgctactatcagttcattagaggagctcttccatggctgaactacctgaggtctatgtaggcagaagaaagaactgttagcagat

SEQ ID NO: 57521 - DNA, 600 bp, Chicken  19866894313532_2
tgccttggcaatatactcatcaagatgaagcagcttctgttcacctccttagcagacaagatgaaaaaaatgcatcagctaaagtcatggtctgagaaactccccacagttgaagaggtacccagttgttgcaactggtctgctactatcagttcattagaggagctcttccatggctgaactacctgaggtctatgtaggcagaagaaagaactgttagcagatacctggttcaacagtgagggccaactgagcatgcaccaaagctatgcctatgagtcaatcatcttatgccattartagtgagcagcccaagagcttcttttgtgtggtagttggtttcatgtcaggattttcttttgggtaggggtacctcttcaagttacacctgcacagagaacctttatatcttgatgtcaagagactgcttactaatacagatccttggtaagtgactataagtttgtttaagctttgttagctgaaacagttgaaagtctgatgggaagtggtggtgacctagagctccaactttaagaaacagtttgctctttcatctccctttctcaaagatctttcctgaaatctctcccargaaga

SEQ ID NO: 57522 - DNA, 600 bp, Chicken  19866894313532_3
attartagtgagcagcccaagagcttcttttgtgtggtagttggtttcatgtcaggattttcttttgggtaggggtacctcttcaagttacacctgcacagagaacctttatatcttgatgtcaagagactgcttactaatacagatccttggtaagtgactataagtttgtttaagctttgttagctgaaacagttgaaagtctgatgggaagtggtggtgacctagagctccaactttaagaaacagtttgctctttcatctccctttctcaaagatctttcctgaaatctctcccargaagatctgtgctgtatttctccagttagaaatcagcagtgtggagagaccagtctctgagaaaccttatctagctgctcattgtcctgtccccgttcattgtgtcggagttggactagatgacctttaagcatcccttccaacacaaacaattctactatatgagattttttttttgcactagttacccaagtatgctggtaaaagatatattgtactatcttcattttacagaggagggaaaccaagacattggtgaaagacttgcccaaagtctgagaagaaaatgaatgaaccctg

SEQ ID NO: 57523 - DNA, 600 bp, Chicken  19866894313533_1
cagctgttaaaagcccgacgttgggcatcccataatgcacagaatgctatgaattctgcatcctcactactggtgattatcagaaggtggggaatctgtttgctctgcgctgctggaaaaggtaaagggagaaagccagcccttcccaaagcctgtgctgcaggtgggaaggtgagcttcccagagctcagcgcttcaggtgggtgcagtaacgttggctcagcagtgcagcagcactcctctatcagcaaagcttccttacgttatgcacagtgtaatgaatccatactgcagtctggratgacttcctagtgctaaagaactgcagtcgttgggtttgctgttgtcttttaaatgccttctcgttattatggacctgtgtctaagaggaagagtgtaactccttgttcccagagggaggattctggagtcacagcacgctgttgatcatggcagcctgcacgcagtaagcagtcctttctggagacccagctatgtagcatcatgtaggaagagctccaccttacggcacatgactttatgattaatctccctgcaccacgtgatgctttgctgccatttcagggatccgagttaaac

SEQ ID NO: 57524 - DNA, 599 bp, Chicken  19866894313542_1
  misc_feature (1)..(84): n is any nucleotide
nnnnnnnnnnnnnnnnnnnnnnnnnnnnnnnnnnnnnnnnnnnnnnnnnnnnnnnnnnnnnnnnnnnnnnnnnnnnnnnnnnnntgcgtggggatgtttgcctcctcgggctctttctccctggggagggaagtctggggaggctgcagcccacagtggagccctttgcaacagcttgaccacccctctttcaaaaacagtgctttcagagtcaaatatggctttgattaagctcacggactgttaatcagcattcacaagattaaaataataataataataatttcctcctctcccccrcccagaagcagactactggtagaaastgaagctggaaaaaatagttgaaagtcagctaaagtcaccttggtaactgcagcaatacacttgcccagaataggagacatcaaacccaactacaaacagctttaaagaaacaaaaagaatgtaatcatctaaagaattaatctgacaactgcccacatttacacctcccacaagctcccaatcagagggaaatgtgctttaatctcctccaacccccctccagtttcacacaacacgagatgtgaagtcctttaactgggacatttccggcg

SEQ ID NO: 57525 - DNA, 599 bp, Chicken  19866894313542_2
  misc_feature (1)..(58): n is any nucleotide
nnnnnnnnnnnnnnnnnnnnnnnnnnnnnnnnnnnnnnnnnnnnnnnnnnnnnnnnnntgcgtggggatgtttgcctcctcgggctctttctccctggggagggaagtctggggaggctgcagcccacagtggagccctttgcaacagcttgaccacccctctttcaaaaacagtgctttcagagtcaaatatggctttgattaagctcacggactgttaatcagcattcacaagattaaaataataataataataatttcctcctctcccccrcccagaagcagactactggtagaaastgaagctggaaaaaatagttgaaagtcagctaaagtcaccttggtaactgcagcaatacacttgcccagaataggagacatcaaacccaactacaaacagctttaaagaaacaaaaagaatgtaatcatctaaagaattaatctgacaactgcccacatttacacctcccacaagctcccaatcagagggaaatgtgctttaatctcctccaacccccctccagtttcacacaacacgagatgtgaagtcctttaactgggacatttccggcgtgctgcttccatttaaatctactgcc

SEQ ID NO: 57526 - DNA, 600 bp, Chicken  19866894313542_3
agttgaaagtcagctaaagtcaccttggtaactgcagcaatacacttgcccagaataggagacatcaaacccaactacaaacagctttaaagaaacaaaaagaatgtaatcatctaaagaattaatctgacaactgcccacatttacacctcccacaagctcccaatcagagggaaatgtgctttaatctcctccaacccccctccagtttcacacaacacgagatgtgaagtcctttaactgggacatttccggcgtgctgcttccatttaaatctactgcctttccaaatgcagcagycctagctgttgcagacttgttttttctggacactgagaaacatgaattttttgtgtgggttggatgaagtattaaatctggaatagacaaagtttgcagcgttttacatgatagtcagctagagcttagtcataacaaataaaactctgccrgtttctgctgctggtttatttggtgatggggtggaggaagcaagggctcatgggtagccgacagtcgtaaaagcagagatgttagtgttagaaagcaaacttcttctaaattttcttctacggctgaaaagtacaagctgtggatggc

SEQ ID NO: 57527 - DNA, 506 bp, Chicken  19866894313542_4
ccacaagctcccaatcagagggaaatgtgctttaatctcctccaacccccctccagtttcacacaacacgagatgtgaagtcctttaactgggacatttccggcgtgctgcttccatttaaatctactgcctttccaaatgcagcagycctagctgttgcagacttgttttttctggacactgagaaacatgaattttttgtgtgggttggatgaagtattaaatctggaatagacaaagtttgcagcgttttacatgatagtcagctagagcttagtcataacaaataaaactctgccrgtttctgctgctggtttatttggtgatggggtggaggaagcaagggctcatgggtagccgacagtcgtaaaagcagagatgttagtgttagaaagcaaacttcttctaaattttcttctacggctgaaaagtacaagctgtggatggcagtgtgtgttacgatgtgaacttctcattggcaacgctctagacatcctggtgaccct

SEQ ID NO: 57528 - DNA, 600 bp, Chicken  19866894313546_1
gagcagactccagggcaagagaagctcctgaagcaaccagattgcattatgtatgcatgcaattataactgcaaggtaaataaaagtgaacttagctttaaaatgttcctagagagcgagacgagagtgacacgacccagggatacttaaccacatctgaaaggtttattaagaaacagtaacaagactttgaccaaggccctatttatctgctaaaatcctttccttatacacttcatcacagcaaagctaaggggagcatcagctcatagctctgcctgaagacttcccccattaaayaccctcaattatgcaccaagacatcacgtattgcctctcctcatcttcccacgccaaatacrtttaacatggaaaacactgagcacacagcgagtgtgcacagcataactcagtgtccctgtgcccaaccaatgctgttttacagaagcgtgcgtgtgtattcatgctgccattttcaagaacaactattccagtaccgtagagagcacgcttcaggacagactgaccgcgcagacacttggctgcaaggaaaacaacctactctgaactaaagctctgataaaaagttatttgccgttt

SEQ ID NO: 57529 - DNA, 600 bp, Chicken  19866894313546_2
ttataactgcaaggtaaataaaagtgaacttagctttaaaatgttcctagagagcgagacgagagtgacacgacccagggatacttaaccacatctgaaaggtttattaagaaacagtaacaagactttgaccaaggccctatttatctgctaaaatcctttccttatacacttcatcacagcaaagctaaggggagcatcagctcatagctctgcctgaagacttcccccattaaayaccctcaattatgcaccaagacatcacgtattgcctctcctcatcttcccacgccaaatacrtttaacatggaaaacactgagcacacagcgagtgtgcacagcataactcagtgtccctgtgcccaaccaatgctgttttacagaagcgtgcgtgtgtattcatgctgccattttcaagaacaactattccagtaccgtagagagcacgcttcaggacagactgaccgcgcagacacttggctgcaaggaaaacaacctactctgaactaaagctctgataaaaagttatttgccgtttgtcgtgggttaaccctggtgtgcagccaagtcctacactgttgctcacttgctcagtggtaa

SEQ ID NO: 57530 - DNA, 599 bp, Chicken  19866894313551_1
  misc_feature (1)..(61): n is any nucleotide
nnnnnnnnnnnnnnnnnnnnnnnnnnnnnnnnnnnnnnnnnnnnnnnnnnnnnnnnnnnnnccctattcccaatcacaaaatccccccatctgtaccctgcacacacttccctgcatctgtattcacactcatctcctgcacccctccccacgcagcacagactgcagtgctgtggggttgggcatcgtgtgcgggttgttagcaacctgacaccggcactgctgctgtccccttggcagctggcagagagcaatgaggccctcagagcgtgacatccctgcagcaacagcccccgcttycccattgatcccccagatgaaaaatgagcctgaagytctgcaagggctgggatggctgggaagcaggaaaggctgtgggagaggctgcaggaaagcatcaggtgctcctgctgcctgccagccctgggactgagcatcagtttctcccccccccaaggccaggacagggattgcctggagcagaacttcacatctaggtaaccatcttgtgattcgcccatgggtgtcctttgtgattgatggaaaatagcctcaccccagggatatccatctcatgctatggcagatgttggacaaat

SEQ ID NO: 57531 - DNA, 599 bp, Chicken  19866894313551_2
  misc_feature (1)..(25): n is any nucleotide
nnnnnnnnnnnnnnnnnnnnnnnnnccctattcccaatcacaaaatccccccatctgtaccctgcacacacttccctgcatctgtattcacactcatctcctgcacccctccccacgcagcacagactgcagtgctgtggggttgggcatcgtgtgcgggttgttagcaacctgacaccggcactgctgctgtccccttggcagctggcagagagcaatgaggccctcagagcgtgacatccctgcagcaacagcccccgcttycccattgatcccccagatgaaaaatgagcctgaagytctgcaagggctgggatggctgggaagcaggaaaggctgtgggagaggctgcaggaaagcatcaggtgctcctgctgcctgccagccctgggactgagcatcagtttctcccccccccaaggccaggacagggattgcctggagcagaacttcacatctaggtaaccatcttgtgattcgcccatgggtgtcctttgtgattgatggaaaatagcctcaccccagggatatccatctcatgctatggcagatgttggacaaatggtctcctggcatttgacattaaggatgctcaggtt

SEQ ID NO: 57532 - DNA, 600 bp, Chicken  19866894313554_1
agtatcagtgctagatgtggtacaaagtcaggaaagatagaagagatacaatgctggaatcggtaacagaagtgttaaccaagcatccgcttcaccattgcctccttaacacattgaaagcagagcaagcactgggtgcttttaattggaaccaggaatttgcctgtttcccaacactgccattccaaggcacgcagaaggatgtgatgtggaagcgggagggttaaacgagcactttattcagccaccatctgatgtgtgcacatccaaagtgctaattacatctaacaaagacaatgyacaaagccctgcataatacccgagatttcaataatgcttctatcattcttactaggttcattttttgcaagttaaaatagaaaatgacaatattcaaaatctagacacttgtatgcaatgcttttaaggatagtgaggtgggaagcactggctcagacaacagccaccaggtctgcccatagccttggccaartctaccttcatgctgttctggtcatcaggtctacctgcatgttttgtactccagtctacaaagaaaagaaaccaatctgaagctgggggcagtgatggaaatagact

SEQ ID NO: 57533 - DNA, 485 bp, Chicken  19866894313554_2
gcagaaggatgtgatgtggaagcgggagggttaaacgagcactttattcagccaccatctgatgtgtgcacatccaaagtgctaattacatctaacaaagacaatgyacaaagccctgcataatacccgagatttcaataatgcttctatcattcttactaggttcattttttgcaagttaaaatagaaaatgacaatattcaaaatctagacacttgtatgcaatgcttttaaggatagtgaggtgggaagcactggctcagacaacagccaccaggtctgcccatagccttggccaartctaccttcatgctgttctggtcatcaggtctacctgcatgttttgtactccagtctacaaagaaaagaaaccaatctgaagctgggggcagtgatggaaatagactgatgtagctacagcaagagaactggagagatttctcccatctccaagacattacagagatcagaggaaggttttgggt

SEQ ID NO: 57534 - DNA, 600 bp, Chicken  19866894313555_1
ggccctgttttctctagtgcagctcctcagctgtagatcagcattgccctgatgacaggagtggaattaacctgatagacaccagcaagtcaactggtggtggatgtatgcttatgctggagggtcctcttgatttgtctacctttagtttcaggtcagttacagggttgcaatataaacttagtgtgggattttcttgctcacagctcacctacaaaagcttatgtctgacaagaagtgcacagcagagaaaaaggcagagatggaaaatgttctaacacaggtaagtgcctgcatgargaggtgaatgctttatggatgtgtgtgctgtaagggaagtgcagtgcacagtagtagtgtctgttgtgtttctctaaggatgcatagaactgcacctcagagatgcatgtaggtctgtatgtgttccgaaatactggaatcttactggctaatgacatctcctttctacttgtttggacagttactgctgttgtggctgtcttttgaatgctgtattggtagggctgaagctgcggccttggagatggtctgctcttctgcataccacatgctgtaaaaagcctgtttcttctgagttcc

SEQ ID NO: 57535 - DNA, 599 bp, Chicken  19866894313556_1
  misc_feature (1)..(85): n is any nucleotide
nnnnnnnnnnnnnnnnnnnnnnnnnnnnnnnnnnnnnnnnnnnnnnnnnnnnnnnnnnnnnnnnnnnnnnnnnnnnnnnnnnnnnaatgttttggtccataattaacatcaaactcctgacttaaaatctttatggattgagtaagctccattagctgctacatgaataacgctgtgcaacgctcggaggcccgctggcttccaatcaccccaattcccctgcaaacaacctcaggagaaggtcctcgctggggacttcctgctcctgtccccacagccaacaccgtggggatgacaacygccctgcacccagcttttagccccccaggaaacaagaccagagctcccaaatcagtgccagccactcccgagtcaggtgtagggtgcccaaaatgcagctytggggctgcagactccaactgcaatgggtcrttactgatgcatgtcccagacacatactcacagccttctccagaggactaggtggtggtggaggttggaatcccctgatgatcctcagcattaactagaataaattaactctgcttcatacccctggatagccttccagcgttggctctcacagtagtgatgcatct

SEQ ID NO: 57536 - DNA, 600 bp, Chicken  19866894313556_2
attaacatcaaactcctgacttaaaatctttatggattgagtaagctccattagctgctacatgaataacgctgtgcaacgctcggaggcccgctggcttccaatcaccccaattcccctgcaaacaacctcaggagaaggtcctcgctggggacttcctgctcctgtccccacagccaacaccgtggggatgacaacygccctgcacccagcttttagccccccaggaaacaagaccagagctcccaaatcagtgccagccactcccgagtcaggtgtagggtgcccaaaatgcagctytggggctgcagactccaactgcaatgggtcrttactgatgcatgtcccagacacatactcacagccttctccagaggactaggtggtggtggaggttggaatcccctgatgatcctcagcattaactagaataaattaactctgcttcatacccctggatagccttccagcgttggctctcacagtagtgatgcatctgttggggctgctgtcagattttgagtgttcccacccatacttggagatggaaataacattggaactgatgtgctggtctttgaaactgccggattatggatg

SEQ ID NO: 57537 - DNA, 600 bp, Chicken  19866894313556_3
atggattgagtaagctccattagctgctacatgaataacgctgtgcaacgctcggaggcccgctggcttccaatcaccccaattcccctgcaaacaacctcaggagaaggtcctcgctggggacttcctgctcctgtccccacagccaacaccgtggggatgacaacygccctgcacccagcttttagccccccaggaaacaagaccagagctcccaaatcagtgccagccactcccgagtcaggtgtagggtgcccaaaatgcagctytggggctgcagactccaactgcaatgggtcrttactgatgcatgtcccagacacatactcacagccttctccagaggactaggtggtggtggaggttggaatcccctgatgatcctcagcattaactagaataaattaactctgcttcatacccctggatagccttccagcgttggctctcacagtagtgatgcatctgttggggctgctgtcagattttgagtgttcccacccatacttggagatggaaataacattggaactgatgtgctggtctttgaaactgccggattatggatgaccagctcttgtctgagcagatgaatgcagc

SEQ ID NO: 57538 - DNA, 599 bp, Chicken  19866894313560_1
  misc_feature (1)..(60): n is any nucleotide
nnnnnnnnnnnnnnnnnnnnnnnnnnnnnnnnnnnnnnnnnnnnnnnnnnnnnnnnnnnnatgtatgaaaaggctttattgtaaacgcctttcccatatttggtgatgacgggacttgagaagcaccctgtaacaggatcaaacacatctggtaacacaatcattttctacttcagataagctaaaagatcactgatgctttaacaaaaaaaaaaaaagattatgcaagcgtggcttaaaaaacaaaatggttaatgaaaccacagcggtgtgggaaagctggaatttttacttttttcscccacattcaggggatttctctataaaaatataaattgaatttatgctgatgtcaaagagcatgaggtgtggaagatccaatagagacttgtttggtattaatcacagcacatcagcctgctgggcagaataaactaacattttatagatgctaaacatttcttatttacaccttccttctgcattttgtgaacaggtcaygtgtgactgagtacagaagtacaatattgttcatttgatccctgcccagggggaccacgtttctggattagcaagtgatgttgagatagaattgcagc

SEQ ID NO: 57539 - DNA, 600 bp, Chicken  19866894313560_2
taacaaaaaaaaaaaaagattatgcaagcgtggcttaaaaaacaaaatggttaatgaaaccacagcggtgtgggaaagctggaatttttacttttttcscccacattcaggggatttctctataaaaatataaattgaatttatgctgatgtcaaagagcatgaggtgtggaagatccaatagagacttgtttggtattaatcacagcacatcagcctgctgggcagaataaactaacattttatagatgctaaacatttcttatttacaccttccttctgcattttgtgaacaggtcaygtgtgactgagtacagaagtacaatattgttcatttgatccctgcccagggggaccacgtttctggattagcaagtgatgttgagatagaattgcagccctgtgctctttcctaatctgattagcagccatgtgaggtcaattatttcactctaagaggaaacactattcacacatgttcagtttttaaatttaactctgatccagaagaggggagcagaacagagttacaagacatccagagctgacaaacccagaagacaaaccagtaactaggaatgggtcagatcagttgttaact

SEQ ID NO: 57540 - DNA, 600 bp, Chicken  19866894313562_1
cgagccctccagcatctacattgaatctgacattagtgtttgctagagtttcagtgtcaaccttttggcacctaaaaccaatccaggataattagagctgtcttgctttatagcactagacaatcattcttggacagaagtctacaaaagttggaggttttggcagtttgatgaccagtttgaacatttccaattgagtagacctgactagaagccatgggggttgagactgagtccttggacaatatgtaaggttgtgcagccccccagcttctgaattacccctcttggaggctaacrtgcatctagtcattagcaaggaaagtaatatagtctcaggccttttttgtgccctggagaacaattagcagtcaaaagagaaccatcagatgctattaagaatcaagcatggactgtccagtgttgtctatgttagacaaaatgagaaattgaagacagtttaagcacatcctgaaaaatacgtttttaactctgaataaccagtttttgacatttcaaagctaacattattgttatcctcaccatgaagatattctgactttacatctcacaattatcacataatgaagtgaattctta

SEQ ID NO: 57541 - DNA, 600 bp, Chicken  19866894313564_1
actttccagaatttaagataacagaggattttgttgataaagcagtaatacagatagagagcacatgtaaattagattgtaaaaatgtacagccaagatgtattatagtcaagagtatagagacttccaagggaggtttgaacagaggtgcaatgtctgcatatctctactgataggtgaccatggctggctcaaagaacaaggctgactttctgttgttagctagagatgtgcactagcagttacctccaggaaatcctccacactgatgttgagggattgatccccaccggtgacagragtaatactggggaaaaaaaaatagaaaaagctgatgcctgcatataaagtacagtggtgctttaattgtgtcagtgagacactgtgatggggagatcgaatggacaataaaaatttcagggcagctggagtataccaactctactacaggtaaaggatttcatctgctgctccaaaactgacatggctgctacagaaaggtaaaaggggagttgtaaggtcctgaactgatttaatcataccaggtcatccataaacagggagttgagagagggagaagccagaaggaatgtctgttta

SEQ ID NO: 57542 - DNA, 600 bp, Chicken  19866894313568_1
aggaccagccatatgagcggtagttatctattgagagtgtgcttcatcacatcactattttcaaaggtgtctcttcccagggacctgaatctttgttgcaaaacagagtgtgtgctgaagatgggggatgtgtatgagagatagcctttacccaactcactgtacgtctggtgtgaagtcactgtagttcttaaagtattaaaaaggatgagcaggattattttatgaggttttttttgtagtaaatagctcaaatatgcttcctttcatgtctctatgctgcagtttacctttgaggtwtacttttatttgctagtatcagtttcctttcttactgtttgttctcagagcaagagtagaaactctactttataggtctgaatgtgtctggagtaaaagtatgttattctccttaaaaatacatgagtatgtccaacaactcttaggtggatttggagaacagccgggttttgtaaacatggaaagacaagagatgccaaggacattaaaaaaaaaaaaaagtataatacaataaaaatagagcttctgctttattttgcactgcagtgggatcacactgctgttgtcacttgttttccc

SEQ ID NO: 57543 - DNA, 600 bp, Chicken  19866894313572_1
aacaacatgatgtcattattcagctttaaagctggagggcagatcttcttgctggagcaaagggaattacaaagagctttcaaggcttgaaaagatgctttagcccgatcaatttaagactagtctagtttttccagttaatataattatgtagaattatataacagctcacattattgaggtaaattgtactttatcatgacaaaaactacatttttgaagttaaactgcttttccgtgtatgtaatgcactaaagtccttatattgaattacatctctaaacttttgaggctttattytgcccagactagcactttgcataagtcctattttcacaaaacaccaagaagaaaagtagctgaggaaggctttctcacataacttacttaaaatcagggtctgtcatttaggtttggggactgaaggtcccaacgccgsggatgcagccgagctgcagtcatagcacagcttcccrtacatcactggagtgagatgctcacacacacagttggaaaattagaagcacagggcaggttaaacttgcatgactgacacatgcgaggcagataattactcaaggtctcattgaccttgacagc

SEQ ID NO: 57544 - DNA, 600 bp, Chicken  19866894313572_2
aatataattatgtagaattatataacagctcacattattgaggtaaattgtactttatcatgacaaaaactacatttttgaagttaaactgcttttccgtgtatgtaatgcactaaagtccttatattgaattacatctctaaacttttgaggctttattytgcccagactagcactttgcataagtcctattttcacaaaacaccaagaagaaaagtagctgaggaaggctttctcacataacttacttaaaatcagggtctgtcatttaggtttggggactgaaggtcccaacgccgsggatgcagccgagctgcagtcatagcacagcttcccrtacatcactggagtgagatgctcacacacacagttggaaaattagaagcacagggcaggttaaacttgcatgactgacacatgcgaggcagataattactcaaggtctcattgaccttgacagcattgtgcagtaaccttttcataaggataaactgtgcttggacgggcatttcaatatcacatgcacgtgcacaatcacatctgtttactgcttttggtgccacaaaaccctttcctagagggatacagcagagcctaaca

SEQ ID NO: 57545 - DNA, 600 bp, Chicken  19866894313572_3
ttgaggtaaattgtactttatcatgacaaaaactacatttttgaagttaaactgcttttccgtgtatgtaatgcactaaagtccttatattgaattacatctctaaacttttgaggctttattytgcccagactagcactttgcataagtcctattttcacaaaacaccaagaagaaaagtagctgaggaaggctttctcacataacttacttaaaatcagggtctgtcatttaggtttggggactgaaggtcccaacgccgsggatgcagccgagctgcagtcatagcacagcttcccrtacatcactggagtgagatgctcacacacacagttggaaaattagaagcacagggcaggttaaacttgcatgactgacacatgcgaggcagataattactcaaggtctcattgaccttgacagcattgtgcagtaaccttttcataaggataaactgtgcttggacgggcatttcaatatcacatgcacgtgcacaatcacatctgtttactgcttttggtgccacaaaaccctttcctagagggatacagcagagcctaacaatgacaacgagaccacttctctttctgctttaaattg

SEQ ID NO: 57546 - DNA, 580 bp, Chicken  19866894313588_1
cacctccgggtccccccagccatggtgtgaatccaagctcacaaagggctgcaggagaccccccaaaaggcaaatccttcccaaactctggggttttggagttcatcttccagatccacgggaggctcaaccccagctttccatgacactgggcagccagtgccactctcctggggatgctcccagctcatcccagtccagcagccacatccagctccatgggggtgtccacaggtcctctcatcaccccaaaaccaagcacccaaggggaatggaagacattcctaagagctttttggraagaggatgactcccacttcaaggcattacttttgggggaaattcttggggggatttcacatcccagggaggccccgaatcacactgcagttccccagccgtgctacgctgtgtaatgagtctcaagcatcacgtttgcttttaagaggagcttttgtacacccgtgcctcccgctgcgcatcctgcaatatctaataaagcccgagctatccaacaactctcaaaactgccaaaataccactattttaagcctcaaaatgcaagatccatcgaaaaggg

SEQ ID NO: 57547 - DNA, 600 bp, Chicken  19866894313593_1
gttattgtttagccaggacactgttattttatttttacactataatttcagcacaaaggcaaattgcaccgagtacacttatgatcatgcacacatcaattcatgatctcaactgcattctagtctatctgaaattgtgcaaagtgtttgatagtgtcctgcatgacatcctggttgacaaattggagaaaaatggatttgattgatggaccactcactggaaaaggaattggctggatggtcacactcagagggttgtgatcaatggcgcaatgtccaagttgagactgatgatgagtkgtgttcctcaaggattggttctgggaccagtgctatttaacatctttgtaggcaatgtggacagcgggaacaagtgcaccctcagcaagtttgcagacgacaccaagctgagtggtgcagctgacacacaagagggaagggatactttccagagggacctggacaggtttgagaagtgggcccatgccaacctcataaagttcaacaaggccaagtgcaaggtcctgcatctgggtcagggcaatctcacgcacagatagaggttgagtggagaatggcttgagagtagccctgagaaag

SEQ ID NO: 57548 - DNA, 600 bp, Chicken  19866894313594_1
gctgttttctccatgcacgctctccatttgacaagacagaaaaatggttaattccttttggtatttcatgtacttgtgtgattggtgctcattagcaggctctgatagcactgacatcagttgcccgtagctaggccaaacgattttctcttatccaaacaaacttttggtacatgttgaaagaattttatcagaattcttattttgcagagaattttagctttgtatggaaatccagaataaatatcagtgctgtttgtagactgaaaaccagtttgtgtccagccgtgctgtatcagwtcctttatagagcatattcccatggcatgggccagcagtgttgtggccagatctaatgcagagatgcattaattaggtgcagtacgaaccccagtgacccaaattcatgtggcaaataaacacacagcttaaaagtgaatagatctgattgtagttttgaatgcaatagaacaattggagtgggatcgccctggttgagcttctgctgtagatgtaatacacacccagctctggggagcccatgtgggacgtgcatcaggatgggcacacagggcaggatatcacaaccaacctcttctc

SEQ ID NO: 57549 - DNA, 600 bp, Chicken  19866894313594_2
tcacaaccaacctcttctccaaaagagcagtggcacatcagcacagctgcccagggagcggtggggtcacctgggagtgtcccataacagtggggatgtggcacagagggacgtggtgatgggcatggcacagtgggtggggtggggatttgtgagggcttttccaacctgaatgattctatggttctgtggctctatgacaaggggtggctgaggtgctgctggtgggagctgtctcatggctgtccctgctgcagagatggtcacaggcagactggggacagggggggttggtccatrgggctgtgctgcacagggatggggtgttaatcccacggctgaagatgtgcctgatgctttatttattagaaaataatatatttccatttcttgcctctctgaagaaaaaaaaaagaaagaaaaagagcgagagcaaaaagcctcttagtctcattaaaggcaaatgttcccacttagggaaaacagagggtgtttcacccagcacttgcaggaagcagcaggcagccgcagtgcctgcatggccccccagcaccactctgcctcyctgtgtgcccccccagcacccccggctctgggacg

SEQ ID NO: 57550 - DNA, 600 bp, Chicken  19866894313594_3
acaggcagactggggacagggggggttggtccatrgggctgtgctgcacagggatggggtgttaatcccacggctgaagatgtgcctgatgctttatttattagaaaataatatatttccatttcttgcctctctgaagaaaaaaaaaagaaagaaaaagagcgagagcaaaaagcctcttagtctcattaaaggcaaatgttcccacttagggaaaacagagggtgtttcacccagcacttgcaggaagcagcaggcagccgcagtgcctgcatggccccccagcaccactctgcctcyctgtgtgcccccccagcacccccggctctgggacgagggcaggaatgaaagcagcgctccggagtgttggttataacctgcctctacggggcataaaaataagcattgttttaaaaagcaaacaagcaaacacatgttcagcctggttaaatgcaaactccccacgttgttatttattgtttctgctaaagcaacgttcaggggcatctttgaaattgaaagggttccctgtgttcagctttgtagcagcacagagcaagagacagctttygctggagatcagacacagcaaataagagt

SEQ ID NO: 57551 - DNA, 600 bp, Chicken  19866894313594_4
gcatggccccccagcaccactctgcctcyctgtgtgcccccccagcacccccggctctgggacgagggcaggaatgaaagcagcgctccggagtgttggttataacctgcctctacggggcataaaaataagcattgttttaaaaagcaaacaagcaaacacatgttcagcctggttaaatgcaaactccccacgttgttatttattgtttctgctaaagcaacgttcaggggcatctttgaaattgaaagggttccctgtgttcagctttgtagcagcacagagcaagagacagctttygctggagatcagacacagcaaataagagtaacgagaaagaatgaagggtgggaagacaaaggaagcagcaacagggcggtgtgtttgctcatgccagctatgtacacatcaagaggggcttgaacgtccgctgctttagcagctttgaaacttccctgtaaatccggctttgagcgagaataaaatggaaataaataaaagcgtttcaattaaaacagctttaccactcccgtccttaatgtttctatccaagagctctctgcaggcaggaatatttctgctgcgtgcctcgtacccgca

SEQ ID NO: 57552 - DNA, 600 bp, Chicken  19866894313596_1
tttagtttatctaagtcacaggcatgcattatagcttgcctgatctatttttctgtctcaaaaaaagggaaggcaattaggcttggtgaaacaaattccctttccctttcttcagatgagagtgttgcactgaagccttagtcctgaagttacactattccctcattagagagtggcatttatttacatgtatgcagagctgtcccagctggaggaattgctacttgaaaaggcacaggtaagaagggaagatatttttccacccatatcgcctgtttatccaagttcaactacgagctrttgaagcgggtgcctacaggacaagtctcaggatgagaaatgatgcagctgttttcttttttgtccaccyttcctacatgtttaccctttcccacaatctcttaaatgtttgggtccagctgcccatctgggctgcactgcagaacaaacaggaaagagcatcatcttcacttgtcactggtaaggctgcagcttgagtactgtgttcagttttgggccctctctatattgactacaaagacatggaggccctggagcgtgtccagagatgggcagtgaagccatggaaggcctggagca

SEQ ID NO: 57553 - DNA, 600 bp, Chicken  19866894313596_2
aggcaattaggcttggtgaaacaaattccctttccctttcttcagatgagagtgttgcactgaagccttagtcctgaagttacactattccctcattagagagtggcatttatttacatgtatgcagagctgtcccagctggaggaattgctacttgaaaaggcacaggtaagaagggaagatatttttccacccatatcgcctgtttatccaagttcaactacgagctrttgaagcgggtgcctacaggacaagtctcaggatgagaaatgatgcagctgttttcttttttgtccaccyttcctacatgtttaccctttcccacaatctcttaaatgtttgggtccagctgcccatctgggctgcactgcagaacaaacaggaaagagcatcatcttcacttgtcactggtaaggctgcagcttgagtactgtgttcagttttgggccctctctatattgactacaaagacatggaggccctggagcgtgtccagagatgggcagtgaagccatggaaggcctggagcacaagtcttgtggggagcggctgagggaactgggattgttcagtctggagaagaggaggctcaggggagag

SEQ ID NO: 57554 - DNA, 600 bp, Chicken  19866894313598_1
agttacatgcaggctcctttacgtatgctgaattccatatcagtggtctggtcattcatgcggctcatcagctttctccatcaggccttcctcttcagtctccacctggatgaaggtgcccaaatactgaagaacactaagaattaccctctagctggtatttgggtggagtgcacaaataaatgtgacagaagtagccaagaagggaattctgtcatccattagttgtccagagggaggtgtacctgcctatagcaggggattggaaccaggtgatcttaaaggtcccttcgagcccamaacattttgtcattctatgatctcagacgacagaggcaccaatgtgttgtgcatgtgtctttattgtgttataaaaacttatttcttagggaaactcctgactgccttaccaggctcagacacgtctagtctttgagtcaaactctttatccatgaattgcatgggctggatggagggattttctgaagagtctcttcctgtacagtaaaatggaaagctatcctttttcattctgagactgttcctaaatgcagttcagacacacagaaccacagagagtgctgaatattctttaggac

SEQ ID NO: 57555 - DNA, 599 bp, Chicken  19866894313600_1
  misc_feature (1)..(24): n is any nucleotide
nnnnnnnnnnnnnnnnnnnnnnnntggatgaaggtgcccaaatactgaagaacactaagaattaccctctagctggtatttgggtggagtgcacaaataaatgtgacagaagtagccaagaagggaattctgtcatccattagctgtccagagggaggtgtacctgcctatagcaggggattggaaccaggtgatcttaaaggtcccttcgaactgactgcctttaccaggctcagacacgtctagtctttgagtcaaactctttatccatgaattgcatgggctggatggagggatttkctgaagagtctcttcytgtacagtaaaatggaaagctatcctttttcattctgagactgttyctaaatgcarttcagacacrcagaaccacagagagtgctgaatattctttaggacatgtaagtttgttacgagactgcctaataaacaacagccttttcccagctttcctactaagaaatgaacaaagaattctatacaaacagctgcttacaggtaatctagcgctgygtccatagaaaactgatttctgtggttagctgcttcttatgacagacagcaatggcaaagtaatgtca

SEQ ID NO: 57556 - DNA, 599 bp, Chicken  19866894313600_2
  misc_feature (1)..(8): n is any nucleotide
nnnnnnnntggatgaaggtgcccaaatactgaagaacactaagaattaccctctagctggtatttgggtggagtgcacaaataaatgtgacagaagtagccaagaagggaattctgtcatccattagctgtccagagggaggtgtacctgcctatagcaggggattggaaccaggtgatcttaaaggtcccttcgaactgactgcctttaccaggctcagacacgtctagtctttgagtcaaactctttatccatgaattgcatgggctggatggagggatttkctgaagagtctcttcytgtacagtaaaatggaaagctatcctttttcattctgagactgttyctaaatgcarttcagacacrcagaaccacagagagtgctgaatattctttaggacatgtaagtttgttacgagactgcctaataaacaacagccttttcccagctttcctactaagaaatgaacaaagaattctatacaaacagctgcttacaggtaatctagcgctgygtccatagaaaactgatttctgtggttagctgcttcttatgacagacagcaatggcaaagtaatgtcagtggcatggccagtat

SEQ ID NO: 57557 - DNA, 600 bp, Chicken  19866894313600_3
taccctctagctggtatttgggtggagtgcacaaataaatgtgacagaagtagccaagaagggaattctgtcatccattagctgtccagagggaggtgtacctgcctatagcaggggattggaaccaggtgatcttaaaggtcccttcgaactgactgcctttaccaggctcagacacgtctagtctttgagtcaaactctttatccatgaattgcatgggctggatggagggatttkctgaagagtctcttcytgtacagtaaaatggaaagctatcctttttcattctgagactgttyctaaatgcarttcagacacrcagaaccacagagagtgctgaatattctttaggacatgtaagtttgttacgagactgcctaataaacaacagccttttcccagctttcctactaagaaatgaacaaagaattctatacaaacagctgcttacaggtaatctagcgctgygtccatagaaaactgatttctgtggttagctgcttcttatgacagacagcaatggcaaagtaatgtcagtggcatggccagtataaggaccgcccggaaggtatactgaaaccagatatgtggatattctt

SEQ ID NO: 57558 - DNA, 600 bp, Chicken  19866894313600_4
ctggtatttgggtggagtgcacaaataaatgtgacagaagtagccaagaagggaattctgtcatccattagctgtccagagggaggtgtacctgcctatagcaggggattggaaccaggtgatcttaaaggtcccttcgaactgactgcctttaccaggctcagacacgtctagtctttgagtcaaactctttatccatgaattgcatgggctggatggagggatttkctgaagagtctcttcytgtacagtaaaatggaaagctatcctttttcattctgagactgttyctaaatgcarttcagacacrcagaaccacagagagtgctgaatattctttaggacatgtaagtttgttacgagactgcctaataaacaacagccttttcccagctttcctactaagaaatgaacaaagaattctatacaaacagctgcttacaggtaatctagcgctgygtccatagaaaactgatttctgtggttagctgcttcttatgacagacagcaatggcaaagtaatgtcagtggcatggccagtataaggaccgcccggaaggtatactgaaaccagatatgtggatattctttctgtttgta

SEQ ID NO: 57559 - DNA, 600 bp, Chicken  19866894313600_5
ggtggagtgcacaaataaatgtgacagaagtagccaagaagggaattctgtcatccattagctgtccagagggaggtgtacctgcctatagcaggggattggaaccaggtgatcttaaaggtcccttcgaactgactgcctttaccaggctcagacacgtctagtctttgagtcaaactctttatccatgaattgcatgggctggatggagggatttkctgaagagtctcttcytgtacagtaaaatggaaagctatcctttttcattctgagactgttyctaaatgcarttcagacacrcagaaccacagagagtgctgaatattctttaggacatgtaagtttgttacgagactgcctaataaacaacagccttttcccagctttcctactaagaaatgaacaaagaattctatacaaacagctgcttacaggtaatctagcgctgygtccatagaaaactgatttctgtggttagctgcttcttatgacagacagcaatggcaaagtaatgtcagtggcatggccagtataaggaccgcccggaaggtatactgaaaccagatatgtggatattctttctgtttgtaaataccaaat

SEQ ID NO: 57560 - DNA, 600 bp, Chicken  19866894313600_6
ctcagacacgtctagtctttgagtcaaactctttatccatgaattgcatgggctggatggagggatttkctgaagagtctcttcytgtacagtaaaatggaaagctatcctttttcattctgagactgttyctaaatgcarttcagacacrcagaaccacagagagtgctgaatattctttaggacatgtaagtttgttacgagactgcctaataaacaacagccttttcccagctttcctactaagaaatgaacaaagaattctatacaaacagctgcttacaggtaatctagcgctgygtccatagaaaactgatttctgtggttagctgcttcttatgacagacagcaatggcaaagtaatgtcagtggcatggccagtataaggaccgcccggaaggtatactgaaaccagatatgtggatattctttctgtttgtaaataccaaatcattatttaaaagtgtttgtttctgactccagaaccaggaagttccgggctgttcccattgcacactggaaccccacgcagagctctggtccccactgtttcaaagactgtgcaacaggactaagagatgatcatcatctcaataaata

SEQ ID NO: 57561 - DNA, 599 bp, Chicken  19866894313620_1
  misc_feature (1)..(39): n is any nucleotide
nnnnnnnnnnnnnnnnnnnnnnnnnnnnnnnnnnnnnnngctttaactgattgtactctggtagttatgtatgcctagaccaacaaatgttacattataaatttcacaataagaaataactttatatgtattcaagattgtgtgaggaatttatacaaaagaaagaatgttcatataagtaagaataaaggccatacaactattatgagaaaaataggaagatgaggaataaagtcaatacaatattgtaatttagcaaactcccccttcccagtcactgcaccatctgcaaactgattragaagcttacaggtgttcactgtaatgactgtaatgtaagaacatgttttcatcaggcctttgtgtttttataatcttagcttctatcgtaacatctttagataaaatcactgttcattcagcaagattcactcagcaagaatggtgccagcaatgaggatcttaygtatttcagccaaactgagtatctgccacaggcaagtcttctttttagcaataagataaagtggaagatttattaatacagctaccagatgaaacagaactgcgttccataaacacactggcaagtacaatat

SEQ ID NO: 57562 - DNA, 600 bp, Chicken  19866894313620_2
atgttcatataagtaagaataaaggccatacaactattatgagaaaaataggaagatgaggaataaagtcaatacaatattgtaatttagcaaactcccccttcccagtcactgcaccatctgcaaactgattragaagcttacaggtgttcactgtaatgactgtaatgtaagaacatgttttcatcaggcctttgtgtttttataatcttagcttctatcgtaacatctttagataaaatcactgttcattcagcaagattcactcagcaagaatggtgccagcaatgaggatcttaygtatttcagccaaactgagtatctgccacaggcaagtcttctttttagcaataagataaagtggaagatttattaatacagctaccagatgaaacagaactgcgttccataaacacactggcaagtacaatatggctagaacaggtgtttcctcatctgtatctctgagctagcctgtttacctttgtacactcatttgatgtggttattcaggaaaatcagtgcagatgtgtcttgctctacacggtacttgccaaaggttttttgcaacatgaagctacagttttcagctgatacaaa

SEQ ID NO: 57563 - DNA, 599 bp, Chicken  19866894313627_1
  misc_feature (1)..(10): n is any nucleotide
nnnnnnnnnnactcacccttcaggcacttctgcttcccagtaataaagaacattgtttggaaactctatataaaaaaagcaggttcaggccttagggattttgaagagtgggagagtagcactttcaagtacatcataaactgctactacaggtgcctgaactcagctagcacattttttatgcccttctgcaacaacattgggtaatagagataagctgggactctactagaaattcctctagaacacgtaacaatccacacaaaaagggatatccgacttcctgttcttggagcattyacctctaaactagaaaaagaatcggaaaatacattctatactttaacaagaccttcaaggtgatctcggaggcctttgtcatcactcattttcactgcattatatccttattataagcatatattaattttaagtaccagtcattgcagacaaatgactcaaagaagtgagtcatgcaggtgtgttatatcagatttgtctgtcactgttgctagtaaaagctagaaatcaacattccagcaggcactgtaggatcaggcttgtcaccaattgaatactgttaagatgagcatgcaata

SEQ ID NO: 57564 - DNA, 599 bp, Chicken  19866894313628_1
  misc_feature (1)..(64): n is any nucleotide
nnnnnnnnnnnnnnnnnnnnnnnnnnnnnnnnnnnnnnnnnnnnnnnnnnnnnnnnnnnnnnnntaaatcttttgatcttattcatgaatagctgtcattaaatgtcatagggagttattctctatatctgtgaacttgcactgtatgaatcatttttgttgtcatcaaacacatcgtggtgcatgaaaaaagtatcaagagattatacccaggacaaacaagtcaacctaaggcagacttcattagcatcatttgcaaactacatccacagagtactatcttttaaaagggaggctttwctgaatgataagcctgaacagagcatgaacaccatgtagtcatgatgggtcctgtgttttttggagcagtgttcttgcattacagtacacagcacatttttccactcttcttcctaagcaaatagagaattagaataatatatcaaaccatcaaccttaccttattacctgttgtagtaggagcagtgctggctgccaatcttctgtattaattgcttttcacttgtcagtatcttttccaaaggaaaagatttatattttaaatgtgggcctgttatgtaaacaaaagggctgactcc

SEQ ID NO: 57565 - DNA, 600 bp, Chicken  19866894313629_1
ctattggataatctggaacctgttaggtggtaccatataccattgtttgctggtcccctcccgtctcacacagtgcaataataaacactgcagggattgcctcagtttatagaggggagtggcagagccttgcagctctccttggctttttgcaatgcaagagagcctgataaaatgagctgcaactggactgccttggccacctggtaaagccatgcctgcttctagctactggtcttacatcatagcagttcactgttttgagccgggtttgcagtatctttaagcccatgtggctgrgtgtttgccttactgtattttatcacttgggatatgattgctgcaggaaacaagctctagaaaacttacacattgcactcagttcaactgtaatactatggattcaagtatatttggcagycaaactcccctgaagctgtttgcactgagcagatggaaattctatagaggtctcttgacttggttcagaactgacctgaacgattgttacccatcaggtgtgactgatcattaaaggcctgtgagtgtttccaagctgttcccagttttattgcacagtttggatgccaaaaaaaaaaa

SEQ ID NO: 57566 - DNA, 600 bp, Chicken  19866894313629_2
gcagagccttgcagctctccttggctttttgcaatgcaagagagcctgataaaatgagctgcaactggactgccttggccacctggtaaagccatgcctgcttctagctactggtcttacatcatagcagttcactgttttgagccgggtttgcagtatctttaagcccatgtggctgrgtgtttgccttactgtattttatcacttgggatatgattgctgcaggaaacaagctctagaaaacttacacattgcactcagttcaactgtaatactatggattcaagtatatttggcagycaaactcccctgaagctgtttgcactgagcagatggaaattctatagaggtctcttgacttggttcagaactgacctgaacgattgttacccatcaggtgtgactgatcattaaaggcctgtgagtgtttccaagctgttcccagttttattgcacagtttggatgccaaaaaaaaaaaaaaaaagtcaagttgtcaattgatgagaaaggaacgggaaaaagaacatagagattcctgttcaccttctaccctcctctctccttgcttcttttctgcaattttccccttcttcgccatt

SEQ ID NO: 57567 - DNA, 600 bp, Chicken  19866894313630_1
agggcagcacccacagggacttgtgtgggctttgatgtgctcaagctgctagctgtggtaactaatgccgtgctgcaccttgaaggatatctgggggggtggggggggagcaggagcttcccacatcagaaggctgtgtgataaggaaagacaagagaagcgtcatacagaggtaaaaacttgctagttgaagagtatataaattatgtgacagcctatggaagttgtctttacttgacagcacaagtgggaattgtcttcagcttgggtgtgcgagtccagagcagaactattgcttaygcaggtgctgtgtttcaatatcaggttgtacagagccaaccactcatgtcgtgccaggctgttgctggggaggcggttgtggcacagttcacgcaggttgattcctctggaaatacccttggctaacaggaagcacttgagggtgcatggctgaagaaaggcacctccacagcctttcctttttcctttgactcgagcagtgcccatgctgcctcagctgtgtccctgagctgctggacgtgctgcctgcagaggtgagcgctgcctacagcttgggtagcacagtgctctggagtagcg

SEQ ID NO: 57568 - DNA, 600 bp, Chicken  19866894313639_1
agaaacctaatctttaaatgcagatgaactcccccagagacagctgaaacggaggggagatcagtggggatgctgtatcacctgacacatctgctgctgatacgcctgccaggaaatggggagttgtgagcaaggtttgaacccttaggctttactaaggagtagcaaatacagcacagaatgaggtccaacaaggtgggaggcaggtaagattgctgcagatgaagttgtcaaataaactttatcttaagactttaagaagaaattgtaaaatgggcttaacagcgctctttctcacaratgtggtgagcctctggaaactgctgcctccatctatggctgggcttgaatggagtcaaaacatgtctgtgaatatagcataccgttacaagtccaagtcttacasagacacaagtaactcctttkaggaatgtggtttagtggggaaaattggttgtaggtggatggctggactaggtgatcatagaggtcttttccaaccttaatgattctatgactctcccatgtgtctgagtgggatgactttataccataaagcaacctctcagaaatggaaataaggaagaaaatttaattctg

SEQ ID NO: 57569 - DNA, 600 bp, Chicken  19866894313639_2
tgccaggaaatggggagttgtgagcaaggtttgaacccttaggctttactaaggagtagcaaatacagcacagaatgaggtccaacaaggtgggaggcaggtaagattgctgcagatgaagttgtcaaataaactttatcttaagactttaagaagaaattgtaaaatgggcttaacagcgctctttctcacaratgtggtgagcctctggaaactgctgcctccatctatggctgggcttgaatggagtcaaaacatgtctgtgaatatagcataccgttacaagtccaagtcttacasagacacaagtaactcctttkaggaatgtggtttagtggggaaaattggttgtaggtggatggctggactaggtgatcatagaggtcttttccaaccttaatgattctatgactctcccatgtgtctgagtgggatgactttataccataaagcaacctctcagaaatggaaataaggaagaaaatttaattctgtcttaattcctgcaacatttctttttggtatctgggtactggcagcaaccttcagaaactagcctgagggagctacagaatcagaagttttgattcaccagggaaa

SEQ ID NO: 57570 - DNA, 600 bp, Chicken  19866894313639_3
tgagcaaggtttgaacccttaggctttactaaggagtagcaaatacagcacagaatgaggtccaacaaggtgggaggcaggtaagattgctgcagatgaagttgtcaaataaactttatcttaagactttaagaagaaattgtaaaatgggcttaacagcgctctttctcacaratgtggtgagcctctggaaactgctgcctccatctatggctgggcttgaatggagtcaaaacatgtctgtgaatatagcataccgttacaagtccaagtcttacasagacacaagtaactcctttkaggaatgtggtttagtggggaaaattggttgtaggtggatggctggactaggtgatcatagaggtcttttccaaccttaatgattctatgactctcccatgtgtctgagtgggatgactttataccataaagcaacctctcagaaatggaaataaggaagaaaatttaattctgtcttaattcctgcaacatttctttttggtatctgggtactggcagcaaccttcagaaactagcctgagggagctacagaatcagaagttttgattcaccagggaaatgatcagtgtttgtgggctg

SEQ ID NO: 57571 - DNA, 600 bp, Chicken  19866894313645_1
aaagaaataaagcaaattaatgatttataatttaacagatctttttctttcagtgactaagaaattcacttacaaaacagagaatctttaaaatatatgcagtttcacagttgttagcataaattagttatgaaaataccattaccctaaaggaaaaagatactgacctagtacatgatcatgtaattaaattatgcccctcagctttaacactatactaaaaataaatgaagctacagtaacaaatgctccaggactgaacaagcctgaaaattagaataaaaaattattatctcctckaaatctgtggaaacatgctacggtacaagaagaaaaaattaaccttgaagtagtttgaccacctcttattaaacttgtaaaagtaatattggcagttttggtgtaacactgagcagatattcaactggtataaatttgattaatctcactacagacaatggaaatgtactcatttatgtcagcccagaacctgtccccagggttttgttctcttgtagttatctatccatgggattctaaataacactttattaataatgacaagaaatacatttcacatttcggtcatctatagctttg

SEQ ID NO: 57572 - DNA, 600 bp, Chicken  19866894313647_1
taataccgtgctgctaattgtttaactcccaatgcaagcagaagatcaaaataaagtcttacttggaagctagaggcattcttgtgtttgttatgttgatgtaggtgtgtggggttttttttctgttgtttttcagtgagggaggggaaaaaaaaagaagccccagggcaggagatgctttccccaaacctccattcttctacctatagtctttccctgactatttctgtaattcctttaaggactgcaacatttctttctgaaagataacacgtctggaattttagtagctgagtttcrttttcctagacagtcttactcttaggaaaaagacagacatcagactaattgaaattatttgttatatctgcatgtgcaaatataagaggttttcatatctgctgatgtgggagtcactgattgcctgaaatcctatgaaagccagaataattctggttttatatgattgtaagacacaaaatgaaaccagagtcttattacaactgcagttcatcctctagtctgacaaccaaactgctgcccaccaaataaactcctctgtagccacaaaagacatactggctcaycttcatattttgc

SEQ ID NO: 57573 - DNA, 600 bp, Chicken  19866894313647_2
tagctgagtttcrttttcctagacagtcttactcttaggaaaaagacagacatcagactaattgaaattatttgttatatctgcatgtgcaaatataagaggttttcatatctgctgatgtgggagtcactgattgcctgaaatcctatgaaagccagaataattctggttttatatgattgtaagacacaaaatgaaaccagagtcttattacaactgcagttcatcctctagtctgacaaccaaactgctgcccaccaaataaactcctctgtagccacaaaagacatactggctcaycttcatattttgctggtaagaaacacaactagtctattatgaataaggaaagactatgcttagaaaaaaatcttctattcaaaaacagagaagactttctatgaagagttttaatccatagcctactgagttaaaatacagagactaccaaaaaataaacagagaccaaattcaggcctccaatatgtttgaaaaattaggtatctctttcaatatctggagtttcagacattccctcatcattcctaaaccacattctcccttctgtctcccactatactttttctgtccagaattaga

SEQ ID NO: 57574 - DNA, 599 bp, Chicken  19866894313648_1
  misc_feature (1)..(16): n is any nucleotide
nnnnnnnnnnnnnnnnttgaacgtagaaagatcaactgtataacctgtactacacccagttcctccagtatgactggagcttagcataaaattgtaagtcatcttgttgaggttgtgcagaaatatccagtgtaagtaatcacagtagactgaaccaatagatatttccctaagaattgtctctgaaaagaacagaggaaaattcacctttcctattcattttctattcaaaagctcttccaagagctgtggcaaccaagagatacagaagaaaagaagcagagacatctgctgcaagastatcaggactatcagtttcagatggagtgacagaatgtgatctggtaaacagagacaagcactagcagctgaatcctcaacaaggataggttgcttatatcctctataaggatttgtgggtttctgaatattttgtttcttttacatctgagtttgcctgcaaagctctgaattgtaggaggatttaacaacgattaaggaagagataaacaaaaccttttaaccctcagcctctaagcaaagtataaaccaagccatttgcagcttaaataacattctagtcygtacctatagttaaa

SEQ ID NO: 57575 - DNA, 600 bp, Chicken  19866894313648_2
acatctgctgcaagastatcaggactatcagtttcagatggagtgacagaatgtgatctggtaaacagagacaagcactagcagctgaatcctcaacaaggataggttgcttatatcctctataaggatttgtgggtttctgaatattttgtttcttttacatctgagtttgcctgcaaagctctgaattgtaggaggatttaacaacgattaaggaagagataaacaaaaccttttaaccctcagcctctaagcaaagtataaaccaagccatttgcagcttaaataacattctagtcygtacctatagttaaagtctttattcagagataagctaggatttttcagaaaaagaggctgaaattcattttgcactagtctttgaactattaaccatagaatagtctgtgttcactaagaaagctttaaattacaacctgatagaggtctgagattagctgaagtagggtatgaaagaatgcttatatcactaatttcattgcatcaggattttggaatgcaaacatcataaataaatgttccaattgaaaaaataattagcagatacatctttaaatgagaccacagctgacacacata

SEQ ID NO: 57576 - DNA, 599 bp, Chicken  19866894313649_1
  misc_feature (1)..(84): n is any nucleotide
nnnnnnnnnnnnnnnnnnnnnnnnnnnnnnnnnnnnnnnnnnnnnnnnnnnnnnnnnnnnnnnnnnnnnnnnnnnnnnnnnnnnggcaaattaatttttgtccaggggatgaactgacattcatttgtaccatttgcttcctcaggcccctcatacacataccttaaagttatcaagcatatacaacaggcaattaggtcttaatcaagtcccacttttcccacatgatctgaggttggaatccatataagacaggattaagcaataagcatgtcagttaggtgaaaggatgaggacaayggggactctaccacaacagttcttgtttcatagagcaaggaacatcttcacaaaatgttccttttaggtccttttttcgttgacgttcaccaacagggaactaagaatgacttgtaaaactctgcctggcgtttggtgtctcataatccccaggtctgaatgcctggcaggtaggtgcagggatcccctccaaagacttgtggctgttttagaaatgctggtttatgaggcacagctgaaatttcttctcctgactctggagtttcgaaaggatgaagatggtaaaatttccatgagag

SEQ ID NO: 57577 - DNA, 543 bp, Chicken  19866894313654_1
tttatagctatattctgattttttttcagacttttttataactagaaagaaaatttgaatgcactatttcagatgaaacaagatatattaaggaaagctgcagacaaaatcaatctgagacttgatgtgtgttgaaaggacatcagatttaactgtgttcatcagttaagggaggatgagttaatggctgaccctgagctaatgtcttaacttttttgagaagatcaaaatgaaatcactgcacaaaaaaaatctgtgggaaatctcatcagaagaataggaaagggaaaaagatatatwaaaaaactgatcatggaaagatatggtttttttaaatgaggttgacttcacaggaaaacatttaaataaaaagtaatgtaacaagctaacaaacactaaggagattcaaaaagactgatgtacaggactacacagagtaatatgcattatgttcctattaaggaatgtgtggtatgggataggatctcaatcttatgttaattgatatttttatcagtgaaccataaaaagaaatttaacatt

SEQ ID NO: 57578 - DNA, 599 bp, Chicken  19866894313655_1
  misc_feature (1)..(166): n is any nucleotide
nnnnnnnnnnnnnnnnnnnnnnnnnnnnnnnnnnnnnnnnnnnnnnnnnnnnnnnnnnnnnnnnnnnnnnnnnnnnnnnnnnnnnnnnnnnnnnnnnnnnnnnnnnnnnnnnnnnnnnnnnnnnnnnnnnnnnnnnnnnnnnnnnnnnnnnnnnnnnnnnnnnnnngctgtataggttaattccagggttttaaagtgatttgtcatacctggcaaacatgagcagctgaacacaagatagcttctgagttgcaacaatactgtgtattttctccttccctaatgtatgatgctgtatgyttcattcttcttaattggcccttttgctcatcaacttgcaagaaagagtttgggttgtaataaccagtggggaaggaaaagctgttgaatgactgttacacaaactgtggaaaatctaacaaagatttaaggaccagagggagctgaaaggttgctccatcacagtggaaagctgttggcatcacagaggaaatccattcttctggaagctcatttgttaaacacctttcaaaactgcagtctataatctgctgcccgtggttttctttccagggtaacacaaaaagcttagtaactgt

SEQ ID NO: 57579 - DNA, 585 bp, Chicken  19866894313659_1
ctttgtctctattcctacaatgaccagaagggcacctggtgaatttctggaccccaaatcaaaaacattatgcctaaatacaagcagtggtcccagtccacaacaagtatcccactgctgacacaacaggaagcctccaggagcattacgtatgaggaaaacgtgaccagtgctgtactcaaacccatcctgctgccttgccaaacgcaccctacactctaacagtcaatccaacgtttaaccgtcattaggtttcaggggtaacagctctctgcactgaccagagtcttttcccatcayacaggcctacygttttcgtctgcaaacaggagcaggtagggatgtcccagtcagttcaataaatgatttgaattaggcaccaaaaacctgtgtctaaattcacagaaattgcagaggatatgattgagctctgcagtttgttcaaaatcacatctgaagacagscccaaggattgctgcactcctgaaatgacagccagatttactaagaaatctgctcagagcgcagggcaggaggttgggtggtaatttcacagcaccgggagaaagaaatgaataattcatg

SEQ ID NO: 57580 - DNA, 574 bp, Chicken  19866894313659_2
ttcctacaatgaccagaagggcacctggtgaatttctggaccccaaatcaaaaacattatgcctaaatacaagcagtggtcccagtccacaacaagtatcccactgctgacacaacaggaagcctccaggagcattacgtatgaggaaaacgtgaccagtgctgtactcaaacccatcctgctgccttgccaaacgcaccctacactctaacagtcaatccaacgtttaaccgtcattaggtttcaggggtaacagctctctgcactgaccagagtcttttcccatcayacaggcctacygttttcgtctgcaaacaggagcaggtagggatgtcccagtcagttcaataaatgatttgaattaggcaccaaaaacctgtgtctaaattcacagaaattgcagaggatatgattgagctctgcagtttgttcaaaatcacatctgaagacagscccaaggattgctgcactcctgaaatgacagccagatttactaagaaatctgctcagagcgcagggcaggaggttgggtggtaatttcacagcaccgggagaaagaaatgaataattcatg

SEQ ID NO: 57581 - DNA, 421 bp, Chicken  19866894313659_3
gaccagtgctgtactcaaacccatcctgctgccttgccaaacgcaccctacactctaacagtcaatccaacgtttaaccgtcattaggtttcaggggtaacagctctctgcactgaccagagtcttttcccatcayacaggcctacygttttcgtctgcaaacaggagcaggtagggatgtcccagtcagttcaataaatgatttgaattaggcaccaaaaacctgtgtctaaattcacagaaattgcagaggatatgattgagctctgcagtttgttcaaaatcacatctgaagacagscccaaggattgctgcactcctgaaatgacagccagatttactaagaaatctgctcagagcgcagggcaggaggttgggtggtaatttcacagcaccgggagaaagaaatgaataattcatg

SEQ ID NO: 57582 - DNA, 600 bp, Chicken  19866894313661_1
tgctgagtgcaatgtggaggatgcttgtgccttagagttttgtatgctgttctcctgaaacagtggaattcagttaaaatagaagtacttacggctttttcctctgttgttagaggaagtgttagaaatgaacgtggttggacccagttgcagttgtgaaattgtgaacttgagggattacaggcctattgtagttaatggcatctggcttaggcatgagctgtattttggtctgtctaaaatatatacagatatgtgcatatttgtatataatttttttctgcagggtaatgtaaaacrtgtatgcatatgtgtatgtgattcaataagcaaactgtcaagtctgagataataatgcattcaagttaaaattagttaagaacacatactgttaccagaaatgtgtcattaatctgcaagaagtttgcaactgtttgctgctaaaagagtgacagtaaagtctttttttctttaaccttaaaaataataacaaaaaatgttgaatctgtggcatcagatctgtgtgcacttaagaaacagtctgtgtgggttgtttttgttttgcttgcttgcttgttctcattttccagagagtcttat

SEQ ID NO: 57583 - DNA, 600 bp, Chicken  19866894313668_1
ttttacctaatctttgctgtccgaagattagctggtttagagatgtacaatgaatttcatttattgaaagaacagttttttatggctgtgtttatggctaagccagttaatgtcaccaggagcagagagtatttggtacctctgaaaacttagccttgtcttattatttgttttgcttgtgttgccagatcttaaaacttccttggaattgctggtgctttccagttagacaactttttaacagaataaatattaataaagttgtgggagaggttgactagccagctctggagggcagcrtagtgcatctgttcccattaactcttgactaagaagtttttgcatcaatttaattgtggaccctctgtccaatgagtaacaggttctcaccatgtgtgctgtattctttttgggaactaacaatacttctcaaatatgatggttttaaagaggctagttgactgaattctgtcagagtagggaagagattgtttttattgcttattgttgtgttgttttccttttctaggaataagtaatgtagagtgcaatccaaataatgttttagtgttaatgttttagttgtttttctacttcagc

SEQ ID NO: 57584 - DNA, 600 bp, Chicken  19866894313668_2
atttaattgtggaccctctgtccaatgagtaacaggttctcaccatgtgtgctgtattctttttgggaactaacaatacttctcaaatatgatggttttaaagaggctagttgactgaattctgtcagagtagggaagagattgtttttattgcttattgttgtgttgttttccttttctaggaataagtaatgtagagtgcaatccaaataatgttttagtgttaatgttttagttgtttttctacttcagcatcatacataggaacaaggaggactagatgagggagaacttgaccaractatttaggttttttttaacctgttttgctgtcaaagaaatagcaccaatacctacacactgagattacttccgtatgttttatccacagaagaaccagtccacgtgtccattcaagaatctggaccagcctcacataaggtaagtgctttagcatttatgatgcttgtatgcatgtaagtttaaaaaaaacaaccagtagatatttgccttagttttccctaggttttgttttaacatttcctttaactgcatacaacaagaactgtatgtacattcacagcttcatggcaatagatt

SEQ ID NO: 57585 - DNA, 600 bp, Chicken  19866894313674_1
tgtggcagagcagacagttgccctagaatctggtatccgtgcaaataaagagctcctgtaggaaagcagcatttgaaaggtcacagccaggctcctaaaagcagctgcagccacacaatcagcagcaggaaaaggtaaaactcttgagaatgaaatgtgctgcattaagggcaattaactcttcaggtacttcgaggaagagccagcaacttgacgtacagaaattaagttagctcccccaagttatacttcaacactgtaaacctggacacggtgggaccaaggttcccatggttcttrgccaatgtgtttaactgtgaatgaattygcagcacttctatttacataacccagtgatcatgtccagcaaggccaccacacaaatcagagagaactytcaggaataaatgcttgtgacatggagccagagatttccctcgcttacagctccctgtatttcaggcygcctatcccaaagcaatttaccacagtaactagcacacaagatccaaacgttgctgcaaattttttstaacccttacatacaccatctcctcatttgtgaggacacaagctcaactgtacaagaagaggcagaag

SEQ ID NO: 57586 - DNA, 600 bp, Chicken  19866894313674_2
tctggtatccgtgcaaataaagagctcctgtaggaaagcagcatttgaaaggtcacagccaggctcctaaaagcagctgcagccacacaatcagcagcaggaaaaggtaaaactcttgagaatgaaatgtgctgcattaagggcaattaactcttcaggtacttcgaggaagagccagcaacttgacgtacagaaattaagttagctcccccaagttatacttcaacactgtaaacctggacacggtgggaccaaggttcccatggttcttrgccaatgtgtttaactgtgaatgaattygcagcacttctatttacataacccagtgatcatgtccagcaaggccaccacacaaatcagagagaactytcaggaataaatgcttgtgacatggagccagagatttccctcgcttacagctccctgtatttcaggcygcctatcccaaagcaatttaccacagtaactagcacacaagatccaaacgttgctgcaaattttttstaacccttacatacaccatctcctcatttgtgaggacacaagctcaactgtacaagaagaggcagaagcatttctgtagcccttcaaacatcgatg

SEQ ID NO: 57587 - DNA, 600 bp, Chicken  19866894313674_3
aaagcagctgcagccacacaatcagcagcaggaaaaggtaaaactcttgagaatgaaatgtgctgcattaagggcaattaactcttcaggtacttcgaggaagagccagcaacttgacgtacagaaattaagttagctcccccaagttatacttcaacactgtaaacctggacacggtgggaccaaggttcccatggttcttrgccaatgtgtttaactgtgaatgaattygcagcacttctatttacataacccagtgatcatgtccagcaaggccaccacacaaatcagagagaactytcaggaataaatgcttgtgacatggagccagagatttccctcgcttacagctccctgtatttcaggcygcctatcccaaagcaatttaccacagtaactagcacacaagatccaaacgttgctgcaaattttttstaacccttacatacaccatctcctcatttgtgaggacacaagctcaactgtacaagaagaggcagaagcatttctgtagcccttcaaacatcgatgaatacaaagtttttacaaaattttgtctccagcagcagcattttgaactttccttttgccattacacag

SEQ ID NO: 57588 - DNA, 600 bp, Chicken  19866894313674_4
taagggcaattaactcttcaggtacttcgaggaagagccagcaacttgacgtacagaaattaagttagctcccccaagttatacttcaacactgtaaacctggacacggtgggaccaaggttcccatggttcttrgccaatgtgtttaactgtgaatgaattygcagcacttctatttacataacccagtgatcatgtccagcaaggccaccacacaaatcagagagaactytcaggaataaatgcttgtgacatggagccagagatttccctcgcttacagctccctgtatttcaggcygcctatcccaaagcaatttaccacagtaactagcacacaagatccaaacgttgctgcaaattttttstaacccttacatacaccatctcctcatttgtgaggacacaagctcaactgtacaagaagaggcagaagcatttctgtagcccttcaaacatcgatgaatacaaagtttttacaaaattttgtctccagcagcagcattttgaactttccttttgccattacacagcacctacttttaaacaaagtttaattctgcttagtaaagcaagaaaaatactgtaagcytcaaatatc

SEQ ID NO: 57589 - DNA, 541 bp, Chicken  19866894313674_5
gctcccccaagttatacttcaacactgtaaacctggacacggtgggaccaaggttcccatggttcttrgccaatgtgtttaactgtgaatgaattygcagcacttctatttacataacccagtgatcatgtccagcaaggccaccacacaaatcagagagaactytcaggaataaatgcttgtgacatggagccagagatttccctcgcttacagctccctgtatttcaggcygcctatcccaaagcaatttaccacagtaactagcacacaagatccaaacgttgctgcaaattttttstaacccttacatacaccatctcctcatttgtgaggacacaagctcaactgtacaagaagaggcagaagcatttctgtagcccttcaaacatcgatgaatacaaagtttttacaaaattttgtctccagcagcagcattttgaactttccttttgccattacacagcacctacttttaaacaaagtttaattctgcttagtaaagcaagaaaaatactgtaagcytcaaatatcgtaagctc

SEQ ID NO: 57590 - DNA, 317 bp, Chicken  19866894313674_6
tttcaggcygcctatcccaaagcaatttaccacagtaactagcacacaagatccaaacgttgctgcaaattttttstaacccttacatacaccatctcctcatttgtgaggacacaagctcaactgtacaagaagaggcagaagcatttctgtagcccttcaaacatcgatgaatacaaagtttttacaaaattttgtctccagcagcagcattttgaactttccttttgccattacacagcacctacttttaaacaaagtttaattctgcttagtaaagcaagaaaaatactgtaagcytcaaatatcgtaagctc

SEQ ID NO: 57591 - DNA, 600 bp, Chicken  19866894313675_1
gatgtgattttacactgctaggaaggtgatgcacagagatgcaccactacaaatacattggccacgtagttctctttgtttcccaatgacggatgtccgaaggcttctctgctctgagtggactgagtctctcagtgacaggccactgttataatgtcagcagggcacacctttgggataaactcttctcccccaccacatgcataaggactgttaaagacagtttggcagcatcaataaaatgagtaggtgcactcacagtccattgaggtgcagggagttgtaccaaagcagccacaytgtggtgtcaatggaggcaaaccctcacaagctaaggagggctgaggccaggaggcagtggggtagttgtaaataaaaaagcatttggtgtcaatgacaagttagtgttgcttccagttaaatgttaaaacagtactcaaactgtttttctgcatttagaatgagatctgtgtcaccaagctttagtcattaggattagatgtctcatcctaggtcttcatcagccaggggctaattcagtccattcagttcttgcttaaaatatggacccaagctgggtgggatgaatcaccgacccct

SEQ ID NO: 57592 - DNA, 600 bp, Chicken  19866894313675_2
tttggtgtcaatgacaagttagtgttgcttccagttaaatgttaaaacagtactcaaactgtttttctgcatttagaatgagatctgtgtcaccaagctttagtcattaggattagatgtctcatcctaggtcttcatcagccaggggctaattcagtccattcagttcttgcttaaaatatggacccaagctgggtgggatgaatcaccgacccctccccactgactgtgcaggaagctgagacaacgttcttaaaccagcttcaaaacaacacaaatttgtcttgtttccaattacastgctgagctgagagctcctactcacgagcaattgctgcaataattgtactcttcttccagctgcgtcttcaaaggaagataaaccagttgtcttcaccacgtgcacggggtaggtgaacaacatccagaggagggtgcaggctctgagtcccagtttgacagaaagatctaattgcagactgggaaggggcagagtgagtacagacagagacatccccctctgaacagtacagtctgctgcctggagcaggcaggcaccccctcaccaatcaaagtgatatcaaagtgaaaactcagagg

SEQ ID NO: 57593 - DNA, 600 bp, Chicken  19866894313679_1
gatcttccttgtcctgcagggttttttgaagtgaggtgatcctcatttagatcaacatcttggcttgttaatatttttgggcacctggagagatcaagtttataagtgttaagaaatatactgaaaaatgtgcagtcatatgttctctgactggggcctatgggcttaatcagaacactggatatgcaggctttcaaattgcctagcctccttagaactacttgtgctctctattatcacctctcttcattcttttcagttttcctgaatgcacaagcctccataggaagcgcatcttgsgtttccttgtctacttttgtgacagctgcttgtcagcaagcatgtcaggagtgtatatataagaaatgaagtttcctgttgacctgtgtatactgtggggatgagtgggtctggcagaagcacaagtgccacagtttgtgactgccacttgatccagtgtgctgcatgtagtagtttgtagattgacccgtagagggagatcattaaattctttctgatactgtttttgctagggtagatcagattgggtcgcagctggatccacactgctgctcaggatggccacaggtgttgtcctgc

SEQ ID NO: 57594 - DNA, 600 bp, Chicken  19866894313690_1
cccttcaagtccctttcttaggggtgttgggacaagctcatgggccaggcagaaggggagacatccttgtcctccctggaagaaagggccccattcaacagaaacatgcatttagccaacagcatgatggtatctaacaccattatcccagagaacacatatgtaggatgtagcagtgtctacaggaatggaaatgtgcactggcccatgcattcatgtaatagttctcttcagacatgggagtcacggtacagatcccagactggcttttctcctcaacttatctaggtcttttttaamtttttgtcaggtaccctagatgctcttgacagagaggaggagcctatatttgatcaccccacctctcaagtatgcaagttgcacacttaggtgtgatgcasgtgctgtaaagttatctgtcagagaatacaaaagagaatttaaagtagtactcaggagatgcagccacacaatttccaatcctattatttgttgacaggatttatgaaagtccctcccacgcactggttagaaagttcagcacttcatttcttcctacacttcctcaggcatcaatctatggccctcagctatgcatcc

SEQ ID NO: 57595 - DNA, 600 bp, Chicken  19866894313690_2
aaacatgcatttagccaacagcatgatggtatctaacaccattatcccagagaacacatatgtaggatgtagcagtgtctacaggaatggaaatgtgcactggcccatgcattcatgtaatagttctcttcagacatgggagtcacggtacagatcccagactggcttttctcctcaacttatctaggtcttttttaamtttttgtcaggtaccctagatgctcttgacagagaggaggagcctatatttgatcaccccacctctcaagtatgcaagttgcacacttaggtgtgatgcasgtgctgtaaagttatctgtcagagaatacaaaagagaatttaaagtagtactcaggagatgcagccacacaatttccaatcctattatttgttgacaggatttatgaaagtccctcccacgcactggttagaaagttcagcacttcatttcttcctacacttcctcaggcatcaatctatggccctcagctatgcatccacacgtgttgttgacatacttaattgcaattctgcagtatttagacacctgcagagggaaaactgacatcacttcacattatttttgaagcctccctattt

SEQ ID NO: 57596 - DNA, 600 bp, Chicken  19866894313690_3
aatttccaatcctattatttgttgacaggatttatgaaagtccctcccacgcactggttagaaagttcagcacttcatttcttcctacacttcctcaggcatcaatctatggccctcagctatgcatccacacgtgttgttgacatacttaattgcaattctgcagtatttagacacctgcagagggaaaactgacatcacttcacattatttttgaagcctccctatttgttctgttttctgttctcctttctttctgccccagaacctctcactagcatgttgacatgagcgtgctgyattacagcagctgtttgcagccatgcaaacaaggtgacatggctgtagagcagaccatgcttcacacctcttcaggctctctatttccaagccttcacaggacagaactgctttgttccatcacttctgaaagatctgttcagcaaggactccaaaaagttacatgattcatctccaagctgttaagttacacataaacaactattaatcagtatttatctatgctgtccttgaaatcaagcaaataacctctctaggcaagcacagtacttacttacacttagcattagcagtagaaaa

SEQ ID NO: 57597 - DNA, 600 bp, Chicken  19866894313692_1
gaatatcttcgattacttctaggatctgtaattaatcctaccattgcagtctggtaattaatgaatctacagaagccaaataaagaaggaacaatgcattgacacatctgaaatatcacaaaaataatggtattgtttgagctgtctgtgcttaattccttctcacagatactggctcagtcatcttatcttcaaactgatgcagcagatatgtaaggtatgcagatatgccactctacttacaagcttatttagttgacaatttcactttcgcttctgttttttagtcttccaccaagygggtgggttgtgttggtgattagactagatgatcatagtggtcttttccaaccttaaagatcctatggtcctgtgtcacaaaggaagaagcaggaaagaaaaatatttattatgtacatggaagctatttttaacatgctatactgaacaggtaaggcattaaattaattttgtaaatgccacttgcctgaacttgaagaaataatgagttatatactagccaggttctacaaatatcattccttgatgctgcaatctgaaccattttttgcattaagtgtattttaaagagctttatag

SEQ ID NO: 57598 - DNA, 599 bp, Chicken  19866894313693_1
  misc_feature (1)..(142): n is any nucleotide
nnnnnnnnnnnnnnnnnnnnnnnnnnnnnnnnnnnnnnnnnnnnnnnnnnnnnnnnnnnnnnnnnnnnnnnnnnnnnnnnnnnnnnnnnnnnnnnnnnnnnnnnnnnnnnnnnnnnnnnnnnnnnnnnnnnnnnnnnnnnnntgcaagtacccagtctgtaaaacatcaaagggctggagagaagggtgctgcagggatggctcggctgctatagagatttttagggagagttttgtcctggcagccattcattgctgccctctgtcctgttttacttggagagaagtgagctggagggwgatgccttcctgcccagctgaaacatttcaaccagaagagagaaataaaaaagagtgtagtaaaagaaaactagttcctgtctgtagtgttttaaacagcttgtgggcctttgatctaggattactagtatcctgcamattggttgtcattatttaaacatcagacagggaatgcttgccctaggccctgggccaaataaatatggttttgctggaaaatgattttgcagtgttaatgggaacacgagctgaggagaggggaaggctctcatctccctgcctgcatctcgttacggctc

SEQ ID NO: 57599 - DNA, 599 bp, Chicken  19866894313693_2
  misc_feature (1)..(4): n is any nucleotide
nnnntgcaagtacccagtctgtaaaacatcaaagggctggagagaagggtgctgcagggatggctcggctgctatagagatttttagggagagttttgtcctggcagccattcattgctgccctctgtcctgttttacttggagagaagtgagctggagggwgatgccttcctgcccagctgaaacatttcaaccagaagagagaaataaaaaagagtgtagtaaaagaaaactagttcctgtctgtagtgttttaaacagcttgtgggcctttgatctaggattactagtatcctgcamattggttgtcattatttaaacatcagacagggaatgcttgccctaggccctgggccaaataaatatggttttgctggaaaatgattttgcagtgttaatgggaacacgagctgaggagaggggaaggctctcatctccctgcctgcatctcgttacggctcaccccagcacaatggactgggagtcatcaggaaggacagctccatttctatcagatgctcagtgcggtttttcttgggcttgcagcagcatcgggtttgttttggactaggctgaataaaatagggttccacagaggc

SEQ ID NO: 57600 - DNA, 600 bp, Chicken  19866894313693_3
tttgctggaaaatgattttgcagtgttaatgggaacacgagctgaggagaggggaaggctctcatctccctgcctgcatctcgttacggctcaccccagcacaatggactgggagtcatcaggaaggacagctccatttctatcagatgctcagtgcggtttttcttgggcttgcagcagcatcgggtttgttttggactaggctgaataaaatagggttccacagaggctgggagaaaaagtacacatgtattcctcaatgatgatttgggaattactggaaaggcactgaaatgtatrctgtattttcagaaagcagtgtggattttcagtaatcttctgtttcagtgctggaactgttaaaagtcagtggtgttgtctcttcatggtgactattctcatgctgcagcaagccccatgtcagtagccatgcagcctggtatatgcagcacattctcttgagctgccttgcagatcctgcagctcttaaattagctagaccttttttctcaactgtcatcttatttgtaatcacgtaatacctttcagtccttgcaaagacctttcaagttttcaggagagctcctgcctattgcaatg

SEQ ID NO: 57601 - DNA, 599 bp, Chicken  19866894313702_1
  misc_feature (1)..(99): n is any nucleotide
nnnnnnnnnnnnnnnnnnnnnnnnnnnnnnnnnnnnnnnnnnnnnnnnnnnnnnnnnnnnnnnnnnnnnnnnnnnnnnnnnnnnnnnnnnnnnnnnnnncctcccagcacatcccaaccttgagcaagaagttgggagggagcacagctgcaaactctgacctgaactggccaaggagatatttcataccacgtatcctcatgctcaggaataaaaactgggttggaggaaaaagaggaggaggtggttctgatttccacagtggccattgcttggagactgactggacattgctctackattagacattctgaaacaactgcaaaacgtagttctgcacttctgcttcaaatacagccataaactgaaaaaaataaaagattaatccaaatgctatattcctttttacttgcttattctgtcccacaccggctaaaaccatacgactggtcaattttcaaaaggcataatctgtctgttggcagaattaaactaatgaaaaatgcctgtagtcatctacattttaaatattttgttctgtacaatacatttaacccaagaaaaaaaatacagaccagtagctaaaagaggtacttgtt

SEQ ID NO: 57602 - DNA, 493 bp, Chicken  19866894313702_2
gtctgttggcagaattaaactaatgaaaaatgcctgtagtcatctacattttaaatattttgttctgtacaatacatttaacccaagaaaaaaaatacagaccagtagctaaaagaggtacttgttatttataacagtaatatattaaatttgaaagcggtgtacatacaaatgtctcctgatctgtaataagttctgtacgtgccagcaggaagattaaaatccaattaaaaagactaaaatgtgtcttaaaagtaatttacttagagagatttttcatttacagaagtatataacagyatccagtatgtcagctatgtcaccaatgaaaaacatttcttaactcagaaataattttaaactgaagtaaatgaggataaaccacacaggtctaaaaggtgctttttacattggtgaacagcttcattacagatggctgggacacaaacacacaaaagcagattggatgcaaagcacatcttcccatttgctg

SEQ ID NO: 57603 - DNA, 388 bp, Chicken  19866894313706_1
ttcaaaacctgaggtgtatctgatgactgctgtgctatagcttttcctcttcaggaattaaaaagaagtttctcctttctttcctccctctcacagtctcagtcattcccacaaggccggaatggatttaaagttgggatgaaattagaagggctggatcctgagcacccctctcgattctgtgttcttacagtggcagaggtagctgctattcctatctttgaatcctgtttacatttatggtatttttgttaaaataaaaagcggaaacataagaagattattttagttcattaacgrttaggaggatttcagagtgatactgaaggaataacgttaagtgattcagaatctatatatctacagaaatcctactgtcatatttgtg

SEQ ID NO: 57604 - DNA, 600 bp, Chicken  19866894313707_1
ccttctggatcattaagtgcacctcaaaagaaatattatcagatcagaaggaaagatgaggggatttaagactgcgaaacaataaaagccgcacacacaaaaactataatcctcttctcatcccaataattctaaaattaatgagttgtgcctaacatccattttctgttctgtaatgttccataaagtttttgcagcgaaacatcagattttccccttcctggcaggcagctcacttcaaaaaaaatctgcaaatatatttcaataaatggactatgctccccacttcaattaaaaagytgacaygacaaagagatagaaacatgaatcctcattaacacttctgataaccttgactgtgctttcactcaagctgtccttcacatccaaaaaacctgagtgagaaaaagcttaatagcacctgattactttgtttataaaagacttttccacagcaagtaggaagatcagagtcttgttcaacttcaaaaattgcttctattaacaaacaagacattatttcctcccttcccaaaaaatctttcctcaatctggaaaggcatcggttaagctttctccatttggacctctttcaagaat

SEQ ID NO: 57605 - DNA, 600 bp, Chicken  19866894313707_2
ggatcattaagtgcacctcaaaagaaatattatcagatcagaaggaaagatgaggggatttaagactgcgaaacaataaaagccgcacacacaaaaactataatcctcttctcatcccaataattctaaaattaatgagttgtgcctaacatccattttctgttctgtaatgttccataaagtttttgcagcgaaacatcagattttccccttcctggcaggcagctcacttcaaaaaaaatctgcaaatatatttcaataaatggactatgctccccacttcaattaaaaagytgacaygacaaagagatagaaacatgaatcctcattaacacttctgataaccttgactgtgctttcactcaagctgtccttcacatccaaaaaacctgagtgagaaaaagcttaatagcacctgattactttgtttataaaagacttttccacagcaagtaggaagatcagagtcttgttcaacttcaaaaattgcttctattaacaaacaagacattatttcctcccttcccaaaaaatctttcctcaatctggaaaggcatcggttaagctttctccatttggacctctttcaagaatagaatg

SEQ ID NO: 57606 - DNA, 600 bp, Chicken  19866894313707_3
tcctgattcttaatccagtaatacctttaaagtcttgatgcacctaattacaaagcattgctgtagctaaagattatcccaagccacatacagcctaagaaatcccttaagcctccttcttccagagagatgaagacagacataaagatgataacatatggaaaatgaatgagaaagtagcagcctaacagggatactagaaagaagggcagcatccagaagaattaagcacttaatagaaagtttccatttgaatggcatccaaaaatcagtttcttcagtgtactggaagcatgcagmagctaaagcaggaatcaaactgtttacagactggaggctaaggtgcacaacacagacagagcccagcatagtcaagagccaccttgaggacaaagctgataaaaccaaaaatggactttcttacctggaaaaataagaacacccaaatttacctcaccttattaacactgaatatctaaagagcggcagaattggatttgcgtgcatgtattgatatgcacaacctggctgcaaccatycatttcagaagcttggttagtgggtgccaatactcaagtgccaggggtacgggtgctgcat

SEQ ID NO: 57607 - DNA, 600 bp, Chicken  19866894313707_4
aaagtttccatttgaatggcatccaaaaatcagtttcttcagtgtactggaagcatgcagmagctaaagcaggaatcaaactgtttacagactggaggctaaggtgcacaacacagacagagcccagcatagtcaagagccaccttgaggacaaagctgataaaaccaaaaatggactttcttacctggaaaaataagaacacccaaatttacctcaccttattaacactgaatatctaaagagcggcagaattggatttgcgtgcatgtattgatatgcacaacctggctgcaaccatycatttcagaagcttggttagtgggtgccaatactcaagtgccaggggtacgggtgctgcattcatgtagagggctgctttaacccatctcactgggctgcaatgacaccttgccctctcctatgcctaaagcacaaggcactgatccagcgcctagagaactcaacggacaagtcatgtgaagccatcatcatggaccctgcatcttttgctatgccctcaagttctctctgagcagtctgaggacagatcaaaggcaggacaccccaaactgtacacataccaagctcccacaacaagg

SEQ ID NO: 57608 - DNA, 600 bp, Chicken  19866894313707_5
aaggcactgatccagcgcctagagaactcaacggacaagtcatgtgaagccatcatcatggaccctgcatcttttgctatgccctcaagttctctctgagcagtctgaggacagatcaaaggcaggacaccccaaactgtacacataccaagctcccacaacaaggtgttaaacaaccattacactgtttagttacattgactcccagatgccctttccgccctcaacatctgtacaactgcactactaacagcaaaaaattacattaacctgcttaatacagctagcgtaggaattaaygctgcaggaatgtgttcaaatttgacactgagtaattaaactaaaccatatgtatttaaagtgcattgttccaaaagcactctcaaaccactgcagagctttagataattatgtatagcagtcagtgcgcgctggaaagagaagatgaagaaatgttcctgacaaagtgaaaggaacatcatctgaagaaggaatttgggtgtcggatagcacataacctataaattatgctgtcaaaaaaaaaaagagagagataggggaaataaaggtacaaaaacagctatttctgtaagtgcagct

SEQ ID NO: 57609 - DNA, 600 bp, Chicken  19866894313710_1
tgaagtgttcattaaactaaatcaatgtatggtatagtccatgtatgttaaattctacattagggctggcttagcatttccttatgtggggatgtaaatgaaaaaagggaatgttacagggatagttggggtaagaagaaaaactcactttgagtttaggaagtaaatttcaagtagaaatattcctgcctgcatgaaacaaaatgtattaaaacaaaacaaaataaatccacaaggaaacccttccctcctcacccctcttccctaagaggtcatttgatgacttcctagaaacaccarcatacacttagtgcaagctctggaaaagcagttggcataaattataaattatttgattctatgatgacagtgactttctgcaataattaagaaaataataatactctgataaattgcagtatgataaagcttgtagacatgtctgttttaatttgattatgtatttcatgtcaggaagttttctaggaatggcctaacttaataggaatagcagctgagttgtacggattatgtttgaaatgtctccaagctgcttatgggttctgagatatcgtggttataaaaacgcagatttttttt

SEQ ID NO: 57610 - DNA, 600 bp, Chicken  19866894313712_1
tattcccttctgcctttattctcctaaactctgaagtctgttgcagtgaagaaagccctaagatgctgaattttgggaagggagaacctcgactctagttcttatcctactctgctcctaaaagcttcagccattttcttcacttgtccttgcctatacaataagactgatgatgttatctcctttggaaagtgccccaaggtctttggatagctagaaataaatatttttgtttttcacagaatctcccaatggttcccaagagcagctgattttaacataccattgccccatgaagakgtacartgaaggaattttgcaggcctcaaaacagaaaggctgggaacaccatagtggtcatcaaatkgagaacaacaggtcagctgtagccaatgattgttcatacactccttccctgagcatgaaatggagcagcctactattwgtcctcatcctaaggctacrtggtatcttcaccataaggacaggaaagactaattctcttgttgaggcagtagtgcataaatggcatttcttttcagtcttgccagcattcagacgttagcaaagcatttcactgataattattgatttgctgta

SEQ ID NO: 57611 - DNA, 600 bp, Chicken  19866894313712_2
cttctgcctttattctcctaaactctgaagtctgttgcagtgaagaaagccctaagatgctgaattttgggaagggagaacctcgactctagttcttatcctactctgctcctaaaagcttcagccattttcttcacttgtccttgcctatacaataagactgatgatgttatctcctttggaaagtgccccaaggtctttggatagctagaaataaatatttttgtttttcacagaatctcccaatggttcccaagagcagctgattttaacataccattgccccatgaagakgtacartgaaggaattttgcaggcctcaaaacagaaaggctgggaacaccatagtggtcatcaaatkgagaacaacaggtcagctgtagccaatgattgttcatacactccttccctgagcatgaaatggagcagcctactattwgtcctcatcctaaggctacrtggtatcttcaccataaggacaggaaagactaattctcttgttgaggcagtagtgcataaatggcatttcttttcagtcttgccagcattcagacgttagcaaagcatttcactgataattattgatttgctgtatttata

SEQ ID NO: 57612 - DNA, 600 bp, Chicken  19866894313712_3
gaattttgggaagggagaacctcgactctagttcttatcctactctgctcctaaaagcttcagccattttcttcacttgtccttgcctatacaataagactgatgatgttatctcctttggaaagtgccccaaggtctttggatagctagaaataaatatttttgtttttcacagaatctcccaatggttcccaagagcagctgattttaacataccattgccccatgaagakgtacartgaaggaattttgcaggcctcaaaacagaaaggctgggaacaccatagtggtcatcaaatkgagaacaacaggtcagctgtagccaatgattgttcatacactccttccctgagcatgaaatggagcagcctactattwgtcctcatcctaaggctacrtggtatcttcaccataaggacaggaaagactaattctcttgttgaggcagtagtgcataaatggcatttcttttcagtcttgccagcattcagacgttagcaaagcatttcactgataattattgatttgctgtatttatagaaagctaggacctagtagaattcaatattcaggagatgccaattttctatgaatacctga

SEQ ID NO: 57613 - DNA, 600 bp, Chicken  19866894313712_4
gtccttgcctatacaataagactgatgatgttatctcctttggaaagtgccccaaggtctttggatagctagaaataaatatttttgtttttcacagaatctcccaatggttcccaagagcagctgattttaacataccattgccccatgaagakgtacartgaaggaattttgcaggcctcaaaacagaaaggctgggaacaccatagtggtcatcaaatkgagaacaacaggtcagctgtagccaatgattgttcatacactccttccctgagcatgaaatggagcagcctactattwgtcctcatcctaaggctacrtggtatcttcaccataaggacaggaaagactaattctcttgttgaggcagtagtgcataaatggcatttcttttcagtcttgccagcattcagacgttagcaaagcatttcactgataattattgatttgctgtatttatagaaagctaggacctagtagaattcaatattcaggagatgccaattttctatgaatacctgagaatcacttggtcattttccatttctgtaattgcttctgtattgctggggcgtgaattgcattctttaaaatcaacct

SEQ ID NO: 57614 - DNA, 600 bp, Chicken  19866894313712_5
actgatgatgttatctcctttggaaagtgccccaaggtctttggatagctagaaataaatatttttgtttttcacagaatctcccaatggttcccaagagcagctgattttaacataccattgccccatgaagakgtacartgaaggaattttgcaggcctcaaaacagaaaggctgggaacaccatagtggtcatcaaatkgagaacaacaggtcagctgtagccaatgattgttcatacactccttccctgagcatgaaatggagcagcctactattwgtcctcatcctaaggctacrtggtatcttcaccataaggacaggaaagactaattctcttgttgaggcagtagtgcataaatggcatttcttttcagtcttgccagcattcagacgttagcaaagcatttcactgataattattgatttgctgtatttatagaaagctaggacctagtagaattcaatattcaggagatgccaattttctatgaatacctgagaatcacttggtcattttccatttctgtaattgcttctgtattgctggggcgtgaattgcattctttaaaatcaacctagaaatggaacatgaacaag

SEQ ID NO: 57615 - DNA, 600 bp, Chicken  19866894313713_1
tgttttttatttattttgcaaacctagcattgccaatcccaaggtaaacatgacttctttcttaactgttgctggctttgttatgctttctactgctttttggattatgtttaagttgatgtaacttcccaaaactttaaagcctaacacggttgtctgtctgaccacagtatctttagggaacaagtccagagtcagtttcaaaggttctttttattctcttgaattgttttccaagtaactgacaataaataaatgaaaaagaggagttgcagagaagggcagcagcagaacacactyggaatttttcagtctcaggtcagcagtttggttgttgggacaagcttttgaattttcctatcttttgtgaagctaaaatggaaacgtgatgtttgttgagagttttttacttcttgcttttccttcctgtgtctagcatggagtttcacaagaggatttcataagatgcaagcaagagaaacatgtgagagatgtaatttatgacattgccagccaggcccatattcacctagaacatgtgagattccttctcccttttctttcttttgataaacatagttgatgctgtcctttacaaag

SEQ ID NO: 57616 - DNA, 600 bp, Chicken  19866894313723_1
ctgcccagaccccccccccccaactggccttgagggctttcagggatggggcccccacaagctctttgggcagttgtgccagtgcctcaccgccctctgagtgaaaaatttcctttacatctgatgtaaatctcccctcttctagtttaaaaccatttccatttgtcatatcgttatcagactgtgatagcctagaacagctacttacttatcttggatgctattaatggcgtcctctgtctgctgcctttctgttatgagtgagcaccattctgggtattcctctgctgttcctcccamaggttgacacccttcaktttgagggaatgctgaaatggtgagaagcagttctgatgctatcttgtactggaactcagtgctggtagtgcctttaggctaagccatcaccgaagctgtttgtctccaggctggtgttgtgaattagcaagggctcttagagtcttggtgcaaagtcagcattgccagcacctgtagaatgctctttcgtaggatacattcagcaggcagctggtggagagcactgtcctggagcttccatcccaacaacagatgggtacatctgccataggtttatctcat

SEQ ID NO: 57617 - DNA, 600 bp, Chicken  19866894313723_2
ccccaactggccttgagggctttcagggatggggcccccacaagctctttgggcagttgtgccagtgcctcaccgccctctgagtgaaaaatttcctttacatctgatgtaaatctcccctcttctagtttaaaaccatttccatttgtcatatcgttatcagactgtgatagcctagaacagctacttacttatcttggatgctattaatggcgtcctctgtctgctgcctttctgttatgagtgagcaccattctgggtattcctctgctgttcctcccamaggttgacacccttcaktttgagggaatgctgaaatggtgagaagcagttctgatgctatcttgtactggaactcagtgctggtagtgcctttaggctaagccatcaccgaagctgtttgtctccaggctggtgttgtgaattagcaagggctcttagagtcttggtgcaaagtcagcattgccagcacctgtagaatgctctttcgtaggatacattcagcaggcagctggtggagagcactgtcctggagcttccatcccaacaacagatgggtacatctgccataggtttatctcattgctgtttaatggcatg

SEQ ID NO: 57618 - DNA, 600 bp, Chicken  19866894313723_3
ttgtactggaactcagtgctggtagtgcctttaggctaagccatcaccgaagctgtttgtctccaggctggtgttgtgaattagcaagggctcttagagtcttggtgcaaagtcagcattgccagcacctgtagaatgctctttcgtaggatacattcagcaggcagctggtggagagcactgtcctggagcttccatcccaacaacagatgggtacatctgccataggtttatctcattgctgtttaatggcatgtaaaattttgtgatcatgtacagcatattgtgacaatgaagtcyaaagctgaatagagcactgttgggcagacttattttcaatccctgtaataccataaggtgaccactgaatcttgtttgagaagttgtatagtccatatgtatatggactatgttagcattttactggaaattagcagaattaataatactatgggaaaggcatacaaggaaccattagtgccagstcttgctttgtgataaacttatgctggagagtagcatcttcacataaaaccttaactccccatggctgcttttctgacaaaaagttccaaagtgatgtaggtgattgtgtgtccc

SEQ ID NO: 57619 - DNA, 600 bp, Chicken  19866894313723_4
ctggagcttccatcccaacaacagatgggtacatctgccataggtttatctcattgctgtttaatggcatgtaaaattttgtgatcatgtacagcatattgtgacaatgaagtcyaaagctgaatagagcactgttgggcagacttattttcaatccctgtaataccataaggtgaccactgaatcttgtttgagaagttgtatagtccatatgtatatggactatgttagcattttactggaaattagcagaattaataatactatgggaaaggcatacaaggaaccattagtgccagstcttgctttgtgataaacttatgctggagagtagcatcttcacataaaaccttaactccccatggctgcttttctgacaaaaagttccaaagtgatgtaggtgattgtgtgtcccttattggcttgagtccatctctgctacctagtggagccctcagtgaagaattgttgatgaaggaaccagagaacacagtactgtgggagtaaacaagcattgtaagctgctcctatggaaaaccagctctcctgcttggatgtggttagtaattcactgttgaagaatttgtgtgagccctcagt

SEQ ID NO: 57620 - DNA, 600 bp, Chicken  19866894313724_1
tgggtgttcctgttcattgcaggggcgttggactagatgacctttataggtccttccagctcaaaatattctatgactctatgattctatgatcatttctaaggatcaagcaagagttttatgatgtctgtattttttatgcattccctgagcaatttctagcataatcaggagctacttttggctttacccataaaggtgtaagctacttctccacagtgaattcacaggaagtatgagctgtcaagttttaggctgctactaattagtgatttctttttcctacttcctgataactgyactgcttgattattgtcagtctcccaaaagacatgttcatgggatcgacaaagaaatgtgcactatttgtggatgcagagtggtacacgttttgtattctttatgctagttatacaaaactgtactaataaggggaaatatttccatcctctttttctggacattcatgacatgatatcccagtacctgcaactactgttctttctgtctgcggccagcacatgtaagtgtgaaacaaaactctgcaaagaaaactgactgaccagccatttgctggcatttgctccactacttatttgg

SEQ ID NO: 57621 - DNA, 600 bp, Chicken  19866894313724_2
tcccagtacctgcaactactgttctttctgtctgcggccagcacatgtaagtgtgaaacaaaactctgcaaagaaaactgactgaccagccatttgctggcatttgctccactacttatttggaaataaaatcaaaacaggtaaatgaacatataattcatgcctcttactattgctacatgccaggaatgtatttggcagttgttccagtgctgttccaagtcagaaatttaggaggttttttgtaattctcaactcagggttacatgccatcagagtgcaaagccctctataaggtgrtgccagcaagggaaattttatgtgaggttacatagcaacttaaatttaatcaagtagctgccaaggctcaggttaatccactgaggaagaaagaataaggagtccttgtgtggaattcagtttgagattaagatatcaatatttaggcaactagatgcagatatctacaaataaattaagcctttaaactcccatgatggtcattaagaactgagtcaatattaatcagtaatgtttacagcatgattcaattggcaaacaggttgtttctgaggagctaaataaccttccaggakccat

SEQ ID NO: 57622 - DNA, 600 bp, Chicken  19866894313724_3
gtgrtgccagcaagggaaattttatgtgaggttacatagcaacttaaatttaatcaagtagctgccaaggctcaggttaatccactgaggaagaaagaataaggagtccttgtgtggaattcagtttgagattaagatatcaatatttaggcaactagatgcagatatctacaaataaattaagcctttaaactcccatgatggtcattaagaactgagtcaatattaatcagtaatgtttacagcatgattcaattggcaaacaggttgtttctgaggagctaaataaccttccaggakccattgactctactgaccttctatattaaccatttattagtccattgacatcagcgtggttttatatacccatctcatataaaacacaatcgaagttaaaaagcataagtaaaggaactcaattatgttgtccaaagtagaaggtttcattgggccagttgaaaataatgctataggttacctggaatatccagacaagctgacagacaacatgcaaaattttggactggcagctacagtcatctgggaagctcagaaatatctattatgaaactggatgcctacacaaggtaaataaat

SEQ ID NO: 57623 - DNA, 599 bp, Chicken  19866894313727_1
  misc_feature (1)..(29): n is any nucleotide
nnnnnnnnnnnnnnnnnnnnnnnnnnnnntagctacttgtacttaaagtggcttgattgtacaataagtaacacttctctgtaaatagatccagtgttttctgaccctttcagccataaactaagctatgtaacaaagaacagaaagaaaaactcaatttgaaaaaatcaagaaagggattcttagtgaaagtgtgtttgacttcctctaaaatcactttcattttacaatgctgaattctggagattcaagttcattactcctacttgttaacaatcttggaagaacaaattaagtacycatttatggttacagtctgaaaggcagcttgttatcccccacatgtaagatacattcagatacataggcatttgcttgcagggatgttatcaggaaggaggatatcaggttcatcaactggcaaaaaatataccttgcagataaagttttgacattccatagaaacctattgacaaagccgagttttaaagtaggaracaattgaaatgatttgtggggaggcagaatgagcaggcctcttgaaaagagtagctggtagctgcataacttctaatgcttggtcccactgaaaggtagtt

SEQ ID NO: 57624 - DNA, 600 bp, Chicken  19866894313727_2
ttgacttcctctaaaatcactttcattttacaatgctgaattctggagattcaagttcattactcctacttgttaacaatcttggaagaacaaattaagtacycatttatggttacagtctgaaaggcagcttgttatcccccacatgtaagatacattcagatacataggcatttgcttgcagggatgttatcaggaaggaggatatcaggttcatcaactggcaaaaaatataccttgcagataaagttttgacattccatagaaacctattgacaaagccgagttttaaagtaggaracaattgaaatgatttgtggggaggcagaatgagcaggcctcttgaaaagagtagctggtagctgcataacttctaatgcttggtcccactgaaaggtagtttgcttccayggtgatcagtccttttagttctgccatttattgtgccttcatttttccattatgtagtagtggcttagatttatttctggtgtgggcgatgagatccttagaaaaggttcctttgtcactgggttgtgaaacatgagaaaaatatatccattttattctgtagttagtttgatttttaagacacttttg

SEQ ID NO: 57625 - DNA, 598 bp, Chicken  19866894313727_3
gttacagtctgaaaggcagcttgttatcccccacatgtaagatacattcagatacataggcatttgcttgcagggatgttatcaggaaggaggatatcaggttcatcaactggcaaaaaatataccttgcagataaagttttgacattccatagaaacctattgacaaagccgagttttaaagtaggaracaattgaaatgatttgtggggaggcagaatgagcaggcctcttgaaaagagtagctggtagctgcataacttctaatgcttggtcccactgaaaggtagtttgcttccayggtgatcagtccttttagttctgccatttattgtgccttcatttttccattatgtagtagtggcttagatttatttctggtgtgggcgatgagatccttagaaaaggttcctttgtcactgggttgtgaaacatgagaaaaatatatccattttattctgtagttagtttgatttttaagacacttttgcatcctcatattcttctcaaaatcagtgttattttcaaggcttaagcacttccttaagcatataaaatcaaaacaaggcttacagacaattgcattacatttatagaat

SEQ ID NO: 57626 - DNA, 589 bp, Chicken  19866894313731_1
ggctgcacggcagcttctcgggctgagagtcacctgcagcccttttgctgaagcaaaaggcaaagtcccatcagccgcacggggccaggacttcctccagcgctcagtgtactttggtggtgctggacttgggcctgtgtgtacgcagggaaggggcccgagctgcttcagaaggtgccggccctggggacgagcacccagcacggggccccacctccccccccgtgcacaccagccccgctcacccatcccggcagccccagggctgggcacaccggcagccgccatgcatgcagcacrccgtgctgggaactcctctgcagggaattttcctcccagtatgcgcagtcgaacaaagctggaggacggaggctttcctgacattgtccatcccagctctttgggaaaggaacaagcggggttttggaacaagcaacacatctgtgtatttacacatgcacacaataggtcgtgtgctcaccggtgctgaatgggagcaaaacgtggctgtcccattgccaaaccctgccagcaagggaaaggccaggagagcattgctatatgcacagccgagggagctgccagcaca

SEQ ID NO: 57627 - DNA, 599 bp, Chicken  19866894313740_1
  misc_feature (1)..(13): n is any nucleotide
nnnnnnnnnnnnncatctggttcatcgaacacagacactggaaaagtgaatggaagcttggagaccaaatacaagtgggctgagtatgggctgactttcacagaaaagtggaacacagataacactctgggaacagaaattgcaattgaagatcaggtagtagattagctgagtattcatttcttttacttaagtagtagaactgaacttacagctttattttctcattcttcaattagattgccaaaggcttgaagttgacgtttgatacaactttctcaccaaatacagggtaagggkttttttttttttgcctttttaccttgtgtatcatgctacacatgtggttggtaaatgttccatctggtttgtcaaatcagcaggtgtttgttattgatcccaattagcaaaccccaatgctaaaggcttctgcttttcyacattgcatcttattctaggggcttagtattggacacttcacagctgtccatctctcttaatttctgagatagaaatatttagttggactattacaggaggcacaaagatgtttctaccttcatcacaatacatgtttttgtggttttgtatagtttctt

SEQ ID NO: 57628 - DNA, 600 bp, Chicken  19866894313740_2
ttgcaattgaagatcaggtagtagattagctgagtattcatttcttttacttaagtagtagaactgaacttacagctttattttctcattcttcaattagattgccaaaggcttgaagttgacgtttgatacaactttctcaccaaatacagggtaagggkttttttttttttgcctttttaccttgtgtatcatgctacacatgtggttggtaaatgttccatctggtttgtcaaatcagcaggtgtttgttattgatcccaattagcaaaccccaatgctaaaggcttctgcttttcyacattgcatcttattctaggggcttagtattggacacttcacagctgtccatctctcttaatttctgagatagaaatatttagttggactattacaggaggcacaaagatgtttctaccttcatcacaatacatgtttttgtggttttgtatagtttcttgatgagttacctgtgctttgggccagtctgttggatgtatgtgcatggcatttggggtgcgttctgttgaggcatatggctcaaatttgtctgctcattgagaatgtgatcaaactgtcttaagattaactgtttctctg

SEQ ID NO: 57629 - DNA, 599 bp, Chicken  19866894313742_1
  misc_feature (1)..(84): n is any nucleotide
nnnnnnnnnnnnnnnnnnnnnnnnnnnnnnnnnnnnnnnnnnnnnnnnnnnnnnnnnnnnnnnnnnnnnnnnnnnnnnnnnnnnattgtggctatttgaaggttggaatgtgaacagaggattgcgttagaaagctcccagcaatttcattgctatcatttttttcataaatacagctgtgtatttgtgacttgtgtttatttagggcttggaaattcatgtgcaggactgaaagacaggattatcgttttgataacattaatttttgtctttattgaaataatttcttatagcaaactrttccatgtccgaccagtcacccagactgatgtgtacagagcagatgccaaggaaattccaaggatattccaggtattcaatagtaaattaatgtttatagtgtaacaaacgtggcatatcgtcaaaaatatttccctaaccttgtctaattgaagtatttactacaaaattgttgaaaatattcattscagtgttattcttcattttttctaattcaggaattactctgaatacgtgtttgtcatattggagtactgagattattttgctttaattctagattctgtatgctaatgaag

SEQ ID NO: 57630 - DNA, 600 bp, Chicken  19866894313742_2
gacttgtgtttatttagggcttggaaattcatgtgcaggactgaaagacaggattatcgttttgataacattaatttttgtctttattgaaataatttcttatagcaaactrttccatgtccgaccagtcacccagactgatgtgtacagagcagatgccaaggaaattccaaggatattccaggtattcaatagtaaattaatgtttatagtgtaacaaacgtggcatatcgtcaaaaatatttccctaaccttgtctaattgaagtatttactacaaaattgttgaaaatattcattscagtgttattcttcattttttctaattcaggaattactctgaatacgtgtttgtcatattggagtactgagattattttgctttaattctagattctgtatgctaatgaaggagagagcaaaaaggagcaggaatttcctgtggagcctatgggagagaagtcaaattatatttgtcacaaaggacatgagtttatacctactctttatcactttccaaccaattgtgaagcttgtatgaagcctctttggcatatgtttaaacctcctcctgctctagaatggtcgccgttgccatatc

SEQ ID NO: 57631 - DNA, 600 bp, Chicken  19866894313744_1
cctaaaccttggattcagtccaacgtcctgttttcataacacctttaatctggaggagtttaagaagacatacaaggtttagaaatacagataaagaaaaatccccatacagttctaatcacttttgctttaatttaagcatttcaaggctatccttgaccttttagtacttacagatagccttgagaacagtctgtaaccaactacttttaaggatttttttttttcttttttttcttttttcctgcattcttcccctctccttgtttaaagaaaatgaaatttggtaggaaagataayacaacttagtgcaacgccataactaaaagccactaacatgacacaaagcgcatgcctgctttaagacctgttaacccaaacacctacaaccaactacactaacttatctgcagttcctaccccattgaatggggaattttagaaaactcagtatagccatgaagtatccagagattctgtaaccatgagattacrtgcattaatgggaacaaacttgtaacaaacatatcactaagagctttgatgagaggatttgttttatactatgataacaaaaaagcatatacactgtytctygtt

SEQ ID NO: 57632 - DNA, 600 bp, Chicken  19866894313744_2
gtaaccaactacttttaaggatttttttttttcttttttttcttttttcctgcattcttcccctctccttgtttaaagaaaatgaaatttggtaggaaagataayacaacttagtgcaacgccataactaaaagccactaacatgacacaaagcgcatgcctgctttaagacctgttaacccaaacacctacaaccaactacactaacttatctgcagttcctaccccattgaatggggaattttagaaaactcagtatagccatgaagtatccagagattctgtaaccatgagattacrtgcattaatgggaacaaacttgtaacaaacatatcactaagagctttgatgagaggatttgttttatactatgataacaaaaaagcatatacactgtytctygttactttcagaacagctggaattgatagatcttaacagagacttaccacacctctaaatgatggcggaatgaggccacaataaattgggacaaatgagctacagatcaatgcctgtagaaaaaacgakattatataaattaaacagtaattgctctgctactgaaattatcatttacattcattctcttcagatgcc

SEQ ID NO: 57633 - DNA, 600 bp, Chicken  19866894313744_3
agataayacaacttagtgcaacgccataactaaaagccactaacatgacacaaagcgcatgcctgctttaagacctgttaacccaaacacctacaaccaactacactaacttatctgcagttcctaccccattgaatggggaattttagaaaactcagtatagccatgaagtatccagagattctgtaaccatgagattacrtgcattaatgggaacaaacttgtaacaaacatatcactaagagctttgatgagaggatttgttttatactatgataacaaaaaagcatatacactgtytctygttactttcagaacagctggaattgatagatcttaacagagacttaccacacctctaaatgatggcggaatgaggccacaataaattgggacaaatgagctacagatcaatgcctgtagaaaaaacgakattatataaattaaacagtaattgctctgctactgaaattatcatttacattcattctcttcagatgccagcaaarccaactgaacaagcaaccaaaaaacccagcaagtactcttacacaattactaaaaaaaataaagctaacatcaattattattttatacaaa

SEQ ID NO: 57634 - DNA, 600 bp, Chicken  19866894313744_4
aayacaacttagtgcaacgccataactaaaagccactaacatgacacaaagcgcatgcctgctttaagacctgttaacccaaacacctacaaccaactacactaacttatctgcagttcctaccccattgaatggggaattttagaaaactcagtatagccatgaagtatccagagattctgtaaccatgagattacrtgcattaatgggaacaaacttgtaacaaacatatcactaagagctttgatgagaggatttgttttatactatgataacaaaaaagcatatacactgtytctygttactttcagaacagctggaattgatagatcttaacagagacttaccacacctctaaatgatggcggaatgaggccacaataaattgggacaaatgagctacagatcaatgcctgtagaaaaaacgakattatataaattaaacagtaattgctctgctactgaaattatcatttacattcattctcttcagatgccagcaaarccaactgaacaagcaaccaaaaaacccagcaagtactcttacacaattactaaaaaaaataaagctaacatcaattattattttatacaaaggat

SEQ ID NO: 57635 - DNA, 532 bp, Chicken  19866894313744_5
gaatggggaattttagaaaactcagtatagccatgaagtatccagagattctgtaaccatgagattacrtgcattaatgggaacaaacttgtaacaaacatatcactaagagctttgatgagaggatttgttttatactatgataacaaaaaagcatatacactgtytctygttactttcagaacagctggaattgatagatcttaacagagacttaccacacctctaaatgatggcggaatgaggccacaataaattgggacaaatgagctacagatcaatgcctgtagaaaaaacgakattatataaattaaacagtaattgctctgctactgaaattatcatttacattcattctcttcagatgccagcaaarccaactgaacaagcaaccaaaaaacccagcaagtactcttacacaattactaaaaaaaataaagctaacatcaattattattttatacaaaggatgaggacattcaattttgttattaaggtagtcacatttcatctaagaaaaagatttacaaga

SEQ ID NO: 57636 - DNA, 456 bp, Chicken  19866894313744_6
atgggaacaaacttgtaacaaacatatcactaagagctttgatgagaggatttgttttatactatgataacaaaaaagcatatacactgtytctygttactttcagaacagctggaattgatagatcttaacagagacttaccacacctctaaatgatggcggaatgaggccacaataaattgggacaaatgagctacagatcaatgcctgtagaaaaaacgakattatataaattaaacagtaattgctctgctactgaaattatcatttacattcattctcttcagatgccagcaaarccaactgaacaagcaaccaaaaaacccagcaagtactcttacacaattactaaaaaaaataaagctaacatcaattattattttatacaaaggatgaggacattcaattttgttattaaggtagtcacatttcatctaagaaaaagatttacaaga

SEQ ID NO: 57637 - DNA, 600 bp, Chicken  19866894313749_1
gtaaggatagtatctgaatggcttgttgattgccactaataattatttaggacatttgcagactgatgctgttgagtgaggagagcagctgtacatgctcacaataacagcagatggacacaagccatgtactcttcactgaactttctcaggttgagtttcagttagcctggatcagaagctggcttcctagcatccttaggctgttttttctgttatttgctcagcagcacagcgctgagtgccattccccatatgctcaccttgctgtgacaattccaggctgcagtacggccccartatgtaatgaatggaaaggatcacagtaatgagagtaactctgttatcaaagatgctaattaaacagctattaacaagtggcagatttttcagtaggtgctgctgttgaattaattatgcaggaacttcaaacatcagacattgatttcacattgttacctgtgctgcttytctgatcagaaaccatcatttagtagttcaaataaatctgatttcaggccacgagaccctgaggacgtgtcttacctttgggctgctttaattcatgaaatacaacgatgtcatgaggattattgagat

SEQ ID NO: 57638 - DNA, 600 bp, Chicken  19866894313749_2
ggatcagaagctggcttcctagcatccttaggctgttttttctgttatttgctcagcagcacagcgctgagtgccattccccatatgctcaccttgctgtgacaattccaggctgcagtacggccccartatgtaatgaatggaaaggatcacagtaatgagagtaactctgttatcaaagatgctaattaaacagctattaacaagtggcagatttttcagtaggtgctgctgttgaattaattatgcaggaacttcaaacatcagacattgatttcacattgttacctgtgctgcttytctgatcagaaaccatcatttagtagttcaaataaatctgatttcaggccacgagaccctgaggacgtgtcttacctttgggctgctttaattcatgaaatacaacgatgtcatgaggattattgagattttctgctaaaacagagatgtccaagccactcagcctgttggcactgaagattgcttcattctccaggtcagtccagaacactctgtcctgcaggaaatacaaaggatttctgaccttaccctgctcagttccaattcaagctggactaaactctggtagtcacaaaatca

SEQ ID NO: 57639 - DNA, 599 bp, Chicken  19866894313758_1
  misc_feature (1)..(3): n is any nucleotide
nnngggatttccgaagagaaaacccatgattttctggttaaatgggggattctcaaagagaaaacgcgtgatttttgcttaaatggaaaatttgaaaaaacgcgtgatttttgttaaatgttggattctcgaagtgaaaatgcgtgtttttcgctgaaatggtagatttctgaaaagaaaacgcatgattttctagttaaatggaagattcctgaagagaaaacgcgtgatttttgcttaaatggcagatttgagaaaacgcatgattttcgcttaaatgttggattctcaaaaagaaarcttgattttcgcataaatgtgggatttgcgaaaagaaaacacgtgtttttcgcataaatgggggatatccgaagagaaaacgcatgattttcaggttgaaaggggaattttcgaatacaaattgtgattttctggttaaatgtgggatttgcgaagagaaaacrrgtgatttttgcttaaatgggggatttgagaaaacgcatgattttcggataaaatgggggatcctcgaagagaaaacgcttggttttctggttaaatgggggatttgcgaagagaaaacgcgtgattttcgggtt

SEQ ID NO: 57640 - DNA, 600 bp, Chicken  19866894313758_2
gatttctgaaaagaaaacgcatgattttctagttaaatggaagattcctgaagagaaaacgcgtgatttttgcttaaatggcagatttgagaaaacgcatgattttcgcttaaatgttggattctcaaaaagaaarcttgattttcgcataaatgtgggatttgcgaaaagaaaacacgtgtttttcgcataaatgggggatatccgaagagaaaacgcatgattttcaggttgaaaggggaattttcgaatacaaattgtgattttctggttaaatgtgggatttgcgaagagaaaacrrgtgatttttgcttaaatgggggatttgagaaaacgcatgattttcggataaaatgggggatcctcgaagagaaaacgcttggttttctggttaaatgggggatttgcgaagagaaaacgcgtgattttcgggttaaatggaagattcgtgaagagaaaacgcgtgatatttgcttaaatggtagatttgtgaagagaaaacgtgtgtttttcgcataaatgggggatttgcgaagagaaatcgcgtgattttcgcataaatgggggattctcgaagagaaaacgcgtgattttcgctta

SEQ ID NO: 57641 - DNA, 600 bp, Chicken  19866894313758_3
atttctgaaaagaaaacgcatgattttctagttaaatggaagattcctgaagagaaaacgcgtgatttttgcttaaatggcagatttgagaaaacgcatgattttcgcttaaatgttggattctcaaaaagaaarcttgattttcgcataaatgtgggatttgcgaaaagaaaacacgtgtttttcgcataaatgggggatatccgaagagaaaacgcatgattttcaggttgaaaggggaattttcgaatacaaattgtgattttctggttaaatgtgggatttgcgaagagaaaacrrgtgatttttgcttaaatgggggatttgagaaaacgcatgattttcggataaaatgggggatcctcgaagagaaaacgcttggttttctggttaaatgggggatttgcgaagagaaaacgcgtgattttcgggttaaatggaagattcgtgaagagaaaacgcgtgatatttgcttaaatggtagatttgtgaagagaaaacgtgtgtttttcgcataaatgggggatttgcgaagagaaatcgcgtgattttcgcataaatgggggattctcgaagagaaaacgcgtgattttcgcttaa

SEQ ID NO: 57642 - DNA, 599 bp, Chicken  19866894313767_1
  misc_feature (1)..(45): n is any nucleotide
nnnnnnnnnnnnnnnnnnnnnnnnnnnnnnnnnnnnnnnnnnnnnttattttttttcttttttttttctgttatctgagcggaggagggcagagaagcgccaaggctggggggaagggttttgtcggctttttctttatgcaacacgagttgctcaggggagtgtcttgcgttattaatgctgagtggctccggcagctactgtggtttaaggtcgttagtcactcgctgcgggcgtgccgtgcagagctgctcacagcaccctcctggtcccaccaggccagtaggtcgggaacagcckcaacggggtcagtggggcacagggggagccgggggctgcggtcagcatctaaccagggtcatggggtgagcatggatgctccttgcatcccgttggagcagccctgcaccagctcttaatcacagaggagcgatgaggatgcaggatgctctccgtgcattagaggaatgcaggcctgcttgcgctctgctcttctgattgttgtttttctgttgctttcctcaggatgagggcctctaggcagatatttccgaactggttctgcatcctctggctgccactcctgctgagggctatct

SEQ ID NO: 57643 - DNA, 599 bp, Chicken  19866894313768_1
  misc_feature (1)..(119): n is any nucleotide
nnnnnnnnnnnnnnnnnnnnnnnnnnnnnnnnnnnnnnnnnnnnnnnnnnnnnnnnnnnnnnnnnnnnnnnnnnnnnnnnnnnnnnnnnnnnnnnnnnnnnnnnnnnnnnnnnnnnnnncccccccagcatcccaacagagccccggggtgagatgctccccaaacatccccagtgctgcagcattcagctcagagccctttgtgattccctcaggtgctgccctgaggaatccgcactgctgccgtaatggtccttcaccagaataggcattgcccaccacccccagccctgctggccytgtagggacattcccaaagcagcatccttagggagtgccccgtgttttggggccatgtccatatttctgtaggagcagtgctggggctgccacaccacagctcttcccacgtgcacaggacgccaccatccccacaaacagcaattctatttttgcagtgtgaccttggcagtttggaagataagagcccaagtggggacacagcacagctcagtgctcggaggttctctatcwgcagctgygggcgtggggtcctggaacaacacggtgatctgtcctgtgtaaaacagagcccgggt

SEQ ID NO: 57644 - DNA, 600 bp, Chicken  19866894313768_2
gcactgctgccgtaatggtccttcaccagaataggcattgcccaccacccccagccctgctggccytgtagggacattcccaaagcagcatccttagggagtgccccgtgttttggggccatgtccatatttctgtaggagcagtgctggggctgccacaccacagctcttcccacgtgcacaggacgccaccatccccacaaacagcaattctatttttgcagtgtgaccttggcagtttggaagataagagcccaagtggggacacagcacagctcagtgctcggaggttctctatcwgcagctgygggcgtggggtcctggaacaacacggtgatctgtcctgtgtaaaacagagcccgggtgcccatcccctgtaaggcaaacccctcagctccagctgagcttgcagcaaaagggagattttgcttcccaggagatcacagactacggactcactctctttattgcacttctgccattggcctgcataggggatgatggcagagggaagttcccatggaaaggggctttgtgatgtctggtgggtgagttgtccctactggtgatccggcggtctttgggcaaaataaatctgat

SEQ ID NO: 57645 - DNA, 600 bp, Chicken  19866894313768_3
gccgtaatggtccttcaccagaataggcattgcccaccacccccagccctgctggccytgtagggacattcccaaagcagcatccttagggagtgccccgtgttttggggccatgtccatatttctgtaggagcagtgctggggctgccacaccacagctcttcccacgtgcacaggacgccaccatccccacaaacagcaattctatttttgcagtgtgaccttggcagtttggaagataagagcccaagtggggacacagcacagctcagtgctcggaggttctctatcwgcagctgygggcgtggggtcctggaacaacacggtgatctgtcctgtgtaaaacagagcccgggtgcccatcccctgtaaggcaaacccctcagctccagctgagcttgcagcaaaagggagattttgcttcccaggagatcacagactacggactcactctctttattgcacttctgccattggcctgcataggggatgatggcagagggaagttcccatggaaaggggctttgtgatgtctggtgggtgagttgtccctactggtgatccggcggtctttgggcaaaataaatctgatgggtggca

SEQ ID NO: 57646 - DNA, 600 bp, Chicken  19866894313770_1
aagattaatcttcactctgttggaggtagacatctcattttgaaaaccttctgagcaattaaacagtgtcattttgttctctgaagggcaaaattgttcttagcctgttctccttctgttgctctttacttttcttgtcactgtagctggcatttaaccaagatgctgtttctgaattgtcccttctttccctcccctatgctcctccttttcttgttcattctgtcagcatcttggtattgtctgtgtgatgattgatgatggtacaggggttacttattgatccttctgtgacggggytgattgattccatgaactcttttaggaaagggatatatcttgaccattttagttatgttgttatgttctttgttgctgctaatgtagttgttatctccaacacattcctttatatgtcccaagcacttgtcaccctaatcatcagtttcacttcctcttgcctgatgtgatagttgtaccttaagtaaccaagatcattatattcaaaaagtaaattcacttgatgtttctagatgggcagaacttaattctgtgtctcgcctgtgcctcttctgtgtactggtttctgatttcctacta

SEQ ID NO: 57647 - DNA, 586 bp, Chicken  19866894313775_1
agggcactatgaggcaaaaaatttcactgtgttttggtaacagttttttaaccaatactgttggagatttagctgccttttcctgcccatcttattgtccagccccatcctcagctgacacttgcctggtttcatgactctagaaaagatgggtgtcttatcttttccctgtagtcagtgcagtgcctcctgccgctgtcctacctttgcttgaggcacgaatacctgaagttccacactcaaccactgcattatgttctttaaggaatggtgctttccaaatcaaacactgctgatttytgttacaatccaaatgttgatttcattgctttcatacctactagcatgacaactccactctatgtgttgttttcaattttattacaacttggcgctggctctgaagatttcccatctggatttctacatggaggtcttctaaaaatatttgacagcccttttgcttttcataaaatctcctagcccttcattattgatcacaaaatgatttatttttgtgatctttacatcatggtataatatcaatgcttattctgttaaacttcatttgaataatatattcatt

SEQ ID NO: 57648 - DNA, 600 bp, Chicken  19866894313777_1
gacatatttcttgtttagcagtagaaatgccaaatagattttttttttctcaaaaaaacatcctgtaagacctcaaaagacacaaatttagtaacctttccatggatggaatctgccctgcttggagtcttgctgagtgctgcatagctctgagatttcagcatcagaagaaatgtaggatattttctttatacttttagtttcgttatattgcattttaaggcataatttacatagggcctgagtacctttcattatgggttcataatgaaccagcacttccttgtgcaaaacatataygtaatctacataatcagacaaatcaactttttgaaatgcctgagagattagatgtggctcacagtgagagctaaggcattgctctgcacatatagctttttttttgctttgaatttagaagttcaaatactgatgtgctatgttggtgtctgatagtttattctgatgtttttgctttcctagtaaatgacttcttacacaaacttttctttctctgaagaatggccctcgtgctaaacctcaacattttttttttgtcaaataaccttcagtttctaagatgaactgcttttgagacag

SEQ ID NO: 57649 - DNA, 600 bp, Chicken  19866894313777_2
cctttcattatgggttcataatgaaccagcacttccttgtgcaaaacatataygtaatctacataatcagacaaatcaactttttgaaatgcctgagagattagatgtggctcacagtgagagctaaggcattgctctgcacatatagctttttttttgctttgaatttagaagttcaaatactgatgtgctatgttggtgtctgatagtttattctgatgtttttgctttcctagtaaatgacttcttacacaaacttttctttctctgaagaatggccctcgtgctaaacctcaacaytttttttttgtcaaataaccttcagtttctaagatgaactgcttttgagacagaacaattttgagaaattgtagagcaaatttggaacaggaggagcagcacctttccttgaagaccctgagccaaagataaatttttcgaatcacattaaagatgaggaaaaataagttttgttatcgtagttcaagcatgcaatatctgaagtaaaaatcatcagtttgatgagaattttaagaagacggtacagttgagtttataacacaacgcagatttcaacattagtgttggaaagtactcctg

SEQ ID NO: 57650 - DNA, 599 bp, Chicken  19866894313781_1
  misc_feature (1)..(21): n is any nucleotide
nnnnnnnnnnnnnnnnnnnnnatattactcgtgtgacacagctgctcgcacatgggacaggcacagcctttagcatcctggagacatcaaagtctgagcatggccatggtctgatagcttatggggtctgacaggccgcgaggtctgaccgcttatggctgtcacagagagaaaagaaccaaagtgctgcacacaagttctgtaaagaaaatgttttatttaaagtgttaaataccatcaccagaatgagttcgatttacattagttggtgttcattacaggcctaatctgccttttttwttttttwttttttccccaactgtaattccttttaactttttaaaacatagtatgtacaagacagcagtgatcactggaatagtgctatttacatgactaaaccataagtagagttgcagacgtgtgaaaattaaaaaaaatacattaattttttttttaaataaatactgcataatgacaagtatgtacaaaccttccatgcatcgtgtccttgattttaaagtttgaaataatttgtataggacaatgaacacagcaacgtgtgcgcacatctcacagtatcaggaaaatggttatgt

SEQ ID NO: 57651 - DNA, 599 bp, Chicken  19866894313781_2
  misc_feature (1)..(14): n is any nucleotide
nnnnnnnnnnnnnnatattactcgtgtgacacagctgctcgcacatgggacaggcacagcctttagcatcctggagacatcaaagtctgagcatggccatggtctgatagcttatggggtctgacaggccgcgaggtctgaccgcttatggctgtcacagagagaaaagaaccaaagtgctgcacacaagttctgtaaagaaaatgttttatttaaagtgttaaataccatcaccagaatgagttcgatttacattagttggtgttcattacaggcctaatctgccttttttwttttttwttttttccccaactgtaattccttttaactttttaaaacatagtatgtacaagacagcagtgatcactggaatagtgctatttacatgactaaaccataagtagagttgcagacgtgtgaaaattaaaaaaaatacattaattttttttttaaataaatactgcataatgacaagtatgtacaaaccttccatgcatcgtgtccttgattttaaagtttgaaataatttgtataggacaatgaacacagcaacgtgtgcgcacatctcacagtatcaggaaaatggttatgtatttttc

SEQ ID NO: 57652 - DNA, 600 bp, Chicken  19866894313789_1
agaacctcattcacagctaagatcccaaggcactagtgcaatgcaattattatcatcaccatcactatcagctcaatcaacccgaatatgtgcttctaatgagaatatgtcttcaggcagctaaagttcagacttgttttctgttttgtttttaaataagcaatctttgcagcaagtaaattgaaaactttatcaaactaagattagcatttagagagcagcgacaaaaaatctgagcatagcaaaaaattatcagtaagagcagattaccgtagctcatttaaagagtttgttgagttmaaagatacaggttgaccaagaagcaatttgtttacatctctgaattcgtctatagaagaacaggacaaaaataaaaaaaatacaccaacaatacagatacaattaaatacccttctacctacagataatacataaaagkaatgcttactatttaagtggctgttttggcacaagaaaaagtcagggtatggtttttttctgcacattcctgtgcagttcactacaataaatctctatgtcttcttgaaggggacatctgggccgtcagatacaagaacacttccaacttgaggagaaaaa

SEQ ID NO: 57653 - DNA, 600 bp, Chicken  19866894313789_2
tctgttttgtttttaaataagcaatctttgcagcaagtaaattgaaaactttatcaaactaagattagcatttagagagcagcgacaaaaaatctgagcatagcaaaaaattatcagtaagagcagattaccgtagctcatttaaagagtttgttgagttmaaagatacaggttgaccaagaagcaatttgtttacatctctgaattcgtctatagaagaacaggacaaaaataaaaaaaatacaccaacaatacagatacaattaaatacccttctacctacagataatacataaaagkaatgcttactatttaagtggctgttttggcacaagaaaaagtcagggtatggtttttttctgcacattcctgtgcagttcactacaataaatctctatgtcttcttgaaggggacatctgggccgtcagatacaagaacacttccaacttgaggagaaaaaaaaacaatggaaacccacaacaaaaagtttaatttgcttttgtatgataaaacgccctgccacaaaagtctcaattgtgaataattaccactcaatcatatgaatcattcttgtgaatattgctgggtttaaaatgaca

SEQ ID NO: 57654 - DNA, 600 bp, Chicken  19866894313805_1
gcctagttcgcatgcaccataacccatttaagtaagtatggcagtttaatcacaagatttcagaaagaagacatgaatttgctgagaaggcagcacaggcagcacttgagagtcacacaaaggtctgcagcgtttgcctattatttgttcatggcttgcctaaatgccttcattaagttggaaggctcttcacaaaaaacagagcctgttgacatagtgtgctcataccgtggcttagtgcgtgagtcctcaggccactaaagcttctcctaagctaactatcacaacattactaccttygtatccatctcctcttaatattatttagagtgagatgagggaatatttgggatattgggaaaattaaaagatatatgcaaattctttcattcactaatatgaaagggaacttattttgattttatcagaccagttcttttccttttgtcataccagtattaatgagtgactgttcactacaagyagggagttatatccacaattggtatctacagatggagctccactgactttgatgtgtacaagctgtggatttggcctgtgttctcagcggacctattccagatatatacaaagatt

SEQ ID NO: 57655 - DNA, 508 bp, Chicken  19866894313805_2
gctcttcacaaaaaacagagcctgttgacatagtgtgctcataccgtggcttagtgcgtgagtcctcaggccactaaagcttctcctaagctaactatcacaacattactaccttygtatccatctcctcttaatattatttagagtgagatgagggaatatttgggatattgggaaaattaaaagatatatgcaaattctttcattcactaatatgaaagggaacttattttgattttatcagaccagttcttttccttttgtcataccagtattaatgagtgactgttcactacaagyagggagttatatccacaattggtatctacagatggagctccactgactttgatgtgtacaagctgtggatttggcctgtgttctcagcggacctattccagatatatacaaagattagaaaacagcccaacaggtattcagaagggttccagtttaattgtgggaattacttgtgtagggacattatactgaaatttgattatggctg

SEQ ID NO: 57656 - DNA, 600 bp, Chicken  19866894313814_1
cctacctaagctttggggattttgccctgcagggaggtaagaggaaatggaaatcgttctctgcaaactttgggaagcgctttgctgcgaggagaaattctggtggggtttctttttttttttttttccccacctttgggaaacttagctgtgtatgtgtaacagccatggaacgcgctctgagctgtataagcgggatcccaagtggagctgcaaggagctgatgaccggtatccttcatgctgccgtgcttcctcatgcgtgtgctgcgtggaagggggggggcacccacagaacctyacacacacggcatggggaggtcatggggatggtgcagctggtgcagttgcaggaaagcatccaaaataatacaaacgcggggcaaacagcaccgaaaccaaagcccgcagggagtcaggagaaagcaaggtgtgttgtggcacctgggtaagttaaagcgtgggtgggagatgagatggagatgatgtgtttgtgagagggcagagcgggggggctgagccctgctccctgcattggcacagtctgcccatggaggcagtggggtcactgaccatggaggacatcaagagccatggagat

SEQ ID NO: 57657 - DNA, 600 bp, Chicken  19866894313816_1
accaaaaacactttctggtctgaaaaatggggacagaagggaatcaattctcttattacagtaaacagcatatatatttgctcgtggtgagaaatttctgagtatcagtgctgccctttctttagctttgtcttgtgaaagaataaggaaaataaaactagatttacccatctcaaacccacctctaaatcaagcttcagtatggaatttgacttggtattgaaaagtatgtgggagagggtatgtagtacagcaagcttatgcctaggccaggaaggaaaaataaggtttggagatacrtkgctgcaaaacaaatttrgaggggaaagaatgaaaaataaacacagagcagtagtgagtgagttcctggtgactagctaaaggatgatttatggcaacaatcgtgcaatagctgctttaatgaaagcatgatccaaacaggggcaaacttttttcctctgtatttggttactggcagcattgctgcaatcaagccccagatatgttgctggcagcagctgtggtgggatgcaaaggaaagaagctgtaaagaggctgcagggagctgggctctgtaggggaacgcagtcagggatgtgc

SEQ ID NO: 57658 - DNA, 600 bp, Chicken  19866894313816_2
caaaaacactttctggtctgaaaaatggggacagaagggaatcaattctcttattacagtaaacagcatatatatttgctcgtggtgagaaatttctgagtatcagtgctgccctttctttagctttgtcttgtgaaagaataaggaaaataaaactagatttacccatctcaaacccacctctaaatcaagcttcagtatggaatttgacttggtattgaaaagtatgtgggagagggtatgtagtacagcaagcttatgcctaggccaggaaggaaaaataaggtttggagatacrtkgctgcaaaacaaatttrgaggggaaagaatgaaaaataaacacagagcagtagtgagtgagttcctggtgactagctaaaggatgatttatggcaacaatcgtgcaatagctgctttaatgaaagcatgatccaaacaggggcaaacttttttcctctgtatttggttactggcagcattgctgcaatcaagccccagatatgttgctggcagcagctgtggtgggatgcaaaggaaagaagctgtaaagaggctgcagggagctgggctctgtaggggaacgcagtcagggatgtgctg

SEQ ID NO: 57659 - DNA, 600 bp, Chicken  19866894313816_3
ctgaaaaatggggacagaagggaatcaattctcttattacagtaaacagcatatatatttgctcgtggtgagaaatttctgagtatcagtgctgccctttctttagctttgtcttgtgaaagaataaggaaaataaaactagatttacccatctcaaacccacctctaaatcaagcttcagtatggaatttgacttggtattgaaaagtatgtgggagagggtatgtagtacagcaagcttatgcctaggccaggaaggaaaaataaggtttggagatacrtkgctgcaaaacaaatttrgaggggaaagaatgaaaaataaacacagagcagtagtgagtgagttcctggtgactagctaaaggatgatttatggcaacaatcgtgcaatagctgctttaatgaaagcatgatccaaacaggggcaaacttttttcctctgtatttggttactggcagcattgctgcaatcaagccccagatatgttgctggcagcagctgtggtgggatgcaaaggaaagaagctgtaaagaggctgcagggagctgggctctgtaggggaacgcagtcagggatgtgctgaaggtgatgaagctgtg

SEQ ID NO: 57660 - DNA, 600 bp, Chicken  19866894313819_1
gggaggagaagacagaggcagagccgttttcccaacacacacaccttgccttgaacaattcgagtgaaaagttgcagcacccgactgcgcacaaatccattgacatcacagatgtgggcctgcagtgttttcaggaaattgtcccgagtaccacgggcagcttcttccagctggtcaccattcagcacctgtagcagcacttctgccatagctgacaaaatggcatttcgcatcatgtaattctgcaaaaagatgagttgatgaaccaggaacagagaataaaactgaatttctctattycagagtttgtatcaaccttggttgaacatggctatgcctgcaagactgagcaatccagccctgctatccagctaggtccaatacaaaagcaaggactaatataaaaacacaaggtttttaagggctctttactaaaaagtaacatgatgaaagccattaaagaaacttggcactgaagaataaaggacagcagattggtctgacagcagtcagatccctgtgtttctcagatgcctggaagcaacagctagaaagtaggtgtcatggtgtgcaatttctctgcatattttagggaagggc

SEQ ID NO: 57661 - DNA, 600 bp, Chicken  19866894313819_2
tgtatcaaccttggttgaacatggctatgcctgcaagactgagcaatccagccctgctatccagctaggtccaatacaaaagcaaggactaatataaaaacacaaggtttttaagggctctttactaaaaagtaacatgatgaaagccattaaagaaacttggcactgaagaataaaggacagcagattggtctgacagcagtcagatccctgtgtttctcagatgcctggaagcaacagctagaaagtaggtgtcatggtgtgcaatttctctgcatattttagggaagggcatgaccygttctataaggcaggttttggctacttgatctctgtgaaagatgttctgttttcaaaaagaaaaatcagatagcagtacttctactgcctgtcttctctggacaggtaatattttgcaaatgtacctcgccgtccaagtgacgcagtagaacactgatgttggataacaccagtgcaggaatttgttcagccagttcagttatgaagacagcataacccttgattccagaagtatcacgagccagctcttgtggacatttctgtccaatttccctgcacagaaaaataaaataaggaaaa

SEQ ID NO: 57662 - DNA, 599 bp, Chicken  19866894313824_1
  misc_feature (1)..(87): n is any nucleotide
nnnnnnnnnnnnnnnnnnnnnnnnnnnnnnnnnnnnnnnnnnnnnnnnnnnnnnnnnnnnnnnnnnnnnnnnnnnnnnnnnnnnnnntcatcagcttatatgtggaaccgatacaactgtcattctaacaataagtatgtcttcatgtatatatgaaccgggactacttgaatagctgagaattaaggaaaaaaaaaacaacccagaatccaaaaccaaaatgacacaaaacccaagtgctcaaacaatgactaaaagtaaaaatacaagaaaaagattaatacagtacagctgtgctakaggatgtttgtgatttgcatcaatkaatgtggtcccactgatgtcaaaggttgcctgataagtttattcagtgtaacygtgggagtagtcttaccacatacctaaatgtgggcagaggcccgaaggaattaaacaataaattctgacaaggaactgtaaaagctttctgtcacatcacacatcatgtgttctatacacaccatgtgtgaaaagctttctgcgaagatggtcagatattggtggggtagaagctgaatgaaaaccaagctccttggtcaccatgaacacaaatgtactga

SEQ ID NO: 57663 - DNA, 599 bp, Chicken  19866894313824_2
  misc_feature (1)..(62): n is any nucleotide
nnnnnnnnnnnnnnnnnnnnnnnnnnnnnnnnnnnnnnnnnnnnnnnnnnnnnnnnnnnnnntcatcagcttatatgtggaaccgatacaactgtcattctaacaataagtatgtcttcatgtatatatgaaccgggactacttgaatagctgagaattaaggaaaaaaaaaacaacccagaatccaaaaccaaaatgacacaaaacccaagtgctcaaacaatgactaaaagtaaaaatacaagaaaaagattaatacagtacagctgtgctakaggatgtttgtgatttgcatcaatkaatgtggtcccactgatgtcaaaggttgcctgataagtttattcagtgtaacygtgggagtagtcttaccacatacctaaatgtgggcagaggcccgaaggaattaaacaataaattctgacaaggaactgtaaaagctttctgtcacatcacacatcatgtgttctatacacaccatgtgtgaaaagctttctgcgaagatggtcagatattggtggggtagaagctgaatgaaaaccaagctccttggtcaccatgaacacaaatgtactgagcctcagtaaataaatgaatacctt

SEQ ID NO: 57664 - DNA, 582 bp, Chicken  19866894313824_3
  misc_feature (1)..(9): n is any nucleotide
nnnnnnnnntcatcagcttatatgtggaaccgatacaactgtcattctaacaataagtatgtcttcatgtatatatgaaccgggactacttgaatagctgagaattaaggaaaaaaaaaacaacccagaatccaaaaccaaaatgacacaaaacccaagtgctcaaacaatgactaaaagtaaaaatacaagaaaaagattaatacagtacagctgtgctakaggatgtttgtgatttgcatcaatkaatgtggtcccactgatgtcaaaggttgcctgataagtttattcagtgtaacygtgggagtagtcttaccacatacctaaatgtgggcagaggcccgaaggaattaaacaataaattctgacaaggaactgtaaaagctttctgtcacatcacacatcatgtgttctatacacaccatgtgtgaaaagctttctgcgaagatggtcagatattggtggggtagaagctgaatgaaaaccaagctccttggtcaccatgaacacaaatgtactgagcctcagtaaataaatgaatacctttagaagtgactcaaaaaacatttccatcccagaaaa

SEQ ID NO: 57665 - DNA, 600 bp, Chicken  19866894313826_1
tcttaccccaagttttacttggtgcaggtctagtgatgattaaaagacatttcagtctagcttgatgtatagatttctgaacaaaaaaagatgccaaaggatggttctttcattcttccaaaaaacccccacaagtaaacatgttataagcaaaacagatgatataaagtacatttagttttcagatcatgtagcaagaagaaagtttttaaggtaagatttccctataatgtaatactgcctcttgccaactcacctttgggctatctctagcactgctcgttgacttgctccccttgkcttgtagaattcttcaatcttgtgtgttcttcgaatgctgtggagtgagctgcatgcaaagaaacagccagcttggatgttagaaagcacaaagcgctgctgctttttgtttcatcacatacttccattacagcagctgatccccactctgtctacacatgtgcgctatgtaggtgatctgtcgcatagagctcatttgaggatgtaaacagtttgttctgtggggctcgaatctctgtgagtcacccattcagagcagtttccattagcagaggaggaaactctggccctgaagagctt

SEQ ID NO: 57666 - DNA, 600 bp, Chicken  19866894313827_1
ttaccacatctttacctgcttcagctaccaggaaagttatctgaaataagcactaatcagtttttctcacaatgctttttccaaacaagtgcttcaagacagttttcacccatttggatttcactcatgaaaacacaggatgatggctaatgaggtaatataatattttatccttctaacgtgctgattttcttagtgaagcataaaatacacttctgtatttattcatgttgcttttgtaactgtttgcgtataggtttttcagttattgtgaaataattatatcatattagcataaayattgcgttttgcaactcgggragcatcccttttgattacaggaggtaaaaagaagtgggaggatgcttaaatgtttgagaatgaaacacggttgaaacttgccaattcttcatgctacatttccctgtgaattcagaatggattttagccctgagttcatggatcatacataaatatctttcaaaaagaggaatttctgagtaagacttttaggagggttaataaacttttatctttccaagtctctagaatgggggtagtgggtcagttaactgatttatttgcactataaacctactc

SEQ ID NO: 57667 - DNA, 600 bp, Chicken  19866894313827_2
cagctaccaggaaagttatctgaaataagcactaatcagtttttctcacaatgctttttccaaacaagtgcttcaagacagttttcacccatttggatttcactcatgaaaacacaggatgatggctaatgaggtaatataatattttatccttctaacgtgctgattttcttagtgaagcataaaatacacttctgtatttattcatgttgcttttgtaactgtttgcgtataggtttttcagttattgtgaaataattatatcatattagcataaayattgcgttttgcaactcgggragcatcccttttgattacaggaggtaaaaagaagtgggaggatgcttaaatgtttgagaatgaaacacggttgaaacttgccaattcttcatgctacatttccctgtgaattcagaatggattttagccctgagttcatggatcatacataaatatctttcaaaaagaggaatttctgagtaagacttttaggagggttaataaacttttatctttccaagtctctagaatgggggtagtgggtcagttaactgatttatttgcactataaacctactctacagataattaaattttaaa

SEQ ID NO: 57668 - DNA, 599 bp, Chicken  19866894313828_1
  misc_feature (1)..(116): n is any nucleotide
nnnnnnnnnnnnnnnnnnnnnnnnnnnnnnnnnnnnnnnnnnnnnnnnnnnnnnnnnnnnnnnnnnnnnnnnnnnnnnnnnnnnnnnnnnnnnnnnnnnnnnnnnnnnnnnnnnnncctttcccctgcctacccaggcttacatttcactcttcagaagaacagtgccgcagcctcttttgccctgcatcctcacccattcaatgcatgtcattaccttcatccatgtcctgccaggaagctgccaggcacgttgtcatagagggaagaccagatgctgctgctcaatatctccagacakctccgctggaaggaggacccccagcactgcagcctctccattctccacagttgaaccaaccaggacctccattttacaggagaagattttgttttgtttcaygttcagtgaatcaaacaccaggatccttcattgcagacagctctccgacagtgttaacccagagtctgacacccacgtagttctgatttgtaagaccgggaaactttcttaggaacatgacaaacatgaatgtttgcttttccccatgtggaaaggctaaatagtacagaaccctgttgcctggaaaacagagtgag

SEQ ID NO: 57669 - DNA, 599 bp, Chicken  19866894313828_2
  misc_feature (1)..(14): n is any nucleotide
nnnnnnnnnnnnnncctttcccctgcctacccaggcttacatttcactcttcagaagaacagtgccgcagcctcttttgccctgcatcctcacccattcaatgcatgtcattaccttcatccatgtcctgccaggaagctgccaggcacgttgtcatagagggaagaccagatgctgctgctcaatatctccagacakctccgctggaaggaggacccccagcactgcagcctctccattctccacagttgaaccaaccaggacctccattttacaggagaagattttgttttgtttcaygttcagtgaatcaaacaccaggatccttcattgcagacagctctccgacagtgttaacccagagtctgacacccacgtagttctgatttgtaagaccgggaaactttcttaggaacatgacaaacatgaatgtttgcttttccccatgtggaaaggctaaatagtacagaaccctgttgcctggaaaacagagtgagctttatgaaaggatgatctcaagggggagatrgattgagaggaagtactgagcaagtattttgactagatgaatgctgaagatcacctggataaagcatttt

SEQ ID NO: 57670 - DNA, 600 bp, Chicken  19866894313828_3
gcctctccattctccacagttgaaccaaccaggacctccattttacaggagaagattttgttttgtttcaygttcagtgaatcaaacaccaggatccttcattgcagacagctctccgacagtgttaacccagagtctgacacccacgtagttctgatttgtaagaccgggaaactttcttaggaacatgacaaacatgaatgtttgcttttccccatgtggaaaggctaaatagtacagaaccctgttgcctggaaaacagagtgagctttatgaaaggatgatctcaagggggagatrgattgagaggaagtactgagcaagtattttgactagatgaatgctgaagatcacctggataaagcattttgcagcaggtcccaaacaaaaacattacacgttgactaactgcattgtggaatttatttccacagtggaacctaaagtcaggttcaaagcagggatttcaaatatacagttcctaagtggctgagacaaatttatggggggacagaacccacccatcctactgggtcatttgcctcaagctccagaacagagtccctaagccacagattgctcataactgatgtgtcccat

SEQ ID NO: 57671 - DNA, 600 bp, Chicken  19866894313828_4
tgactaactgcattgtggaatttatttccacagtggaacctaaagtcaggttcaaagcagggatttcaaatatacagttcctaagtggctgagacaaatttatggggggacagaacccacccatcctactgggtcatttgcctcaagctccagaacagagtccctaagccacagattgctcataactgatgtgtcccatatatgtgcttctgaccttcaactctatatctgagtggtcacttgcatctcgatagctctcaggtcttacagtgaaaggtagttcttaccttcttacgaaaygctctgctctcaacaaagcagcattttaataaatgctagctttagtaaaaacactgcagagaaaatttcctctagaactttgctccttcttgtcttgcactggggatcttctggtgaactgctccatactcgtctcagcctcactggtacaactttgtttgcataatgaaaaacacaaacaaataaatgcatagagctttttcccaaagccaacaggagctgtgtttgccagcactggcttcattgttgtcttttcatgaacgtacacaaacaaatgagtgattgcatatacacagacat

SEQ ID NO: 57672 - DNA, 600 bp, Chicken  19866894313828_5
ctctagaactttgctccttcttgtcttgcactggggatcttctggtgaactgctccatactcgtctcagcctcactggtacaactttgtttgcataatgaaaaacacaaacaaataaatgcatagagctttttcccaaagccaacaggagctgtgtttgccagcactggcttcattgttgtcttttcatgaacgtacacaaacaaatgagtgattgcatatacacagacatgtttatgggcaggtaagccacactcataatcagacagcccaagggaaggcgggtagggtggagcagaarcctacaagccatggggggatggcaggagccatctccagaactgcttgggggagaagctacagagattttaacaccgtctgcctctcttttctcctggagaacagcagagatgtgaggggggagtcagaagccaaaatactgctgaaagccctgtgctctcagctaaccccagtcctttcctgctgcccttcctcccaaaccaccttcccacagctatcccacatcctcaccttggaaaagacacggtctgggaagctgaggtctgatgagtgggagaagacagaccacgagtaggtttag

SEQ ID NO: 57673 - DNA, 559 bp, Chicken  19866894313835_1
tattcttattacagcacaacttttgaacaaacacagtgatgttacttgtcgaggaaagatttattcatgactgaagaaaaaggaagggctctaattaccctattagcactgccaaatgtaacatcttctctcgcgttacccgggaaagtttgtacgactctgtatccactttatcatgaaagtgtttgaagttctgcaagtgtttgctttttagacatctcttatagaaacgctaatcggaaataacatttagagaactgcaaaccttcaaaggaatggaggtgcacccaccaccttccstatggcagtgtgtaggatgatcaggaaagcagctgaggccatagaggacaatgtgcctgttcttttgatgctacatccaggtgtaggaagtgctctgtttctaaagggaactgaagtggatccttgactccagcaatgggattggtgtctcaagcatctaagcaccttgatggagacgacagaaataaagctggagcaacctctgctcaaaataatctgcaaccccaatgcattgatttctactactacttcagagaca

SEQ ID NO: 57674 - DNA, 600 bp, Chicken  19866894313836_1
gagtgactgctttcagggcttgccaacctggacaggacagacaaactcgaaggacaatagaccagtggggagggagctgtggctctgcagctgctggagacaagaggacagcagcactttaagactgacctgctcaatttacacatctgctttcaggcatgatctgagaggtctttctaacacaaagcccctggggaaggtgagcttgtgtcaccaacagcaagttgtgcagacccaacccccaccagtcttcctctcctaaagaacgattgcatactcaaacccagcatcccacaggamtggggtgcagcatcacttccctcctgctgcctgcactgccagtgccagagctgttttcctcctgtgcctgcccctggtggaggggagaactaaaaggcacataggtcagcaatgcccccaaactatttctcagtgtctgcagtcctctttgtgctgcctgtaacgcttgtgttccagcaataccctttcccatgtagggtggcacatagtcacagccagcatggatattgctgcaaggaccctgctgtgtacttagcacaggttggggcaacaaaactaagctggaactgagctgggcag

SEQ ID NO: 57675 - DNA, 579 bp, Chicken  19866894313839_1
cattctagtttgttttcacatttgctgcttgaggaagtgattaggagcctggccaaggaaagaggaatgtcagagtctaactctgacctagccttaggtaaatcattgtatgtggctacaggaatgataaacacaaaaattaaaatacagaacaatctaacccaaggcatttacagcatgcttatgtcactggtctggtaaaagtttttgttgcatgctgtgtaaaaaataaaaataaaaatgaatgtgattccttgtttctcagctgaacttctgatgaaactttgatatgctagtagraaggcttctttgagtccactgttaaggtctgccagtcactaaggggaaagcaaggtatgattgtgtctagtggagttcagccgcctctatttttctagcaatcatagcttcataaaattgagtttttcctgactttagttaagcatgtttttgggtttcaatcctttttttctgtcagagtgaatcaactattattaaaggtaacaaattaaaaatatttgagggactatgcatctgttcatccacagatttttacatgtctcttcatcattcttgcat

SEQ ID NO: 57676 - DNA, 600 bp, Chicken  19866894313843_1
cccagatatgtacatcctcagaactggaagcttgttttacaggggttgcagagaacaaaccatggggcaacaatcatgagattaatacccttttaggaaaccagcctgatctgttactcattgtttgtgagaacagcaaacaaaatcagggtgataacaatggtgtcctcccagcctccctggcacccactgaggcaggaacatgactcttcatgtccatgtgtgctgcccactgcacagaaatggaggaaaatcccccacacagtcacaggcctgtgtcctttgtgattcactgagatygctctagacttggaataggtattgctcctgacagtgcattcactttcagtttgaagtatttgggctaaaatcatttccacatgcttcctgatatttgatagcctctgtggcctgggatgggagrttccatgtgcaatgttgccacagaaggttgaggtcatcatcataaggaactggcctggaaggctgtgtccagatcatactattttcctacacttagcagacctttaggaagtgatgcattggagttcattgctcagcatctaggtggaaggcatgctgttattcatccgagcagca

SEQ ID NO: 57677 - DNA, 570 bp, Chicken  19866894313843_2
ttgtgagaacagcaaacaaaatcagggtgataacaatggtgtcctcccagcctccctggcacccactgaggcaggaacatgactcttcatgtccatgtgtgctgcccactgcacagaaatggaggaaaatcccccacacagtcacaggcctgtgtcctttgtgattcactgagatygctctagacttggaataggtattgctcctgacagtgcattcactttcagtttgaagtatttgggctaaaatcatttccacatgcttcctgatatttgatagcctctgtggcctgggatgggagrttccatgtgcaatgttgccacagaaggttgaggtcatcatcataaggaactggcctggaaggctgtgtccagatcatactattttcctacacttagcagacctttaggaagtgatgcattggagttcattgctcagcatctaggtggaaggcatgctgttattcatccgagcagcatgaagttggatagatgacacagtttctcttgtctgtaattagttgaaccaaaatcagctgtaaggtctttcacattgctcatttgacagctcag

SEQ ID NO: 57678 - DNA, 600 bp, Chicken  19866894313849_1
tagtagtttccacagagaaactactaataaaactgaacagtgttaacttaaatagactcaagatcattgagaacaggttgtaaggaaacctcctcttcaatgcttctcaaatgtttcaagaatgcttgaaagaaattagttaggaaattagcctggtctccagtgaaaaggtatttatgtataaaaaagatgcagtgagctaaatggtccttcttagaactgtctttggaaaagaatggccatgtattgtgagctgctattgaaatatgctactggctcaacaatgcaggtttactttgraaaaaaaaacatcttactgggacagcattgaagaataccatcgatcagatgtggcaaagaattttaaacacagtgaacagataactttcccttctccatcaatacacaaagacaaatatacacaggtctacacatgcaagcatgtagatatgtgcatgtgtacacatgtgaataggtacatattaatttagctaatcacccaccagttattcttttctctattcacaatgatttttaaataaaaatggatgttttaattcttgcatgttgttgaatgttctcaactgcacaccaattcct

SEQ ID NO: 57679 - DNA, 600 bp, Chicken  19866894313857_1
cagcagttagtggccacttgagttctccttgttcgctgctctactgtcccctctttactgggatcgaatacgcacacttgcttagaagttgaagacgatgtaattccaccagtgatatacaacttgttacccagcacagttccttcatgtccgtatttattgactggatagggatctacaaattcccatttatcttcagtaatatcataccgttcagttgaataaaaggtttcatccctggttctcccagccactgcataaacgtacctcccaataactccaacagcaaactcagaacgygggacagacatgtctgccattcgtaaccaagtgttctgtcttgggtcatatctaaacactttggatgaagcatgaaactcaccgtctggccccagttcttccccacctaacaggaacacaaagttattcacaatggcaaggcagtctggtcgtaaaggtacttgaggaccctctagttcccaccagaccctcggtttgtgcaagagaagaattttactgtttaccatactgtgtcctatcattcctctaaacacggcagtctggggtttggcagaacgaattttgttcgatttcatttcc

SEQ ID NO: 57680 - DNA, 600 bp, Chicken  19866894313858_1
gctacctaacaagtagaatgtagcaaagaaaaatttatactatttttttctcatccttctacattgaaacagaatatatttatttttcagacccctttttgaaagggtaaacaaattattaatttcttcctcagaaaatgaagaactaactttatctgtcactgaattccattttccataatcaagaacgaaagcatacaaagaaaaagctataggtccacttaacaaaaactttttaagattagccagtgtagaactcagacaaagctttattttgagcaggttctgttgtgttaaaayactcatttatcctttgaatttctcctgtagtaaagtatggtgtgaattcacacacaggttacgtctctactgtaaaataaatacacatttatttccgaataaattattgtaggctgaacctgaacattccccaggttcatctgtacccacattacatgcagaatttcaaatatcttaagcagaagatgttcacagcacccttagacctacactgcaagtaagtttgtgctctaactgacatccagataatatatgtaaataaaatatgtacagctgcttgtgtatagtgcaagctcccct

SEQ ID NO: 57681 - DNA, 600 bp, Chicken  19866894313858_2
aaatacacatttatttccgaataaattattgtaggctgaacctgaacattccccaggttcatctgtacccacattacatgcagaatttcaaatatcttaagcagaagatgttcacagcacccttagacctacactgcaagtaagtttgtgctctaactgacatccagataatatatgtaaataaaatatgtacagctgcttgtgtatagtgcaagctcccctgcgtgtatgattatgtgggttaaatggggtgagatacttgtaattgctaaaagttgggaaggtgtccaagtggggggrraaaaaaaaaaaaaaagatgttattcattttggaggaaagactatcactgcatgtgatcctgctcacatcaagtagagagatccaagatcccagccaaagcaaatgaggggttttggtcacatcatacaataaatagactacacatgtaaggtaattcttaagctgtacttagggttcttctaaaaactattttagatacttcaaagaggagatggtagagaagactggattaaatttttctgtgtgctaagctgtcagtgaactgaagtccatggagctcagcagcaggatgaatgaaa

SEQ ID NO: 57682 - DNA, 600 bp, Chicken  19866894313858_3
aatacacatttatttccgaataaattattgtaggctgaacctgaacattccccaggttcatctgtacccacattacatgcagaatttcaaatatcttaagcagaagatgttcacagcacccttagacctacactgcaagtaagtttgtgctctaactgacatccagataatatatgtaaataaaatatgtacagctgcttgtgtatagtgcaagctcccctgcgtgtatgattatgtgggttaaatggggtgagatacttgtaattgctaaaagttgggaaggtgtccaagtggggggrraaaaaaaaaaaaaaagatgttattcattttggaggaaagactatcactgcatgtgatcctgctcacatcaagtagagagatccaagatcccagccaaagcaaatgaggggttttggtcacatcatacaataaatagactacacatgtaaggtaattcttaagctgtacttagggttcttctaaaaactattttagatacttcaaagaggagatggtagagaagactggattaaatttttctgtgtgctaagctgtcagtgaactgaagtccatggagctcagcagcaggatgaatgaaaa

SEQ ID NO: 57683 - DNA, 600 bp, Chicken  19866894313859_1
acaatgtctttgccagcaatgtttacatgagcactgcttaagcattataagttacagcacctacccaaggaggtcaccatttaatatccagtccagatgcttcatttggaaagcaaacaaaatgcatcctcagaagcaattataaaaacactgataagccctcggcacaatcgatacttgaatgacaccaaagccacaaataagacaaaagatacagaggaggctgtgtgccctgtgggtcggggatgagactgctgccctgagatatgtcagatgtacctggagcatcccagcccttcrgtgtcctgaccactggggagcagggaggggtcgcagccccaaggatcattttccttctgaagagaacacactgcaggtcagcgtgggaagtcctttgttatgtactgctttgggcattctaagaccttcagtcttagtaaagcagagcagygggcttagaattcttattttatcattaggttgggtacagttcaaatgtgaattcatatctgtgactctgtgatctaattacccctctctgtttcactctgtggctttacagaatgaaatccccactccataaaaataaacctgggttct

SEQ ID NO: 57684 - DNA, 600 bp, Chicken  19866894313859_2
tgataagccctcggcacaatcgatacttgaatgacaccaaagccacaaataagacaaaagatacagaggaggctgtgtgccctgtgggtcggggatgagactgctgccctgagatatgtcagatgtacctggagcatcccagcccttcrgtgtcctgaccactggggagcagggaggggtcgcagccccaaggatcattttccttctgaagagaacacactgcaggtcagcgtgggaagtcctttgttatgtactgctttgggcattctaagaccttcagtcttagtaaagcagagcagygggcttagaattcttattttatcattaggttgggtacagttcaaatgtgaattcatatctgtgactctgtgatctaattacccctctctgtttcactctgtggctttacagaatgaaatccccactccataaaaataaacctgggttctctgtgcccgaggcagatctagactgttatctcctctataggattacatgtgaattcttcattataagctgcattatttgcagcagtttctgcagcgctgggaaattctgattctctttctctttttggacccaacactgagcttcaaagca

SEQ ID NO: 57685 - DNA, 509 bp, Chicken  19866894313861_1
gcaggacccaggcagggtcctttggccattctgtggccaggaggaaaggtgtccataaaaaggaagtcctcagaagatgtgacatctccaggacttcagtttccaaggcttttggaaactgattttcaaagctgatcatgagtgactcctttctggagctgcttttgattattattcaagttcttctgacatttagaagctgacaagcctggatccctacttttatgattgccttctgcactggtatcttaatgactaggtacagcctccaaaatatctaatgcttgatgcatagaataygagcaagtaatgccgtatttgctgacttaatcattgtgtaaccatgttacagaaggcaagcccctgaatgcagagcagatcacttgaagctcgaggtgatgtggcatgtgtccaccagggtgttagtggaaaggtgccaggcctctcctggcttgcagtggttttggagtccataaagcagtctcttgcccttcatagagtctttttgt

SEQ ID NO: 57686 - DNA, 600 bp, Chicken  19866894313867_1
aaaacatcttatcttactgtgtgattcacttggaagagtggatgtaaatgaaatttaaggatgaggagtggatcaggatacaacatggatcaagatatagactcattttagtatctcttcctctccctcctgtcttttgcaattctagataaatgtaaccctaatatacctaaacatattaaatctgcaaagaagacattacctgggagatgtaaattgaaatagcttattctgccattacaaaaccttgaagtaaatccttaaatgtttgtgctgtcttccctacaaagacttcttttygcttaaatcattcttttgtaaaattcactttttgaaagtggctgtcatactttctcttcaaaatctaaattcttggagaaaaagatttgactgattttcatttgtatctttcaagcttttaagtgtgtatttaagaaatccttcgtagagcatgcagttattttgttataaacacacctacatatatacatacagagggaaatggagatagcatcagtaaatgctcctattttgatctgtttgttaggaaaatcatattcctttcttatttgtaaagtccataattatgagtagaattat

SEQ ID NO: 57687 - DNA, 600 bp, Chicken  19866894313872_1
gcagcagtcgtggcccagccaaagctagcgttaaaaatcaaagctgttccacatcaagctgagatttccaccagtggagctgtgagttattatcaatagctgtgtgtgtgtttcactatccactgccaaagccaaacagctcttccgccgttcctgctccatgaactggaacctactatcgctgccttggccaactgttttccttttaccgttgtcataatgcagctatctctgtagccagggagcttctctgtgccagctgataaagacagaggtgttctaatgtctgttccatgcacrtgacacagcatgctgcttaggcacgcctggggcagcccctcttctgcgctgtgctggaagcgctgacagcgttgtgtccatatccgcaggtctgggccttttgaaatcagtgctgacctggaagactccatggagtttgtggatcccagtgccacyggcgagacagatgagagcggagatgagcacgtcagcgacgaagagacggatctggggacagactgggagaatctgccgagccccaggttctgcgatatcccttcccagcaggtggagatgctgcagagccagagcacgcaggtg

SEQ ID NO: 57688 - DNA, 600 bp, Chicken  19866894313872_2
ctccatgaactggaacctactatcgctgccttggccaactgttttccttttaccgttgtcataatgcagctatctctgtagccagggagcttctctgtgccagctgataaagacagaggtgttctaatgtctgttccatgcacrtgacacagcatgctgcttaggcacgcctggggcagcccctcttctgcgctgtgctggaagcgctgacagcgttgtgtccatatccgcaggtctgggccttttgaaatcagtgctgacctggaagactccatggagtttgtggatcccagtgccacyggcgagacagatgagagcggagatgagcacgtcagcgacgaagagacggatctggggacagactgggagaatctgccgagccccaggttctgcgatatcccttcccagcaggtggagatgctgcagagccagagcacgcaggtgtcacagcccattgccagcagcagtgctggcgggatgatctcctccgctgctgcctcagtgacctcctggtttaaggcgtacactggacatcgctaacgagcatgggaaaaggatcccaggattttggaaggaatccctccccagcagtgctgtagt

SEQ ID NO: 57689 - DNA, 599 bp, Chicken  19866894313873_1
  misc_feature (1)..(102): n is any nucleotide
nnnnnnnnnnnnnnnnnnnnnnnnnnnnnnnnnnnnnnnnnnnnnnnnnnnnnnnnnnnnnnnnnnnnnnnnnnnnnnnnnnnnnnnnnnnnnnnnnnnnnntgtgtggggtttttcttcattactacagatttatataaagtatgatcagtgagtattacccatttgtatatatattctacagtgtgttagcacagggaatttgtcaagcaaagcagtgaaatgcaatgcacagtctgagttttaattagaatttagcccaagttaactgtacagtgaaaaacagacttacagctatasaagaagagggaatatctgacggtaaactaataaacttcttgttgctcttatcattccatttacaatgtaatttcaaagacatgacatcacttggaaaggaataaagtaatttaagtagtccaggtctttagcaagctgtttggatgagaaatagctttgtttctctaagcagcccaagtcctgcttttagggacaataccactttgccaatggctgtacactggaattacattgtactgatgtattccagcacatcagtggttgagcaagttcccaagcaggcacggttaaatgcaaga

SEQ ID NO: 57690 - DNA, 600 bp, Chicken  19866894313876_1
tggctggtaggactgtcacatgcattggtactgtttaattcctcccacccttttttttttttttaagctgagaatattctaaggacagaaggctgctgggagcgtaactccgtctgccctggggctggccttggtgcgctgctctgcatgcctatcctggacatgtgcacccatgtgagatgtgttcccacgtgtcttctggttgttctctgccctctcctttctccccttagtgctgtctggtctgtccctagtcaggaaggcagggtctgtgcccccatcctgctgaggcctgggagyagtgaggggacctgggggcagctttgatgcaaagcacatttggctgcacaaggaggttgggatgctggggggaactgggtttctgcagctgcgtgtgcagagctgggaggctgccttgccgtatcctgtgcttgggaaggaaaaaatgtatgccagagctgccttgcagcaagctcacaggctccccagccccctgcctcgctgctgctgattctctctcactaaactactgggttatttttaacttggaagaattacaacccaagatttgcattctctccccccagtggagggctggag

SEQ ID NO: 57691 - DNA, 394 bp, Chicken  19866894313876_2
gaggctgccttgccgtatcctgtgcttgggaaggaaaaaatgtatgccagagctgccttgcagcaagctcacaggctccccagccccctgcctcgctgctgctgattctctctcactaaactactgggttatttttaacttggaagaattacaacccaagatttgcattctctccccccagtggagggctggaggcaggatgtgggggaggcactgcggagggctgggaacgcagctcaccgccctgcaggatctgtgccatgggctcacgccccggcagcactctgcctgctgggcccygtgtggagagaccaaagactgctccctgcctgggctctcagcgtggctgatgtggagcagctgcagccgcactaacaagccctgctgcagcggg

SEQ ID NO: 57692 - DNA, 600 bp, Chicken  19866894313886_1
ataatctcttcctgcttatcctggtttcaccagcgatgtgccgatgttttctttctgaattgcatcagcataagcaagggagtgatgctgctgtcaggagcaggcagcttcagctattaaaggcttttcatttgctgttctgataacacctactaagaactctaaaattggtaccgtgtctttgaacatctgccaacatcagcttgaatacaaaccgcacaaataggcactgccattgtgggatgcattcagggacgactgatcttggatacaaagtgaagagagcgcttctcggttaargaaagctgtttccttagaytgcagaagggctgtgcacatccccttygcagagaggacaygtgtttctgccccytgtagtgaggactgcgtggcacaacaggaggcacagagtaccgcctgcaccaggtgtagactgacgtctcccagcctcggctggcactgaggtggcagcagtttctcctggcgacagttgcacagtttggcacctgcagccattctggaatcctggtgatcactgatgggccagagttaacccggcagtgagtaccagcagccgtgggctggagtggttgttgtgga

SEQ ID NO: 57693 - DNA, 600 bp, Chicken  19866894313886_2
cctggtttcaccagcgatgtgccgatgttttctttctgaattgcatcagcataagcaagggagtgatgctgctgtcaggagcaggcagcttcagctattaaaggcttttcatttgctgttctgataacacctactaagaactctaaaattggtaccgtgtctttgaacatctgccaacatcagcttgaatacaaaccgcacaaataggcactgccattgtgggatgcattcagggacgactgatcttggatacaaagtgaagagagcgcttctcggttaargaaagctgtttccttagaytgcagaagggctgtgcacatccccttygcagagaggacaygtgtttctgccccytgtagtgaggactgcgtggcacaacaggaggcacagagtaccgcctgcaccaggtgtagactgacgtctcccagcctcggctggcactgaggtggcagcagtttctcctggcgacagttgcacagtttggcacctgcagccattctggaatcctggtgatcactgatgggccagagttaacccggcagtgagtaccagcagccgtgggctggagtggttgttgtggaagtgcattacacagaaagt

SEQ ID NO: 57694 - DNA, 600 bp, Chicken  19866894313886_3
ttttctttctgaattgcatcagcataagcaagggagtgatgctgctgtcaggagcaggcagcttcagctattaaaggcttttcatttgctgttctgataacacctactaagaactctaaaattggtaccgtgtctttgaacatctgccaacatcagcttgaatacaaaccgcacaaataggcactgccattgtgggatgcattcagggacgactgatcttggatacaaagtgaagagagcgcttctcggttaargaaagctgtttccttagaytgcagaagggctgtgcacatccccttygcagagaggacaygtgtttctgccccytgtagtgaggactgcgtggcacaacaggaggcacagagtaccgcctgcaccaggtgtagactgacgtctcccagcctcggctggcactgaggtggcagcagtttctcctggcgacagttgcacagtttggcacctgcagccattctggaatcctggtgatcactgatgggccagagttaacccggcagtgagtaccagcagccgtgggctggagtggttgttgtggaagtgcattacacagaaagttgtgtttctctgagcactgctatggtg

SEQ ID NO: 57695 - DNA, 600 bp, Chicken  19866894313886_4
ttgcatcagcataagcaagggagtgatgctgctgtcaggagcaggcagcttcagctattaaaggcttttcatttgctgttctgataacacctactaagaactctaaaattggtaccgtgtctttgaacatctgccaacatcagcttgaatacaaaccgcacaaataggcactgccattgtgggatgcattcagggacgactgatcttggatacaaagtgaagagagcgcttctcggttaargaaagctgtttccttagaytgcagaagggctgtgcacatccccttygcagagaggacaygtgtttctgccccytgtagtgaggactgcgtggcacaacaggaggcacagagtaccgcctgcaccaggtgtagactgacgtctcccagcctcggctggcactgaggtggcagcagtttctcctggcgacagttgcacagtttggcacctgcagccattctggaatcctggtgatcactgatgggccagagttaacccggcagtgagtaccagcagccgtgggctggagtggttgttgtggaagtgcattacacagaaagttgtgtttctctgagcactgctatggtgctctagcatcagt

SEQ ID NO: 57696 - DNA, 589 bp, Chicken  19866894313886_5
gcaagggagtgatgctgctgtcaggagcaggcagcttcagctattaaaggcttttcatttgctgttctgataacacctactaagaactctaaaattggtaccgtgtctttgaacatctgccaacatcagcttgaatacaaaccgcacaaataggcactgccattgtgggatgcattcagggacgactgatcttggatacaaagtgaagagagcgcttctcggttaargaaagctgtttccttagaytgcagaagggctgtgcacatccccttygcagagaggacaygtgtttctgccccytgtagtgaggactgcgtggcacaacaggaggcacagagtaccgcctgcaccaggtgtagactgacgtctcccagcctcggctggcactgaggtggcagcagtttctcctggcgacagttgcacagtttggcacctgcagccattctggaatcctggtgatcactgatgggccagagttaacccggcagtgagtaccagcagccgtgggctggagtggttgttgtggaagtgcattacacagaaagttgtgtttctctgagcactgctatggtgctctagcatcagtcag

SEQ ID NO: 57697 - DNA, 600 bp, Chicken  19866894313889_1
aagagggattttgtgatccacagtaagatagctttccaatggtttgtttcgttaaccatcaataaaggcatcatagcaaaacgactcattttttcatttaaaatccagacaatacagagaaacgcttactggaagcagtgtggaaatagatttgatcagaggggggactaagcttaaaacatttaattatgttcaacccacaaattaaatgatcaaatcatatattaaaccttgatcgttactaagttaaatgtataattcaacaggagtttgtgcacagctattcagctggagtaactmactttctgaaatttcatgtgcttgtacaagccttgcacatcttttagtaggtaactaagcaatagttgatgattaacgaagtgaagtttaatgtagtaaggtgtcttgtgttcccttatgcatcttttatcttctactgaaaacctgaaacagtatctactatctggacgttagcaagttagggatgggatatgattgagaaagacaaggcaaacctgtagccctttatcaaacccttggtctgttcaagaaactattaatccccaactcataaatccactttagaacacaggattattt

SEQ ID NO: 57698 - DNA, 599 bp, Chicken  19866894313892_1
  misc_feature (1)..(62): n is any nucleotide
nnnnnnnnnnnnnnnnnnnnnnnnnnnnnnnnnnnnnnnnnnnnnnnnnnnnnnnnnnnnnnctgatgggagtttgttctcagtgaatgtctgtctcctgcctttaggtgttttcaagccaagccttttctttgcagtaaggatgagaatctacagcagaacttagacaactaaaatacttcagttaatgttgtaccgtattatctaaggctgacactcttacggtagtatgaatgaggccagagtaattacttaatcttcgtttaatcaaatcatttgttgtacagttcttacttagcrttacatggcaccctattgcataatttcacacttgaggtaaaggttagggaatggtaaattctaaagagagcatattttattattgactcctgattaaaactaagcaggttattttaggcttgcaccaatgaaattatgtaggaacttccaatttttatgaagttgaagcaaattcctccaaaattacgacttttttccttaaccaatgagctccataggagagattcacacagacttggagtgattcactatgcttctccaagtgctgaacactgcatactcgtgccttccaccctttt

SEQ ID NO: 57699 - DNA, 599 bp, Chicken  19866894313893_1
  misc_feature (1)..(34): n is any nucleotide
nnnnnnnnnnnnnnnnnnnnnnnnnnnnnnnnnnatcttggcataggaggcatcgacagacagagggggttcagaagcagaagccacttctccaaacttgcctcttctccttcatcctggatcagtacatccgaattagacacacttagctaatggcagaggtgctccaacaggagtaccctcactttgtgtagcagagattgctcagaagttatatttggtacacgcaccagctatgacaattttattgtgacatgtatgtcagcatctcattgtcattaaattctcagtagatcctgmcattaaatttctcagtagagtcmcaatgttaataatagatgaagtaattgagctattgtttttcctcgactgtactttcctatacagattgctgctgtactttgcaggaaaactgcctgagatttttgtgactataattgttctaaagattatgtttttagcagggtgattgcatttaggttaggctgagcagcgcactgtatttgttgtaggaacaaatggatgggtagaaagagacatatatatatatatatatatatatatatatatatatctccttgcagtttgaggagaagacg

SEQ ID NO: 57700 - DNA, 599 bp, Chicken  19866894313893_2
  misc_feature (1)..(11): n is any nucleotide
nnnnnnnnnnnatcttggcataggaggcatcgacagacagagggggttcagaagcagaagccacttctccaaacttgcctcttctccttcatcctggatcagtacatccgaattagacacacttagctaatggcagaggtgctccaacaggagtaccctcactttgtgtagcagagattgctcagaagttatatttggtacacgcaccagctatgacaattttattgtgacatgtatgtcagcatctcattgtcattaaattctcagtagatcctgmcattaaatttctcagtagagtcmcaatgttaataatagatgaagtaattgagctattgtttttcctcgactgtactttcctatacagattgctgctgtactttgcaggaaaactgcctgagatttttgtgactataattgttctaaagattatgtttttagcagggtgattgcatttaggttaggctgagcagcgcactgtatttgttgtaggaacaaatggatgggtagaaagagacatatatatatatatatatatatatatatatatatatctccttgcagtttgaggagaagacgtgattatgtgttttctttagcaa

SEQ ID NO: 57701 - DNA, 599 bp, Chicken  19866894313898_1
  misc_feature (1)..(85): n is any nucleotide
nnnnnnnnnnnnnnnnnnnnnnnnnnnnnnnnnnnnnnnnnnnnnnnnnnnnnnnnnnnnnnnnnnnnnnnnnnnnnnnnnnnnnctgctgagctcactgctttgcaggtagagcctggctcaagtttccccctctaaaattaacccgtggtatctgctctttgcaagcacacttcagaaagacaagagttaagagggagaagtcagaagtctgaagctagaagctacagaaggaaatcaagcagcttattaatacttatgttagtttttcctcttacaattcctttgttaatcctttayrttactaaaaccttcaaaagtaatctgattttcgtacgtgctctattaagctgcaagagtctcmaagtatatttttcattaaaagtccaatgagtattgctgwgtaaaaatgctgccagacaacccctcatttcttcggtaaatacttcagtggtcgctgcggagcaccttcagctctctgacaccctctgcccacgtctgcccgacatcagcactccgctctcacccaggccagccttatctccggcacagactgctggccccggccgggccgggtggtgtttccaatttccttatat

SEQ ID NO: 57702 - DNA, 599 bp, Chicken  19866894313898_2
  misc_feature (1)..(84): n is any nucleotide
nnnnnnnnnnnnnnnnnnnnnnnnnnnnnnnnnnnnnnnnnnnnnnnnnnnnnnnnnnnnnnnnnnnnnnnnnnnnnnnnnnnnctgctgagctcactgctttgcaggtagagcctggctcaagtttccccctctaaaattaacccgtggtatctgctctttgcaagcacacttcagaaagacaagagttaagagggagaagtcagaagtctgaagctagaagctacagaaggaaatcaagcagcttattaatacttatgttagtttttcctcttacaattcctttgttaatcctttayrttactaaaaccttcaaaagtaatctgattttcgtacgtgctctattaagctgcaagagtctcmaagtatatttttcattaaaagtccaatgagtattgctgwgtaaaaatgctgccagacaacccctcatttcttcggtaaatacttcagtggtcgctgcggagcaccttcagctctctgacaccctctgcccacgtctgcccgacatcagcactccgctctcacccaggccagccttatctccggcacagactgctggccccggccgggccgggtggtgtttccaatttccttatata

SEQ ID NO: 57703 - DNA, 599 bp, Chicken  19866894313898_3
  misc_feature (1)..(21): n is any nucleotide
nnnnnnnnnnnnnnnnnnnnnctgctgagctcactgctttgcaggtagagcctggctcaagtttccccctctaaaattaacccgtggtatctgctctttgcaagcacacttcagaaagacaagagttaagagggagaagtcagaagtctgaagctagaagctacagaaggaaatcaagcagcttattaatacttatgttagtttttcctcttacaattcctttgttaatcctttayrttactaaaaccttcaaaagtaatctgattttcgtacgtgctctattaagctgcaagagtctcmaagtatatttttcattaaaagtccaatgagtattgctgwgtaaaaatgctgccagacaacccctcatttcttcggtaaatacttcagtggtcgctgcggagcaccttcagctctctgacaccctctgcccacgtctgcccgacatcagcactccgctctcacccaggccagccttatctccggcacagactgctggccccggccgggccgggtggtgtttccaatttccttatataacaaggctctaatgttgggcaggaagtgggcagatactgagaaatcagggaggataaaaggca

SEQ ID NO: 57704 - DNA, 600 bp, Chicken  19866894313898_4
tgcaggtagagcctggctcaagtttccccctctaaaattaacccgtggtatctgctctttgcaagcacacttcagaaagacaagagttaagagggagaagtcagaagtctgaagctagaagctacagaaggaaatcaagcagcttattaatacttatgttagtttttcctcttacaattcctttgttaatcctttayrttactaaaaccttcaaaagtaatctgattttcgtacgtgctctattaagctgcaagagtctcmaagtatatttttcattaaaagtccaatgagtattgctgwgtaaaaatgctgccagacaacccctcatttcttcggtaaatacttcagtggtcgctgcggagcaccttcagctctctgacaccctctgcccacgtctgcccgacatcagcactccgctctcacccaggccagccttatctccggcacagactgctggccccggccgggccgggtggtgtttccaatttccttatataacaaggctctaatgttgggcaggaagtgggcagatactgagaaatcagggaggataaaaggcactagacccgtaacccctggggtcaagagggtatgacttca

SEQ ID NO: 57705 - DNA, 600 bp, Chicken  19866894313917_1
caatacttacgcatcagtgtatccagggagcttctttcgccattttggcttcttcagaggttgtccgtcatcatccacaatgaagtcatcgatgtctggacacagagaaccattttaacagtcaggacactcacacattcagccagtaactgacaaacttcagctcagccagtgcagttggtgcaattgcaccacagacttaagtggctgctggcctgcacagctacccacagaatctcctgcaccaacctcaggtattccagaagtctgaaccacaataacaagctagaactaactttwaaaaactggaaaagctatctagcagcartawgcagcttggtgcacagaaaatgcagtaaaaaaaatgtcctgttgcattaaatgctagacagaaatcatttttgcaactccttcagcacagtgttagcaaaaatgatgggctaatgcccaagagtagaactaggacaggtgtgcactgtgctaccaggtgctaaacagaacctccactaacatcttttgaagcattttccctttgaaggaagtttaaagtaaacaccgaacacagcagtgtatgcaatatgcttctgttcgtctaaactg

SEQ ID NO: 57706 - DNA, 582 bp, Chicken  19866894313917_2
agcttctttcgccattttggcttcttcagaggttgtccgtcatcatccacaatgaagtcatcgatgtctggacacagagaaccattttaacagtcaggacactcacacattcagccagtaactgacaaacttcagctcagccagtgcagttggtgcaattgcaccacagacttaagtggctgctggcctgcacagctacccacagaatctcctgcaccaacctcaggtattccagaagtctgaaccacaataacaagctagaactaactttwaaaaactggaaaagctatctagcagcartawgcagcttggtgcacagaaaatgcagtaaaaaaaatgtcctgttgcattaaatgctagacagaaatcatttttgcaactccttcagcacagtgttagcaaaaatgatgggctaatgcccaagagtagaactaggacaggtgtgcactgtgctaccaggtgctaaacagaacctccactaacatcttttgaagcattttccctttgaaggaagtttaaagtaaacaccgaacacagcagtgtatgcaatatgcttctgttcgtctaaactgttttgtccaa

SEQ ID NO: 57707 - DNA, 579 bp, Chicken  19866894313917_3
ttctttcgccattttggcttcttcagaggttgtccgtcatcatccacaatgaagtcatcgatgtctggacacagagaaccattttaacagtcaggacactcacacattcagccagtaactgacaaacttcagctcagccagtgcagttggtgcaattgcaccacagacttaagtggctgctggcctgcacagctacccacagaatctcctgcaccaacctcaggtattccagaagtctgaaccacaataacaagctagaactaactttwaaaaactggaaaagctatctagcagcartawgcagcttggtgcacagaaaatgcagtaaaaaaaatgtcctgttgcattaaatgctagacagaaatcatttttgcaactccttcagcacagtgttagcaaaaatgatgggctaatgcccaagagtagaactaggacaggtgtgcactgtgctaccaggtgctaaacagaacctccactaacatcttttgaagcattttccctttgaaggaagtttaaagtaaacaccgaacacagcagtgtatgcaatatgcttctgttcgtctaaactgttttgtccaa

SEQ ID NO: 57708 - DNA, 600 bp, Chicken  19866894313919_1
ggatgccattcgagaagccatgcatggggtgttcctctaccatgcaattcgggtatgacgtgttggcttccatatgtttgtgcttggcaaatgcaatgctgtatctgacagctatgtctgggggaattcctgtatggtggtgggtttttttgtttgttttgttttttagtatggcatggatatgggaattgtgaatgctgggaatctgccagtgtatgatgacatccacaaggaattgctacagctatgtgagaatctaatctggaacaaagatcctgatgcgacagagaagcttctacrttatgctcaggtaactttaaattttcagttttggatagttgttagcttaacacctgggctttagtgctggtgataggtagatgagcctctgaaatgcacgtctgtcaatataaaggtattagaagttcctgataatgctacagctagttgagttattagtatagaataaaatgtgaactctgtaacagatggagcccatccagtcttgcagttgccttaaaaggtccagggaaataaaattgggaatggccaacccacatccaaatcaaatgttggagctggagcataattggaaagcgt

SEQ ID NO: 57709 - DNA, 594 bp, Chicken  19866894313920_1
taagtgatccaaacacatgccatgagcagatacgttttataaaaagtcagaactggaagtccctcctaccacagaaaccaaagggcattctgaatgtccttgcagcatgcggcagtctatagcaaaaactgccttcagcatttcttcttcatgaaggcaggacctgcatcatgaggattggtgttctaactgccattcacatattcatggaaacagattattgccaggttgatggagaatcttatccttacacaaatactgcagaactgcacatgttaaatactgcaaaatattacatgygttttgccaaacgccttataaaccttaaggaaagagagagaagaagcaaagaggcaggaggaaaaccagatctggcagtgaaccaaatgcatgttctttttgctcactacagcctccgtcccagtttatcctcctccccctttgattttgtgataggttgactgaaaattgtgccgaagtttctccaagagacagcaatcacttgactaagtggggcagaaaataattctcagaattgagcaatttctcatgacacttcttttttcatcagtcatcactccagcagtcccaaat

SEQ ID NO: 57710 - DNA, 600 bp, Chicken  19866894313923_1
tctttttcatactttcttcgtcgcctcttctccaggactgaagggggtaattctttggtatcatcctaaaaaggacagatacgaatcaggagccttacagggataatacagagataaaagtgggatgtgctcaaggttctgatttcaaacttttccctagaaatgtagtatttaaaaagcaattggctcagcttttagagatgccaaatgcatacagtaaatggatttcaagctttttactctcactgagaatcctgtacttacactccccttgcagattttcagtgccttttctgcacycctccaagctagaccctaccttttcacatgcatttttctggascccagaaaaccacgactcccarcaayaccyacaggcacctccttagggaatggaattatctccagccctaaaccttggaagaccacagttcccaatgcacgtggcaacttagggagaattcaaaccatatccacatgcacataagggtacacagagttctcgtacccgcccagaagcttctttaatcttctcatgcagtctctgacgcaacagatttattgcagaaaaagaattggaaccaagttcacttttggcat

SEQ ID NO: 57711 - DNA, 600 bp, Chicken  19866894313923_2
ggggtaattctttggtatcatcctaaaaaggacagatacgaatcaggagccttacagggataatacagagataaaagtgggatgtgctcaaggttctgatttcaaacttttccctagaaatgtagtatttaaaaagcaattggctcagcttttagagatgccaaatgcatacagtaaatggatttcaagctttttactctcactgagaatcctgtacttacactccccttgcagattttcagtgccttttctgcacycctccaagctagaccctaccttttcacatgcatttttctggascccagaaaaccacgactcccarcaayaccyacaggcacctccttagggaatggaattatctccagccctaaaccttggaagaccacagttcccaatgcacgtggcaacttagggagaattcaaaccatatccacatgcacataagggtacacagagttctcgtacccgcccagaagcttctttaatcttctcatgcagtctctgacgcaacagatttattgcagaaaaagaattggaaccaagttcacttttggcatctgaaaatgaaaggaagaaaataaaaacacttaaaatgcagca

SEQ ID NO: 57712 - DNA, 600 bp, Chicken  19866894313923_3
ctaaaaaggacagatacgaatcaggagccttacagggataatacagagataaaagtgggatgtgctcaaggttctgatttcaaacttttccctagaaatgtagtatttaaaaagcaattggctcagcttttagagatgccaaatgcatacagtaaatggatttcaagctttttactctcactgagaatcctgtacttacactccccttgcagattttcagtgccttttctgcacycctccaagctagaccctaccttttcacatgcatttttctggascccagaaaaccacgactcccarcaayaccyacaggcacctccttagggaatggaattatctccagccctaaaccttggaagaccacagttcccaatgcacgtggcaacttagggagaattcaaaccatatccacatgcacataagggtacacagagttctcgtacccgcccagaagcttctttaatcttctcatgcagtctctgacgcaacagatttattgcagaaaaagaattggaaccaagttcacttttggcatctgaaaatgaaaggaagaaaataaaaacacttaaaatgcagcactaaagtgaggaattttctata

SEQ ID NO: 57713 - DNA, 600 bp, Chicken  19866894313923_4
aaaggacagatacgaatcaggagccttacagggataatacagagataaaagtgggatgtgctcaaggttctgatttcaaacttttccctagaaatgtagtatttaaaaagcaattggctcagcttttagagatgccaaatgcatacagtaaatggatttcaagctttttactctcactgagaatcctgtacttacactccccttgcagattttcagtgccttttctgcacycctccaagctagaccctaccttttcacatgcatttttctggascccagaaaaccacgactcccarcaayaccyacaggcacctccttagggaatggaattatctccagccctaaaccttggaagaccacagttcccaatgcacgtggcaacttagggagaattcaaaccatatccacatgcacataagggtacacagagttctcgtacccgcccagaagcttctttaatcttctcatgcagtctctgacgcaacagatttattgcagaaaaagaattggaaccaagttcacttttggcatctgaaaatgaaaggaagaaaataaaaacacttaaaatgcagcactaaagtgaggaattttctatagata

SEQ ID NO: 57714 - DNA, 600 bp, Chicken  19866894313923_5
gacagatacgaatcaggagccttacagggataatacagagataaaagtgggatgtgctcaaggttctgatttcaaacttttccctagaaatgtagtatttaaaaagcaattggctcagcttttagagatgccaaatgcatacagtaaatggatttcaagctttttactctcactgagaatcctgtacttacactccccttgcagattttcagtgccttttctgcacycctccaagctagaccctaccttttcacatgcatttttctggascccagaaaaccacgactcccarcaayaccyacaggcacctccttagggaatggaattatctccagccctaaaccttggaagaccacagttcccaatgcacgtggcaacttagggagaattcaaaccatatccacatgcacataagggtacacagagttctcgtacccgcccagaagcttctttaatcttctcatgcagtctctgacgcaacagatttattgcagaaaaagaattggaaccaagttcacttttggcatctgaaaatgaaaggaagaaaataaaaacacttaaaatgcagcactaaagtgaggaattttctatagatatggg

SEQ ID NO: 57715 - DNA, 600 bp, Chicken  19866894313933_1
tgtgtgtatcatagacgtgcttatattctttctggaggttaattgtcaggttgttatctgatggtggttttcttcatgttgttgtgctcatttgcaagaggtgagttggaaattgcactgctctttggggagctttggaagctggagtgcatctgagtgcctaagcagtgctacggaatgtgttttgaaaggaggagataccaagctgtgttgtgattgcaatctctccataaggatacagtctgcactggaaaaacgtgcccttgcattgctgcaagcttagcttatagcatccactcrgggtgaaaatggcacagctggagcagtgcttgcaggatgaaagggatgctgacagaagtgagaacgcagtcaaggattgctcgtccagcagtaacatcagggctctttcctttggctggaacctgccttcctgatgcatcctgccaggattcatcctcccctccccgcctgaattcttctgacacttcacacatctcaccccattttatggatttgtctctcaaacacttctcatacaggttgctctcacatgtgcggtttatgatctccataaaactcgatgttcatctgatacggcta

SEQ ID NO: 57716 - DNA, 600 bp, Chicken  19866894313941_1
agttactggaacagagtgctgcatgtgaggacctagatgtgaaagacagtgtttaccttcagtttttgtccagttcataagtaaaatacgtgagctgtgagcagtagactaacagtagttttggaagctatcaacttacattattcgctgcagggagcacctgctgatgctgaggaactcaaagtggctggcagcttctctgaaagcatgtactttcccatctggctgcctgtcctctgctcgctgtatctctgctcatcttcatgggttcagcaatcacccgtggtggggcagaacagrgtgtgatggcagccacctctgccagatgagcaagtaaggggaaaagtggaaagtcagaagagaaaaggagggttgagacaatactgaagatgggggaagggtactgctaaataaccccggtgacttcaagaagacaagtcagaaaaggactagcgctgtccttctttgtgttgtgacgacggggagtggcaggagaggtggagctgaaaatgttcgagtggggggaattaaactgcggtctttggtctgcctgttggtgttacttggttgcaacacaaccaatccagagaaagcatattc

SEQ ID NO: 57717 - DNA, 600 bp, Chicken  19866894313944_1
tggattttagtgtggtattatctaagttccttggcttgcaatgctgcaggatgcaatagtacagcatagttgtgtggtttggattttgtactgaatagcagaaaaaaagggagcacttaccctgggtcacatgagaaacttaaagaactccggtagtggaaatctctagaatcaattgttccatgctgcaagggggcaggggcgggacatctctttgctgttaatcaaagtttaagaaaggatagtattatttcacgaggtatgaagccagcatagtggaaacaggttgatcttaaaggratctgagtgctttctatgtttttccactcctgtgtactacatttcataacctattttacatttctatcaaaacatagcaatgagagtttccaagtttttgtgatgaaaatattttttgcagttgattgtctgaggaaaagagctgttatgcaattaaatgataaaaacgaatagcaattgataggcagatattgtcaaccagtgtatgtcatttgtagtataagcacctcagagatgagcccttacttacgtaggcataagagcgtgttgagaggccacctgccagtgggctggcagatg

SEQ ID NO: 57718 - DNA, 502 bp, Chicken  19866894313945_1
aacatgaaaaaaatacactgaaaagcttttgttttaaatgcttcttgtcagcttctcaaaatgttccattattcttcaggcttttaactgaaattcaagtactacagaatgctttaacaaccctccttgatgagcagagacttacccttaattcagagcatcaggaattatatgtcacatcatgagctgacgcgtgttctcatcagaaagatctggaatcatgcaaaaccttcatagtggctatctgcattttatccccttttggtgctattttagaaatgacttatcataattagcccrtggtgttggttaaatattatgcaggccaaaagcaggatcttttcatgagcaggaagcctaagcacggtacaacctcatattttgcctagcgttgaataggaaggaatttgtgcgctgaactgtaaatgatcaaatgaggtaatttcaaatacacctctgaactccattcgcacagctcagctcccaacttttcagaagcgat

SEQ ID NO: 57719 - DNA, 600 bp, Chicken  19866894313956_1
ctcagggccagtctcccccaaggcacacatgtgcccgccggtgtccacctgaacagggctgctcagaccgtgcagccattcgctctgcctcgttatcatcagccaacgctcaaagccagtcctctatctttattcttcctcgcttatctccagatggcgtttactgtgaaaacacacttcattccttgaggtaggaattcagctctacctcttctgcagcattttgcctcccgagcttcccacacatctcccggtcctacagacgcggctgcggggagttccgccgctccagcccgagcrgggctatgcccccgctgtcccctcgcgcacggcagccccggggccggggcgctgggaaagaggttcccgcagccttcgggctcggagcctgatccccgtcccaccgcacgctctcccagagcccgccgagacgctccgcaccctcgggcggctcagccgagcgtgcagccccggcactgcggcgggtcgcgaggatctgtacgcagcaccggttcctctcgcccggccccgctcccgtctccgcgccttcaccggcggccgcagcatcctccgtgccgcggacaaagcccgcacctttcc

SEQ ID NO: 57720 - DNA, 600 bp, Chicken  19866894313959_1
actcagccatgggcatgggcccagcgtggggacagcatcccccagcttggtggtggccgtgccagctgtgagagaggcctcctggcacaagtgccgtgagatgaccagcctgcagggcgggaggcgtgggagcctcgccgtctgggcatgcaggatggcagtgtggggcagaggtgccagcagctccctgccagctccctgccctcctcctcaccatagctcggggctgggcacctgcttgccaagggccacctggctgccgtgctgatgcaggcaggtaggacaggggatgtggcgtgygggcggcagggatgggctgccagcacccagcgttgctcccagcccagctgggtagcagagactccctgggacaacagcaacctgtgcccttgctgcccactgtggagcctgagtggggttctcccagagcctcctgcccatcctgcagcttctagacaagctcacggacagacagccctcagggatggacaacagacagtccccagggacagacagccccaggggcggacagacagccgagcacagccagcagtcagatgtctttacaacagcagcagactcattttgcagcccccaggg

SEQ ID NO: 57721 - DNA, 599 bp, Chicken  19866894313976_1
  misc_feature (1)..(93): n is any nucleotide
nnnnnnnnnnnnnnnnnnnnnnnnnnnnnnnnnnnnnnnnnnnnnnnnnnnnnnnnnnnnnnnnnnnnnnnnnnnnnnnnnnnnnnnnnnnnncttcacagtttcaattaagataaagctggtatgccaggaaccagtggcaaggaaagaaaggaaggtggatggatcaataagaccttcctaattatgctttgccagaacgtctgatgtaaatcgtgccaaaataaacgtattcagagtgttaggctcatttgattgtgcaagaactgcaaatgtgatcacaggagaaggtgaccaaaygagagccagtaagcagggctctgtggttcccaaagcacacgtggcacacacacaccgagaggaagatggagcagaatgcacctggtgcacacagggctggagcactgcctacccctccctccttccccactgtgctcagcatgggaagagttaaccaggtgtatggcaacaaatgaaagcttgcataattgaaagatagctgaggcattaatcttccttctyggtactttgagtcctctttaaaaagattattttgtcttcagagacagctttaatgctacttaatgaatcgcttataa

SEQ ID NO: 57722 - DNA, 600 bp, Chicken  19866894313976_2
aataaacgtattcagagtgttaggctcatttgattgtgcaagaactgcaaatgtgatcacaggagaaggtgaccaaaygagagccagtaagcagggctctgtggttcccaaagcacacgtggcacacacacaccgagaggaagatggagcagaatgcacctggtgcacacagggctggagcactgcctacccctccctccttccccactgtgctcagcatgggaagagttaaccaggtgtatggcaacaaatgaaagcttgcataattgaaagatagctgaggcattaatcttccttctyggtactttgagtcctctttaaaaagattattttgtcttcagagacagctttaatgctacttaatgaatcgcttataaatgaggtattctttcccctrtacagggatgggctgactgctatactgattttcatcaatgtaaaagagaccattcacttttgtcaaatacacaaatataatggctactctccacaaataccactacgctgcttggtgtacttagggccaattttgcccatccttttggccaagcctggtcagtggcagcaacatacacacatcccttagctggctctgtgcag

SEQ ID NO: 57723 - DNA, 600 bp, Chicken  19866894313976_3
tctgtggttcccaaagcacacgtggcacacacacaccgagaggaagatggagcagaatgcacctggtgcacacagggctggagcactgcctacccctccctccttccccactgtgctcagcatgggaagagttaaccaggtgtatggcaacaaatgaaagcttgcataattgaaagatagctgaggcattaatcttccttctyggtactttgagtcctctttaaaaagattattttgtcttcagagacagctttaatgctacttaatgaatcgcttataaatgaggtattctttcccctrtacagggatgggctgactgctatactgattttcatcaatgtaaaagagaccattcacttttgtcaaatacacaaatataatggctactctccacaaataccactacgctgcttggtgtacttagggccaattttgcccatccttttggccaagcctggtcagtggcagcaacatacacacatcccttagctggctctgtgcagctagtcgccttttgactcatttttaggaaggacagctgcagaagggcctggccttgggcacctccagagatggagccccacagcttctctgggcagg

SEQ ID NO: 57724 - DNA, 600 bp, Chicken  19866894313977_1
aaactgcatttgtaggaaaggctcaattgatggttttgatgactgggattacaacaagtctggtgtttgaaacaattagtcttttccatagggtgtgtatagccagactctgatcacagctacatgtgtgcataagcaaagatgcttactttgaagctgttttttattcaggcacaggtaactatggtcagaacatattgctattgctattatttacttctgatgtgtcaaatgagtcaaatctttaccaaaaatttcctacaatgaccagaaaatgaatgaccagtccttctggtggcrcttgggaacactaggcacatcacactactattttcacagagaactttgccggtactgtttgataacaaaaaaattatctctttccataagtttatctgcactttgatattaaaatagaatataagctttttaagagtttcataaagagtttaagattataaaaygaaggtagtwgcacccactgtaacattacatagttttatgtcagcaaatgatccaacacagaamttttasagtgcttcaraatagactcctctaagtttgttgtattattccaaactggaaaactgagatttccaa

SEQ ID NO: 57725 - DNA, 600 bp, Chicken  19866894313977_2
tattcaggcacaggtaactatggtcagaacatattgctattgctattatttacttctgatgtgtcaaatgagtcaaatctttaccaaaaatttcctacaatgaccagaaaatgaatgaccagtccttctggtggcrcttgggaacactaggcacatcacactactattttcacagagaactttgccggtactgtttgataacaaaaaaattatctctttccataagtttatctgcactttgatattaaaatagaatataagctttttaagagtttcataaagagtttaagattataaaaygaaggtagtwgcacccactgtaacattacatagttttatgtcagcaaatgatccaacacagaamttttasagtgcttcaraatagactcctctaagtttgttgtattattccaaactggaaaactgagatttccaatctgtgaatttgtattctcttctgaaaatccttcattgcataaagggcagcaaaaagataggtaatgttggaccttgtcagatggagattgcaaaaactcattgacataggtgagatagtaactgaaattgctgttggtgttgccaactaatagttttactgtg

SEQ ID NO: 57726 - DNA, 600 bp, Chicken  19866894313977_3
caggtaactatggtcagaacatattgctattgctattatttacttctgatgtgtcaaatgagtcaaatctttaccaaaaatttcctacaatgaccagaaaatgaatgaccagtccttctggtggcrcttgggaacactaggcacatcacactactattttcacagagaactttgccggtactgtttgataacaaaaaaattatctctttccataagtttatctgcactttgatattaaaatagaatataagctttttaagagtttcataaagagtttaagattataaaaygaaggtagtwgcacccactgtaacattacatagttttatgtcagcaaatgatccaacacagaamttttasagtgcttcaraatagactcctctaagtttgttgtattattccaaactggaaaactgagatttccaatctgtgaatttgtattctcttctgaaaatccttcattgcataaagggcagcaaaaagataggtaatgttggaccttgtcagatggagattgcaaaaactcattgacataggtgagatagtaactgaaattgctgttggtgttgccaactaatagttttactgtgtgtctgtcct

SEQ ID NO: 57727 - DNA, 600 bp, Chicken  19866894313977_4
caaatgagtcaaatctttaccaaaaatttcctacaatgaccagaaaatgaatgaccagtccttctggtggcrcttgggaacactaggcacatcacactactattttcacagagaactttgccggtactgtttgataacaaaaaaattatctctttccataagtttatctgcactttgatattaaaatagaatataagctttttaagagtttcataaagagtttaagattataaaaygaaggtagtwgcacccactgtaacattacatagttttatgtcagcaaatgatccaacacagaamttttasagtgcttcaraatagactcctctaagtttgttgtattattccaaactggaaaactgagatttccaatctgtgaatttgtattctcttctgaaaatccttcattgcataaagggcagcaaaaagataggtaatgttggaccttgtcagatggagattgcaaaaactcattgacataggtgagatagtaactgaaattgctgttggtgttgccaactaatagttttactgtgtgtctgtcctacccagtgcacatcccacagaattaggtttattgagagtcatccatctacaggt

SEQ ID NO: 57728 - DNA, 600 bp, Chicken  19866894313977_5
agtcaaatctttaccaaaaatttcctacaatgaccagaaaatgaatgaccagtccttctggtggcrcttgggaacactaggcacatcacactactattttcacagagaactttgccggtactgtttgataacaaaaaaattatctctttccataagtttatctgcactttgatattaaaatagaatataagctttttaagagtttcataaagagtttaagattataaaaygaaggtagtwgcacccactgtaacattacatagttttatgtcagcaaatgatccaacacagaamttttasagtgcttcaraatagactcctctaagtttgttgtattattccaaactggaaaactgagatttccaatctgtgaatttgtattctcttctgaaaatccttcattgcataaagggcagcaaaaagataggtaatgttggaccttgtcagatggagattgcaaaaactcattgacataggtgagatagtaactgaaattgctgttggtgttgccaactaatagttttactgtgtgtctgtcctacccagtgcacatcccacagaattaggtttattgagagtcatccatctacaggtaaatca

SEQ ID NO: 57729 - DNA, 600 bp, Chicken  19866894313977_6
ttaccaaaaatttcctacaatgaccagaaaatgaatgaccagtccttctggtggcrcttgggaacactaggcacatcacactactattttcacagagaactttgccggtactgtttgataacaaaaaaattatctctttccataagtttatctgcactttgatattaaaatagaatataagctttttaagagtttcataaagagtttaagattataaaaygaaggtagtwgcacccactgtaacattacatagttttatgtcagcaaatgatccaacacagaamttttasagtgcttcaraatagactcctctaagtttgttgtattattccaaactggaaaactgagatttccaatctgtgaatttgtattctcttctgaaaatccttcattgcataaagggcagcaaaaagataggtaatgttggaccttgtcagatggagattgcaaaaactcattgacataggtgagatagtaactgaaattgctgttggtgttgccaactaatagttttactgtgtgtctgtcctacccagtgcacatcccacagaattaggtttattgagagtcatccatctacaggtaaatcaagggagcatc

SEQ ID NO: 57730 - DNA, 600 bp, Chicken  19866894313978_1
ctgtggacttaaagttcaagatctgagtgggagcataggcaccaggtagcggcagtgatggtataactactgtctgcttcctcactaatgggagaactgctgaaaatgaacagttcctctcatagtaatgattttaaaatgtatatgctggataaaaaagcccaaaccaacaaagttctgtgcttaaaatcttttcactttctgctgccacagttgtaaatgaggtccccagacatccaagttgtagtcatgaagtttgtagtccatttcctcttcacacagaacctgactgacatggarggttgaccatggaggcttgaccaggttcacagcttatgcagcaaaggcttttttttccctcaaggtaatttaaccccagctatttcatggcacgttatcaaatcagcaggaagaaagccaaatgaataagatkttatagtttgtataacagcagtgtacactgcagttactggacttaaagctagagtggacagatcttagcttattcttttctcctccctactgggttatggtaactatagggaagtaatgctgtccatctgccctttgtaggactccttgttatcctcctgtgttgtg

SEQ ID NO: 57731 - DNA, 600 bp, Chicken  19866894313978_2
ttaaaatgtatatgctggataaaaaagcccaaaccaacaaagttctgtgcttaaaatcttttcactttctgctgccacagttgtaaatgaggtccccagacatccaagttgtagtcatgaagtttgtagtccatttcctcttcacacagaacctgactgacatggarggttgaccatggaggcttgaccaggttcacagcttatgcagcaaaggcttttttttccctcaaggtaatttaaccccagctatttcatggcacgttatcaaatcagcaggaagaaagccaaatgaataagatkttatagtttgtataacagcagtgtacactgcagttactggacttaaagctagagtggacagatcttagcttattcttttctcctccctactgggttatggtaactatagggaagtaatgctgtccatctgccctttgtaggactccttgttatcctcctgtgttgtgagttaactcaggggcagctcagtaccacagagtcacttgcttacactctctggatggaatggtggacaggatcaggaaggtagaagtgtgagaactcatgaagacaggttactgaataaagcgaaagccacgt

SEQ ID NO: 57732 - DNA, 600 bp, Chicken  19866894313978_3
tgctgtccatctgccctttgtaggactccttgttatcctcctgtgttgtgagttaactcaggggcagctcagtaccacagagtcacttgcttacactctctggatggaatggtggacaggatcaggaaggtagaagtgtgagaactcatgaagacaggttactgaataaagcgaaagccacgtgtgcaagcaaagaacagtgagttaattcactgcttgccgtcaagcaggtgttcagctacatccaggcaagcaaggttcatgtgtaacggtttattgggaagacaaatgccatcactyctctttctttaccccagctttaattggtgagcatgatgccagatagcatgggatatacactgctgtacagttgttacgtgccaacagcagagcactcatacttacctgtgactggagacaggtctacaagtgcttgctattaattcctgctggcgtatttccacctaggtacccaagtaaatacagtggcaaacataatgtgatttttgcctaccctcttacaggcatcaaattgtttataagtaaagagagtgtgtatgtgttttttcttcccttacagtctttttgcatctgtgtgtc

SEQ ID NO: 57733 - DNA, 600 bp, Chicken  19866894313980_1
ttccccccagagcaacatgccttcagttgcctggatagactgatatttctaatgatgcagcaataccaaaagcgtcacatatgaagactctccaaatcatcattactctaaacaaaccatatttttcctctcttccttctctcagctgtagcagttgattcaacactcgcttgctcagcacacacaggttcttcctctcctattgtcagcatgctctctacacctgcaacatatctgagtaagatataaagagcgagagcaagcgctgatgaaagcccagtctctccctccctttaccgytgctgctaccttgcctcacctcaggtttacacaaaatatcacctccagtttctgtgcagcacacagacagcatctgcacatttcggtctctttttatggttcctttttctcccccatattctttttctctcccttttaagactggtgtgtttctggagtttccctggggaaaatctgcaacttgaaagggtctcttaataaccttgctcagacctgcacacaggaaattaagccattctgcacattcagcatttgccactttgctctgcaatccaaagttcttgcacatacatactgttt

SEQ ID NO: 57734 - DNA, 600 bp, Chicken  19866894313982_1
aacagcttatgccatgtcacagtgcagcatggctgcaggctagatacggctgctccaaatgccaccgctacccatattatagagaaaatatgagtctctattaatattaaaacaaattttcattaaaaaattgtcataacgtgattaagtgactttaaaagtttcttcacattatgcataatttttacaagaggagtgcattagaataatcagcagccagacagcacctcgtggccaaggggactccaaacactgcaacctcgtgtaccaggaggaagttggcctcttgttccctctcaytggcttttcccttctccctccagaaacctgggacttgctcagcaccagtcatgtcgtttgagccttttattgtttccctcttcttagtctgctgcagaggaaaagattaacttcttctttatagccttaattcttaaatctggtctaatatcctctcctgtagtgcgtgcattcagttgctgcacacccagccgttgctgatgggttagagtgaaaagaatagcataccccctacctctgggtctttgagtcttgaagagagttcaaacagttactctcgttttgcttttcctttgatat

SEQ ID NO: 57735 - DNA, 600 bp, Chicken  19866894313986_1
cagggcataacctgatcacctacagagattagaaagaaatgttccccacgtgtagacttcagcagctgcctctgtgtgtcacagcttctgatgtttgttttttggcttcttccttaagcagaagtttatcagcacttgtagattatgtagacaacagagctggtttggtataccaaatcctattatcttatctcactgtcagaagtttctctggtgtgcttgagaaagaaaacggtcctattacacacttaaatatggagcagtattccaaggtcattttctgtacattacatattctawtttcatcactcacagatgctgtaaatgagcacaacgtacaaataaaaatgcatagctttacacttgggcaaataagattagcatcataaataaagcttgtgatatatatgtacataaacacaaaaggctttcttaactataatttgctgtgtattcctctgttacgtaatttaattgaattttacttactagatagcatgacttaaaagccagcttacaatgttgtaggtataacttctaaactcttaaaagccacccacaatacataagcaagataataaatcctccgtagaccaaatc

SEQ ID NO: 57736 - DNA, 600 bp, Chicken  19866894314002_1
cggacacagaagtgctgtaagtattagctacattgaaatcgaagaagagcagtggagcccattcatgcagccctgttagcaagtttgggctctttagagagaaccatcagcatttgtttagttattttcaagcagaagttggcaatctttaatctgcaaaatttcctataatttattgacacttacacatctttcttttctgcagaaacactgctggttttaattagcgcaaattaatcaatagcagggaggccatgctgagttccagtgaaaggcaggtgaggagctctggttgcatgytaaacacagtgatatgtgaaaccaacaactggagctgcagcttcacagagatgcaccttgcagggcaggtgcggcatgcaggaacacacacagctctcaacctgcagctcagtgtatgccatgcaatggaaatgcatgattctaattatgttttcaaaactttaacaagtgcatctgtgttacaagttccctcctgtgcctactccacagaggataagaaatgtttcwgctcctgcttattatgtcttgaggtctttttcattttgggttggtttgggttaggttgagtaattttttttt

SEQ ID NO: 57737 - DNA, 600 bp, Chicken  19866894314002_2
gcaaattaatcaatagcagggaggccatgctgagttccagtgaaaggcaggtgaggagctctggttgcatgytaaacacagtgatatgtgaaaccaacaactggagctgcagcttcacagagatgcaccttgcagggcaggtgcggcatgcaggaacacacacagctctcaacctgcagctcagtgtatgccatgcaatggaaatgcatgattctaattatgttttcaaaactttaacaagtgcatctgtgttacaagttccctcctgtgcctactccacagaggataagaaatgtttcwgctcctgcttattatgtcttgaggtctttttcattttgggttggtttgggttaggttgagtaatttttttttgtagctcaatccatagaattgcatctgacattttggaactcaacttgtttttgctgggtttgtcagccaaagagggtttgtctcagtgacacctgcatagaacagcagttgatgcatctgcatgggactctgtacacatccttggtcttggctttctcacccatttctgctataccctgttttgcaggtactaccaggcgcatattgcctgggcccttgggatcctga

SEQ ID NO: 57738 - DNA, 600 bp, Chicken  19866894314007_1
accctgagttggaagggacactggaagaaagtacgatcgccattcagtggaacttcggtaaactagggagtgtttggtttattctcagcctgcggctcaaatttagccccatttaatatcttagttttgaagttaagcctcactgcagctctggggctttccaaaaacagcaggagtatcaggaactgaaaaagacatcaataggttgctgacacttccatccttcaagctctttgcctacctgtttcttactgcctgacacacacagaaaacaccctaaccctaaaccaactccaaccycaacccaaycctaaccctaacccaaccccaactccaatccaaccctaaccctaaaccaaccccaactccaatacaaccctaaccctaaaccaaccccaaccctaaccccaacccaacactaacgccaagcccaacccaatccaacattaaccccaaccctaatcccaatctaacmccaaccccagtcccaacccgtaactccaactccaaccctaacctcaaccctaaacctaacctcaaccccaaccctaaccctaactccaaccccaaccctaaccctaagcccaaccccagtcccac

SEQ ID NO: 57739 - DNA, 600 bp, Chicken  19866894314007_2
tggaagggacactggaagaaagtacgatcgccattcagtggaacttcggtaaactagggagtgtttggtttattctcagcctgcggctcaaatttagccccatttaatatcttagttttgaagttaagcctcactgcagctctggggctttccaaaaacagcaggagtatcaggaactgaaaaagacatcaataggttgctgacacttccatccttcaagctctttgcctacctgtttcttactgcctgacacacacagaaaacaccctaaccctaaaccaactccaaccycaacccaaycctaaccctaacccaaccccaactccaatccaaccctaaccctaaaccaaccccaactccaatacaaccctaaccctaaaccaaccccaaccctaaccccaacccaacactaacgccaagcccaacccaatccaacattaaccccaaccctaatcccaatctaacmccaaccccagtcccaacccgtaactccaactccaaccctaacctcaaccctaaacctaacctcaaccccaaccctaaccctaactccaaccccaaccctaaccctaagcccaaccccagtcccaccccctagcc

SEQ ID NO: 57740 - DNA, 599 bp, Chicken  19866894314007_3
gtatcaggaactgaaaaagacatcaataggttgctgacacttccatccttcaagctctttgcctacctgtttcttactgcctgacacacacagaaaacaccctaaccctaaaccaactccaaccycaacccaaycctaaccctaacccaaccccaactccaatccaaccctaaccctaaaccaaccccaactccaatacaaccctaaccctaaaccaaccccaaccctaaccccaacccaacactaacgccaagcccaacccaatccaacattaaccccaaccctaatcccaatctaacmccaaccccagtcccaacccgtaactccaactccaaccctaacctcaaccctaaacctaacctcaaccccaaccctaaccctaactccaaccccaaccctaaccctaagcccaaccccagtcccaccccctagccccaactccaaccccaatcccaaccctaaccccaaccctaaacctaacccccaccccaaccctaaccccaaccctaatccattcaaactgggaacaggatacaggtgtgtggggtgggattttggggggagaatgggcaccttcctctggaccccctccaatagct

SEQ ID NO: 57741 - DNA, 600 bp, Chicken  19866894314009_1
cttgcaaaactattggcagtcatgcaaaccaagcaaaaacccggctaggtaaccgaagggagcaataatcactttgcactgtttctgcccatctcaggacctggtttgcaccatgctgtctgtacaagagctgccccccgctacccccaggcagtgccccccagcggtgcacccacccgcagtgtgtcgtagcccagcagcaccgtcagcgtcccactgccgtaggacagcgtaactccctgcccgttgttgatgtaagtggaggatgtgctggggttgaacttggcatggtttcctgcrggagagacgaagtgatagagctgctgggggtgctgtagctgtggggctcacagctgctcgggggggatagrtgggggaggctgcgtggcacccaccgcatgctggcatgttgcagaacgtggagggcacccacaggttggaggagccggtgtcgaagagcaccaggaagttctgagggggggtcccgatgctgatctccccgaagtaagaggactgcagacaagaggtgggttatgtccgtgggacggggctcacctccacctccccgccgtgcaccgcatcccggcaccttgcagcaat

SEQ ID NO: 57742 - DNA, 600 bp, Chicken  19866894314009_2
ctttgcactgtttctgcccatctcaggacctggtttgcaccatgctgtctgtacaagagctgccccccgctacccccaggcagtgccccccagcggtgcacccacccgcagtgtgtcgtagcccagcagcaccgtcagcgtcccactgccgtaggacagcgtaactccctgcccgttgttgatgtaagtggaggatgtgctggggttgaacttggcatggtttcctgcrggagagacgaagtgatagagctgctgggggtgctgtagctgtggggctcacagctgctcgggggggatagrtgggggaggctgcgtggcacccaccgcatgctggcatgttgcagaacgtggagggcacccacaggttggaggagccggtgtcgaagagcaccaggaagttctgagggggggtcccgatgctgatctccccgaagtaagaggactgcagacaagaggtgggttatgtccgtgggacggggctcacctccacctccccgccgtgcaccgcatcccggcaccttgcagcaatgctggggatcccctcactcttaaggtgacaaagtgggaaagggactgagcgatccactcccaaatgaagcg

SEQ ID NO: 57743 - DNA, 600 bp, Chicken  19866894314012_1
gttaaatgagactgcttgctccattctgtgccagaagcacaatctgcatgctgtccatattcagatatcaggttaaaggatttggtgcataaatttggatatgtagttatgaaaaaaatgcttgtgtagtccaggaatggtaattcaccagtcgatcctttctaaacacagcactaaaaaaagttaaccagcccctagtaccaacctcctgttgcttatgtaactgacaaatgtcagttttatggaatttttaattcctgtgtactactgtgagtgccatggactgtgtggaaatgtatrcaatcccttttacagtcttatgtaattttctctgatgctttgagctcctttaagtcaccacttgagaacaaattataatacactggacttttcatatataaagcctgagatgttttgaagctttatgcaaaataggagcagagcactggattaatatcagtggaaaactaatctttgaaaagatgcagtgttttcgtgtcataaatgttttctttcctctttttactccctgaaaacataaataaagggaataacaacattattgttatactactgtttttttgcacaatatttctataa

SEQ ID NO: 57744 - DNA, 599 bp, Chicken  19866894314013_1
  misc_feature (1)..(96): n is any nucleotide
nnnnnnnnnnnnnnnnnnnnnnnnnnnnnnnnnnnnnnnnnnnnnnnnnnnnnnnnnnnnnnnnnnnnnnnnnnnnnnnnnnnnnnnnnnnnnnnncagaagggggcggttgtgaaagagcggcttgtgcctgaatgccagagccaaatcctattcgttgatactgtactagtaccgctgactattccagaaaggggaaaaaagctggctttgaccaaatactggcttctgcttcttaacaaatgcagtaatcactgccagtatcaaccagaaacagatcttaaatttctcatcctgcaygatctagtcacagttcttctttcaaaagacctgccttttctgtctatgtgtcaagaaaaagaaagcaagtgaacttcagtacagagattccrcactaccrtrtttaatgtaggaaggctacccagacacaaggagtatgcacaagcatggtaggtctcctacactctgtcccctgttttgcaggctcatggacaagacctgtggacagggaacaagttgggtgcttcccactgaaggtttgcaacaggcgcctgcacacagaaacgcttcgactgcatgcatgcaaaagtgacctttat

SEQ ID NO: 57745 - DNA, 599 bp, Chicken  19866894314013_2
  misc_feature (1)..(4): n is any nucleotide
nnnncagaagggggcggttgtgaaagagcggcttgtgcctgaatgccagagccaaatcctattcgttgatactgtactagtaccgctgactattccagaaaggggaaaaaagctggctttgaccaaatactggcttctgcttcttaacaaatgcagtaatcactgccagtatcaaccagaaacagatcttaaatttctcatcctgcaygatctagtcacagttcttctttcaaaagacctgccttttctgtctatgtgtcaagaaaaagaaagcaagtgaacttcagtacagagattccrcactaccrtrtttaatgtaggaaggctacccagacacaaggagtatgcacaagcatggtaggtctcctacactctgtcccctgttttgcaggctcatggacaagacctgtggacagggaacaagttgggtgcttcccactgaaggtttgcaacaggcgcctgcacacagaaacgcttcgactgcatgcatgcaaaagtgacctttatgggacaggatctgaggaagacaaaagcactgtgtctggactcaaaggctgctcaacagagtcattgagcatgctgctagtgctgcgtggcat

SEQ ID NO: 57746 - DNA, 600 bp, Chicken  19866894314013_3
agggggcggttgtgaaagagcggcttgtgcctgaatgccagagccaaatcctattcgttgatactgtactagtaccgctgactattccagaaaggggaaaaaagctggctttgaccaaatactggcttctgcttcttaacaaatgcagtaatcactgccagtatcaaccagaaacagatcttaaatttctcatcctgcaygatctagtcacagttcttctttcaaaagacctgccttttctgtctatgtgtcaagaaaaagaaagcaagtgaacttcagtacagagattccrcactaccrtrtttaatgtaggaaggctacccagacacaaggagtatgcacaagcatggtaggtctcctacactctgtcccctgttttgcaggctcatggacaagacctgtggacagggaacaagttgggtgcttcccactgaaggtttgcaacaggcgcctgcacacagaaacgcttcgactgcatgcatgcaaaagtgacctttatgggacaggatctgaggaagacaaaagcactgtgtctggactcaaaggctgctcaacagagtcattgagcatgctgctagtgctgcgtggcatcaccacaac

SEQ ID NO: 57747 - DNA, 600 bp, Chicken  19866894314013_4
ggggcggttgtgaaagagcggcttgtgcctgaatgccagagccaaatcctattcgttgatactgtactagtaccgctgactattccagaaaggggaaaaaagctggctttgaccaaatactggcttctgcttcttaacaaatgcagtaatcactgccagtatcaaccagaaacagatcttaaatttctcatcctgcaygatctagtcacagttcttctttcaaaagacctgccttttctgtctatgtgtcaagaaaaagaaagcaagtgaacttcagtacagagattccrcactaccrtrtttaatgtaggaaggctacccagacacaaggagtatgcacaagcatggtaggtctcctacactctgtcccctgttttgcaggctcatggacaagacctgtggacagggaacaagttgggtgcttcccactgaaggtttgcaacaggcgcctgcacacagaaacgcttcgactgcatgcatgcaaaagtgacctttatgggacaggatctgaggaagacaaaagcactgtgtctggactcaaaggctgctcaacagagtcattgagcatgctgctagtgctgcgtggcatcaccacaacaa

SEQ ID NO: 57748 - DNA, 600 bp, Chicken  19866894314017_1
ttgtgacaatgatatcccattctcccgcagagtttgtcaaaagaaataatataaaaccctgtcgcatgaagtccttgctgtcctttcacagatggattagtggcaggattacccagactttcaagcgagtgatttgggttacagctctatgaaggcagcttacaaggaaggctacaaatttgttggtggtgtatacaaatgcgctgcacaagacaataaatcagatgtcagcaatgtgttcatgagatggaatctggagcttgctgcagcctcatcaaagtcacctgcactggggagatwtgcattcggctggacggctgcagcatagagcaggtgcaacaaaggcagagaagggaaagcttgtggtctgtggtaggcagtgaatgaaatggcatatttaattaattactgcccatttacagtaattgcagaaccaaccagccagggacatggtaaccaccacatcctccctatctatgggaagtggcagggacgaggtttatttgcragagtatcacgcttccatccttgagataaaagtgtaactcctctcccttctcccaggtttccagcgcttgaagtgcaagttaattttatttg

SEQ ID NO: 57749 - DNA, 600 bp, Chicken  19866894314017_2
caagacaataaatcagatgtcagcaatgtgttcatgagatggaatctggagcttgctgcagcctcatcaaagtcacctgcactggggagatwtgcattcggctggacggctgcagcatagagcaggtgcaacaaaggcagagaagggaaagcttgtggtctgtggtaggcagtgaatgaaatggcatatttaattaattactgcccatttacagtaattgcagaaccaaccagccagggacatggtaaccaccacatcctccctatctatgggaagtggcagggacgaggtttatttgcragagtatcacgcttccatccttgagataaaagtgtaactcctctcccttctcccaggtttccagcgcttgaagtgcaagttaattttatttggaggcttgtagttttgtattagcagagctgaggcactgaattgtcatcataaagctgggactgtggtagcattatacttttgcaaggtttagacttctcctcactccctttttgatgtctctaatttattattttccctctaccttcagcgtatcattttccctaatttaggtacaccttaagtaagatgttttcctaaaatgcataa

SEQ ID NO: 57750 - DNA, 599 bp, Chicken  19866894314035_1
  misc_feature (1)..(161): n is any nucleotide
nnnnnnnnnnnnnnnnnnnnnnnnnnnnnnnnnnnnnnnnnnnnnnnnnnnnnnnnnnnnnnnnnnnnnnnnnnnnnnnnnnnnnnnnnnnnnnnnnnnnnnnnnnnnnnnnnnnnnnnnnnnnnnnnnnnnnnnnnnnnnnnnnnnnnnnnnnnnnnnnnacatttaattcctttgtgagtttgtgaggtgattcatgttcatttccaggctgttcatgtggaaaacagtttgcaaagaggagccagtgttggtgggtggttgggaacaagcagatgaagaatttggtctttgaatttyatggactagattttgtttgtagcagtaaaattattttgatttcagtgagttaacttgaggtctatgccaatatcactgagatcaatgtctggtttggaatgccctgagtccatatagcaaataggccaaattatttcaatatatatgtgatatgttttatactttaggctgaaagctacctttaagttcacaataaatatagtggaaaaatgtatatcataaaaatayttacagggctcaaatatttgagagtgccaayatgcaaagggatacaggtagtgctagcaatcttcttcttc

SEQ ID NO: 57751 - DNA, 600 bp, Chicken  19866894314035_2
agtttgcaaagaggagccagtgttggtgggtggttgggaacaagcagatgaagaatttggtctttgaatttyatggactagattttgtttgtagcagtaaaattattttgatttcagtgagttaacttgaggtctatgccaatatcactgagatcaatgtctggtttggaatgccctgagtccatatagcaaataggccaaattatttcaatatatatgtgatatgttttatactttaggctgaaagctacctttaagttcacaataaatatagtggaaaaatgtatatcataaaaatayttacagggctcaaatatttgagagtgccaayatgcaaagggatacaggtagtgctagcaatcttcttcttcttgctagcttttgagctttcaaggctggagtgactgggaagaaagagaaatcttgtatgcttatcctgttttgttttgtttttagagagaaatattgaaaggaaaaaygaaggcttgaggaatgagaggtcctgaatgagattctcgttcattatcttggctgtctaatgtactaattattgcctgtcattggaataaggctacctattgatctccagctgagtttagc

SEQ ID NO: 57752 - DNA, 600 bp, Chicken  19866894314035_3
ggttgggaacaagcagatgaagaatttggtctttgaatttyatggactagattttgtttgtagcagtaaaattattttgatttcagtgagttaacttgaggtctatgccaatatcactgagatcaatgtctggtttggaatgccctgagtccatatagcaaataggccaaattatttcaatatatatgtgatatgttttatactttaggctgaaagctacctttaagttcacaataaatatagtggaaaaatgtatatcataaaaatayttacagggctcaaatatttgagagtgccaayatgcaaagggatacaggtagtgctagcaatcttcttcttcttgctagcttttgagctttcaaggctggagtgactgggaagaaagagaaatcttgtatgcttatcctgttttgttttgtttttagagagaaatattgaaaggaaaaaygaaggcttgaggaatgagaggtcctgaatgagattctcgttcattatcttggctgtctaatgtactaattattgcctgtcattggaataaggctacctattgatctccagctgagtttagctgtatttggagatatatctttgttacattgc

SEQ ID NO: 57753 - DNA, 600 bp, Chicken  19866894314035_4
gtccatatagcaaataggccaaattatttcaatatatatgtgatatgttttatactttaggctgaaagctacctttaagttcacaataaatatagtggaaaaatgtatatcataaaaatayttacagggctcaaatatttgagagtgccaayatgcaaagggatacaggtagtgctagcaatcttcttcttcttgctagcttttgagctttcaaggctggagtgactgggaagaaagagaaatcttgtatgcttatcctgttttgttttgtttttagagagaaatattgaaaggaaaaaygaaggcttgaggaatgagaggtcctgaatgagattctcgttcattatcttggctgtctaatgtactaattattgcctgtcattggaataaggctacctattgatctccagctgagtttagctgtatttggagatatatctttgttacattgcaatcttgttaccgaggagctggtatagtaatctcagctgtggaacactggggattagatgcaaaaccttaattacagttatcttaataatggtccctgaggggcaggttgaaagtacctgtgaaacaggctgtgtgcatggaggagca

SEQ ID NO: 57754 - DNA, 600 bp, Chicken  19866894314039_1
caatagacggttcaattcctgccactgtgttgtgatccatgaagaactattttgtgagtcaatcatctttgtaggcttccatttactgtatctgcaacagtggtaagaacacctctcctttcttattgtttctaacctgactgcttctagatgatcacctcttcagttgagaaactaccccattctctgcatttgaaaagggactgaagtaagagcctaaaaataaatgtgaagagctctgtcactgttggcttgaaacgtattctggccaggtttcttccaacagcttttatttatatyttttctttttgtggcaaacattgttttgttttgactgaaatatagcaaagtctttgacatcatgaaatggcaaaaaaatgtcacagttcatcatgctacaaagtataaacgatcatcaaacaggtgaaaaatacattaaagaagaataaaacttcaaacaggttttaagcagttcacttttatgttttaatagctctttaggagcctgtaaatagaaagtcaattggatttcagacttgtttccatagttatattacacacagggagtattcaataaaacaaatctttaatttagttcct

SEQ ID NO: 57755 - DNA, 600 bp, Chicken  19866894314042_1
tagagagtagtcagccagggtaacctactttagctaaagagcagttcagctgggaaacagcacatttaatggagactaaacccttgttccagatcatacagggaagcaccaatggtcactcctcctttcacagaggtgagccatgaaggcttggcttccagagccatttcatgaaaatgtatgagttgtatctctgcttatactgcaatccaagagatgaaagggagcatttcaggtgtaccagcaacaaggcacctatcctgcaataatacctgtcctgcactgagttactgcagtggyctctggaggggagagcagcattcccccacgagtcacgtcctgctgcaggttcagcacagcccagctgtgcagctctgcatggcagccatggggcacagacacccagcctcaccctgccccaaatcctctctttgttgccagacctaacctgcagtacgcacccggtcctgtgcaaaacagtgttcacttgtttctcaaaaccatcaactgacacagaggaacatctgtcaggtaactgactgatacctcttcaccaaagtgagcacgtttagcaggcagcttacagaggcggtcggcagt

SEQ ID NO: 57756 - DNA, 466 bp, Chicken  19866894314042_2
cagcttacagaggcggtcggcagtctctgggtgcaggtaacgggcagccgcagtttccagtctgtctcaccatccagctggtcagtgcgaaggaagcaggaccctggggagcatccacacccatgagtgctctcatgtaggtacacctacagcttacagaatgggttttgtttctaggacatctttccttctttggaaatggtatcgtatttaaagtaatacttgttaataaggtaagaatcaaggaattatactcccacatcacacatttgtttcctcccaccagtctgaagtacagtrggattctgctctgtatctttaaaacatttggaattagtcatcatgctctgtaaacctgcagatcaagcatttccgtattccacacttaacaaaacaaacctgaacagcacctaaaatgattcacgtttataacacacagcatttgtgacctcattcaccctggatt

SEQ ID NO: 57757 - DNA, 599 bp, Chicken  19866894314055_1
  misc_feature (1)..(7): n is any nucleotide
nnnnnnnaagtattggcaaacagcaaagcatcccacttcaagttgagctgttgctggtaaatagacatgggatctaggaagcaccaattttgcattagttttgttgcaagcagattaataatggtattgctggttgatttggtgcagtgataaattgttattatatgcaacaaattgctctgcttttaggtctaagatactgccagagattgccagtgatctcaaggatcttgttttgtttaggcaggatggggatcctctcaatacaagtctactaatgcatatgtttttcctcaagcrtgtaccttcctctgtgtgcacgtagccccagagacgtggatttcctaatggaatggaggactttgatgagagtggatggccgtgtcacctctgtgttctcagtggagaagaaaatcttccgcagtgggattaaagccatctgcttgcgtcatgggctgttaggtgtgagatacaatttgacttttatttgctagttgccattaggaaatgatttttggatgctgttgctttggtgtacgccatgttccatctgttagggatttttgtcatttctcattatttgaaaatacctatttatg

SEQ ID NO: 57758 - DNA, 586 bp, Chicken  19866894314056_1
aactatgatgccttgctatgaaacctgcttggatttggacaataggaaggctcaggactattgcagtgcaaagaacaggagatgcaggaaaagtcagtagaagggaaagttcacctcttttaaggtcattctaaggaccgattgtcttgtgaaactcagtttaaccaagttgtagatttttatacataatgtgtcatctgtcttcgctgatcttctcaattacagtttcacttaaaaacacatgccagatcagtgtgacctcttggttgcacaatcccaatgatctgtctggcagactgygcctaagaaagccaagagccccagtatcgcctgtatggcgcctgcatgctcctcacacgctgcccaaggaaagtgcaacaggcaacgccaaagcaaatagtctgacattgtttgtatagatcagcaacatgtctttcattaaaatttgctgcggccacagttgtgacattttttttaatgcaattgtaacacagctgatctcttgaattacagactggtgaggagggatcccttcacaagcaaaaggaagggaactgtgcaaacactgactcatagaggaatacat

SEQ ID NO: 57759 - DNA, 599 bp, Chicken  19866894314065_1
  misc_feature (1)..(105): n is any nucleotide
nnnnnnnnnnnnnnnnnnnnnnnnnnnnnnnnnnnnnnnnnnnnnnnnnnnnnnnnnnnnnnnnnnnnnnnnnnnnnnnnnnnnnnnnnnnnnnnnnnnnnnnnntcagacgtgcaattgccactgcattcaagttcaaggcatgatatttataccagatttcaaacactcctcactcgcaggtatggtgttgcaaagataggatcaatacacacagtaggttaaaacaggcactgttctgccaaaatcaatccccagattctcatttggtcctcatttactttagaagctactcaggtkttaagagascactgaatgcaaatattctagcagacagagcattgctgtctgctatagacaacaatgcccatcacagccatggaaagcaagaggctgtgaattgtgtatttcttcagctgtatttttaccagtatcacctacatgtgtttcagttccctatctcatacctatttatatgatgtttacaaaagcatgcgagctgtggtaagctctgctacccatcatattgcagttgaaatcatagattcccctgcaacaaataaaggtagataaatccttaggatgagccagcatcctga

SEQ ID NO: 57760 - DNA, 599 bp, Chicken  19866894314065_2
  misc_feature (1)..(96): n is any nucleotide
nnnnnnnnnnnnnnnnnnnnnnnnnnnnnnnnnnnnnnnnnnnnnnnnnnnnnnnnnnnnnnnnnnnnnnnnnnnnnnnnnnnnnnnnnnnnnnnntcagacgtgcaattgccactgcattcaagttcaaggcatgatatttataccagatttcaaacactcctcactcgcaggtatggtgttgcaaagataggatcaatacacacagtaggttaaaacaggcactgttctgccaaaatcaatccccagattctcatttggtcctcatttactttagaagctactcaggtkttaagagascactgaatgcaaatattctagcagacagagcattgctgtctgctatagacaacaatgcccatcacagccatggaaagcaagaggctgtgaattgtgtatttcttcagctgtatttttaccagtatcacctacatgtgtttcagttccctatctcatacctatttatatgatgtttacaaaagcatgcgagctgtggtaagctctgctacccatcatattgcagttgaaatcatagattcccctgcaacaaataaaggtagataaatccttaggatgagccagcatcctgacagacagaa

SEQ ID NO: 57761 - DNA, 600 bp, Chicken  19866894314065_3
tgcaaatattctagcagacagagcattgctgtctgctatagacaacaatgcccatcacagccatggaaagcaagaggctgtgaattgtgtatttcttcagctgtatttttaccagtatcacctacatgtgtttcagttccctatctcatacctatttatatgatgtttacaaaagcatgcgagctgtggtaagctctgctacccatcatattgcagttgaaatcatagattcccctgcaacaaataaaggtagataaatccttaggatgagccagcatcctgacagacagaaccagcaarctgttctatttctgtagcatacctttaaagacagcccagctccagtccacccagcagctcattagcaagatagtacataacacaacagatgtaggtgggyaaaggaaacaaagtcatagtgacacaaagcattttgtagatttgaagatgcttttctaagaatttgcagtatcgtttgcctcaaagcctgtttaaacccttacattcagagctctgttcaactgagcgttttaagctacacgagaaaaaaaaataattacagcatcatgaatacttctgtaaagaaagcaaagtgaattc

SEQ ID NO: 57762 - DNA, 506 bp, Chicken  19866894314065_4
ctgtatttttaccagtatcacctacatgtgtttcagttccctatctcatacctatttatatgatgtttacaaaagcatgcgagctgtggtaagctctgctacccatcatattgcagttgaaatcatagattcccctgcaacaaataaaggtagataaatccttaggatgagccagcatcctgacagacagaaccagcaarctgttctatttctgtagcatacctttaaagacagcccagctccagtccacccagcagctcattagcaagatagtacataacacaacagatgtaggtgggyaaaggaaacaaagtcatagtgacacaaagcattttgtagatttgaagatgcttttctaagaatttgcagtatcgtttgcctcaaagcctgtttaaacccttacattcagagctctgttcaactgagcgttttaagctacacgagaaaaaaaaataattacagcatcatgaatacttctgtaaagaaagcaaagtgaattccatgca

SEQ ID NO: 57763 - DNA, 599 bp, Chicken  19866894314071_1
  misc_feature (1)..(9): n is any nucleotide
nnnnnnnnntctgcctctatcctaaaattgtattgcacaaattcttagcacaaagtttatgtctcagagcatctgtttgctgccacaatttagcctatataatgctgaaaaaacaacaacaacaacaaaaggtgaagactacccagatgttgttgtatttcagcagatgacagacatttggttggagatgttggcagagtggcatacaaacacttgtagacgagcaaagtaacctgcactctttattcaatactagggtttcctacggtacccatctgccactggagaaggctggcccaytcactttgycccctcctctgtgagtctgaattcagaaaacacatgaaaagagaaacaaaggcaattcaaatatgcataagattgtgctttgttaaaaaactgccataaatctgcatggtttaggcaaaaagtccaaacgtagtgaaagcatatgtatgtggtgcatttatgggcaaatctcattctaattttcatcccaaaataacttagctttggtattcttaacaagcaggtgtcattgaacaaaactgcatccttcagcatccttatccacactggtgggaaaggagctacagaac

SEQ ID NO: 57764 - DNA, 600 bp, Chicken  19866894314071_2
tctgcctctatcctaaaattgtattgcacaaattcttagcacaaagtttatgtctcagagcatctgtttgctgccacaatttagcctatataatgctgaaaaaacaacaacaacaacaaaaggtgaagactacccagatgttgttgtatttcagcagatgacagacatttggttggagatgttggcagagtggcatacaaacacttgtagacgagcaaagtaacctgcactctttattcaatactagggtttcctacggtacccatctgccactggagaaggctggcccaytcactttgycccctcctctgtgagtctgaattcagaaaacacatgaaaagagaaacaaaggcaattcaaatatgcataagattgtgctttgttaaaaaactgccataaatctgcatggtttaggcaaaaagtccaaacgtagtgaaagcatatgtatgtggtgcatttatgggcaaatctcattctaattttcatcccaaaataacttagctttggtattcttaacaagcaggtgtcattgaacaaaactgcatccttcagcatccttatccacactggtgggaaaggagctacagaacaacaggaaac

SEQ ID NO: 57765 - DNA, 600 bp, Chicken  19866894314072_1
ccagtgctggggaaaggcctccataaatgactgacccaactttgtgctgaagggaaaatagggcaaagtgggtcagtttgtgataaggagatgaaccagagctgttggctttgccaggaggtccccggaaacagccaagaaatgggaggacaggcaaggtgatgataccacacttaaagctgagaagaactgctgcaggacaccacgctgagcaggtttggggttttcctgcttttgtgctgttgctcagtaggaatgctgggatgggaaggtgatgtgatgtggcagccagggctcctkctgctgctgctcaccacagtgctgtgacagcggtgtcttcagctactttyctctagcagactgctggcagtgcctgggatgtgaccccctgcacctgttgtttgggaacttctccagatccctctaggttgtggccaggtagctctgtcctgctcttttccaagagcacagtttgagttttcagccatatctgagcttccttcagaaggccagagctcctggggtcctgtgcccttacccagcatggcgatgtcaacctacctgggggggcagactggctgtcactcaagaacttggctg

SEQ ID NO: 57766 - DNA, 600 bp, Chicken  19866894314072_2
agggaaaatagggcaaagtgggtcagtttgtgataaggagatgaaccagagctgttggctttgccaggaggtccccggaaacagccaagaaatgggaggacaggcaaggtgatgataccacacttaaagctgagaagaactgctgcaggacaccacgctgagcaggtttggggttttcctgcttttgtgctgttgctcagtaggaatgctgggatgggaaggtgatgtgatgtggcagccagggctcctkctgctgctgctcaccacagtgctgtgacagcggtgtcttcagctactttyctctagcagactgctggcagtgcctgggatgtgaccccctgcacctgttgtttgggaacttctccagatccctctaggttgtggccaggtagctctgtcctgctcttttccaagagcacagtttgagttttcagccatatctgagcttccttcagaaggccagagctcctggggtcctgtgcccttacccagcatggcgatgtcaacctacctgggggggcagactggctgtcactcaagaacttggctgcaaaacataaatgttttgtcttgctgagtaaaatgccttgtgcaaaaacc

SEQ ID NO: 57767 - DNA, 600 bp, Chicken  19866894314073_1
tataataatatatatatatatcataatggagctaaaaatactctcctacacttttccagcaaattaaaaagtgaaggtaaaggctaaattttgctgtgattttatatgagtatctatttttatacttttgtaaatatgctgcatcttcaaaaagaacttatattaaaaagtagatttctacacattctcatgttattctgtggcagaaggagacaaatgcaaaaaaaaaaaaaaaatattcataagttagcaatcacagtgaaaaataagtcctgaaagaatgtcatcttctaccttccygtaatagaatgcaaacatagcgtctggcctcatatgccttgaaaacaacatttattattactaaacatacctggatttcttcttccatcttggattttgtttgcaaaagcaggaaattcaaagaacattttagagactcagtttactgttctgtgggtatacaacttgttcaatctatactgaaatcgtaccacacatagaaatttttctaaaaatctcagaaatttgaatagttgtcaacgtatttttcccgaacaggtaatgaaaggcaagaaagtctccacggctatttgcaaaagt

SEQ ID NO: 57768 - DNA, 600 bp, Chicken  19866894314077_1
tagaagtttaggaatttacaactgttatctaagggaaaactatagtgggagccaattgctttagtcagaagcctttgttattgtaaagaagctttaatatacatgcttttgcttcctaaatcggaaggtggaagtgtagtattttatgggtcactcagaagaaacaaataaaaacaaaagcaattcaactcctcgtcacccaatctggcaatttgtaaaactgaagtctgcaaagcaccaacttggtaacagatgtagtgaattataaacacgaacttgtcagagattactgttaaaaayagaagaagaagaagggcaggcaggcgtcctatgttaaaacacatcttttgttttcattatcgttaatccacctttccccttacagctatttgatgtgaagcatggctgtggagtagtaccagttcagtggtgtggatgaagggaaaagagctttcagaaattacagaacgaggttccgagaagaaaatttcatttaaaaagacatttctgttcagcagtcgagcaatctgtttcaaatttcagtgtctatctgtagcactgaggtttctgtgtcactgcacacggaaagagctgctgagg

SEQ ID NO: 57769 - DNA, 600 bp, Chicken  19866894314077_2
agaagtttaggaatttacaactgttatctaagggaaaactatagtgggagccaattgctttagtcagaagcctttgttattgtaaagaagctttaatatacatgcttttgcttcctaaatcggaaggtggaagtgtagtattttatgggtcactcagaagaaacaaataaaaacaaaagcaattcaactcctcgtcacccaatctggcaatttgtaaaactgaagtctgcaaagcaccaacttggtaacagatgtagtgaattataaacacgaacttgtcagagattactgttaaaaaaygaagaagaagaagggcaggcaggcgtcctatgttaaaacacatcttttgttttcattatcgttaatccacctttccccttacagctatttgatgtgaagcatggctgtggagtagtaccagttcagtggtgtggatgaagggaaaagagctttcagaaattacagaacgaggttccgagaagaaaatttcatttaaaaagacatttctgttcagcagtcgagcaatctgtttcaaatttcagtgtctatctgtagcactgaggtttctgtgtcactgcacacggaaagagctgctgagga

SEQ ID NO: 57770 - DNA, 600 bp, Chicken  19866894314077_3
gaagtttaggaatttacaactgttatctaagggaaaactatagtgggagccaattgctttagtcagaagcctttgttattgtaaagaagctttaatatacatgcttttgcttcctaaatcggaaggtggaagtgtagtattttatgggtcactcagaagaaacaaataaaaacaaaagcaattcaactcctcgtcacccaatctggcaatttgtaaaactgaagtctgcaaagcaccaacttggtaacagatgtagtgaattataaacacgaacttgtcagagattactgttaaaaaaayaagaagaagaagggcaggcaggcgtcctatgttaaaacacatcttttgttttcattatcgttaatccacctttccccttacagctatttgatgtgaagcatggctgtggagtagtaccagttcagtggtgtggatgaagggaaaagagctttcagaaattacagaacgaggttccgagaagaaaatttcatttaaaaagacatttctgttcagcagtcgagcaatctgtttcaaatttcagtgtctatctgtagcactgaggtttctgtgtcactgcacacggaaagagctgctgaggaa

SEQ ID NO: 57771 - DNA, 600 bp, Chicken  19866894314077_4
catattgtctgctttggtgagctcagactctatatgtgaggaatgagcaaaaattccagctaatcctaggcataaagctttttaatgtttaagtctctcctgcctcgcagataaataccgtctcctgtttcacccatccagctggggtatcagacaatctggggagcatccaagatgggcatgaagatccatttcctggttcatgataactacagtagatacttgtgccataaagttcattttctagcatttcattcaacaacaaactttaaaaagctgcttagacctaccaggctgttyctcctgcaactcagacactagggaagtattgagaatcatagaaacacagaacagtttgggttggaagggacctttaagatcatctagttccaacccccctgctatagtgagggacactccctctagaccaggttgctcaaagscccatccagcctggccttgaacacctccagggtggggcagggatatttaaaaggcagggggggatatttaaaagtaatacagaatgtgaaatccttcaagttttgataagggcaacatcatcactacaggtttttagtgtggaacgagacaagaaga

SEQ ID NO: 57772 - DNA, 600 bp, Chicken  19866894314077_5
ggggtatcagacaatctggggagcatccaagatgggcatgaagatccatttcctggttcatgataactacagtagatacttgtgccataaagttcattttctagcatttcattcaacaacaaactttaaaaagctgcttagacctaccaggctgttyctcctgcaactcagacactagggaagtattgagaatcatagaaacacagaacagtttgggttggaagggacctttaagatcatctagttccaacccccctgctatagtgagggacactccctctagaccaggttgctcaaagscccatccagcctggccttgaacacctccagggtggggcagggatatttaaaaggcagggggggatatttaaaagtaatacagaatgtgaaatccttcaagttttgataagggcaacatcatcactacaggtttttagtgtggaacgagacaagaagatagggaaggtggttcagcactcatcagtatcatcatcacagggtagcaacagtaacagaggtcccacctcgtcatgcctccatcacaatgttgttaatttacaaaygatgactccaaaagagacagaggggaaaagtgaaggt

SEQ ID NO: 57773 - DNA, 600 bp, Chicken  19866894314077_6
gtgagggacactccctctagaccaggttgctcaaagscccatccagcctggccttgaacacctccagggtggggcagggatatttaaaaggcagggggggatatttaaaagtaatacagaatgtgaaatccttcaagttttgataagggcaacatcatcactacaggtttttagtgtggaacgagacaagaagatagggaaggtggttcagcactcatcagtatcatcatcacagggtagcaacagtaacagaggtcccacctcgtcatgcctccatcacaatgttgttaatttacaaaygatgactccaaaagagacagaggggaaaagtgaaggtttgtttattttgtaaacaaccagttccaaacctccactttctgccaaccatttgcttctctgagagaaactgttaacagtgaagtaaatagaaagtctgaacaaaaacttcttgtggattttttgtgagagacagaggacctcgaggatctatctgaaacaagcctgactactgtcagaaaaaaagtacttctccttgcatattaggtttatattagaaataactgaaaaagactcctttccttccttctttctttccttctt

SEQ ID NO: 57774 - DNA, 600 bp, Chicken  19866894314078_1
ctgtgatgtcctgccctggattagtttttgttcgtgtcttctgcagaaactggtgaggtgcaaggcttgtgcagatgctggtttgctggatgagaactttctcaggagatgtctgaatttctatggcatggtgattcaactgatgcttcgcatcctcgaccccgcctatcccaagtgagcgtcgggattatctgtgtaaattgtatcaaagataattcaggatatggtagattatttactgagtttagctactttaattcagctgttgtattttattttatttttttagtctttgttctyatataaatgtttctttgattatttttgtcagtgacatgcactcttgcatagaatatatcctatttgcagtttaaggttcaactgggggatgtggggtgttggggaagcatcccacagctgtgttagtagatgtgaaccattggcattgaccttctaaaaaatctgtcacatcttttataatgttttttttataggccaactccataagagatctcatattgctttgtacttagccctggtatttcactgtcctttctgttgtatattctattctgcagcataaaattgcctttaacactt

SEQ ID NO: 57775 - DNA, 600 bp, Chicken  19866894314081_1
gggacggggctctgagcacgtgattgagctgtgggtgtcccttttcattgcaggggaagttggacctgattaagggtcccttcctgctcagacagattctatcattcagtcatatcactgacagatcaacatctgagaaaagtacttctgggtagaagcagctgctgtgggacttggagaagggaaatccctgccttccctgtggcgtcacttggttttaatagatggaaggaagatgacagtttgttttgcaggagcaaaccatgtttggtgactgctaaatgcttctcaattaattawttataaatattgttctctcagttgcactggatatctacaggaaggatgaaaacttatttatcagtcctcttccatagtagcaatgacccatggatgcaccctgtgcatgggacccatccactgtgaggagctgcaggccatcatgaggagctatagggccataatgaggagctatagggcaatgagaagctgtagggccaccatgaagcctcccatcagcctcttctgctctggggccagcaagcccagggcccttctcagctgcttcacactattttgagcacagtctgatcaccaagg

SEQ ID NO: 57776 - DNA, 379 bp, Chicken  19866894314097_1
aatccagatcaaagatcaatgtctagtaggcaaagttttcacttcaagtcaaggagaaaagagtttaggcatagaggtttatcctaaatctgacatgacttggacaacaggtggacaaattttaataaaaatctggatacaacaaaatgttcatgctgccgcttcaactaaaacccagggctcagtcttgcagcagaatataagtatctccaaatctgaagggtatttcaaaggtcagctgcttagacaagtaaggtaggtatgttactacaatcctagattttggcttccatgcttggytctgccagagacgtcctgtaacygaccttgtacataacccttaggttgctttttctgcttccgtttctcatctgtaaaa

SEQ ID NO: 57777 - DNA, 356 bp, Chicken  19866894314097_2
tagtaggcaaagttttcacttcaagtcaaggagaaaagagtttaggcatagaggtttatcctaaatctgacatgacttggacaacaggtggacaaattttaataaaaatctggatacaacaaaatgttcatgctgccgcttcaactaaaacccagggctcagtcttgcagcagaatataagtatctccaaatctgaagggtatttcaaaggtcagctgcttagacaagtaaggtaggtatgttactacaatcctagattttggcttccatgcttggytctgccagagacgtcctgtaacygaccttgtacataacccttaggttgctttttctgcttccgtttctcatctgtaaaa

SEQ ID NO: 57778 - DNA, 599 bp, Chicken  19866894314100_1
  misc_feature (1)..(201): n is any nucleotide
nnnnnnnnnnnnnnnnnnnnnnnnnnnnnnnnnnnnnnnnnnnnnnnnnnnnnnnnnnnnnnnnnnnnnnnnnnnnnnnnnnnnnnnnnnnnnnnnnnnnnnnnnnnnnnnnnnnnnnnnnnnnnnnnnnnnnnnnnnnnnnnnnnnnnnnnnnnnnnnnnnnnnnnnnnnnnnnnnnnnnnnnnnnnnnnnnnnnnnnnntgcatatgtctatttgtatgtgtgtgtatgtgtatatatgtcacttcaaaataatgtctcccattccatatgttgtcccatgatgtcagagacagataytgctgatatggtgataggggttgaaccttccattcaatattccatcacattttgttgctgtgggacagatggcagcagagaggcggtctaacaaaatggcatctgacatggaagtgtataggaaacaaaggtgtggaactgaattccttcatgcagaaaaaatgacacccactgacattcattgacacttgctgaatgtttatggagatcaaacagtggatgtgagcagagtgaggtagtgagtggtgcatttcagcagtggcaaaagcaacactgatacacctcctctggtgcagatt

SEQ ID NO: 57779 - DNA, 600 bp, Chicken  19866894314100_2
gatatggtgataggggttgaaccttccattcaatattccatcacattttgttgctgtgggacagatggcagcagagaggcggtctaacaaaatggcatctgacatggaagtgtataggaaacaaaggtgtggaactgaattccttcatgcagaaaaaatgacacccactgacattcattgacacttgctgaatgtttatggagatcaaacagtggatgtgagcagagtgaggtagtgagtggtgcatttcagcagtggcaaaagcaacactgatacacctcctctggtgcagatttttayaagcagagaatgcaggctcttgctcattcctgacaaaaatgcatagctaatagtggttaatatattgaaaaagagtgttttgtagcacagaacttgttctctcaagcrgagttactgtgctcttatgacctattgtagtctccatggagataaagaggagctattactttcagagtggcctacagacatgtatatggtgtatatgtttatgatctctctctctataaaagtaaaatagctttaggtgcataaaagctttgttagtgtaaaccagaacgtcaaaaaattcctcttcattta

SEQ ID NO: 57780 - DNA, 600 bp, Chicken  19866894314100_3
agtgtataggaaacaaaggtgtggaactgaattccttcatgcagaaaaaatgacacccactgacattcattgacacttgctgaatgtttatggagatcaaacagtggatgtgagcagagtgaggtagtgagtggtgcatttcagcagtggcaaaagcaacactgatacacctcctctggtgcagatttttayaagcagagaatgcaggctcttgctcattcctgacaaaaatgcatagctaatagtggttaatatattgaaaaagagtgttttgtagcacagaacttgttctctcaagcrgagttactgtgctcttatgacctattgtagtctccatggagataaagaggagctattactttcagagtggcctacagacatgtatatggtgtatatgtttatgatctctctctctataaaagtaaaatagctttaggtgcataaaagctttgttagtgtaaaccagaacgtcaaaaaattcctcttcatttagtaagagattaaaaaaaaaatttagtctgatgttggtgatttgtctcttaagcattcttattggaaagtatacataaaagtagataagcagacataaataggcagcaa

SEQ ID NO: 57781 - DNA, 599 bp, Chicken  19866894314103_1
  misc_feature (1)..(29): n is any nucleotide
nnnnnnnnnnnnnnnnnnnnnnnnnnnnnacatgtataattgcaagcttttaggaacaccaaaaacaaacatacgttcttcacggtcagatctgaggggtggtcctctcctgagcggtggttctctgtcatcagcgcggcgatctctcatgtcacggccacctctgtcccattcttcacgacgactcgaatccctccagctagatgtttcctcagctggtcctcttctccaaccagcatcatcccttttgccattcaaaatgaaaaaataaggctaaatgttaatgttttatctttgctrcggaaagaggtgatgataacacagatattttcaggtccagtgggtctctatttaatatgctgacttccaaaatcttttctggagcctaacatgaaatatgatgtacaggggaaaaaaagtaaaatattttaaagcagtaaagcattctgggatttactctgttagcactttaagaacaacaaaccgctacgccattatccacatactaccttaaagaactccatttcttacacaccaaccacagttcatttcactacgtgaagtcagactatttcttaatgacacaaaggagtcaaacc

SEQ ID NO: 57782 - DNA, 560 bp, Chicken  19866894314112_1
tcacagaccctgcctgacccactcactcggctgaaaattacagactaacctctccccagcaggaatacagctttcctgttctcagcataatgaagtgcaggtccataaagcaagctcccagcatcaccttgcagccatgcatgcaaagatcccctcagtgcagatctaggtccatgtccagcaggccgggacagggctggcattgacactgcatcagagagctgaacaaagcaggcatctgctgtgggggcaacacaaacttccatctctctcctctcttccatccctatcccatctcamagccaagataycatgctcctccatcctgctccatcagcacccactgacccaacgctgagccccagcccggccatcaatggctgttggtggtctttttgtaaactttgcctgcaaaggtttcattaggctgcctcgcagtcattacatcaagtaatggaaaacatccatctccttcagctcctccacagcagccaaaggaaattggtctgaagagcgttaatcaagctatgaaaatcattggcagctcgcatcttgatgag

SEQ ID NO: 57783 - DNA, 549 bp, Chicken  19866894314112_2
gcctgacccactcactcggctgaaaattacagactaacctctccccagcaggaatacagctttcctgttctcagcataatgaagtgcaggtccataaagcaagctcccagcatcaccttgcagccatgcatgcaaagatcccctcagtgcagatctaggtccatgtccagcaggccgggacagggctggcattgacactgcatcagagagctgaacaaagcaggcatctgctgtgggggcaacacaaacttccatctctctcctctcttccatccctatcccatctcamagccaagataycatgctcctccatcctgctccatcagcacccactgacccaacgctgagccccagcccggccatcaatggctgttggtggtctttttgtaaactttgcctgcaaaggtttcattaggctgcctcgcagtcattacatcaagtaatggaaaacatccatctccttcagctcctccacagcagccaaaggaaattggtctgaagagcgttaatcaagctatgaaaatcattggcagctcgcatcttgatgag

SEQ ID NO: 57784 - DNA, 600 bp, Chicken  19866894314120_1
aatgagcctcacagacattctaagcccttctgatattgctgctgctctgcgggactgccaaggtgagaaaacaattaacttgctaaaaatgtactattttgtgcaacacattgcaaggctaattcagccccaaaggaatactgaagaagcacacatgtaatcagacttctgtagtctctcctgtagctgtcacagtatgcattcgttcagatttttacagtgggggtggtttgagtttgtaccccatcccttggtgtgtggcagggtgctgggcagcatggtaacacccattgatcagcytttacatactgttcatgtttggaacagttagactgtaamaaagcagcatcctcagaccatctagggacagtgaacacagaggtctggggttaatatatttattaatttattttcagctccagattcctttagtcccaaaaaattctttcagatcagtgggatgtcyaaaaagagtagtagccagctcaaggagatcttccggattctcgacaatgatcaaagtggctttattgaggaagatgagctcaagtaaggattttctgttaccttgactagtaagagactatccaaaaatcagca

SEQ ID NO: 57785 - DNA, 600 bp, Chicken  19866894314120_2
tgctgctctgcgggactgccaaggtgagaaaacaattaacttgctaaaaatgtactattttgtgcaacacattgcaaggctaattcagccccaaaggaatactgaagaagcacacatgtaatcagacttctgtagtctctcctgtagctgtcacagtatgcattcgttcagatttttacagtgggggtggtttgagtttgtaccccatcccttggtgtgtggcagggtgctgggcagcatggtaacacccattgatcagcytttacatactgttcatgtttggaacagttagactgtaamaaagcagcatcctcagaccatctagggacagtgaacacagaggtctggggttaatatatttattaatttattttcagctccagattcctttagtcccaaaaaattctttcagatcagtgggatgtcyaaaaagagtagtagccagctcaaggagatcttccggattctcgacaatgatcaaagtggctttattgaggaagatgagctcaagtaaggattttctgttaccttgactagtaagagactatccaaaaatcagcactcctttctttctttctaaaacttttccataaagggatg

SEQ ID NO: 57786 - DNA, 600 bp, Chicken  19866894314120_3
ttctgtagtctctcctgtagctgtcacagtatgcattcgttcagatttttacagtgggggtggtttgagtttgtaccccatcccttggtgtgtggcagggtgctgggcagcatggtaacacccattgatcagcytttacatactgttcatgtttggaacagttagactgtaamaaagcagcatcctcagaccatctagggacagtgaacacagaggtctggggttaatatatttattaatttattttcagctccagattcctttagtcccaaaaaattctttcagatcagtgggatgtcyaaaaagagtagtagccagctcaaggagatcttccggattctcgacaatgatcaaagtggctttattgaggaagatgagctcaagtaaggattttctgttaccttgactagtaagagactatccaaaaatcagcactcctttctttctttctaaaacttttccataaagggatgcctcacgttatgctaaacattggtaaaacccttggtagattgtcaacggtgtatttgagtagataacccccgtgcctaaagagcaaagcaggagatgcccaccctttgtgctactttacctcccggg

SEQ ID NO: 57787 - DNA, 468 bp, Chicken  19866894314120_4
agctcaaggagatcttccggattctcgacaatgatcaaagtggctttattgaggaagatgagctcaagtaaggattttctgttaccttgactagtaagagactatccaaaaatcagcactcctttctttctttctaaaacttttccataaagggatgcctcacgttatgctaaacattggtaaaacccttggtagattgtcaacggtgtatttgagtagataacccccgtgcctaaagagcaaagcaggagatgcccaccctttgtgctactttacctcccggggctggactttggtagmrgcagaatccagagcagcaggtctggacctacagagcagaactgtacatgaggaagatgtagctgatcaaacaaagcagtgtttggaggacacggcaaatatttgtttacagatagttactgctttttatcatacagccagcaaaaacaggatcctgtgacaaccata

SEQ ID NO: 57788 - DNA, 467 bp, Chicken  19866894314120_5
gctcaaggagatcttccggattctcgacaatgatcaaagtggctttattgaggaagatgagctcaagtaaggattttctgttaccttgactagtaagagactatccaaaaatcagcactcctttctttctttctaaaacttttccataaagggatgcctcacgttatgctaaacattggtaaaacccttggtagattgtcaacggtgtatttgagtagataacccccgtgcctaaagagcaaagcaggagatgcccaccctttgtgctactttacctcccggggctggactttggtagmrgcagaatccagagcagcaggtctggacctacagagcagaactgtacatgaggaagatgtagctgatcaaacaaagcagtgtttggaggacacggcaaatatttgtttacagatagttactgctttttatcatacagccagcaaaaacaggatcctgtgacaaccata

SEQ ID NO: 57789 - DNA, 599 bp, Chicken  19866894314123_1
  misc_feature (1)..(46): n is any nucleotide
nnnnnnnnnnnnnnnnnnnnnnnnnnnnnnnnnnnnnnnnnnnnnncataaatctgcatgtgcaactttacttcatttatgtatgtaagacttttttacattaaaccatgttttcaagtacggcccaatatttcgcatggctcctgatttttccatgacctgtatgtgtttgtttccactttattgacatattggatttgactaaaggaaaggtttgatcaattctcttgtcataaggagcaatcccgtatgtatgcttcaaggccttcctgagctggaacccgtgttccaccagctctysttcctgactggtcttttggaaacaaccttgctttccaaacactagctgcaggagcaggattgtgaaggtggcttatatagagcaggtttccctattccagtgagtgctttgtctatcaaaaatgtttccattcacatagagcaattccagaattttcagacagtccccattccaagtagtaaggattgagccacagtaaagaaccgctggtttttgtgtctatgtttgattatttggatgctcagtgtgaaagtatctatttttggtctctgacttctgactaaagttatcattttaa

SEQ ID NO: 57790 - DNA, 599 bp, Chicken  19866894314123_2
  misc_feature (1)..(45): n is any nucleotide
nnnnnnnnnnnnnnnnnnnnnnnnnnnnnnnnnnnnnnnnnnnnncataaatctgcatgtgcaactttacttcatttatgtatgtaagacttttttacattaaaccatgttttcaagtacggcccaatatttcgcatggctcctgatttttccatgacctgtatgtgtttgtttccactttattgacatattggatttgactaaaggaaaggtttgatcaattctcttgtcataaggagcaatcccgtatgtatgcttcaaggccttcctgagctggaacccgtgttccaccagctctysttcctgactggtcttttggaaacaaccttgctttccaaacactagctgcaggagcaggattgtgaaggtggcttatatagagcaggtttccctattccagtgagtgctttgtctatcaaaaatgtttccattcacatagagcaattccagaattttcagacagtccccattccaagtagtaaggattgagccacagtaaagaaccgctggtttttgtgtctatgtttgattatttggatgctcagtgtgaaagtatctatttttggtctctgacttctgactaaagttatcattttaaa

SEQ ID NO: 57791 - DNA, 599 bp, Chicken  19866894314125_1
  misc_feature (1)..(87): n is any nucleotide
nnnnnnnnnnnnnnnnnnnnnnnnnnnnnnnnnnnnnnnnnnnnnnnnnnnnnnnnnnnnnnnnnnnnnnnnnnnnnnnnnnnnnnntttcataatctgagaaatcttattgttcaaacccccccaacagtatgagaaggcctctcatactgtaagagcaaaataaagcatctccaaaaaattgtatgggcatttgtgcatgcatttgtgtggacagcctttctatgaagacacgcacacacaatgatcctgcaatgtaagctcttttgcagcaccacatgcaaacatttttctgcatcmagaagaaactaatttatgctaaggaaattcacctcacaacagtacaacacagtatttttccaggtagttttgctgagattagtaagtcrattttacatgcaaatgaatagaagggaggcaaaggagaataccttaaaaataaaaattaaaaaaaatatctatcaagaagtaaacgtagcatgcaaactaatctacgttagctgtatctcagctccagcatttcaaagtcggacttccctctgttgctgctggatgaaaaatgcacttctttgctgtttattcagtattattttggaaag

SEQ ID NO: 57792 - DNA, 600 bp, Chicken  19866894314125_2
tcataatctgagaaatcttattgttcaaacccccccaacagtatgagaaggcctctcatactgtaagagcaaaataaagcatctccaaaaaattgtatgggcatttgtgcatgcatttgtgtggacagcctttctatgaagacacgcacacacaatgatcctgcaatgtaagctcttttgcagcaccacatgcaaacatttttctgcatcmagaagaaactaatttatgctaaggaaattcacctcacaacagtacaacacagtatttttccaggtagttttgctgagattagtaagtcrattttacatgcaaatgaatagaagggaggcaaaggagaataccttaaaaataaaaattaaaaaaaatatctatcaagaagtaaacgtagcatgcaaactaatctacgttagctgtatctcagctccagcatttcaaagtcggacttccctctgttgctgctggatgaaaaatgcacttctttgctgtttattcagtattattttggaaaggcacaaagcaggtctgagatggaggtcacctcttcccatcagttgctccctcagatgaacatcactacctacaaaagtctttctgtccac

SEQ ID NO: 57793 - DNA, 600 bp, Chicken  19866894314135_1
tttttcgagtgatctgctttcccagagagataatatccattatcctggcaaatcaccttaacaggcagagatttttgctgtgtgaaggtggggaacttcaggtcctgagcagagcttttatctgcaaagcttcaccccggcttgatagggcctgtgaactaaattaaatctcgtcgttactactgctgttgcttgaagacatgttctgagccccgcacagcagatgtgtcacgtggcgtgatgcagctgggagtctgcacgtgtttgcacaacagcaccttggatgcagggtgcttaccytgcaaaggaggtcttgtagctgggattccytggggtggtgtgtatttgttttgagcaggtcgggttcctgcgggcatggagctggtgggcaggggagagctctgtggcattyaagccatgtgagccaaggactctgcgyatcatctgaagaacagctttctcagcttccttgcatttattttcgagagcttttattgtgttttcacaccatcccgtctaaaagaggtaagagggaaagcataattgaggaaacagattttgcgtgtcaagccagcactgagaaaacacactcccagggac

SEQ ID NO: 57794 - DNA, 600 bp, Chicken  19866894314135_10
agtaactgcagctgagaaagagagaggcaaaattatgaatcagaaaagccaacgccaagcccattatttttactcttggggaaaaaaaagtatctttccagacttttttttttttttttttccacatggagtgaatctttgggacactaatgttctgctgtcaggtttgtttaaagattgttttgacagtgccttttgggggtcaaatcttgaagtttttctccatgtgtttcagctaggcaggactcccagtgtctcaacagaggcttttccaaaggagggaaagactaatactgctcratttaattgagaatgttgtctgaacaaacaagagggaggtgcaggtttttaaatttatatatatatatatattttaaatagcagagaatggtgtgcagctgagcagcacgtgcctgcaggtgggttcaggggcagagccctcacctgcgccctgcccttggtgctcccagcctcggccttcacatgggtttccaggtttttatgggcttaattcaaacctgaagtctgcttcagtgtaatgtttttgtggtttaatgttcttggagattttttacagtgtttcttttaaattctgtcact

SEQ ID NO: 57795 - DNA, 600 bp, Chicken  19866894314135_2
taatatccattatcctggcaaatcaccttaacaggcagagatttttgctgtgtgaaggtggggaacttcaggtcctgagcagagcttttatctgcaaagcttcaccccggcttgatagggcctgtgaactaaattaaatctcgtcgttactactgctgttgcttgaagacatgttctgagccccgcacagcagatgtgtcacgtggcgtgatgcagctgggagtctgcacgtgtttgcacaacagcaccttggatgcagggtgcttaccytgcaaaggaggtcttgtagctgggattccytggggtggtgtgtatttgttttgagcaggtcgggttcctgcgggcatggagctggtgggcaggggagagctctgtggcattyaagccatgtgagccaaggactctgcgyatcatctgaagaacagctttctcagcttccttgcatttattttcgagagcttttattgtgttttcacaccatcccgtctaaaagaggtaagagggaaagcataattgaggaaacagattttgcgtgtcaagccagcactgagaaaacacactcccagggaccaggaggctccttctccttggcatttcagc

SEQ ID NO: 57796 - DNA, 600 bp, Chicken  19866894314135_3
agcttttatctgcaaagcttcaccccggcttgatagggcctgtgaactaaattaaatctcgtcgttactactgctgttgcttgaagacatgttctgagccccgcacagcagatgtgtcacgtggcgtgatgcagctgggagtctgcacgtgtttgcacaacagcaccttggatgcagggtgcttaccytgcaaaggaggtcttgtagctgggattccytggggtggtgtgtatttgttttgagcaggtcgggttcctgcgggcatggagctggtgggcaggggagagctctgtggcattyaagccatgtgagccaaggactctgcgyatcatctgaagaacagctttctcagcttccttgcatttattttcgagagcttttattgtgttttcacaccatcccgtctaaaagaggtaagagggaaagcataattgaggaaacagattttgcgtgtcaagccagcactgagaaaacacactcccagggaccaggaggctccttctccttggcatttcagcaggtttggatgtgaaataaaaaccagccaaacacgcacattgaaaatcagaaaagccaaaaactgctcatggcaggttaaag

SEQ ID NO: 57797 - DNA, 600 bp, Chicken  19866894314135_4
gcttgatagggcctgtgaactaaattaaatctcgtcgttactactgctgttgcttgaagacatgttctgagccccgcacagcagatgtgtcacgtggcgtgatgcagctgggagtctgcacgtgtttgcacaacagcaccttggatgcagggtgcttaccytgcaaaggaggtcttgtagctgggattccytggggtggtgtgtatttgttttgagcaggtcgggttcctgcgggcatggagctggtgggcaggggagagctctgtggcattyaagccatgtgagccaaggactctgcgyatcatctgaagaacagctttctcagcttccttgcatttattttcgagagcttttattgtgttttcacaccatcccgtctaaaagaggtaagagggaaagcataattgaggaaacagattttgcgtgtcaagccagcactgagaaaacacactcccagggaccaggaggctccttctccttggcatttcagcaggtttggatgtgaaataaaaaccagccaaacacgcacattgaaaatcagaaaagccaaaaactgctcatggcaggttaaagtaacgataggctcttcagtggatgggc

SEQ ID NO: 57798 - DNA, 600 bp, Chicken  19866894314135_5
cacaccatcccgtctaaaagaggtaagagggaaagcataattgaggaaacagattttgcgtgtcaagccagcactgagaaaacacactcccagggaccaggaggctccttctccttggcatttcagcaggtttggatgtgaaataaaaaccagccaaacacgcacattgaaaatcagaaaagccaaaaactgctcatggcaggttaaagtaacgataggctcttcagtggatgggctgtggtgccttgctgctgttccagctttgcctattggtgggtgaatgcaacaagcaccagctcygccattcacgtgcctttaggtattggtaacagctttacaggatcagttctgcttcttgctattatctgataaagctataatcagcaggagatgggagacagcattttgttcctgtaatggcctcaggaaatgggtgctgtggaagtgtaagagcagctgaaacattttctcaccagtcctcgcagacaggaaggcaatggagagaaaggtggagcaaggcaggctcatttccacactggcagccagggagctttaagtaagaaggcaagcaggggagggagagtgggagcatgtagcttc

SEQ ID NO: 57799 - DNA, 600 bp, Chicken  19866894314135_6
agaacggcttgggttggaagggaccttaaagatcacttagttccaaccacggctgtgggctggtgactacccaccatccagcctggccttgggcacatgcccagcttctctgggcagcctgtgccagggccctgcttggggataaaacccagtggcagctcccttctgccaggggtgtgtatgtggccttgggagcctgccctgccgagcctgcaagacctttgctctagaaaaaatatctgtcattgcttttagcagcccagtttgggattgcagtgtggagcatctgaagcattttgrgacctttgttggcaggaggcagtgcaggaccgggctgcatcccactggccgcagggtgcgggatggcaccgctgcagaaggaaggacagcatcggggcctttgtgcttattgttctcagcagagctgtrctggaaccaataaagttgctgccaccactgctttgaggaaaagtaactgcagctgagaaagagagaggcaaaattatgaatcagaaaagccaacgccaagcccattatttttactcttggggaaaaaaaagtatctttccagacttttttttttttttttttccacatgga

SEQ ID NO: 57800 - DNA, 600 bp, Chicken  19866894314135_7
ccctgcttggggataaaacccagtggcagctcccttctgccaggggtgtgtatgtggccttgggagcctgccctgccgagcctgcaagacctttgctctagaaaaaatatctgtcattgcttttagcagcccagtttgggattgcagtgtggagcatctgaagcattttgrgacctttgttggcaggaggcagtgcaggaccgggctgcatcccactggccgcagggtgcgggatggcaccgctgcagaaggaaggacagcatcggggcctttgtgcttattgttctcagcagagctgtrctggaaccaataaagttgctgccaccactgctttgaggaaaagtaactgcagctgagaaagagagaggcaaaattatgaatcagaaaagccaacgccaagcccattatttttactcttggggaaaaaaaagtatctttccagacttttttttttttttttttccacatggagtgaatctttgggacactaatgttctgctgtcaggtttgtttaaagattgttttgacagtgccttttgggggtcaaatcttgaagtttttctccatgtgtttcagctaggcaggactcccagtgtctca

SEQ ID NO: 57801 - DNA, 600 bp, Chicken  19866894314135_8
tagcagcccagtttgggattgcagtgtggagcatctgaagcattttgrgacctttgttggcaggaggcagtgcaggaccgggctgcatcccactggccgcagggtgcgggatggcaccgctgcagaaggaaggacagcatcggggcctttgtgcttattgttctcagcagagctgtrctggaaccaataaagttgctgccaccactgctttgaggaaaagtaactgcagctgagaaagagagaggcaaaattatgaatcagaaaagccaacgccaagcccattatttttactcttggggraaaaaaagtatctttccagacttttttttttttttttttccacatggagtgaatctttgggacactaatgttctgctgtcaggtttgtttaaagattgttttgacagtgccttttgggggtcaaatcttgaagtttttctccatgtgtttcagctaggcaggactcccagtgtctcaacagaggcttttccaaaggagggaaagactaatactgctcratttaattgagaatgttgtctgaacaaacaagagggaggtgcaggtttttaaatttatatatatatatatattttaaatagc

SEQ ID NO: 57802 - DNA, 600 bp, Chicken  19866894314135_9
cattttgrgacctttgttggcaggaggcagtgcaggaccgggctgcatcccactggccgcagggtgcgggatggcaccgctgcagaaggaaggacagcatcggggcctttgtgcttattgttctcagcagagctgtrctggaaccaataaagttgctgccaccactgctttgaggaaaagtaactgcagctgagaaagagagaggcaaaattatgaatcagaaaagccaacgccaagcccattatttttactcttggggaaaaaaaagtatctttccagacttttttttttttttttttrcacatggagtgaatctttgggacactaatgttctgctgtcaggtttgtttaaagattgttttgacagtgccttttgggggtcaaatcttgaagtttttctccatgtgtttcagctaggcaggactcccagtgtctcaacagaggcttttccaaaggagggaaagactaatactgctcratttaattgagaatgttgtctgaacaaacaagagggaggtgcaggtttttaaatttatatatatatatatattttaaatagcagagaatggtgtgcagctgagcagcacgtgcctgcaggtg

SEQ ID NO: 57803 - DNA, 557 bp, Chicken  19866894314145_1
gtctctcttttggaggacttccacctttatattcctacctctcaggtcttcattttttatttcttatttttttaacctaacgcagggctcattcgcagagcattcattctggagctggatattcactgtctgaagtacatcagacacagtggcccctcagtctggctgctgtaaaacagaacactgagctcatcacagactgccttgggttggaagggatctaaaagaccatctagttccaacctcagctgtgacacactgggctcggttcatgcctaggaaaagcagctgtcatagtcrgagaacacagaatcattaaggctggaaaagacccctaagatccccaggtccaaccccaacccacccctccgtgcccacacagccactgctgaatgcagcacagcctctgccgagggaaggctttgcccataagaggccacagcacgaggcacaacatcctcagctgagctcagctcggggctattcagggggatctatgagcccaggagaggcaaaacacaacagaaaaatgagggaccaaaaagaggagagggtct

SEQ ID NO: 57804 - DNA, 471 bp, Chicken  19866894314147_1
tctcttccaggagaatcagttccatgatgtttctaggctcacagagcaagcgcagagactcaccaggctggagttccctgggtcattctttgtctcttttgttataaaagatgtgtgcatgcatattaagctatttccaattatttggcttttaaaacataatcttgtaatatttcagttcacacctgtttaaaaaaacagcaatatccatcacagtgcaacttatgactccttggacatttctctaaaattatttttcttaatttgtttactgtcctttaaaggtaaaaagattgtgtrtaactttggctgagaaaaggctaaggtactcaccttctgacattgtggttgtctgttctgttatatagctgatgtcatcagttgaggggacaggagtaatggcaagtatccaacatttggtgattaaatgagcaaaagtaatacaggatatatgaaggattaaaaataaaa

SEQ ID NO: 57805 - DNA, 600 bp, Chicken  19866894314152_1
ggggcaggaatgcctctctgttgaaaatgatttgcattctaatagggtttagtcataattgtccattttttgctgggtgttcaggatagttccagctcaggttgttcagctgttgttggcttcatcttggttgctaccagcaagtaacaaaaatactgctttaagctcgtctttctgtgaatcttgtctttttacagtaacaaatttgtttgctaaatgaacttagagatagaagagccagtattcaggatgagcaacgttctggtccattgactcatgtttcaaaccatctttctctcwttctgaactctccttyttaaaggaaaaggaatgatacaataactctgaaatttatatcagtgcaattccagtttctatgtcactgactgcttcttcctatctaagcatttagcaaatctcctgttcctttcatatttcagtgtctctactagctttgacatatttatctattcttttggctgcatatgctgctgtagtaaagataacaatggaatattttccaattttcaatcacagtttttctttcccttctgtatttatttatttatttaagtacgtttcctaggctctctcatwggc

SEQ ID NO: 57806 - DNA, 600 bp, Chicken  19866894314152_2
tctgttgaaaatgatttgcattctaatagggtttagtcataattgtccattttttgctgggtgttcaggatagttccagctcaggttgttcagctgttgttggcttcatcttggttgctaccagcaagtaacaaaaatactgctttaagctcgtctttctgtgaatcttgtctttttacagtaacaaatttgtttgctaaatgaacttagagatagaagagccagtattcaggatgagcaacgttctggtccattgactcatgtttcaaaccatctttctctcwttctgaactctccttyttaaaggaaaaggaatgatacaataactctgaaatttatatcagtgcaattccagtttctatgtcactgactgcttcttcctatctaagcatttagcaaatctcctgttcctttcatatttcagtgtctctactagctttgacatatttatctattcttttggctgcatatgctgctgtagtaaagataacaatggaatattttccaattttcaatcacagtttttctttcccttctgtatttatttatttatttaagtacgtttcctaggctctctcatwggctatattttctagcagt

SEQ ID NO: 57807 - DNA, 528 bp, Chicken  19866894314152_3
tcwttctgaactctccttyttaaaggaaaaggaatgatacaataactctgaaatttatatcagtgcaattccagtttctatgtcactgactgcttcttcctatctaagcatttagcaaatctcctgttcctttcatatttcagtgtctctactagctttgacatatttatctattcttttggctgcatatgctgctgtagtaaagataacaatggaatattttccaattttcaatcacagtttttctttcccttctgtatttatttatttatttaagtacgtttcctaggctctctcatwggctatattttctagcagttacttgcctttttgtccttcctgctcttaaatccatcagttatactagcttggtggaaattgttgtagatgtacaacccaagttctccagtgaggtttggctaactaacaagctattcaagtggttttgtctcctgggtatgtcttcatcctctgtttttccaggttgcttgaatatcctgaacccataatttaccctaatctcctcta

SEQ ID NO: 57808 - DNA, 600 bp, Chicken  19866894314157_1
ctttctttaaatgtgctcagttctctaagcccagtaaagttattgctgtagaatgacattttctgtttgttacaggctgacttgaaacttttcacagacggtcaaattgtcgctgtgtggcaaagcttctgtcaggcctgctttactgcgggaaaatgttcctttttgaaggagtgagagcatcttttatttctggggctttagccttattagaaaaggaagttcttggagaatgttacaatttgctatggaacttatcaaagccaaccaaccaaacccagccccttcctttccaagccsccaccccgaaacagcactgggtttgagatgagaccagcaatgctctcagacaatgccttggagctygaccaaatctatcagtcactgagcaggaggtgcaactccatcatttaagaaacaatcattttttaatctacttatcgcttcctctccatgctgccagygcagcttttcattgctgtaaaatgtrtttcagcaaactgtagaaggaaaggggttttgcctacaatcctgcagctcttgggtgttctaatcgrcagagaggtatcccctttgtctcatctgtacattctgcttgct

SEQ ID NO: 57809 - DNA, 600 bp, Chicken  19866894314157_2
ttgttacaggctgacttgaaacttttcacagacggtcaaattgtcgctgtgtggcaaagcttctgtcaggcctgctttactgcgggaaaatgttcctttttgaaggagtgagagcatcttttatttctggggctttagccttattagaaaaggaagttcttggagaatgttacaatttgctatggaacttatcaaagccaaccaaccaaacccagccccttcctttccaagccsccaccccgaaacagcactgggtttgagatgagaccagcaatgctctcagacaatgccttggagctygaccaaatctatcagtcactgagcaggaggtgcaactccatcatttaagaaacaatcattttttaatctacttatcgcttcctctccatgctgccagygcagcttttcattgctgtaaaatgtrtttcagcaaactgtagaaggaaaggggttttgcctacaatcctgcagctcttgggtgttctaatcgrcagagaggtatcccctttgtctcatctgtacattctgcttgcttctgagcgaagtctggtagagttggaaggatggatggatgttgtggttcctgcatttctgtaagtc

SEQ ID NO: 57810 - DNA, 582 bp, Chicken  19866894314157_3
tttgaaggagtgagagcatcttttatttctggggctttagccttattagaaaaggaagttcttggagaatgttacaatttgctatggaacttatcaaagccaaccaaccaaacccagccccttcctttccaagccsccaccccgaaacagcactgggtttgagatgagaccagcaatgctctcagacaatgccttggagctygaccaaatctatcagtcactgagcaggaggtgcaactccatcatttaagaaacaatcattttttaatctacttatcgcttcctctccatgctgccagygcagcttttcattgctgtaaaatgtrtttcagcaaactgtagaaggaaaggggttttgcctacaatcctgcagctcttgggtgttctaatcgrcagagaggtatcccctttgtctcatctgtacattctgcttgcttctgagcgaagtctggtagagttggaaggatggatggatgttgtggttcctgcatttctgtaagtcactgaggagctaaggtctagagggttacttgggccaattttgttggcagattggtgtgactttcgtgcaacttttttaat

SEQ ID NO: 57811 - DNA, 556 bp, Chicken  19866894314157_4
ttctggggctttagccttattagaaaaggaagttcttggagaatgttacaatttgctatggaacttatcaaagccaaccaaccaaacccagccccttcctttccaagccsccaccccgaaacagcactgggtttgagatgagaccagcaatgctctcagacaatgccttggagctygaccaaatctatcagtcactgagcaggaggtgcaactccatcatttaagaaacaatcattttttaatctacttatcgcttcctctccatgctgccagygcagcttttcattgctgtaaaatgtrtttcagcaaactgtagaaggaaaggggttttgcctacaatcctgcagctcttgggtgttctaatcgrcagagaggtatcccctttgtctcatctgtacattctgcttgcttctgagcgaagtctggtagagttggaaggatggatggatgttgtggttcctgcatttctgtaagtcactgaggagctaaggtctagagggttacttgggccaattttgttggcagattggtgtgactttcgtgcaacttttttaat

SEQ ID NO: 57812 - DNA, 489 bp, Chicken  19866894314157_5
tcaaagccaaccaaccaaacccagccccttcctttccaagccsccaccccgaaacagcactgggtttgagatgagaccagcaatgctctcagacaatgccttggagctygaccaaatctatcagtcactgagcaggaggtgcaactccatcatttaagaaacaatcattttttaatctacttatcgcttcctctccatgctgccagygcagcttttcattgctgtaaaatgtrtttcagcaaactgtagaaggaaaggggttttgcctacaatcctgcagctcttgggtgttctaatcgrcagagaggtatcccctttgtctcatctgtacattctgcttgcttctgagcgaagtctggtagagttggaaggatggatggatgttgtggttcctgcatttctgtaagtcactgaggagctaaggtctagagggttacttgggccaattttgttggcagattggtgtgactttcgtgcaacttttttaat

SEQ ID NO: 57813 - DNA, 599 bp, Chicken  19866894314163_1
  misc_feature (1)..(120): n is any nucleotide
nnnnnnnnnnnnnnnnnnnnnnnnnnnnnnnnnnnnnnnnnnnnnnnnnnnnnnnnnnnnnnnnnnnnnnnnnnnnnnnnnnnnnnnnnnnnnnnnnnnnnnnnnnnnnnnnnnnnnnnntttttgctgatcctggaaagctggtaaatggaaatatgttgatcatggtttaacacaacagtagctgtgaaaatatcaacacttataccacaacacatagataccatcaacagcgtttactgcttttttttttctaatgtacttagtgctctgtactatctatctcatgcatattgtttytcttggttaccattttattggtagattcacagctattgcataaaacagtatggtctacagcaaaccctatattttcacaatttccttaatgttaaaatgggttcagagagaactatttcaagctactacttctattccaaacagttattgtattttctgactaatgaattgactcttggattcagaatgaattttcacttccacgtgaaattttatatggaaaggagataaagaatatgctaatgcacagaactgacacaatccaactttctaggattgctctagcaatactckcactt

SEQ ID NO: 57814 - DNA, 600 bp, Chicken  19866894314163_2
tgtttytcttggttaccattttattggtagattcacagctattgcataaaacagtatggtctacagcaaaccctatattttcacaatttccttaatgttaaaatgggttcagagagaactatttcaagctactacttctattccaaacagttattgtattttctgactaatgaattgactcttggattcagaatgaattttcacttccacgtgaaattttatatggaaaggagataaagaatatgctaatgcacagaactgacacaatccaactttctaggattgctctagcaatactckcacttgkctgtcttcctacaatgcaagtctacaacacaaagagatctttagcattgactcagttatatgtagtayacatgttaaaatataggaatgtgtcttgaaataagtaattaacatctgtagtataaaagaaaatgtataatttgtctttttttatcaaacaattcaagagaaatttagaaatatgtgattttcttttctgtgagtaaattagataattaataaggattaaacaataattccttgtctgacacttgctaaaacaaagcacacatcttcaactctgaattactcttt

SEQ ID NO: 57815 - DNA, 600 bp, Chicken  19866894314163_3
cttggttaccattttattggtagattcacagctattgcataaaacagtatggtctacagcaaaccctatattttcacaatttccttaatgttaaaatgggttcagagagaactatttcaagctactacttctattccaaacagttattgtattttctgactaatgaattgactcttggattcagaatgaattttcacttccacgtgaaattttatatggaaaggagataaagaatatgctaatgcacagaactgacacaatccaactttctaggattgctctagcaatactckcacttgkctgtcttcctacaatgcaagtctacaacacaaagagatctttagcattgactcagttatatgtagtayacatgttaaaatataggaatgtgtcttgaaataagtaattaacatctgtagtataaaagaaaatgtataatttgtctttttttatcaaacaattcaagagaaatttagaaatatgtgattttcttttctgtgagtaaattagataattaataaggattaaacaataattccttgtctgacacttgctaaaacaaagcacacatcttcaactctgaattactctttttttaat

SEQ ID NO: 57816 - DNA, 600 bp, Chicken  19866894314163_4
tattttcacaatttccttaatgttaaaatgggttcagagagaactatttcaagctactacttctattccaaacagttattgtattttctgactaatgaattgactcttggattcagaatgaattttcacttccacgtgaaattttatatggaaaggagataaagaatatgctaatgcacagaactgacacaatccaactttctaggattgctctagcaatactckcacttgkctgtcttcctacaatgcaagtctacaacacaaagagatctttagcattgactcagttatatgtagtayacatgttaaaatataggaatgtgtcttgaaataagtaattaacatctgtagtataaaagaaaatgtataatttgtctttttttatcaaacaattcaagagaaatttagaaatatgtgattttcttttctgtgagtaaattagataattaataaggattaaacaataattccttgtctgacacttgctaaaacaaagcacacatcttcaactctgaattactctttttttaataacactgtacccaacagaagcagcttggagggacagagtcagtgcagttgagcctagtggtcttcaac

SEQ ID NO: 57817 - DNA, 599 bp, Chicken  19866894314164_1
  misc_feature (1)..(5): n is any nucleotide
nnnnnttcttcaacagttttaatgtcaagaggtattaaatgaagttctggcccatatggagatcacagagaccaagctttcccctctctgagggaagtttcaaagccatatattcaacagttaaggagtgtcaaatacatcccatgaaaccatacaccgataactatctcccttcaagctattttagttttacaacgcaggggaggtaactgacttcctgaagcagagggaggaaatcttttaagtatggatcacatatcatagcagaaaaactaaccaccaattaatagaaagagcagyattgcttgtaattccaacatttgtaacccagccctggcttgggcagggcyctgatctactgacactcatgtgctcctcccctcagaagggcctttgcatcsgaagtgaagtaggaaagcacagacggagcagttgtcatcatttggctccacttggaaaagcaacaaaaccctcatcaatggcttagagctggcaggaatagcactggcacatgcacaggtccctcacagctcagaattcagtgacaggtcctttccatgctcttggttacgaatgagcagccagttccaaagggtctc

SEQ ID NO: 57818 - DNA, 600 bp, Chicken  19866894314164_2
cccatatggagatcacagagaccaagctttcccctctctgagggaagtttcaaagccatatattcaacagttaaggagtgtcaaatacatcccatgaaaccatacaccgataactatctcccttcaagctattttagttttacaacgcaggggaggtaactgacttcctgaagcagagggaggaaatcttttaagtatggatcacatatcatagcagaaaaactaaccaccaattaatagaaagagcagyattgcttgtaattccaacatttgtaacccagccctggcttgggcagggcyctgatctactgacactcatgtgctcctcccctcagaagggcctttgcatcsgaagtgaagtaggaaagcacagacggagcagttgtcatcatttggctccacttggaaaagcaacaaaaccctcatcaatggcttagagctggcaggaatagcactggcacatgcacaggtccctcacagctcagaattcagtgacaggtcctttccatgctcttggttacgaatgagcagccagttccaaagggtctcagctataacacaatacatttaactacaccatattgctacatacatagaacc

SEQ ID NO: 57819 - DNA, 600 bp, Chicken  19866894314164_3
aaagccatatattcaacagttaaggagtgtcaaatacatcccatgaaaccatacaccgataactatctcccttcaagctattttagttttacaacgcaggggaggtaactgacttcctgaagcagagggaggaaatcttttaagtatggatcacatatcatagcagaaaaactaaccaccaattaatagaaagagcagyattgcttgtaattccaacatttgtaacccagccctggcttgggcagggcyctgatctactgacactcatgtgctcctcccctcagaagggcctttgcatcsgaagtgaagtaggaaagcacagacggagcagttgtcatcatttggctccacttggaaaagcaacaaaaccctcatcaatggcttagagctggcaggaatagcactggcacatgcacaggtccctcacagctcagaattcagtgacaggtcctttccatgctcttggttacgaatgagcagccagttccaaagggtctcagctataacacaatacatttaactacaccatattgctacatacatagaacctgctgaacctttttcctgaagcagccactcttctctcttcagaactgagct

SEQ ID NO: 57820 - DNA, 600 bp, Chicken  19866894314168_1
tgtctgcacacagttctacacaggaatgaaatccctggaaatgcacgtgctttaggctgctagcattgagcacaggacatcagtgtcaggtaccagctgtcccttcaatcagccagtactccatctgagaccacacagctgattcacagactgactgcaggtggacaacgaatttgctcaaagtgttgggaatgtgcagtgaatcagaatactgagcagcctgggatgcctggacgtgttctttatattggacagcctcctcctggtcaccttccctaggaaggaaaagtgtcaaaaccytgctccacttcatagtgactggarataaccttcttttattgaagagaaaaattattctgcctgtatatttcaccctgaattgtgttgaggattttattttaaaggacgtatggcttttccaatattctttatgggtgcttacttggtgttgtgcttctcccatctaagaaatccatctctgcgtcttctcccatccttgtccattcagcatgagacagtctccttctatggatacaaaactcaccaacagacaaaagtacaaaacgatggtggattactgctggtgagtagagagtgaaa

SEQ ID NO: 57821 - DNA, 600 bp, Chicken  19866894314168_2
aatgaaatccctggaaatgcacgtgctttaggctgctagcattgagcacaggacatcagtgtcaggtaccagctgtcccttcaatcagccagtactccatctgagaccacacagctgattcacagactgactgcaggtggacaacgaatttgctcaaagtgttgggaatgtgcagtgaatcagaatactgagcagcctgggatgcctggacgtgttctttatattggacagcctcctcctggtcaccttccctaggaaggaaaagtgtcaaaaccytgctccacttcatagtgactggarataaccttcttttattgaagagaaaaattattctgcctgtatatttcaccctgaattgtgttgaggattttattttaaaggacgtatggcttttccaatattctttatgggtgcttacttggtgttgtgcttctcccatctaagaaatccatctctgcgtcttctcccatccttgtccattcagcatgagacagtctccttctatggatacaaaactcaccaacagacaaaagtacaaaacgatggtggattactgctggtgagtagagagtgaaagaatatttccatggctaggaaaat

SEQ ID NO: 57822 - DNA, 599 bp, Chicken  19866894314170_1
  misc_feature (1)..(79): n is any nucleotide
nnnnnnnnnnnnnnnnnnnnnnnnnnnnnnnnnnnnnnnnnnnnnnnnnnnnnnnnnnnnnnnnnnnnnnnnnnnnnnnaaatatggcatggtgtctaatgcactaccaacccctagctgatagccagaacttgtcagtttctagtggtggttatagaaaatgacagcctgtggtgaaatgactgattcttctctagtatatccatgatcagcctttgctcttgatgttctttctatggtgctaggtccaggcagaagttatcttttttcactgtgcactgattgataatctcattccaygctcagttagatgagttattgtttattatattcgtggaaactgagttaggaggaaaacagctaatagcagctaagagcaggagaccaacagggccatgtcagggagttaccgggtctctgtaacgtcatgttttccgcaagtcacaagcatatctgaattcagatagttcaattcctgtggatttggggaaatggaaatgtgaagagtgtatatgtacttttatgaagtttttaaaccttcatctccagtcaagtaaggagaagcaatgtgattcttgtcatttatttgaggcttccca

SEQ ID NO: 57823 - DNA, 581 bp, Chicken  19866894314172_1
tgctgccttcctccttttgggccgctgtgcatctgcagagccgtggtttggtattgagaaaaatgagaacgtggtgtttgcatggtgaggagaacccagtggtaaaagagtcattgcgtgccgcaggaagccgccgtcgagggccttttagggcggcggctttttctgtgagtgaatgcgatgacaaaatgcgcaatgtggacaaaagtgctggacgcccgtggagatgccggggattgaacccgggacctcatacatgcaaagcatgcgctctaccgctgagctacatccccctgcccrcrctgcccactcgccggccccaccgctccgtccttcattcatccgagtggggaacagcgcgccgcggagcgctgcctgccgggcggggcggggagcagcgcggggctgcgctgcgtgcgctttgggtgtctcctggagtacagaagcactctgtgtgcgcgcacggacggctgtatgatttttttttttctcttcgggagccgtaataattcaagggaagaaaagtgaggagagaaaaatttcatgaagtaaaaaaaaatataccacctccccgtcgggga

SEQ ID NO: 57824 - DNA, 579 bp, Chicken  19866894314172_2
ctgccttcctccttttgggccgctgtgcatctgcagagccgtggtttggtattgagaaaaatgagaacgtggtgtttgcatggtgaggagaacccagtggtaaaagagtcattgcgtgccgcaggaagccgccgtcgagggccttttagggcggcggctttttctgtgagtgaatgcgatgacaaaatgcgcaatgtggacaaaagtgctggacgcccgtggagatgccggggattgaacccgggacctcatacatgcaaagcatgcgctctaccgctgagctacatccccctgcccrcrctgcccactcgccggccccaccgctccgtccttcattcatccgagtggggaacagcgcgccgcggagcgctgcctgccgggcggggcggggagcagcgcggggctgcgctgcgtgcgctttgggtgtctcctggagtacagaagcactctgtgtgcgcgcacggacggctgtatgatttttttttttctcttcgggagccgtaataattcaagggaagaaaagtgaggagagaaaaatttcatgaagtaaaaaaaaatataccacctccccgtcgggga

SEQ ID NO: 57825 - DNA, 600 bp, Chicken  19866894314173_1
tctttgtctgagagactgtgctggtggcaaatgcatcaccttgggcatctacttgaaagagggagtgtgtttatggtatctgcaaagcagaagagcaaaggttcagtccaatacataggaggacactgagtatgtacaaagatgcaggcaaagaaacagactttctactgcagtggggaaaagagacaaaaacttttcctggataagacatagcaattttaaatcaagccagaccaaacctacaactctataaagagtttgcaagagtggtagagcaaagtggagggttgggaggagttrcatgtttttcctctggatttcctttgagtggaggagaatgcacgttgctgtttatcttcctccagttgtttggattcagtttctgttgaacagaaggacaggaggtayggatccaaactatccagaggttgtcaaaattcagcttgtttgacagctagaaaagaatgtgattggtgactccactgatatacagggaacagaggaaaagcctctaaaagccccagtgagaaagttcactgctacttcatacattcttgctccacatacttcaagaaagttgccagtcacacaggagagggt

SEQ ID NO: 57826 - DNA, 600 bp, Chicken  19866894314173_2
caatacataggaggacactgagtatgtacaaagatgcaggcaaagaaacagactttctactgcagtggggaaaagagacaaaaacttttcctggataagacatagcaattttaaatcaagccagaccaaacctacaactctataaagagtttgcaagagtggtagagcaaagtggagggttgggaggagttrcatgtttttcctctggatttcctttgagtggaggagaatgcacgttgctgtttatcttcctccagttgtttggattcagtttctgttgaacagaaggacaggaggtayggatccaaactatccagaggttgtcaaaattcagcttgtttgacagctagaaaagaatgtgattggtgactccactgatatacagggaacagaggaaaagcctctaaaagccccagtgagaaagttcactgctacttcatacattcttgctccacatacttcaagaaagttgccagtcacacaggagagggtgccttgatgtgtagctgtctccacagactttgtgaacttttaaaacacagcagctgcaggcagctgaatgactaggtcaccaaataaagacttgggaatggggattac

SEQ ID NO: 57827 - DNA, 600 bp, Chicken  19866894314173_3
caacacaaaaaatgaaaacatggccatctgatatgaaccagtttttccgactgtgttgaacttgatttatggatagtgtttctttctgcccctggttccctattatctaagataaaaattctctacatttagatagctttcttttatacttacatactgagtttcgtgagatgttttctctttgtggcttttgttccatttcagaactgatgatgaaaatcctgacagatcctccaccacagaagtgtgaatgtgctgataaggtagttaagttagtaaacatgtaattatgatagtgcyaaaagaggaaatctctatggagatttagatttccttccataatgcaaacaaaagatgatcctcgaagttgtaagttctgttgtttcatctgttttaatgggcaattaatcaagacacagaagacaakgctgataggggtgaaagctgtcatgtggctttgtaattggttttctaagaaactgagagatgtaatcgctacagagaaggatgttgaaataaaatttaacgtgtgatatgaaatgaggaatggaaaaaacctgagagttaaggatgacattttgtcttacttgaatacagctg

SEQ ID NO: 57828 - DNA, 492 bp, Chicken  19866894314173_4
tttagatagctttcttttatacttacatactgagtttcgtgagatgttttctctttgtggcttttgttccatttcagaactgatgatgaaaatcctgacagatcctccaccacagaagtgtgaatgtgctgataaggtagttaagttagtaaacatgtaattatgatagtgcyaaaagaggaaatctctatggagatttagatttccttccataatgcaaacaaaagatgatcctcgaagttgtaagttctgttgtttcatctgttttaatgggcaattaatcaagacacagaagacaakgctgataggggtgaaagctgtcatgtggctttgtaattggttttctaagaaactgagagatgtaatcgctacagagaaggatgttgaaataaaatttaacgtgtgatatgaaatgaggaatggaaaaaacctgagagttaaggatgacattttgtcttacttgaatacagctgtgtaatggaagaagcttgt

SEQ ID NO: 57829 - DNA, 600 bp, Chicken  19866894314174_1
tctcatgttctatttcagatacttactgagcacattttgaaaccttctaatagtctcaatttaattagcttcctattggcttaatttttctttgcccatttaaatattgtattataagcacatttgtaaatcacattgttctaaagccaaaacatttcattcaatgagtgattgcctatataatgtaacaattaccacagcaaattaacgtctttgaataaagatggcacttagtgatgctttatttctttaaattctttcatttatactgcagttaaacaggatatgtcactgcattgyactaataacaaattaactccaacactatggagaaataacaacctaacaatgttattcttcctttataaattagcttcaaaacaaattatcttcttggatgacttgttagtgcaagagttattttgttaagattttggggaaaaaaaatgtagaaataaaagggaaattataacactgaagcagtgatcataatactacagtgctgtagctttctgaggaaagcaagagttgctccaaaagtaacgyttcctattttattatrtttattatgttggccctgacatcagaggtggatgttgg

SEQ ID NO: 57830 - DNA, 600 bp, Chicken  19866894314174_2
tctttaaattctttcatttatactgcagttaaacaggatatgtcactgcattgyactaataacaaattaactccaacactatggagaaataacaacctaacaatgttattcttcctttataaattagcttcaaaacaaattatcttcttggatgacttgttagtgcaagagttattttgttaagattttggggaaaaaaaatgtagaaataaaagggaaattataacactgaagcagtgatcataatactacagtgctgtagctttctgaggaaagcaagagttgctccaaaagtaacgyttcctattttattatrtttattatgttggccctgacatcagaggtggatgttggtgatatggcagttgagtttgaaccttcccaccaatattccatcacattttgttgctacatgacagatatcagtagagaggaagtctgaccaagtggtgtctgacatggaagtatgtatgaagcaaaggtgtggaattgaattcttccatgtggaaaaaaattgcacccactgacatccattgatgctgaatatttatggagaccaaacactgaatgtgaggaaaatgaggcaagggggtggtacac

SEQ ID NO: 57831 - DNA, 600 bp, Chicken  19866894314174_3
tttatactgcagttaaacaggatatgtcactgcattgyactaataacaaattaactccaacactatggagaaataacaacctaacaatgttattcttcctttataaattagcttcaaaacaaattatcttcttggatgacttgttagtgcaagagttattttgttaagattttggggaaaaaaaatgtagaaataaaagggaaattataacactgaagcagtgatcataatactacagtgctgtagctttctgaggaaagcaagagttgctccaaaagtaacgyttcctattttattatrtttattatgttggccctgacatcagaggtggatgttggtgatatggcagttgagtttgaaccttcccaccaatattccatcacattttgttgctacatgacagatatcagtagagaggaagtctgaccaagtggtgtctgacatggaagtatgtatgaagcaaaggtgtggaattgaattcttccatgtggaaaaaaattgcacccactgacatccattgatgctgaatatttatggagaccaaacactgaatgtgaggaaaatgaggcaagggggtggtacactcaccaaagacaaacc

SEQ ID NO: 57832 - DNA, 600 bp, Chicken  19866894314178_1
tttgtctgttcaagcttggaagttagcattgcagattctgtcttgagtaaattcagctgtccattgtacctgaagtactgtttgtgttaaggcttcctcattcagtttaagttccttctgaaggtcgtcatttttttctttcaaagactcattttcctctaaatattttccttcattctcctgatgcctaagttttacttgatcaagttctagccttagcatagcaatctcttcttgcagtaactgatttctgtgcagcagatccttttctctgtcattagtgtcagattcctgtgtgayaaaagacaagaataaattgtcatttgggaaataaattctggtttcacctggcaggcaccacactccccaccactaagtgggatgagggagagaactggaaactcatgggttgagatacaaataatttattaagccaaaagatgaaaaaaatggaaacaagaaagtgatgataatgtaataaccaattcaaaagccaagtaataggatcacaaagagcttcagccaatttctttcctagttaatctcgagatatctggatgtttcactggtagaaaccttaaaaatgattataacaacaac

SEQ ID NO: 57833 - DNA, 599 bp, Chicken  19866894314187_1
  misc_feature (1)..(33): n is any nucleotide
nnnnnnnnnnnnnnnnnnnnnnnnnnnnnnnnnctaacctgataccatgtacctgaaattggctcctgagaatcagcaaattaaactggaaagccaccgtcttccattcccacctgtacttggctcccacaaacacgttgcacctgatgctggagaaggctgctggggcccagcacccaaatggggagaaggaggaaatggggctaggaaggtgcagcaccaccaggaaggtgtttctgccagagttaggatcagaaacaagcagtttggctttggtgtttgcagtcagatctaagctgycttatacagcctggaagtgagggaaaatatccaagggctgttgcgatamttgsatcygtattgggaaatatccaaggactggtgtgatacctggatctgtattggaaaatatccaaggactgggagtcctttagctgagctgagctcatacgttccctgccaagcatcttcctggaaccaaggygagggggaaaaactgcaggcagaatggtttctgraagcatcagcacagcagcatctgtattagcaagaaacaggcttatttgtaactaattactgttctttgcagcactttgtaa

SEQ ID NO: 57834 - DNA, 600 bp, Chicken  19866894314187_2
tacctgaaattggctcctgagaatcagcaaattaaactggaaagccaccgtcttccattcccacctgtacttggctcccacaaacacgttgcacctgatgctggagaaggctgctggggcccagcacccaaatggggagaaggaggaaatggggctaggaaggtgcagcaccaccaggaaggtgtttctgccagagttaggatcagaaacaagcagtttggctttggtgtttgcagtcagatctaagctgycttatacagcctggaagtgagggaaaatatccaagggctgttgcgatamttgsatcygtattgggaaatatccaaggactggtgtgatacctggatctgtattggaaaatatccaaggactgggagtcctttagctgagctgagctcatacgttccctgccaagcatcttcctggaaccaaggygagggggaaaaactgcaggcagaatggtttctgraagcatcagcacagcagcatctgtattagcaagaaacaggcttatttgtaactaattactgttctttgcagcactttgtaaaatattcagcagaaaccatttaattggccgggccacttctcagattaaat

SEQ ID NO: 57835 - DNA, 600 bp, Chicken  19866894314187_3
tgaaattggctcctgagaatcagcaaattaaactggaaagccaccgtcttccattcccacctgtacttggctcccacaaacacgttgcacctgatgctggagaaggctgctggggcccagcacccaaatggggagaaggaggaaatggggctaggaaggtgcagcaccaccaggaaggtgtttctgccagagttaggatcagaaacaagcagtttggctttggtgtttgcagtcagatctaagctgycttatacagcctggaagtgagggaaaatatccaagggctgttgcgatamttgsatcygtattgggaaatatccaaggactggtgtgatacctggatctgtattggaaaatatccaaggactgggagtcctttagctgagctgagctcatacgttccctgccaagcatcttcctggaaccaaggygagggggaaaaactgcaggcagaatggtttctgraagcatcagcacagcagcatctgtattagcaagaaacaggcttatttgtaactaattactgttctttgcagcactttgtaaaatattcagcagaaaccatttaattggccgggccacttctcagattaaatattt

SEQ ID NO: 57836 - DNA, 600 bp, Chicken  19866894314187_4
attggctcctgagaatcagcaaattaaactggaaagccaccgtcttccattcccacctgtacttggctcccacaaacacgttgcacctgatgctggagaaggctgctggggcccagcacccaaatggggagaaggaggaaatggggctaggaaggtgcagcaccaccaggaaggtgtttctgccagagttaggatcagaaacaagcagtttggctttggtgtttgcagtcagatctaagctgycttatacagcctggaagtgagggaaaatatccaagggctgttgcgatamttgsatcygtattgggaaatatccaaggactggtgtgatacctggatctgtattggaaaatatccaaggactgggagtcctttagctgagctgagctcatacgttccctgccaagcatcttcctggaaccaaggygagggggaaaaactgcaggcagaatggtttctgraagcatcagcacagcagcatctgtattagcaagaaacaggcttatttgtaactaattactgttctttgcagcactttgtaaaatattcagcagaaaccatttaattggccgggccacttctcagattaaatatttctca

SEQ ID NO: 57837 - DNA, 600 bp, Chicken  19866894314187_5
ggagaaggaggaaatggggctaggaaggtgcagcaccaccaggaaggtgtttctgccagagttaggatcagaaacaagcagtttggctttggtgtttgcagtcagatctaagctgycttatacagcctggaagtgagggaaaatatccaagggctgttgcgatamttgsatcygtattgggaaatatccaaggactggtgtgatacctggatctgtattggaaaatatccaaggactgggagtcctttagctgagctgagctcatacgttccctgccaagcatcttcctggaaccaaggygagggggaaaaactgcaggcagaatggtttctgraagcatcagcacagcagcatctgtattagcaagaaacaggcttatttgtaactaattactgttctttgcagcactttgtaaaatattcagcagaaaccatttaattggccgggccacttctcagattaaatatttctcaaatggaagtcccatgaggaacgtatacagctccttaattttacaatgaagagtccccctttcatgaatgagcctgacttttatttctgcgaaagctactttatgccactctataaaactagctgaaa

SEQ ID NO: 57838 - DNA, 600 bp, Chicken  19866894314187_6
accaccaggaaggtgtttctgccagagttaggatcagaaacaagcagtttggctttggtgtttgcagtcagatctaagctgycttatacagcctggaagtgagggaaaatatccaagggctgttgcgatamttgsatcygtattgggaaatatccaaggactggtgtgatacctggatctgtattggaaaatatccaaggactgggagtcctttagctgagctgagctcatacgttccctgccaagcatcttcctggaaccaaggygagggggaaaaactgcaggcagaatggtttctgraagcatcagcacagcagcatctgtattagcaagaaacaggcttatttgtaactaattactgttctttgcagcactttgtaaaatattcagcagaaaccatttaattggccgggccacttctcagattaaatatttctcaaatggaagtcccatgaggaacgtatacagctccttaattttacaatgaagagtccccctttcatgaatgagcctgacttttatttctgcgaaagctactttatgccactctataaaactagctgaaatgtaggaatcacgttgtgcccctcactgctgcta

SEQ ID NO: 57839 - DNA, 600 bp, Chicken  19866894314192_1
tctccagttttaaactgaaatgaaagagaacatgttgtaatggtatcatattgtttttcgcaagaggatgaaaattatgaagcaatttcatgttttgagaataactgggcttaatgcacacattcagactgaagatctatttgaaatggatgaaggtctgctatgttatattaaagaaataatcaggttcttaaatagataatctgagatttgagactgaaaaattgattttgataaaagcagaatatttcccacttcctgctttcatgctaactcagatatgattaaatgaatagaacyattttaatgctgtctagagaatgactttgggacttccaacatgaaagtatagtgagagaagttctttccttgttcatccaactcttagcatatcctgaaggtaccttcaaatcccatgatggatttggatctttgctactatcagattagtaacaaagggatgaaaagctgcaatatactcttagaagtcttctgaacctgtaaatctctgtgtcagtataataatttttactaaaatctctatttgattgtctgttttgtactaaatctttgcttggtaaaatattggaaagtgttgtt

SEQ ID NO: 57840 - DNA, 600 bp, Chicken  19866894314194_1
aggctgactggcctgttgttccttggatcctccttatggcccttcttgtagatgggagtcacatcagcaagcctccaatactgtgtgtatctcacaccgtagcccacgtttacctccctgccttcctccacattgtgcccaggaggtccaaggcacacgagccagaaggtaaactccaaattgtgagttattcatgtttgttcaacttttacattttctaaactctcaaaatgaaattaatgcatcaccgttgtcctttccataggatcactcgaggtacttttcatttagaaccatcasggagaaaaggagtaacttgaatgttacctgagatttctaatggcaagagttcatcagtttatgtggatctgcttgtcatgcaaagaaaactcaagctattaacacagacttttaactactctgttcaatgttataaaatcataccaagattcagattcaataaatctgtgtaccagtttctcatttaactgaagcagctgttttagagaaaaactgatgctgatacaaagaaaaggcaatttaaaagcaaactttgtaggtttagaactcatttgaactctgaagttttcctctaatttg

SEQ ID NO: 57841 - DNA, 600 bp, Chicken  19866894314199_1
ccacaaagatgatcacggggctggagcgcctctcctgtgaggacaggctgagggacctgggcttattcagcctggagaaggctgcggggtgacctcattgtagcctttcagtacctaaagggagcctataaacaggaagggagtaaactctttgaaagtgtagataacaaaaggacaaggggaaatggttttaagttgaaagagggaagatttaggttggatgttcggggggaagttctttaccaggagagtggtgaggtgctggaacaggctgcccagagaggttgtggatgccctgtycctggaggtgttcaaggccaggttggatgaggccckggacaacctggtctcgtaaatggggaggttggtggccctgcctggcagggaggttggagattcacgatccttgaggtttcttccaacccaggccattctgtgattctgtgatcactgtggtcattttcaacccaggccattctgtgattctgtgattctgtgatcattgtggtcattttcaacccaggccattctgtgattctgtgatcattgtggtccttttcaacccaggccactctatgattctaggataacactgtactt

SEQ ID NO: 57842 - DNA, 600 bp, Chicken  19866894314199_2
gtgaggacaggctgagggacctgggcttattcagcctggagaaggctgcggggtgacctcattgtagcctttcagtacctaaagggagcctataaacaggaagggagtaaactctttgaaagtgtagataacaaaaggacaaggggaaatggttttaagttgaaagagggaagatttaggttggatgttcggggggaagttctttaccaggagagtggtgaggtgctggaacaggctgcccagagaggttgtggatgccctgtycctggaggtgttcaaggccaggttggatgaggccckggacaacctggtctcgtaaatggggaggttggtggccctgcctggcagggaggttggagattcacgatccttgaggtttcttccaacccaggccattctgtgattctgtgatcactgtggtcattttcaacccaggccattctgtgattctgtgattctgtgatcattgtggtcattttcaacccaggccattctgtgattctgtgatcattgtggtccttttcaacccaggccactctatgattctaggataacactgtacttgattacctttattagtcacaaataggcagcttctct

SEQ ID NO: 57843 - DNA, 599 bp, Chicken  19866894314201_1
  misc_feature (1)..(139): n is any nucleotide
nnnnnnnnnnnnnnnnnnnnnnnnnnnnnnnnnnnnnnnnnnnnnnnnnnnnnnnnnnnnnnnnnnnnnnnnnnnnnnnnnnnnnnnnnnnnnnnnnnnnnnnnnnnnnnnnnnnnnnnnnnnnnnnnnnnnnnnnnnnactcataatcgtgttagaaaaagcagccttcctttctcatctgtgtctgcatatcagacgttacaagagcatgcttcgctgagctgaggagaaggaaaacttacataaattagctggctttcttcaactccatattgaataatgtttttggcttccctaaytgaggggtagaacagatggtgcaggcttagtttaaagtggcatccattagagttacttaagctgatgaatggttgttctctgtaggcatacgtttgttctctataccatgtttattttggaagaaattcagtggaaaaagtcctgattgaagaagcagttatcaagcatggttatgggctaagggggtaatttggtaggtgtgctttgttgaatacttaatgcatggagaaaggagtctttggcatctggggaaggagaaaagagttaaagggtttccaaacagctgttagctggtgag

SEQ ID NO: 57844 - DNA, 600 bp, Chicken  19866894314202_1
aaagaaaggattgctatcatgagaaattagctatttgggtgatttcttaaattaatacaacaatttattcctgatagaaggcttcagcagtgtaactcattctctttttcactcgtaggagcctaaaaatgttggctttcaaaactcatgcttccatcctctgctgtgctgaatgcccctcctttcactgtaaagaataacatccttggagtctgtcttggtggaaaggatagttggactacaaagaactttattctgggttaggaatctcaatctggctttttacctgtaaattcagayttttttttttctttacatctttgtccacaatgtaagtatatctgatctgaaccttctgtaaactgaaatacaacggataaaattaccgaggacttaaaatattcattatttctttcgtagaatgttttccgctgttgatgctttttggtttcagctgttccttcttagttgaacagtaatctacgccaacccaaaaaacagttctatgactaatttgaattatagcatctatagaaatctcaaataaaaaaaaagaaaaraagaaaaaaaatctgctataatcagaaattgaattgttcc

SEQ ID NO: 57845 - DNA, 600 bp, Chicken  19866894314202_2
aactttattctgggttaggaatctcaatctggctttttacctgtaaattcagatttttttttttctttacatctttgtccacaatgtaagtatatctgatctgaaccttctgtaaactgaaatacaacggataaaattaccgaggacttaaaatattcattatttctttcgtagaatgttttccgctgttgatgctttttggtttcagctgttccttcttagttgaacagtaatctacgccaacccaaaaaacagttctatgactaatttgaattatagcatctatagaaatctcaaatyaaaaaaaagaaaaraagaaaaaaaatctgctataatcagaaattgaattgttccattctgatgcagacaagagttgctgttttgcgtgtaactttacttccagaaacatacagaatgcatcaactcccctcttgcttcctttgattcttcagtccccttatcagctgttcagtgaagaccttgtgaaatacatcaattacatttctccatttctaacaatgataaaagtagctttttcttctgtgacctgcaggaacccctcaactgcccaccagacactgttcttagtagatgccatgt

SEQ ID NO: 57846 - DNA, 600 bp, Chicken  19866894314202_3
actttattctgggttaggaatctcaatctggctttttacctgtaaattcagatttttttttttctttacatctttgtccacaatgtaagtatatctgatctgaaccttctgtaaactgaaatacaacggataaaattaccgaggacttaaaatattcattatttctttcgtagaatgttttccgctgttgatgctttttggtttcagctgttccttcttagttgaacagtaatctacgccaacccaaaaaacagttctatgactaatttgaattatagcatctatagaaatctcaaatayaaaaaaagaaaaraagaaaaaaaatctgctataatcagaaattgaattgttccattctgatgcagacaagagttgctgttttgcgtgtaactttacttccagaaacatacagaatgcatcaactcccctcttgcttcctttgattcttcagtccccttatcagctgttcagtgaagaccttgtgaaatacatcaattacatttctccatttctaacaatgataaaagtagctttttcttctgtgacctgcaggaacccctcaactgcccaccagacactgttcttagtagatgccatgtt

SEQ ID NO: 57847 - DNA, 600 bp, Chicken  19866894314202_4
ctttattctgggttaggaatctcaatctggctttttacctgtaaattcagatttttttttttctttacatctttgtccacaatgtaagtatatctgatctgaaccttctgtaaactgaaatacaacggataaaattaccgaggacttaaaatattcattatttctttcgtagaatgttttccgctgttgatgctttttggtttcagctgttccttcttagttgaacagtaatctacgccaacccaaaaaacagttctatgactaatttgaattatagcatctatagaaatctcaaataayaaaaaagaaaaraagaaaaaaaatctgctataatcagaaattgaattgttccattctgatgcagacaagagttgctgttttgcgtgtaactttacttccagaaacatacagaatgcatcaactcccctcttgcttcctttgattcttcagtccccttatcagctgttcagtgaagaccttgtgaaatacatcaattacatttctccatttctaacaatgataaaagtagctttttcttctgtgacctgcaggaacccctcaactgcccaccagacactgttcttagtagatgccatgtta

SEQ ID NO: 57848 - DNA, 600 bp, Chicken  19866894314202_5
ttaggaatctcaatctggctttttacctgtaaattcagatttttttttttctttacatctttgtccacaatgtaagtatatctgatctgaaccttctgtaaactgaaatacaacggataaaattaccgaggacttaaaatattcattatttctttcgtagaatgttttccgctgttgatgctttttggtttcagctgttccttcttagttgaacagtaatctacgccaacccaaaaaacagttctatgactaatttgaattatagcatctatagaaatctcaaataaaaaaaaagaaaaraagaaaaaaaatctgctataatcagaaattgaattgttccattctgatgcagacaagagttgctgttttgcgtgtaactttacttccagaaacatacagaatgcatcaactcccctcttgcttcctttgattcttcagtccccttatcagctgttcagtgaagaccttgtgaaatacatcaattacatttctccatttctaacaatgataaaagtagctttttcttctgtgacctgcaggaacccctcaactgcccaccagacactgttcttagtagatgccatgttaggaaaaggcagg

SEQ ID NO: 57849 - DNA, 600 bp, Chicken  19866894314203_1
aaaattagaaaaaaatataaacagagggataatatataactatttttttttgttttatctagacagacttatgtggattgttgcagctttaattcaaaattttattgactgatttctttctgcatcccaaggagttgctaagcaacatggattctccctcaccatgcatttgttaaaacagaaaaaagtgggaagaaacagaaaaagattcactttctctaatatatctatcaaaccacaaagtaccacttatttcagaatcacctgaagttataccactgatatattcactttctcagwgctgtgcctggttctagagtttaagttcaaaaccaatgaacaaaaatgggcccatttttgctcccattggtaagacactgctggatgatggcttttactcattagtccacccatagccagtgactcacaaatctgcccactgctccttgtgctaaattcttaattatttttaggaagagtaataggttgaggaatgagggctcagctgccttcagcctggagctctcctctgaggcctttagaaaagatgaataattccaggtttttggtacagtctgaatgctatcatttgggctgtgc

SEQ ID NO: 57850 - DNA, 600 bp, Chicken  19866894314206_1
agtgtatgttagatcagtagtgtagtaaagaaaaaaaagtcaaaacaaaaacaaaagctgagtaaaaaaatggatttgtatgtccttaaaattttctagtttggaaaagtaacaacaaggtttggaaaagtgaatcccatctggagttgatttaccatctgtttatggccaggttgctcatgcaagagttttgtaacctttctgaaaagctaagcttgtaaactctctttaaataagtagattaaggcaaaaattccattggaatcaaatcacttaatgtatgttttcaagatctcagaygcttaggatctttttttttttttttttttctctcaggctttagaaaggtagtaaatcacaaatcgtcattctgaggttttcagtgttaacatttgaacaaaacattatcccataagcatgctgctgtaaatgtactgtcactgcctacgctgtggcaggaaatgtttgctaaactttgtgtgttttgatctttctgcaatctcctgataactgctggaagcgtgagaaggtgtgccagcaaaaatgttgctttatattttctccttttcttaagtgtgtgtgttagcaaacactgctgaa

SEQ ID NO: 57851 - DNA, 599 bp, Chicken  19866894314206_2
tgtgtgttttgatctttctgcaatctcctgataactgctggaagcgtgagaaggtgtgccagcaaaaatgttgctttatattttctccttttcttaagtgtgtgtgttagcaaacactgctgaaaagagcacgatgacttggatccacttttggtctgacatgctgctgatgactctcacgcagagataagcaaaccaaccttatatttcatattttattagggacctttacttttgttcctcgacagataggaaagcaattaaatttgattaaaatcagtgcattggataagttcctawaaagggttcataagtgcagatgtgattattggaactccagacttcaaagacagttctggagaagcttaaagttgatgaatttcctaagtgtgaatgtgaacatttaaagtgatttgcagagcacacgttatgaagaagcagggcatggagaaagtgtggcacttgtaagggtaccagtcaatgataatcatatctcttaatagtccattttttaaatatattataagttaataacgttagccaatttatgtggtattgcttaaatgtgtcattttcaatttaaacccaaataaaaaaga

SEQ ID NO: 57852 - DNA, 600 bp, Chicken  19866894314209_1
catgcaatttttggggtagttttttttcttttttctttttcttttctccaagaaaaacttcataagtaaggagggtgagtaggtagcctgaacagtggggaaagctgtactgctgaaataatacaacagaacattaacaccacaaaatcaggttaccagaaattagggaatgccaaaacaacaacttctgtgttttcttttcccttatctatactgtcagatgatattagctatttcttctcactgattgcatagattaggcattgcttgtaaaatagcagttctactatactttatatytagtattcagtaaatgcaccgtacactctttccagcatgttgttcatatcatgactaaataccaaaatgttaactcctgaagggttcttgattctcccattatagctttgttgtttcttctaaatatcaagacaattatccacacaacatcactgtgcagtagagtagcattgccaggcatgttgaatgaaggaaatttgatgtgcacctgctgaaaccaaaatatagaagtgtgaaataaacttcagagctccaggtcctgctttttctgtggctggggctgtgcagccttccacatgc

SEQ ID NO: 57853 - DNA, 591 bp, Chicken  19866894314210_1
atcttcctgacaagtacatttattcattattatttactacacactccagtttgaaaaacaatttttgtgatcaaatcattaacatttactgtaattttggcaacattttccaacttttgtctttgcctcctttcctgcctgttgtctgccttacagtgtctgcctaacagaagttagctttacaaggattatatcaccaatatgttaaacagatcttttttttccccttgccaagctgtcttattgcacattaggctcttaagtattaaagcaaatgttaaataccaggttcctatgtgyaacattaagaatctactacagctacagccttgataaacatcagggaatattttcttatgagatcaccacttcttgatgtacacgattgcttattaatttttccaggcagatcttcagcagatataaaccaatacactgatctcaaactgaaggcctgtctctgactctgaaagcataccatgcaattgtgttaagttttaatgtattttgaccatgctttaaaattcatttcttgtgatttcactgaaataaaattaactttattaaagatttatttatgaaaagtaaaga

SEQ ID NO: 57854 - DNA, 600 bp, Chicken  19866894314211_1
gtgacctatagatggcctagcacagagcatgggtagcaagagcacaatgtttgccaacaacaataaatcctgaaagcaaaaaaggtggggagatcagctgggagttccaggaggacctcatgtgttaaaacagctgggcaggaaaacagaaagtgaaacaagaagcagctctgcatcgttaaacagtggaccttttcaccgtatgaagtgatgaatgtttgaagttcacatggggttaaaaaatgagaaaacaactagaaaaaacactaatagaagccacccatccagggattctgggtrtaaacaccatctgcatgctgctgtgctcctcaggtcacacatgttggggctgggggaggattaccacacactttcctgctcttcagcacacatccaayaggtgccactgctggaggcagaattctgggggcacatctgtgtgctctgggctttcctttggcaaagcgaggcttcaaacaccaaccctttaatgctgcctgcaatttaartggcctgccagctcagaattcgggataggtgtatgtgtgcaagcacatgtattcagactgtgcatttacaggacaaatccggaagagattg

SEQ ID NO: 57855 - DNA, 600 bp, Chicken  19866894314211_2
tgggagttccaggaggacctcatgtgttaaaacagctgggcaggaaaacagaaagtgaaacaagaagcagctctgcatcgttaaacagtggaccttttcaccgtatgaagtgatgaatgtttgaagttcacatggggttaaaaaatgagaaaacaactagaaaaaacactaatagaagccacccatccagggattctgggtrtaaacaccatctgcatgctgctgtgctcctcaggtcacacatgttggggctgggggaggattaccacacactttcctgctcttcagcacacatccaayaggtgccactgctggaggcagaattctgggggcacatctgtgtgctctgggctttcctttggcaaagcgaggcttcaaacaccaaccctttaatgctgcctgcaatttaartggcctgccagctcagaattcgggataggtgtatgtgtgcaagcacatgtattcagactgtgcatttacaggacaaatccggaagagattgaagcctacatgggaacgacatcactaaatggaacagatgggagcgcagtgaaagtcaatgtaacacgagtgatcccgcatcctctcttcaaccccatg

SEQ ID NO: 57856 - DNA, 600 bp, Chicken  19866894314211_3
gatgaatgtttgaagttcacatggggttaaaaaatgagaaaacaactagaaaaaacactaatagaagccacccatccagggattctgggtrtaaacaccatctgcatgctgctgtgctcctcaggtcacacatgttggggctgggggaggattaccacacactttcctgctcttcagcacacatccaayaggtgccactgctggaggcagaattctgggggcacatctgtgtgctctgggctttcctttggcaaagcgaggcttcaaacaccaaccctttaatgctgcctgcaatttaartggcctgccagctcagaattcgggataggtgtatgtgtgcaagcacatgtattcagactgtgcatttacaggacaaatccggaagagattgaagcctacatgggaacgacatcactaaatggaacagatgggagcgcagtgaaagtcaatgtaacacgagtgatcccgcatcctctcttcaaccccatgcttctggacttttgatgtagctgtacttgagctggcaagacccctcgtcttcaacaaatacatccagcccatctgcctccctctcgctgtgcagaagtttcctgttggcaa

SEQ ID NO: 57857 - DNA, 600 bp, Chicken  19866894314213_1
attatttcatcattaagcaaaatgtgcctgagtgttacctgaagaggaacaacctgaatcacctctcacatttttacaattctaaagtgactttataagaaaagtctcaacgaagttgtaaagatagaattgcaagtcatgaggtgtataaagtttggtgatgctcctttctccttttccccacagactgcattttgagaaaaagtccaggatgcctggttctgctccaatttctacattttggtccctatagtgtgttacatttctgtgttctccaggtgttcattttctttatttccrtattaaagttacaccaagtagaattaatttaaatagagtatgcagagaggcatgcacaaatcttgctaaggacttttccctttagagcttgtatatcactcagtcattcctcactgtttacaacaatacactgtatgaattttcagttttgctcaaaatagaaaaataaatgttttaattacactttactggaaaagcttttagattagtgcttttttttttcctttatacagccagttaaagccatgtgctgtgctacgtgtaaaatatgcctgttttaaaatgtgtgcttctttatag

SEQ ID NO: 57858 - DNA, 600 bp, Chicken  19866894314223_1
ttttctcttaaaacaaaaacagtttcaatgctactgcacaaaaacacatcacagttgagcacacagaagtgatttctgcttcagcattgatacaataatatggatgtgtgtaagttgatattgccttgaatgctttgaccagggaggcaatggcccattactggctttagtccttgaaggtgctatgattagattatacctttgcttcctacagggcttacacacagtacgaacagtaaatagactgatcaagagacacgacccaaaaactacaccacaaagatcccacccttaattaarcttcattctcttytctgattcatccacaaacactattcccacccaaggactcactcatgctaccagtgcaagatcacttctgagaactcagattacctgtagtgttacctacccagtgccagggaaacattgtcaacatgtacacagtcagactcatcatttgctcactatttttgctagaaatccttaaccttagtacacttccctaactgcagtatttcctatttttcttggaatagaaaagctcacacttcaaatacttgcattcaaatgaggtatgggtagaaggcaaaactactt

SEQ ID NO: 57859 - DNA, 600 bp, Chicken  19866894314223_2
caaaaacagtttcaatgctactgcacaaaaacacatcacagttgagcacacagaagtgatttctgcttcagcattgatacaataatatggatgtgtgtaagttgatattgccttgaatgctttgaccagggaggcaatggcccattactggctttagtccttgaaggtgctatgattagattatacctttgcttcctacagggcttacacacagtacgaacagtaaatagactgatcaagagacacgacccaaaaactacaccacaaagatcccacccttaattaarcttcattctcttytctgattcatccacaaacactattcccacccaaggactcactcatgctaccagtgcaagatcacttctgagaactcagattacctgtagtgttacctacccagtgccagggaaacattgtcaacatgtacacagtcagactcatcatttgctcactatttttgctagaaatccttaaccttagtacacttccctaactgcagtatttcctatttttcttggaatagaaaagctcacacttcaaatacttgcattcaaatgaggtatgggtagaaggcaaaactacttagacatgcatttg

SEQ ID NO: 57860 - DNA, 600 bp, Chicken  19866894314223_3
aaaaatattctatgttgtcaaacaatgcccagtgaaccctgcaccacacctgccttctacccagagctatatgcattacagaactgaatacagagtgtttgttcctgctttgagttttgctccttttcttttgtatagagttagtgttcagtttcagagaatacacgacagcaatgtaaggcatgacatttgtgaactctggcttctcttttattgctgttggagagactgggaaatcctcttcagaaatcctttgtttgctggggcaggacttcacagcaaacaggagaaaaaaagccrtrgaaacaaaagagatcttggtagaggccaagattgcaagtcacagtcagtcctcagctcaaaagttctgaagttccttccatttactatccataacacagcacaagaaggtttctctrggaagctcccgaggttttattacacctatctaccactgcagcacacrcaaaacccagcagagagagaacagtgctctcatctccacagtgggatacgcaaagactttgcctaagtgataatgctgggaggtgaaagaagtgtttccaggagttccaagaaagcacttatgcaaagcagaaa

SEQ ID NO: 57861 - DNA, 600 bp, Chicken  19866894314223_4
aaatattctatgttgtcaaacaatgcccagtgaaccctgcaccacacctgccttctacccagagctatatgcattacagaactgaatacagagtgtttgttcctgctttgagttttgctccttttcttttgtatagagttagtgttcagtttcagagaatacacgacagcaatgtaaggcatgacatttgtgaactctggcttctcttttattgctgttggagagactgggaaatcctcttcagaaatcctttgtttgctggggcaggacttcacagcaaacaggagaaaaaaagccrtrgaaacaaaagagatcttggtagaggccaagattgcaagtcacagtcagtcctcagctcaaaagttctgaagttccttccatttactatccataacacagcacaagaaggtttctctrggaagctcccgaggttttattacacctatctaccactgcagcacacrcaaaacccagcagagagagaacagtgctctcatctccacagtgggatacgcaaagactttgcctaagtgataatgctgggaggtgaaagaagtgtttccaggagttccaagaaagcacttatgcaaagcagaaata

SEQ ID NO: 57862 - DNA, 600 bp, Chicken  19866894314223_5
ctccttttcttttgtatagagttagtgttcagtttcagagaatacacgacagcaatgtaaggcatgacatttgtgaactctggcttctcttttattgctgttggagagactgggaaatcctcttcagaaatcctttgtttgctggggcaggacttcacagcaaacaggagaaaaaaagccrtrgaaacaaaagagatcttggtagaggccaagattgcaagtcacagtcagtcctcagctcaaaagttctgaagttccttccatttactatccataacacagcacaagaaggtttctctrggaagctcccgaggttttattacacctatctaccactgcagcacacrcaaaacccagcagagagagaacagtgctctcatctccacagtgggatacgcaaagactttgcctaagtgataatgctgggaggtgaaagaagtgtttccaggagttccaagaaagcacttatgcaaagcagaaatagagaaactgtctgactgctaatgctgcagtgtcaaggaacagattatagctgcagataaaaccctcttgccaattgctgctgacagcaatcaggggtcaagttcaaatagcccagga

SEQ ID NO: 57863 - DNA, 596 bp, Chicken  19866894314223_6
gacagcaatgtaaggcatgacatttgtgaactctggcttctcttttattgctgttggagagactgggaaatcctcttcagaaatcctttgtttgctggggcaggacttcacagcaaacaggagaaaaaaagccrtrgaaacaaaagagatcttggtagaggccaagattgcaagtcacagtcagtcctcagctcaaaagttctgaagttccttccatttactatccataacacagcacaagaaggtttctctrggaagctcccgaggttttattacacctatctaccactgcagcacacrcaaaacccagcagagagagaacagtgctctcatctccacagtgggatacgcaaagactttgcctaagtgataatgctgggaggtgaaagaagtgtttccaggagttccaagaaagcacttatgcaaagcagaaatagagaaactgtctgactgctaatgctgcagtgtcaaggaacagattatagctgcagataaaaccctcttgccaattgctgctgacagcaatcaggggtcaagttcaaatagcccaggatgattcccacaatgaacaatgccacaccacagaactcagaagg

SEQ ID NO: 57864 - DNA, 599 bp, Chicken  19866894314231_1
  misc_feature (1)..(116): n is any nucleotide
nnnnnnnnnnnnnnnnnnnnnnnnnnnnnnnnnnnnnnnnnnnnnnnnnnnnnnnnnnnnnnnnnnnnnnnnnnnnnnnnnnnnnnnnnnnnnnnnnnnnnnnnnnnnnnnnnnnnaaaagaccaagcagtggcatactaaaggattgcctgaaaagagagaacacccccaggtttagtcctcaggggcctaccctgtttttccggcacagggatgcgcacagcccacattcaggataagatcaaatgtaaggggtgctttctttttcttttccttgttttttttttttttttttttttwaatcttcagagataaaaatcaaactgtttttaggggaggcacttctgattttgaagcttatgaagacatcacccaaaggcattctctgaagcatatctggaagataacatgtagtaaaggagggtggcaagtcaggaccaattatgtgttcacttggcacatgatgtttaggcaaataattgactgtttgattcccttggagaatggctttacccgcagcaatggtgcattggtgtaggaggtaataccccttccttgagacatgtttgagtgaaggaattgcgtgttcaagcatgctt

SEQ ID NO: 57865 - DNA, 600 bp, Chicken  19866894314235_1
tttatgctcctgtggaaaataataacctttggcagtcagacatcagaggaagactgggacatccagaacagatttgtgcagaattaaaacggcatttgtaagtctgccttttctgcatgtttgtgcctttcttaatcagtccagggtgggtggggctttgagcaatctcatctagtgatctagcagaaggtattctcacctgtggcagggcagggacgttggaactagattgtccttaaaatctcttcaaactcaattcattctgtgattctaatgtaagtaggtaaatacctcaaaatragacaaggagatgcttaagttaccagagaaacccatctttggcattctttgagcaatgttgcatgcctgcagcatttaactctacataaaacagagtaggcactgtcattttcatttattttgcatcattttaatttctgtggggtttttgttgtttgttttcaacaataaaaataacgtacagatttacaatgtggaactagagcccacagttctctactgctgtttggctacataaaagctaggcttatacttgcttcatctacagtttcttctttacagggggagtcctgaattcct

SEQ ID NO: 57866 - DNA, 599 bp, Chicken  19866894314253_1
  misc_feature (1)..(50): n is any nucleotide
nnnnnnnnnnnnnnnnnnnnnnnnnnnnnnnnnnnnnnnnnnnnnnnnnnccggggtgaaaaggtgcttcattactgctgcaggagggagaggaagagccttggtgctcacagcaagtggtgtccccatagcatggcaacttgatgaaagctgggagaaagccccacacgtggctccttctgcttctgtgtgcaggaaatcttaggcagagagtggggctggcgtgcccctttttggggggtggctgttatccttgtcaaggcacttggcattgtgtccaaacactgtctgtgttgtagmagcttggggaaactgaggccagagggcaaaaagtgctttmtgtccygcagctttctggccagccacccccagctgatggtggagggctccttggtgcatcaggtcccactgcactggaggagcaatgcccagctggcagatcttcccccccccccccccccttcagcagtgaggagcaggatggtcctgctggggggcagcaaccccatttgcacatccctgccctgtcacctgcccacacctgcagtgcagaggagctgtttgcaaagtgccggcagatcagaagtgacaaacattga

SEQ ID NO: 57867 - DNA, 599 bp, Chicken  19866894314253_2
  misc_feature (1)..(10): n is any nucleotide
nnnnnnnnnnccggggtgaaaaggtgcttcattactgctgcaggagggagaggaagagccttggtgctcacagcaagtggtgtccccatagcatggcaacttgatgaaagctgggagaaagccccacacgtggctccttctgcttctgtgtgcaggaaatcttaggcagagagtggggctggcgtgcccctttttggggggtggctgttatccttgtcaaggcacttggcattgtgtccaaacactgtctgtgttgtagmagcttggggaaactgaggccagagggcaaaaagtgctttmtgtccygcagctttctggccagccacccccagctgatggtggagggctccttggtgcatcaggtcccactgcactggaggagcaatgcccagctggcagatcttcccccccccccccccccttcagcagtgaggagcaggatggtcctgctggggggcagcaaccccatttgcacatccctgccctgtcacctgcccacacctgcagtgcagaggagctgtttgcaaagtgccggcagatcagaagtgacaaacattgacaccaaggcagggctttgggcaaggttcagctgtaagccc

SEQ ID NO: 57868 - DNA, 599 bp, Chicken  19866894314253_3
  misc_feature (1)..(4): n is any nucleotide
nnnnccggggtgaaaaggtgcttcattactgctgcaggagggagaggaagagccttggtgctcacagcaagtggtgtccccatagcatggcaacttgatgaaagctgggagaaagccccacacgtggctccttctgcttctgtgtgcaggaaatcttaggcagagagtggggctggcgtgcccctttttggggggtggctgttatccttgtcaaggcacttggcattgtgtccaaacactgtctgtgttgtagmagcttggggaaactgaggccagagggcaaaaagtgctttmtgtccygcagctttctggccagccacccccagctgatggtggagggctccttggtgcatcaggtcccactgcactggaggagcaatgcccagctggcagatcttcccccccccccccccccttcagcagtgaggagcaggatggtcctgctggggggcagcaaccccatttgcacatccctgccctgtcacctgcccacacctgcagtgcagaggagctgtttgcaaagtgccggcagatcagaagtgacaaacattgacaccaaggcagggctttgggcaaggttcagctgtaagcccgtgtct

SEQ ID NO: 57869 - DNA, 600 bp, Chicken  19866894314255_1
aacccgcagctcactgcgtacttccgagcctctccaggaaaggctcacagcagtgtgtacagactgacagaccgcaatgttcctgcactacagccagcgctacggccgtggctctcagctgcccgcccacgcagggcacagaggccagcatcctcacccacgtttacttaatgtattaaggaatttcagcactgcttgaccgaggaaccaggcagattcctggcagtccggtactgccttacttcctgtacagtactgcttgtggagctgatttccaaggtgctcaaaagactgcacctstctgccctcagaggtttctcagagcagctctgtcctgtgctggatactctcgttcaaaaggcattccatttacttcacaaggctcagagaaaagctaccaagaatagagctttgagtactctatccctttcttttcccccttgcatcgattaagaggcattgaaaatagctccacaccaactggcattgccagctctggaaataagtcctgagttcctacagctgtaggctttactccactgacagctgtacgctttcagtctgttttggtggctgctgctgctgctgctgctcatattt

SEQ ID NO: 57870 - DNA, 600 bp, Chicken  19866894314260_1
aatcgtgcttcagctggatgcctgcatgttctgtggaacataaatctagtagagcagcaagagagaaataaattctctcatcactaacttaatttgcagattgaatttcgcagagtaacttgacagatatttcaacaatttgaataaaatgttatttcagtttgttcaatttccggagtatacgcattaaaggatttccattttaatctagggaataatgtttcctacattaaaaaaaatctttagtatagaaaagctgataccacattcaagatgcaatgatgttcttgtatgctgggsagaatggccgcatgtaattatgatctggctgttcagttttaatcttttatgcactcctgactgagaactcttactacgcttctaagatctattgatattttcatttgcttattgattgagaagaaattatctccacaacacagagaaaccaccaagaaaatatagttcaaacaaagctgaactgcagtccttaacatcaagcatgccagttaattccttttcttattacatgtacagccctaacaytgcagctaaacttaagtgagctcaaattttgcttaaaaaacaaacatacagcca

SEQ ID NO: 57871 - DNA, 600 bp, Chicken  19866894314260_2
tatagaaaagctgataccacattcaagatgcaatgatgttcttgtatgctgggsagaatggccgcatgtaattatgatctggctgttcagttttaatcttttatgcactcctgactgagaactcttactacgcttctaagatctattgatattttcatttgcttattgattgagaagaaattatctccacaacacagagaaaccaccaagaaaatatagttcaaacaaagctgaactgcagtccttaacatcaagcatgccagttaattccttttcttattacatgtacagccctaacaytgcagctaaacttaagtgagctcaaattttgcttaaaaaacaaacatacagccaccatgctttgtctttctttgccttcataggataagttgagcatatgacaaagccaatgaagtaattcctctcacatagctgttccctctctccctcatcacctcccctctgagccacaaagcacaagctgctggcactgctcctgagatcccagcaggtaacaattttctgctcctgcctggcatgatgaggaagcagcaaggctggaagtcaaaggatatgatcacaatctcatttaagtgagct

SEQ ID NO: 57872 - DNA, 448 bp, Chicken  19866894314261_1
taaattgcttcttgcaaaaattcaggagaaatcatgaaaagaatgctatttatcactgaacccagattttctgtctaatggccttattaactatatgtggccagtaagttaattcttgtaatgatatcctaatcattctttgagtacttggattatagaacagaggaattacaaaggcaaacctcctctttaaatttcgcagccaactttgttttcttcttctctctcattattgaataatttaaagtatctgtgatcagtaaaatattgcatgcttttactttccccaaactcaagtcyatctcctctaaaaaaaagaggtatgaaaataggaaatatgatttcctcctcttaaatctatgtaaaataataaggtggttattttaagataaactaaaacttaactaaacaagttaactaaagattcagagcccattgctgtttgcag

SEQ ID NO: 57873 - DNA, 600 bp, Chicken  19866894314264_1
tgttttacagttatactcatgatactcattttgattctcttcttataaactgtcatgtgtttcagcattcctgctgtttcatcttattgtttggcagacaaacacacactgaaagcagttcagcagttttgcatgagcagcattttttctgcaatagctttaaatatatacccatgtttggtgtttaatgaattttctatgtgttttaatcctgtttttataacgtgttgcattttactgattaaaatggatttgtttcacagcagtacaccttgagggttgcagacatccagtgactgwcrttccttcatgcagtgctctttaaaagcaggyatgctatcttttcaacaaagcaagtgacagtctgtgttactcaggtagaccttctgtcatggttggtgtgttctgtactgtaaactgctcagtgatggagccaaggacctcacaagcaaatttaactgtcagcatcgatgggaagaagacccaagttctgaatcccctcttgagcaacagccactgattttctgcacctctgctcaccagcgtgttgactgcatagtcattaaatctgattaagccagtgagcactgcaattcagct

SEQ ID NO: 57874 - DNA, 600 bp, Chicken  19866894314264_2
ttttacagttatactcatgatactcattttgattctcttcttataaactgtcatgtgtttcagcattcctgctgtttcatcttattgtttggcagacaaacacacactgaaagcagttcagcagttttgcatgagcagcattttttctgcaatagctttaaatatatacccatgtttggtgtttaatgaattttctatgtgttttaatcctgtttttataacgtgttgcattttactgattaaaatggatttgtttcacagcagtacaccttgagggttgcagacatccagtgactgwcrttccttcatgcagtgctctttaaaagcaggyatgctatcttttcaacaaagcaagtgacagtctgtgttactcaggtagaccttctgtcatggttggtgtgttctgtactgtaaactgctcagtgatggagccaaggacctcacaagcaaatttaactgtcagcatcgatgggaagaagacccaagttctgaatcccctcttgagcaacagccactgattttctgcacctctgctcaccagcgtgttgactgcatagtcattaaatctgattaagccagtgagcactgcaattcagctta

SEQ ID NO: 57875 - DNA, 600 bp, Chicken  19866894314264_3
attctcttcttataaactgtcatgtgtttcagcattcctgctgtttcatcttattgtttggcagacaaacacacactgaaagcagttcagcagttttgcatgagcagcattttttctgcaatagctttaaatatatacccatgtttggtgtttaatgaattttctatgtgttttaatcctgtttttataacgtgttgcattttactgattaaaatggatttgtttcacagcagtacaccttgagggttgcagacatccagtgactgwcrttccttcatgcagtgctctttaaaagcaggyatgctatcttttcaacaaagcaagtgacagtctgtgttactcaggtagaccttctgtcatggttggtgtgttctgtactgtaaactgctcagtgatggagccaaggacctcacaagcaaatttaactgtcagcatcgatgggaagaagacccaagttctgaatcccctcttgagcaacagccactgattttctgcacctctgctcaccagcgtgttgactgcatagtcattaaatctgattaagccagtgagcactgcaattcagcttatttgcctccttactatagtaatttaggaata

SEQ ID NO: 57876 - DNA, 600 bp, Chicken  19866894314265_1
cccgtgtgcccacgtgtgtgcaaggaccgccctacaagggaggaacaattggctttttcctccctttttccccccaaaattccttcgggggtccctacacacaccccaatccccgcattctcccctggatccgctgcaccttcccagtgatgctccccaaacttctgcacttctgcacagtgcatccatcccaacggaatcctacgccgagcttttggggccggttggttccctctccccctgcgcacagtcgatgctcgatgacattttatagccctgtgctctcaggaccaggctttygcccaccacccggtggtgcygtgtccatgatgcccaccccgtgtttttcaggctcgtggggaaggcgatggagaagctaaatctctttggttcaaaggcgggtgagtacctacgggatgtggggctgtccccatggcagcagtgtcagcattctggggggctgggaaaagccatggggggctggaccccatgggctggggccagatttcgggtctggatggcggattttcaggttggatggcagattatcaggttggatggatacccagttttgggtttggatactgggttttggggctg

SEQ ID NO: 57877 - DNA, 600 bp, Chicken  19866894314265_2
caaggaccgccctacaagggaggaacaattggctttttcctccctttttccccccaaaattccttcgggggtccctacacacaccccaatccccgcattctcccctggatccgctgcaccttcccagtgatgctccccaaacttctgcacttctgcacagtgcatccatcccaacggaatcctacgccgagcttttggggccggttggttccctctccccctgcgcacagtcgatgctcgatgacattttatagccctgtgctctcaggaccaggctttygcccaccacccggtggtgcygtgtccatgatgcccaccccgtgtttttcaggctcgtggggaaggcgatggagaagctaaatctctttggttcaaaggcgggtgagtacctacgggatgtggggctgtccccatggcagcagtgtcagcattctggggggctgggaaaagccatggggggctggaccccatgggctggggccagatttcgggtctggatggcggattttcaggttggatggcagattatcaggttggatggatacccagttttgggtttggatactgggttttggggctgtatggggttggatggcagat

SEQ ID NO: 57878 - DNA, 600 bp, Chicken  19866894314266_1
ataaagggaagctttctctctgacacgatggcaataatgtgtctactaaacatattaattctcaactaagttctaagagactgagaagagagtgagaagcactgcctcccacagttaggtactgcttgtatattgctcaggtatttcaattctccatgcataaacaaatccttggatatttgaagcatgctctgctagattaaaagaaatgagcaacaaaatgtgtggagatagaaatttcattttttccttgggtagataacttatattcaggggatttcccaaatactcatgagacayacctggctctccagaaaatatagtagaagacacatgaaatgtatagttaatatcctccattgtataatagatcctgttggggattactacattagtaaagacaaaatggatgaatagatgaaaaaaaaaagcatatgtcatgtttgcccgggcatgcttctgcaatgagtgcgctgcatccatgctgttctgttttgtagcagacaatattagtcttcttagatctgactaagccttatttaaatccactcttactttgagatccaaaaaaagcctgtagcaaagagttcgctgggcagt

SEQ ID NO: 57879 - DNA, 600 bp, Chicken  19866894314266_2
taatagatcctgttggggattactacattagtaaagacaaaatggatgaatagatgaaaaaaaaaagcatatgtcatgtttgcccgggcatgcttctgcaatgagtgcgctgcatccatgctgttctgttttgtagcagacaatattagtcttcttagatctgactaagccttatttaaatccactcttactttgagatccaaaaaaagcctgtagcaaagagttcgctgggcagtaacaacaacaaaaagcactttttaaaaaaatgttctatactactaataatttatatttcttaaratatggaaacaaatcttttactcagttccttcattatattaattgtatagattcctattttccattttatgtcttttccaggcagaagaatccttgtttgccatgtcttcaacccttcaatacttttgcatatgcatccttgcactattgtactttcaagaaaaacacctaggatttagttgaacagatattcaaattcttgaagaattttgtaagatttcctataacagcttaacacttaaaatgtatttcagttatatccattctcataaaagttataaaagaaatctctatcattta

SEQ ID NO: 57880 - DNA, 600 bp, Chicken  19866894314266_3
atccttgtttgccatgtcttcaacccttcaatacttttgcatatgcatccttgcactattgtactttcaagaaaaacacctaggatttagttgaacagatattcaaattcttgaagaattttgtaagatttcctataacagcttaacacttaaaatgtatttcagttatatccattctcataaaagttataaaagaaatctctatcatttatcttttacaattttctgtattgctttctttctttctttctttctttaaaaaaatcagcattaaagcttacaaaattgcaatgatagagyccagtaaatttctttcttgctaaaaaatattttcagtgttatttttttcattcaacaagcatgcaatctccaccatccagcaactttgctctgaaacgctaaaatattttctgtactggtttgacctaatgaaatgaactgtaccaggagttaaaaaaccaagtttccatctctaaaaattattttggatttcagtggtgtttgtgtttatgatagagcaagctattaaatatgtgtttgataaactacattctaaagaatcagtgctttcagtacatgaaaaaatctagcttgatttca

SEQ ID NO: 57881 - DNA, 599 bp, Chicken  19866894314267_1
  misc_feature (1)..(170): n is any nucleotide
nnnnnnnnnnnnnnnnnnnnnnnnnnnnnnnnnnnnnnnnnnnnnnnnnnnnnnnnnnnnnnnnnnnnnnnnnnnnnnnnnnnnnnnnnnnnnnnnnnnnnnnnnnnnnnnnnnnnnnnnnnnnnnnnnnnnnnnnnnnnnnnnnnnnnnnnnnnnnnnnnnnnnnnnnntttcccttcccttattctggtaaaatcattccttgccttttcacttgttttccaggtttttatcttcttttcccccttcctgactatatataaatgtatccctgtatgtgtacgtacttgagatgttttyggtcggtcgtggaaagtgttcctttctgtggtgttttcattgagacaatcaggggcaaagttcttgtggcagtgccaggtctaataccacaggaagagctgtgtccgctggaaataccacagagagtacagaacccgcagtattttctaaaaacacaacatggttttgaaagcaagtcaaatactgcaaagtcagctcagattattactttgtcttaaattgtttgtttggctttgttttattttcttaaaagggtgctgaggaacactgcttacgttaaatctggttttgccaccgtg

SEQ ID NO: 57882 - DNA, 600 bp, Chicken  19866894314267_2
ttttcttaaaagggtgctgaggaacactgcttacgttaaatctggttttgccaccgtgcccttccagtcagaatcacagctgtgaagtgatggaaatgccatgattgcatcacttctagtcctgtagagacgcgcggttcagtcagcagtctgggtgctgctctgccttcagcttttgtaggcgccgtgtctcgttggtgtttgcagttgctcctgtggcattcagtgacagccgtagctctgctttctccagagctgtacctgggaatgagtcctgtgagatgcaacgtgctgctcggygcaygagagtctgtgggatcgagggccccagtcttaaagaacgtagccctgtggggagcagaggcagggagcaaatctgtgccattggaacgagygcacttctaccccrtcattggcacagcacgggtacgcttttcatttcctcctccactgtgrgaagcagtttgggaaacaccaatttgatctttttgtttatgaaggcaaatcatgagcacaaacaaactattgaatgaactgtttcttcatagaagtctgtattgcaagagattttaaaatctcaaaagaagagtttggaatayg

SEQ ID NO: 57883 - DNA, 600 bp, Chicken  19866894314267_3
cttaaaagggtgctgaggaacactgcttacgttaaatctggttttgccaccgtgcccttccagtcagaatcacagctgtgaagtgatggaaatgccatgattgcatcacttctagtcctgtagagacgcgcggttcagtcagcagtctgggtgctgctctgccttcagcttttgtaggcgccgtgtctcgttggtgtttgcagttgctcctgtggcattcagtgacagccgtagctctgctttctccagagctgtacctgggaatgagtcctgtgagatgcaacgtgctgctcggygcaygagagtctgtgggatcgagggccccagtcttaaagaacgtagccctgtggggagcagaggcagggagcaaatctgtgccattggaacgagygcacttctaccccrtcattggcacagcacgggtacgcttttcatttcctcctccactgtgrgaagcagtttgggaaacaccaatttgatctttttgtttatgaaggcaaatcatgagcacaaacaaactattgaatgaactgtttcttcatagaagtctgtattgcaagagattttaaaatctcaaaagaagagtttggaataygtggg

SEQ ID NO: 57884 - DNA, 600 bp, Chicken  19866894314267_4
atgccatgattgcatcacttctagtcctgtagagacgcgcggttcagtcagcagtctgggtgctgctctgccttcagcttttgtaggcgccgtgtctcgttggtgtttgcagttgctcctgtggcattcagtgacagccgtagctctgctttctccagagctgtacctgggaatgagtcctgtgagatgcaacgtgctgctcggygcaygagagtctgtgggatcgagggccccagtcttaaagaacgtagccctgtggggagcagaggcagggagcaaatctgtgccattggaacgagygcacttctaccccrtcattggcacagcacgggtacgcttttcatttcctcctccactgtgrgaagcagtttgggaaacaccaatttgatctttttgtttatgaaggcaaatcatgagcacaaacaaactattgaatgaactgtttcttcatagaagtctgtattgcaagagattttaaaatctcaaaagaagagtttggaataygtggggaagcaagtggtgaacgctgaggtttggaaaggcatccttatgtttttggaacggctttcttctgcagcaagaacagccagctctgcgtgt

SEQ ID NO: 57885 - DNA, 600 bp, Chicken  19866894314267_5
tcacttctagtcctgtagagacgcgcggttcagtcagcagtctgggtgctgctctgccttcagcttttgtaggcgccgtgtctcgttggtgtttgcagttgctcctgtggcattcagtgacagccgtagctctgctttctccagagctgtacctgggaatgagtcctgtgagatgcaacgtgctgctcggygcaygagagtctgtgggatcgagggccccagtcttaaagaacgtagccctgtggggagcagaggcagggagcaaatctgtgccattggaacgagygcacttctaccccrtcattggcacagcacgggtacgcttttcatttcctcctccactgtgrgaagcagtttgggaaacaccaatttgatctttttgtttatgaaggcaaatcatgagcacaaacaaactattgaatgaactgtttcttcatagaagtctgtattgcaagagattttaaaatctcaaaagaagagtttggaataygtggggaagcaagtggtgaacgctgaggtttggaaaggcatccttatgtttttggaacggctttcttctgcagcaagaacagccagctctgcgtgttaccaagtaaatga

SEQ ID NO: 57886 - DNA, 600 bp, Chicken  19866894314267_6
gctgctctgccttcagcttttgtaggcgccgtgtctcgttggtgtttgcagttgctcctgtggcattcagtgacagccgtagctctgctttctccagagctgtacctgggaatgagtcctgtgagatgcaacgtgctgctcggygcaygagagtctgtgggatcgagggccccagtcttaaagaacgtagccctgtggggagcagaggcagggagcaaatctgtgccattggaacgagygcacttctaccccrtcattggcacagcacgggtacgcttttcatttcctcctccactgtgrgaagcagtttgggaaacaccaatttgatctttttgtttatgaaggcaaatcatgagcacaaacaaactattgaatgaactgtttcttcatagaagtctgtattgcaagagattttaaaatctcaaaagaagagtttggaataygtggggaagcaagtggtgaacgctgaggtttggaaaggcatccttatgtttttggaacggctttcttctgcagcaagaacagccagctctgcgtgttaccaagtaaatgatttcccagtgacagtgagttagcgstggttgttgtgcagcagctgac

SEQ ID NO: 57887 - DNA, 600 bp, Chicken  19866894314267_7
ygcaygagagtctgtgggatcgagggccccagtcttaaagaacgtagccctgtggggagcagaggcagggagcaaatctgtgccattggaacgagygcacttctaccccrtcattggcacagcacgggtacgcttttcatttcctcctccactgtgrgaagcagtttgggaaacaccaatttgatctttttgtttatgaaggcaaatcatgagcacaaacaaactattgaatgaactgtttcttcatagaagtctgtattgcaagagattttaaaatctcaaaagaagagtttggaataygtggggaagcaagtggtgaacgctgaggtttggaaaggcatccttatgtttttggaacggctttcttctgcagcaagaacagccagctctgcgtgttaccaagtaaatgatttcccagtgacagtgagttagcgstggttgttgtgcagcagctgacagctgggccctggagccggaatactcccgggtgtgtgcagatgctgtgagctgtaagaacacaccagtgggctgtgartggtgcagagccgcgagtcgcagccttctctggggatggtggctgttactgcactgagcgctcag

SEQ ID NO: 57888 - DNA, 600 bp, Chicken  19866894314267_8
ttcatttcctcctccactgtgrgaagcagtttgggaaacaccaatttgatctttttgtttatgaaggcaaatcatgagcacaaacaaactattgaatgaactgtttcttcatagaagtctgtattgcaagagattttaaaatctcaaaagaagagtttggaataygtggggaagcaagtggtgaacgctgaggtttggaaaggcatccttatgtttttggaacggctttcttctgcagcaagaacagccagctctgcgtgttaccaagtaaatgatttcccagtgacagtgagttagcgstggttgttgtgcagcagctgacagctgggccctggagccggaatactcccgggtgtgtgcagatgctgtgagctgtaagaacacaccagtgggctgtgartggtgcagagccgcgagtcgcagccttctctggggatggtggctgttactgcactgagcgctcaggctccagcctgggggagtaacttcggttgcttcgtgttggatgtcaatttaaaagtttctcctgttttcacaagggccaaactgtaatgctgcttaattatgtcctgtgttagctctgttcttagctaagaagtc

SEQ ID NO: 57889 - DNA, 600 bp, Chicken  19866894314267_9
ctgtttcttcatagaagtctgtattgcaagagattttaaaatctcaaaagaagagtttggaataygtggggaagcaagtggtgaacgctgaggtttggaaaggcatccttatgtttttggaacggctttcttctgcagcaagaacagccagctctgcgtgttaccaagtaaatgatttcccagtgacagtgagttagcgstggttgttgtgcagcagctgacagctgggccctggagccggaatactcccgggtgtgtgcagatgctgtgagctgtaagaacacaccagtgggctgtgartggtgcagagccgcgagtcgcagccttctctggggatggtggctgttactgcactgagcgctcaggctccagcctgggggagtaacttcggttgcttcgtgttggatgtcaatttaaaagtttctcctgttttcacaagggccaaactgtaatgctgcttaattatgtcctgtgttagctctgttcttagctaagaagtcttgtgtagcctggaacaaatctttaaaaggccttcaaggatcaatagttctcaatcattaataaatgaaaaagaaggaaaatattgcatagttcattgta

SEQ ID NO: 57890 - DNA, 600 bp, Chicken  19866894314269_1
cctgaaaaaagacaccacaaggccactggaccttgatgacagcctgcactagtggatgaactgaagaggtatccagcaacataaatatttcctttaaatagacatcattattacaaacctttgttctgggtggcagcaacttaaataaggcaccaataatccaaaacaagagggattacttgaagtgacctatgctacctcaagccaatactgcaactattctctgactgcaggcatttcctctcccaaagacagaattattaagagttcttcagaattataaaacattctccaactccmgcctgagaatgctacaaattcagcaatgaacagaaaaacaccctggtgtttatccaaacaaatcactgtgggagttcagagtactcccatggtttaccgctgmgatgatgtccacccaggaaggaagaaatgaaaacatccctgaaccctatcaatgatggaagcgttaggattcaagttctcagaactgcaaactgatgccaacttacatagaaagacagaagagtcatagcaggtctgtctcagtgatttcaaacaatcacaaattagggttgagactgaatgttacttctgtaccac

SEQ ID NO: 57891 - DNA, 600 bp, Chicken  19866894314269_2
atcattattacaaacctttgttctgggtggcagcaacttaaataaggcaccaataatccaaaacaagagggattacttgaagtgacctatgctacctcaagccaatactgcaactattctctgactgcaggcatttcctctcccaaagacagaattattaagagttcttcagaattataaaacattctccaactccmgcctgagaatgctacaaattcagcaatgaacagaaaaacaccctggtgtttatccaaacaaatcactgtgggagttcagagtactcccatggtttaccgctgmgatgatgtccacccaggaaggaagaaatgaaaacatccctgaaccctatcaatgatggaagcgttaggattcaagttctcagaactgcaaactgatgccaacttacatagaaagacagaagagtcatagcaggtctgtctcagtgatttcaaacaatcacaaattagggttgagactgaatgttacttctgtaccacctaattacgttgtcagaatcgtttttgtcaaagtatgtactacttctggcacaaacctcagtatgctccagagctaatcgtaatgaaataatgcacattattt

SEQ ID NO: 57892 - DNA, 600 bp, Chicken  19866894314277_1
attggatagatgaactggtgattcaggcagtttttttgaaagacttcatcagcgacaccagtagtcaatgtctctaccagtaccttcattagaaacaatgcagtttggcatactgtacagagcctgctggtgaaagatgtgtttagggcaaaagagtgggcattacccagtccagcaagagggaaaggaagtcgtgtcacttagtatttacgtccctgatttcaagaagttagtgcaagtgcacaagtcacagacatccgaaagagagcagaaggaactgtagcagtgtaatgtcccagkgagacaacttagaattaagccctccatcctttttccttatattttatacccttctgttcttacttcaacgtctaatatactcctaatggagtgccagccagtgtcagcattgtccagccaccagggacagcaggaggcacttacaacaatgcaaaggctgtgatcacaacttcacatgcaacatgtattattgtagccacacatccatgctcacagattcagccctgaaaataacactcaaagtgaagtcactgtgaaaatgattcatccgaatgtgtgccagccagaagtgatggaggt

SEQ ID NO: 57893 - DNA, 600 bp, Chicken  19866894314281_1
agagctgcaagtgacctggcacaacaaacacaggataagtgcaggtaatgatgcaccaagagctttttgcaccataactgggagcaggcaaataccagcggcgggtggaagcaccacggccctgtgacaggaatggatcccagcactccagcacgttcctgttcatgcagcatctcctgtgctgatggtccctttaagaaatcaacttctgtggaaaacattgacaccaaaaggagaaagccaaactgcacgcccactgcagcacagcctccagagggaagggaataggaaatgttgttyttatggctttaattcattttaggggcgttgtgcatccagaaggttccactaagacaatttctttctttatctcattggttttgcagccgtgtcaaatgtccattgcagcccagctccctgctgacacaggtacctccataacacgcgtggtgttgggagttgtaacgcctgttatgggctctgtgtgtgacccacagcagtggaatggatttacggatgtgatttgaacattggtcttcacaactgttttccagctaaggaacggaacagcagcaatgaaatagctttcatggtaatggt

SEQ ID NO: 57894 - DNA, 600 bp, Chicken  19866894314281_2
tccagaaggttccactaagacaatttctttctttatctcattggttttgcagccgtgtcaaatgtccattgcagcccagctccctgctgacacaggtacctccataacacgcgtggtgttgggagttgtaacgcctgttatgggctctgtgtgtgacccacagcagtggaatggatttacggatgtgatttgaacattggtcttcacaactgttttccagctaaggaacggaacagcagcaatgaaatagctttcatggtaatggtcattacttaaaaggacataaaatcaaacaaaaaygttggttagggaaataaccagacattcactcaccgcaaagaatctccagaaattttacctttctaatggaaagtctttgagtatctgtctgagaaacctgcctctaggtggatctccagaactgcaactgctcctgcagcagctggatgcttccttctagaggtcagctccagacccagtgctacagagttggattcaacaatccttatgggtcccctttcaacacgggatattctatcattctatgcccctttcctccagacactgacatctaactgtcccaattagctcaataaatct

SEQ ID NO: 57895 - DNA, 600 bp, Chicken  19866894314286_1
cacatccaggctggccttgaatgcctccagcaacagggcatccacaacttctctgggcaacctgtttcagtgtgtcaccaacctctgagtgaaaaactttctcctaatatctaacctaaatctctgtcttagtttaaaaccattcccccttgtcctatcactatccacccttgtaaacagtcattcccccacctgcttatctgctcccttcaagtactggatggccccaacgagtactcctgggagccttctcttttccaagctaaacaagcccagttccctcaacctttcttcacaatyatctttgtggccctccactggactcatctgagagctctgtgtccttcttgtactgkgggtcccgggcctggatgctgaactccagatgaagcctcacaagagctgagtagaggggaacaatcacctgcctctccctgctggtcgctcctcttttaatgcagcacagaacacagttggccttctgggatgcaagcgcacactgctggctcatgtccagcttctcatccaccaggacccccaagtccttctttgcagggctgctctcaaggaggtcttctccccgccagtctgtataaatac

SEQ ID NO: 57896 - DNA, 600 bp, Chicken  19866894314286_2
gcaacctgtttcagtgtgtcaccaacctctgagtgaaaaactttctcctaatatctaacctaaatctctgtcttagtttaaaaccattcccccttgtcctatcactatccacccttgtaaacagtcattcccccacctgcttatctgctcccttcaagtactggatggccccaacgagtactcctgggagccttctcttttccaagctaaacaagcccagttccctcaacctttcttcacaatyatctttgtggccctccactggactcatctgagagctctgtgtccttcttgtactgkgggtcccgggcctggatgctgaactccagatgaagcctcacaagagctgagtagaggggaacaatcacctgcctctccctgctggtcgctcctcttttaatgcagcacagaacacagttggccttctgggatgcaagcgcacactgctggctcatgtccagcttctcatccaccaggacccccaagtccttctttgcagggctgctctcaaggaggtcttctccccgccagtctgtataaatacctgggattgccctgacccaagtgaagcaccctgcacttggccttgttgaatctcat

SEQ ID NO: 57897 - DNA, 600 bp, Chicken  19866894314290_1
gttagtcatagaaactaaaaatgaatagaagaagaaaggagcggagaaggtaaagaacatacaaactgaaaggaagaataatggaaaaaatcaaaactcattcaaagacaaactctctatcaatgagtttttaacaaagctagggtgaattttaatctggatttatatttttatcaaaataaatcaaatagatatatatggattactatttacttggactaataataatctttgctaagattattttttggtacatttaatttattggaacttactttctgtatttttttagcatgtatrttaaaaaaagctaactcagtagctttactgaaggagtgtatctsacattcagttcattaacattatagaagtaacagctctgctaacctgggcaattactgctagtcctgctatgaggtatgtgtagcagttgcataccatatgcctagtctctaaaggatcctaaagaatctcctaagtttatatagttgatcctctttggctttctggtctcataatttttattttattttattcggtcagtagtagggctatttctgtattttattagtcagtaatcagatataatttggaagatgt

SEQ ID NO: 57898 - DNA, 600 bp, Chicken  19866894314290_2
agaaggtaaagaacatacaaactgaaaggaagaataatggaaaaaatcaaaactcattcaaagacaaactctctatcaatgagtttttaacaaagctagggtgaattttaatctggatttatatttttatcaaaataaatcaaatagatatatatggattactatttacttggactaataataatctttgctaagattattttttggtacatttaatttattggaacttactttctgtatttttttagcatgtatrttaaaaaaagctaactcagtagctttactgaaggagtgtatctsacattcagttcattaacattatagaagtaacagctctgctaacctgggcaattactgctagtcctgctatgaggtatgtgtagcagttgcataccatatgcctagtctctaaaggatcctaaagaatctcctaagtttatatagttgatcctctttggctttctggtctcataatttttattttattttattcggtcagtagtagggctatttctgtattttattagtcagtaatcagatataatttggaagatgtgtcatgtgcgtccagtttaacagttgcagttaaatagccaaaac

SEQ ID NO: 57899 - DNA, 600 bp, Chicken  19866894314294_1
caattgtaaaggggttctgatcttagacagggagcttctggctggcagccttttttgttccttggccaagacgagtaggcctagaatgacataaggagcagagagatcaaggataggtgtcatttgacctgatttctacttgtctaaaagttagttatctagactaagctagctcttcaggctttcaaaccaaaaggagaagcacctccagagaccatttcctcccactcattttagacagctgtcttaagagaagataaattgctctctggaaatatctgtctgtctctagtacttatygagagagtctatatgaagatcttcaacaaaactacttgctaagaatagagcatacctgattctatacaaatactttactctcaggtattttccttttattggagcactagaatratgagtgtccctctaacaagatctgtccagatagaagaaaatatgtaaattctcaatttctcaagtggtagactaataatgcaggaagcagtgaactcagtgcaaatgagataggggtagatgagaattcaatactccaggacaccagagatgctctataatactgtattatccttaaattagtca

SEQ ID NO: 57900 - DNA, 600 bp, Chicken  19866894314294_2
aggtgtcatttgacctgatttctacttgtctaaaagttagttatctagactaagctagctcttcaggctttcaaaccaaaaggagaagcacctccagagaccatttcctcccactcattttagacagctgtcttaagagaagataaattgctctctggaaatatctgtctgtctctagtacttatygagagagtctatatgaagatcttcaacaaaactacttgctaagaatagagcatacctgattctatacaaatactttactctcaggtattttccttttattggagcactagaatratgagtgtccctctaacaagatctgtccagatagaagaaaatatgtaaattctcaatttctcaagtggtagactaataatgcaggaagcagtgaactcagtgcaaatgagataggggtagatgagaattcaatactccaggacaccagagatgctctataatactgtattatccttaaattagtcacagtagagaaaaatactgaattccatgcttactgaattttacatgaacccagtgaatattaaatacgtttatgagctcatgttaatttcaaatctctgctctgatcttttttgg

SEQ ID NO: 57901 - DNA, 600 bp, Chicken  19866894314301_1
aaaggggcagggctgtgtcaccacaaagtgagagcaaaatggcagcaacctccatttccatgaccacaaacaaggatgataacagagaaaagaacctcataataacccttgtcaacactgagaaggaattgtcagagaaacaatgcccatctcataattcagacctctcttcatctgaatatttttttcccttcctcacagcatgtggaattatactagagagaaggaaggaagggtattctttgccaaaccatttgcctatcagcaaaatatcaaaatttgtctgttcttcaatgcctmctcctgcttctactgtgattcyttaccatttgatgaaagaggtgataataggaattacaaatgcccatctttaaaatctaggggaaaaaatacaatgattttgaattcagttgagaatttggaaaaatccacattttacaatagacacaaataaaaagtttttatactaaatctttcagaatctgactttgagctttcaggaattctgcagactttctcatgaataacagtagctcagtacatgaaattaaaatattctctgattctgtggttagttttcagacagaaaagtcacatggc

SEQ ID NO: 57902 - DNA, 600 bp, Chicken  19866894314301_2
acaaagtgagagcaaaatggcagcaacctccatttccatgaccacaaacaaggatgataacagagaaaagaacctcataataacccttgtcaacactgagaaggaattgtcagagaaacaatgcccatctcataattcagacctctcttcatctgaatatttttttcccttcctcacagcatgtggaattatactagagagaaggaaggaagggtattctttgccaaaccatttgcctatcagcaaaatatcaaaatttgtctgttcttcaatgcctmctcctgcttctactgtgattcyttaccatttgatgaaagaggtgataataggaattacaaatgcccatctttaaaatctaggggaaaaaatacaatgattttgaattcagttgagaatttggaaaaatccacattttacaatagacacaaataaaaagtttttatactaaatctttcagaatctgactttgagctttcaggaattctgcagactttctcatgaataacagtagctcagtacatgaaattaaaatattctctgattctgtggttagttttcagacagaaaagtcacatggcctttttagtagtcatgttctga

SEQ ID NO: 57903 - DNA, 600 bp, Chicken  19866894314308_1
aaatcagacaaagaacctcatcttcagctaccgttatgttgtagcaatctaatgctgttttagacaataggtttgtatagcttttgcatagcactgcccagggaagcaaactctgccacagcctcctgttcctgcccctctcttaggtcaccaggtaatgaaccagaatgggactcacccagaggtgatgttatttttgaggtggtgtctattcatcctcatatgtttttacatgcaagttttaatgccccaatcgagcgcactgcatagctgcagaatgaaagtatgctagcaaatacyttttgtatttcattgcaaaagcccttcctggctgttggctgcacctgcatgtcccccagcaggagctcactgcggggtcactcagtgccaggcaccaaggaagccgagtccttcctttggattgctgcctgcagtggtgctatgaagcacatctccactaatgcagaagctgctttactgrtgttcaggttgtcctaatccctttgaaatagtggtaacctattcactgtaattcccaaagtgagaagcaggtgagtttgggtttctttttttctttttaaattatgttgcctgcataga

SEQ ID NO: 57904 - DNA, 600 bp, Chicken  19866894314308_2
gaggtgatgttatttttgaggtggtgtctattcatcctcatatgtttttacatgcaagttttaatgccccaatcgagcgcactgcatagctgcagaatgaaagtatgctagcaaatacyttttgtatttcattgcaaaagcccttcctggctgttggctgcacctgcatgtcccccagcaggagctcactgcggggtcactcagtgccaggcaccaaggaagccgagtccttcctttggattgctgcctgcagtggtgctatgaagcacatctccactaatgcagaagctgctttactgrtgttcaggttgtcctaatccctttgaaatagtggtaacctattcactgtaattcccaaagtgagaagcaggtgagtttgggtttctttttttctttttaaattatgttgcctgcatagagctgttcaaaatttaatctagtaacaagttagctcttgcaccaagtaaatttactggacatccagagagtacagcatggtaaaatgcaagcttttccactctcacccttagatagaaattttgaggtgcagtgtgatagagaatcctcagtggatatggaaaatggttgtgaaataataac

SEQ ID NO: 57905 - DNA, 600 bp, Chicken  19866894314311_1
ggaaaatccagtctgggatcagggagagtctgaagaagatgtgaagagggaagagtggaggaacattggtttgaaaatgtgtcggaaacacaggagctgctggggttggggatggaggggatgcacttggactttgacatcagggtctgagcctcatcagcaattcaaggagactcccccaggggagctgaacaactctctgagctgtttgtggtctcttgataaaagacagttgtaatgtataggggaaggtagttgggtgtccctttatcctacccgtcctgctggacatgccctagrgactgagcccaggaggatgctctttatttgctgaggaactctgtggcttcctactggacttcagaaagtaaggcagtcagggcaggcccaaatggctccttcatcacatcccccttgctccaacacccctccctcctcttttgatacctgcgagtaggggtatccatgttctaggggctttggaagtgatacagcgtgccactgctgtgcccctgccatgrcatgtattcatctggcagcaagcagcttgagaggttcctgagcttccaagaggtcccatgggcccagaccatcatgacc

SEQ ID NO: 57906 - DNA, 600 bp, Chicken  19866894314311_2
ataaaagacagttgtaatgtataggggaaggtagttgggtgtccctttatcctacccgtcctgctggacatgccctagrgactgagcccaggaggatgctctttatttgctgaggaactctgtggcttcctactggacttcagaaagtaaggcagtcagggcaggcccaaatggctccttcatcacatcccccttgctccaacacccctccctcctcttttgatacctgcgagtaggggtatccatgttctaggggctttggaagtgatacagcgtgccactgctgtgcccctgccatgrcatgtattcatctggcagcaagcagcttgagaggttcctgagcttccaagaggtcccatgggcccagaccatcatgaccaggcacagaatggggctctgtcaccaggttctgaaccaggtccatgagtatgaagtggggaatgtggttttggcctctcctaytcttgctgctctctctcctctgcttggggacgtttggccttcctgcttggccgtgtcctacatggcaagaagctctcttccctcccagtgccctctccctcggttggaatgcccaccagccacagcagccttggggac

SEQ ID NO: 57907 - DNA, 600 bp, Chicken  19866894314311_3
aggcccaaatggctccttcatcacatcccccttgctccaacacccctccctcctcttttgatacctgcgagtaggggtatccatgttctaggggctttggaagtgatacagcgtgccactgctgtgcccctgccatgrcatgtattcatctggcagcaagcagcttgagaggttcctgagcttccaagaggtcccatgggcccagaccatcatgaccaggcacagaatggggctctgtcaccaggttctgaaccaggtccatgagtatgaagtggggaatgtggttttggcctctcctaytcttgctgctctctctcctctgcttggggacgtttggccttcctgcttggccgtgtcctacatggcaagaagctctcttccctcccagtgccctctccctcggttggaatgcccaccagccacagcagccttggggactggaggatacaagtgcctcacgwtccggaagcatgttttggccttctaagaacgatgaaatgaggcagctgtccactgtgggcaatttagtctaatgygatactgaaatcgtctgtttaatgcacccagatgctccagcagtaagtgcattacaaaattctt

SEQ ID NO: 57908 - DNA, 600 bp, Chicken  19866894314311_4
agcttgagaggttcctgagcttccaagaggtcccatgggcccagaccatcatgaccaggcacagaatggggctctgtcaccaggttctgaaccaggtccatgagtatgaagtggggaatgtggttttggcctctcctaytcttgctgctctctctcctctgcttggggacgtttggccttcctgcttggccgtgtcctacatggcaagaagctctcttccctcccagtgccctctccctcggttggaatgcccaccagccacagcagccttggggactggaggatacaagtgcctcacgwtccggaagcatgttttggccttctaagaacgatgaaatgaggcagctgtccactgtgggcaatttagtctaatgygatactgaaatcgtctgtttaatgcacccagatgctccagcagtaagtgcattacaaaattcttcaataaataatggagatgggaataatttttttcgttgttttcttttttaatgaaaatggcaaaaacagtaatttgctactgtacatctgcatcagttatttaacgtgacatcttgctgtagtaataatccatcagcatccagcattacatatggattcata

SEQ ID NO: 57909 - DNA, 600 bp, Chicken  19866894314311_5
gtcaccaggttctgaaccaggtccatgagtatgaagtggggaatgtggttttggcctctcctaytcttgctgctctctctcctctgcttggggacgtttggccttcctgcttggccgtgtcctacatggcaagaagctctcttccctcccagtgccctctccctcggttggaatgcccaccagccacagcagccttggggactggaggatacaagtgcctcacgwtccggaagcatgttttggccttctaagaacgatgaaatgaggcagctgtccactgtgggcaatttagtctaatgygatactgaaatcgtctgtttaatgcacccagatgctccagcagtaagtgcattacaaaattcttcaataaataatggagatgggaataatttttttcgttgttttcttttttaatgaaaatggcaaaaacagtaatttgctactgtacatctgcatcagttatttaacgtgacatcttgctgtagtaataatccatcagcatccagcattacatatggattcataaaaaggtttatgtgygtgttggtgcatttgctgcctgccagaccaattacatacattttaccataaattatacat

SEQ ID NO: 57910 - DNA, 600 bp, Chicken  19866894314311_6
tggccttctaagaacgatgaaatgaggcagctgtccactgtgggcaatttagtctaatgygatactgaaatcgtctgtttaatgcacccagatgctccagcagtaagtgcattacaaaattcttcaataaataatggagatgggaataatttttttcgttgttttcttttttaatgaaaatggcaaaaacagtaatttgctactgtacatctgcatcagttatttaacgtgacatcttgctgtagtaataatccatcagcatccagcattacatatggattcataaaaaggtttatgtgygtgttggtgcatttgctgcctgccagaccaattacatacattttaccataaattatacatattgaactgagaacctgctgtgttaattgctcacatttttataggggaaaatgtggtcatggagcgatttttctttttaaacatattgagaacaaggcagaagaagatgctatgtcttcagttttcaaagctgagaaatcaatatttagcctgacagtttaccatcattaaaacaaacaaaaayctcagcaaaaacaaacacttggagaaggaagcttcccttggtgtcttctctcttct

SEQ ID NO: 57911 - DNA, 545 bp, Chicken  19866894314311_7
gtaataatccatcagcatccagcattacatatggattcataaaaaggtttatgtgygtgttggtgcatttgctgcctgccagaccaattacatacattttaccataaattatacatattgaactgagaacctgctgtgttaattgctcacatttttataggggaaaatgtggtcatggagcgatttttctttttaaacatattgagaacaaggcagaagaagatgctatgtcttcagttttcaaagctgagaaatcaatatttagcctgacagtttaccatcattaaaacaaacaaaaayctcagcaaaaacaaacacttggagaaggaagcttcccttggtgtcttctctcttctccttcctttaggcacccatgtctttgcttggagaagtatggaaatacatgcatggttgtactgcgactgttccactgaaatgaagactgaacttctaatgtatcaacaccgaggacaggtttcattgccttcccatgggtggggttcccacaaaagacccacgaggagcactgggtcgatctttctcag

SEQ ID NO: 57912 - DNA, 420 bp, Chicken  19866894314314_1
ttcaggcgtccaaatgaaacacgcagccagatgtacaattattctctgcttctcttatcttcaatggattgagacaggcactacgagaaactgtcttggcctactattatcttaacttttgtgtaaagaaacctgtttttctccctttaccgtaataaggaaactgaatgactatattcttaacttagataaattaattaaattacctttttgtagtcaggttttccataatatctttgttcttagcaaagccaatgccaaaatagcagtacttcatatggagtcaatgactgagtaaaygcagtcgactataatattgtgtttatctggtccatgaaattgctagtagtgtttgttaggaagttgagacccagctggtgaaaaaaaaaatagtttaaacctgtgatcatcatttatagt

SEQ ID NO: 57913 - DNA, 599 bp, Chicken  19866894314316_1
  misc_feature (1)..(14): n is any nucleotide
nnnnnnnnnnnnnnttaaagttctccaattttgtaaataaatagataaaaagatgaaaaatcaagatcactttcagcgtttatattaagctactgcttcaaagcctgggatagttctgtcttcaagtaaattctcttttctattgacacttcaacatttatttatgtatctacacttaaaagcaacgaattttattgcatgttttaagtattacaataactaacgataatactgtaacatgatggaaagctcaacaacagcagtgtagcaaagccctaggctgccacaagtgagacttgstcaaatgcaacaaccccgaacacagacataaagaaaagaagctacttactttttagaaggcctcaggcacacagggacctccagcaagataccctcctctctactgccaacccttaaatgaggtctrgaaggggtggatcctggctccaccccttctggtcactcaggtgcattgcatgcagctgagctcctctgggatggccctgccttcccaccaggtgctcaatcactggttcatttctgctacagcaaccaaaaaccactgggagagaggagactgttacatctgctgccaacgc

SEQ ID NO: 57914 - DNA, 600 bp, Chicken  19866894314316_2
aaattctcttttctattgacacttcaacatttatttatgtatctacacttaaaagcaacgaattttattgcatgttttaagtattacaataactaacgataatactgtaacatgatggaaagctcaacaacagcagtgtagcaaagccctaggctgccacaagtgagacttgstcaaatgcaacaaccccgaacacagacataaagaaaagaagctacttactttttagaaggcctcaggcacacagggacctccagcaagataccctcctctctactgccaacccttaaatgaggtctrgaaggggtggatcctggctccaccccttctggtcactcaggtgcattgcatgcagctgagctcctctgggatggccctgccttcccaccaggtgctcaatcactggttcatttctgctacagcaaccaaaaaccactgggagagaggagactgttacatctgctgccaacgccaaagatcacattgatatcttcagaaaaactaacatacaattatagctgaaatgaactgtacgtttgtagacttgtagggttttatattaaagaaaatgaaaggctacataatggctttcacaactgc

SEQ ID NO: 57915 - DNA, 600 bp, Chicken  19866894314316_3
atttctgctacagcaaccaaaaaccactgggagagaggagactgttacatctgctgccaacgccaaagatcacattgatatcttcagaaaaactaacatacaattatagctgaaatgaactgtacgtttgtagacttgtagggttttatattaaagaaaatgaaaggctacataatggctttcacaactgcatcccatctcatctgtacactcagtccttctctatcatgttgtgctgttattatagaacacattggaaagatggttagaataattgatcaaaaccaaggctgtgaactsaggaaaactgatgccactgagaaaaggacagggaaagcataactcctgcccacacctctaggttagcagcaaatggctacawcctttacagcgtgatgctgtcagctgatctgcattgtttacctcaaacaacctgcaytaatgcagtctaaagctctcagaggtcctgagaagcaacaaggtcagaatggmaaagcaatgatcgatatactaccaggaaataataaacatggaattaccaggcccattagtattctcacagtcaaggaggctcactgctcagagaaattgcttccctga

SEQ ID NO: 57916 - DNA, 600 bp, Chicken  19866894314316_4
ttcagaaaaactaacatacaattatagctgaaatgaactgtacgtttgtagacttgtagggttttatattaaagaaaatgaaaggctacataatggctttcacaactgcatcccatctcatctgtacactcagtccttctctatcatgttgtgctgttattatagaacacattggaaagatggttagaataattgatcaaaaccaaggctgtgaactsaggaaaactgatgccactgagaaaaggacagggaaagcataactcctgcccacacctctaggttagcagcaaatggctacawcctttacagcgtgatgctgtcagctgatctgcattgtttacctcaaacaacctgcaytaatgcagtctaaagctctcagaggtcctgagaagcaacaaggtcagaatggmaaagcaatgatcgatatactaccaggaaataataaacatggaattaccaggcccattagtattctcacagtcaaggaggctcactgctcagagaaattgcttccctgaacttaaagctatcatgaaggcactgcatactccaaactgtagttrcccaagccctgttctcatcagccaccatgccttcaat

SEQ ID NO: 57917 - DNA, 600 bp, Chicken  19866894314316_5
agggttttatattaaagaaaatgaaaggctacataatggctttcacaactgcatcccatctcatctgtacactcagtccttctctatcatgttgtgctgttattatagaacacattggaaagatggttagaataattgatcaaaaccaaggctgtgaactsaggaaaactgatgccactgagaaaaggacagggaaagcataactcctgcccacacctctaggttagcagcaaatggctacawcctttacagcgtgatgctgtcagctgatctgcattgtttacctcaaacaacctgcaytaatgcagtctaaagctctcagaggtcctgagaagcaacaaggtcagaatggmaaagcaatgatcgatatactaccaggaaataataaacatggaattaccaggcccattagtattctcacagtcaaggaggctcactgctcagagaaattgcttccctgaacttaaagctatcatgaaggcactgcatactccaaactgtagttrcccaagccctgttctcatcagccaccatgccttcaatctgtcactctaagtttcttgaaaccacagcagcgatgtgcactgagtccacccatat

SEQ ID NO: 57918 - DNA, 600 bp, Chicken  19866894314316_6
tcccatctcatctgtacactcagtccttctctatcatgttgtgctgttattatagaacacattggaaagatggttagaataattgatcaaaaccaaggctgtgaactsaggaaaactgatgccactgagaaaaggacagggaaagcataactcctgcccacacctctaggttagcagcaaatggctacawcctttacagcgtgatgctgtcagctgatctgcattgtttacctcaaacaacctgcaytaatgcagtctaaagctctcagaggtcctgagaagcaacaaggtcagaatggmaaagcaatgatcgatatactaccaggaaataataaacatggaattaccaggcccattagtattctcacagtcaaggaggctcactgctcagagaaattgcttccctgaacttaaagctatcatgaaggcactgcatactccaaactgtagttrcccaagccctgttctcatcagccaccatgccttcaatctgtcactctaagtttcttgaaaccacagcagcgatgtgcactgagtccacccatatctctcttacctctgcaaataggttcattccccattccctgaccagcccacacm

SEQ ID NO: 57919 - DNA, 600 bp, Chicken  19866894314316_7
ctgcccacacctctaggttagcagcaaatggctacawcctttacagcgtgatgctgtcagctgatctgcattgtttacctcaaacaacctgcaytaatgcagtctaaagctctcagaggtcctgagaagcaacaaggtcagaatggmaaagcaatgatcgatatactaccaggaaataataaacatggaattaccaggcccattagtattctcacagtcaaggaggctcactgctcagagaaattgcttccctgaacttaaagctatcatgaaggcactgcatactccaaactgtagttrcccaagccctgttctcatcagccaccatgccttcaatctgtcactctaagtttcttgaaaccacagcagcgatgtgcactgagtccacccatatctctcttacctctgcaaataggttcattccccattccctgaccagcccacacmtaccagtaacaccattttggtcttgtgagaccacagggcatcaagtccattcaacacaagtctacaaacaaaaattcaaggacaactaattactaaatctacagttcggcaagctgttaattataaatgatgcatttagtgtgagaacagaca

SEQ ID NO: 57920 - DNA, 525 bp, Chicken  19866894314316_8
aaagcaatgatcgatatactaccaggaaataataaacatggaattaccaggcccattagtattctcacagtcaaggaggctcactgctcagagaaattgcttccctgaacttaaagctatcatgaaggcactgcatactccaaactgtagttrcccaagccctgttctcatcagccaccatgccttcaatctgtcactctaagtttcttgaaaccacagcagcgatgtgcactgagtccacccatatctctcttacctctgcaaataggttcattccccattccctgaccagcccacacmtaccagtaacaccattttggtcttgtgagaccacagggcatcaagtccattcaacacaagtctacaaacaaaaattcaaggacaactaattactaaatctacagttcggcaagctgttaattataaatgatgcatttagtgtgagaacagacataaaattcttataagcacatttctgaagaaatagttatttttctcccttctagcttaaaaaaataaaaaaaa

SEQ ID NO: 57921 - DNA, 600 bp, Chicken  19866894314317_1
tgctgatcatcagcacctacaccaccttgtctgccaccgaggacacgccggtgaaggccgaagtggtgggcatggagcatctcgagagagaggaggacaggatcgaccaggatgctgtcaaactcccaggtatgtggctgcttgagtcgtgcttccagccctgctcccagctccgcctgtggtgagcaccgggtaatttccaggcagctccctgcaggttttccccaggaaggctgtgcttcctgcagtgctggctgggagctcccatggcccctttgggaaggacaggcagggtgcagrgctggrgtccttttgtggggacagagcagggatgtccccacgaggtgaccggcactgcacaaggacagcctggtgctggctgaccgggrctgctcccagcgtgctgccagcacatcgtgctccccgtaacgagccattcactgcgctcaaaggtatgtaaatttacgggcactgactttttttggttgtgaggttataaatttggattcagatttagctctgacaaagcccttgattatgcctcagctttgtttacgggtccacgttatttattatttgtttaccatggccgttgatgga

SEQ ID NO: 57922 - DNA, 600 bp, Chicken  19866894314317_2
tcatcagcacctacaccaccttgtctgccaccgaggacacgccggtgaaggccgaagtggtgggcatggagcatctcgagagagaggaggacaggatcgaccaggatgctgtcaaactcccaggtatgtggctgcttgagtcgtgcttccagccctgctcccagctccgcctgtggtgagcaccgggtaatttccaggcagctccctgcaggttttccccaggaaggctgtgcttcctgcagtgctggctgggagctcccatggcccctttgggaaggacaggcagggtgcagrgctggrgtccttttgtggggacagagcagggatgtccccacgaggtgaccggcactgcacaaggacagcctggtgctggctgaccgggrctgctcccagcgtgctgccagcacatcgtgctccccgtaacgagccattcactgcgctcaaaggtatgtaaatttacgggcactgactttttttggttgtgaggttataaatttggattcagatttagctctgacaaagcccttgattatgcctcagctttgtttacgggtccacgttatttattatttgtttaccatggccgttgatggaattaca

SEQ ID NO: 57923 - DNA, 600 bp, Chicken  19866894314317_3
gaggaggacaggatcgaccaggatgctgtcaaactcccaggtatgtggctgcttgagtcgtgcttccagccctgctcccagctccgcctgtggtgagcaccgggtaatttccaggcagctccctgcaggttttccccaggaaggctgtgcttcctgcagtgctggctgggagctcccatggcccctttgggaaggacaggcagggtgcagrgctggrgtccttttgtggggacagagcagggatgtccccacgaggtgaccggcactgcacaaggacagcctggtgctggctgaccgggrctgctcccagcgtgctgccagcacatcgtgctccccgtaacgagccattcactgcgctcaaaggtatgtaaatttacgggcactgactttttttggttgtgaggttataaatttggattcagatttagctctgacaaagcccttgattatgcctcagctttgtttacgggtccacgttatttattatttgtttaccatggccgttgatggaattacagccaaacctcccttccccagctgcaggctggcctcgcaaggccaccacgagcaggtgtctcctgaccctgtgctgcccctcct

SEQ ID NO: 57924 - DNA, 600 bp, Chicken  19866894314322_1
atactattgttctacatcctgcatgtaaaaaaatgtttttttatatatgtatatatacatataaaggcaaagccgaccagcgtggcattaaaaaaaaacacaaaacacaacacaaagcataagcagacacactgaaagttatgcagtaatgaggagtgtatgcttcatgtgtgcgttagtgtaacagtgcttccaatcttaaaacacccttttaattgtctaagcagagtgctttttccacatctgctctaccagtgattttcccaatcaccgcaaatatctgttacttaatttcttgcwatctttgctrtatttagcacaaaaccagaaataaggcaaaatwatctttcagaactctgaatatctgaggacattcacatcttccaaaaattaatgtaaaatattattggagcacaaaaaatggtacccctgaactgaagcatccttctgtctataccaagatgtccaaattgtattccagagttatccatgcatgcttggggcatgcagtaaggacgacaattactcacaggcatcccttttgtcttagcatgttctgaatgacaactcaaagcttcaggatgggcgtgtgctcacaat

SEQ ID NO: 57925 - DNA, 600 bp, Chicken  19866894314322_2
tctacatcctgcatgtaaaaaaatgtttttttatatatgtatatatacatataaaggcaaagccgaccagcgtggcattaaaaaaaaacacaaaacacaacacaaagcataagcagacacactgaaagttatgcagtaatgaggagtgtatgcttcatgtgtgcgttagtgtaacagtgcttccaatcttaaaacacccttttaattgtctaagcagagtgctttttccacatctgctctaccagtgattttcccaatcaccgcaaatatctgttacttaatttcttgcwatctttgctrtatttagcacaaaaccagaaataaggcaaaatwatctttcagaactctgaatatctgaggacattcacatcttccaaaaattaatgtaaaatattattggagcacaaaaaatggtacccctgaactgaagcatccttctgtctataccaagatgtccaaattgtattccagagttatccatgcatgcttggggcatgcagtaaggacgacaattactcacaggcatcccttttgtcttagcatgttctgaatgacaactcaaagcttcaggatgggcgtgtgctcacaatttccgctcta

SEQ ID NO: 57926 - DNA, 600 bp, Chicken  19866894314322_3
tatatgtatatatacatataaaggcaaagccgaccagcgtggcattaaaaaaaaacacaaaacacaacacaaagcataagcagacacactgaaagttatgcagtaatgaggagtgtatgcttcatgtgtgcgttagtgtaacagtgcttccaatcttaaaacacccttttaattgtctaagcagagtgctttttccacatctgctctaccagtgattttcccaatcaccgcaaatatctgttacttaatttcttgcwatctttgctrtatttagcacaaaaccagaaataaggcaaaatwatctttcagaactctgaatatctgaggacattcacatcttccaaaaattaatgtaaaatattattggagcacaaaaaatggtacccctgaactgaagcatccttctgtctataccaagatgtccaaattgtattccagagttatccatgcatgcttggggcatgcagtaaggacgacaattactcacaggcatcccttttgtcttagcatgttctgaatgacaactcaaagcttcaggatgggcgtgtgctcacaatttccgctctaaaatcaccaccaatgacagagaacaaggtaatc

SEQ ID NO: 57927 - DNA, 600 bp, Chicken  19866894314322_4
catgcttggggcatgcagtaaggacgacaattactcacaggcatcccttttgtcttagcatgttctgaatgacaactcaaagcttcaggatgggcgtgtgctcacaatttccgctctaaaatcaccaccaatgacagagaacaaggtaatcagttctgatactgctcagaggtttggagtggatattcagagctgatgggcattcttgtgattggcttcatgctgagttctgtaaaactcgattctaaccttcatcttccatctacaagagtgaaatccactctttatgtacctagcatrtattgtaccaaaaaatttacagttcagtatacaaggaaactaagacagaagattgtgttcacctaccttctcttgcatcagccttcctaaaaaacaagcaagcaaacaaccaagaaaacctccaaaactactccacaaaaattacctttttttttttcagtaataaataaaattagcctccctgataatgcaaaagtgcctgaaaaacaatgagttgaaatatctagggaataaaagagacagatgcctttgcaaagttttcaggtcataaggactttatccagtacccattaaagtttt

SEQ ID NO: 57928 - DNA, 600 bp, Chicken  19866894314322_5
aaaagagacagatgcctttgcaaagttttcaggtcataaggactttatccagtacccattaaagttttacccagtgaaagaataatttcagaattcatctctctggtgatgctggttcaggactgcagtccagctgatatatcagtcgctggtaggcacagaaatgaatgccatcagcataacggtgtacaaccttttataaaactcaagcataagctaccagggaattccctgaatactccttggagcgttgtgtggtgtgcagcactttgtagctggtgtttaagctggaaaaacagygtgacaaattcagcagtggaatctccaagagtatcctttgctactcaccaaatcatactagtgaagaatgaccacaggcacaagactaaaacaaaccckgggctccagggttcggaacccccaggtcaaagttacccacttgttttggggaatggaattgttgaggagcctaacaactgggaacatcacaggaaaaacgcagaaatacaaaaatgcgaggattaaaaaacagaaggggagctaatgatccccctctagcatattccctttaaaacagtgtacataaaaactttaaattca

SEQ ID NO: 57929 - DNA, 600 bp, Chicken  19866894314322_6
tctctggtgatgctggttcaggactgcagtccagctgatatatcagtcgctggtaggcacagaaatgaatgccatcagcataacggtgtacaaccttttataaaactcaagcataagctaccagggaattccctgaatactccttggagcgttgtgtggtgtgcagcactttgtagctggtgtttaagctggaaaaacagygtgacaaattcagcagtggaatctccaagagtatcctttgctactcaccaaatcatactagtgaagaatgaccacaggcacaagactaaaacaaaccckgggctccagggttcggaacccccaggtcaaagttacccacttgttttggggaatggaattgttgaggagcctaacaactgggaacatcacaggaaaaacgcagaaatacaaaaatgcgaggattaaaaaacagaaggggagctaatgatccccctctagcatattccctttaaaacagtgtacataaaaactttaaattcagttataaattggtttcaaaatcgtctggcagttttaaagacttttataagtcataatattaatcaccagagttcactagaaggtccctgtagccccttg

SEQ ID NO: 57930 - DNA, 600 bp, Chicken  19866894314326_1
ctgggaacatgagaggaagtcctgcacagtgtgtttaattagtttgtctttgaaaaacaggtctcttcaggctatattgttgtgggtttgttgaagcattagcatcccaaatcacttgtcagttttgaaaatgtaggttgataagatgaaggaatttggttattgcccctacagggaagcaagagtttttgagtcctgcccattatttcttcaaatctgcaggctcataatctgtatgcaacagctttgccagcagtttcaaaagctgccccctggctacatgcaacgtgcagatcttgyacactgctcagagactcttcagcacatcttctctggttcactgagggacacactgccttcagctcctggcgctttcccccttcccaggctgctccttgtccaagttctgttcctgctgggtcagcatcagaagcagtacatggaaaaggactctgagcttcagctcctgcctttaccaaagtgcaacgcccagcattcatcacatcaggcctttccttcaacacctccataaatgcaccagactgaaattctcttcttttaaacaaaaatgtgaggaagagaatacagggcagataagtg

SEQ ID NO: 57931 - DNA, 600 bp, Chicken  19866894314326_2
ccagactgaaattctcttcttttaaacaaaaatgtgaggaagagaatacagggcagataagtgcttgcaaggaagaactatttttttattattaaaaaaagtttgagagatgtaatgtgattatatttctagctccactttcccatctgttcaccttccaaagtgacatttaagggagttgagtttactatgctagaggcatcagcagcattggattgagtggaacacattccagactgactctcaagctactcaacacttgcctaaagctcaggttttatttgcttttcttcagcagarttgccttgatctccagaaatgcccttttcttgtctgcaaccccttctccctcaatttctgccccaagtattatctgytattttacagtgcatgactggggaggagggctcaaaccttacttgcctgagagcactttggataggacacagggtacctccaaccccagttgtatggggtcyagaggttaggagtcacagacycaatactgaaccagatcctgggttcctctgctcttaacagctgtaaaggaagaagaacatctgagctytcctatttcagacagtgaccttgcccaacaac

SEQ ID NO: 57932 - DNA, 600 bp, Chicken  19866894314326_3
ctatttttttattattaaaaaaagtttgagagatgtaatgtgattatatttctagctccactttcccatctgttcaccttccaaagtgacatttaagggagttgagtttactatgctagaggcatcagcagcattggattgagtggaacacattccagactgactctcaagctactcaacacttgcctaaagctcaggttttatttgcttttcttcagcagarttgccttgatctccagaaatgcccttttcttgtctgcaaccccttctccctcaatttctgccccaagtattatctgytattttacagtgcatgactggggaggagggctcaaaccttacttgcctgagagcactttggataggacacagggtacctccaaccccagttgtatggggtcyagaggttaggagtcacagacycaatactgaaccagatcctgggttcctctgctcttaacagctgtaaaggaagaagaacatctgagctytcctatttcagacagtgaccttgcccaacaacagtgcacaggaacaaaaagagaccaacatgataggaactcatggggcaacatggagaagcagtgctttctccctttt

SEQ ID NO: 57933 - DNA, 600 bp, Chicken  19866894314326_4
tgagtttactatgctagaggcatcagcagcattggattgagtggaacacattccagactgactctcaagctactcaacacttgcctaaagctcaggttttatttgcttttcttcagcagarttgccttgatctccagaaatgcccttttcttgtctgcaaccccttctccctcaatttctgccccaagtattatctgytattttacagtgcatgactggggaggagggctcaaaccttacttgcctgagagcactttggataggacacagggtacctccaaccccagttgtatggggtcyagaggttaggagtcacagacycaatactgaaccagatcctgggttcctctgctcttaacagctgtaaaggaagaagaacatctgagctytcctatttcagacagtgaccttgcccaacaacagtgcacaggaacaaaaagagaccaacatgataggaactcatggggcaacatggagaagcagtgctttctcccttttcagtaaggagaaccatactgcaccttcagtgggaagcatccctagctacagttacagagctcaggttcctgtgaacacaagtcctgatcatacagttgcctc

SEQ ID NO: 57934 - DNA, 600 bp, Chicken  19866894314326_5
atcagcagcattggattgagtggaacacattccagactgactctcaagctactcaacacttgcctaaagctcaggttttatttgcttttcttcagcagarttgccttgatctccagaaatgcccttttcttgtctgcaaccccttctccctcaatttctgccccaagtattatctgytattttacagtgcatgactggggaggagggctcaaaccttacttgcctgagagcactttggataggacacagggtacctccaaccccagttgtatggggtcyagaggttaggagtcacagacycaatactgaaccagatcctgggttcctctgctcttaacagctgtaaaggaagaagaacatctgagctytcctatttcagacagtgaccttgcccaacaacagtgcacaggaacaaaaagagaccaacatgataggaactcatggggcaacatggagaagcagtgctttctcccttttcagtaaggagaaccatactgcaccttcagtgggaagcatccctagctacagttacagagctcaggttcctgtgaacacaagtcctgatcatacagttgcctctagaaatgtttgtgggttttt

SEQ ID NO: 57935 - DNA, 600 bp, Chicken  19866894314326_6
gctcaggttttatttgcttttcttcagcagarttgccttgatctccagaaatgcccttttcttgtctgcaaccccttctccctcaatttctgccccaagtattatctgytattttacagtgcatgactggggaggagggctcaaaccttacttgcctgagagcactttggataggacacagggtacctccaaccccagttgtatggggtcyagaggttaggagtcacagacycaatactgaaccagatcctgggttcctctgctcttaacagctgtaaaggaagaagaacatctgagctytcctatttcagacagtgaccttgcccaacaacagtgcacaggaacaaaaagagaccaacatgataggaactcatggggcaacatggagaagcagtgctttctcccttttcagtaaggagaaccatactgcaccttcagtgggaagcatccctagctacagttacagagctcaggttcctgtgaacacaagtcctgatcatacagttgcctctagaaatgtttgtgggtttttttgactaatgacacaacctgaggaggggagaaaaagggagcagccacccactgaagcaccacttctct

SEQ ID NO: 57936 - DNA, 587 bp, Chicken  19866894314329_1
tttgtccgaggcagttactgcattactgttactgatcaaacagtaacagggagccaggactcgggttaagtggcattcctacttttggaatgctggaggccaaacagaggcagattatcagagcaatgaaaaaatgtctgcaaattgaaagcaatgctgcgtgccgactgcctgcaggttctggctgaggcaagcctcaatattaaacgcatttattgtaaaatgcaaagaaaccaaagcaacgtttatgctttctgaggaatatgagaaggcaatcagggtaaggaacggggctaaagyttatgaccatctgccaaagcaaaaccttctgccatgcctaaatttaaactgattcaccactgtcttcctagcataacaaaactatatatgatctcccaaaaagctaaaaggtcctcttcaaaacattcattcagatgagccggtacaaaacttagattctggctagaacattttgttgcttttaattgtatgaaaggttcctaggcaataaggattacctgcattttcacatcacgtgttgcaagcaaaaaggtatggaagagctcattcaaaagcacatcactgtg

SEQ ID NO: 57937 - DNA, 600 bp, Chicken  19866894314346_1
ctcatcctccacactcctggagctccccagtttggcttggttcagcctgttgctctgtgctggagcatcactcttcgaggcccagctgccccggctgcctcgcagctttgataggtttgtctccatcaggcgcctctgcaggatgttgtgtggttgctttaaggacacgcaaagaaagagcagagcaaagtcagggggaagctacgcagtgacacgcattgccaacctgcctgctttctcctctggtgcctgtgggcctgctctcgcagcagggctgccccaaagcctcttctcaggacractgggaactttccaaacttccaggctatgtggattcctgctgggctgcacccatttgtttttgcgccagccccggctaacctggctttgagtaaagaacaccactcttttcttggagagaagcgcgctgcctctcagtatctcctccgactgcttccccaaatgcctgttttatatttaatgctcgtcatggatggatgcacacacactgctggaggtgaaatgactccacttgattatctgctcacttctccgcctggctgagcccccccttatgcttgcttttccttgtcatttcca

SEQ ID NO: 57938 - DNA, 600 bp, Chicken  19866894314348_1
tgtctctgcaatttttttttttttgattggtcttacgcttttcatcttgtaaaacaactgtgtacaaatcttctttgctaggtggtgcacatgagggcctccagcacctgggtccttacggcaatatcccaaacatcgtggctgaactgacaggagataatataccaaaggatttcagtgaagatcaaggctatcctgaccctccaaacccttgtcctattgggaaaacaggtaactctgccatggccttcgcacttctgtacgggctgtgctgctgggctttctggtgatatcctaagmagcacaatgcttatcaccagtgggtgtttcctttcattttgtatgacaggaacagacttgtagagcaatctggtgttccggatgagatttcttttaatatgtgcacctcctgtactgatatatgactgctagaaaaggtgtggggaaagaaatcagcttgaccttggaggaaaagatggcgagatttataagagcatcttgttcctgaggggagttcattgttaggttggatcctgaaaaaagttatcgttctgtactgatgaggtttacccttatttttaaaactttcattgtgccaag

SEQ ID NO: 57939 - DNA, 600 bp, Chicken  19866894314348_2
ccggatgagatttcttttaatatgtgcacctcctgtactgatatatgactgctagaaaaggtgtggggaaagaaatcagcttgaccttggaggaaaagatggcgagatttataagagcatcttgttcctgaggggagttcattgttaggttggatcctgaaaaaagttatcgttctgtactgatgaggtttacccttatttttaaaactttcattgtgccaagaggaatgaaactgtctgccctgatctccaacccagaccatgagtcaatatttaagataccttggctcccatccacamggctttatagctcactgagggtgcatctgcgccaagaatcggagcactgtgtggccataccccaactcattaccagtgagagagtcgtgcagagcagctggggaaggtgatcatggtgcggtacctgggacacccatgggtccctgccatatcttggggctgggcacatcgtcagtggttagtgctcmaggacctcaaaacagcactttgtgtgcataatayagacatacaactaaggaaatggatctttttcctgatatttgagccaaggaatgatttccagtactgaaagtagtagta

SEQ ID NO: 57940 - DNA, 575 bp, Chicken  19866894314348_3
tttacccttatttttaaaactttcattgtgccaagaggaatgaaactgtctgccctgatctccaacccagaccatgagtcaatatttaagataccttggctcccatccacamggctttatagctcactgagggtgcatctgcgccaagaatcggagcactgtgtggccataccccaactcattaccagtgagagagtcgtgcagagcagctggggaaggtgatcatggtgcggtacctgggacacccatgggtccctgccatatcttggggctgggcacatcgtcagtggttagtgctcmaggacctcaaaacagcactttgtgtgcataatayagacatacaactaaggaaatggatctttttcctgatatttgagccaaggaatgatttccagtactgaaagtagtagtaaaacactcattggctgcattggaacgctggaattgggaatgggaatgagcacttcttttttgtctctcattttttatttgtgagctaagagatcttttcaaaatcttttctgtttagtcttcatttatgttccttggataatgcagagcagttggctgtattt

SEQ ID NO: 57941 - DNA, 541 bp, Chicken  19866894314348_4
gaggaatgaaactgtctgccctgatctccaacccagaccatgagtcaatatttaagataccttggctcccatccacamggctttatagctcactgagggtgcatctgcgccaagaatcggagcactgtgtggccataccccaactcattaccagtgagagagtcgtgcagagcagctggggaaggtgatcatggtgcggtacctgggacacccatgggtccctgccatatcttggggctgggcacatcgtcagtggttagtgctcmaggacctcaaaacagcactttgtgtgcataatayagacatacaactaaggaaatggatctttttcctgatatttgagccaaggaatgatttccagtactgaaagtagtagtaaaacactcattggctgcattggaacgctggaattgggaatgggaatgagcacttcttttttgtctctcattttttatttgtgagctaagagatcttttcaaaatcttttctgtttagtcttcatttatgttccttggataatgcagagcagttggctgtattt

SEQ ID NO: 57942 - DNA, 600 bp, Chicken  19866894314356_1
ttcacctgaagatttgataagggtcagggtctagtatttcatccaaactcacttgtgtctgcaggtcattacttgtcattccttatcgctttcctaagaaccctgcagggtgagataggagacatctgtccagtttctggggggaagaagtctaaaacttttgagatggtggggaaaatgactggcacgttgtgcgggtgatatccatacatgaagtagaaaacgcaggtgaaccctttttcagttgagattctcaggatctatttgtatatgtatcaaaatgctgatatatccaagggytkggggagaggtattatgtctrtatgagagttagtgggagagcagcaaggaatgaggttttcctgtggggtttggagtgggaatggagctgcatttgtggcattctgcctttggagtatctctgcacctacagtcctgcttagaggtactcctggacagcatggagatggaagagccagacagcagagatttgtaacagtggtcacctctggtgtccgttgtagcaggtgaagggtctgtatccctcccaagcttgagaaatttcctgcttttactaggggcatacttaccctctgaact

SEQ ID NO: 57943 - DNA, 600 bp, Chicken  19866894314356_2
cacctgaagatttgataagggtcagggtctagtatttcatccaaactcacttgtgtctgcaggtcattacttgtcattccttatcgctttcctaagaaccctgcagggtgagataggagacatctgtccagtttctggggggaagaagtctaaaacttttgagatggtggggaaaatgactggcacgttgtgcgggtgatatccatacatgaagtagaaaacgcaggtgaaccctttttcagttgagattctcaggatctatttgtatatgtatcaaaatgctgatatatccaagggytkggggagaggtattatgtctrtatgagagttagtgggagagcagcaaggaatgaggttttcctgtggggtttggagtgggaatggagctgcatttgtggcattctgcctttggagtatctctgcacctacagtcctgcttagaggtactcctggacagcatggagatggaagagccagacagcagagatttgtaacagtggtcacctctggtgtccgttgtagcaggtgaagggtctgtatccctcccaagcttgagaaatttcctgcttttactaggggcatacttaccctctgaactgc

SEQ ID NO: 57944 - DNA, 600 bp, Chicken  19866894314356_3
gtcagggtctagtatttcatccaaactcacttgtgtctgcaggtcattacttgtcattccttatcgctttcctaagaaccctgcagggtgagataggagacatctgtccagtttctggggggaagaagtctaaaacttttgagatggtggggaaaatgactggcacgttgtgcgggtgatatccatacatgaagtagaaaacgcaggtgaaccctttttcagttgagattctcaggatctatttgtatatgtatcaaaatgctgatatatccaagggytkggggagaggtattatgtctrtatgagagttagtgggagagcagcaaggaatgaggttttcctgtggggtttggagtgggaatggagctgcatttgtggcattctgcctttggagtatctctgcacctacagtcctgcttagaggtactcctggacagcatggagatggaagagccagacagcagagatttgtaacagtggtcacctctggtgtccgttgtagcaggtgaagggtctgtatccctcccaagcttgagaaatttcctgcttttactaggggcatacttaccctctgaactgctgcaaagagctgtctgcttg

SEQ ID NO: 57945 - DNA, 600 bp, Chicken  19866894314360_1
actgtgactgtcagtcacaatgactcaaaccattgtgctgatcaaagttcttagcatcttgtatataagaccctcaaagttcttcagaagaagcttggaatatcaggagaagctaaaagtaaaatgttatagtttaaaaagggttctgctgagtttgtggggttacttatgctttccacgataggatcaggaaaggaatagaatggacagaagattgctttcattttctttcattatcctattaaaaaaaaatcataaaatcatacattaatatccaagaaaccttttttgaaaaactgrtgcttttcctatgagcacaaagacctgtgtgtaaatctgagaagagtcccaagtgctcaaagagaaacagatgccctataaaggcagtgagggacagaaatctgtcagaaactccatgtaaataatccagatgtacctgaccagaaagctgcttcagggcgtgagaggaagatttgagcctgtgtgtgcagcagggagctcagcattgtgtcctccatgtgtatcattcagtccagggcaatatttgagagaagaggctccagcacatcttatcctcaacctgtgagcttctccaagtag

SEQ ID NO: 57946 - DNA, 600 bp, Chicken  19866894314360_2
ggcagtgagggacagaaatctgtcagaaactccatgtaaataatccagatgtacctgaccagaaagctgcttcagggcgtgagaggaagatttgagcctgtgtgtgcagcagggagctcagcattgtgtcctccatgtgtatcattcagtccagggcaatatttgagagaagaggctccagcacatcttatcctcaacctgtgagcttctccaagtagggctgccagttcacaacacccgtgatgacagatctgtgatgggaccaggtctccatcaagcgtaggggaaaacaaccaatgygtttcacgctgggcactgagcacccagggagcagtgcttccctatcattttcagattggctgtacacattttatataaatatatgcatacagatatttaaagaatcgaatgacctggaactgaagggttctgcagcaccttactggaatggagagtagctagttggacttcatgatctttaaggtcttttccaacctgagcaattctgtgattctagttcacttgtactttcacctgaattcagttaaagaatcaatgatttcttgtatggacatactactgcctctagtatagttggca

SEQ ID NO: 57947 - DNA, 600 bp, Chicken  19866894314362_1
caagttctactttttcaaatgcacagagatataacagacgtttctactaatttttctgaactaggttctaagttttgcttatacaactgtgaggagaatctggtctatagttatgcataagatacgcatattacagttgtttaaaatgttgcaaactttcagtactcaagagctgctactttaaatacacttcatttttatctgcaaatcctcccacttaatttactttaagttttaaagcagctgtgattgccttctcttgcctgcagctgttcccttttacttgaaacctggactgayggaagcagttggtctagacattgttggtttactttgaggggaacttgctcactgatcttttggtgctaaccgtagacgtgaatgcacacatacctccagtatgtggtatgtatgtttagagcagattttgttktgcgctgtagtctacaaaaccaagcagaggaacaaggctgtttttgcaagaagatctcaccaaatgcaattaaacaaagctccagttccactaacacttttcatctggctgcctggacaggtagctctgctcttaagccaagcaatgtatggtctggattgcagtgg

SEQ ID NO: 57948 - DNA, 600 bp, Chicken  19866894314362_2
cagttgtttaaaatgttgcaaactttcagtactcaagagctgctactttaaatacacttcatttttatctgcaaatcctcccacttaatttactttaagttttaaagcagctgtgattgccttctcttgcctgcagctgttcccttttacttgaaacctggactgayggaagcagttggtctagacattgttggtttactttgaggggaacttgctcactgatcttttggtgctaaccgtagacgtgaatgcacacatacctccagtatgtggtatgtatgtttagagcagattttgttktgcgctgtagtctacaaaaccaagcagaggaacaaggctgtttttgcaagaagatctcaccaaatgcaattaaacaaagctccagttccactaacacttttcatctggctgcctggacaggtagctctgctcttaagccaagcaatgtatggtctggattgcagtggtttactttttttttttaaacttaaaattcctcaatttaatttcacaagcagactgaagcttgtagcacagactcgtgctagacagaatcatctccccatctcatgttctgacatggattcttgaaccaaagag

SEQ ID NO: 57949 - DNA, 600 bp, Chicken  19866894314362_3
aaccaaagaggaactgatactgatctctgaacaatcactccataaactaggaggttgtgattctctaaggatgctgatatggagccatgctgtatgttctctgcagggttgctttttgtgagcttgcacagaagggatggaagggtacaaggaatctaaaaccaaacaagtcagtctttttgagaagcgaatgtttattgaaattggctttaatttaggtgccatactaggagaagaattgttatggtatttaggcataacactgacttgagcatgatgctgtgtgtcttcccttagatstgtaagacagctctggatgtgcagtgtattgctgcagccaaggtcagatgcaggtcatgggtgtgygtgtatgtgcagactatctatagcagtatatatcaaaagcatctgcaagctgcagtgctctgccagtatcactccaatgatttgaaacatcgctaagcttaaaaagaaaacacattttctcatggtgttgactgttcaagggtgtaatggatattcttaactgtaacaggaaagcatatgtagtaattaaaacacagagcaggagaattactcaaatttggcaaaaatgcttga

SEQ ID NO: 57950 - DNA, 600 bp, Chicken  19866894314362_4
aaggatgctgatatggagccatgctgtatgttctctgcagggttgctttttgtgagcttgcacagaagggatggaagggtacaaggaatctaaaaccaaacaagtcagtctttttgagaagcgaatgtttattgaaattggctttaatttaggtgccatactaggagaagaattgttatggtatttaggcataacactgacttgagcatgatgctgtgtgtcttcccttagatstgtaagacagctctggatgtgcagtgtattgctgcagccaaggtcagatgcaggtcatgggtgtgygtgtatgtgcagactatctatagcagtatatatcaaaagcatctgcaagctgcagtgctctgccagtatcactccaatgatttgaaacatcgctaagcttaaaaagaaaacacattttctcatggtgttgactgttcaagggtgtaatggatattcttaactgtaacaggaaagcatatgtagtaattaaaacacagagcaggagaattactcaaatttggcaaaaatgcttgagaaaatatctgctttagctgtagatataaatcaagtacttgccaaaattactttcaaaggctttaa

SEQ ID NO: 57951 - DNA, 600 bp, Chicken  19866894314377_1
gcattgtgtcacatcctgtaagtatgatggagtgtattgttcttatagcagtattagaggtatttaatttaacggcatcccaagttatttcttgcagactgagagacactgaaggatatttttgagtgcttttgtgctattgttagtgtacagtgcccaaattttcagtaatgctttagtttcatcattctgtgagcaacagcatatactaaatcaacaatatgcacgtatgttttgtactgctagctcaagatacctaccatttgaattcttatgctgatattgtactattctagctayggggtctcagaatacagggagtctgtgttttgttgaccaacctataaaattccctgtgctcttttcagagtgctgctttactatgatatctctacagcagccagtagcctaatgctgcagagtcaaaacacttgagctgttcctttctgacacccttccaccactgccattgtgccttggggagactgatcagaaggattctgtccaaataatttactttttttttaatcctcttttaattaaaagaaaaaaaaaaagacaaagatcatagaatggctttggttggaagggacttcaagg

SEQ ID NO: 57952 - DNA, 600 bp, Chicken  19866894314384_1
tatggagttctcccagccagccagccagctcccccagcgcctgcgagcttgaattttgggggaagtatagagtctgaagtgaagagttgagggaaggagcactcgagtttctgagggacattggaaagcaaagctgtccgtcagcgccgctcatctgcatagggcggcggacccgccccctcccgctccggccccgtctcctcccgcggtcgggaggcagcagcaggcaggcagcgagcgccgctttgtactgcgaggcggctcccggccgccggcacacggccggagctcagcgcccgmaccactccacgccggactctccttcacgcgcgttctgtatccrcgcgggggacaaaaaagattatgcgtgtgacagacgcacacgtcccttcacacacgcacgagctggagagccgcacgcgcgcgcggatcctgcgtgcatttgcacgcgtgtgggtgcacagagccaggctcgacggagcacgaggggagagcgctgggtaaaagtgctgccctatatggcaggagaggagagctcagatcgccacatccatgatcgcgcgctgttcctggcagcagagctctacagttgtataagtt

SEQ ID NO: 57953 - DNA, 600 bp, Chicken  19866894314384_2
cgagcttgaattttgggggaagtatagagtctgaagtgaagagttgagggaaggagcactcgagtttctgagggacattggaaagcaaagctgtccgtcagcgccgctcatctgcatagggcggcggacccgccccctcccgctccggccccgtctcctcccgcggtcgggaggcagcagcaggcaggcagcgagcgccgctttgtactgcgaggcggctcccggccgccggcacacggccggagctcagcgcccgmaccactccacgccggactctccttcacgcgcgttctgtatccrcgcgggggacaaaaaagattatgcgtgtgacagacgcacacgtcccttcacacacgcacgagctggagagccgcacgcgcgcgcggatcctgcgtgcatttgcacgcgtgtgggtgcacagagccaggctcgacggagcacgaggggagagcgctgggtaaaagtgctgccctatatggcaggagaggagagctcagatcgccacatccatgatcgcgcgctgttcctggcagcagagctctacagttgtataagttgccacgaacaggcaggagcgaggcgtggagcgcgtttgcacaa

SEQ ID NO: 57954 - DNA, 467 bp, Chicken  19866894314384_3
cggccctgggctcccgcaccccgtaccgcccgcaggtgggagcgggaccgacgggagccgcggtccttcagcctcactgcgcgtaggatgaggagcccctgcgcttctgggaggtgggagtgtgtggggggggaacaaaacaaaaaaggtgcatggaacaaagcgttttatttttgcagcatctgtgagtgagcagtggtcccctgtttaagcaaacatatcgctgcgcgtttgcggccgagttcagggaataatcgaggtaatgtctattggggtgcgcgcaggtatgccgaggaagcrgctcggagctgggaagagggggtggcacaaccaggsagctgctggcgagcagggcagcccattgttaatcaattaaacacgcggctaatgaaaaaaaaaatacacgtcgagaaggcgctgctgcagtcccgtggacgcagcgggggaaatgccgtctgaaacctctg

SEQ ID NO: 57955 - DNA, 431 bp, Chicken  19866894314384_4
tgggagcgggaccgacgggagccgcggtccttcagcctcactgcgcgtaggatgaggagcccctgcgcttctgggaggtgggagtgtgtggggggggaacaaaacaaaaaaggtgcatggaacaaagcgttttatttttgcagcatctgtgagtgagcagtggtcccctgtttaagcaaacatatcgctgcgcgtttgcggccgagttcagggaataatcgaggtaatgtctattggggtgcgcgcaggtatgccgaggaagcrgctcggagctgggaagagggggtggcacaaccaggsagctgctggcgagcagggcagcccattgttaatcaattaaacacgcggctaatgaaaaaaaaaatacacgtcgagaaggcgctgctgcagtcccgtggacgcagcgggggaaatgccgtctgaaacctctg

SEQ ID NO: 57956 - DNA, 600 bp, Chicken  19866894314388_1
aggaagaggcagacttagaagcgtctaataacttgaaatctagatgtccggctcagccagaggctcctcttgatgcaattccagctgctctttccatggaaatgaattccttctcttatctgttgtgacacataggtgaaaagcacgcggcagagccggatgacgcagagctcgtgagcctcagcaaaaggctggtggagaatgcagtgctcaaggctgtgcagcagtatttagaagaaacgcaaaacaaagccagacagactgatgggagccccgtgaaagctgaggaagctgccagcrgcactaagagygaaagcaacaatgacarcagcaagtgagcactgtgcaaaagcctgggagcgagtatcccaccaagaataatggcaaaaacacgtcccagctccctgctgaaacttgctgagtggtgctgggcgacaggcactctgctctgagaggctcttatcagaagtttgttctgaatcgagggacactgcctgccggtctcataagcgcttgcattgctgaaaatctrttgaacgctggaaaaggacaagaatggtgaaacagcttcagtccctatgggctsttaatgccaagagt

SEQ ID NO: 57957 - DNA, 600 bp, Chicken  19866894314388_2
gacttagaagcgtctaataacttgaaatctagatgtccggctcagccagaggctcctcttgatgcaattccagctgctctttccatggaaatgaattccttctcttatctgttgtgacacataggtgaaaagcacgcggcagagccggatgacgcagagctcgtgagcctcagcaaaaggctggtggagaatgcagtgctcaaggctgtgcagcagtatttagaagaaacgcaaaacaaagccagacagactgatgggagccccgtgaaagctgaggaagctgccagcrgcactaagagygaaagcaacaatgacarcagcaagtgagcactgtgcaaaagcctgggagcgagtatcccaccaagaataatggcaaaaacacgtcccagctccctgctgaaacttgctgagtggtgctgggcgacaggcactctgctctgagaggctcttatcagaagtttgttctgaatcgagggacactgcctgccggtctcataagcgcttgcattgctgaaaatctrttgaacgctggaaaaggacaagaatggtgaaacagcttcagtccctatgggctsttaatgccaagagtcccttcctcgc

SEQ ID NO: 57958 - DNA, 600 bp, Chicken  19866894314388_3
taacttgaaatctagatgtccggctcagccagaggctcctcttgatgcaattccagctgctctttccatggaaatgaattccttctcttatctgttgtgacacataggtgaaaagcacgcggcagagccggatgacgcagagctcgtgagcctcagcaaaaggctggtggagaatgcagtgctcaaggctgtgcagcagtatttagaagaaacgcaaaacaaagccagacagactgatgggagccccgtgaaagctgaggaagctgccagcrgcactaagagygaaagcaacaatgacarcagcaagtgagcactgtgcaaaagcctgggagcgagtatcccaccaagaataatggcaaaaacacgtcccagctccctgctgaaacttgctgagtggtgctgggcgacaggcactctgctctgagaggctcttatcagaagtttgttctgaatcgagggacactgcctgccggtctcataagcgcttgcattgctgaaaatctrttgaacgctggaaaaggacaagaatggtgaaacagcttcagtccctatgggctsttaatgccaagagtcccttcctcgcttttgraaagaaactga

SEQ ID NO: 57959 - DNA, 600 bp, Chicken  19866894314388_4
agaagaaacgcaaaacaaagccagacagactgatgggagccccgtgaaagctgaggaagctgccagcrgcactaagagygaaagcaacaatgacarcagcaagtgagcactgtgcaaaagcctgggagcgagtatcccaccaagaataatggcaaaaacacgtcccagctccctgctgaaacttgctgagtggtgctgggcgacaggcactctgctctgagaggctcttatcagaagtttgttctgaatcgagggacactgcctgccggtctcataagcgcttgcattgctgaaaatctrttgaacgctggaaaaggacaagaatggtgaaacagcttcagtccctatgggctsttaatgccaagagtcccttcctcgcttttgraaagaaactgagctctctgtgtttgcctttcggatcgtaaggaatgggcacgaagaggccttgccacaagtggaaacaatgccctgtgcacagcctggcactgccacggggctgcttgctggacacaagggcacgtgctgttgcggagtcagcagcaggcatcccgagctaaaaattaccactaccgatactcgtcacagatactattacacagt

SEQ ID NO: 57960 - DNA, 568 bp, Chicken  19866894314388_5
ggaagctgccagcrgcactaagagygaaagcaacaatgacarcagcaagtgagcactgtgcaaaagcctgggagcgagtatcccaccaagaataatggcaaaaacacgtcccagctccctgctgaaacttgctgagtggtgctgggcgacaggcactctgctctgagaggctcttatcagaagtttgttctgaatcgagggacactgcctgccggtctcataagcgcttgcattgctgaaaatctrttgaacgctggaaaaggacaagaatggtgaaacagcttcagtccctatgggctsttaatgccaagagtcccttcctcgcttttgraaagaaactgagctctctgtgtttgcctttcggatcgtaaggaatgggcacgaagaggccttgccacaagtggaaacaatgccctgtgcacagcctggcactgccacggggctgcttgctggacacaagggcacgtgctgttgcggagtcagcagcaggcatcccgagctaaaaattaccactaccgatactcgtcacagatactattacacagtatgtaacatagcaggagtttct

SEQ ID NO: 57961 - DNA, 537 bp, Chicken  19866894314388_6
aacaatgacarcagcaagtgagcactgtgcaaaagcctgggagcgagtatcccaccaagaataatggcaaaaacacgtcccagctccctgctgaaacttgctgagtggtgctgggcgacaggcactctgctctgagaggctcttatcagaagtttgttctgaatcgagggacactgcctgccggtctcataagcgcttgcattgctgaaaatctrttgaacgctggaaaaggacaagaatggtgaaacagcttcagtccctatgggctsttaatgccaagagtcccttcctcgcttttgraaagaaactgagctctctgtgtttgcctttcggatcgtaaggaatgggcacgaagaggccttgccacaagtggaaacaatgccctgtgcacagcctggcactgccacggggctgcttgctggacacaagggcacgtgctgttgcggagtcagcagcaggcatcccgagctaaaaattaccactaccgatactcgtcacagatactattacacagtatgtaacatagcaggagtttct

SEQ ID NO: 57962 - DNA, 600 bp, Chicken  19866894314396_1
gacagaaagtttaaaatatcacgtgacgcaatataacctattgtagcaataaatcagaggttctgatcatgatcatagatattgtctcttattacctacaaaagaaaacacaagccagatatcctattttgtatccagaatgtctctagtggtttagcagctttctaatgaatatcagcttaaaataagctcatctcctttgagatctgcttctgtgaaggcaatattcccaaagaaaatccatgactgctaactaacctttgttatactcatatggcaatgatctattggcctaggaarctcgtacacattgtataattctcagtaaaaggtgatttttttcctgggaggttttaagagaatatctctttaaaatgttgatgtaaaactaattctctttcctgattgattaacaaaaaatattgctactgcacgaggacaagtgtcagtgaaggtgatggcaacctggccttgatttgaaaaacagtagagaaaggtagaagactgtaagagaaactataaatgtaatattttttaaatagcgtacttagtgtgaaagcttttaaagtcttgtgcatgaaaaatgagtttttatcactt

SEQ ID NO: 57963 - DNA, 534 bp, Chicken  19866894314397_1
aaacattattttagaatgtaagagaattccaattttaaagtagtgctggcagcagatcagaagtgggctgaaactttttggctttttaggggtcatgagcaaacagcactgctctgatgaacttcgttatgccatatgaatataaaatattcatagaaaggtaggtgtgcaatagcacctattttttcaatacatctaggagtctaaaattctcaacttatatttggaagtttcttttcttgctttaaggttgtggattatgtttccttgaaaggtgtaaatttctcaattctaaaacartaataatggcgttacttaaacttgatatatagatgtgtttatttaacttcgcagataaatcagtttccttgctggtttgctttgtctgcacattcagagtatttgcaatgatcctgtgcttatagttggagagaagaaaaatggaaattcagggtgttgataaatcaaggcctgcattctaattgttggaaatagcaagtttagttgaggatttatgaaagtcattgtaattgt

SEQ ID NO: 57964 - DNA, 600 bp, Chicken  19866894314399_1
atgaacaagagcctgcatgctgtgcttgtaaaaatctgcaccagcagaggtgatccactgtttcacagctgctacgatggcatcgctgctaggaaaatgttgtccatgaagtccatctttcatcggaacagatggaagcccgaaggtgccaaatttggatatatggtgggtgtggtagcagagtcctgccaagattagcagtgtgctccccagtctgatgcctggcatcactgtgttgcaagagcaaggttgtcttcttctctggcctcagtctggaagttcgagccttcagcttcgtcrtgatgcactggtcagagttaatggtttgtacaggttccagaaaatccagagggatcacacatgtcctacccccaaaagacagtgcacatcattttacccactgcaggcagcatcttgaacttgttctttgatgaggaattcacatactgccactccatggttgactctggctcttagtggtgacaccacatcttgtcacaataatgatgcaattcaggaagctgtcaccttcagccttgcattggttcaataggtcctgacaaacttgcatacagcrgtctttctgttcctctatgagca

SEQ ID NO: 57965 - DNA, 600 bp, Chicken  19866894314399_2
agttcgagccttcagcttcgtcrtgatgcactggtcagagttaatggtttgtacaggttccagaaaatccagagggatcacacatgtcctacccccaaaagacagtgcacatcattttacccactgcaggcagcatcttgaacttgttctttgatgaggaattcacatactgccactccatggttgactctggctcttagtggtgacaccacatcttgtcacaataatgatgcaattcaggaagctgtcaccttcagccttgcattggttcaataggtcctgacaaacttgcatacagcrgtctttctgttcctctatgagcattcatgggacttaacctggtgtaaactttgcaatattccacaactaccaccaccacttcctatgcagtgaagatgatattaagctctgtacacagttccccggttgtaaactgccgatttgtatagatgagctgatagagatactcttcatttcatggtgcgatagctgtgcatgactatccagaacatggcttgtctttcacgtcactgtcaccactgctgaaacacaccaccaacctcctcactgtgctcacatccactgtttggtctccataaa

SEQ ID NO: 57966 - DNA, 600 bp, Chicken  19866894314402_1
ggaggtggagggtaaaggctgcatcccacccttgcaggagccccgttgggttcccccaagccagcaggcaggagggagcacagggaaggcgttgttgctaattagaggctgataaccggggcgatgcgtttccattgctcatcctcttcagatcgtgctgggcacgttgtcctttcacttttccctcagcctcaaattctctcctccactgaagacaccccagtgctgatgctgaacccagacctttgctttgcctttccccattgtgccccaccttcccctgatacagggactccatgsggtgccctaaacatggggctccgccaaggagtggagagccctcctgccctgcctgggggctgcatgaaggatcccccggagcaaggtgctgctgcaccccttccgctttggggtctttgggatcagaagtcatttgggacgtgcgtgtgtccccacaggctgcttggctgggagccccaggatggggacatctgcgtgtccctgggggatgttcagggccaggacctgcttgggatgggggcaaccgtgcgtccctgggggatgcttggaattgggacccctaggatggggacgtggctc

SEQ ID NO: 57967 - DNA, 600 bp, Chicken  19866894314411_1
ccaatattgacccatggggaacaccacttgtctggttgccagctggatttgactccattcaccaccactctctgcgcctgactgtgcagccagttttttatccagctaagaggtcatctgtctaagccatgtgctaccagcctctccaagaaaatactgcgggaagcaggcagatagggaggtcaggctgacatgcctgtagttccccaggctctccttccaacccttctttttaaaacaagcagacctaaaatactgagatgttgaagtactaagcaaatgcagactctgtagaatgtwtttttcctttctttagctttctgaaagtggcttctgtacaggccatgaaccggactccatggagttcagctcactaggaggatgggtagcaacacgagcatcrggcatgaagaaaaacatctatggaaacattgaagatctggtaaatatttttaatacttgttctaattaattattcttcygattggaggtttaactcttgtaatgactcatgagagggagaagggaaactacatttctgttaatcagtgatacagytttgacatcaaattttgactgagattgttgtttgcttgtttt

SEQ ID NO: 57968 - DNA, 600 bp, Chicken  19866894314411_2
agctaagaggtcatctgtctaagccatgtgctaccagcctctccaagaaaatactgcgggaagcaggcagatagggaggtcaggctgacatgcctgtagttccccaggctctccttccaacccttctttttaaaacaagcagacctaaaatactgagatgttgaagtactaagcaaatgcagactctgtagaatgtwtttttcctttctttagctttctgaaagtggcttctgtacaggccatgaaccggactccatggagttcagctcactaggaggatgggtagcaacacgagcatcrggcatgaagaaaaacatctatggaaacattgaagatctggtaaatatttttaatacttgttctaattaattattcttcygattggaggtttaactcttgtaatgactcatgagagggagaagggaaactacatttctgttaatcagtgatacagytttgacatcaaattttgactgagattgttgtttgcttgtttttggtatyagtactaggaaacattactgctaatctgaaagtttgagtttggtatttactagatagcttaaggaactgtgttgatttatccttaccctgttgctt

SEQ ID NO: 57969 - DNA, 600 bp, Chicken  19866894314411_3
tcaggctgacatgcctgtagttccccaggctctccttccaacccttctttttaaaacaagcagacctaaaatactgagatgttgaagtactaagcaaatgcagactctgtagaatgtwtttttcctttctttagctttctgaaagtggcttctgtacaggccatgaaccggactccatggagttcagctcactaggaggatgggtagcaacacgagcatcrggcatgaagaaaaacatctatggaaacattgaagatctggtaaatatttttaatacttgttctaattaattattcttcygattggaggtttaactcttgtaatgactcatgagagggagaagggaaactacatttctgttaatcagtgatacagytttgacatcaaattttgactgagattgttgtttgcttgtttttggtatyagtactaggaaacattactgctaatctgaaagtttgagtttggtatttactagatagcttaaggaactgtgttgatttatccttaccctgttgctttcttccactgttcacactctgatattctcagtgcagtaatcctgttaaatttgtaggatttttccaacagcgcgtgcta

SEQ ID NO: 57970 - DNA, 528 bp, Chicken  19866894314411_4
agatgttgaagtactaagcaaatgcagactctgtagaatgtwtttttcctttctttagctttctgaaagtggcttctgtacaggccatgaaccggactccatggagttcagctcactaggaggatgggtagcaacacgagcatcrggcatgaagaaaaacatctatggaaacattgaagatctggtaaatatttttaatacttgttctaattaattattcttcygattggaggtttaactcttgtaatgactcatgagagggagaagggaaactacatttctgttaatcagtgatacagytttgacatcaaattttgactgagattgttgtttgcttgtttttggtatyagtactaggaaacattactgctaatctgaaagtttgagtttggtatttactagatagcttaaggaactgtgttgatttatccttaccctgttgctttcttccactgttcacactctgatattctcagtgcagtaatcctgttaaatttgtaggatttttccaacagcgcgtgctatttc

SEQ ID NO: 57971 - DNA, 479 bp, Chicken  19866894314411_5
tttctttagctttctgaaagtggcttctgtacaggccatgaaccggactccatggagttcagctcactaggaggatgggtagcaacacgagcatcrggcatgaagaaaaacatctatggaaacattgaagatctggtaaatatttttaatacttgttctaattaattattcttcygattggaggtttaactcttgtaatgactcatgagagggagaagggaaactacatttctgttaatcagtgatacagytttgacatcaaattttgactgagattgttgtttgcttgtttttggtatyagtactaggaaacattactgctaatctgaaagtttgagtttggtatttactagatagcttaaggaactgtgttgatttatccttaccctgttgctttcttccactgttcacactctgatattctcagtgcagtaatcctgttaaatttgtaggatttttccaacagcgcgtgctatttc

SEQ ID NO: 57972 - DNA, 600 bp, Chicken  19866894314413_1
ctggataagcccaccagcatgttctgtttaagtcaccagacagccatcagatggcaatgacctttcagtcaccaatgacctgtccacatttgaacctgtggcccagaggtggaaggttttgtataactcagtgcttccctgagctcaccagttcatgctttgataaatgcagttagaaaggaataaaaatattctttagacgatactgactatatgcagactcctgaatcagtttttccactgttttctgcagcttcagtgccataagcacaaatataacttcaagtacagccagtattraaatgatttacaccaactgttggtagaaactagtgaaatatacacaggttgatggatggatggatcgatagattgatcttttccattgagtaccttctaaccattggcttttggaaaaagctgtcttgcaatttgtaaggctcattagatgacagagctggctgttgcataggatggacgatcggtttcttagtacttgcctgtgcaagagttagaactagagcaggaaaggtgtatgagttatgtgggattttgaagtgaaatgagaagcgttgtctacgtatgcatcaaaataaacat

SEQ ID NO: 57973 - DNA, 599 bp, Chicken  19866894314414_1
  misc_feature (1)..(65): n is any nucleotide
nnnnnnnnnnnnnnnnnnnnnnnnnnnnnnnnnnnnnnnnnnnnnnnnnnnnnnnnnnnnnnnnntgacacctgttcagaattttcagcttcttacccccttattatactttctataatccctagaagcacagagcatggaacagtgttcttcggttccagacttgtggtattaattctcactgcctcctaggtacctttcagtgttttacattatcatccttaccttaaggattaactaaatggatggagtcatttctcttaactaatgccagaaaatgctcaggttatctggcagacyacggaaagaaaatctaagaattccgtaggagaaagagttctggattggtttttgacaaagcaaaacagaaatatcttaayagatgcagcttttaagtaactatgttaaatgtatcrctatcatccattaataacgatttgccattcttcggtttgatatattcagcaaactttagcagtgcataatgctagggaacaaaaactcttttgccatcagtcartagtcactctttctaacatttctactaaaaataaaacgtatctttcagttaaaagccaatatattttggtcagacaaaa

SEQ ID NO: 57974 - DNA, 600 bp, Chicken  19866894314414_2
attttcagcttcttacccccttattatactttctataatccctagaagcacagagcatggaacagtgttcttcggttccagacttgtggtattaattctcactgcctcctaggtacctttcagtgttttacattatcatccttaccttaaggattaactaaatggatggagtcatttctcttaactaatgccagaaaatgctcaggttatctggcagacyacggaaagaaaatctaagaattccgtaggagaaagagttctggattggtttttgacaaagcaaaacagaaatatcttaayagatgcagcttttaagtaactatgttaaatgtatcrctatcatccattaataacgatttgccattcttcggtttgatatattcagcaaactttagcagtgcataatgctagggaacaaaaactcttttgccatcagtcartagtcactctttctaacatttctactaaaaataaaacgtatctttcagttaaaagccaatatattttggtcagacaaaatgcttccacaaagaatcttgtttcaaaagaaagactcttacattataaaccacaataacaactcmtactcaatttattcat

SEQ ID NO: 57975 - DNA, 600 bp, Chicken  19866894314414_3
aatccctagaagcacagagcatggaacagtgttcttcggttccagacttgtggtattaattctcactgcctcctaggtacctttcagtgttttacattatcatccttaccttaaggattaactaaatggatggagtcatttctcttaactaatgccagaaaatgctcaggttatctggcagacyacggaaagaaaatctaagaattccgtaggagaaagagttctggattggtttttgacaaagcaaaacagaaatatcttaayagatgcagcttttaagtaactatgttaaatgtatcrctatcatccattaataacgatttgccattcttcggtttgatatattcagcaaactttagcagtgcataatgctagggaacaaaaactcttttgccatcagtcartagtcactctttctaacatttctactaaaaataaaacgtatctttcagttaaaagccaatatattttggtcagacaaaatgcttccacaaagaatcttgtttcaaaagaaagactcttacattataaaccacaataacaactcmtactcaatttattcatacatacaaatcggaattcattttagactcaaaatat

SEQ ID NO: 57976 - DNA, 600 bp, Chicken  19866894314414_4
cttaccttaaggattaactaaatggatggagtcatttctcttaactaatgccagaaaatgctcaggttatctggcagacyacggaaagaaaatctaagaattccgtaggagaaagagttctggattggtttttgacaaagcaaaacagaaatatcttaayagatgcagcttttaagtaactatgttaaatgtatcrctatcatccattaataacgatttgccattcttcggtttgatatattcagcaaactttagcagtgcataatgctagggaacaaaaactcttttgccatcagtcartagtcactctttctaacatttctactaaaaataaaacgtatctttcagttaaaagccaatatattttggtcagacaaaatgcttccacaaagaatcttgtttcaaaagaaagactcttacattataaaccacaataacaactcmtactcaatttattcatacatacaaatcggaattcattttagactcaaaatatatgatattgcaaggatattaataagttttcccaggtactacagaatcctgtataaatgtatttgttggagtgcttctctgtcaacatccttttccacatatacg

SEQ ID NO: 57977 - DNA, 543 bp, Chicken  19866894314414_5
acagaaatatcttaayagatgcagcttttaagtaactatgttaaatgtatcrctatcatccattaataacgatttgccattcttcggtttgatatattcagcaaactttagcagtgcataatgctagggaacaaaaactcttttgccatcagtcartagtcactctttctaacatttctactaaaaataaaacgtatctttcagttaaaagccaatatattttggtcagacaaaatgcttccacaaagaatcttgtttcaaaagaaagactcttacattataaaccacaataacaactcmtactcaatttattcatacatacaaatcggaattcattttagactcaaaatatatgatattgcaaggatattaataagttttcccaggtactacagaatcctgtataaatgtatttgttggagtgcttctctgtcaacatccttttccacatatacgtcatagtttagctgcacctcctctacccattggctgagctgtatatccgtctgaacaatggaaacagatcattaaattaacacaatt

SEQ ID NO: 57978 - DNA, 587 bp, Chicken  19866894314420_1
ctcctgtaagggtatggaaaatcaaactctgtttcctgcacagcttctaaactattttaggactgccatttgctgaggaaaatgctccatctcctggagttcctctcattgacgttttttttttttcattctgtgcagaatgttttagagtaccattaaataacacagattgaaactgaaaatggtttcataacctagtactttgggcacttctctttgtaatgaaacacctgagcttcatcctctgttctagtgcatgtgtaagtgatttgtgtgcagcagatgagtactgacagaagrgatgcaggaagtgccatcataggctgccctgctcagcaccctgctgttcagacaactctcaggcagagatgtgatgcgggtacagacctcataagcaaagaaggtagttgatcagggattactaagaaaaaattgaagctgcacgatttataaaacttgtttgattctttctgctccattctacttacattttagtttgtttttacaatacacagcattgtttcacttttcaatgccgtaagaaaaatggtgaagggaaagtgtttttagttttgctttgcttctca

SEQ ID NO: 57979 - DNA, 600 bp, Chicken  19866894314428_1
ttgttgatggctcatatggttttatgtcaaaaatgtgaaaagctctctatagtgcaggcttaataggagacaccaaatcctttgttacattgagtttttgatctcatgcaagttcagtgtttgggtgtttgaggatagttctttcatataaaatgagataaaagaagggacagtgatagtcagtatctccataggaaagtatattaacacctgtgagtattttcttttgattacctggaagcactatatttcattcaatttgtttctgcagtcttccttttcttaaactcaaaccttgcrcatttaaacatgcttttgaagaaagccactgtaaaggacagtttgtcttggccaagttgtgtttgcaaatggcattcagttctcgtattcattgctcatgtttgtcttgtttagctgtctgtgcttgggtatgggtttgctgctttccaaaaagtcatgaagcagcagtaataacgggcagtcaaaggatagcatacagatcacgtgcttgaaggaacaagttcatgcatggtccccatccactgacagaagaacatctgagagaaaaagcaagcgctggtgtccagtgaaaggggtgct

SEQ ID NO: 57980 - DNA, 599 bp, Chicken  19866894314430_1
  misc_feature (1)..(126): n is any nucleotide
nnnnnnnnnnnnnnnnnnnnnnnnnnnnnnnnnnnnnnnnnnnnnnnnnnnnnnnnnnnnnnnnnnnnnnnnnnnnnnnnnnnnnnnnnnnnnnnnnnnnnnnnnnnnnnnnnnnnnnnnnnnnnngagcaagaagccatgtcccttcattggtcatgtacaaagtgcaatggcaagaattgagctcacaccgccaaaaaactaacttaacaaatccctgctgtccctctttgtagtgtcagctgcacgaagtgtagaagggaccctccctttgcacatccaagcccagcataggcagtsagggtcccaaatgagttgtgcctcggtaccaaccactttcgaagcagcccaaacccctgcatatactgccactatctcttttcagtcagagtgcagtgggttttggatcctctgtatckctgactccaaaaccttaggggtcaactttgagtctccactggtgctttctaccagagrctccaggtgaggccattctccccagctgcaatgcagagtatgttttttacatcttatcctcccagctccttgtgcatcccagcctctccaatggcagggcaacacaaaaagcagaaaaatcc

SEQ ID NO: 57981 - DNA, 599 bp, Chicken  19866894314430_2
  misc_feature (1)..(7): n is any nucleotide
nnnnnnngagcaagaagccatgtcccttcattggtcatgtacaaagtgcaatggcaagaattgagctcacaccgccaaaaaactaacttaacaaatccctgctgtccctctttgtagtgtcagctgcacgaagtgtagaagggaccctccctttgcacatccaagcccagcataggcagtsagggtcccaaatgagttgtgcctcggtaccaaccactttcgaagcagcccaaacccctgcatatactgccactatctcttttcagtcagagtgcagtgggttttggatcctctgtatckctgactccaaaaccttaggggtcaactttgagtctccactggtgctttctaccagagrctccaggtgaggccattctccccagctgcaatgcagagtatgttttttacatcttatcctcccagctccttgtgcatcccagcctctccaatggcagggcaacacaaaaagcagaaaaatccttggttctgagcaagctctattcaacattatcaacatttttatctgaaacccaaaccacaacaccacaccagctactctgaagtcagtagtccctcttaacctcccctggcattattcc

SEQ ID NO: 57982 - DNA, 600 bp, Chicken  19866894314430_3
aattgagctcacaccgccaaaaaactaacttaacaaatccctgctgtccctctttgtagtgtcagctgcacgaagtgtagaagggaccctccctttgcacatccaagcccagcataggcagtsagggtcccaaatgagttgtgcctcggtaccaaccactttcgaagcagcccaaacccctgcatatactgccactatctcttttcagtcagagtgcagtgggttttggatcctctgtatckctgactccaaaaccttaggggtcaactttgagtctccactggtgctttctaccagagrctccaggtgaggccattctccccagctgcaatgcagagtatgttttttacatcttatcctcccagctccttgtgcatcccagcctctccaatggcagggcaacacaaaaagcagaaaaatccttggttctgagcaagctctattcaacattatcaacatttttatctgaaacccaaaccacaacaccacaccagctactctgaagtcagtagtccctcttaacctcccctggcattattcccggtgcaaacatkggtaagcaaccagagccaaagaagtctccgcagtctctttgcgaca

SEQ ID NO: 57983 - DNA, 520 bp, Chicken  19866894314430_4
ccttaggggtcaactttgagtctccactggtgctttctaccagagrctccaggtgaggccattctccccagctgcaatgcagagtatgttttttacatcttatcctcccagctccttgtgcatcccagcctctccaatggcagggcaacacaaaaagcagaaaaatccttggttctgagcaagctctattcaacattatcaacatttttatctgaaacccaaaccacaacaccacaccagctactctgaagtcagtagtccctcttaacctcccctggcattattcccggtgcaaacatkggtaagcaaccagagccaaagaagtctccgcagtctctttgcgacatctttgatgcaggtctccaagaggcaatcctccttgggcactggatcrgktaggcagatgggtgtttccactttcctctccaggaaggagtcaccattgcctaccttttcttctgccttttcctcttcctgcagactcttggttcaggcatttctgacatctctctcagagctg

SEQ ID NO: 57984 - DNA, 426 bp, Chicken  19866894314430_5
acatcttatcctcccagctccttgtgcatcccagcctctccaatggcagggcaacacaaaaagcagaaaaatccttggttctgagcaagctctattcaacattatcaacatttttatctgaaacccaaaccacaacaccacaccagctactctgaagtcagtagtccctcttaacctcccctggcattattcccggtgcaaacatkggtaagcaaccagagccaaagaagtctccgcagtctctttgcgacatctttgatgcaggtctccaagaggcaatcctccttgggcactggatcrgktaggcagatgggtgtttccactttcctctccaggaaggagtcaccattgcctaccttttcttctgccttttcctcttcctgcagactcttggttcaggcatttctgacatctctctcagagctg

SEQ ID NO: 57985 - DNA, 424 bp, Chicken  19866894314430_6
atcttatcctcccagctccttgtgcatcccagcctctccaatggcagggcaacacaaaaagcagaaaaatccttggttctgagcaagctctattcaacattatcaacatttttatctgaaacccaaaccacaacaccacaccagctactctgaagtcagtagtccctcttaacctcccctggcattattcccggtgcaaacatkggtaagcaaccagagccaaagaagtctccgcagtctctttgcgacatctttgatgcaggtctccaagaggcaatcctccttgggcactggatcrgktaggcagatgggtgtttccactttcctctccaggaaggagtcaccattgcctaccttttcttctgccttttcctcttcctgcagactcttggttcaggcatttctgacatctctctcagagctg

SEQ ID NO: 57986 - DNA, 600 bp, Chicken  19866894314446_1
atggctcttattttaagtattaatttcagaataaggctgttgtgtttcagcaagcatctctttctaattaattctgcaatggtcctggtaaacccaagtttatctgagaaatttcaacctaatactatgacagactgtgaagtgacaaacataagaatatgtttttcaaacatgaggaaaaggagaacttgtgctaatctatatctaaattgaaagatttcccattcaaatatacattccttatacacaagtggaacacaatgcaaaatacattgctttgtctgccagttcttttttctwgcagtgataatccttctaatgcaytaaattcacamamamacaaaaaaaaagcttttwaatcctaaatagcatgctaagcacttggctttcaatacaaacacataaattagctgtccatgtctgtaccagatataccaaataacagcttcagtgataatcaactttaacaaagctgcaataacaagccactcatttaaacaaagtagaagctgtctgacctctttcaagatgagtgctatatgcctctgtgtgttttctgggcaaaatactctcaaaaaagtactgtttaaatatcatgtt

SEQ ID NO: 57987 - DNA, 600 bp, Chicken  19866894314446_2
ttcagaataaggctgttgtgtttcagcaagcatctctttctaattaattctgcaatggtcctggtaaacccaagtttatctgagaaatttcaacctaatactatgacagactgtgaagtgacaaacataagaatatgtttttcaaacatgaggaaaaggagaacttgtgctaatctatatctaaattgaaagatttcccattcaaatatacattccttatacacaagtggaacacaatgcaaaatacattgctttgtctgccagttcttttttctwgcagtgataatccttctaatgcaytaaattcacamamamacaaaaaaaaagcttttwaatcctaaatagcatgctaagcacttggctttcaatacaaacacataaattagctgtccatgtctgtaccagatataccaaataacagcttcagtgataatcaactttaacaaagctgcaataacaagccactcatttaaacaaagtagaagctgtctgacctctttcaagatgagtgctatatgcctctgtgtgttttctgggcaaaatactctcaaaaaagtactgtttaaatatcatgttaaactcattcttttcagggggatg

SEQ ID NO: 57988 - DNA, 600 bp, Chicken  19866894314446_3
gctgttgtgtttcagcaagcatctctttctaattaattctgcaatggtcctggtaaacccaagtttatctgagaaatttcaacctaatactatgacagactgtgaagtgacaaacataagaatatgtttttcaaacatgaggaaaaggagaacttgtgctaatctatatctaaattgaaagatttcccattcaaatatacattccttatacacaagtggaacacaatgcaaaatacattgctttgtctgccagttcttttttctwgcagtgataatccttctaatgcaytaaattcacamamamacaaaaaaaaagcttttwaatcctaaatagcatgctaagcacttggctttcaatacaaacacataaattagctgtccatgtctgtaccagatataccaaataacagcttcagtgataatcaactttaacaaagctgcaataacaagccactcatttaaacaaagtagaagctgtctgacctctttcaagatgagtgctatatgcctctgtgtgttttctgggcaaaatactctcaaaaaagtactgtttaaatatcatgttaaactcattcttttcagggggatgtattttacttc

SEQ ID NO: 57989 - DNA, 600 bp, Chicken  19866894314446_4
tgttgtgtttcagcaagcatctctttctaattaattctgcaatggtcctggtaaacccaagtttatctgagaaatttcaacctaatactatgacagactgtgaagtgacaaacataagaatatgtttttcaaacatgaggaaaaggagaacttgtgctaatctatatctaaattgaaagatttcccattcaaatatacattccttatacacaagtggaacacaatgcaaaatacattgctttgtctgccagttcttttttctwgcagtgataatccttctaatgcaytaaattcacamamamacaaaaaaaaagcttttwaatcctaaatagcatgctaagcacttggctttcaatacaaacacataaattagctgtccatgtctgtaccagatataccaaataacagcttcagtgataatcaactttaacaaagctgcaataacaagccactcatttaaacaaagtagaagctgtctgacctctttcaagatgagtgctatatgcctctgtgtgttttctgggcaaaatactctcaaaaaagtactgtttaaatatcatgttaaactcattcttttcagggggatgtattttacttcag

SEQ ID NO: 57990 - DNA, 600 bp, Chicken  19866894314446_5
ttgtgtttcagcaagcatctctttctaattaattctgcaatggtcctggtaaacccaagtttatctgagaaatttcaacctaatactatgacagactgtgaagtgacaaacataagaatatgtttttcaaacatgaggaaaaggagaacttgtgctaatctatatctaaattgaaagatttcccattcaaatatacattccttatacacaagtggaacacaatgcaaaatacattgctttgtctgccagttcttttttctwgcagtgataatccttctaatgcaytaaattcacamamamacaaaaaaaaagcttttwaatcctaaatagcatgctaagcacttggctttcaatacaaacacataaattagctgtccatgtctgtaccagatataccaaataacagcttcagtgataatcaactttaacaaagctgcaataacaagccactcatttaaacaaagtagaagctgtctgacctctttcaagatgagtgctatatgcctctgtgtgttttctgggcaaaatactctcaaaaaagtactgtttaaatatcatgttaaactcattcttttcagggggatgtattttacttcagaa

SEQ ID NO: 57991 - DNA, 600 bp, Chicken  19866894314446_6
gtgtttcagcaagcatctctttctaattaattctgcaatggtcctggtaaacccaagtttatctgagaaatttcaacctaatactatgacagactgtgaagtgacaaacataagaatatgtttttcaaacatgaggaaaaggagaacttgtgctaatctatatctaaattgaaagatttcccattcaaatatacattccttatacacaagtggaacacaatgcaaaatacattgctttgtctgccagttcttttttctwgcagtgataatccttctaatgcaytaaattcacamamamamaaaaaaaaagcttttwaatcctaaatagcatgctaagcacttggctttcaatacaaacacataaattagctgtccatgtctgtaccagatataccaaataacagcttcagtgataatcaactttaacaaagctgcaataacaagccactcatttaaacaaagtagaagctgtctgacctctttcaagatgagtgctatatgcctctgtgtgttttctgggcaaaatactctcaaaaaagtactgtttaaatatcatgttaaactcattcttttcagggggatgtattttacttcagaatg

SEQ ID NO: 57992 - DNA, 600 bp, Chicken  19866894314446_7
ctctttctaattaattctgcaatggtcctggtaaacccaagtttatctgagaaatttcaacctaatactatgacagactgtgaagtgacaaacataagaatatgtttttcaaacatgaggaaaaggagaacttgtgctaatctatatctaaattgaaagatttcccattcaaatatacattccttatacacaagtggaacacaatgcaaaatacattgctttgtctgccagttcttttttctwgcagtgataatccttctaatgcaytaaattcacamamamacaaaaaaaaagcttttwaatcctaaatagcatgctaagcacttggctttcaatacaaacacataaattagctgtccatgtctgtaccagatataccaaataacagcttcagtgataatcaactttaacaaagctgcaataacaagccactcatttaaacaaagtagaagctgtctgacctctttcaagatgagtgctatatgcctctgtgtgttttctgggcaaaatactctcaaaaaagtactgtttaaatatcatgttaaactcattcttttcagggggatgtattttacttcagaatgtgctcacaactctcta

SEQ ID NO: 57993 - DNA, 600 bp, Chicken  19866894314448_1
agttggtctccagctttagtcaatgctctaccatgttgcaaaatatgcagcatagactgtttgggtcttcgatgtaaaatcttacacaatctaaaatatgaattattaacattatttttcattattgtttattttatttttctgtattattttccttcctgctcaataatgaaagttgaaagagaatttcttatcaaaatgataaaatttgaggcattaactttctgaaaatttcactgctgtgggtgtcctgtaccggtatggttttgtattctagttactgcctttgtggcttttacmtattaagtttatttaaagatatcttctgtattaccttgtagtggtatgtgggagtggggggggaggaaaaggggacacgtatgacatatgttgaaattgctctttaacttcatcagtccattgaagaaagaatgaacttgagatcagatgcagatgagaaataatcaagaaatgttttttcctatttattgtatgaactgtcatttgtatttgttctgtagtttacagtcaaaactgacaaaaaaaaaaaaccaaaaacattctgttggtccttttcaacacccaagtgaatggaaagag

SEQ ID NO: 57994 - DNA, 600 bp, Chicken  19866894314450_1
ttgggttactaacccttccaacatcactataaaatctggaaagtcatgtttatttatgaccacattaaaataaaaaaagcttgagcctgacatatcctttgatcaaacaaaagatttagacttttccacggccctacagcttgcaaaatgccttacaagagtctgtattaagacactcacatagtctgcatggcacatgctccatacagacaggtttctaatggttcctgggctcctatcccattccataaggaggaaaagaactgtacaagagggaagaaagctctgactctttttacmgcagatcctgggggcccttgattctgagagcawtgaaggcagcaagtcctgtaagaggaagaatttcaccaagtgctgataagatccctcaatccatggtaaaaatctagaaagtttggaaatgaggtggtgtttccaagcagagggatccgagctctgcaccactcacctgcttaggataaagaaaggaatgagaaggatgtgtctctcagagctgagcagaggggaactgggaggggaagagaaggaacaatgtttggccttcaacacccatcaatgttatttcacacactatctaaa

SEQ ID NO: 57995 - DNA, 600 bp, Chicken  19866894314450_2
atctggaaagtcatgtttatttatgaccacattaaaataaaaaaagcttgagcctgacatatcctttgatcaaacaaaagatttagacttttccacggccctacagcttgcaaaatgccttacaagagtctgtattaagacactcacatagtctgcatggcacatgctccatacagacaggtttctaatggttcctgggctcctatcccattccataaggaggaaaagaactgtacaagagggaagaaagctctgactctttttacmgcagatcctgggggcccttgattctgagagcawtgaaggcagcaagtcctgtaagaggaagaatttcaccaagtgctgataagatccctcaatccatggtaaaaatctagaaagtttggaaatgaggtggtgtttccaagcagagggatccgagctctgcaccactcacctgcttaggataaagaaaggaatgagaaggatgtgtctctcagagctgagcagaggggaactgggaggggaagagaaggaacaatgtttggccttcaacacccatcaatgttatttcacacactatctaaaaaatttcacttggcattttttaaaacagtgtct

SEQ ID NO: 57996 - DNA, 599 bp, Chicken  19866894314452_1
  misc_feature (1)..(22): n is any nucleotide
nnnnnnnnnnnnnnnnnnnnnngttccatcacatttaaactttttggggagatgtatggctgaatcagttcttactgctaggaagatctcaaggtaattctaaaaaatgaggaatgagaaaagcctccattatgtgggagaaactaccaaggtagaggaccaatcttctaggccaaaacctattaaaatcaagggaaaaaaaaagttttagatggccttgtgcctactcttagaaatttaattgaatttgaagtaggctttatagatggagggactcacaacatgagattaattagtcaytgaagtgatggcaaacacaagaagtaaactggccagttggtcctagacaaggtataaaaaattcgaatagggttagtcaggataattcaggtaaaatctctggatggtggaatgtcactccaggggcaaggatgaggaaaggttatgggtctctgggaaaaaaaaaatgctttttaatgttctttttgattgaacatgttaatgtcccataggcctgttctttacataattctgtttgcacaagatgaagggggtaccagagctttgccagcttcatgtagctcattgcaaaatccttg

SEQ ID NO: 57997 - DNA, 600 bp, Chicken  19866894314453_1
cttttcgcctgtgaatcctttgtgtgactcccaagtactgttcactgccgctgcttctcaggacagctaaggaagcagggtaaggagatgagaacttacattgaatgctggaatttattttcctttggtttctgcagccttttatcagagtatctctgatagtagtgagtaactgagcctaaggaaacaatttttcttattgctcaaacaatgaggtaaaacagacctcaagaactgataaatggaagcaccatgagcaacaagtttgcttgttaacccatgcattcaaagggcagaatmtctttgtttttggaaatacaaaaggtacatgatgctcattttcagacttggggaatccttaatcttctttccttctctctttgtgcacgtactgtctctttgcaatttttgctgaaatattttggtcattgagacagaattgagtctttttagggttatggtatgttacaaagtttatttataccaaaatattctcattttgatgtagtagtttacctgcccatttgagtgatttgtgatttacatactgtaatctagggccctttgtgatttgaagttgatctgaagtggtagcaataa

SEQ ID NO: 57998 - DNA, 599 bp, Chicken  19866894314462_1
  misc_feature (1)..(74): n is any nucleotide
nnnnnnnnnnnnnnnnnnnnnnnnnnnnnnnnnnnnnnnnnnnnnnnnnnnnnnnnnnnnnnnnnnnnnnnnnnagcggggcgggaagtagtatggtgtgcgagggcgtcccgctgccgtttcgtggggcatgtgacgagcggctgtaatgccgcaagtgtccggggcgcggcggagctgcccggagggttttcgggccgcgcaggaggggctgatgagctgaggtgaaaccggcaggctgcgtcccagatacattaattatgtggtacatgcgatcgccgtcgttcacctgctttttarttctggtttcgtagtctgtgcctaagtagagcaggtgcactcgatgtcctttcagccagctgttggtggaacgctatttcagggacaaggaagggaaacgctcctggtgtgaagggacarcggccgagaggaaatatggtggtgctgaatgtgaagagagaaataaagatcaaaggacagagtgttgaagtattgatcgggacaagcaaaaaaaggattctatttcccgtataaaatgtcacttctatgccaacacgaagtgatatgcattctctgctgataaaagaagttggctgcca

SEQ ID NO: 57999 - DNA, 600 bp, Chicken  19866894314462_2
ttcgtggggcatgtgacgagcggctgtaatgccgcaagtgtccggggcgcggcggagctgcccggagggttttcgggccgcgcaggaggggctgatgagctgaggtgaaaccggcaggctgcgtcccagatacattaattatgtggtacatgcgatcgccgtcgttcacctgctttttarttctggtttcgtagtctgtgcctaagtagagcaggtgcactcgatgtcctttcagccagctgttggtggaacgctatttcagggacaaggaagggaaacgctcctggtgtgaagggacarcggccgagaggaaatatggtggtgctgaatgtgaagagagaaataaagatcaaaggacagagtgttgaagtattgatcgggacaagcaaaaaaaggattctatttcccgtataaaatgtcacttctatgccaacacgaagtgatatgcattctctgctgataaaagaagttggctgccataccttgctagttttacatyggtgcaatggggtcagttttgcacaccggggcccaggacttcatactaaaaaaatctaaggagatcttgcctctgttctggaataatgcctggagtattat

SEQ ID NO: 58000 - DNA, 599 bp, Chicken  19866894314462_3
gcctaagtagagcaggtgcactcgatgtcctttcagccagctgttggtggaacgctatttcagggacaaggaagggaaacgctcctggtgtgaagggacarcggccgagaggaaatatggtggtgctgaatgtgaagagagaaataaagatcaaaggacagagtgttgaagtattgatcgggacaagcaaaaaaaggattctatttcccgtataaaatgtcacttctatgccaacacgaagtgatatgcattctctgctgataaaagaagttggctgccataccttgctagttttacatyggtgcaatggggtcagttttgcacaccggggcccaggacttcatactaaaaaaatctaaggagatcttgcctctgttctggaataatgcctggagtattatctctgtgggggctggatcatctgtcctaaagctacaragctagcaggaattacagagtcacagaataggtaaggttgaaaatgaccactaaggtcatgtaatccaatcattgacccattcctgccatgacccactgacccatgtctctcaatgccacatctgcacctctcttgaaaaatcaaatgaagctgcttgttt

SEQ ID NO: 58001 - DNA, 461 bp, Chicken  19866894314462_4
gagaaataaagatcaaaggacagagtgttgaagtattgatcgggacaagcaaaaaaaggattctatttcccgtataaaatgtcacttctatgccaacacgaagtgatatgcattctctgctgataaaagaagttggctgccataccttgctagttttacatyggtgcaatggggtcagttttgcacaccggggcccaggacttcatactaaaaaaatctaaggagatcttgcctctgttctggaataatgcctggagtattatctctgtgggggctggatcatctgtcctaaagctacaragctagcaggaattacagagtcacagaataggtaaggttgaaaatgaccactaaggtcatgtaatccaatcattgacccattcctgccatgacccactgacccatgtctctcaatgccacatctgcacctctcttgaaaaatcaaatgaagctgcttgttt

SEQ ID NO: 58002 - DNA, 599 bp, Chicken  19866894314466_1
  misc_feature (1)..(27): n is any nucleotide
nnnnnnnnnnnnnnnnnnnnnnnnnnnaaaattttagtatgaagtagaattccactaccccatactaatatgatagatcttttaaactatttgcttcagtgagtgttccttcagtatcctgaaatcctgcagtgagctgacaaaggtgcctttgaatacctcaattatgcatggccatctttatcctatttagattgacacttatctagattacacgattggttagcctttcagaacaagctgacccttaaattaaaatgttgcctctttgaagaccaccaatcaaattaaaacaacctrtcacatcttaacctctaaaatgaactggtttttaagtgttctctttcaatgatcagttcctacaaaatmatttgtaatcatcagtgatccactctaaagacattcaaattcaactgaatgttgtgactttgatgagctcctcccccagagctttctggtctttagagctgtggttttggtggccacagaacaaattatcacaaggctgctctctaaattgggttgatgactgacaagcttaacagcaagcctgaaaaccactcctcttttcaccatcgtctgaagacttacaactgtaa

SEQ ID NO: 58003 - DNA, 600 bp, Chicken  19866894314466_2
atgatagatcttttaaactatttgcttcagtgagtgttccttcagtatcctgaaatcctgcagtgagctgacaaaggtgcctttgaatacctcaattatgcatggccatctttatcctatttagattgacacttatctagattacacgattggttagcctttcagaacaagctgacccttaaattaaaatgttgcctctttgaagaccaccaatcaaattaaaacaacctrtcacatcttaacctctaaaatgaactggtttttaagtgttctctttcaatgatcagttcctacaaaatmatttgtaatcatcagtgatccactctaaagacattcaaattcaactgaatgttgtgactttgatgagctcctcccccagagctttctggtctttagagctgtggttttggtggccacagaacaaattatcacaaggctgctctctaaattgggttgatgactgacaagcttaacagcaagcctgaaaaccactcctcttttcaccatcgtctgaagacttacaactgtaagcagcagagctattctttcactgtttataaaaatcagcagatgtgggggattttccaacataagtgtcca

SEQ ID NO: 58004 - DNA, 415 bp, Chicken  19866894314466_3
attcaactgaatgttgtgactttgatgagctcctcccccagagctttctggtctttagagctgtggttttggtggccacagaacaaattatcacaaggctgctctctaaattgggttgatgactgacaagcttaacagcaagcctgaaaaccactcctcttttcaccatcgtctgaagacttacaactgtaagcagcagagctattctttcactgtttataaaaatcagcagatgtgggggattttccaacataagtgtccagagctgcaagcaattcaggagactcttggagttcatcracrataactttctggttcaggtattggacagaccgaacagaagcgaagtattagtggaccggtctcaccaatgcggaagagatcttgaataggttaaggttggtgatagtctggg

SEQ ID NO: 58005 - DNA, 412 bp, Chicken  19866894314466_4
caactgaatgttgtgactttgatgagctcctcccccagagctttctggtctttagagctgtggttttggtggccacagaacaaattatcacaaggctgctctctaaattgggttgatgactgacaagcttaacagcaagcctgaaaaccactcctcttttcaccatcgtctgaagacttacaactgtaagcagcagagctattctttcactgtttataaaaatcagcagatgtgggggattttccaacataagtgtccagagctgcaagcaattcaggagactcttggagttcatcracrataactttctggttcaggtattggacagaccgaacagaagcgaagtattagtggaccggtctcaccaatgcggaagagatcttgaataggttaaggttggtgatagtctggg

SEQ ID NO: 58006 - DNA, 600 bp, Chicken  19866894314468_1
gagggatgaggaaggaataaaacccaccatgttgtactacctaagggaagatggagatatctaagatattgtcctaaagatagatctggagaatgatctaagttctgtctggaggcttgctgctatgaaaatcatagtgcagtggattgtggactatatcatgaagaccagttggaggctacagttgcacttaactgaatttacttcccaccttgtacccactctgataaggggaagaatgaatcaaatggtgaatgaaaatagaaactattagggatttatgttttttccttggttgaktttatcagtctgttctgatggaaaaactgttattctgaatgcttttttttttctctcaaaacattaaaaaaattcatgcgcaacttgaaaaagtttattggaattggtatggcttaaaagtttggaatgttaaaatgtttaagtatgtgttaattgatcatttcagactccattttcaaacattcatatacttaccatgcaagcaggatacattcagtagtccctggcttgtaggaaatttgtacatcttgcttgcttatctttaaatgttaatgttacagagatgctttcacaaagcta

SEQ ID NO: 58007 - DNA, 600 bp, Chicken  19866894314472_1
ttttgggccactctgtagttataaactatagatcatattatttatctaatgaaataataaaaaaaggtagacatgaccccttgtaagactgcagtgccatatgtaaccacttagtttgttatagagctatttattcggtttactgtgtgtattttgactgtatacataacataagagctagatctcatgagtgatacagttttgtttctattttcaaggactgagggaatgctgtcctcgaagctctccatgaactgtctgaaaaggctttctgatgggatcacaaaaagctcaaggggkaaaaaaggtcaacagaaacaagcataaatttcagcaaagacaaagtctgcatcatcttttacatttcaagatccctatctgcttagaaactcgattgctcaacttctagtttgcatgtctttgacaaccttcgttgaaatcatatgcaaatactaaatttaytacagttaggggtaacgtgagatgctttcttattcatttaatcatatccatctgttaattccagaagatggtagctttgaattgtattgttatttgcattaccaggaattgggagtaacctaagtatgtggttacttc

SEQ ID NO: 58008 - DNA, 532 bp, Chicken  19866894314472_2
tacataacataagagctagatctcatgagtgatacagttttgtttctattttcaaggactgagggaatgctgtcctcgaagctctccatgaactgtctgaaaaggctttctgatgggatcacaaaaagctcaaggggaaaaaaaggtcaacagaaacaagcataaatttcagcaaagacaaagtctgcatcatcttttacatttcaagatccctatctgcttagaaactcgattgctcaacttctagtttgcatgtctttgacaaccttcgttgaaatcatatgcaaatactaaatttaytacagttaggggtaacgtgagatgctttcttattcatttaatcatatccatctgttaattccagaagatggtagctttgaattgtattgttatttgcattaccaggaattgggagtaacctaagtatgtggttacttcagttttattgaaggctggggtttttgtttttgtttttttttttactattttgcatattaaatgtagacaacctgagaatcttgaaggagactga

SEQ ID NO: 58009 - DNA, 599 bp, Chicken  19866894314478_1
  misc_feature (1)..(20): n is any nucleotide
nnnnnnnnnnnnnnnnnnnnctgcccagaggataagagcaatatacaatattgcaatatataatattgctcttataagataagagcgaagaatggtgctaggaataatttttactgtggaaactgcccaattctttatacttttcagatggaagaaagggagatgtccatcaaactgtcattacaaattagatgccacaaacctaagctggaggagccgccaggaatccataaaccttttagaggatgtgcctgtttttgacatttaaaacaaaaaatctttatggatttttgtggaagrggctgatgagccagcagctgcatttctcagctgtcggatggactccactcaaacaagctgatgcctgggtttaggaggacaggttaattactttcygtgctgtgccgaagagcaaataatagctggtccgcgttactgagtaggaaaagatgtytgagagtggtttggtttgggtttttttgttgtttgccgcatcctgactgctgcctccgtacagcctgagtgtaggtgccccttgcagaacaataactggatgctactcgaaatacttggcagtgcaggcaggggagtggaatgta

SEQ ID NO: 58010 - DNA, 600 bp, Chicken  19866894314478_2
gctaggaataatttttactgtggaaactgcccaattctttatacttttcagatggaagaaagggagatgtccatcaaactgtcattacaaattagatgccacaaacctaagctggaggagccgccaggaatccataaaccttttagaggatgtgcctgtttttgacatttaaaacaaaaaatctttatggatttttgtggaagrggctgatgagccagcagctgcatttctcagctgtcggatggactccactcaaacaagctgatgcctgggtttaggaggacaggttaattactttcygtgctgtgccgaagagcaaataatagctggtccgcgttactgagtaggaaaagatgtytgagagtggtttggtttgggtttttttgttgtttgccgcatcctgactgctgcctccgtacagcctgagtgtaggtgccccttgcagaacaataactggatgctactcgaaatacttggcagtgcaggcaggggagtggaatgtaatgagaacacttcagcaggtctgagggtgagtaaactccagtagtgtaggaatgagaaggttgggcttttggtgcaggtctctccctcacttggcat

SEQ ID NO: 58011 - DNA, 600 bp, Chicken  19866894314478_3
aaagggagatgtccatcaaactgtcattacaaattagatgccacaaacctaagctggaggagccgccaggaatccataaaccttttagaggatgtgcctgtttttgacatttaaaacaaaaaatctttatggatttttgtggaagrggctgatgagccagcagctgcatttctcagctgtcggatggactccactcaaacaagctgatgcctgggtttaggaggacaggttaattactttcygtgctgtgccgaagagcaaataatagctggtccgcgttactgagtaggaaaagatgtytgagagtggtttggtttgggtttttttgttgtttgccgcatcctgactgctgcctccgtacagcctgagtgtaggtgccccttgcagaacaataactggatgctactcgaaatacttggcagtgcaggcaggggagtggaatgtaatgagaacacttcagcaggtctgagggtgagtaaactccagtagtgtaggaatgagaaggttgggcttttggtgcaggtctctccctcacttggcattcgcagacaataagaatacaaggattaacatagtagactccgtttattacacttgggt

SEQ ID NO: 58012 - DNA, 600 bp, Chicken  19866894314478_4
acattacccctgtgagagtagattgactctgcatcttttttatttttaaccacgttttcaggtttcttcaaccatctgagttttattagcaaggttattttagaagtatccccgtttaatcaagtttaaacaatctgcttaaagcctactgctgggatataaacacagtagtcctttaatgcagcaaaacaatctgttgaaagatacaatgcaaacatgcatacatctatccagtattgcttaactgttgtctcttccatgcctgaattcccattcaaactgcagcgctcagcctgcagyacgctcttgatttcggggctgtaaaacaaaacccaaaagtgccaaacaagagccaaaagtgcaccttyactgatgtctagagagcggaggcttgcaggacaccacagcatctccaatctgctttaatggttgtgtttacatcgctcccattttgttctattcaaggaatcaggtttcgcaagcagtaagaaaagcagcccctctgccagctggagggaggccagctccaggagcagcttgttttctctccaccccctccttgccctcttcatttgctacggcaagcaaaggttggtgggc

SEQ ID NO: 58013 - DNA, 600 bp, Chicken  19866894314478_5
caaccatctgagttttattagcaaggttattttagaagtatccccgtttaatcaagtttaaacaatctgcttaaagcctactgctgggatataaacacagtagtcctttaatgcagcaaaacaatctgttgaaagatacaatgcaaacatgcatacatctatccagtattgcttaactgttgtctcttccatgcctgaattcccattcaaactgcagcgctcagcctgcagyacgctcttgatttcggggctgtaaaacaaaacccaaaagtgccaaacaagagccaaaagtgcaccttyactgatgtctagagagcggaggcttgcaggacaccacagcatctccaatctgctttaatggttgtgtttacatcgctcccattttgttctattcaaggaatcaggtttcgcaagcagtaagaaaagcagcccctctgccagctggagggaggccagctccaggagcagcttgttttctctccaccccctccttgccctcttcatttgctacggcaagcaaaggttggtgggctctgtataggacagccgacttggggcaggagtgatgtctgcatcttcatcaaagatactgcaaggtta

SEQ ID NO: 58014 - DNA, 600 bp, Chicken  19866894314483_1
ttggtgtgtgcatgtgtaatgatcttttttaagaccacaaactgttcaaaaagctgctagcttccatttttcatttgcacagtgctttcttaagggtagacatgatgagaagcaaacacaaagaaatgagatctgttaaaaagaagtttatctgttttcattaagtgataaatgacttcctattgaatgtggccagagtgaacttcttaaccagacatatcccttctgctattcaacgtccacattatgtggtgcaagaatcagagaaagtgtgagggctgaagggctcaacccaccctmctgctccaagttaaggtggggtgcccaagaccagcagccatgcactgaaagtcttcaaggttggaaatcccactctactactttgccccctgtccagcaggtctaccacgctcagtgtcatctttttcacttatatccatatgaaattttctccctttctcaagagagattggtttttaagggaccatgaccagttttttttttaagatataggatttcctgtgtctgtttaataaaaccaaatccatcattgaaactccatgcttcctcccaagttatctttcattctttaaccaatgg

SEQ ID NO: 58015 - DNA, 600 bp, Chicken  19866894314485_1
ttccactaatgatcaagccaccatatccctctctgttctacatgaatgaaacgtgctggacagaaatagagtgctttgggttatcctccaggttgttcctttggcatggacaagtcagcttacagcttggtgcatttgtttgtcatgcacaactaggaggagacctacacagcaaattgctttgaggtaactcagcactaagatgtcctaataaggaattagttaagcagtataagcacttggtagcagaaatactttattgaaaacagcattaattttcagtgtttttagtgttacacrttaaaaaatacaattctgatagctaggaatcatatggcctcgcatacatagacacacataagcaaaaaaagtggatttttgcttctgagacaccaaacactgcacaaacaagttttctcccccactgccctcggtgcccatagggagggcatgccctacctcctgcacagccagctgctcagggactgccctcatccactcccgcagctcagtcagctcctcaatattgtttggttcttcatgtatcctcaagctgacagctctgtatacaccacagatctgcaggacacagcaaagamg

SEQ ID NO: 58016 - DNA, 354 bp, Chicken  19866894314485_2
rttaaaaaatacaattctgatagctaggaatcatatggcctcgcatacatagacacacataagcaaaaaaagtggatttttgcttctgagacaccaaacactgcacaaacaagttttctcccccactgccctcggtgcccatagggagggcatgccctacctcctgcacagccagctgctcagggactgccctcatccactcccgcagctcagtcagctcctcaatattgtttggttcttcatgtatcctcaagctgacagctctgtatacaccacagatctgcaggacacagcaaagamgacatcacccctacaggtgtgcagcttcagcaatggggctagcaaacctcatct

SEQ ID NO: 58017 - DNA, 599 bp, Chicken  19866894314489_1
  misc_feature (1)..(160): n is any nucleotide
nnnnnnnnnnnnnnnnnnnnnnnnnnnnnnnnnnnnnnnnnnnnnnnnnnnnnnnnnnnnnnnnnnnnnnnnnnnnnnnnnnnnnnnnnnnnnnnnnnnnnnnnnnnnnnnnnnnnnnnnnnnnnnnnnnnnnnnnnnnnnnnnnnnnnnnnnnnnnnnnacaccaggggcatggcactgcttctggtatgggacctcaggccagagctgcagaggcagtgggctgtgctggcactgcttgtgacacctcttccattaattaaatcaagtagtgcagtcatgcaagaaatcataccacasataagctcagaacaagcagaaatctttacaagagaaaagttaaattttattctgacatacttgaaggtaccttggttcatttttctgagctacaccgtacttggccaccatctggattctgccattccaatgctcagagaaaacagtagaaggttggtatttaggaggaatctgataacataatgattcctggcaagcactgcattcatgaactgggctgtcctggctcagcacactttcctagatccagaccaaagcaatgacaacttgaagggacttttgtcgttgtttttactgac

SEQ ID NO: 58018 - DNA, 600 bp, Chicken  19866894314492_1
gtcctaattttgatacaacttgagtatctttgaagactgcaaaggtgctttttctacacagcctttaattacagtctgtgaactgcaacttaagggggacaaagctgagactaagtgaatgggacaagcgagctgaggacaatgcaacagttcacaggctggccctcaatcctgagctgaaagctgcagctactgactgtctgactgctgctctgctgttatcctttcttgatatttccagtatgatacatctttggagagtgttaagtccagatttaagactgtccatctccagatttraragataaagggcaagaaagagtgacaggaaaaaaagtgaattatggctttctgtggttgaaaagatggcaggggacacacamattttcacaatttgtgaaattcacacaaggactagtcatctgtgtccaagcagtagtctatgttagtacaggttattgctaacactgtaccgggactgcttttgagttaacaaccaattctatctttgtgctagaaacaaaggagcagccaatttccctctggtgcatggttcaggcagcccrtaggaagaaaaggagcatgtaacattcagaacag

SEQ ID NO: 58019 - DNA, 600 bp, Chicken  19866894314492_2
cctaattttgatacaacttgagtatctttgaagactgcaaaggtgctttttctacacagcctttaattacagtctgtgaactgcaacttaagggggacaaagctgagactaagtgaatgggacaagcgagctgaggacaatgcaacagttcacaggctggccctcaatcctgagctgaaagctgcagctactgactgtctgactgctgctctgctgttatcctttcttgatatttccagtatgatacatctttggagagtgttaagtccagatttaagactgtccatctccagatttraragataaagggcaagaaagagtgacaggaaaaaaagtgaattatggctttctgtggttgaaaagatggcaggggacacacamattttcacaatttgtgaaattcacacaaggactagtcatctgtgtccaagcagtagtctatgttagtacaggttattgctaacactgtaccgggactgcttttgagttaacaaccaattctatctttgtgctagaaacaaaggagcagccaatttccctctggtgcatggttcaggcagcccrtaggaagaaaaggagcatgtaacattcagaacaggg

SEQ ID NO: 58020 - DNA, 600 bp, Chicken  19866894314492_3
tgcaacttaagggggacaaagctgagactaagtgaatgggacaagcgagctgaggacaatgcaacagttcacaggctggccctcaatcctgagctgaaagctgcagctactgactgtctgactgctgctctgctgttatcctttcttgatatttccagtatgatacatctttggagagtgttaagtccagatttaagactgtccatctccagatttraragataaagggcaagaaagagtgacaggaaaaaaagtgaattatggctttctgtggttgaaaagatggcaggggacacacamattttcacaatttgtgaaattcacacaaggactagtcatctgtgtccaagcagtagtctatgttagtacaggttattgctaacactgtaccgggactgcttttgagttaacaaccaattctatctttgtgctagaaacaaaggagcagccaatttccctctggtgcatggttcaggcagcccrtaggaagaaaaggagcatgtaacattcagaacagggggaatcttcttttgaaccgctgccttcaccagtcctggaaattccagcttgcatgctcttgggtttccctcttgtgcatat

SEQ ID NO: 58021 - DNA, 479 bp, Chicken  19866894314492_4
agtccagatttaagactgtccatctccagatttraragataaagggcaagaaagagtgacaggaaaaaaagtgaattatggctttctgtggttgaaaagatggcaggggacacacamattttcacaatttgtgaaattcacacaaggactagtcatctgtgtccaagcagtagtctatgttagtacaggttattgctaacactgtaccgggactgcttttgagttaacaaccaattctatctttgtgctagaaacaaaggagcagccaatttccctctggtgcatggttcaggcagcccrtaggaagaaaaggagcatgtaacattcagaacagggggaatcttcttttgaaccgctgccttcaccagtcctggaaattccagcttgcatgctcttgggtttccctcttgtgcatatggaatgaagggactactctcagtaggtgagggtgtcagttctgacattacaacatattcaga

SEQ ID NO: 58022 - DNA, 581 bp, Chicken  19866894314493_1
ggctgcacgtagcacagtcctgggatgggaggaagccccgtgcggggccgtgcgcctgccctcctctgaaggagcacgattctctttgtagcccaaggtcagagttgcccccaaactaaactctgatagatctgcctgcctttgattttcccccattgctggctgaggaagtgctgaatgtatccagccccgtcctttctatctatattctgtgttcctattgtgcccatactactctacatctattacttagagtgctctggctctgcaaaacaggataagagacaggagggaggcacrgggctgtgcagcaggtaggtagagacgcacagcttaaagaaggtattcacagaatcagagaatcaggaaggctggagaagacctttaagatcatccagtccaaccattcgcctactgccagtattgcccactaatccatgtctctcagtaccacatctatcctttccttaaacacttccagtgatggtggctccaccactattacttatgtattaatgcagttgggcccaatgtattcacattttccaggaaaagccttcagcacacaataggaaatgcct

SEQ ID NO: 58023 - DNA, 599 bp, Chicken  19866894314495_1
  misc_feature (1)..(103): n is any nucleotide
nnnnnnnnnnnnnnnnnnnnnnnnnnnnnnnnnnnnnnnnnnnnnnnnnnnnnnnnnnnnnnnnnnnnnnnnnnnnnnnnnnnnnnnnnnnnnnnnnnnnnnnaccttgtttcttggcttggatgcttaggagcttcttattggtggccttaaatacatatgataagacttttttagactaatttttcatgtgagaaggaaaacctgacactggtgccctctgaaaatttcttgttctgttcttttggtttgtaggtggttttttttctgtgccattgatgttttgggtttttttttttkaaggtctgtttaaagaattttgtgatgttttttgtattagaatcatagaatcatcaaggttggaaaagatcaccaagtccaagcattagcccatcactaccatggccattaaccatgtcactcagtgccatgaacacrtaccttcatagcacaagatttcttttaatttagtcttagtgctatcttctatttttctgtttgggaaagagggagctccataggtgaaatcagatttctgcctgcaattgcatctctactgtgattatatgtgtaggaaagaagaggagagaaaatttagg

SEQ ID NO: 58024 - DNA, 600 bp, Chicken  19866894314495_2
tattggtggccttaaatacatatgataagacttttttagactaatttttcatgtgagaaggaaaacctgacactggtgccctctgaaaatttcttgttctgttcttttggtttgtaggtggttttttttctgtgccattgatgttttgggtttttttttttkaaggtctgtttaaagaattttgtgatgttttttgtattagaatcatagaatcatcaaggttggaaaagatcaccaagtccaagcattagcccatcactaccatggccattaaccatgtcactcagtgccatgaacacrtaccttcatagcacaagatttcttttaatttagtcttagtgctatcttctatttttctgtttgggaaagagggagctccataggtgaaatcagatttctgcctgcaattgcatctctactgtgattatatgtgtaggaaagaagaggagagaaaatttaggctcttgcaatgttatgggagaaggaaatagaaaaaatgttaatgggtacaaaaacaaatttgtgcaggtttgctataacttagagtaaaacatttcctggatatgaatcttattatctagatgaagagtgttctaagga

SEQ ID NO: 58025 - DNA, 600 bp, Chicken  19866894314495_3
cttctatttttctgtttgggaaagagggagctccataggtgaaatcagatttctgcctgcaattgcatctctactgtgattatatgtgtaggaaagaagaggagagaaaatttaggctcttgcaatgttatgggagaaggaaatagaaaaaatgttaatgggtacaaaaacaaatttgtgcaggtttgctataacttagagtaaaacatttcctggatatgaatcttattatctagatgaagagtgttctaaggaaatatcatttcagtcctgagtcccagtttgacttccactaagtcratagaaaattgtacawtgtcttcaattgatgtgagatgcagccctatgaatgatgctttcttttcacagggggatgttgctttgctatttgtactcttcatttcttaggaatgcctctsataggtactctttctttcatttctcttgtcagaaacatttgattattgatctcttggtgctagttaagtgttttgtgacrttaaacatgtaaggttttcaggcactttctggatacgtgtatgccatgttggatagcgtttacaatagaaagctatggatgagtcaagtaacttgtttggt

SEQ ID NO: 58026 - DNA, 600 bp, Chicken  19866894314495_4
tgggaaagagggagctccataggtgaaatcagatttctgcctgcaattgcatctctactgtgattatatgtgtaggaaagaagaggagagaaaatttaggctcttgcaatgttatgggagaaggaaatagaaaaaatgttaatgggtacaaaaacaaatttgtgcaggtttgctataacttagagtaaaacatttcctggatatgaatcttattatctagatgaagagtgttctaaggaaatatcatttcagtcctgagtcccagtttgacttccactaagtcratagaaaattgtacawtgtcttcaattgatgtgagatgcagccctatgaatgatgctttcttttcacagggggatgttgctttgctatttgtactcttcatttcttaggaatgcctctsataggtactctttctttcatttctcttgtcagaaacatttgattattgatctcttggtgctagttaagtgttttgtgacrttaaacatgtaaggttttcaggcactttctggatacgtgtatgccatgttggatagcgtttacaatagaaagctatggatgagtcaagtaacttgtttggtaattaaattcgcaggt

SEQ ID NO: 58027 - DNA, 600 bp, Chicken  19866894314495_5
ttgcaatgttatgggagaaggaaatagaaaaaatgttaatgggtacaaaaacaaatttgtgcaggtttgctataacttagagtaaaacatttcctggatatgaatcttattatctagatgaagagtgttctaaggaaatatcatttcagtcctgagtcccagtttgacttccactaagtcratagaaaattgtacawtgtcttcaattgatgtgagatgcagccctatgaatgatgctttcttttcacagggggatgttgctttgctatttgtactcttcatttcttaggaatgcctctsataggtactctttctttcatttctcttgtcagaaacatttgattattgatctcttggtgctagttaagtgttttgtgacrttaaacatgtaaggttttcaggcactttctggatacgtgtatgccatgttggatagcgtttacaatagaaagctatggatgagtcaagtaacttgtttggtaattaaattcgcaggtagttttgctacctgctatttggacacgatttcaatattttgtggtaaagaatgccactaacagtgaggcatgacaaacagaggagtagtgtgagatctttcct

SEQ ID NO: 58028 - DNA, 600 bp, Chicken  19866894314495_6
agtaaaacatttcctggatatgaatcttattatctagatgaagagtgttctaaggaaatatcatttcagtcctgagtcccagtttgacttccactaagtcratagaaaattgtacawtgtcttcaattgatgtgagatgcagccctatgaatgatgctttcttttcacagggggatgttgctttgctatttgtactcttcatttcttaggaatgcctctsataggtactctttctttcatttctcttgtcagaaacatttgattattgatctcttggtgctagttaagtgttttgtgacrttaaacatgtaaggttttcaggcactttctggatacgtgtatgccatgttggatagcgtttacaatagaaagctatggatgagtcaagtaacttgtttggtaattaaattcgcaggtagttttgctacctgctatttggacacgatttcaatattttgtggtaaagaatgccactaacagtgaggcatgacaaacagaggagtagtgtgagatctttcctccagtttcctgatggctccccttcaacattttgattcactcacattcagagactgagatgaaaaggtttgacatctactg

SEQ ID NO: 58029 - DNA, 599 bp, Chicken  19866894314499_1
  misc_feature (1)..(17): n is any nucleotide
nnnnnnnnnnnnnnnnnctaaaattgctggtctctgctatttaacaaaactctgttttgttaatgaaaagcttagacaagcattctcatcacaggatttcatggtagtaagccaagaaaggagaaaaacaatttgctgacttgacaaagaagtctaatattttgagaataattgcttgcctctgaatattttacaaaatggtgaaattaaaggacaatataatttcttttactgcttttctatgtgtttcatatgccttcataaacataagagcttttaatgttttctttcttttgggayaacttcttttttagagcttatatttttgcttgattcaaactaaaagcacagttatctgaatttaacaagtacattttgggatacaagacccttctaggtgataaagtcaagaaactcctttatcacagagaattatacaaaatgattattcatctatstttagaggtaccaggtacagattaacctaatagtttttaaggaattatcttttgaaaatagcattctgtgaaaagcaggtttctcatacttggaatttgtctatattaacttagatttaattaaaacaacataaaaacaca

SEQ ID NO: 58030 - DNA, 600 bp, Chicken  19866894314499_2
attttgagaataattgcttgcctctgaatattttacaaaatggtgaaattaaaggacaatataatttcttttactgcttttctatgtgtttcatatgccttcataaacataagagcttttaatgttttctttcttttgggayaacttcttttttagagcttatatttttgcttgattcaaactaaaagcacagttatctgaatttaacaagtacattttgggatacaagacccttctaggtgataaagtcaagaaactcctttatcacagagaattatacaaaatgattattcatctatstttagaggtaccaggtacagattaacctaatagtttttaaggaattatcttttgaaaatagcattctgtgaaaagcaggtttctcatacttggaatttgtctatattaacttagatttaattaaaacaacataaaaacacatctttctataagtttttaactgggaaatgaaaagttaggaagattaatttttctcattacagtgtttgagagagcatagttcttggacttaaactgcaccaacttttttgaaggtatagaggataatttctgggtaggtaggcacaggagaaaaaaaac

SEQ ID NO: 58031 - DNA, 599 bp, Chicken  19866894314507_1
  misc_feature (1)..(91): n is any nucleotide
nnnnnnnnnnnnnnnnnnnnnnnnnnnnnnnnnnnnnnnnnnnnnnnnnnnnnnnnnnnnnnnnnnnnnnnnnnnnnnnnnnnnnnnnnnnaagagtttccttaaagaaaagttgtccatgctagttgtgtatccctgggctttaccctggaacccagcagaaaaagatgaagcactgtctttgtgataaagctgcaagtatggcacttcagataccctacagtgccctcattcttcatttcaataaatagtacttccaaggaaactcagtagcactgcataccattaaacaaagcaccrctgcctttgttctttgctttttttactattattactgcagtgactgcaatcctagtgattacaacattctcaaaggcagattagctttaacccaactaacggcaggtctgccagatgctaaagactgattttacagatgatgacagaaatcacttcctccayaagcttcgaactccagactgagcagcactcacctctctcaaccaccacctggaggttggttgtctcatcgttgaaccaccctgggatctccacacggcagcagtacgtcccactgtctgtttcctgggcattcagga

SEQ ID NO: 58032 - DNA, 600 bp, Chicken  19866894314507_2
aaaagatgaagcactgtctttgtgataaagctgcaagtatggcacttcagataccctacagtgccctcattcttcatttcaataaatagtacttccaaggaaactcagtagcactgcataccattaaacaaagcaccrctgcctttgttctttgctttttttactattattactgcagtgactgcaatcctagtgattacaacattctcaaaggcagattagctttaacccaactaacggcaggtctgccagatgctaaagactgattttacagatgatgacagaaatcacttcctccayaagcttcgaactccagactgagcagcactcacctctctcaaccaccacctggaggttggttgtctcatcgttgaaccaccctgggatctccacacggcagcagtacgtcccactgtctgtttcctgggcattcaggatggtgagggacacgttgcccttcagcaggtcccctttcagcacatacttcgtgtgatgcctctctgtcaccttccgcccatctgtccagataatgggttgagaacatttggaagcggggcaggcgtcccggccccagcacattgaggtgatgtcgtattctgt

SEQ ID NO: 58033 - DNA, 600 bp, Chicken  19866894314512_1
acaacttgaagagtgcataacacttgacatagttcaggaagtgagttttcttggctgcgtgccgaagcaaatccagccccactgcctttgcaaacacacacttccttggaagcagcaatgcggtgtggccgccaagccagcctcagccaaactcctgctgctgtataaacgcaaggcgtgataaatccctgcactttgtaattcatataacaacagggcaaagctgggaaagtctactcccctaatgcatgcttctctactgatggagaatgggaaagtaagagcagagcacgctgtctygtgttgttcaaagctcctgattcctgacctgcagctctaaagccrgttttgcattgggatttatttcctctgaagcctggcgagcccctgtaggccttccccaggtttctttctacgtgtgctgctaatggagctggcaagcctcccctggtaatgagagatcgcacctcagcgggcttatcrgaaatgaaggttgttaataaataaagcctgggtctttaagctcgtgttaacatcaatcagattaatataaaagggaaaaaacagtgtttccaatggggttttccttcccccccacct

SEQ ID NO: 58034 - DNA, 600 bp, Chicken  19866894314512_2
ttttcttggctgcgtgccgaagcaaatccagccccactgcctttgcaaacacacacttccttggaagcagcaatgcggtgtggccgccaagccagcctcagccaaactcctgctgctgtataaacgcaaggcgtgataaatccctgcactttgtaattcatataacaacagggcaaagctgggaaagtctactcccctaatgcatgcttctctactgatggagaatgggaaagtaagagcagagcacgctgtctygtgttgttcaaagctcctgattcctgacctgcagctctaaagccrgttttgcattgggatttatttcctctgaagcctggcgagcccctgtaggccttccccaggtttctttctacgtgtgctgctaatggagctggcaagcctcccctggtaatgagagatcgcacctcagcgggcttatcrgaaatgaaggttgttaataaataaagcctgggtctttaagctcgtgttaacatcaatcagattaatataaaagggaaaaaacagtgtttccaatggggttttccttcccccccacctctccctgctcagttggggctggacctggtgatgcagggaggcagc

SEQ ID NO: 58035 - DNA, 600 bp, Chicken  19866894314512_3
aatccctgcactttgtaattcatataacaacagggcaaagctgggaaagtctactcccctaatgcatgcttctctactgatggagaatgggaaagtaagagcagagcacgctgtctygtgttgttcaaagctcctgattcctgacctgcagctctaaagccrgttttgcattgggatttatttcctctgaagcctggcgagcccctgtaggccttccccaggtttctttctacgtgtgctgctaatggagctggcaagcctcccctggtaatgagagatcgcacctcagcgggcttatcrgaaatgaaggttgttaataaataaagcctgggtctttaagctcgtgttaacatcaatcagattaatataaaagggaaaaaacagtgtttccaatggggttttccttcccccccacctctccctgctcagttggggctggacctggtgatgcagggaggcagctcagtgctgcaaggatggagacatgcagggaaatatgggctgtgggctcagcactggggcagctccacctttttcttccaaatcttccaagattggtgggctcaacagcctcaggaggcagtgttgggggctggtggc

SEQ ID NO: 58036 - DNA, 600 bp, Chicken  19866894314515_1
cctttcattccctttcaggggagcaggtagtgctgttgtaagtgtacagtgataacttttcctccgtgacatccagctcttaaacctcaggctttcaccttcccggagctgacctctttctgttctgtttccctcaggttctataagcacctggaccgtggctacaattcgtgctcaagagcagatttgtacttcatgcctctggcaggatccaaactggccaagaagagagaagaggccattgaaaaggccaaaagggaagcggagcagaaagccagagaagagagggagagagagaargaaaaagagaaggaaagagagagggaacgtgagcgtgaaagagaagcagaaagagctgcggtaggtttatttgtagctaagagctgcttaagggggctggcgtggatagtgactgcagagtgcacgtccccacaggtgcccgaatacacgtgcatccaygtctttgtggatgtgggagctgtgtgttaagtgaaggccgaccagctccgagcgttcccagcctgcctgtcactttctactctaaaggaagtggagagtttctgttcccggcctctaattgtgtgtgggaagccagtgcag

SEQ ID NO: 58037 - DNA, 600 bp, Chicken  19866894314515_2
ggctacaattcgtgctcaagagcagatttgtacttcatgcctctggcaggatccaaactggccaagaagagagaagaggccattgaaaaggccaaaagggaagcggagcagaaagccagagaagagagggagagagagaargaaaaagagaaggaaagagagagggaacgtgagcgtgaaagagaagcagaaagagctgcggtaggtttatttgtagctaagagctgcttaagggggctggcgtggatagtgactgcagagtgcacgtccccacaggtgcccgaatacacgtgcatccaygtctttgtggatgtgggagctgtgtgttaagtgaaggccgaccagctccgagcgttcccagcctgcctgtcactttctactctaaaggaagtggagagtttctgttcccggcctctaattgtgtgtgggaagccagtgcagctggggataactgggccaagtgtttacattgcttgcagtagaagctcagatatgggaaacactctgtaggtgtagatacaacgaattgctttgtgtaacttccactgcctttgcagtgcaggcacaaagtctctgtctgctgagaaagggtcgtgaagg

SEQ ID NO: 58038 - DNA, 600 bp, Chicken  19866894314518_1
gggtcctcatttgcatggagatgggagatccaagggaaggttgtttttcccattgtgcttatgcatttttctgtcgaaatgtctccgagtggaagtggaaataatgtagggaataaaagagaacaaaggctcagtgcaggaacgtgatgacaatgcagcgaggcgctttatgaccagaactgctcaaacagctggagattgtattacactgtttatcatgtttaaacccgtgtcaaaatgacagatattgtggaagattttgtgtaagattgtgaactaggtattatgtgcaaaagtcarccatatgttataatattcttctggggacaagaaatctaactgagactacagggaagggtgagttyagtaaagaagtcatcttctcctgagacagaggtgatagtgtgggctgcatacagaatacttgtgtggtttgcagagtgccatgaatcacacaatttatttgactttttttgccttgctttttatctgtgtgtacaacatatttgggtttgaggtttttccctatatatataaaaataataattaaaaaaaaaataacagaaacaattccttcccatatacattttcttcagtgtg

SEQ ID NO: 58039 - DNA, 600 bp, Chicken  19866894314518_2
tttttctgtcgaaatgtctccgagtggaagtggaaataatgtagggaataaaagagaacaaaggctcagtgcaggaacgtgatgacaatgcagcgaggcgctttatgaccagaactgctcaaacagctggagattgtattacactgtttatcatgtttaaacccgtgtcaaaatgacagatattgtggaagattttgtgtaagattgtgaactaggtattatgtgcaaaagtcarccatatgttataatattcttctggggacaagaaatctaactgagactacagggaagggtgagttyagtaaagaagtcatcttctcctgagacagaggtgatagtgtgggctgcatacagaatacttgtgtggtttgcagagtgccatgaatcacacaatttatttgactttttttgccttgctttttatctgtgtgtacaacatatttgggtttgaggtttttccctatatatataaaaataataattaaaaaaaaaataacagaaacaattccttcccatatacattttcttcagtgtgtgatattaagatatccaaaattaatgtacctgtggctggccacatgggagcatgtcatttctgtt

SEQ ID NO: 58040 - DNA, 600 bp, Chicken  19866894314519_1
gtcatcccctatggttttacgaaacatgttttctaagtaattctcactcctttataaaagatcatgattttgtgttgaacaaaattatcagagacagttcatggagtcctacaaaaccaatggaagcattcacaagatgagtttgcttcaggcccattcaagcgctcttttgcacaggttttttttaaacatgaactaagtaaaaagggaggcagacttcacacagcccatgcacatatcatacaattagtcacacatttgagtaaatcatcaagttccctaacagtgatcatacaaatrttragaaaaaaaaaatgactatcgcactcttattacaaaacttscttgcctcacagaaatagaatgaaacacagataactaaataatgacaaaggatgaatgtagatgattcatgatcaggttataataacaaacatatctaacaggaaggagcataaagacttgcatcatctgtgttaaaatatgagttgagttttcaagctagcaagcgagcctctagtgggcctagcagctttaggcagtacttctcagtcacagaatcccagagcaagcgatggtggaagggacctcaggaggtct

SEQ ID NO: 58041 - DNA, 600 bp, Chicken  19866894314519_2
atcccctatggttttacgaaacatgttttctaagtaattctcactcctttataaaagatcatgattttgtgttgaacaaaattatcagagacagttcatggagtcctacaaaaccaatggaagcattcacaagatgagtttgcttcaggcccattcaagcgctcttttgcacaggttttttttaaacatgaactaagtaaaaagggaggcagacttcacacagcccatgcacatatcatacaattagtcacacatttgagtaaatcatcaagttccctaacagtgatcatacaaatrttragaaaaaaaaaatgactatcgcactcttattacaaaacttscttgcctcacagaaatagaatgaaacacagataactaaataatgacaaaggatgaatgtagatgattcatgatcaggttataataacaaacatatctaacaggaaggagcataaagacttgcatcatctgtgttaaaatatgagttgagttttcaagctagcaagcgagcctctagtgggcctagcagctttaggcagtacttctcagtcacagaatcccagagcaagcgatggtggaagggacctcaggaggtctcca

SEQ ID NO: 58042 - DNA, 591 bp, Chicken  19866894314519_3
cactcctttataaaagatcatgattttgtgttgaacaaaattatcagagacagttcatggagtcctacaaaaccaatggaagcattcacaagatgagtttgcttcaggcccattcaagcgctcttttgcacaggttttttttaaacatgaactaagtaaaaagggaggcagacttcacacagcccatgcacatatcatacaattagtcacacatttgagtaaatcatcaagttccctaacagtgatcatacaaatrttragaaaaaaaaaatgactatcgcactcttattacaaaacttscttgcctcacagaaatagaatgaaacacagataactaaataatgacaaaggatgaatgtagatgattcatgatcaggttataataacaaacatatctaacaggaaggagcataaagacttgcatcatctgtgttaaaatatgagttgagttttcaagctagcaagcgagcctctagtgggcctagcagctttaggcagtacttctcagtcacagaatcccagagcaagcgatggtggaagggacctcaggaggtctccagcccagtgccctgctcaaagcaggctcagcta

SEQ ID NO: 58043 - DNA, 600 bp, Chicken  19866894314520_1
taaagtcttatttatagatattctctgcacaataagacacgattcattacagtatttcaacgtgatcaaagatatctgccaaacgaaatggcaacctttctgtttccccctttacaggaaataagtctatgcatacaaatgcatgctttccacgtatcatatcacattctatgcgcctactacctctgataatacacttgactcccagcaattaattaaactattttcactgttgctttgcctaaacgcacccacaagctacagctctgaggagagaggacacgttatgtgggtaaactrcaagcaagagcaggccaaatccctctgcagcttctgaagcaatggttaaatgccactcaagggcaactcacagcttgctgatgctcagctccatgtccaatgttctctagtgcagacgcgacagatagcttgaagtgctttcggtcactttggagcagcactccagagtaaatcataaactcataacaagaagatgggagctacattttttcgttatatgtggtgttaataaaagatggccaagtactcttacgctccctctgaacgactacttcgatccaggctgaactacaaaccgag

SEQ ID NO: 58044 - DNA, 600 bp, Chicken  19866894314529_1
gtccttgcctttggccttgccactctaatggtgcccctgttctaagaaccagttgcaaaatggaatttgtatccagtaacaaacagagtgtttcagaaacacaagctggtaaagctcagtgacagaccaggagaatcacaccagcaagaaatgagccaaaaaggtaaataatggatttattcagctatgtgaaggaatacatctggggtctgagatgtagttaaaaactcagatgaattctgcaacatattttcattctacagcagttttgaataaattcaaatttaagttttggaaaawaaaacatgcagaagagtcacacacacagaggaaatatttacagcgtaattcattttgatactgaactgaaggcagatctcagcatgtttttcaatattatactgcatccagattttccattgtcagtgtattgcaaaatttcatattgacaacacaggcctgcactgcaggagttgtcaggacaaagttggaggttttggcaggtggaggagggatacttgaggcttttggcatccaggaagggatgaaatgttgctttggctgtttggcacctatgagctagctgaggcttttggcatc

SEQ ID NO: 58045 - DNA, 599 bp, Chicken  19866894314531_1
  misc_feature (1)..(47): n is any nucleotide
nnnnnnnnnnnnnnnnnnnnnnnnnnnnnnnnnnnnnnnnnnnnnnnttgctgtgggatgagaaggttcctaggcatctgcccagggtcgctcaggaccttgtaagattggcccctacagagaactgtgctgatgcgggggttgttgggccgatgcagcagtgtccagaggtgtcaactctttggctctgggacagaaagcagggtcgagctgatactgtctggtagatctccctgggtcatcctaacagcactttattgcttctaccagataacctaggagcctgctttctttcttccrtcckctcagaaagcaagtgtcaaggctgcttcccctccagtgacaatgcctggcacagccttgcagaggggtccagctgagcggagcgggctgcaagccaggtatttcctaaataaacacatacaacaggagcagagaactcaccaaccaacactgctgctgttcaggcattttttttcccttggagcaggtggtgggggctctggtcaatgttttcttggtcatgccggatgagcagcacaactttgggtgggaaccagcccacagacatccagcgtgcttagatgctcacaaggctt

SEQ ID NO: 58046 - DNA, 599 bp, Chicken  19866894314531_2
  misc_feature (1)..(43): n is any nucleotide
nnnnnnnnnnnnnnnnnnnnnnnnnnnnnnnnnnnnnnnnnnnttgctgtgggatgagaaggttcctaggcatctgcccagggtcgctcaggaccttgtaagattggcccctacagagaactgtgctgatgcgggggttgttgggccgatgcagcagtgtccagaggtgtcaactctttggctctgggacagaaagcagggtcgagctgatactgtctggtagatctccctgggtcatcctaacagcactttattgcttctaccagataacctaggagcctgctttctttcttccrtcckctcagaaagcaagtgtcaaggctgcttcccctccagtgacaatgcctggcacagccttgcagaggggtccagctgagcggagcgggctgcaagccaggtatttcctaaataaacacatacaacaggagcagagaactcaccaaccaacactgctgctgttcaggcattttttttcccttggagcaggtggtgggggctctggtcaatgttttcttggtcatgccggatgagcagcacaactttgggtgggaaccagcccacagacatccagcgtgcttagatgctcacaaggcttagat

SEQ ID NO: 58047 - DNA, 600 bp, Chicken  19866894314531_3
caactttgggtgggaaccagcccacagacatccagcgtgcttagatgctcacaaggcttagattaattaaataggcattgctgtagcagctgtttcaaatagcttcgcaccagtgtggcttccagtgcctcggtttttaatagatgactatcacatgaaggtttcacattatcatttagttatttggagtgttatccagtgcttttcagtatttctgggaatttcatgttaatatgctctctggtgctctctaaaagtcacagagctcttctcacagtatcagaagcactgcacagaacrgcttgcaactgctaattaaaaaaatccaggatgacaggcaacaaggtctgctctcatgggccttgtgtataggcgaggaagcctccgagttcatgaatggttcatttatactgaactttaacttatctgcttctgagtgctcacagtctgctaaaaatgttggataaatttgcactggatacccctcgcctaaactgattatcagtatcagatccaaaaataatttaattcctctaaacattacctgttgcttcctgttacacggcacaatagctgattgtctgcctccgttgtgccacg

SEQ ID NO: 58048 - DNA, 600 bp, Chicken  19866894314537_1
tgggcatttctggttctgtgatcctcttttgtactttcagcacagatcacacactacgcaaacttatttttaatgcaatctgaccttctccacgctcgcagcagataatccccatgcactcacaggccttaccctgcaatgttctgtatggagacactttttgaaagcgccgtaggctgttgtgatctcctgttattgaatattgaggtgacggtgttctcatcaggagcgagtattgcagagcgagggcgctccttgggttgtgagcctggaagggaagcaccagagaaaagtcagctygtgcagctgcattctgagctgcaattatgaaatcttaaagaaagcaggttctagaattcccttcctttttgctctagagttgcaactgggaaatatatctgcagctgttagacacagccccaactgcagagaagcctgagctttctgcctctcccttgacactcccgtgggactgttaaagcaggacctggtcaaagcaaagtccccatgctttgcccaagacaatctggaatttgtctcagatagtaaacttgagtgctggatgctcaaatactttaaaacaaaatttagacatcacgc

SEQ ID NO: 58049 - DNA, 599 bp, Chicken  19866894314543_1
  misc_feature (1)..(218): n is any nucleotide
nnnnnnnnnnnnnnnnnnnnnnnnnnnnnnnnnnnnnnnnnnnnnnnnnnnnnnnnnnnnnnnnnnnnnnnnnnnnnnnnnnnnnnnnnnnnnnnnnnnnnnnnnnnnnnnnnnnnnnnnnnnnnnnnnnnnnnnnnnnnnnnnnnnnnnnnnnnnnnnnnnnnnnnnnnnnnnnnnnnnnnnnnnnnnnnnnnnnnnnnnnnnnnnnnnnnnnnnnnactgggctgttgagagacccaaggaggagaaggacactgccccccactgccctgcttagcctggtgcatgatgacccatccmgagcagcacccggacctccacatggctgtcccactgtgtcctcagttccgttggaactcacttgaatttggtttgttaacacctctggccaagaaacttgggctgtcagcagtgagagaattccctggaagcacccagcaaatctctgggcaccaaggagragtccagttctatttccaaatagtatgaaactgaacagaatttgcagtatttgtttctactagttgataaatgttggctcatgtggattaggaactgcaccattcttatgcccagtttattcyacactgcagttagca

SEQ ID NO: 58050 - DNA, 599 bp, Chicken  19866894314543_2
  misc_feature (1)..(57): n is any nucleotide
nnnnnnnnnnnnnnnnnnnnnnnnnnnnnnnnnnnnnnnnnnnnnnnnnnnnnnnnnactgggctgttgagagacccaaggaggagaaggacactgccccccactgccctgcttagcctggtgcatgatgacccatccmgagcagcacccggacctccacatggctgtcccactgtgtcctcagttccgttggaactcacttgaatttggtttgttaacacctctggccaagaaacttgggctgtcagcagtgagagaattccctggaagcacccagcaaatctctgggcaccaaggagragtccagttctatttccaaatagtatgaaactgaacagaatttgcagtatttgtttctactagttgataaatgttggctcatgtggattaggaactgcaccattcttatgcccagtttattcyacactgcagttagcaatgcgtaacttaaagagccaaagctaaaaggcttcccatgaatgtctatagacagaaaaagaaacaagaaatgtcatgtattttaaaatattcatgccactggatttccattgcatagatctaggtactgaaacgcctcgtgccaatttctacatcccaaa

SEQ ID NO: 58051 - DNA, 600 bp, Chicken  19866894314543_3
catgatgacccatccmgagcagcacccggacctccacatggctgtcccactgtgtcctcagttccgttggaactcacttgaatttggtttgttaacacctctggccaagaaacttgggctgtcagcagtgagagaattccctggaagcacccagcaaatctctgggcaccaaggagragtccagttctatttccaaatagtatgaaactgaacagaatttgcagtatttgtttctactagttgataaatgttggctcatgtggattaggaactgcaccattcttatgcccagtttattcyacactgcagttagcaatgcgtaacttaaagagccaaagctaaaaggcttcccatgaatgtctatagacagaaaaagaaacaagaaatgtcatgtattttaaaatattcatgccactggatttccattgcatagatctaggtactgaaacgcctcgtgccaatttctacatcccaaaacgcacctcggctatttctgtggcttctgcatttaagagctggtccaagtttgcttttgtagcctctgtaagctataaaaaagtccacccctagtgaaatacgtatttaatttgtatttaacat

SEQ ID NO: 58052 - DNA, 600 bp, Chicken  19866894314544_1
gaagggagaaaagcaaaagaggattatgatcattgccaatgaatttggaacaatacgggattttgagatcttaagaaattcagcatgagtccaggttaaattcttggttgatctgagcagatgttctccttcctgtaaccactgcagcattaagcattgcacctatcatctgtaaaaggcaggactttaactattccagtagcaaggactgcttctctggagccaagaagctctgtcaccatctcagcactgggatattcaaaatgtttgggtagctcagatcgggagaatggcttgtgyatgatcctgagactgcttgtctcatctgggtaacaggcaaggcacaccatgactggtctttgaagcagttagaaggtgttcatgggcaagcagctggtccaggcttgccgcagtggtggagcatctcccagagagatggagtgaaacaggacagagactgaaacaccacaagtagtccaatggaatttttggtgggaagaagggggatttgttataggagaagcatgctaattattaagtgtactggagcagcactgaaacaaggagttttatccttgctttaagttgtctgccctaagg

SEQ ID NO: 58053 - DNA, 600 bp, Chicken  19866894314552_1
gagtacatccatccctttatttactgcctaggcagttagtacaacactagctcccaacaactgctttctgcagaaggattgctgtgcaactgcttgctgagggccttcaggatttctgatgtaaagattgccttagactgtagccccatagagctaacgctgtcaaagaactggtttataacttctcagtacaaactgcaagcaacataaacaggctaccaaattaaacattaactttagttttaagaaagacttacctgtgtaagtaagctatcaagtaccccagtttaaagcaatatyctaccaacctccattaacacctgcactgaaaatacagattttaaggtaattccaawtatttactgcatcttaccttccagtgycatctctaagaaaatgctaagtacttctaagggaaaacatgttctaaatttagaactataagaactaaaagcaatcagagtaacagatttttttcctgttccatggcataactctcagggtgaaaaagccaaaatctgatcacacaaacccaagctgcagacatgtattctagtaagaagtccccttttcatctcctcagcaaccaatctgcacagg

SEQ ID NO: 58054 - DNA, 600 bp, Chicken  19866894314552_2
acaactgctttctgcagaaggattgctgtgcaactgcttgctgagggccttcaggatttctgatgtaaagattgccttagactgtagccccatagagctaacgctgtcaaagaactggtttataacttctcagtacaaactgcaagcaacataaacaggctaccaaattaaacattaactttagttttaagaaagacttacctgtgtaagtaagctatcaagtaccccagtttaaagcaatatyctaccaacctccattaacacctgcactgaaaatacagattttaaggtaattccaawtatttactgcatcttaccttccagtgycatctctaagaaaatgctaagtacttctaagggaaaacatgttctaaatttagaactataagaactaaaagcaatcagagtaacagatttttttcctgttccatggcataactctcagggtgaaaaagccaaaatctgatcacacaaacccaagctgcagacatgtattctagtaagaagtccccttttcatctcctcagcaaccaatctgcacaggtcacgttaactacctttactttttgagacataaaaacatactgaactccataacac

SEQ ID NO: 58055 - DNA, 600 bp, Chicken  19866894314552_3
gtgcaactgcttgctgagggccttcaggatttctgatgtaaagattgccttagactgtagccccatagagctaacgctgtcaaagaactggtttataacttctcagtacaaactgcaagcaacataaacaggctaccaaattaaacattaactttagttttaagaaagacttacctgtgtaagtaagctatcaagtaccccagtttaaagcaatatyctaccaacctccattaacacctgcactgaaaatacagattttaaggtaattccaawtatttactgcatcttaccttccagtgycatctctaagaaaatgctaagtacttctaagggaaaacatgttctaaatttagaactataagaactaaaagcaatcagagtaacagatttttttcctgttccatggcataactctcagggtgaaaaagccaaaatctgatcacacaaacccaagctgcagacatgtattctagtaagaagtccccttttcatctcctcagcaaccaatctgcacaggtcacgttaactacctttactttttgagacataaaaacatactgaactccataacacctttcttcgttcttccttctttaaaga

SEQ ID NO: 58056 - DNA, 599 bp, Chicken  19866894314553_1
  misc_feature (1)..(192): n is any nucleotide
nnnnnnnnnnnnnnnnnnnnnnnnnnnnnnnnnnnnnnnnnnnnnnnnnnnnnnnnnnnnnnnnnnnnnnnnnnnnnnnnnnnnnnnnnnnnnnnnnnnnnnnnnnnnnnnnnnnnnnnnnnnnnnnnnnnnnnnnnnnnnnnnnnnnnnnnnnnnnnnnnnnnnnnnnnnnnnnnnnnnnnnnnnnnnnnnctcccaacaactgctttctgcagaaggattgctgtgcaactgcttgctgagggccttcaggatttctgatgtaaagattgccttagactgtagccccatagagctaaygctgtcaaagaactggtttataacttctcagtacaaactgcaagcgacataaacaggctaccaaattaaacattaactttagttttaagaaagacttacctgtgtaagtaagctatcaagtaccccagtttaaagcaatatcctaccaacctccattaacacctgcactgaaaatacagattttaaggtaattccaattatttactgcatcttaccttccagtgccayctctaagaaaatgctaagtacttctaagggaaaacatgttctaaatttagaactrtaagaactaaaagcaa

SEQ ID NO: 58057 - DNA, 600 bp, Chicken  19866894314553_2
caactgcttgctgagggccttcaggatttctgatgtaaagattgccttagactgtagccccatagagctaaygctgtcaaagaactggtttataacttctcagtacaaactgcaagcgacataaacaggctaccaaattaaacattaactttagttttaagaaagacttacctgtgtaagtaagctatcaagtaccccagtttaaagcaatatcctaccaacctccattaacacctgcactgaaaatacagattttaaggtaattccaattatttactgcatcttaccttccagtgccayctctaagaaaatgctaagtacttctaagggaaaacatgttctaaatttagaactrtaagaactaaaagcaatcagagtaacagattttttcctgttccatggcataactctcagggtgaaaaagccaaaatctgatcacacaaacccaagcwgcagacacgtattctagtaagaagtccccttttcatctcctcagcaaccaatctgcacaggtcacgttaactacctttactttttgagacataaaaacatactgaactccgtaacacctttcttcgttcttccttctgtaaagagaac

SEQ ID NO: 58058 - DNA, 600 bp, Chicken  19866894314553_3
agccccatagagctaaygctgtcaaagaactggtttataacttctcagtacaaactgcaagcgacataaacaggctaccaaattaaacattaactttagttttaagaaagacttacctgtgtaagtaagctatcaagtaccccagtttaaagcaatatcctaccaacctccattaacacctgcactgaaaatacagattttaaggtaattccaattatttactgcatcttaccttccagtgccayctctaagaaaatgctaagtacttctaagggaaaacatgttctaaatttagaactrtaagaactaaaagcaatcagagtaacagattttttcctgttccatggcataactctcagggtgaaaaagccaaaatctgatcacacaaacccaagcwgcagacacgtattctagtaagaagtccccttttcatctcctcagcaaccaatctgcacaggtcacgttaactacctttactttttgagacataaaaacatactgaactccgtaacacctttcttcgttcttccttctgtaaagagaaccacccagaagatgtctttgcttttttaactgacaaaacgtctcaagaacatttgt

SEQ ID NO: 58059 - DNA, 600 bp, Chicken  19866894314553_4
agttttaagaaagacttacctgtgtaagtaagctatcaagtaccccagtttaaagcaatatcctaccaacctccattaacacctgcactgaaaatacagattttaaggtaattccaattatttactgcatcttaccttccagtgccayctctaagaaaatgctaagtacttctaagggaaaacatgttctaaatttagaactrtaagaactaaaagcaatcagagtaacagattttttcctgttccatggcataactctcagggtgaaaaagccaaaatctgatcacacaaacccaagcwgcagacacgtattctagtaagaagtccccttttcatctcctcagcaaccaatctgcacaggtcacgttaactacctttactttttgagacataaaaacatactgaactccgtaacacctttcttcgttcttccttctgtaaagagaaccacccagaagatgtctttgcttttttaactgacaaaacgtctcaagaacatttgtaagggattggcctctctttcttcctttgtaaatgatgaccatttttaccatgcccaggatgttttatacaacgagagaacagattattttccatgga

SEQ ID NO: 58060 - DNA, 600 bp, Chicken  19866894314563_1
ttagttttaatcctttcttatttctggattctgaggattacattatattcatgtctctctcttctagttgtgtacatgaaggtataatagaagtgataatctataattaatgagtaattacgtgttttagctattggtcatgtgctgggtgtgggaacattagaatagtggagggttcatagcctacattacaacagaagttaggattaggatgttgcttatcaagatgacagtagtggctttggtgaaatcttgaggaaagagttttcattcatatttgtcaccatgcacatgatagaytgtgtcattctacgtcctaacacagctatgctgatgggctcatgtggctggtgtgtctttgtggctgggtagccaggccatgcaggtgtcattaaggtcccataaaatccagagtagctaaagggtgctggttttaagggtagtccaccagcagtctgtagtgctatttccctgtcaaacagaagacacagtgcttgtttccccttaataaagtcactcgagtaacacacacgtgacttctaggattaaaattcagctttagattaattgcaattgtattcattttaaattgaatgcact

SEQ ID NO: 58061 - DNA, 600 bp, Chicken  19866894314565_1
ctgacttcacaggatcacaggatcacagaattgtaggggctagaagggacctccagagatcattgagtccagtcctactgcaaagcaggcttccctacagcaggcaaaatgtgggagaggttagaaatcatggcatgtgtttcacctgatgcaaagtatattgatccactgctccacaaaacacgatggaaatgaaaacctgttagcgcgaaccctcatgttttcagtgttcagcgcttccctgttcctctaattcctgaagacaaaatgctgctgggcaataaacctggatgttcattraaatatggacagttctttctgccacttcagttatctaatagacggtgtttcccgctctcagtgaagtaaagcaactctgatcgccttaggtcctaaggttactccttatctttcagcagagatactgcatggtctcaaacagctgtggaggctatctgcatgaaaacggacagttggcacgatgttcctgccatgcaaaaatctgccagtaagtacactgcaaagacttttgatctcctgtaatgtagtgaatagcaaactgcttcactgtggggaaactactacagtttgtttcaggag

SEQ ID NO: 58062 - DNA, 599 bp, Chicken  19866894314571_1
  misc_feature (1)..(76): n is any nucleotide
nnnnnnnnnnnnnnnnnnnnnnnnnnnnnnnnnnnnnnnnnnnnnnnnnnnnnnnnnnnnnnnnnnnnnnnnnnnntggagagactttcagatgtaatttactttcaaacaattgggtttatcatgatcaaaataattcaagtgatattttttgatttgcaccaccttgataatgaaattggcgtggctgagctgcctcacaagcacagaaaagaaacacatttaaaaaaaaacaaaaaaagaagcatttttccagggttttttttaagtagactttccccctcttcatttcagtctgcwctttttcaaagggatgcaggtatgcattaagtttccagaaagattagccacacgtttgtgctaatgaaaagggtagttatatatgaaagcgtgtgtttaaggcatcttgtgtgcccccagccatcagcccgggcagcccatgcagtcgtagggttgtgcagccctgctgagtgggtaccaccagagggagaggtgcaggcgtggctttgtgctctcttaaacacagccttcaggcaatcactgaatccccacatgcagttgcctttggcccatgtcttcatgctcagtcccacagcaaa

SEQ ID NO: 58063 - DNA, 600 bp, Chicken  19866894314578_1
cgttgcccttctgagctgatgtagtcactcagtgccacaaatcgccagggaaagcattcatgtactcagtttgtagaaaggtatttgcccattagaggaaggggaagtgttgcaatcttttaaaaacagacatcttggaaaaatgagtaagttttaacaaaaatgtctagcttgcatcccattactcaatacactggccctagtaaagccttacccttccatactgtgctcttcaggcttttttgcactgtctgtgcaagaagatactcctcaagttacttttgcatttcattttataayactcttattagattgattggcttcatttgctcataccccattggtttttgttgtttttcagaaataaaagttctcaaagatgatcagatccttagggawtatttgatcaggcgtatctttgctcaagagacacttccaagagttaagaaccttatttcatggctagcttttttctttagcagctgtaaatggagatgcaaggatgtgaaaatcaagttgcaaagtgttggtcccaatactgcagttctgtagaaacttattaaacacctaaagctgtatgttaacttgaaagcaatttgt

SEQ ID NO: 58064 - DNA, 600 bp, Chicken  19866894314578_2
aggggaagtgttgcaatcttttaaaaacagacatcttggaaaaatgagtaagttttaacaaaaatgtctagcttgcatcccattactcaatacactggccctagtaaagccttacccttccatactgtgctcttcaggcttttttgcactgtctgtgcaagaagatactcctcaagttacttttgcatttcattttataayactcttattagattgattggcttcatttgctcataccccattggtttttgttgtttttcagaaataaaagttctcaaagatgatcagatccttagggawtatttgatcaggcgtatctttgctcaagagacacttccaagagttaagaaccttatttcatggctagcttttttctttagcagctgtaaatggagatgcaaggatgtgaaaatcaagttgcaaagtgttggtcccaatactgcagttctgtagaaacttattaaacacctaaagctgtatgttaacttgaaagcaatttgtccttccaggtagtaaacgtatttccctaaaatgagcccaggctgatgcagatgtgattaactgttattagacaatactgaaacaacacagcatcttaac

SEQ ID NO: 58065 - DNA, 600 bp, Chicken  19866894314578_3
ataatggattgaaatgttaaaatatttcatttttgtatcaaaataaagtgtatgctgtcaaatgactcacaatctgaaatgtgttgccatcacttttgtttagcgctgagaggagtatgaagtaatctcaaactactgcaatgcagcggtgggatcattgttccaaccgggttctgcaagtcagaaattaactttgattcaactcagcacctgagctttagttgtaatggctttgcaatggaatgatttgaccaagaaacaaaaggtctccatgtggaggcttgtcaatgtgtgagaatytacatgatgtggcagtgtcactggtcagtcccaggtttgggagcacatcctgttccttggttgtgatcacaaaatgaaagacgtgcaacctgatgttttcatgtagacttcaatgatctaatacagaatattgctgccttaatgttgtttggtgttgtaagtacaaacaccactgtgtttgcgatggggaaggtttggctttgcattgaatgtacgttgtagtctgagttacttcagactgactttttgctaggtggaattcaagcaggatttctacattaactgtattctttttatcac

SEQ ID NO: 58066 - DNA, 600 bp, Chicken  19866894314591_1
aggtggctaggtgagggccctgcttttcctgtgggatctgatttaagaatccagtaacgtctgctgaaaagcatgtctgcctcatttgccttcaacatctcttccaactggtgtgagttttgtatgacagcaatggccgggaaattagataagatcatcaaacatattttatataagccatcaataacaatgtgctgtcactaataaccaaagctagactcaaaagccatgcgtgttcattttgatcagcatgccattttgatggtgtaaagctttcttatttggctgtaatttaaaaawtaagaaaggaaggaagcttcttcatayaccacaagtattttcatgctttttattttccaaaaaacgttatggaagagaatagctccaaggtgaaattagctccaaggttatctacaagtgaaggtgaaacaggcaagaagacagccatgaaaaatgatgtgcatggccagagatagaattgcgttttgggaactgagattcatttacttgctgcataaatattgttatatttaggctcagatccttccttcagacactcttcaacaattgcctgtgaagtgaaaagactatgtttgtatt

SEQ ID NO: 58067 - DNA, 600 bp, Chicken  19866894314591_2
cctgtgggatctgatttaagaatccagtaacgtctgctgaaaagcatgtctgcctcatttgccttcaacatctcttccaactggtgtgagttttgtatgacagcaatggccgggaaattagataagatcatcaaacatattttatataagccatcaataacaatgtgctgtcactaataaccaaagctagactcaaaagccatgcgtgttcattttgatcagcatgccattttgatggtgtaaagctttcttatttggctgtaatttaaaaawtaagaaaggaaggaagcttcttcatayaccacaagtattttcatgctttttattttccaaaaaacgttatggaagagaatagctccaaggtgaaattagctccaaggttatctacaagtgaaggtgaaacaggcaagaagacagccatgaaaaatgatgtgcatggccagagatagaattgcgttttgggaactgagattcatttacttgctgcataaatattgttatatttaggctcagatccttccttcagacactcttcaacaattgcctgtgaagtgaaaagactatgtttgtatttgtgtttgtaggtaaaaatgaaaagac

SEQ ID NO: 58068 - DNA, 600 bp, Chicken  19866894314593_1
tccacccaggttagcattgtcagcaaacttgctcagaacatcctctgatcctacatgcaagacactgatgaaaactttaaggagaagtggccctaaatggaaccctgtggaaccctgcttgtggctggccaccagcctgaattgctgaaatgctttgggctcctctcattggccaaatgctcactcatcatattatgtttctgtctagccctttgcaggacactttgtcctgaagcatacgctgaggaacagtattaaaatcccatatgaaatcctaagcaataacatcagttggcttcytctcatcaattagatggttgacttcttaataaaaggaccttaagttctacaggaccttcctttcatgaactcgtgttggctgtgaccaatgacagaattgtccttcaggtgtttttcagtaacatccagcatcattttctccataattttatcaggcactgaattgagactgtcaggtccgtaattgctgatttcatctttcttcctcttctttcaaactggaacagtatttgccagcttcctgtgaaatgggaactggcatgaccctagacttcttctgatgccactcaaatgagtgtc

SEQ ID NO: 58069 - DNA, 599 bp, Chicken  19866894314595_1
  misc_feature (1)..(147): n is any nucleotide
nnnnnnnnnnnnnnnnnnnnnnnnnnnnnnnnnnnnnnnnnnnnnnnnnnnnnnnnnnnnnnnnnnnnnnnnnnnnnnnnnnnnnnnnnnnnnnnnnnnnnnnnnnnnnnnnnnnnnnnnnnnnnnnnnnnnnnnnnnnnnnnnnnnaaatgtctttgcaaacctcctctgtggtgcagcagaggcatcggcatcgctgcctgggagcaggcaggctgtgtcctgcaggggacagttggcacagcagggttgtccctctgcaccaggggacgggggaatatttggaatgagacggacgtygggtcaggccatgtcctggctctgggctgggaggacatggatggggctctgcggcccctcagggatctgcggcacctttggcacctctcaccagcctggcatggggaccagtggagcgtgacagccctgccgtgccagccaggacattggtatgcagatggcagggggtgacacaaggaggggacggcccttcctgcagggtgctcacgccaggctctgggtgtctgagcacacagctgcggggtgtggggctgggcacagcaggacccccggggcccatcgttctctgcccacagtgc

SEQ ID NO: 58070 - DNA, 600 bp, Chicken  19866894314597_1
agagatgctgtggtctccttctatggagacctgtttggatgccttcttgtgtgacctactgtagggcgcctgcttttgcaggggagttggatttgatggtctcttccaaccccctgaaactgtgattctgtgataatgtctgctacagagattgcaatggtatcctcaagtgcttacagaaccactctggaccagctgatgagaacaggtgacctctattaaggacatggagagctagaatagcagaggctgcccaggcctggagaaaggggcagctgaggagctgaggtagcctgtgargattgattctgccaccaaagcagcacagtcatttacatttggataaaccatatggttgtcaaataaccaatcatttcctgatatgcaacatttcctcagctgaaacataaaatccttccctttctctgcagatccaggaaagaaattcctttttactatgaatgaagcaccaggttccactagagtggctcaactttacatagcattaacaaataattagaaagctggtgtctcctgctgattcaccacttgatttattctttgggaaacaaacagaggtgccttttgcttgtgtgaact

SEQ ID NO: 58071 - DNA, 600 bp, Chicken  19866894314608_1
atgagtcagccatatttggccctgctgtagcaccactgcatatcctaaggccaaacgcacacgtgaacacacttccatcttttaattccacacgagactgttaagcatacgatcctgaatattcggtatgctgtatgtcaagattatcaagttgaattatagttagcaattcttgaccaaaactgcatgctgagaaactaaattaaggatctgctgccttttctgctgtccgttgctagtgaagtagtcacagtacaattttacatgcctcttttattctgcagtgaacatggatcaatwgatcccaactcctccttttcaatctatagtctctgtaattgtgtcatgctctcagttgcgtcagcacagctgtttatgccttacagaataaactggacaagggaagagrtatacatttggaagaaaaacaaataattctgattgtttacaagtaaataaacttgtgtataaggaagttttcatttcaagaagcaagcaagcatgaaacacatactgctacacrgaacgtgagaaattctaataccagggaaaaaatagtaattctaatgacaaggagactgattkaagtaacttaataat

SEQ ID NO: 58072 - DNA, 600 bp, Chicken  19866894314608_2
cgatcctgaatattcggtatgctgtatgtcaagattatcaagttgaattatagttagcaattcttgaccaaaactgcatgctgagaaactaaattaaggatctgctgccttttctgctgtccgttgctagtgaagtagtcacagtacaattttacatgcctcttttattctgcagtgaacatggatcaatwgatcccaactcctccttttcaatctatagtctctgtaattgtgtcatgctctcagttgcgtcagcacagctgtttatgccttacagaataaactggacaagggaagagrtatacatttggaagaaaaacaaataattctgattgtttacaagtaaataaacttgtgtataaggaagttttcatttcaagaagcaagcaagcatgaaacacatactgctacacrgaacgtgagaaattctaataccagggaaaaaatagtaattctaatgacaaggagactgattkaagtaacttaataatggaaagttttccagttggaagataaaccacaggtaatacaaaacattttgaaatgcattatggttagctgaaaagcaatgcagctcttacacactagtaaaagttccac

SEQ ID NO: 58073 - DNA, 586 bp, Chicken  19866894314608_3
tgctgtccgttgctagtgaagtagtcacagtacaattttacatgcctcttttattctgcagtgaacatggatcaatwgatcccaactcctccttttcaatctatagtctctgtaattgtgtcatgctctcagttgcgtcagcacagctgtttatgccttacagaataaactggacaagggaagagrtatacatttggaagaaaaacaaataattctgattgtttacaagtaaataaacttgtgtataaggaagttttcatttcaagaagcaagcaagcatgaaacacatactgctacacrgaacgtgagaaattctaataccagggaaaaaatagtaattctaatgacaaggagactgattkaagtaacttaataatggaaagttttccagttggaagataaaccacaggtaatacaaaacattttgaaatgcattatggttagctgaaaagcaatgcagctcttacacactagtaaaagttccactacaacaaaagaaacattaatactaaatttgggtttccttaccacatatacagcctgacaggttattctaagttatatgaatgaaaataatgctaacagg

SEQ ID NO: 58074 - DNA, 524 bp, Chicken  19866894314608_4
gaacatggatcaatwgatcccaactcctccttttcaatctatagtctctgtaattgtgtcatgctctcagttgcgtcagcacagctgtttatgccttacagaataaactggacaagggaagagrtatacatttggaagaaaaacaaataattctgattgtttacaagtaaataaacttgtgtataaggaagttttcatttcaagaagcaagcaagcatgaaacacatactgctacacrgaacgtgagaaattctaataccagggaaaaaatagtaattctaatgacaaggagactgattkaagtaacttaataatggaaagttttccagttggaagataaaccacaggtaatacaaaacattttgaaatgcattatggttagctgaaaagcaatgcagctcttacacactagtaaaagttccactacaacaaaagaaacattaatactaaatttgggtttccttaccacatatacagcctgacaggttattctaagttatatgaatgaaaataatgctaacagg

SEQ ID NO: 58075 - DNA, 600 bp, Chicken  19866894314614_1
cattttgattcaagactgaaggttgtttaaatattcatcctaaggtgttaaggtagaaaaaaaaaaaaacaaaccaacaaccatgaattaaaaactaagaaagctctatcttaagtcttttctgtaaaagaaacagaggaattcataaaacagaaagcactgaaatcatccagtgaaaacagattacataccaagcgtacttaaacagacaacgttcaagtttgctacctttatgaagcagaaaattttctagaacttccttaaaaataaaggagacaacacttgttgagttcaaacacmatttaaaagtaataacataaaaatgtataaattgaagcctgaaagaaaaatgcacatcacagctggggatcctaagcaaagcaatccactgcaaccagggtaaagctgctccgtgtcagtggcagaattaccccatggtgagtaattgtggaatgagtgtcgtgagaaatcaattatcttctaagaaattcatcacctccttctcccactgcaagggcactgctgaagtatcagccttcctttatcaacacgagtgtgtaacagatgtttggaacacagacagacagagacttcaccttt

SEQ ID NO: 58076 - DNA, 599 bp, Chicken  19866894314615_1
  misc_feature (1)..(2): n is any nucleotide
nnccacatttccctaatgttattcagatctatttgccagttccttcagctgacagttcttttgcttccagataggttatggctcagcccaggaaaggaaataattcattatcaccgcggttgttttcccatttgatacagaacaggagttggactcaatgatccttattggtcccttccaacttggactgttctgtgattctaggcacagaccgaatttcttttgtttatatacacagccttcaaaaataaatcattatttcaatcgccattcaagtgatgctgctgtacagccatgagygtcttacaggcactctwactttttttctcttccagaggttaagaatctgagctctatgggagtacatgcatacatttacttgctgacatgcttgatagccaccggcccctgtttgttgagtcctataggaatgaacagagctaccccctttttgtccatggagctcccaratctagacaaggatttggacaaaatgtgccatggatgattaaagatggcaygagcgtaggcatgcattaggagacagcaagragcaggcaggagygagctgtgctaatgcgtgttgattcttcatggtt

SEQ ID NO: 58077 - DNA, 600 bp, Chicken  19866894314615_2
gttattcagatctatttgccagttccttcagctgacagttcttttgcttccagataggttatggctcagcccaggaaaggaaataattcattatcaccgcggttgttttcccatttgatacagaacaggagttggactcaatgatccttattggtcccttccaacttggactgttctgtgattctaggcacagaccgaatttcttttgtttatatacacagccttcaaaaataaatcattatttcaatcgccattcaagtgatgctgctgtacagccatgagygtcttacaggcactctwactttttttctcttccagaggttaagaatctgagctctatgggagtacatgcatacatttacttgctgacatgcttgatagccaccggcccctgtttgttgagtcctataggaatgaacagagctaccccctttttgtccatggagctcccaratctagacaaggatttggacaaaatgtgccatggatgattaaagatggcaygagcgtaggcatgcattaggagacagcaagragcaggcaggagygagctgtgctaatgcgtgttgattcttcatggttcttagccaacctgatgaa

SEQ ID NO: 58078 - DNA, 600 bp, Chicken  19866894314615_3
gtcccttccaacttggactgttctgtgattctaggcacagaccgaatttcttttgtttatatacacagccttcaaaaataaatcattatttcaatcgccattcaagtgatgctgctgtacagccatgagygtcttacaggcactctwactttttttctcttccagaggttaagaatctgagctctatgggagtacatgcatacatttacttgctgacatgcttgatagccaccggcccctgtttgttgagtcctataggaatgaacagagctaccccctttttgtccatggagctcccaratctagacaaggatttggacaaaatgtgccatggatgattaaagatggcaygagcgtaggcatgcattaggagacagcaagragcaggcaggagygagctgtgctaatgcgtgttgattcttcatggttcttagccaacctgatgaagccagtgtggcatcagggcaaccattcagagctgatgaacatatgcctttcccacacttccaagagctgaggagccgggagctctgctctgatgatcaggccagttgtccagtaagcagtccagacagcttaggcgtaacaatgtcttcttgt

SEQ ID NO: 58079 - DNA, 600 bp, Chicken  19866894314615_4
tttgtttatatacacagccttcaaaaataaatcattatttcaatcgccattcaagtgatgctgctgtacagccatgagygtcttacaggcactctwactttttttctcttccagaggttaagaatctgagctctatgggagtacatgcatacatttacttgctgacatgcttgatagccaccggcccctgtttgttgagtcctataggaatgaacagagctaccccctttttgtccatggagctcccaratctagacaaggatttggacaaaatgtgccatggatgattaaagatggcaygagcgtaggcatgcattaggagacagcaagragcaggcaggagygagctgtgctaatgcgtgttgattcttcatggttcttagccaacctgatgaagccagtgtggcatcagggcaaccattcagagctgatgaacatatgcctttcccacacttccaagagctgaggagccgggagctctgctctgatgatcaggccagttgtccagtaagcagtccagacagcttaggcgtaacaatgtcttcttgtaatgaaaatgaaggcattttattaaagagaaaggattagaacagcaataat

SEQ ID NO: 58080 - DNA, 600 bp, Chicken  19866894314615_5
tcattatttcaatcgccattcaagtgatgctgctgtacagccatgagygtcttacaggcactctwactttttttctcttccagaggttaagaatctgagctctatgggagtacatgcatacatttacttgctgacatgcttgatagccaccggcccctgtttgttgagtcctataggaatgaacagagctaccccctttttgtccatggagctcccaratctagacaaggatttggacaaaatgtgccatggatgattaaagatggcaygagcgtaggcatgcattaggagacagcaagragcaggcaggagygagctgtgctaatgcgtgttgattcttcatggttcttagccaacctgatgaagccagtgtggcatcagggcaaccattcagagctgatgaacatatgcctttcccacacttccaagagctgaggagccgggagctctgctctgatgatcaggccagttgtccagtaagcagtccagacagcttaggcgtaacaatgtcttcttgtaatgaaaatgaaggcattttattaaagagaaaggattagaacagcaataataggcctgaacccttaggaaaagtcttggacc

SEQ ID NO: 58081 - DNA, 600 bp, Chicken  19866894314615_6
cgccattcaagtgatgctgctgtacagccatgagygtcttacaggcactctwactttttttctcttccagaggttaagaatctgagctctatgggagtacatgcatacatttacttgctgacatgcttgatagccaccggcccctgtttgttgagtcctataggaatgaacagagctaccccctttttgtccatggagctcccaratctagacaaggatttggacaaaatgtgccatggatgattaaagatggcaygagcgtaggcatgcattaggagacagcaagragcaggcaggagygagctgtgctaatgcgtgttgattcttcatggttcttagccaacctgatgaagccagtgtggcatcagggcaaccattcagagctgatgaacatatgcctttcccacacttccaagagctgaggagccgggagctctgctctgatgatcaggccagttgtccagtaagcagtccagacagcttaggcgtaacaatgtcttcttgtaatgaaaatgaaggcattttattaaagagaaaggattagaacagcaataataggcctgaacccttaggaaaagtcttggacctggatacagattc

SEQ ID NO: 58082 - DNA, 600 bp, Chicken  19866894314618_1
gctggagactcccatcctgacgctgaactctcaaaggtcacaccacaatctgtgcttgcatgacaacacaggattaagacctgtcataaattaggcacctaaatatttctgggtctggcccaggatgcctggatttttgtttgcctgcatttttgggcagttgcacttatctggcccttatctggcccacccacacacaggaagcatgaaactcacaatgttcctccagcacctctgactagaacccacgtagctgagtaatggctcagccatgaggagcaatgagagggaatcagctcycatccctgctctctcctagggcaatgggcagtgcttctgcaaaccgaacacctgtggacagttctgctcagcatgcaaagatggttacttcagtatggagaacacaaattactttggctgccaaggtgagtccccttctgacatgtcaggtgaaggaggggagcacacgggctggccctggagaaagtgtctgcatgccgcagctgactggtggccttggatagaaggaacagatgtcccacttctttcttttcagcatactgtgcctagaacatgtgctggatcttactgggtatctgg

SEQ ID NO: 58083 - DNA, 600 bp, Chicken  19866894314627_1
ggaaaaaaatgctgagactccaagacgtgcaggccagcctaggagttagcctagaggaaatgctgaccattgtcgaggaggtattacatcccggacgccgtactagcacagaggaaatttgtaaatgcctgggaattagcctggaggacctccgctctcagatcctgagtcaaaacacgcagaacggtaagcatatatgaaatactgttttttactttacagtgtttgtgttacataaaatagctctttattaataagtggtgcgcaaatctcatcagaatacttctccagaatcttgaraatctgaatagtagaatgggtatacagtgggagaagtagcagattagattttagattagtcagtgttagtttagagtcatttctaggtagattcaagrgagaagtcttacgttaggcttcctttwtaagcagaatctctaacaaagcmagacattttggctggytacagcatcaatcaaataagtcctgtttgstctctctgaactggagttcagggctagcataggtagagactgtcattctgtttttgaatggacaaatacattaccacttcataaaacctgcatgaggatgcaagtc

SEQ ID NO: 58084 - DNA, 600 bp, Chicken  19866894314627_2
cgtactagcacagaggaaatttgtaaatgcctgggaattagcctggaggacctccgctctcagatcctgagtcaaaacacgcagaacggtaagcatatatgaaatactgttttttactttacagtgtttgtgttacataaaatagctctttattaataagtggtgcgcaaatctcatcagaatacttctccagaatcttgaraatctgaatagtagaatgggtatacagtgggagaagtagcagattagattttagattagtcagtgttagtttagagtcatttctaggtagattcaagrgagaagtcttacgttaggcttcctttwtaagcagaatctctaacaaagcmagacattttggctggytacagcatcaatcaaataagtcctgtttgstctctctgaactggagttcagggctagcataggtagagactgtcattctgtttttgaatggacaaatacattaccacttcataaaacctgcatgaggatgcaagtcttctaggtcactctttcctgaggaagacatttctactgtatatacatacatatatatctatatctatatatctctatccatatagatataaaaatgtt

SEQ ID NO: 58085 - DNA, 600 bp, Chicken  19866894314627_3
tgcctgggaattagcctggaggacctccgctctcagatcctgagtcaaaacacgcagaacggtaagcatatatgaaatactgttttttactttacagtgtttgtgttacataaaatagctctttattaataagtggtgcgcaaatctcatcagaatacttctccagaatcttgaraatctgaatagtagaatgggtatacagtgggagaagtagcagattagattttagattagtcagtgttagtttagagtcatttctaggtagattcaagrgagaagtcttacgttaggcttcctttwtaagcagaatctctaacaaagcmagacattttggctggytacagcatcaatcaaataagtcctgtttgstctctctgaactggagttcagggctagcataggtagagactgtcattctgtttttgaatggacaaatacattaccacttcataaaacctgcatgaggatgcaagtcttctaggtcactctttcctgaggaagacatttctactgtatatacatacatatatatctatatctatatatctctatccatatagatataaaaatgttggtgcaggtaaacaatttactatgtaa

SEQ ID NO: 58086 - DNA, 600 bp, Chicken  19866894314627_4
cctccgctctcagatcctgagtcaaaacacgcagaacggtaagcatatatgaaatactgttttttactttacagtgtttgtgttacataaaatagctctttattaataagtggtgcgcaaatctcatcagaatacttctccagaatcttgaraatctgaatagtagaatgggtatacagtgggagaagtagcagattagattttagattagtcagtgttagtttagagtcatttctaggtagattcaagrgagaagtcttacgttaggcttcctttwtaagcagaatctctaacaaagcmagacattttggctggytacagcatcaatcaaataagtcctgtttgstctctctgaactggagttcagggctagcataggtagagactgtcattctgtttttgaatggacaaatacattaccacttcataaaacctgcatgaggatgcaagtcttctaggtcactctttcctgaggaagacatttctactgtatatacatacatatatatctatatctatatatctctatccatatagatataaaaatgttggtgcaggtaaacaatttactatgtaaagtatttcccatrtattcttgtg

SEQ ID NO: 58087 - DNA, 600 bp, Chicken  19866894314627_5
ctgagtcaaaacacgcagaacggtaagcatatatgaaatactgttttttactttacagtgtttgtgttacataaaatagctctttattaataagtggtgcgcaaatctcatcagaatacttctccagaatcttgaraatctgaatagtagaatgggtatacagtgggagaagtagcagattagattttagattagtcagtgttagtttagagtcatttctaggtagattcaagrgagaagtcttacgttaggcttcctttwtaagcagaatctctaacaaagcmagacattttggctggytacagcatcaatcaaataagtcctgtttgstctctctgaactggagttcagggctagcataggtagagactgtcattctgtttttgaatggacaaatacattaccacttcataaaacctgcatgaggatgcaagtcttctaggtcactctttcctgaggaagacatttctactgtatatacatacatatatatctatatctatatatctctatccatatagatataaaaatgttggtgcaggtaaacaatttactatgtaaagtatttcccatrtattcttgtgtatgattataccgtgt

SEQ ID NO: 58088 - DNA, 600 bp, Chicken  19866894314627_6
atatgaaatactgttttttactttacagtgtttgtgttacataaaatagctctttattaataagtggtgcgcaaatctcatcagaatacttctccagaatcttgaraatctgaatagtagaatgggtatacagtgggagaagtagcagattagattttagattagtcagtgttagtttagagtcatttctaggtagattcaagrgagaagtcttacgttaggcttcctttwtaagcagaatctctaacaaagcmagacattttggctggytacagcatcaatcaaataagtcctgtttgstctctctgaactggagttcagggctagcataggtagagactgtcattctgtttttgaatggacaaatacattaccacttcataaaacctgcatgaggatgcaagtcttctaggtcactctttcctgaggaagacatttctactgtatatacatacatatatatctatatctatatatctctatccatatagatataaaaatgttggtgcaggtaaacaatttactatgtaaagtatttcccatrtattcttgtgtatgattataccgtgtagtcttgagtatcggtgccagtgacttcta

SEQ ID NO: 58089 - DNA, 600 bp, Chicken  19866894314627_7
taacaaagcmagacattttggctggytacagcatcaatcaaataagtcctgtttgstctctctgaactggagttcagggctagcataggtagagactgtcattctgtttttgaatggacaaatacattaccacttcataaaacctgcatgaggatgcaagtcttctaggtcactctttcctgaggaagacatttctactgtatatacatacatatatatctatatctatatatctctatccatatagatataaaaatgttggtgcaggtaaacaatttactatgtaaagtatttcccatrtattcttgtgtatgattataccgtgtagtcttgagtatcggtgccagtgacttctaaaagaaagaattgtcttagaggtagatagtggggttgctaatagtacttaataatagagcatttatgaaataattaatttgcattcgtaggcatttccaacttagattaggatcttgctttgtgaattttaaagaacccatacttctttgtttccactctgtggctttaatgcctccactgttttccacagccaaattatatacttgcccagactggtttcagggaggtatgtatttgttgcat

SEQ ID NO: 58090 - DNA, 599 bp, Chicken  19866894314638_1
  misc_feature (1)..(267): n is any nucleotide
nnnnnnnnnnnnnnnnnnnnnnnnnnnnnnnnnnnnnnnnnnnnnnnnnnnnnnnnnnnnnnnnnnnnnnnnnnnnnnnnnnnnnnnnnnnnnnnnnnnnnnnnnnnnnnnnnnnnnnnnnnnnnnnnnnnnnnnnnnnnnnnnnnnnnnnnnnnnnnnnnnnnnnnnnnnnnnnnnnnnnnnnnnnnnnnnnnnnnnnnnnnnnnnnnnnnnnnnnnnnnnnnnnnnnnnnnnnnnnnnnnnnnnnnnnnnnnnnnnnnnnnnnnntcaattttccagctctacatatgccttataagygtctgatgatgttcctgctgcatccctggaggatcctgagctgaatgccttaacaggagtctcagggagtgctgtatacttcccatgggattctctgtacagggcagaggggagggcatggaagggggggcaatgctcattctgctgcacacagctctgtctgcctgagacctgtacagtgtttgaggttgcaaggggacctctagatgtccaaaccctactgctgaagcacagtcatctacaactggtaggacagcgtgattagcacatcctgagcaaatttctctttctcccccttt

SEQ ID NO: 58091 - DNA, 599 bp, Chicken  19866894314639_1
  misc_feature (1)..(234): n is any nucleotide
nnnnnnnnnnnnnnnnnnnnnnnnnnnnnnnnnnnnnnnnnnnnnnnnnnnnnnnnnnnnnnnnnnnnnnnnnnnnnnnnnnnnnnnnnnnnnnnnnnnnnnnnnnnnnnnnnnnnnnnnnnnnnnnnnnnnnnnnnnnnnnnnnnnnnnnnnnnnnnnnnnnnnnnnnnnnnnnnnnnnnnnnnnnnnnnnnnnnnnnnnnnnnnnnnnnnnnnnnnnnnnnnnnnnnnnnnntggaggagatgttctacatttggaaccattgcctgtaggtaggtaagtgatggtttgttctgtgcrtatattcaggtggaataattgcacagttcttggttatttcatttttttcccctttaaactgtagctagcaggtttaagctttcagaagtttggggttaaatgtctatatctcaatttcactgttatactgtaatccctcctcttctttacatcttgttgatgcaacattttcattccaagaaatacaacttttgaatctctctctataatgaagaccacatgcaaatgagttaatttattcaaaagctacttaaacattagaatagctggaaaaatggatgacttaataaactgcctat

SEQ ID NO: 58092 - DNA, 600 bp, Chicken  19866894314639_2
tgtagctagcaggtttaagctttcagaagtttggggttaaatgtctatatctcaatttcactgttatactgtaatccctcctcttctttacatcttgttgatgcaacattttcattccaagaaatacaacttttgaatctctctctataatgaagaccacatgcaaatgagttaatttattcaaaagctacttaaacattagaatagctggaaaaatggatgacttaataaactgcctattggctgcttacgtaatgcaagtttttctgtgtgttacagactttgaaatgcagatgattraaytggatgagtctgctgaacaacttaaagaagcaacccaggtaactttatcaagagtatcttgtgtaaaattgtttgaataccaagttgtggtagcttaaaatgctgttccaataggctccagtagtagctttcttaccgagcttggcttaactgaacttgcttttaaatgcattgtgtaattcagctacttaacactacattagaagctgatgactgaactaattttttttttcaatttccaagcaaatgaatgcacaaaacgaaaggattcaagagctaatggacatggtggtgcag

SEQ ID NO: 58093 - DNA, 600 bp, Chicken  19866894314639_3
agctagcaggtttaagctttcagaagtttggggttaaatgtctatatctcaatttcactgttatactgtaatccctcctcttctttacatcttgttgatgcaacattttcattccaagaaatacaacttttgaatctctctctataatgaagaccacatgcaaatgagttaatttattcaaaagctacttaaacattagaatagctggaaaaatggatgacttaataaactgcctattggctgcttacgtaatgcaagtttttctgtgtgttacagactttgaaatgcagatgattraaytggatgagtctgctgaacaacttaaagaagcaacccaggtaactttatcaagagtatcttgtgtaaaattgtttgaataccaagttgtggtagcttaaaatgctgttccaataggctccagtagtagctttcttaccgagcttggcttaactgaacttgcttttaaatgcattgtgtaattcagctacttaacactacattagaagctgatgactgaactaattttttttttcaatttccaagcaaatgaatgcacaaaacgaaaggattcaagagctaatggacatggtggtgcagaaa

SEQ ID NO: 58094 - DNA, 600 bp, Chicken  19866894314648_1
agagtaggggctgttggaggtggatagtggaggcatggaggaaacccagaacccagtcgttggtaactgagatctggagagatgctttcagaccactgacgtggcgcagaaagaaatgaaatgcatataatacaaggaaatctcattcctacaaagacaagtggaccacttccatctgtgcaagggaaaacactgagtaaatggcaagtaactgagaataaggttgaagaaagaggaggttctccccaccctttcctcagatgtcagtcacatctagtgagcggtggtgggagccacccrggaacctgcctaagtgacaaaaggcagcaaaggtaattgtgaagaacacaaaatgagtcagctgagctccctgggcccagcagcgttcytcctgttaaataaaatctacacgtagctcctggatgaggctgcataataaagcacttccctttgcgtggaaaaggaaagcaaactaattcttcttttatgtggctttttattttgcatgatttcagataagaatatttttgtagttttacactgccttctactgtagatcacaaaacttacactggttgggaaagccttatatttctatgg

SEQ ID NO: 58095 - DNA, 600 bp, Chicken  19866894314648_2
agaccactgacgtggcgcagaaagaaatgaaatgcatataatacaaggaaatctcattcctacaaagacaagtggaccacttccatctgtgcaagggaaaacactgagtaaatggcaagtaactgagaataaggttgaagaaagaggaggttctccccaccctttcctcagatgtcagtcacatctagtgagcggtggtgggagccacccrggaacctgcctaagtgacaaaaggcagcaaaggtaattgtgaagaacacaaaatgagtcagctgagctccctgggcccagcagcgttcytcctgttaaataaaatctacacgtagctcctggatgaggctgcataataaagcacttccctttgcgtggaaaaggaaagcaaactaattcttcttttatgtggctttttattttgcatgatttcagataagaatatttttgtagttttacactgccttctactgtagatcacaaaacttacactggttgggaaagccttatatttctatgggtgacacattttgcacaagtcctgagagcgttcacaaatgacattgatataattattgataccttttgctaaataaattaaaaaatata

SEQ ID NO: 58096 - DNA, 599 bp, Chicken  19866894314659_1
  misc_feature (1)..(157): n is any nucleotide
nnnnnnnnnnnnnnnnnnnnnnnnnnnnnnnnnnnnnnnnnnnnnnnnnnnnnnnnnnnnnnnnnnnnnnnnnnnnnnnnnnnnnnnnnnnnnnnnnnnnnnnnnnnnnnnnnnnnnnnnnnnnnnnnnnnnnnnnnnnnnnnnnnnnnnnnnnnnnagatcttgagaaaaggttggtgttctaggacagcccaggaagtatctacctatctcagatgtaattaggcagaacacagaaagaaaggttgagagttgaaggaagtgattttcctttcttcaggtactaaaaacgagcccccratctcaggctgagggcgtgatgggcaaagcacagtcctctttgtgaggctgcagccgttacccatttgttctctgctgcagggatggtgcagactgcgtggcttycctttgtccccatacacagctctgcctctcctggtcctacagcagtgctgggggagaggagctgcactgccctgcaggacctcctgggctgcctgcagttccctggctcagggctggtgagctgcccactccctggaatagagctttatcccttctttgcccctttaatgcttggaattgcactgacctgttga

SEQ ID NO: 58097 - DNA, 599 bp, Chicken  19866894314659_2
  misc_feature (1)..(52): n is any nucleotide
nnnnnnnnnnnnnnnnnnnnnnnnnnnnnnnnnnnnnnnnnnnnnnnnnnnnagatcttgagaaaaggttggtgttctaggacagcccaggaagtatctacctatctcagatgtaattaggcagaacacagaaagaaaggttgagagttgaaggaagtgattttcctttcttcaggtactaaaaacgagcccccratctcaggctgagggcgtgatgggcaaagcacagtcctctttgtgaggctgcagccgttacccatttgttctctgctgcagggatggtgcagactgcgtggcttycctttgtccccatacacagctctgcctctcctggtcctacagcagtgctgggggagaggagctgcactgccctgcaggacctcctgggctgcctgcagttccctggctcagggctggtgagctgcccactccctggaatagagctttatcccttctttgcccctttaatgcttggaattgcactgacctgttgatagaggtgatcattaaataccttaaatcattaaggacttacatgaggaggtctgttggtagtttactttgcaattggggtggttaagagcgtttgctgtgtctct

SEQ ID NO: 58098 - DNA, 600 bp, Chicken  19866894314668_1
ggagagcaagtgacagtgggaaggatttggtaacttcattgctggtgtgtttgtgtgtgcaagagccaggcacaacctggatgggctccaggaggctcgcctgtgtgtcacaagcccagcagtgggcctgtagaagggaagccaggttttatttagttaacaaaggtcctgtgctttcagcgcaggaagagctggatttaatctccatggctgctgtacagtggccaacacgtgctgctggggggcctcggatgaaccagatccactttccatagagaggaagctggaggggagcacttrctgaaattgagctcttcttagctcagtgttctgcatgcggttctactccacagccctgggaaggtctgttagccgagctgcctatctacatagtacccataagaaccacagaaacatagaattctcggagctgggagagacccataaggatcactgagtccaactcctggcttcacaaagccatcttaagccatcaggctgctgctttggatctgaaacgctgcagatcagaggagcagaatcccaccagcaaaaccccaggtggtggggaaggcagactggggctgtgcaaggagcaat

SEQ ID NO: 58099 - DNA, 600 bp, Chicken  19866894314671_1
ggaaagtatgatttggatcacaccaggttagataacacaaacctttatgttggctttatgtcataagccaaatgcaaattgttactgttcctcatttgcagttacctctggctatttaatccatactccactaattctcctctgtgttattggtctggaatttagtctgcatgatgagaatcatttagctgatagcgctttaaactcatctataaacagcttttgatgactaatatgcatttttgtgttcctgcagtaaatttgtttcaagcaaaaaagagactgtttggaaacaccttrcattgcctggtaaatcaactatttaatatttcatttcaagctgtactgggaaaggaaatctgttttttcctcagattcacatctgaaggcagaaagtacaataactgcagaaaaatagatagaatttgtattattccattaaggaatacatgtcttctcaagcyatcacaagaatgtttttatatgtgttgtttacatttttctgtcttaaaaaacagccacttcagattccttcaatttgaattcctacacggcctctgcaaataaagagaatgaacaaccaaatggaaatgccttttc

SEQ ID NO: 58100 - DNA, 600 bp, Chicken  19866894314671_2
gtctgcatgatgagaatcatttagctgatagcgctttaaactcatctataaacagcttttgatgactaatatgcatttttgtgttcctgcagtaaatttgtttcaagcaaaaaagagactgtttggaaacaccttrcattgcctggtaaatcaactatttaatatttcatttcaagctgtactgggaaaggaaatctgttttttcctcagattcacatctgaaggcagaaagtacaataactgcagaaaaatagatagaatttgtattattccattaaggaatacatgtcttctcaagcyatcacaagaatgtttttatatgtgttgtttacatttttctgtcttaaaaaacagccacttcagattccttcaatttgaattcctacacggcctctgcaaataaagagaatgaacaaccaaatggaaatgccttttcttactcccagccctggaagtgattcattattcaaagcattaccattaagaatgaactatttccacagataagatgaagcaggtaatatttttacaggcatccttacaaccctggaaaatgtgaatgtctgtatccttacatgctgttgagaagaatccttggta

SEQ ID NO: 58101 - DNA, 600 bp, Chicken  19866894314683_1
atatgaacagttgcagctcatgttcctctggtcccacatctgcccacgtggagctgcacaggcagttctctgaggcagcattcaaaccattttgatcggaaaccttgggctctagcatgcacagaagtcatgccaggctaaccacaacagtcagtcggagagagagagcccaatctgtcctgctgctttttgctgcaaaacagaattacagcatcactcgtggctggaagggccctgggaaagacacctcacccaaacggccgctgtgaccggctctgtcaccagcatgcgctgaactgrtggtgctggtgagtgtggggaagaggacctgccagccctgaataacgcatatcttagactacggactagagcccagagggtgaaagtccaagtaagtcgggttggtaatttcctggtcactgtgggtggtttttccatgacaaaaacaaatcacgtttgcacacacggaaggcaaatgtgcactgcttggtggcatgcttcactgccctgtaacaagaacttgtttacagggtctctccaaaacatctcccacatacaccatgctgctctaaaatgagcacaaacagagaaaaaaacagc

SEQ ID NO: 58102 - DNA, 600 bp, Chicken  19866894314686_1
gcttgcccagtcatgtcttaactacacttcaataacaagttttgaatcttagttaagtcttgaccttgaagtgcagctgggtgttctactaactgtaaatgtgggaaattgtggaacaatattgcaaaatagaagtgtgggggtgtttgaaacatagcaggtgtttcctttggatggtccaatttcctacatgagaaacagaattccatctaacagcagaactcctcatacagctctttcacttctaactatggcacagcaccaaatccaaggtttaaaaatgaaacgtgaaaatatatrtatatatatattattttaaagaggatatattattacatgctagtaggatccagagaatgagcaaataaagcatgtctcagattcaagctttgccagaggcaggatgtagcaccttttctacaacagctgaagaaagaaaacgaatctcataagcattgaacttcagatacaaaattagaatggaacagtcagtaactactacaagcagtgttttcagtactgttaaggggcaaacaatctgaaagaaggctatatgacagaatgacaaacgacatcattttttaccaaagccatccttta

SEQ ID NO: 58103 - DNA, 600 bp, Chicken  19866894314692_1
gctgtgccaggttggaaatgatgatgaaaatgccaaacttttaaaatgttagtgaaggtaaagaccctgtgtctaggttgtgccatgtgacaaagcaggtgagatgtgaggggtaacaagggccctgtctgtctttctgggcttgtgtcaagtgctgctgcagtcatctggggaaacgaacaagagctattaattacaatttaaatgaatagtcacagtgaatgaaagagtctaaatccattgtattttaaataacttccactttctgttgaataagctctgctggactagaatctgtayccttggagaacatacaagggatttcaaggagacattaccatccacatcatactttgctctgatgtgcaacagaaattacrtcttccagtttgtttctgtggcttgtaggacccatggtttatgtgttattttggaatttggtggtgaggaaaaagaggactccactctgctgctgtacatgctgcaacatttgcattcccactgccatgtggtcaggtccaggtttcttttgctgactgtgtagaatgaggtcagtggcttcacagcaaagtgttctcatatataatcagtcctgcattt

SEQ ID NO: 58104 - DNA, 600 bp, Chicken  19866894314692_2
tgccatgtgacaaagcaggtgagatgtgaggggtaacaagggccctgtctgtctttctgggcttgtgtcaagtgctgctgcagtcatctggggaaacgaacaagagctattaattacaatttaaatgaatagtcacagtgaatgaaagagtctaaatccattgtattttaaataacttccactttctgttgaataagctctgctggactagaatctgtayccttggagaacatacaagggatttcaaggagacattaccatccacatcatactttgctctgatgtgcaacagaaattacrtcttccagtttgtttctgtggcttgtaggacccatggtttatgtgttattttggaatttggtggtgaggaaaaagaggactccactctgctgctgtacatgctgcaacatttgcattcccactgccatgtggtcaggtccaggtttcttttgctgactgtgtagaatgaggtcagtggcttcacagcaaagtgttctcatatataatcagtcctgcatttttctgcatttgagagaggaaaacagacagagccatctcttagaccccttgtgatttcagtaaaaacatgcacatgttgca

SEQ ID NO: 58105 - DNA, 585 bp, Chicken  19866894314693_1
  misc_feature (1)..(35): n is any nucleotide
nnnnnnnnnnnnnnnnnnnnnnnnnnnnnnnnnnnaagatgtattttcaagaaacctgcaattttgactagtctttttaaaagagtgccccaaattccccaccagtacatcaacacaaaacatggtacctgcaaataagcagtgggtatttgcagactagcagatttatgtggaaaaagaagtgtggtacagacactgagctactaaatcactcaccccctatgctgcagacatttatttgcaggattggagaaccttccttaagtctgtgcctactgttgcaggtgtttagggagggcrtgatgcctcatgcaggaaagcctccatgagaagctgcctgtaggcacgtacaggtgtgaaaacttaatgcatgctgccaggaagaaagccaaggctggcttaacatgttggctttgaggctgaaaaaagcaccaatggggaaaacagtggcataaagggactgcatttccacatcattttattcatagaatgacagaatccaagaggttggagaagaccaccaagatcatttaatccaactgcccacctgccaccagtctttcccactacccacattcctcagaa

SEQ ID NO: 58106 - DNA, 353 bp, Chicken  19866894314694_1
gataaaactaaagatcgacacttctgttacttagagtagcacctgtgtcccatccacggcttgcttggctttagctcactgggaacacctgagataagaactatatttttgccatttgaatatacttcttctattcgacagaataaatcctctgcagtgacagtatgctgaaatcactgaagctaataatcaccacgctcctagggactatggactgaaatatacagttcagaaactccctctccacctcttgcttaaaatctcctaaaaccaggttctgcctctctgtgctgtcacacrgcaggatcagacacatcgaagaggactgcaaatcagagaattcaatacacact

SEQ ID NO: 58107 - DNA, 599 bp, Chicken  19866894314707_1
  misc_feature (1)..(86): n is any nucleotide
nnnnnnnnnnnnnnnnnnnnnnnnnnnnnnnnnnnnnnnnnnnnnnnnnnnnnnnnnnnnnnnnnnnnnnnnnnnnnnnnnnnnnntgtgatcgtagtgtgagaacttttgagcacacggggttttgttttttgggtggtgctttgtagaaggggcagattagaactgtttcttctaaattaaagatttaaagtctatgaaatatttgcagcacccatattgtgtaagctctttcatgcttacatgcatttgccaaagccctggggaaatgcagtcctaacatctccgtgactgtttgcmtagaggaacatcatgaccacaccaagcacacaggaataaaataataaaggtacaatgtgtaaaaagaagctgtagttcatttccctttgagtttaacttaataaaagcagtgaatcatttgatttttaccagtagaatttttacaaatagacttaaaatatttctcttcagatttgtgtctccaacagctgcagctgaaaccagcaatcaacaaagccccttgtttttattggagttgaagtggcttgttgaaaatggattggattacggggatcaatcagcagcaggtcgaggatgca

SEQ ID NO: 58108 - DNA, 600 bp, Chicken  19866894314714_1
agtgactcattctcagggacacagcggtgggaatgaggcactgccgtggttgcagataattccctggaagtctccgttatgcataacacattaattgaagatattcacaagttgcttaacgtcacatcgcttcatttcctcgtccacgtaggtaaaaatggctttgtgtaagtcttaacctatgtgaaaagaagttctgtaggctgtccgacaagtggttccgtgctgaacctgttgctgtgcagcctgagttgtttcttgctgtgctgccagctagaggggcagaggcagcagcagcaygaaggcatgcacttctgagtgcacagaagtgagcagtggcgatgaggagggaactgtttgctgctggttgcttcagtgatgagcatcagaaggatgggtgcttcctgtttatagctgataaccatctgtgacaattacactggtctcacaagtgacatatctctatattcatgtgagcctacgtggcacaggatacccctacagagaactggaaatgcaacgtgataactgtgtggtccttgcctgttccagagtggatagcagcagatgtatcactggggaacactctcctgtagatag

SEQ ID NO: 58109 - DNA, 600 bp, Chicken  19866894314714_2
tagcagcagatgtatcactggggaacactctcctgtagatagtaacgtgttcctagcaggcagatctggcacgttgtgtaggcagcagaaaacaaacagtgcagcccagcgcttgcagatttacactggaaagggggaagtggtgcacttacagacagcagccttaccttgggtgatagtcagtccttgggatgtaccctaattctagctttccctcagggcctgtggttctggctgtgttgcccattccaggtgagcgctggaccatcatgagtcccctggcatttgctgtagtttatyatgtagcttcttaaggtgctgcttcatcctgatgtttttatctctattggctttatgacatgggaaatattgcatggaagaacacactttaatgctataatagctgtttgtcaaaaagtttgtgctttttttttttcctaatctagaaagtgagtcaaaggctgagtttcccatatgctgattgaattttcaagtgtatcactctgaagctgattacatcttttgactgctgatctgattttttgaccaagaggagctcgctgaggagaggagatgccttttttggcagctctgtgcttt

SEQ ID NO: 58110 - DNA, 549 bp, Chicken  19866894314715_1
gagaaaggggacagagggaggggggcgttgtcaggggagcagcagatggacccaggagggtgtgcagggacgaggctgactgctgtcccctgtcctagtgccccaaccctccctgtcgctgcaccccagccagggggtgtcgctgggggacaatgtcaccctgcgctgccgtctgccccagccagctgcctgggtccgactctatcggtacaaaaatgcaacatacatcgagcagaaggacaacgtgcaggacatggctgagttctccttgactagcattaaacaggaagctgcagtgakatatcagtgccagtaccaggggttggagcaaccagggacatcagagaagagtgaacccgtgaagctgktgctgacaggtgagggcactggggaaagcagatggccctgggctgttcccacagggctgtgttccatctctgttacctctctgtgctcagatcacaggtatcccctacctggcatttccctgaaccccaaagagcatgtggagatggggagcaacatcaccatccagtgctggaacaagga

SEQ ID NO: 58111 - DNA, 481 bp, Chicken  19866894314715_2
gacgaggctgactgctgtcccctgtcctagtgccccaaccctccctgtcgctgcaccccagccagggggtgtcgctgggggacaatgtcaccctgcgctgccgtctgccccagccagctgcctgggtccgactctatcggtacaaaaatgcaacatacatcgagcagaaggacaacgtgcaggacatggctgagttctccttgactagcattaaacaggaagctgcagtgakatatcagtgccagtaccaggggttggagcaaccagggacatcagagaagagtgaacccgtgaagctgktgctgacaggtgagggcactggggaaagcagatggccctgggctgttcccacagggctgtgttccatctctgttacctctctgtgctcagatcacaggtatcccctacctggcatttccctgaaccccaaagagcatgtggagatggggagcaacatcaccatccagtgctggaacaagga

SEQ ID NO: 58112 - DNA, 600 bp, Chicken  19866894314716_1
aagttctcaaatttgttgcacaaaatgctgcactgaagcaaatccaggattcactgagtagataaaagaaggaagaaatatgagtatacagtctaatgcacttagctgtcaacttataaagtacttgtatttattatttaatttcaaaatatttgaactgtcctaggaaccaggattaggactcagatctatcctaaatgaattacattaaatgctgtgctgtgaaatctgttataccatgcaagacaaaaggatctgcaatattttaacattactattatatacaacattacagggtgytgtcttgtactcaataaacaggatcactggcattccagaggtgcctgtgagcacctcagccagaagccctcttgaaatagcaaaatggaaatcttagagtccatctaaattagacatgaattctcagatgcacttctgagttttagcaggaacttggtgtgggcaaagaagtacaaaagaagaaagaatgttctgtgacttagtccagatttgtttccagtgttttgagtggaccgttggatgtcaaagtcttttagtctttctgggaaattacaaaattataagtatttttctgactcc

SEQ ID NO: 58113 - DNA, 600 bp, Chicken  19866894314718_1
agaccaccctcccattcaactgcaggtgtcagcactcacagtgtgggccagtgggatggtccgtgcttgtcctttctggctgtagtgagtctcagtgtagcctggtgcaaacaggtctctgcagttacagggggaaaaggagagaaaaaaagtcctttaatgatacaaggcactgtgtggtttcctttgcgttgctaagttatgcccacgtataatggaattaggttgagcacaatgaaggccagctcaggacacatctgggcattggtgtgcgtctcaaactctgactctccagtgccyaaatctgaacacaattataaaccaatctgcttctgtgttgcaacttctgcccagaagccaattcacatctttgtcctaggaaactgctgattcccccatttaaatttgatcatgtcatccatgtacagacaatattgtccctgtcttcagcccaagatcaagccaaaagcctataaaaggcgctcctgtgcactgaatagtaagtattttgacttgattccagaggaaacagccttccctctttttttaaacatctgcattttctaaacagtgatgtaaaaaagtacagtaagtcaaaat

SEQ ID NO: 58114 - DNA, 600 bp, Chicken  19866894314719_1
gcgcaccatcaaatgctgcaacagatctgatttgtttgcggctgcatcaaagcaatctgttaaaaccaggagctatggtccgagtcaatgctacctgcaggtctacagaggtaaatactacagataactgccagtccatatttcaatcttaaaatgctgatttattaacataactgtcaatatttactaggctgacgagacttggctaggaaagtaataactaatctagcttttccagaagatgaactgagaaatatttgtgtatgaaacatatctacaggcttgatggatgaggagaaygcatatgtcttcttcaggcacatttaaccaagaattcatttcagtgcatgggtctaaatctaaacattttgttccacttccaaaataggtttttttgtgagttttttttttaattattcaaataaaaacatctggagttgtattttgctaagcatactgttttgtttctgcagcaaattgatgacatcgtgaaaccttactgcaaggatggtgatgatatttggaaagcagtgtggttcaggataataattaccacttgcagtagcgcaggaatgttttatcaaacaggaacaaggtaca

SEQ ID NO: 58115 - DNA, 600 bp, Chicken  19866894314721_1
ttgccttagtaggatatagtactgaagtgaacttaaatagccagtactatcaaactttcaaagaaaatcaaagaacctcatattttcaagctccaacttctacagcaatatttaaatgtaggagaggaccacttctaatcaagagaacagttgctggtactcaagactgccttttatttacatattcttataccaagcatagtacttccatcatttaacacactttgtaaggacagggcaatagggaagccacccaggaatggtttctcatcaattcaattataggcacaacaactgggyttaatatcatgtctctgttctcattaacgaccaccaccaaagcctagasaaggtgactgtgcttttatctgctactagtcttgtgtttagacatgtttgtagcaatcactgactactgaattctttctcacacatcttctacaggtcttcaatgcagctttcagcttccatcagaaaacgtcaactctattggcaccaccacttttaagaaattccttttagtggaaggagtggtacagggtattgatccagatgtggcctgccagttgtctcaaaaatcgaagtatcactacatgtaga

SEQ ID NO: 58116 - DNA, 600 bp, Chicken  19866894314721_2
tcaaactttcaaagaaaatcaaagaacctcatattttcaagctccaacttctacagcaatatttaaatgtaggagaggaccacttctaatcaagagaacagttgctggtactcaagactgccttttatttacatattcttataccaagcatagtacttccatcatttaacacactttgtaaggacagggcaatagggaagccacccaggaatggtttctcatcaattcaattataggcacaacaactgggyttaatatcatgtctctgttctcattaacgaccaccaccaaagcctagasaaggtgactgtgcttttatctgctactagtcttgtgtttagacatgtttgtagcaatcactgactactgaattctttctcacacatcttctacaggtcttcaatgcagctttcagcttccatcagaaaacgtcaactctattggcaccaccacttttaagaaattccttttagtggaaggagtggtacagggtattgatccagatgtggcctgccagttgtctcaaaaatcgaagtatcactacatgtagagattatagtcttaaacagctcaactccacagctgcatacagttaatgct

SEQ ID NO: 58117 - DNA, 600 bp, Chicken  19866894314727_1
ggtacctgaggaaggtcccactgggaaggagtgggctggtggtaaagcttcctatagtgtcttgcagtgcaggtgggtctgaaacttggtagttcagcagaaaatattaggaattattttcttcaattgtcttcccttgggacgtttcttcatgtagttttaagaaaaacaacaacatgtgaatgattcgctgtgggaaatgcctctctctcccagagttctgataaagcagaccccattcaaaaacaggcagatgaatacattggaaatctcctccattcctttgctgaatttcttccyactattagacgcaaaacttgaacttggtcctgttttcatgatactggagtggtgttgtctctggatgctgaaataattcagtagaagttctcactgcttaagtgtaacttcaatttcagaatagcatctatatcagttttcagaaatcctgtctggaatttctaagcatgattattctttctgaaaatgcttaaaaaatcagtccagtcaggtaccaagacactctttcaagttacttttcaaccagtctttgttaaccagcatacgtcagaatttgaatctgtgaatggcaaatacaag

SEQ ID NO: 58118 - DNA, 600 bp, Chicken  19866894314731_1
tgcttgtctgacttggtgaagaatgaaataagagcacatatgctgaactgctaaaaatgtacaaaaagcaaatggaaaatacaggtaaattaaaaaaaaaaaaaagtatttttttccttgaatcaaaggcattagtagtgacatttgaaatatttcagagaagtgtatctttttagtataagtctgaatttagcaattacaaaaaatgatctctgaattctctgtgattttgctgctcaactacaggaattgttctgtcttctatggccagtgaagatcagaaaaagtaatgtcaattayaggaagagtataagtactaactaactcgaaaagatatgaaagtcagttataaagaacagaacataatgaagaatttccaactcagatataacctctgtgttaacatatggttgtgagaactggaaatccaccaagacataaaaaatgggaaagtagatgcctttggaagcaaatgcctacmggagatttgggacataggatagcaagtctcatctctgaggaaggaatgtgagaaatcagcaatctctgctgaaatccaacattttcttcagcagatgctaccacatcctcctctgtgat

SEQ ID NO: 58119 - DNA, 600 bp, Chicken  19866894314731_2
gtctgaatttagcaattacaaaaaatgatctctgaattctctgtgattttgctgctcaactacaggaattgttctgtcttctatggccagtgaagatcagaaaaagtaatgtcaattayaggaagagtataagtactaactaactcgaaaagatatgaaagtcagttataaagaacagaacataatgaagaatttccaactcagatataacctctgtgttaacatatggttgtgagaactggaaatccaccaagacataaaaaatgggaaagtagatgcctttggaagcaaatgcctacmggagatttgggacataggatagcaagtctcatctctgaggaaggaatgtgagaaatcagcaatctctgctgaaatccaacattttcttcagcagatgctaccacatcctcctctgtgatgccatcaaataggagccgtggggttttagaaaacctactggtgacttgcatgagaaaacctgaacagaaggtttaggtaggagggctgagctcatgatctcaacaccagaaagctgaaacagcaggaagtgatggaagagatctactagcggttgcttgggaagtttataatatattttcc

SEQ ID NO: 58120 - DNA, 600 bp, Chicken  19866894314738_1
gccacagccacctcaaatcaagagttgtcccagtgggttaaatatttcaagttccttttcacagcatagagtgaaagtaaatcaatttttgaatgtttttattttcgatcaaaatcttagcctcaaaatctcgagactgtcctcagcaactattatgtgaaaaaaccctttccgacaatggcaatgcatcttgtgcccagtgtgaatattttttatattactcttttgttcaaaatatttagttccagacctcctgtatatcggaagcagaaaagatcaagaaaggaaaacatctctaamagaaaaacaccagcaacaatatttgaaaacattaaacttggaagaattgtctgttctgcagtaagcaagttgtctgagtatgcagtccctttggccacttctgaatgtagaagctatgcacaagttgtcacttggtatcagtttgaatgaagagaaccgtgtctcatcctgacctatctgacagctttaggattagctctataatacttcaaagtatttttattcttctacagcttttgtgctgtacatccaacgtgattatagcgaacttccattctcttttgctggactttggactta

SEQ ID NO: 58121 - DNA, 600 bp, Chicken  19866894314749_1
gcttaatgtaatcatatttcttaattcttagtttcttaaacaaaatatgttctccttgctataggacaattgaactaatcgtctttagcctgttactgcaattcttgtaatgttctgttttgggagaataggtttatattattgcctctctataaaactgttcggaggtcaccttctgagacatcatttttcttacttgcttgctccagtcaccatgaggagattctattctctgaagtgggaaattctatgctaatattgtttaatgtgttttccagagggagttgttatcaagtagcrtaacgtgatgctcaggagctgagggttactacctttgtagttgctagaaaaaaatgcatgttttttacatcttttgagcattaatgaagttgtcttacaaaaggcttttgactttgaatgkgttttatcayggagaaagtataagcaaaaccttcacacccgctatttcaccgagtactacccgattttatttaaacttcaaacattatcattacctattccaccctcattaacagggcattaagaaaaagggacgacaaacctgtcttttgtgtttgtctctctaagatacgttagcgt

SEQ ID NO: 58122 - DNA, 600 bp, Chicken  19866894314749_2
gggagaataggtttatattattgcctctctataaaactgttcggaggtcaccttctgagacatcatttttcttacttgcttgctccagtcaccatgaggagattctattctctgaagtgggaaattctatgctaatattgtttaatgtgttttccagagggagttgttatcaagtagcrtaacgtgatgctcaggagctgagggttactacctttgtagttgctagaaaaaaatgcatgttttttacatcttttgagcattaatgaagttgtcttacaaaaggcttttgactttgaatgkgttttatcayggagaaagtataagcaaaaccttcacacccgctatttcaccgagtactacccgattttatttaaacttcaaacattatcattacctattccaccctcattaacagggcattaagaaaaagggacgacaaacctgtcttttgtgtttgtctctctaagatacgttagcgtgccttgacctttctttctaccagtgttcccttccttttactttagtaatgctgtttcagacatcagtcaaacacgctgattgcagacatttgctttgcctcttgaaagcaatgcgctgcct

SEQ ID NO: 58123 - DNA, 600 bp, Chicken  19866894314749_3
gtttatattattgcctctctataaaactgttcggaggtcaccttctgagacatcatttttcttacttgcttgctccagtcaccatgaggagattctattctctgaagtgggaaattctatgctaatattgtttaatgtgttttccagagggagttgttatcaagtagcrtaacgtgatgctcaggagctgagggttactacctttgtagttgctagaaaaaaatgcatgttttttacatcttttgagcattaatgaagttgtcttacaaaaggcttttgactttgaatgkgttttatcayggagaaagtataagcaaaaccttcacacccgctatttcaccgagtactacccgattttatttaaacttcaaacattatcattacctattccaccctcattaacagggcattaagaaaaagggacgacaaacctgtcttttgtgtttgtctctctaagatacgttagcgtgccttgacctttctttctaccagtgttcccttccttttactttagtaatgctgtttcagacatcagtcaaacacgctgattgcagacatttgctttgcctcttgaaagcaatgcgctgcctgcccgggtga

SEQ ID NO: 58124 - DNA, 457 bp, Chicken  19866894314749_4
acgacaaacctgtcttttgtgtttgtctctctaagatacgttagcgtgccttgacctttctttctaccagtgttcccttccttttactttagtaatgctgtttcagacatcagtcaaacacgctgattgcagacatttgctttgcctcttgaaagcaatgcgctgcctgcccgggtgagcagccccgctgtggtgccatgctgggcctgtgggaaaaccagccagggctgatcccagaggctacagctggctccccgatgtagtttcactcgcgaaagcctggagacaacttagtaaaamgtatttgccttcttatcaaaagagaaaaggcagttttcagagatcctattttttttttttaatccattttgaagcttgcttttccatgggaagttatatttcgagagaagcacgggagctgtctatgaatgggttgtaaaaatgtatctggcgtgac

SEQ ID NO: 58125 - DNA, 599 bp, Chicken  19866894314751_1
  misc_feature (1)..(28): n is any nucleotide
nnnnnnnnnnnnnnnnnnnnnnnnnnnnatgttttcgtgtttgtcattgacattgatttcaccagaattcggaagtttaaacacataccacaagccttcactgaagtcaacgctttctcaaatccatgacaattaaacttagattatcattattacaggggtacaagcttagcgcatgtaggctagactattccttcttccagagtgagcagtggaagcttctgtaggtgcacccatgcatctgtgtcctgccccttgtaagcaacagaagaatggcgataggagagcgtccatcgcatsctcatygtgctttgaccgtagcggcgtatgtgcagcgcatgaatgcgtttaaatggatcccttcttatgatacttgcaaaagcaggaaagcagttcattcgcttcctcctacggagacatgtttagcccacccaggagytgtttttgaacattgctactgatcgttacctgtagtgagctagctagaaaaagtattaaacattcatgtagttcggctgcgcctattgactctgcattgtaaatagactctgctgtgctctcccagtggaaagatttattttactttaagaatatatagg

SEQ ID NO: 58126 - DNA, 599 bp, Chicken  19866894314751_2
  misc_feature (1)..(22): n is any nucleotide
nnnnnnnnnnnnnnnnnnnnnnatgttttcgtgtttgtcattgacattgatttcaccagaattcggaagtttaaacacataccacaagccttcactgaagtcaacgctttctcaaatccatgacaattaaacttagattatcattattacaggggtacaagcttagcgcatgtaggctagactattccttcttccagagtgagcagtggaagcttctgtaggtgcacccatgcatctgtgtcctgccccttgtaagcaacagaagaatggcgataggagagcgtccatcgcatsctcatygtgctttgaccgtagcggcgtatgtgcagcgcatgaatgcgtttaaatggatcccttcttatgatacttgcaaaagcaggaaagcagttcattcgcttcctcctacggagacatgtttagcccacccaggagytgtttttgaacattgctactgatcgttacctgtagtgagctagctagaaaaagtattaaacattcatgtagttcggctgcgcctattgactctgcattgtaaatagactctgctgtgctctcccagtggaaagatttattttactttaagaatatataggactgtt

SEQ ID NO: 58127 - DNA, 600 bp, Chicken  19866894314751_3
tagattatcattattacaggggtacaagcttagcgcatgtaggctagactattccttcttccagagtgagcagtggaagcttctgtaggtgcacccatgcatctgtgtcctgccccttgtaagcaacagaagaatggcgataggagagcgtccatcgcatsctcatygtgctttgaccgtagcggcgtatgtgcagcgcatgaatgcgtttaaatggatcccttcttatgatacttgcaaaagcaggaaagcagttcattcgcttcctcctacggagacatgtttagcccacccaggagytgtttttgaacattgctactgatcgttacctgtagtgagctagctagaaaaagtattaaacattcatgtagttcggctgcgcctattgactctgcattgtaaatagactctgctgtgctctcccagtggaaagatttattttactttaagaatatataggactgttccttcagtactttttctttgtttaacaagaagctctctcgctgtaaacccagcagacaataaaaccagtcaggggcttttatcgaggatgtctgacccatcgcctggcaataattagttcaggttaattacagc

SEQ ID NO: 58128 - DNA, 600 bp, Chicken  19866894314758_1
gtgtccagttttctacatgccagtactaaaaacatagaaattatgaagaaagtcaagtgaagggctgtgtatggtgccaaattacatgacattaaaggtgaggccaagagaaatatgtttgttcaagcttaagaatagaaggcccaggaggggatatcactactgccttcagtactgaaggaacaactgaaggaaaagagaagacaggatcttctcggaggtgtgtactgacagggtgagaaagaacagacgtaggtcacaacaaaagaaatttgatataagggttatttttatttttayatgaggatgatcacaaacaagttggcatggcaatgtgtgtaatgttcattcctggagattttcaaagcactattggacaagacctcaaagaacttgtaccaagataaccctgctttgaatggaggcttggaccagatgtcctttagagatttctcccaataggaataattttatgttttgatgaaaagaaagtgatagtgattcaaatgcaacatttactgatctacagttgatcaagaggttgaacaacttattctgaacttcatctccaaacaagtggatgagcagaaggtgatcagg

SEQ ID NO: 58129 - DNA, 433 bp, Chicken  19866894314764_1
gcttctgctagtccaacataagggaagtgatttaattccatgtctgcttggatttctcctatataatcagtggaggcccaggagaattaggaggcacaggatgatactctcctgattactttgctgtcatctccaatttatggcctaaaatgcatgtagataaagtgttcatatgcagaagaacacgagagtttgtttcaggatactctcctaatacatttaactgtagtgactgtacaagataggctctcttacacaaggagtaactgagatgacagcagtatctaaaccagactgtgmatactatttgtttgctaacaggtgacaaggaggaagggaggaaaaacaactgcccatgaagaagcacagcaataagtgctgtccctgatggagggttttacgttggcccagcttgtaccagtcctctagagat

SEQ ID NO: 58130 - DNA, 600 bp, Chicken  19866894314768_1
tcagacatcagaagtatctttctttactactgttataacttactagaagctcatttccagtttaagtctgtctccataaacaacaaaatacacttgagaggaatttaaattgccttaatgctgaacaactttcagtgtgtgaggagtttcaacctgttcatcttactccattgaactgttttcctgttctagaaatgtagatatattgaaccagaaaaagattgcactcatgaacctactggttagagtgttcacttctggtttcttttataggatgattcacctgatttctaaagaatrttcagagaagaaacttgaaccacagactgttctctcctagataaatacactaactgctcatctataaaatcatgacctgacttgactgtactcccagggcactgaattattttctgaatagcagagtggggaagggaagtgctcccacccttactatggtacgtggcctggtatgttagcatgatctccatgtaggtagaaagacgggagtttaattcttctagatttatttaaaacttaacttcttttttcctacacctaatgtgttctaaatgccacattaatggattttacaataag

SEQ ID NO: 58131 - DNA, 599 bp, Chicken  19866894314770_1
  misc_feature (1)..(212): n is any nucleotide
nnnnnnnnnnnnnnnnnnnnnnnnnnnnnnnnnnnnnnnnnnnnnnnnnnnnnnnnnnnnnnnnnnnnnnnnnnnnnnnnnnnnnnnnnnnnnnnnnnnnnnnnnnnnnnnnnnnnnnnnnnnnnnnnnnnnnnnnnnnnnnnnnnnnnnnnnnnnnnnnnnnnnnnnnnnnnnnnnnnnnnnnnnnnnnnnnnnnnnnnnnnnnnnnnnnncttctttggaccctgactgccctgcctttggttaggctgacctttaataaagctcatttgccaactttgatggcatgtggcatcttcrctctcagtctccagacagtagagaccatcctggcgccccatttctggccactcccaccaatcaccccacattctcagcccyacaggcccctccgccagctttgtgctctcatgcccaagccacagagaacaacagagcacagtgagcattgttctgggctttgccatgcacggtcagctctgctctgtcacccccactcccccaaacctccccacgctgtaacgcagccttctgctttcccagtccaaggcagatgatggagtataccccaaargtgatgcctttccccttgctctgca

SEQ ID NO: 58132 - DNA, 599 bp, Chicken  19866894314770_2
  misc_feature (1)..(131): n is any nucleotide
nnnnnnnnnnnnnnnnnnnnnnnnnnnnnnnnnnnnnnnnnnnnnnnnnnnnnnnnnnnnnnnnnnnnnnnnnnnnnnnnnnnnnnnnnnnnnnnnnnnnnnnnnnnnnnnnnnnnnnnnnnnnnnnnnnncttctttggaccctgactgccctgcctttggttaggctgacctttaataaagctcatttgccaactttgatggcatgtggcatcttcrctctcagtctccagacagtagagaccatcctggcgccccatttctggccactcccaccaatcaccccacattctcagcccyacaggcccctccgccagctttgtgctctcatgcccaagccacagagaacaacagagcacagtgagcattgttctgggctttgccatgcacggtcagctctgctctgtcacccccactcccccaaacctccccacgctgtaacgcagccttctgctttcccagtccaaggcagatgatggagtataccccaaargtgatgcctttccccttgctctgcagcagccacctaagccttcacctcytcttycccccttattccttgcagaggttcccagatgcacaattcagaggcacattct

SEQ ID NO: 58133 - DNA, 600 bp, Chicken  19866894314770_3
aactttgatggcatgtggcatcttcrctctcagtctccagacagtagagaccatcctggcgccccatttctggccactcccaccaatcaccccacattctcagcccyacaggcccctccgccagctttgtgctctcatgcccaagccacagagaacaacagagcacagtgagcattgttctgggctttgccatgcacggtcagctctgctctgtcacccccactcccccaaacctccccacgctgtaacgcagccttctgctttcccagtccaaggcagatgatggagtataccccaaargtgatgcctttccccttgctctgcagcagccacctaagccttcacctcytcttycccccttattccttgcagaggttcccagatgcacaattcagaggcacattctrtcagtgccctacagtgatttcattgcgttccataccaygcagggtgtaacgctataatgtatgggaagcacagcaataatagaggggtggcaaaatccttggctgcagcaaaagaggacaagcctaaatgcaacaaccatggatgcagaaacaaaggaaacagcctgcttacctttgagaagcctcaggtagg

SEQ ID NO: 58134 - DNA, 600 bp, Chicken  19866894314770_4
accatcctggcgccccatttctggccactcccaccaatcaccccacattctcagcccyacaggcccctccgccagctttgtgctctcatgcccaagccacagagaacaacagagcacagtgagcattgttctgggctttgccatgcacggtcagctctgctctgtcacccccactcccccaaacctccccacgctgtaacgcagccttctgctttcccagtccaaggcagatgatggagtataccccaaargtgatgcctttccccttgctctgcagcagccacctaagccttcacctcytcttycccccttattccttgcagaggttcccagatgcacaattcagaggcacattctrtcagtgccctacagtgatttcattgcgttccataccaygcagggtgtaacgctataatgtatgggaagcacagcaataatagaggggtggcaaaatccttggctgcagcaaaagaggacaagcctaaatgcaacaaccatggatgcagaaacaaaggaaacagcctgcttacctttgagaagcctcaggtaggcatacatctccagtcagatccccctcccacactgccaacccttaaatga

SEQ ID NO: 58135 - DNA, 600 bp, Chicken  19866894314770_5
cctggcgccccatttctggccactcccaccaatcaccccacattctcagcccyacaggcccctccgccagctttgtgctctcatgcccaagccacagagaacaacagagcacagtgagcattgttctgggctttgccatgcacggtcagctctgctctgtcacccccactcccccaaacctccccacgctgtaacgcagccttctgctttcccagtccaaggcagatgatggagtataccccaaargtgatgcctttccccttgctctgcagcagccacctaagccttcacctcytcttycccccttattccttgcagaggttcccagatgcacaattcagaggcacattctrtcagtgccctacagtgatttcattgcgttccataccaygcagggtgtaacgctataatgtatgggaagcacagcaataatagaggggtggcaaaatccttggctgcagcaaaagaggacaagcctaaatgcaacaaccatggatgcagaaacaaaggaaacagcctgcttacctttgagaagcctcaggtaggcatacatctccagtcagatccccctcccacactgccaacccttaaatgagggct

SEQ ID NO: 58136 - DNA, 600 bp, Chicken  19866894314770_6
acaggcccctccgccagctttgtgctctcatgcccaagccacagagaacaacagagcacagtgagcattgttctgggctttgccatgcacggtcagctctgctctgtcacccccactcccccaaacctccccacgctgtaacgcagccttctgctttcccagtccaaggcagatgatggagtataccccaaargtgatgcctttccccttgctctgcagcagccacctaagccttcacctcytcttycccccttattccttgcagaggttcccagatgcacaattcagaggcacattctrtcagtgccctacagtgatttcattgcgttccataccaygcagggtgtaacgctataatgtatgggaagcacagcaataatagaggggtggcaaaatccttggctgcagcaaaagaggacaagcctaaatgcaacaaccatggatgcagaaacaaaggaaacagcctgcttacctttgagaagcctcaggtaggcatacatctccagtcagatccccctcccacactgccaacccttaaatgagggctgggaaggggtggatcctggctgcagcccttccatcactcagtacattgcatgc

SEQ ID NO: 58137 - DNA, 600 bp, Chicken  19866894314770_7
ccacagagaacaacagagcacagtgagcattgttctgggctttgccatgcacggtcagctctgctctgtcacccccactcccccaaacctccccacgctgtaacgcagccttctgctttcccagtccaaggcagatgatggagtataccccaaargtgatgcctttccccttgctctgcagcagccacctaagccttcacctcytcttycccccttattccttgcagaggttcccagatgcacaattcagaggcacattctrtcagtgccctacagtgatttcattgcgttccataccaygcagggtgtaacgctataatgtatgggaagcacagcaataatagaggggtggcaaaatccttggctgcagcaaaagaggacaagcctaaatgcaacaaccatggatgcagaaacaaaggaaacagcctgcttacctttgagaagcctcaggtaggcatacatctccagtcagatccccctcccacactgccaacccttaaatgagggctgggaaggggtggatcctggctgcagcccttccatcactcagtacattgcatgcacatgagctcccctgggttggccctgccttcccaccag

SEQ ID NO: 58138 - DNA, 599 bp, Chicken  19866894314775_1
  misc_feature (1)..(19): n is any nucleotide
nnnnnnnnnnnnnnnnnnnggcctcgcgttgcctttacggccttgccttccttttttttttttttttttttttttttttgcattgccaggcctggcctgtcatacctgtcctagcctggacttgccttgcctggacttgccttgccttgcctggcctggcctggactgcactaaccaggcctggcggtttcttgatttctctttcatgccctgacctggcgtggcctggtctagcctggcattcacatttttgtcttgcctaacctggcctgtcctagccaggccttgcctgtcctggamttgccttgcctatcctggcctggcgttgccttgccgggcctggcttggcctggcattccctagccttgcctggcctgaccttgcctatcctggcctggccttaccttgcctatcctggcctggccttgcctgtcctagcccggcctacctttgcttggacttgccttgccttacctggcctggcctggcctgtcctagcccggcctatccttgtttggactttgcttgccttgccttgccttgccttgccttgccttgccttgctatgccttgccttgcctgacatggcgttgccttgc

SEQ ID NO: 58139 - DNA, 600 bp, Chicken  19866894314779_1
gggagctttgcatcaacagcctcatagaactgggaatatagaaatgctgtctgcatcaccacagaggtgcagatgcagagcccccacatcagtgctgagtggcctgggctgggaggatgctgctccacgaccaacactggctcagtgaagccagtttggaccatctgggctgtgagcactgcccgggggaaatctggaccttgtctgcaaggaaagataagagcatacaagtgaccacaagtgtcttggcaagagcagcgggaagagaagtgcccagcctgctacacatcaagatgcctycattttcatccaagaagcagcaggaaacaccaatctcaccaactgtgattgagcaaaaagtggaaagtgaacacagactagaaacatccaagccttacacactacctcacagccactgcagcaattgtgagtttgcactgattaaagcttcttcagctctgatgtctaacaaagccaggagaagaaaggcgcccatgttaactagagaaagatcactgtgtttatggtctagaatcatagaatcattaaggctggaaaagacctccaagattatcaagtcaaaccaccaacccatcccca

SEQ ID NO: 58140 - DNA, 600 bp, Chicken  19866894314786_1
tgttttagagaggaccacctgaaaaagtaaaatctttggcttctttgactaccgtgttatacatagagaagcttagcacatgtggctgcttttgttctggtgcgaaattttttgcagcttttagatgtggaaatggcctaaactaatactaatcatgaaactgatgcatttaggtaggcttaaaatccttatttacgatggatttatagagtttattttcctcttagacagataataacacattctctggagagaaagacacccacaccagggtgaaatatctcctggttagactgcatygccaaacgccatcacagcagccttgcagtcctgggatgtgagctgctctccacattcacaaggaaaggaagttccccatagggcacctcagaagccaacagcttgaataagcaggtgcataagcatcaaaaatctaaactctagtttattgttttttgaattaatgagcctttgcgtgtgtgtgtatgcaaaaagcagtttcaattaactgctgtctctcagcttagatwagtgccatctgcaaggtagaacactttcttaggcagcttgcactagcacattctccaaaggtaggaaaat

SEQ ID NO: 58141 - DNA, 600 bp, Chicken  19866894314786_2
gataataacacattctctggagagaaagacacccacaccagggtgaaatatctcctggttagactgcatygccaaacgccatcacagcagccttgcagtcctgggatgtgagctgctctccacattcacaaggaaaggaagttccccatagggcacctcagaagccaacagcttgaataagcaggtgcataagcatcaaaaatctaaactctagtttattgttttttgaattaatgagcctttgcgtgtgtgtgtatgcaaaaagcagtttcaattaactgctgtctctcagcttagatwagtgccatctgcaaggtagaacactttcttaggcagcttgcactagcacattctccaaaggtaggaaaatgatctgtaacctcttgtgtccttgctcactcttcccaggtgggtttggggagagaatcagcaatgtaaaagtacaagaacttatagcttgagattaagacagtttatgaggaaaagcagagtagcacgtgcaaacaaagtacaacaaagaattcattcacaacttctcctcagcataccagctttcagccacttccaggaaagcagggctcattgcatgtaacagtttct

SEQ ID NO: 58142 - DNA, 600 bp, Chicken  19866894314786_3
ctcagcataccagctttcagccacttccaggaaagcagggctcattgcatgtaacagtttcttgggaggataaatgtcatcacttcgaacatcccccttcatccttctttacaccagatttcattgtctgcatgatgcctccttttgatcagcctgactcaactgtcctgattgtgtccctcccaggtcctcgtgcaccctcaggcccttgctggcaaggcagcacaagaagtagagaagtccatggctctgtgcaagcactactctgcaacaactgaagcatcaatgtgttatcaccaktattattatccaaaatccaaaacacagtattcatagaagcctctatgaggagcattaactctatcccactcagagccttatgacagatggttaaatatatcttaagaaaaaatctagttttagaccaacaggggctttcttgtgcctcagccttcgctggaatgcatgaaagtggaaacagaagtgagaatgtaaaatagagttcatcagtgaatactttgcgtgtgcacacaaacaagtacaagatgctccaaaatgtccaagaccaataggggatattttttaactcatcatgaccca

SEQ ID NO: 58143 - DNA, 600 bp, Chicken  19866894314786_4
tcttgtgcctcagccttcgctggaatgcatgaaagtggaaacagaagtgagaatgtaaaatagagttcatcagtgaatactttgcgtgtgcacacaaacaagtacaagatgctccaaaatgtccaagaccaataggggatattttttaactcatcatgacccacaggagaatcttttgcagatttcaagttcattacacactcttcagtgattcccaaacattctttcacctgcagtcatggaacaataggaacctgaggcccagggttgcacaacttgtctacaggtccactatgtcayagcaagaacttaccgatctcctcasgttatacctgaggtgtttggtagctttatagatttacttatgtcttagttatcaaattcttaacagatataaacagaacaaaacaaaagatcagcctttaaagaaacttcatgttctagaggaagaagctttcttgatacatgaccatccactgtcatttgctttcattgcttcattttgtcaataaagctgttgttgtggcattgcagcactgtttcatagcactacttagaataacagagaaattaacttcaattatctcaagctactaataa

SEQ ID NO: 58144 - DNA, 600 bp, Chicken  19866894314786_5
tgcatgaaagtggaaacagaagtgagaatgtaaaatagagttcatcagtgaatactttgcgtgtgcacacaaacaagtacaagatgctccaaaatgtccaagaccaataggggatattttttaactcatcatgacccacaggagaatcttttgcagatttcaagttcattacacactcttcagtgattcccaaacattctttcacctgcagtcatggaacaataggaacctgaggcccagggttgcacaacttgtctacaggtccactatgtcayagcaagaacttaccgatctcctcasgttatacctgaggtgtttggtagctttatagatttacttatgtcttagttatcaaattcttaacagatataaacagaacaaaacaaaagatcagcctttaaagaaacttcatgttctagaggaagaagctttcttgatacatgaccatccactgtcatttgctttcattgcttcattttgtcaataaagctgttgttgtggcattgcagcactgtttcatagcactacttagaataacagagaaattaacttcaattatctcaagctactaataatgaacttctgtcccatctagttttt

SEQ ID NO: 58145 - DNA, 600 bp, Chicken  19866894314788_1
aaaaccctaattagttttaaaatagagcttgtcacattttctggatgacttattcatactgggttgcagaagtctcagcagccctttaacctgctttcccatgatcaaggggtctcctggtaattcaaggtcatctgttagctcttatccctgcaagacattgttgggctgatgctgttatgctcatatcacaatgaggtttgctttccaaatccacaccatatgcatggtgatgtgggggagacgcctctctctttaatttagcactgaaaagaaccccttcctctcaaactgaggtgyatgaatgtgctctatgccaatgtcagtattattggaggaaatcacctctataaatcacctccctawcatgtgaaaacagacaccccaaaccgagacatcaaaatgaatcatacactcgaaaatctccttcttcccccagtygcaaagtggggctggcaatacttccatgcctctgggaagccctttggctaagcaaatcctaaccacatgtaaaatattctctaagaagagcattatttacctggtgatttgctcttattgttctggtattaaaaaaaaagaaaaaaaaaaactgtacac

SEQ ID NO: 58146 - DNA, 600 bp, Chicken  19866894314788_2
cagaagtctcagcagccctttaacctgctttcccatgatcaaggggtctcctggtaattcaaggtcatctgttagctcttatccctgcaagacattgttgggctgatgctgttatgctcatatcacaatgaggtttgctttccaaatccacaccatatgcatggtgatgtgggggagacgcctctctctttaatttagcactgaaaagaaccccttcctctcaaactgaggtgyatgaatgtgctctatgccaatgtcagtattattggaggaaatcacctctataaatcacctccctawcatgtgaaaacagacaccccaaaccgagacatcaaaatgaatcatacactcgaaaatctccttcttcccccagtygcaaagtggggctggcaatacttccatgcctctgggaagccctttggctaagcaaatcctaaccacatgtaaaatattctctaagaagagcattatttacctggtgatttgctcttattgttctggtattaaaaaaaaagaaaaaaaaaaactgtacacaaattttggagcactacacagagtttattttgaaaaagaaatcaaagaatgtttttttttttgttg

SEQ ID NO: 58147 - DNA, 600 bp, Chicken  19866894314788_3
ctcttatccctgcaagacattgttgggctgatgctgttatgctcatatcacaatgaggtttgctttccaaatccacaccatatgcatggtgatgtgggggagacgcctctctctttaatttagcactgaaaagaaccccttcctctcaaactgaggtgyatgaatgtgctctatgccaatgtcagtattattggaggaaatcacctctataaatcacctccctawcatgtgaaaacagacaccccaaaccgagacatcaaaatgaatcatacactcgaaaatctccttcttcccccagtygcaaagtggggctggcaatacttccatgcctctgggaagccctttggctaagcaaatcctaaccacatgtaaaatattctctaagaagagcattatttacctggtgatttgctcttattgttctggtattaaaaaaaaagaaaaaaaaaaactgtacacaaattttggagcactacacagagtttattttgaaaaagaaatcaaagaatgtttttttttttgttgtttcaactcggggccagatggaaagaaaaaaacaaatgtattctatcctaagaaaggaaacacatgaaagctttc

SEQ ID NO: 58148 - DNA, 600 bp, Chicken  19866894314793_1
gcttttcaccttcagcttttaatgcaacctaactctaggcacgcccttctgttctaggtctgccttctactatgaaatagtaactgctgatccataataactaatctcagatgagtcatcaggttgctctaaactctagtgttttactaacacattacaacagcagacctacctgtgaatctccctctaatgcagcttgtgcatacatccgcactgacagctcaaggtctttagactggttctggtaaccatagtagtagaaatctcccatcttcaaataaactgtggaagaaaccagtrgtgtgttatttaaarcatttgtagagacggaataaagtaaccagtaatgtgatagagaatttcataatctttctrtttaaatcagtatataaaaaatatggrtattcttcctcactcactgtctctgtgactactttatatcagactgacaactaaaaatatttatcttggctgaatactttcatggttgatcttcaataaattaattcagtaagyggtcattactacttttacaaaaaactaagagacttcatacttaattccctcttcacttgtgaaatgtcagtctctctttgggca

SEQ ID NO: 58149 - DNA, 600 bp, Chicken  19866894314793_2
cttttaatgcaacctaactctaggcacgcccttctgttctaggtctgccttctactatgaaatagtaactgctgatccataataactaatctcagatgagtcatcaggttgctctaaactctagtgttttactaacacattacaacagcagacctacctgtgaatctccctctaatgcagcttgtgcatacatccgcactgacagctcaaggtctttagactggttctggtaaccatagtagtagaaatctcccatcttcaaataaactgtggaagaaaccagtrgtgtgttatttaaarcatttgtagagacggaataaagtaaccagtaatgtgatagagaatttcataatctttctrtttaaatcagtatataaaaaatatggrtattcttcctcactcactgtctctgtgactactttatatcagactgacaactaaaaatatttatcttggctgaatactttcatggttgatcttcaataaattaattcagtaagyggtcattactacttttacaaaaaactaagagacttcatacttaattccctcttcacttgtgaaatgtcagtctctctttgggcaacctgtagtccgtta

SEQ ID NO: 58150 - DNA, 600 bp, Chicken  19866894314793_3
aatagtaactgctgatccataataactaatctcagatgagtcatcaggttgctctaaactctagtgttttactaacacattacaacagcagacctacctgtgaatctccctctaatgcagcttgtgcatacatccgcactgacagctcaaggtctttagactggttctggtaaccatagtagtagaaatctcccatcttcaaataaactgtggaagaaaccagtrgtgtgttatttaaarcatttgtagagacggaataaagtaaccagtaatgtgatagagaatttcataatctttctrtttaaatcagtatataaaaaatatggrtattcttcctcactcactgtctctgtgactactttatatcagactgacaactaaaaatatttatcttggctgaatactttcatggttgatcttcaataaattaattcagtaagyggtcattactacttttacaaaaaactaagagacttcatacttaattccctcttcacttgtgaaatgtcagtctctctttgggcaacctgtagtccgttattcaggtcagtgtactaacttagtaagacttaamacatgctgtttaagagatcattctgt

SEQ ID NO: 58151 - DNA, 600 bp, Chicken  19866894314793_4
aatctcagatgagtcatcaggttgctctaaactctagtgttttactaacacattacaacagcagacctacctgtgaatctccctctaatgcagcttgtgcatacatccgcactgacagctcaaggtctttagactggttctggtaaccatagtagtagaaatctcccatcttcaaataaactgtggaagaaaccagtrgtgtgttatttaaarcatttgtagagacggaataaagtaaccagtaatgtgatagagaatttcataatctttctrtttaaatcagtatataaaaaatatggrtattcttcctcactcactgtctctgtgactactttatatcagactgacaactaaaaatatttatcttggctgaatactttcatggttgatcttcaataaattaattcagtaagyggtcattactacttttacaaaaaactaagagacttcatacttaattccctcttcacttgtgaaatgtcagtctctctttgggcaacctgtagtccgttattcaggtcagtgtactaacttagtaagacttaamacatgctgtttaagagatcattctgtacctgtcacaatggaagttgcayacac

SEQ ID NO: 58152 - DNA, 555 bp, Chicken  19866894314793_5
acagctcaaggtctttagactggttctggtaaccatagtagtagaaatctcccatcttcaaataaactgtggaagaaaccagtrgtgtgttatttaaarcatttgtagagacggaataaagtaaccagtaatgtgatagagaatttcataatctttctrtttaaatcagtatataaaaaatatggrtattcttcctcactcactgtctctgtgactactttatatcagactgacaactaaaaatatttatcttggctgaatactttcatggttgatcttcaataaattaattcagtaagyggtcattactacttttacaaaaaactaagagacttcatacttaattccctcttcacttgtgaaatgtcagtctctctttgggcaacctgtagtccgttattcaggtcagtgtactaacttagtaagacttaamacatgctgtttaagagatcattctgtacctgtcacaatggaagttgcayacacctcaaaagttacagagttttgctgatgataatttcactcatttcaaattcaatccaacccaagacaaca

SEQ ID NO: 58153 - DNA, 422 bp, Chicken  19866894314793_6
tgatagagaatttcataatctttctrtttaaatcagtatataaaaaatatggrtattcttcctcactcactgtctctgtgactactttatatcagactgacaactaaaaatatttatcttggctgaatactttcatggttgatcttcaataaattaattcagtaagyggtcattactacttttacaaaaaactaagagacttcatacttaattccctcttcacttgtgaaatgtcagtctctctttgggcaacctgtagtccgttattcaggtcagtgtactaacttagtaagacttaamacatgctgtttaagagatcattctgtacctgtcacaatggaagttgcayacacctcaaaagttacagagttttgctgatgataatttcactcatttcaaattcaatccaacccaagacaaca

SEQ ID NO: 58154 - DNA, 373 bp, Chicken  19866894314793_7
tggrtattcttcctcactcactgtctctgtgactactttatatcagactgacaactaaaaatatttatcttggctgaatactttcatggttgatcttcaataaattaattcagtaagyggtcattactacttttacaaaaaactaagagacttcatacttaattccctcttcacttgtgaaatgtcagtctctctttgggcaacctgtagtccgttattcaggtcagtgtactaacttagtaagacttaamacatgctgtttaagagatcattctgtacctgtcacaatggaagttgcayacacctcaaaagttacagagttttgctgatgataatttcactcatttcaaattcaatccaacccaagacaaca

SEQ ID NO: 58155 - DNA, 600 bp, Chicken  19866894314803_1
atgggaatcaggaattcctcccgctccttcagtttgctctccaggtcttttcggtcggcagcactcagctcaggggtacctgcaaccaggcacagccacaggtcagcaatctctgacaagctgaggcagagggagcagaggtttgtgctgttcctgcacacgggctgcctttggccaggaaaaatgccagcccgtcagctccaggcaatgccaagcactcctgaatcaaaccaaagtgctccagcctggatttcctgccaacaacattcaggcaagagctccaaagcaggtttcaccacrgaaactctattccatttacatgccaaatgagttgagctatcaattgagtgacagatttactggacttgttcctaaaaagaattatgttccagcacagcgttcgtttcagcccaaaacacgggcagtgtgagaccactgagcaccactgcatgctttgtgacacctcaccacaccacccacttcccagcagccaacatggcccccggccatggagcgacgtgatggacaggaaggagaactgtgctaagaagacttggtcctctgatgttcataatttctcacttacttaaattaacactg

SEQ ID NO: 58156 - DNA, 600 bp, Chicken  19866894314806_1
ctgctattaagattttcagttctgtaaaggctaaataaattgtaactacttggttctggttctgtaaggtaggaagctgctgctgaccctaactagatttcatatagattttggtaaacaaactcagacacattgaatcaattccctgatctctataggtacagaagctacatgtatcttccaagactgagattcaaaatttgccactttgagctgaagaatttgcttttcattctggtgctgtacttaacaaatgaggctttgagagcaattactgcacattggaagtaaccctggcartagtgtatacatgaacagattttgataaggaagaagtgcatttaacactttggagaagaagcatatttatgtgcattaattgcatatgagtctgatgtccttctggccttctttacatttgtagtttttaacagtatagctttaacatcacaaacttcaatgttgctaatgctcaggatgttcatgacacagtcttttatgaccactacagctgacccctttctatactgatgctgaaatgtaccagtgagcaatgacctggtaaaattgctaatatatcctcaatatggtccatgttgc

SEQ ID NO: 58157 - DNA, 600 bp, Chicken  19866894314807_1
agtaatcggtgaaatatcgggcatttttgggattatatagaaatgtatacagattgtggttgtttttttttttttgtttttttttttgtttttgtttttttaaactttattcctagatcctgggtcactgagctggggaatgcacccattgtgcagccctgcagctgagtctgcccagtatgtcccagccagatgtgcaagactccctctagaaagctctgagcatcaggacctgaatatagagccttactttgggggcaggcactctgaggagctttgcaaggataataggaagatggrgagttgaggtatttcttaaaataatttggaaaggggtgagtcttttgagattctgatgtctctgctcctgatagccccaattctggaagtacatagtcttcatgcaagtaattgtaccgtgcacttacagaactgtgatggataatgtgaccctataaatattaaattgcaataaattccttttaaagaaaaaattattacgttgtttattaaaatttttatttacttaaatgagctttgattaatattgattagctttttccccttccactgcaaaggagaaaaaatgtcatatatacg

SEQ ID NO: 58158 - DNA, 600 bp, Chicken  19866894314814_1
ttgtcacatagccgcggtggctggcggcagacaggcggtgtccccgacccagatgggccggcagtgttcctggcacagcccgaggctgttcccacaagcgggagatgcggtccgtgtgctgcagggagcagcgctgcctgctgtgttgaaagcgctgcctctcgagagcatcagagtggatggggctgcctggctcccccagacctgaagtcacaggcttccaacaaatgttatttcctgtagtggggaagaattgctctttatgctgtgcatacacctagaatccttccacggccttcytggttgtttgttgttttttccccttgcatttgatttcttgccttgttccaaaggggcagygcccctccagcttagtggagcaccctcttaaagcaatcagtcagcaccacatccaggaccactgaaagacaaattgttgcctaatgaacgcagtgactgccgctccttctcttccattccccaggagtttgaagacacactggtttctgatttgcagctgggtgctccggagccctgggcttgcagctctgatttacctgagcttgatttcagcgaggtagaaaaaatcaactccaatcc

SEQ ID NO: 58159 - DNA, 600 bp, Chicken  19866894314814_2
gcagtgttcctggcacagcccgaggctgttcccacaagcgggagatgcggtccgtgtgctgcagggagcagcgctgcctgctgtgttgaaagcgctgcctctcgagagcatcagagtggatggggctgcctggctcccccagacctgaagtcacaggcttccaacaaatgttatttcctgtagtggggaagaattgctctttatgctgtgcatacacctagaatccttccacggccttcytggttgtttgttgttttttccccttgcatttgatttcttgccttgttccaaaggggcagygcccctccagcttagtggagcaccctcttaaagcaatcagtcagcaccacatccaggaccactgaaagacaaattgttgcctaatgaacgcagtgactgccgctccttctcttccattccccaggagtttgaagacacactggtttctgatttgcagctgggtgctccggagccctgggcttgcagctctgatttacctgagcttgatttcagcgaggtagaaaaaatcaactccaatcccaccaagtatgttgttagagttgagcaggcagcagctgtgttttagagcgcgctataagg

SEQ ID NO: 58160 - DNA, 600 bp, Chicken  19866894314815_1
acattaactgctatctgacaatgggaaaagttaaaaaaagaaaaatgggagttcatgagttgtaaaagttcttaagtgggacaacatctaaaaatatcctaaatctaattcttagtatgggatataaataccaggaaaaaaaaattattaacaatataaacacagattacagaaagattttaatatgcattcagccaagatgtctacctcatttctttttcattagttaccacccagggtgctcttctgagtcacagatgtacacagctgaaattactgtcaatttagtcagttgtaaayggcataacttcccaagctgtgcatggtttatataggtattatcccttcagtatcttggcaggatcactcttataataactttgctatcagttggccaatacagagtcaaacaaagttttttgcctgaaagatgtttaccctgaaggaattttttctgatactttttgtttttttctgcaaggaagaaaattcaaaccaaacattgcaaattatagaaagataacctttgattctcatttcatgacacataaaagaatgaaactttataaaaactcactgcttcttctgtcattgcagact

SEQ ID NO: 58161 - DNA, 600 bp, Chicken  19866894314816_1
cctggaagtgttcaaggccaggctgaacggggctgtgagcaacctgctctagagagaggtgtccctgcttatagcaggggattggaactagatggtcttaaaggtcccttccaacccaaaccattctgattgattgactacacttatttgcatgtgaatgtggatattcatatgaagaacggctctttcatgatattaggtttcttcagttttcttcataggcacaaccctagtgaagaaaacaccctaactcactgcagttctttggttttaggcagtctgctgaattaacactccgcrattacagctaagtggagtctgtgtatttcagttaccatgcatctgcaaataaaaaatacccttagcagcacatttttgtgctattgtttagggaggttatcgggcatatcaaacatgctcgaccactctctttgctggctgcagagcggtttgttttggcagtgtcatgaagatcctcggttagggctgatttcagtgctgattgaaactagctgagggtcggtctgctgcctccctcagtgtttaagtcttcctttgagccaatgtcaaaactaaaactaagtagcataggcttaaagc

SEQ ID NO: 58162 - DNA, 600 bp, Chicken  19866894314817_1
tgcaaaaagaaatcacccacgaaaaatggtggagagttataaaataacatttaacatgagcagatgggggaaaaaaggtaagtgttaaaacagtgacataggaatagccctgaataaacagttctctgcatgcattgtaacagaactgggtcactgagtgccagaaataaacatgcaaatactcagtgaaatcagcaatacagtatcaaatgtttcttgttaagaagctgaaagggttgttttaagaaatgtagctttcctgttgccaatttcttcttctcacagcacaatgtataagawgatgaaactggtttatccagcacactgaaaaagccaattgtggctgggaaatgaaatttcaaatatgtagctaagatagtaacaaacaattggcttctccaacgggattctggaagtttctacacctgtcaaatgcttgtttaagcagcactgctcttttccattcctcctcccttcctggtttaacacatccatcatgaacttttgttctgtgagggtggtgaaactcgaaaacaacagattgcctggatcagctgggagagtccatccttggagttatttaaacctcagtagaaacag

SEQ ID NO: 58163 - DNA, 481 bp, Chicken  19866894314817_2
actgctcttttccattcctcctcccttcctggtttaacacatccatcatgaacttttgttctgtgagggtggtgaaactcgaaaacaacagattgcctggatcagctgggagagtccatccttggagttatttaaacctcagtagaaacagccctaaggaatcttctccagcagactctacttcgaaccaaggtgcttgcaagctgcagagaatcagtgatgtggttgtacagctccatgagagctgaaatgctgaaatgcaggtagctgcaatctgacccaccgtaccatttcaagtgsttgaaatggtatctaaatgcaggtatcttactcgtagactgttaatctttttttccaacatagaagcagaaacatgtttttctactcttaagtgcttctttcacacaaagaattagccttcaataaataagtaaatccgtatcaagaaagaaatgcttcataaagaatacagtggcttcca

SEQ ID NO: 58164 - DNA, 599 bp, Chicken  19866894314818_1
  misc_feature (1)..(25): n is any nucleotide
nnnnnnnnnnnnnnnnnnnnnnnnntctattgtgatcccatgttggtcctgactgatggtatcttgcaagtatcagtcttcagaagctgaccaggtattgattaccatgatcatctttcttgcccttcctgaagataagaataatgtgagccagcttccagttgaccagaattgagcagattcctaagactgtcagcagatatctgagagaggtctttcagtaccgtgggatgaatcccattggagtctgtagacttgtgtgcactcagctgcagcagtagatcaagtcagctgggagcytagcactcccaggttgtggtgctccaacccgtggttggtgttaaggtggaggtgaagaagmcattaaatgtctgctttattttcatccccgtttggaaatggccagctttatcaagtaaaaaccaaccaacctaaaatatgcaccacttcttttttattatccatcacaacgtgccagcttcagttctgagcttcggccatgtgaatttctccctgtgaaagcagagggcatctctgtagtccttctgtatakcctgaccttgcttccaagcccatacgctttgcttttctgcctgagt

SEQ ID NO: 58165 - DNA, 600 bp, Chicken  19866894314818_2
tcttgcaagtatcagtcttcagaagctgaccaggtattgattaccatgatcatctttcttgcccttcctgaagataagaataatgtgagccagcttccagttgaccagaattgagcagattcctaagactgtcagcagatatctgagagaggtctttcagtaccgtgggatgaatcccattggagtctgtagacttgtgtgcactcagctgcagcagtagatcaagtcagctgggagcytagcactcccaggttgtggtgctccaacccgtggttggtgttaaggtggaggtgaagaagmcattaaatgtctgctttattttcatccccgtttggaaatggccagctttatcaagtaaaaaccaaccaacctaaaatatgcaccacttcttttttattatccatcacaacgtgccagcttcagttctgagcttcggccatgtgaatttctccctgtgaaagcagagggcatctctgtagtccttctgtatakcctgaccttgcttccaagcccatacgctttgcttttctgcctgagttcttggaggagatccctcttcagccagtctgccttctgcctccctgcttggcttccaacatg

SEQ ID NO: 58166 - DNA, 600 bp, Chicken  19866894314818_3
acttgtgtgcactcagctgcagcagtagatcaagtcagctgggagcytagcactcccaggttgtggtgctccaacccgtggttggtgttaaggtggaggtgaagaagmcattaaatgtctgctttattttcatccccgtttggaaatggccagctttatcaagtaaaaaccaaccaacctaaaatatgcaccacttcttttttattatccatcacaacgtgccagcttcagttctgagcttcggccatgtgaatttctccctgtgaaagcagagggcatctctgtagtccttctgtatakcctgaccttgcttccaagcccatacgctttgcttttctgcctgagttcttggaggagatccctcttcagccagtctgccttctgcctccctgcttggcttccaacatgctggaattgcccattcctacactcttaraagatggctcttcaaatgtcaccaccaatggtagacscccattcccattaccaaccagttccttgagcagcctgcagcctgctctcctagaatccaggctagtagctctgtaccagtcttctccatgtcaccaaagattttcaactcaaccatcgcacgatcgc

SEQ ID NO: 58167 - DNA, 600 bp, Chicken  19866894314818_4
cgtttggaaatggccagctttatcaagtaaaaaccaaccaacctaaaatatgcaccacttcttttttattatccatcacaacgtgccagcttcagttctgagcttcggccatgtgaatttctccctgtgaaagcagagggcatctctgtagtccttctgtatakcctgaccttgcttccaagcccatacgctttgcttttctgcctgagttcttggaggagatccctcttcagccagtctgccttctgcctccctgcttggcttccaacatgctggaattgcccattcctacactcttaraagatggctcttcaaatgtcaccaccaatggtagacscccattcccattaccaaccagttccttgagcagcctgcagcctgctctcctagaatccaggctagtagctctgtaccagtcttctccatgtcaccaaagattttcaactcaaccatcgcacgatcgctgtggttgaggcagccactgctcatcacttcacccatgaaaccatctctatttacaaacagcagaactaggatggcactcttcctgtcagctcccttcgtacctgcatcaaaacgttaccttgctgggcttactgg

SEQ ID NO: 58168 - DNA, 587 bp, Chicken  19866894314818_5
ccaacctaaaatatgcaccacttcttttttattatccatcacaacgtgccagcttcagttctgagcttcggccatgtgaatttctccctgtgaaagcagagggcatctctgtagtccttctgtatakcctgaccttgcttccaagcccatacgctttgcttttctgcctgagttcttggaggagatccctcttcagccagtctgccttctgcctccctgcttggcttccaacatgctggaattgcccattcctacactcttaraagatggctcttcaaatgtcaccaccaatggtagacscccattcccattaccaaccagttccttgagcagcctgcagcctgctctcctagaatccaggctagtagctctgtaccagtcttctccatgtcaccaaagattttcaactcaaccatcgcacgatcgctgtggttgaggcagccactgctcatcacttcacccatgaaaccatctctatttacaaacagcagaactaggatggcactcttcctgtcagctcccttcgtacctgcatcaaaacgttaccttgctgggcttactggtttatctagcaatcagatgatgaa

SEQ ID NO: 58169 - DNA, 600 bp, Chicken  19866894314821_1
gtggtttttgggttacctcctgaaggtgacagagaagggagaggagtgactcttgttttccttgggaagcaccacagccaactgtttggggaacatgcctcactagagccttctcaggacttctggcttctcctaaaggtagcaagctgcaagtgagcttcctcctcctgtcagggctgtagcagcaatgtcagagctgagcatcaggttggtcttatttcctaatcaaacgcatcctttaaaaatgaaatacatttctacagagaaagccaatctaaagagaaagccaacggagcaaarcacttatgagaatttgagaactcgatagctaaaaagaaagtgatgcaaayatataagttccatgcccaccataagttagcacagttatattggaatcgtggcttaatattttggcaaagccccattgcaaccttaccgcctccatgtatctggcacaagtatggaaaccgccacacgttccccaagccgacggcaaatccgatgcaacttaagatatactggaacttattatcccacttcggtctgccatcttctttagggacttcaggtggtacgtccattggtgaatcttcaggtagg

SEQ ID NO: 58170 - DNA, 600 bp, Chicken  19866894314821_2
tcttgttttccttgggaagcaccacagccaactgtttggggaacatgcctcactagagccttctcaggacttctggcttctcctaaaggtagcaagctgcaagtgagcttcctcctcctgtcagggctgtagcagcaatgtcagagctgagcatcaggttggtcttatttcctaatcaaacgcatcctttaaaaatgaaatacatttctacagagaaagccaatctaaagagaaagccaacggagcaaarcacttatgagaatttgagaactcgatagctaaaaagaaagtgatgcaaayatataagttccatgcccaccataagttagcacagttatattggaatcgtggcttaatattttggcaaagccccattgcaaccttaccgcctccatgtatctggcacaagtatggaaaccgccacacgttccccaagccgacggcaaatccgatgcaacttaagatatactggaacttattatcccacttcggtctgccatcttctttagggacttcaggtggtacgtccattggtgaatcttcaggtaggtgaatctttagattggtaaatcttctagtgtgaagtacccttggctttct

SEQ ID NO: 58171 - DNA, 600 bp, Chicken  19866894314821_3
gcttaatattttggcaaagccccattgcaaccttaccgcctccatgtatctggcacaagtatggaaaccgccacacgttccccaagccgacggcaaatccgatgcaacttaagatatactggaacttattatcccacttcggtctgccatcttctttagggacttcaggtggtacgtccattggtgaatcttcaggtaggtgaatctttagattggtaaatcttctagtgtgaagtacccttggctttctagtccctttccctataaatgggaagatgcttcaaaacgtgtctgtgctgygggttttatgggggatggcagaagggtttctccaaaaagaggcggcgctttctttttatgcagtgcaaaggaatgtgccattggaaatgccacagtttaaataccaaaccaggaattattattatatagacagagtgaccactcctgatgctccgcagttccttctatagttagggaacttaggaatatgttgttaatgggtaacttgggatcaaacagatttttattttctgttctccttctgttctcggataccatcaaagaagtgtgacactgaatataattaaaaagaaaccttta

SEQ ID NO: 58172 - DNA, 600 bp, Chicken  19866894314824_1
cagtagctctactaccatcacactagcttgtggttacactgacaaatagtaaaaagtagagttttggtttgccctaaatatttcagagcagaggtgtgcaatgggcaaaagcaagccagtttaggttatattctgcgcttctacctccagcactaccttgtgtcctctgtcctgtccccaacataagatcaagctcttgcaagattattaatgtccagctagcaggttcaccaggagcagtcccacactctggccaacctgaatttgagggccagagttggcaggctgtccgatgagacmgatcatctgatggatgcttgcttgctggacaccagccagccactgcctgtcacttagtgggcatgccaaaaatctgtgagctggccctagaaatgcagccagcagatacaccggcccgtgatggctgaagtgctaacctgggccactcctgccctaaaaggtttattaggtgaggatagagagaagagagaaactgcacgaggtgaatgtatagtctctttaattgctccaaatctgagtgttctgtatctaatcttaatgtgatcatatacatttgaatgttatgatagaaataccatg

SEQ ID NO: 58173 - DNA, 600 bp, Chicken  19866894314827_1
gccctgctgatttatttgtagcagcaatatgttaatgttatctgacagctactattgaagtgtcacaagcatgtgtatgcaataacgcagatgctgcagggaatccgctgcaggccactatcttcccaggcacagaaagcaaggggagggatgggaaataccttacagagcagaaatgttctactactccctactgcgcttgttcagagggaaaattgacagacaggtgaaaaggctgaagtaaaacacatgcagaaagcatgggaatattcagacaatctatgttgcaagctttgccayctgtgccttgatagttaaaaascagcaaaaccaaamccagacccagctactccaaggacaccatcccacgcaggctcccagtgcaaggagctgatagtgctgctgtactaacagatgggtgatatgagctgttagaattttaggagaggtaagaaaaatctttaggttttaagcttccttcttcatagcagtatacaagcgtgatgataacatggcataagtttggtttgattatactyactcctccaytgcccctcaagtacttacaggctaattgttttaacacccaggcaaatgaga

SEQ ID NO: 58174 - DNA, 600 bp, Chicken  19866894314827_2
agcaatatgttaatgttatctgacagctactattgaagtgtcacaagcatgtgtatgcaataacgcagatgctgcagggaatccgctgcaggccactatcttcccaggcacagaaagcaaggggagggatgggaaataccttacagagcagaaatgttctactactccctactgcgcttgttcagagggaaaattgacagacaggtgaaaaggctgaagtaaaacacatgcagaaagcatgggaatattcagacaatctatgttgcaagctttgccayctgtgccttgatagttaaaaascagcaaaaccaaamccagacccagctactccaaggacaccatcccacgcaggctcccagtgcaaggagctgatagtgctgctgtactaacagatgggtgatatgagctgttagaattttaggagaggtaagaaaaatctttaggttttaagcttccttcttcatagcagtatacaagcgtgatgataacatggcataagtttggtttgattatactyactcctccaytgcccctcaagtacttacaggctaattgttttaacacccaggcaaatgagaggtatcaccctcgtgtctcata

SEQ ID NO: 58175 - DNA, 600 bp, Chicken  19866894314827_3
gttatctgacagctactattgaagtgtcacaagcatgtgtatgcaataacgcagatgctgcagggaatccgctgcaggccactatcttcccaggcacagaaagcaaggggagggatgggaaataccttacagagcagaaatgttctactactccctactgcgcttgttcagagggaaaattgacagacaggtgaaaaggctgaagtaaaacacatgcagaaagcatgggaatattcagacaatctatgttgcaagctttgccayctgtgccttgatagttaaaaascagcaaaaccaaamccagacccagctactccaaggacaccatcccacgcaggctcccagtgcaaggagctgatagtgctgctgtactaacagatgggtgatatgagctgttagaattttaggagaggtaagaaaaatctttaggttttaagcttccttcttcatagcagtatacaagcgtgatgataacatggcataagtttggtttgattatactyactcctccaytgcccctcaagtacttacaggctaattgttttaacacccaggcaaatgagaggtatcaccctcgtgtctcatacataaagactgatc

SEQ ID NO: 58176 - DNA, 562 bp, Chicken  19866894314827_4
agtaaaacacatgcagaaagcatgggaatattcagacaatctatgttgcaagctttgccayctgtgccttgatagttaaaaascagcaaaaccaaamccagacccagctactccaaggacaccatcccacgcaggctcccagtgcaaggagctgatagtgctgctgtactaacagatgggtgatatgagctgttagaattttaggagaggtaagaaaaatctttaggttttaagcttccttcttcatagcagtatacaagcgtgatgataacatggcataagtttggtttgattatactyactcctccaytgcccctcaagtacttacaggctaattgttttaacacccaggcaaatgagaggtatcaccctcgtgtctcatacataaagactgatcaaagaattactccaaggtcacagaagaaaccaaaggcaaagtcaggatttgcatacagatttctcatattgcccaatgctttaacaaaaacatccaccagttcatcctatgtcttcatctccacaagaaaagccatacaggaaaaaacaagcaaaatattctcaa

SEQ ID NO: 58177 - DNA, 552 bp, Chicken  19866894314827_5
atgcagaaagcatgggaatattcagacaatctatgttgcaagctttgccayctgtgccttgatagttaaaaascagcaaaaccaaamccagacccagctactccaaggacaccatcccacgcaggctcccagtgcaaggagctgatagtgctgctgtactaacagatgggtgatatgagctgttagaattttaggagaggtaagaaaaatctttaggttttaagcttccttcttcatagcagtatacaagcgtgatgataacatggcataagtttggtttgattatactyactcctccaytgcccctcaagtacttacaggctaattgttttaacacccaggcaaatgagaggtatcaccctcgtgtctcatacataaagactgatcaaagaattactccaaggtcacagaagaaaccaaaggcaaagtcaggatttgcatacagatttctcatattgcccaatgctttaacaaaaacatccaccagttcatcctatgtcttcatctccacaagaaaagccatacaggaaaaaacaagcaaaatattctcaa

SEQ ID NO: 58178 - DNA, 599 bp, Chicken  19866894314832_1
  misc_feature (1)..(4): n is any nucleotide
nnnntgcctgtggctgagtatgtggtgtttttaccaagtctaattcgagatgcttgagatgtttctgaaagtttaatcttggcactaacagctgagaatgtagtgataaaagtcatatggctcatgatgtagattctgctttattggtccacaccctgaactcagacgcctttgaaaagttgcaaagaagacagtcactttaatttctgaaaatgcattgggagtgtttgagaaaaaaaaaataaagatggcaatttagataagctacaaactatgcgatcttctgaactgtgcttatayaggcgcagcagttatcagccagcacaaggttgaacgaatcttctaagcaccaaagttgtacttttacccatcactgtgcaatttttagtaatgattggtggtggaaaagaagacaattgctatttgctgattgttctgtgatgatagaaatacattttggttttttttttttctgttttaaaggaggggagaaattcttcacagccgttgcagtattttttcttttagcctttacaagataacaatgaaaaaatgggaacatttgtattgaaaactctgttgttgttttaattcaggtg

SEQ ID NO: 58179 - DNA, 600 bp, Chicken  19866894314833_1
gttccatactacaaggcacaaggatttaaccactgattcctctaccgagcttgcaacttctggttgaactagggagtctctttaggaaagatatctaatcttgatttaaagacttctttaaagactacttaacaactcatcaagcttgtctggggtttcttctttggtttataggagtaatgaaccgagtcccccatcctcccctcctggagatacttcttaatggaaagtaaaaatgccacaattacaacacaccatgtgtgggacataaaacctcactctcactctactatctatatygtatttaataaagtaccaacagagcagcaatgatgtacactgggattcgggcatcataaataaaaggaggaaaatgtaataatgggaagttggagagaaatatgaaagtcactgtaagaacagaaataaacaaggaaaaaataaaaacaaaaaaaaccccacagtcaggcataaaatagcacattttacatcaggtatacttttgaatgattctctctaaatagatgaacagatacacaggcacgcatgtacataggcacacatacacccgacttgccagatcttaccagatgatgtagt

SEQ ID NO: 58180 - DNA, 600 bp, Chicken  19866894314834_1
gtgcaagtgaatctctggttactaacatccctggtgttggaaatcctttactgagctaaaagaaaaactttacttgctcatatcagcaaagactcttgtagtatatacttaacccttaatcttgtttggtatgttggtacctacttgcagtattacagtaaaataatatttgatgttcaagaagacattatccttcattttaagtttaagttcataaacaaaacaaaaacttggctatttaacagcttgttagtactatataaaataccataacacaaaattgtgagttttattccattsttcttgttctactttagaaatcatccgttatttatttaatggcaaaattgtaaagaatttaggtagcattcttgtgtatcttggagtgtarcttgctaacaccaatagaaaagagaaaagccaagaatgagatttcccaaattaccattaaccactggggcagtggcaaactaccccattgtggctcatgactggtgaaaactctttttttcttttttctttttttttttttccagggatctagacttctccctattactgctgagttgtgttttctcatgtgtagacagtataagaaag

SEQ ID NO: 58181 - DNA, 600 bp, Chicken  19866894314834_2
actcttgtagtatatacttaacccttaatcttgtttggtatgttggtacctacttgcagtattacagtaaaataatatttgatgttcaagaagacattatccttcattttaagtttaagttcataaacaaaacaaaaacttggctatttaacagcttgttagtactatataaaataccataacacaaaattgtgagttttattccattsttcttgttctactttagaaatcatccgttatttatttaatggcaaaattgtaaagaatttaggtagcattcttgtgtatcttggagtgtarcttgctaacaccaatagaaaagagaaaagccaagaatgagatttcccaaattaccattaaccactggggcagtggcaaactaccccattgtggctcatgactggtgaaaactctttttttcttttttctttttttttttttccagggatctagacttctccctattactgctgagttgtgttttctcatgtgtagacagtataagaaagcctgaatgcatgtagcagttgtgaacatggatattcaaagagaagcagtctggagatttttatatcactgcctgatataaatgtgtccaaa

SEQ ID NO: 58182 - DNA, 600 bp, Chicken  19866894314859_1
cagccgcaccagcccgctggataacgtcggacgggagctgggatcgcatcttttgcaggtaccgctctggaaacgcggtattaacgattaaagaaaccagaccctcttctgagctttcggttgccaccgtgactaatttttaagggttcacgtgtttaattacccaaaaaaaaaaaaaaaaaaaaaaaaagtgggaggcgagggaagggatggacggactcctctgcacaaacgcagttcaggtagaggaaggaatattagagttactgtatccatgctttgtgtgtgtgtgtgtgcggrggattgcgtgggytgtgacacatccttaatagattggggtctcttctgctgcctccgcacccagaagccccatttccgtcttctgaaacgcgcttgacaaatcatcccgtcccacacagcccttattcgctccgcggggaggcttacattcccctcgcttgctcagcaggggctaacatcccggggagttagaaacggggtggcagtgctcggaaattctcgggtgggcattggtcatcagcggcagttytgcgggctgcggggtcacggttatagaggagtcctgcccagggctccgtt

SEQ ID NO: 58183 - DNA, 600 bp, Chicken  19866894314859_2
ccgctggataacgtcggacgggagctgggatcgcatcttttgcaggtaccgctctggaaacgcggtattaacgattaaagaaaccagaccctcttctgagctttcggttgccaccgtgactaatttttaagggttcacgtgtttaattacccaaaaaaaaaaaaaaaaaaaaaaaaagtgggaggcgagggaagggatggacggactcctctgcacaaacgcagttcaggtagaggaaggaatattagagttactgtatccatgctttgtgtgtgtgtgtgtgcggrggattgcgtgggytgtgacacatccttaatagattggggtctcttctgctgcctccgcacccagaagccccatttccgtcttctgaaacgcgcttgacaaatcatcccgtcccacacagcccttattcgctccgcggggaggcttacattcccctcgcttgctcagcaggggctaacatcccggggagttagaaacggggtggcagtgctcggaaattctcgggtgggcattggtcatcagcggcagttytgcgggctgcggggtcacggttatagaggagtcctgcccagggctccgtttccttccagcttt

SEQ ID NO: 58184 - DNA, 600 bp, Chicken  19866894314859_3
aggaatattagagttactgtatccatgctttgtgtgtgtgtgtgtgcggrggattgcgtgggytgtgacacatccttaatagattggggtctcttctgctgcctccgcacccagaagccccatttccgtcttctgaaacgcgcttgacaaatcatcccgtcccacacagcccttattcgctccgcggggaggcttacattcccctcgcttgctcagcaggggctaacatcccggggagttagaaacggggtggcagtgctcggaaattctcgggtgggcattggtcatcagcggcagttytgcgggctgcggggtcacggttatagaggagtcctgcccagggctccgtttccttccagctttctgaataatcgcagcctgagagggaatacgtcttgtctagaataacacccccggaggacggtactttatgtgtcggtctgtctgtgtccatctctctgtctgttgctccctctgccgaccctttccccagacgctggacggtttcatattcgtggtggctccggatgggaagatcatgtacatctcggagaccgcctcggtgcacctgggcctgtctcaggtaggctgggggccggc

SEQ ID NO: 58185 - DNA, 599 bp, Chicken  19866894314866_1
  misc_feature (1)..(236): n is any nucleotide
nnnnnnnnnnnnnnnnnnnnnnnnnnnnnnnnnnnnnnnnnnnnnnnnnnnnnnnnnnnnnnnnnnnnnnnnnnnnnnnnnnnnnnnnnnnnnnnnnnnnnnnnnnnnnnnnnnnnnnnnnnnnnnnnnnnnnnnnnnnnnnnnnnnnnnnnnnnnnnnnnnnnnnnnnnnnnnnnnnnnnnnnnnnnnnnnnnnnnnnnnnnnnnnnnnnnnnnnnnnnnnnnnnnnnnnnnnnntgtgtttaaatcaacgtgttctctgtccagtgttgtcagaaagagagaatacttcaactggggraaaaaaaagttactatctcacttaacgggacttcccaagcttcttcaaatccagcacatccagtttgttatctaagcactcccgttctcttaaagatttacagtgatttattttcagtgtcagtaacagcatcatcattactgagagatccaactgtatcaaatgttacattaataaatcatcaaccctgaaaatcgatactccaatgaattgaatcaaatgaaagtgtttctgtagagcagtttcaccgacaaactcgaaacctctgctgtccaagttcataaaaatttctgtcagct

SEQ ID NO: 58186 - DNA, 600 bp, Chicken  19866894314866_2
ttgttatctaagcactcccgttctcttaaagatttacagtgatttattttcagtgtcagtaacagcatcatcattactgagagatccaactgtatcaaatgttacattaataaatcatcaaccctgaaaatcgatactccaatgaattgaatcaaatgaaagtgtttctgtagagcagtttcaccgacaaactcgaaacctctgctgtccaagttcataaaaatttctgtcagctggttaggccagagccatcagacacagctctcctgactcaatgtcagacaaacgttatcagctgayggattattttttttctcgtgtcaatcaatcagtgtgccyagtgttacaatttttgcttcctctaacgcgacacaaattgctactttatttcatggcctgaaaagatactaacggttaggtctgaccttccttttccattttccagtttgtagagccctagcttcccattcacaactgcctgtttcctcctccatccttctttaaatgtactcaaacagaaaaactaagagctctatttgtttttccaagtttgcagatcagttaagtatgcaaaaacatgcatgccatgcacatttattt

SEQ ID NO: 58187 - DNA, 600 bp, Chicken  19866894314866_3
tgatttattttcagtgtcagtaacagcatcatcattactgagagatccaactgtatcaaatgttacattaataaatcatcaaccctgaaaatcgatactccaatgaattgaatcaaatgaaagtgtttctgtagagcagtttcaccgacaaactcgaaacctctgctgtccaagttcataaaaatttctgtcagctggttaggccagagccatcagacacagctctcctgactcaatgtcagacaaacgttatcagctgayggattattttttttctcgtgtcaatcaatcagtgtgccyagtgttacaatttttgcttcctctaacgcgacacaaattgctactttatttcatggcctgaaaagatactaacggttaggtctgaccttccttttccattttccagtttgtagagccctagcttcccattcacaactgcctgtttcctcctccatccttctttaaatgtactcaaacagaaaaactaagagctctatttgtttttccaagtttgcagatcagttaagtatgcaaaaacatgcatgccatgcacatttatttgcttgtgtttgagttggtgaatgtgtttgtgctcactac

SEQ ID NO: 58188 - DNA, 599 bp, Chicken  19866894314877_1
  misc_feature (1)..(141): n is any nucleotide
nnnnnnnnnnnnnnnnnnnnnnnnnnnnnnnnnnnnnnnnnnnnnnnnnnnnnnnnnnnnnnnnnnnnnnnnnnnnnnnnnnnnnnnnnnnnnnnnnnnnnnnnnnnnnnnnnnnnnnnnnnnnnnnnnnnnnnnnnnnnnccagactatacacatatataaaaccttaaatttaaaaaacctgatatttgagaatattttttttttctggaagaaatctgttccagtgcatttcttcctctggttcaggatctcacattcacgtaaggaactatgtatatttatcaggggatggaaagragtcaggaaaaaactgcatgctcaayttgaacaggaaaatccctaaggagaagcatttacagttaaataaaatcagcccaaggctgtttaatgtctcaaatactgtcaagaataccattccactgaaggcgaagcagtttgtaccatttcagcaaatcttaacaacctgatggagagtracatgcgtatgtatgtacaaatacctgccttgaactctgcctctcaatgtgccccagcccaagtgaacaggatctggtgtgtgagctctgagaggtgggctctcacagttctgtgtgcca

SEQ ID NO: 58189 - DNA, 599 bp, Chicken  19866894314877_2
  misc_feature (1)..(115): n is any nucleotide
nnnnnnnnnnnnnnnnnnnnnnnnnnnnnnnnnnnnnnnnnnnnnnnnnnnnnnnnnnnnnnnnnnnnnnnnnnnnnnnnnnnnnnnnnnnnnnnnnnnnnnnnnnnnnnnnnnnccagactatacacatatataaaaccttaaatttaaaaaacctgatatttgagaatattttttttttctggaagaaatctgttccagtgcatttcttcctctggttcaggatctcacattcacgtaaggaactatgtatatttatcaggggatggaaagragtcaggaaaaaactgcatgctcaayttgaacaggaaaatccctaaggagaagcatttacagttaaataaaatcagcccaaggctgtttaatgtctcaaatactgtcaagaataccattccactgaaggcgaagcagtttgtaccatttcagcaaatcttaacaacctgatggagagtracatgcgtatgtatgtacaaatacctgccttgaactctgcctctcaatgtgccccagcccaagtgaacaggatctggtgtgtgagctctgagaggtgggctctcacagttctgtgtgccagagcttactgctcctacagccaagtg

SEQ ID NO: 58190 - DNA, 600 bp, Chicken  19866894314877_3
acctgatatttgagaatattttttttttctggaagaaatctgttccagtgcatttcttcctctggttcaggatctcacattcacgtaaggaactatgtatatttatcaggggatggaaagragtcaggaaaaaactgcatgctcaayttgaacaggaaaatccctaaggagaagcatttacagttaaataaaatcagcccaaggctgtttaatgtctcaaatactgtcaagaataccattccactgaaggcgaagcagtttgtaccatttcagcaaatcttaacaacctgatggagagtracatgcgtatgtatgtacaaatacctgccttgaactctgcctctcaatgtgccccagcccaagtgaacaggatctggtgtgtgagctctgagaggtgggctctcacagttctgtgtgccagagcttactgctcctacagccaagtgactgcagtaccgggtgcggttgcaggccatacctcactgtgccagagcaccaagacaccacagcttcttcttttttctggctcccttgggtgtacagtctcttttcctgactgctttattgttgtatagacctatcatatacacatacatatga

SEQ ID NO: 58191 - DNA, 600 bp, Chicken  19866894314884_1
ctttacttgttatgtaaacagccttgtttttctcaatgatcctgcttcacagaagcactgaagtcccaataagacttttatcattgcatccaccaggtgcaaggacttttcttgagttccaaataaattgttttgagttatagtgcaccaagaaagaaagttgcataacaagcaatggaaattcaacaaattgtggaaaaacagctaaagggtggccaaaagtcactgtcatgaagctgaaagaaaaataaaaagaaggaagcaggtggttgtatgaccaacctagaggcaacctcacaygctcagagggacattagcaaatattcatgagttctttgaaaaaaaaaaatgaatatgtatgccaatgtattgcatatgtatgtcttagctgtttaaatgtagaacccataagagcacacatgtgcatgatttattgagtcacttggtacgtattgtgagaaataaagtgatgccacattctaacatcagattggagttagttttcttcccagatttcagatgacaatctcgaagtccaattgaccagagagtaactctgactttaaataataatcagttatctcttggcttccagcgctg

SEQ ID NO: 58192 - DNA, 600 bp, Chicken  19866894314886_1
caagtgagacttccaaaaaggcatgagaattttaataaaaataaatacctactctcttgaaacaaaactaggcctcatcaagtttgtcaagatagcttgcactaagatactactttaaaaagagtaaaaaaaacccccagcaatttatgttagatatgcttgaagataaatagagctggtgaaagagacacttatacatttaagtgcaagaagccacacttgagcttttagcatacatgtatttctaaactgtgaagatgtgaaagcaaaggttatgattcgtagggcaactgttttttyctatcatttttttattagattatgaagcacaggagcttactccaggtattccccttgaacttgatttaaaccactggtagctctctaacaccaggagctgtggtattttgccatgtatcatacccctctacttgctatttctaaattgctcgcttatatcttgtgatgggtccttcagtttctcataaattaataaggcatctgtgagtatttgcaagcaggtcttagaattctgaatctgccccagtacagacactgtaaaagaaaaaaaaaaaaaaaaaaaagaagaagaaaaaagaa

SEQ ID NO: 58193 - DNA, 600 bp, Chicken  19866894314893_1
acatcatccagctggtgagcatcgccaggctccgccggggacgccccacgtggcagagcgctgcgccacgtccccccgcttgtcccctctgcagggcggtacggtcatcggcagcgcccgctgcaaagccttcaccacgcggcagggccgcctgcgcgccgcccgcaacctggtggagcacggcatcaccaacctctgcgtcatcggcggcgatggcagcctgacgggcgccgacgtcttccgcgccgagtgggccgggctgctggatgagctgctgcgggacggtgcgtggtgtgggaygcgggaggtgggacgcgggaggtgggacgcggtgggtaccaacgagccaaccctggagctcaacccgaagcgttgggcgtcggggcgcagggctgatcagcgaggaggtggcgaaggccaacgggcggctcaacgtggtgggtttggtgggctccatcgacaacgacttctgcggcaccgacatgaccattggcaccgactcggcgctgcatcgcatcatggaggtgatcgatgccatcactaccacagcgcagaggtgagtgttggcctcgctatcggcacagctcccaccctcctcct

SEQ ID NO: 58194 - DNA, 600 bp, Chicken  19866894314895_1
actcttcaggctcatgtccagcttttcatccaccagaaaccccccaggtctttctctacagggctgctctcagtgagttcttctcccagtctgtacaaataactgagattgctctgacccaggtgcaacaccctgcacttgaccttgttaaacctcaatggattcacatagccccactttttgagtctgtccaggtgcctttgaatgtcaagtcttccagcttttcatgatagaaacctttttttctcaagctatttatccactctaagatactttgtctgcctttagcatttctgtggsgtgttttttgctttcattttactggactgtattgacaacagagataagactctactggtggtcacctcaattatgactggtagataagaacagcaattgcagtgaaatcctggctttgcctttgtgctcttgtcattctttgattctttggtcccaagtagaaactgttaagcaacgcaggttccttttctattgtgtygagttattctagagggcactagaagagcagaggttcaagtgttttgaatgaggacagactcttcaaatgcttgagctsctggacccttaagagggttttcc

SEQ ID NO: 58195 - DNA, 600 bp, Chicken  19866894314895_2
tttgaatgtcaagtcttccagcttttcatgatagaaacctttttttctcaagctatttatccactctaagatactttgtctgcctttagcatttctgtggsgtgttttttgctttcattttactggactgtattgacaacagagataagactctactggtggtcacctcaattatgactggtagataagaacagcaattgcagtgaaatcctggctttgcctttgtgctcttgtcattctttgattctttggtcccaagtagaaactgttaagcaacgcaggttccttttctattgtgtygagttattctagagggcactagaagagcagaggttcaagtgttttgaatgaggacagactcttcaaatgcttgagctsctggacccttaagagggttttcctgagtatatgtaagcagtgattattttgaaggactggtaacagggcagccttaggatattctcagaggtttagcaaaagtcttgaccaagtggctcttgtccttactctcagtgtactgtttaaagtataaacaactgaaagtgctactcaaaggaaagcttgctatatagttttttaagcagccaagcaacagtcttt

SEQ ID NO: 58196 - DNA, 600 bp, Chicken  19866894314895_3
tctgcctttagcatttctgtggsgtgttttttgctttcattttactggactgtattgacaacagagataagactctactggtggtcacctcaattatgactggtagataagaacagcaattgcagtgaaatcctggctttgcctttgtgctcttgtcattctttgattctttggtcccaagtagaaactgttaagcaacgcaggttccttttctattgtgtygagttattctagagggcactagaagagcagaggttcaagtgttttgaatgaggacagactcttcaaatgcttgagctsctggacccttaagagggttttcctgagtatatgtaagcagtgattattttgaaggactggtaacagggcagccttaggatattctcagaggtttagcaaaagtcttgaccaagtggctcttgtccttactctcagtgtactgtttaaagtataaacaactgaaagtgctactcaaaggaaagcttgctatatagttttttaagcagccaagcaacagtcttttcatctacaccctgctccagggagacctcattatggccttccagtacttgaagggagtatataaacaggaaggggaat

SEQ ID NO: 58197 - DNA, 600 bp, Chicken  19866894314901_1
acagaaacccagatctctgaaagatttgatatggcaccaggagaagagaggatataaagattcagaatgatttacagcactgtaggaagcacaagtgtccaggtatattattccttattttatcaagctgagtttaatgcccttggaagtcagagggaaacagttgtgtatttggatgacacattcacagactttgggtagcttaaatttggcaagtggttgttaaagggaaatttctgaaccaaacaagcttacattgcatctgcctgagacaaagagagatctcagcttgttgcaggrcttttcttaaagcccagcttactctaaacataactgcaggagcagccaaggctttcaatactcaagggctttctgaaaagtgcattttcaggtgtacattaagcaggtgtgaaaacataaagaaaacagaccaaaaactgatttcatttacactggattaaatcttgaaaagcttcagtgcttttgcacttcattttctacagtataaccacagcccaccatctgtttctcctaaaaggaaaccatacaacaggacttttagtgtaaatggcatttcttctgacatgtttatccctttag

SEQ ID NO: 58198 - DNA, 600 bp, Chicken  19866894314905_1
catccataaatcaaagaaaggtttcttttcaacagctatgaactagcactacattcaaaaggcacatgaaacacgaaaaacactcaaggcttcacaactacacaaacgcaaggcaattcttctcacgtgaccctggctttgcaaagctaggatctgacattacgggaactaaactgtgcaaaacaattttagaattacaacatgcttttcaaaataaccacccaagaggattagtgctctcagcattcaccttacagctcagaagtacaggagaacggagaatgggaaagaataacatcraaagtttgagtagaaaaatatacgtaatcaggctataacctggtaaatttatttcataaaacgtgatgaaacacttaaatgctgtctacagacagactcaggtttctggtatcacaaatatgaaataaaactacattaaarggaaagctggcaaatgaaaggctttcttttagcaatattcacaataaggtggcccctgcaaagagtataaaatataccctttcctttgagtatgaacactttcccatgcatttcattctacaaattttgccttaattgaaagcacagcatgacattttg

SEQ ID NO: 58199 - DNA, 578 bp, Chicken  19866894314905_2
caaagctaggatctgacattacgggaactaaactgtgcaaaacaattttagaattacaacatgcttttcaaaataaccacccaagaggattagtgctctcagcattcaccttacagctcagaagtacaggagaacggagaatgggaaagaataacatcraaagtttgagtagaaaaatatacgtaatcaggctataacctggtaaatttatttcataaaacgtgatgaaacacttaaatgctgtctacagacagactcaggtttctggtatcacaaatatgaaataaaactacattaaarggaaagctggcaaatgaaaggctttcttttagcaatattcacaataaggtggcccctgcaaagagtataaaatataccctttcctttgagtatgaacactttcccatgcatttcattctacaaattttgccttaattgaaagcacagcatgacattttgtcaagaccataccttgctaaagttctcctaaccagctgcagcaacttccttgcctggatgatctatctcactttatttctatctccagacagacagttcttaatttctggggggtgcat

SEQ ID NO: 58200 - DNA, 599 bp, Chicken  19866894314906_1
  misc_feature (1)..(131): n is any nucleotide
nnnnnnnnnnnnnnnnnnnnnnnnnnnnnnnnnnnnnnnnnnnnnnnnnnnnnnnnnnnnnnnnnnnnnnnnnnnnnnnnnnnnnnnnnnnnnnnnnnnnnnnnnnnnnnnnnnnnnnnnnnnnnnnnnnngctgataacaacccgtgcttgtggccgaggcccagcagccctgcatgggagggcagagcccaggggagtccgcatgaagtccaacacgaaggctctgtgctcttacactctttgcagcattgctctgcatgcacaaactccctggtgccgagaagcactgcacaccctstgccctgcctagggcaagcatgggcattgcaaaaggatgtagtagaaaaactaaaggtttatttatttatttttttaataaaatacattcttacaaaataactctttctctcccatgctgagggaccgagcatggttctcactggctctcctttcaccccctctcctcaatctggatctgctcaaggctgcaggggcctgggatgcaggacacctcagcacgggtccagcaccccacacaaggctggtggaggtcccgcgggtgccttagtgagagcaggtcccccggtggcccgtgca

SEQ ID NO: 58201 - DNA, 563 bp, Chicken  19866894314907_1
  misc_feature (1)..(5): n is any nucleotide
nnnnnagactgctaaagagaaagcacataaatataaggagaggtgttagtactctcatctgaagtatggggtctggaaggcccgaaggggagtatgttctcatgctattttgcaggagtacccatgttttgtacttccagcattccaggcaatagctgcaatccagcctacactgcctttcagaggtaacattaattgggtgaatgctattaatcaagcctaactcgcccttagacttctgcgagcctggcatttgcttcctgcttgaatcagaaacctctaaaagcataggcctttagraaagctgtactcacaatccttcccccgctggtgatttttctcaggccctcgcgctcgcactgtgctgctgctgcaatcgctgggagacaattggaggttatttttagactgcctgctctgcagagctgacatttgtaggttaggcgtaccagttgctggctgctgcctctgtcttccctaaatatttcccttccaacagctggatgtccccctcctccttccccagtctttccctgcaagtatcaaggtataaatccacattg

SEQ ID NO: 58202 - DNA, 600 bp, Chicken  19866894314921_1
aagcacggtgctttatgaacaaataaaagtgaacgatctttgcttcaaacccacataatgaatgtatactttgcacacgcactggagcaggcgccgctagctcattgtgcagggaacacgaggggggaaaaagtttctacatctctaaaaaaattaagaaataacagcactcccttttacattcactgacatgaaaggcaaaaccaaaaccgagctttccaaccgctcctaacgagccaagcccatctcatttccttaccacgcagaggtgttgcccccatgggctccctgtgcagagcsaggcagacagaagtgaggaaatccacttgtcacagtataaggcaaaaagaaaaggtttctcttcctgagttgcaaataaccgggaacacaataaccagggaaagctacatatgtagccaagcacagtacaaacgccctgctcggtcactgacaagctaaaattagtagcttacccaactgcccagaactatgcgctgccagtgcctccccagcatctccctgtttgtctttctggttgctctcccgttggtctcacccgttaatttgtccctcggggagcagccacgccgagcccagcag

SEQ ID NO: 58203 - DNA, 600 bp, Chicken  19866894314934_1
gcactgaggctcaacagagatctgttttgaatggggctccttaaataagactgctgttatcaatgttttgtcatggaaatgtcattagcagcagtacaaataataataagtaaatgtacagcagtgtgggagagctgatgctgatgtgcagtcagcatccaaactgatcatggagttgattcatggccttagtgtgaagctggcaactcagaccttaattgttttaataattagggaaattgttacagtgtgttactgctgtaagttttactgttgtatttaagctttacttgtgctgtraaaatatttaagtggtctctcagaggaaaaattaggactcttgcttctgtagttgctccctggagtactgtgggattttatgggcaactggaagtgtttgaaagccttgctctgctctactgcagcccctgcctgcccctagccatgcatccacctgagagagagcaaacatggatcatccttgcctccgtttcatgcctcagctctgctgcattccttgcagcatcccgtatgtaatgcagtactgcttgccccagggggatatcatgtttttatctcctatttattttgctcactgga

SEQ ID NO: 58204 - DNA, 600 bp, Chicken  19866894314939_1
ttcagaatcctttagttagtctgcatcctgaattatgtgacctgcacattcctacagttgttcttagcttggaaaagagaaagggccttggacacagtcctgtactaagtagatatgcaagaaaaaaaataatcataatctaaacaatctcctcccctctctgaaaaagaaacacctaacaaaagccctttacaatctcagttaaatggcagatttggtacagatggagggctcttttaaacagaagagtggaaatgtccttttacatcatcactactctgctcccaaaccagatggagygcttatgattactggcttggaagcaacttacaaacaaagcaacacatggcagaattcagcagaaagaaaaacatggtttgacatgagatacagacaatataaatatcttcccaagtatgggaaagacaagctgaaatagtttacaatgatctggaactactgatccagattttacaagaaggatagaatttttcctgcaactgcagtggatgatatttcagacagttctgaaaggtaaaggtataagaagcccaccagaacagaggacatagctctgtagtatttcaggcattctttcag

SEQ ID NO: 58205 - DNA, 600 bp, Chicken  19866894314939_2
aggctgcaggatcacatgccaagtcagaaaagatgcagactgaatacagtgaaagaaatgaacctcatcagacaaactgccccattcctctaagacatccccccagcgtcacactcctcacatctacggatctagattccaccaagttacgacttcgagaaaagtacatttactcattgtacttcaattatcagagtcacggctaccgagaacgtacagacacagcaaattaaataaataaatcatgtcctagttacaaaagagtcagcatcatctgggtacagaaccaacatccatcaygaaaatactaygtttgctatactacaattcaaacgctgccagcccagttcatttgctattagaaaacagccacataattagaaatccataggcagaagcataaaataaagaaaaattaaaaaaataaggagagaaaaacaatccttcatattttaagtcaaggtcacgcaacatgattaaaatacttttatttttcccgagtcttatttctgctctttcataatatactgctcctgaagagaaagtagctacaaaacctgcaaatcctttagttgttttcaagtagctattttttgctta

SEQ ID NO: 58206 - DNA, 600 bp, Chicken  19866894314939_3
tcacatgccaagtcagaaaagatgcagactgaatacagtgaaagaaatgaacctcatcagacaaactgccccattcctctaagacatccccccagcgtcacactcctcacatctacggatctagattccaccaagttacgacttcgagaaaagtacatttactcattgtacttcaattatcagagtcacggctaccgagaacgtacagacacagcaaattaaataaataaatcatgtcctagttacaaaagagtcagcatcatctgggtacagaaccaacatccatcaygaaaatactaygtttgctatactacaattcaaacgctgccagcccagttcatttgctattagaaaacagccacataattagaaatccataggcagaagcataaaataaagaaaaattaaaaaaataaggagagaaaaacaatccttcatattttaagtcaaggtcacgcaacatgattaaaatacttttatttttcccgagtcttatttctgctctttcataatatactgctcctgaagagaaagtagctacaaaacctgcaaatcctttagttgttttcaagtagctattttttgcttaactttgacaag

SEQ ID NO: 58207 - DNA, 600 bp, Chicken  19866894314941_1
ctaagaacaaaatagctaatagtaggaagcataaatgtatgtgaaatgatactgtctaatagtgcaaagagatatgatctcctgaagttgattttgaaagccaatggtctcccggtgccatcaagcatccaactattatggtaactgtataaaattaacaatctctcaaacaaaaggctgccagattaagctatacaaacagcaccaattgtgcaggtttctatcgcttaagtaattgcagggttgagaaatatcgcttgtgtagttcagggtgaccttgttttgtggaattaagatgartgttcatttgttaatattataaactgaaaggattcaaagcctgcttggattttcagatgtgagtgccagcatccacagtccgtcagcataccagattgcatgtgcacagcatacacatatctatgctgtatagatagcaccagcgaaaaattaagcaaaggaaaagcaaactcagagggatgccgccacatgagatctcatctacaatcaggttaataaaacaagtaagcacgtttgcaagcctagaatgatctaagaaaggttttcattcctcagtccaactttaggataaagcagaag

SEQ ID NO: 58208 - DNA, 600 bp, Chicken  19866894314943_1
gctcgtgagtgtgactgttaccatgggcacacatctaatcaaatggatcctaattacgtctattacccaatttggcacttggagagtgcttcagtgattattcttctgcttgtctgacaaataacatgattattcagtaagctgcatatgttttaatggagcatttttgttctttgataagaagctgtctaactaaccaaaaagtgcttttcacttgcaaaagcatagctaatattagcaaccagactctattcattacgcttaataacctaataaatatatttaagactctgtgctacrctcagttacctttagaaagcactttatcattagtctctaaaagcaaaatggtctcttcttttcaaggatgagagcacttctaaaacttcagttgaagatcatagattataaatgcaactcattttaaaaataggtttaaacattgatacttgcctttagctttaagactgaaaacagagtacttacataagtcacagatttatgagagaagcaaggaatttttcaagaatatgtcaaaaagaagctggtgatgctgatgctcactgccttttgccaaacttatgcctttcacagcatgag

SEQ ID NO: 58209 - DNA, 600 bp, Chicken  19866894314943_2
tcagttacctttagaaagcactttatcattagtctctaaaagcaaaatggtctcttcttttcaaggatgagagcacttctaaaacttcagttgaagatcatagattataaatgcaactcattttaaaaataggtttaaacattgatacttgcctttagctttaagactgaaaacagagtacttacataagtcacagatttatgagagaagcaaggaatttttcaagaatatgtcaaaaagaagctggtgatgctgatgctcactgccttttgccaaacttatgcctttcacagcatgagraaaaaaaaagtaaaaaattggcatttctcctgcactaccacaattctccctggcacaaacagaaaacaaggattttcctgtcaaaggaaggatgctgccagcaggacagtgggacaggtggtgatggaggctgcagagctcagccatgctttatatcatctgagacaagaykggagcctgtcagacctgtgtcaatgagagcctagcttccagggacacgagatgcagacagcatctcactttccttctctgtctttctggcaactctttgctcacataatttttcttttcaatatattt

SEQ ID NO: 58210 - DNA, 600 bp, Chicken  19866894314943_3
cagttacctttagaaagcactttatcattagtctctaaaagcaaaatggtctcttcttttcaaggatgagagcacttctaaaacttcagttgaagatcatagattataaatgcaactcattttaaaaataggtttaaacattgatacttgcctttagctttaagactgaaaacagagtacttacataagtcacagatttatgagagaagcaaggaatttttcaagaatatgtcaaaaagaagctggtgatgctgatgctcactgccttttgccaaacttatgcctttcacagcatgagaraaaaaaaagtaaaaaattggcatttctcctgcactaccacaattctccctggcacaaacagaaaacaaggattttcctgtcaaaggaaggatgctgccagcaggacagtgggacaggtggtgatggaggctgcagagctcagccatgctttatatcatctgagacaagaykggagcctgtcagacctgtgtcaatgagagcctagcttccagggacacgagatgcagacagcatctcactttccttctctgtctttctggcaactctttgctcacataatttttcttttcaatatatttg

SEQ ID NO: 58211 - DNA, 600 bp, Chicken  19866894314943_4
agaaagcactttatcattagtctctaaaagcaaaatggtctcttcttttcaaggatgagagcacttctaaaacttcagttgaagatcatagattataaatgcaactcattttaaaaataggtttaaacattgatacttgcctttagctttaagactgaaaacagagtacttacataagtcacagatttatgagagaagcaaggaatttttcaagaatatgtcaaaaagaagctggtgatgctgatgctcactgccttttgccaaacttatgcctttcacagcatgagaaaaaaaaaagtraaaaattggcatttctcctgcactaccacaattctccctggcacaaacagaaaacaaggattttcctgtcaaaggaaggatgctgccagcaggacagtgggacaggtggtgatggaggctgcagagctcagccatgctttatatcatctgagacaagaykggagcctgtcagacctgtgtcaatgagagcctagcttccagggacacgagatgcagacagcatctcactttccttctctgtctttctggcaactctttgctcacataatttttcttttcaatatatttgggaagtgaaca

SEQ ID NO: 58212 - DNA, 600 bp, Chicken  19866894314943_5; identical to SEQ ID NO: 58211

SEQ ID NO: 58213 - DNA, 600 bp, Chicken  19866894314943_6
aacagagtacttacataagtcacagatttatgagagaagcaaggaatttttcaagaatatgtcaaaaagaagctggtgatgctgatgctcactgccttttgccaaacttatgcctttcacagcatgagaaaaaaaaaagtaaaaaattggcatttctcctgcactaccacaattctccctggcacaaacagaaaacaaggattttcctgtcaaaggaaggatgctgccagcaggacagtgggacaggtggtgatggaggctgcagagctcagccatgctttatatcatctgagacaagaykggagcctgtcagacctgtgtcaatgagagcctagcttccagggacacgagatgcagacagcatctcactttccttctctgtctttctggcaactctttgctcacataatttttcttttcaatatatttgggaagtgaacagaagaaggcccccctggaattttccctcagcacattttactttccatccccatccttcctgcacagccatgaggagaaggccatgcagcacccaggttctagcagcctcttccttctattctactgtgcacagaaaggatgacacaaggagaaaggaag

SEQ ID NO: 58214 - DNA, 600 bp, Chicken  19866894314943_7
acagagtacttacataagtcacagatttatgagagaagcaaggaatttttcaagaatatgtcaaaaagaagctggtgatgctgatgctcactgccttttgccaaacttatgcctttcacagcatgagaaaaaaaaaagtaaaaaattggcatttctcctgcactaccacaattctccctggcacaaacagaaaacaaggattttcctgtcaaaggaaggatgctgccagcaggacagtgggacaggtggtgatggaggctgcagagctcagccatgctttatatcatctgagacaagaykggagcctgtcagacctgtgtcaatgagagcctagcttccagggacacgagatgcagacagcatctcactttccttctctgtctttctggcaactctttgctcacataatttttcttttcaatatatttgggaagtgaacagaagaaggcccccctggaattttccctcagcacattttactttccatccccatccttcctgcacagccatgaggagaaggccatgcagcacccaggttctagcagcctcttccttctattctactgtgcacagaaaggatgacacaaggagaaaggaagc

SEQ ID NO: 58215 - DNA, 600 bp, Chicken  19866894314947_1
agatggttaaaggtgtgtttcttctagagcacctagtgacagacctcagcattcctgcagcttaggaacatgtgagaatcatttgagtcagcatgctcccatacaaagcagcataaattcccgtttccttgatgcctatgacatcagacgttattttcccatagctccattaggagattattaactaatccctcatctgtaattctagaacttgattttttttaattactgcccctactgtcttggcaaagtctgtatcacaacggctgcttcttacacaggcttcccaagaggtgtatktaaaaaatcaccatgaccatcaggaaccccccatgcagaacactgaccactttgttaagagcttgctctaacacattcttccctcaaacacygaaactaaaaggctgtatctacaaatgcaggaaagaggattattctcacctatcaggttttcatatgaaaacaaaatggttttaacagkgcaaatagccactgctccacgcaacagctcacgtggcttatactccgcccactgttatgctggtcagtaaagtggttttgcagagatccttacaagcactctgcccacargaaaagcta

SEQ ID NO: 58216 - DNA, 600 bp, Chicken  19866894314947_2
atgctcccatacaaagcagcataaattcccgtttccttgatgcctatgacatcagacgttattttcccatagctccattaggagattattaactaatccctcatctgtaattctagaacttgattttttttaattactgcccctactgtcttggcaaagtctgtatcacaacggctgcttcttacacaggcttcccaagaggtgtatktaaaaaatcaccatgaccatcaggaaccccccatgcagaacactgaccactttgttaagagcttgctctaacacattcttccctcaaacacygaaactaaaaggctgtatctacaaatgcaggaaagaggattattctcacctatcaggttttcatatgaaaacaaaatggttttaacagkgcaaatagccactgctccacgcaacagctcacgtggcttatactccgcccactgttatgctggtcagtaaagtggttttgcagagatccttacaagcactctgcccacargaaaagctaagagcccatcacaagcttacatccytgaagattcttggaaagaacaggaactacttgattttcatagttctattgcaacaattacactaatt

SEQ ID NO: 58217 - DNA, 600 bp, Chicken  19866894314947_3
taactaatccctcatctgtaattctagaacttgattttttttaattactgcccctactgtcttggcaaagtctgtatcacaacggctgcttcttacacaggcttcccaagaggtgtatktaaaaaatcaccatgaccatcaggaaccccccatgcagaacactgaccactttgttaagagcttgctctaacacattcttccctcaaacacygaaactaaaaggctgtatctacaaatgcaggaaagaggattattctcacctatcaggttttcatatgaaaacaaaatggttttaacagkgcaaatagccactgctccacgcaacagctcacgtggcttatactccgcccactgttatgctggtcagtaaagtggttttgcagagatccttacaagcactctgcccacargaaaagctaagagcccatcacaagcttacatccytgaagattcttggaaagaacaggaactacttgattttcatagttctattgcaacaattacactaattgctgtcctttatgcaattacctgcatatagacaaagtcaacatttaacwcttaagagcactcaaacgccttgaattcactccttttagc

SEQ ID NO: 58218 - DNA, 600 bp, Chicken  19866894314947_4
aggtgtatktaaaaaatcaccatgaccatcaggaaccccccatgcagaacactgaccactttgttaagagcttgctctaacacattcttccctcaaacacygaaactaaaaggctgtatctacaaatgcaggaaagaggattattctcacctatcaggttttcatatgaaaacaaaatggttttaacagkgcaaatagccactgctccacgcaacagctcacgtggcttatactccgcccactgttatgctggtcagtaaagtggttttgcagagatccttacaagcactctgcccacargaaaagctaagagcccatcacaagcttacatccytgaagattcttggaaagaacaggaactacttgattttcatagttctattgcaacaattacactaattgctgtcctttatgcaattacctgcatatagacaaagtcaacatttaacwcttaagagcactcaaacgccttgaattcactccttttagcagttacctccctgtactcttttccatcctgaggtggagttacacaacacgaaagagtcaaaggcagccaagccaaccttggtgctgtgccgaggagactcccagctcgct

SEQ ID NO: 58219 - DNA, 593 bp, Chicken  19866894314947_5
accccccatgcagaacactgaccactttgttaagagcttgctctaacacattcttccctcaaacacygaaactaaaaggctgtatctacaaatgcaggaaagaggattattctcacctatcaggttttcatatgaaaacaaaatggttttaacagkgcaaatagccactgctccacgcaacagctcacgtggcttatactccgcccactgttatgctggtcagtaaagtggttttgcagagatccttacaagcactctgcccacargaaaagctaagagcccatcacaagcttacatccytgaagattcttggaaagaacaggaactacttgattttcatagttctattgcaacaattacactaattgctgtcctttatgcaattacctgcatatagacaaagtcaacatttaacwcttaagagcactcaaacgccttgaattcactccttttagcagttacctccctgtactcttttccatcctgaggtggagttacacaacacgaaagagtcaaaggcagccaagccaaccttggtgctgtgccgaggagactcccagctcgctggtagctggcatgccttgccacgtttg

SEQ ID NO: 58220 - DNA, 477 bp, Chicken  19866894314947_6
ctatcaggttttcatatgaaaacaaaatggttttaacagkgcaaatagccactgctccacgcaacagctcacgtggcttatactccgcccactgttatgctggtcagtaaagtggttttgcagagatccttacaagcactctgcccacargaaaagctaagagcccatcacaagcttacatccytgaagattcttggaaagaacaggaactacttgattttcatagttctattgcaacaattacactaattgctgtcctttatgcaattacctgcatatagacaaagtcaacatttaacwcttaagagcactcaaacgccttgaattcactccttttagcagttacctccctgtactcttttccatcctgaggtggagttacacaacacgaaagagtcaaaggcagccaagccaaccttggtgctgtgccgaggagactcccagctcgctggtagctggcatgccttgccacgtttg

SEQ ID NO: 58221 - DNA, 600 bp, Chicken  19866894314952_1
ctcagctgctttgcagtagcagcaaaattcttctcctttgtgcttgccgtcaacttcagcctcaggaaaagggctctgaatgttttcacgttgaggacacacttcctaaagaggacagtgatgcacagaagcaattcaacagcagcctgagcctgacacctcggtgatgaacctaccttgccttgctacaataaggcttgccatgcagtctggcacgctggttcctgctgccaagaaagtgatgcccattatcacatctggaattcccagtgtgtagccaatgattgtcacctaaggagyggaataaaactgtcaggtggtttgtaaasaataaaatcagagagcagcttggtccagttctgcaagacgctgtgagacggcgtttattgctcagtgcaaactgacacttttgttaaagagaagcagtgatgggctttttttccttttttttttgtatattcatcacctggcagagaaaagcastgacctcccatgyagtctctttgattagcagctttcatccaccattttcctgacgctcacctggaggagaggctatatggtggctcactgccctctcttaacagacttggccraagc

SEQ ID NO: 58222 - DNA, 600 bp, Chicken  19866894314952_2
cttctcctttgtgcttgccgtcaacttcagcctcaggaaaagggctctgaatgttttcacgttgaggacacacttcctaaagaggacagtgatgcacagaagcaattcaacagcagcctgagcctgacacctcggtgatgaacctaccttgccttgctacaataaggcttgccatgcagtctggcacgctggttcctgctgccaagaaagtgatgcccattatcacatctggaattcccagtgtgtagccaatgattgtcacctaaggagyggaataaaactgtcaggtggtttgtaaasaataaaatcagagagcagcttggtccagttctgcaagacgctgtgagacggcgtttattgctcagtgcaaactgacacttttgttaaagagaagcagtgatgggctttttttccttttttttttgtatattcatcacctggcagagaaaagcastgacctcccatgyagtctctttgattagcagctttcatccaccattttcctgacgctcacctggaggagaggctatatggtggctcactgccctctcttaacagacttggccraagctcacagatgwtattacatacaaataaaca

SEQ ID NO: 58223 - DNA, 600 bp, Chicken  19866894314952_3
tgctacaataaggcttgccatgcagtctggcacgctggttcctgctgccaagaaagtgatgcccattatcacatctggaattcccagtgtgtagccaatgattgtcacctaaggagyggaataaaactgtcaggtggtttgtaaasaataaaatcagagagcagcttggtccagttctgcaagacgctgtgagacggcgtttattgctcagtgcaaactgacacttttgttaaagagaagcagtgatgggctttttttccttttttttttgtatattcatcacctggcagagaaaagcastgacctcccatgyagtctctttgattagcagctttcatccaccattttcctgacgctcacctggaggagaggctatatggtggctcactgccctctcttaacagacttggccraagctcacagatgwtattacatacaaataaacatcccccaaggttcaccacgttaatgttacataaatgttatatgcaggaacttatatatctgtgtcactgcaaacagttccttttggcagagaggaaatgcctttaagttcctttgctgcagagcctacagtcgattactgctctctgatccgat

SEQ ID NO: 58224 - DNA, 600 bp, Chicken  19866894314952_4
cttgccatgcagtctggcacgctggttcctgctgccaagaaagtgatgcccattatcacatctggaattcccagtgtgtagccaatgattgtcacctaaggagyggaataaaactgtcaggtggtttgtaaasaataaaatcagagagcagcttggtccagttctgcaagacgctgtgagacggcgtttattgctcagtgcaaactgacacttttgttaaagagaagcagtgatgggctttttttccttttttttttgtatattcatcacctggcagagaaaagcastgacctcccatgyagtctctttgattagcagctttcatccaccattttcctgacgctcacctggaggagaggctatatggtggctcactgccctctcttaacagacttggccraagctcacagatgwtattacatacaaataaacatcccccaaggttcaccacgttaatgttacataaatgttatatgcaggaacttatatatctgtgtcactgcaaacagttccttttggcagagaggaaatgcctttaagttcctttgctgcagagcctacagtcgattactgctctctgatccgatccacacattaaaa

SEQ ID NO: 58225 - DNA, 600 bp, Chicken  19866894314952_5
gagyggaataaaactgtcaggtggtttgtaaasaataaaatcagagagcagcttggtccagttctgcaagacgctgtgagacggcgtttattgctcagtgcaaactgacacttttgttaaagagaagcagtgatgggctttttttccttttttttttgtatattcatcacctggcagagaaaagcastgacctcccatgyagtctctttgattagcagctttcatccaccattttcctgacgctcacctggaggagaggctatatggtggctcactgccctctcttaacagacttggccraagctcacagatgwtattacatacaaataaacatcccccaaggttcaccacgttaatgttacataaatgttatatgcaggaacttatatatctgtgtcactgcaaacagttccttttggcagagaggaaatgcctttaagttcctttgctgcagagcctacagtcgattactgctctctgatccgatccacacattaaaaatgtggacgcctttgtttaatgatgccaaacttcctatcagccatgttaaacgcatagagcaaagaaaaacgtaatcaggggataatgactgctcttctg

SEQ ID NO: 58226 - DNA, 600 bp, Chicken  19866894314952_6
tgtcaggtggtttgtaaasaataaaatcagagagcagcttggtccagttctgcaagacgctgtgagacggcgtttattgctcagtgcaaactgacacttttgttaaagagaagcagtgatgggctttttttccttttttttttgtatattcatcacctggcagagaaaagcastgacctcccatgyagtctctttgattagcagctttcatccaccattttcctgacgctcacctggaggagaggctatatggtggctcactgccctctcttaacagacttggccraagctcacagatgwtattacatacaaataaacatcccccaaggttcaccacgttaatgttacataaatgttatatgcaggaacttatatatctgtgtcactgcaaacagttccttttggcagagaggaaatgcctttaagttcctttgctgcagagcctacagtcgattactgctctctgatccgatccacacattaaaaatgtggacgcctttgtttaatgatgccaaacttcctatcagccatgttaaacgcatagagcaaagaaaaacgtaatcaggggataatgactgctcttctgaactttcagcagca

SEQ ID NO: 58227 - DNA, 600 bp, Chicken  19866894314955_1
aacaacaaaaatgagcttaagaaattcattcttattttctccaaatatgtcttatttctctggcccgattaaaagcttatagcagttagggagaatgtgaaagtctggatatttggagagctgtcagttttcctctcatgaattttagttgatactaaatttctgaatgcatttaagccaactgaatgtcacaaagaaaatccaagaccttgacaggacgaagctgtaaaagtcaaatataatatgctcagtccttatagaaactagactttttacctgattgtagaatatagatggatrtaytgatggagaagagatgaacttttccagagtccactttttccccaaagacagggagaaaaaatcatggtctgaagtaacttcttcctcttgaataaagagaaacactgacttgtcatgacgtatctgatgcctagaattccaaatggagatgtgtttgatttggtcttctcattgactttaatgacttacagaataaaaataattacattgaaaagggawtataaatatatatttttgctcttaggtgcaagaaatttgcactgaaggtgattaagttggtgtagaacagtgtatctc

SEQ ID NO: 58228 - DNA, 600 bp, Chicken  19866894314955_2
aacaaaaatgagcttaagaaattcattcttattttctccaaatatgtcttatttctctggcccgattaaaagcttatagcagttagggagaatgtgaaagtctggatatttggagagctgtcagttttcctctcatgaattttagttgatactaaatttctgaatgcatttaagccaactgaatgtcacaaagaaaatccaagaccttgacaggacgaagctgtaaaagtcaaatataatatgctcagtccttatagaaactagactttttacctgattgtagaatatagatggatrtaytgatggagaagagatgaacttttccagagtccactttttccccaaagacagggagaaaaaatcatggtctgaagtaacttcttcctcttgaataaagagaaacactgacttgtcatgacgtatctgatgcctagaattccaaatggagatgtgtttgatttggtcttctcattgactttaatgacttacagaataaaaataattacattgaaaagggawtataaatatatatttttgctcttaggtgcaagaaatttgcactgaaggtgattaagttggtgtagaacagtgtatctccag

SEQ ID NO: 58229 - DNA, 569 bp, Chicken  19866894314955_3
gctgtaaaagtcaaatataatatgctcagtccttatagaaactagactttttacctgattgtagaatatagatggatrtaytgatggagaagagatgaacttttccagagtccactttttccccaaagacagggagaaaaaatcatggtctgaagtaacttcttcctcttgaataaagagaaacactgacttgtcatgacgtatctgatgcctagaattccaaatggagatgtgtttgatttggtcttctcattgactttaatgacttacagaataaaaataattacattgaaaagggawtataaatatatatttttgctcttaggtgcaagaaatttgcactgaaggtgattaagttggtgtagaacagtgtatctccagataccttaatgtttctatgaaagactatattcttatttatcatattctgaaagctagaataagcattcttttatgcagtttagtaactggctgaatatgtggactattacagagatatttagatatttccctcattctcaggaagaaggtggtggcaggtgagagaaaaaggtcatgcaaatcaaaag

SEQ ID NO: 58230 - DNA, 600 bp, Chicken  19866894314966_1
tcccaccccagttaatggcagtcttgtgtttcattttgttgtttcagactgtgatggccagaagactgcttgagcagagatctgaggaacacatgatctgcagaaatgagatggacaacacacttctttcagagcccttacttttgaatcacataatctgctttgactttgtaaggacttttacgattgttggcctacagaaagtgctctgcagttcttggatgtgccccagagcatcatcagcacaacagcacaacttgaggaaacagaagcttgggtttcatttagcttgaatgcttrctttcctggtttccaaggagagatgaagttcaaagggcagaagttatctgcttacataaatcttaaagaaacaatttctatgaagtaaaccacatccatcaaacaggagctcttcagacactagtacaaagctgacatttattttgctatcacaagggcaatgctattcaactagcagttaaaccgatttgagaagaaaaarcataattctctgccataatgcagtaggctattatccaattaaaaatggtctgataaaatcactttttaacatttgttacattttttgcctgtttgcaa

SEQ ID NO: 58231 - DNA, 600 bp, Chicken  19866894314966_2
agtgctctgcagttcttggatgtgccccagagcatcatcagcacaacagcacaacttgaggaaacagaagcttgggtttcatttagcttgaatgcttrctttcctggtttccaaggagagatgaagttcaaagggcagaagttatctgcttacataaatcttaaagaaacaatttctatgaagtaaaccacatccatcaaacaggagctcttcagacactagtacaaagctgacatttattttgctatcacaagggcaatgctattcaactagcagttaaaccgatttgagaagaaaaarcataattctctgccataatgcagtaggctattatccaattaaaaatggtctgataaaatcactttttaacatttgttacattttttgcctgtttgcaattcagccaaaaaattctatcattttctgaatgcaaccaagatgtaactaactgttgccataccaataactaggaagaaaaagaacctcctccacatggactacccacgcagatctgatggggacagtttgtgaaatgccttgggaataaaatgatgtggtggctgatggtatgcacacaactgctgcagtagggtcaggcct

SEQ ID NO: 58232 - DNA, 599 bp, Chicken  19866894314967_1
  misc_feature (1)..(164): n is any nucleotide
nnnnnnnnnnnnnnnnnnnnnnnnnnnnnnnnnnnnnnnnnnnnnnnnnnnnnnnnnnnnnnnnnnnnnnnnnnnnnnnnnnnnnnnnnnnnnnnnnnnnnnnnnnnnnnnnnnnnnnnnnnnnnnnnnnnnnnnnnnnnnnnnnnnnnnnnnnnnnnnnnnnnaggagttctctgcttgcagttgaaagttttctccacttccccttctcaggctcctgatgtttcaaagaaaaacaacccctgactgctggtaagccagaagagaacgaattgctgattgcattttgtgggaagcagraaggggagcaacctctttacatggtgtaataaagataggacaagggggaacggctttaaactaagagaggggacgtttaggtcagatgtgaggaggaaagtctttactcagaggacgatgaggccctggcactgctgcacggagctgtgggtgccccatccctggaggtgtgtagggccattggaatgggccctgggtagcctgagctgggggtgcagccagyccacggcaggggttggatctcattgatctttgaggtcccttccgacctcagccattctgtgattctatgattcccc

SEQ ID NO: 58233 - DNA, 600 bp, Chicken  19866894314967_2
tttcaaagaaaaacaacccctgactgctggtaagccagaagagaacgaattgctgattgcattttgtgggaagcagraaggggagcaacctctttacatggtgtaataaagataggacaagggggaacggctttaaactaagagaggggacgtttaggtcagatgtgaggaggaaagtctttactcagaggacgatgaggccctggcactgctgcacggagctgtgggtgccccatccctggaggtgtgtagggccattggaatgggccctgggtagcctgagctgggggtgcagccagyccacggcaggggttggatctcattgatctttgaggtcccttccgacctcagccattctgtgattctatgattcccccatgtccccacaggcacctcattggaacacacaggcgtgctatttgaacctgctcgtttccatattgcagagctaatggcgctgtgatgaatgctgagcacagtgtgaaagccctcgctgcgctgctgagagaggagcagtcaggagggagaggaagggcagaasaggaggacttatttggttcacaaatgtgtgggtatcgaaacaggaagaaatgccagagt

SEQ ID NO: 58234 - DNA, 479 bp, Chicken  19866894314967_3
gaggtgtgtagggccattggaatgggccctgggtagcctgagctgggggtgcagccagyccacggcaggggttggatctcattgatctttgaggtcccttccgacctcagccattctgtgattctatgattcccccatgtccccacaggcacctcattggaacacacaggcgtgctatttgaacctgctcgtttccatattgcagagctaatggcgctgtgatgaatgctgagcacagtgtgaaagccctcgctgcgctgctgagagaggagcagtcaggagggagaggaagggcagaasaggaggacttatttggttcacaaatgtgtgggtatcgaaacaggaagaaatgccagagtaatccaggctgacattcccacaagcaaatgtttttcccacatctggactaaagcacatcttttaaaaagctatctaatctgaccttcagtatgtcaagcgatgatgagagaaaagatttc

SEQ ID NO: 58235 - DNA, 600 bp, Chicken  19866894314977_1
tgtgggcacatgaaaacctgggcaactggaaaacgtgtgctgcagagtggggggagagaaacattctgtttgctggaagatgaatgatttccttactgctgcaattcagagccgtcagctgatgcctctgtgtagcagatcagaaccccaattcaacctagcggttactggaaatggaaactttatttcacataggtaaaattgtttccctgggtatattgttttctttgtctctggagggcgctatgaaggctgacaaactttgtggctgctttgctaagtgggataatgagcaggagygcccagagctgcagttcatctctgcctgttgtcttcccacaagcaggcctgcactcctgtcttcaggcttttctcgagccgttaaggcacttgtttctgtttggctgaatttttaaaggctgaagatggtgtgatgagtggctgttaggatagagccaccaggtgagtgggtgtgctaggattgtgagttacccaaacaggtaaggtttggggtgatactgctagaaggaggaggatctctgcttctcccgtgtatctttagtcagggggagagcaccaccaacaaatggcattcttatt

SEQ ID NO: 58236 - DNA, 600 bp, Chicken  19866894314978_1
cctctcagcctataaccagaagttggtttgtattatacatctatttcttgctgatctccttcctccaactggcaactctgaggaaaagataatttgggcagtgtttttcacttgtgcacccagggctttatagttttctttaattctgcccatgttccagcttccagtatcatgctcacatgaaagagcaacaactctctgcagcatagctgatatgtaactaattaatgaatggaggcataaaggcataatgcaagatttagaatttgcaggtggacattccatgggattcagtaccartgagacagagagattatcctttggaccagctgatgtggagcagaggctgtccagcaatcctgcagtgttccacatctctgtctgcttctgtaaggagtctagtaatgtgcagcagagctttccagaggtaggcttaaatatgcttgcagcaacacagagctacattagcagtgacatatactagagtagtaggagcttctactcctaggaagaaaactaacaaagggatggttttgcagagtgaacataacagagatggagaaaatgctggtgtcccccactaactgggcaaatgtggag

SEQ ID NO: 58237 - DNA, 600 bp, Chicken  19866894314984_1
cgctcttcccctacactgcagatgtcaaagggcttaatcattggaaagcttgcctttttctctcctcagctaaactctggctattgcctgctattagaaaaatggcctctcctacggctctttaccatatggctacgttagcattactgctcagattaaggacttccagccatctgctgggctatctgcacctgttccctgccacagcccagtcactgcaggctggaacggggcacatccctggttgcaaagggatttttccacctcacacctcagggttgtgagcaaggtgaactagcwgtgcagacatttatttgttcgggattggccaagatcttaagggggcttagaaacctcctctttctgcatgtgggccaaagtcaacactggaraatgctaaaagatctggcctttttagcataaatgccatcgctcttcaagtcacatcttgcacaaaaaactgttcttctctcactccatctgtgtccctgttcccaaatcttaatctgattacaaaatcagatttggaatttcttttggaatgagcaacatcagcaacacactttataatctactggaaaggtaaacttttcgcaagga

SEQ ID NO: 58238 - DNA, 600 bp, Chicken  19866894314984_2
attagaaaaatggcctctcctacggctctttaccatatggctacgttagcattactgctcagattaaggacttccagccatctgctgggctatctgcacctgttccctgccacagcccagtcactgcaggctggaacggggcacatccctggttgcaaagggatttttccacctcacacctcagggttgtgagcaaggtgaactagcwgtgcagacatttatttgttcgggattggccaagatcttaagggggcttagaaacctcctctttctgcatgtgggccaaagtcaacactggaraatgctaaaagatctggcctttttagcataaatgccatcgctcttcaagtcacatcttgcacaaaaaactgttcttctctcactccatctgtgtccctgttcccaaatcttaatctgattacaaaatcagatttggaatttcttttggaatgagcaacatcagcaacacactttataatctactggaaaggtaaacttttcgcaaggagaaaaaaaatcaagccatacaaagattttatggctatttttataaagttccagaatagaatagatcctgttggaaagaaccaagaaaaataa

SEQ ID NO: 58239 - DNA, 600 bp, Chicken  19866894314988_1
acttagtgttgcatctctgttttattttgttcttttaaatgtgacaaatgttcttccatctctcatcactttttaggacagagcccattgtctatttacctacaagagacagtgagatctttggtcccaaaatacgaactttcggcacacagaccgattacagggatggtgaagcccagacagatccatattcccctgaatatgtagttcccagtggctcagtccctgagcttctgatgcttgctactctcacttggggtgagttgcaaaatcaagataaattgtaatagctatagcccyctttagcagcaggttctcttctattcaatgtcaggtttcaagactatttgtacctttggtatggtagccctttgctgtcttcctttagggcacaatacagtgataatggtctgaagttgaacctagagaggttcaggcgggacattaggaaacatttctttccaaaagagtggtaatgcattggaacaggctgcccaggaaggtggtggagtccctgtctctggaagttttcaagaaaagtgtagatgtggcactgagggacatagtttagtggacattatgayaatgggttgatagttg

SEQ ID NO: 58240 - DNA, 575 bp, Chicken  19866894314988_2
taatagctatagcccyctttagcagcaggttctcttctattcaatgtcaggtttcaagactatttgtacctttggtatggtagccctttgctgtcttcctttagggcacaatacagtgataatggtctgaagttgaacctagagaggttcaggcgggacattaggaaacatttctttccaaaagagtggtaatgcattggaacaggctgcccaggaaggtggtggagtccctgtctctggaagttttcaagaaaagtgtagatgtggcactgagggacatagtttagtggacattatgayaatgggttgatagttggactagatgatcttagtggtcttttccaaccttaatgattctatwattctatggttattttatctatttttaaaataggtatggtattcacatatttaatagtgcccttctgaggcatttaataaagagctttgagatcactcagtataaaaaggtcacatgttttacaagtatgaactagtagaagttttgcacttaccctctgttcttcggttgttctgagctagacatcagtaagaaaataaaaattgcttctgtg

SEQ ID NO: 58241 - DNA, 514 bp, Chicken  19866894314988_3
atttgtacctttggtatggtagccctttgctgtcttcctttagggcacaatacagtgataatggtctgaagttgaacctagagaggttcaggcgggacattaggaaacatttctttccaaaagagtggtaatgcattggaacaggctgcccaggaaggtggtggagtccctgtctctggaagttttcaagaaaagtgtagatgtggcactgagggacatagtttagtggacattatgayaatgggttgatagttggactagatgatcttagtggtcttttccaaccttaatgattctatwattctatggttattttatctatttttaaaataggtatggtattcacatatttaatagtgcccttctgaggcatttaataaagagctttgagatcactcagtataaaaaggtcacatgttttacaagtatgaactagtagaagttttgcacttaccctctgttcttcggttgttctgagctagacatcagtaagaaaataaaaattgcttctgtg

SEQ ID NO: 58242 - DNA, 600 bp, Chicken  19866894314991_1
cgaaagccttctcttctccaggctgaacagccccagctctgtcagcccatcctcataggagaggtgttccatctcttggatcactgtgtggcccttctctggatgctctccaacaggtccatgtctctcctgtactggggactctacatctggatgcactattccaggtgatgtctcaccagcgcggagtagaggggcaggatcacctccacatgaaattccaagatttctaagaatcgactggtgggtgctagtaaaaatctgaaaagtataaagcgttacagatcttttgtatggcarttcctgtgatctcctttgtggcagtaccttggggctctgtcataagcatcattgtgtgagatgctatataagcaaagaataaaaaggmagccttgcaatgatggtatcaacataaagatgagcttcctctgcagagataaggggaatgtgagacatatgcttggtagtcttttgtatttcatgcagatgctgaaataagcagtgcttcattgctggcatagaaacagtgagctgtcagtcattatttgatttagtgcttctttcaagggttcattttaacactcacatgcatatgtatat

SEQ ID NO: 58243 - DNA, 600 bp, Chicken  19866894314991_2
tggcccttctctggatgctctccaacaggtccatgtctctcctgtactggggactctacatctggatgcactattccaggtgatgtctcaccagcgcggagtagaggggcaggatcacctccacatgaaattccaagatttctaagaatcgactggtgggtgctagtaaaaatctgaaaagtataaagcgttacagatcttttgtatggcarttcctgtgatctcctttgtggcagtaccttggggctctgtcataagcatcattgtgtgagatgctatataagcaaagaataaaaaggmagccttgcaatgatggtatcaacataaagatgagcttcctctgcagagataaggggaatgtgagacatatgcttggtagtcttttgtatttcatgcagatgctgaaataagcagtgcttcattgctggcatagaaacagtgagctgtcagtcattatttgatttagtgcttctttcaagggttcattttaacactcacatgcatatgtatatttttttctaaagtgggctgtaaaactgatattcttgaggtcaacaatttgagtttaataagatagagcactgtaaaagaaaggcgctt

SEQ ID NO: 58244 - DNA, 600 bp, Chicken  19866894314992_1
ggcagtgttggaacatgtatatagaatgagatccaaaacaaaattactaaagtatcagtttacaattcattatgttgaatgcaaacaactttagaacaaagatggttattttcttcatattggattttctttgtagatttcttcaagtgtcagtagaaatgtaagtctgaagaaaatcgttttgctaattttaagttccaaatacttaaagcagcaaatcccgggtctgagtcgagtcaaagtggataaatgcaaagctagagcctccaaatctcacagcatgttaaatagctttagctrtgactgattacaacaatgctacatgtgcaccaatgtgaaaagggtgtattctgaaaacactaggtcatacatgaatagttaagattcaaattacagtaagtggcaaaaaagacaatctttcagacatctaggtaatatttgtaaaattaagcatttaaaactgctaggcaagtccagtgaaagaacagacacatgacagtgtaagtaaatgatcaaaaataaatcattgtcacatacacacgttgtttttttatttcaattaaaactcaaagtcaacatttttttctacacaaaagaata

SEQ ID NO: 58245 - DNA, 471 bp, Chicken  19866894314995_1
atagcagatacattaagggacagttatatgatttaatcatctctgtctacatgatcatattgtctttatttcaaaatgacatagaggcagaaatgtgactatttgcagctccaagttttgtcactggcactgagcaagttagaggtggaaaactgtctaaaggatttgttttccatttaattggttatttaaatgttcaggattagatttggtgtcagattgcaatgttgatattttcacttctccatgaatcagaaaaccttcaaaaaacttctcaaacacttactcctggtgatttgraaatgatttagaatttctgggatcttgaaccttctgactgaaaattatgttctttctagtttcactggtggcttgcagaatcaaactctataaccacaaagtagttataaaatctggtatgtttaatcaacactgcacagagccgggtgcaagggggatagatcctcttaa

SEQ ID NO: 58246 - DNA, 600 bp, Chicken  19866894315006_1
cattttggtgcccaatgtggggctcctagagttgagataacaacagtgagcaaacaaccatgtggtgctgagccaccttccatgtcaaaccacagcactgccctgagtccataacagatcacctcgggactctgaaactgtccccatcactcagtggagaacaccagaagatcttgagatcttttcagggagcagctcctgaggtatagtccttacaacattcttttggaagaggcctccacagttctctggttctgctctgaagagcccctcttgttatggcgctgcagcaaggagacsagctctgacacagcgcttcatattgccgcctactgactgcagccccggagtgctgctgtagagacaacagggctgtggtgagacacacaagaccttcaggtctgcacaaatgcaaggacttgagagcagagtaaagagagcaggaataaaaagagcatgttgtgctgctgtccgtggctgtacctcccccagatccagatccaggcaaggcaggaagagagaagagcaaaggaagtttttgcaagcttttttagtgtcttttaaccaattcagggaacctggttccatatttgcatgagc

SEQ ID NO: 58247 - DNA, 600 bp, Chicken  19866894315006_2
tttgcatgagctcttggcttgtgaaaatagaaagtagatgggaaagaagtggaaaaaatgcaacatttttttttacagattacagtatcacacttacacaaacaaaaaataaaacacatataaaatacgaagaacattgactgggaatcatgtgaggaagatgtgcactttattgaagctggaatagtgcatattgcaacaattggttgagggcatgcttgatctcctggttcctcatgctgtagataatggggttcagtgttggaggaaccacggagtacagaaatgacaccaccaggkccagggatggggaggagatggagaagggcttcaggtgggcaaacacgacagtgctgagaaacagggagaccacggccaggtgagggaggcacgtggagaaggctttgtgccrtccctgctcagagggcatcctcagcaccaccctgaagatctgcacgtaggagaaaagaatgaaagcaaaacacccaagtaaaacargggcactaatcacactaagcccaacttccctgagatatgattttgagcaggagagcttgaggatgtggggggatttcacagaagaactgatccacagcattg

SEQ ID NO: 58248 - DNA, 600 bp, Chicken  19866894315006_3
aacacatataaaatacgaagaacattgactgggaatcatgtgaggaagatgtgcactttattgaagctggaatagtgcatattgcaacaattggttgagggcatgcttgatctcctggttcctcatgctgtagataatggggttcagtgttggaggaaccacggagtacagaaatgacaccaccaggkccagggatggggaggagatggagaagggcttcaggtgggcaaacacgacagtgctgagaaacagggagaccacggccaggtgagggaggcacgtggagaaggctttgtgccrtccctgctcagagggcatcctcagcaccaccctgaagatctgcacgtaggagaaaagaatgaaagcaaaacacccaagtaaaacargggcactaatcacactaagcccaacttccctgagatatgattttgagcaggagagcttgaggatgtggggggatttcacagaagaactgatccacagcattgccttggcacagaggcagtgagaatgtattggcagtgtgcagcagggaatagaraagcccagtgccccaggcagctgctgccatggtggcacaagctctgctgcccagsaggg

SEQ ID NO: 58249 - DNA, 600 bp, Chicken  19866894315006_4
acaattggttgagggcatgcttgatctcctggttcctcatgctgtagataatggggttcagtgttggaggaaccacggagtacagaaatgacaccaccaggkccagggatggggaggagatggagaagggcttcaggtgggcaaacacgacagtgctgagaaacagggagaccacggccaggtgagggaggcacgtggagaaggctttgtgccrtccctgctcagagggcatcctcagcaccaccctgaagatctgcacgtaggagaaaagaatgaaagcaaaacacccaagtaaaacargggcactaatcacactaagcccaacttccctgagatatgattttgagcaggagagcttgaggatgtggggggatttcacagaagaactgatccacagcattgccttggcacagaggcagtgagaatgtattggcagtgtgcagcagggaatagaraagcccagtgccccaggcagctgctgccatggtggcacaagctctgctgcccagsagggtcccgtagtgcaggggctttgcagatggcaacatagcggtcataggacatcatggtgataatgcaatactctgctgaaaacaaaaa

SEQ ID NO: 58250 - DNA, 527 bp, Chicken  19866894315006_5
ctgagaaacagggagaccacggccaggtgagggaggcacgtggagaaggctttgtgccrtccctgctcagagggcatcctcagcaccaccctgaagatctgcacgtaggagaaaagaatgaaagcaaaacacccaagtaaaacargggcactaatcacactaagcccaacttccctgagatatgattttgagcaggagagcttgaggatgtggggggatttcacagaagaactgatccacagcattgccttggcacagaggcagtgagaatgtattggcagtgtgcagcagggaatagaraagcccagtgccccaggcagctgctgccatggtggcacaagctctgctgcccagsagggtcccgtagtgcaggggctttgcagatggcaacatagcggtcataggacatcatggtgataatgcaatactctgctgaaaacaaaaacatatagaagaagacctgtgcagcacatcctgagtagggagatgtgccctggtgtcccagagggcattggccatggctttgg

SEQ ID NO: 58251 - DNA, 472 bp, Chicken  19866894315006_6
gccrtccctgctcagagggcatcctcagcaccaccctgaagatctgcacgtaggagaaaagaatgaaagcaaaacacccaagtaaaacargggcactaatcacactaagcccaacttccctgagatatgattttgagcaggagagcttgaggatgtggggggatttcacagaagaactgatccacagcattgccttggcacagaggcagtgagaatgtattggcagtgtgcagcagggaatagaraagcccagtgccccaggcagctgctgccatggtggcacaagctctgctgcccagsagggtcccgtagtgcaggggctttgcagatggcaacatagcggtcataggacatcatggtgataatgcaatactctgctgaaaacaaaaacatatagaagaagacctgtgcagcacatcctgagtagggagatgtgccctggtgtcccagagggcattggccatggctttgg

SEQ ID NO: 58252 - DNA, 599 bp, Chicken  19866894315007_1
  misc_feature (1)..(44): n is any nucleotide
nnnnnnnnnnnnnnnnnnnnnnnnnnnnnnnnnnnnnnnnnnnntttatgctttaataaagatgtacttaacaactctaaagtatccttatatcttgctgtgaataaagaactgcattatgtttaaaagtttccattatatcaatagtaaaaacatataaaaacataaacttactttgaagttcacaaactaatctaaaataaaaaatccaattacacagctggaatggctaccaaatcattcttaagattttttttaacatcagtctcaaatattaaatcaaagattgaaaattgataygtttacaataaaatcacaaacagaccaaacaacctatggactcataaattatgaaaatactggtaagtagcttcagataaacccgttacaaacagaaaatacaatgacatacgtgaaaaagggaattggctggatcagtttgaggtccggttctctctcttgcaccagcaaagcctgccttttcttacgtaactccagtgcttcatctatgattcttcctgtttcagctgtactcacgttcacattatggatagacatgtcactagaaagtattaagaaacaaagacaagggtatgttt

SEQ ID NO: 58253 - DNA, 600 bp, Chicken  19866894315010_1
tcttaaccatagtggtggttacaaccaagtttttttgccagcggtcttttccagagtcctcaggatgaggctgtcaaattagagcagttttagaaaataaccagggaaacttaattaaagaccaagtatattaattacagatgaacatcagtgacttcacaaatcagatacttgcagcagaagttacgcttaccttcgtagtcccacagctttctaaagggtttccctggctctccaagcggtgctggaggatcattgaagaagggagcactaacttgcattagcagtcctgcatcataygacttcagtgcaattgttactgggtcatggttcacgggtaaaccgtcccacgtgtgctcaattcttaactccatcttcgtgttctgcataaraacagctggccagcttccatcaagatgtccaagccgagcgtgagatctcctttaagttcaagctggtaaaatagtgagaaagatcagataagtggatataagaatccaaggtggtgatgtgagaagtgtgacaaaggttatggaaaatttaaagcaatacattaagtcatcagctgacttcagacatctggtaaaaaggtgaaggtaa

SEQ ID NO: 58254 - DNA, 600 bp, Chicken  19866894315010_2
gaaaataaccagggaaacttaattaaagaccaagtatattaattacagatgaacatcagtgacttcacaaatcagatacttgcagcagaagttacgcttaccttcgtagtcccacagctttctaaagggtttccctggctctccaagcggtgctggaggatcattgaagaagggagcactaacttgcattagcagtcctgcatcataygacttcagtgcaattgttactgggtcatggttcacgggtaaaccgtcccacgtgtgctcaattcttaactccatcttcgtgttctgcataaraacagctggccagcttccatcaagatgtccaagccgagcgtgagatctcctttaagttcaagctggtaaaatagtgagaaagatcagataagtggatataagaatccaaggtggtgatgtgagaagtgtgacaaaggttatggaaaatttaaagcaatacattaagtcatcagctgacttcagacatctggtaaaaaggtgaaggtaaatattggactatcagttctggacgggttatgtgtaaataaagtgaaaaccaattaagcttttatgtcaacatttttttctctgtgatacgtc

SEQ ID NO: 58255 - DNA, 599 bp, Chicken  19866894315012_1
  misc_feature (1)..(211): n is any nucleotide
nnnnnnnnnnnnnnnnnnnnnnnnnnnnnnnnnnnnnnnnnnnnnnnnnnnnnnnnnnnnnnnnnnnnnnnnnnnnnnnnnnnnnnnnnnnnnnnnnnnnnnnnnnnnnnnnnnnnnnnnnnnnnnnnnnnnnnnnnnnnnnnnnnnnnnnnnnnnnnnnnnnnnnnnnnnnnnnnnnnnnnnnnnnnnnnnnnnnnnnnnnnnnnnnnnnacccagggcagccaggcagtgctaccacagctcttttcttccctctgcaggccacactccgattttcactcctggactgcccgatgagwctgaagcaagtccagcatgtcagctctccctgcattatcattatgtccatcccaccaggtgggattggaggtaacatctgtctgctccggcctgaagcagagtgcgtgtccaacttaactgggaatctgcagatctccagcgactgctgggaaacaaagctgagaagccacaggtggagcttcaagctgcagctgcccagaaaaataattctaggaccaagtagacataggctggataaaatatgtcatatttaccgagtgacttttgtgactaagagccagactttgaaagatattag

SEQ ID NO: 58256 - DNA, 599 bp, Chicken  19866894315014_1
  misc_feature (1)..(157): n is any nucleotide
nnnnnnnnnnnnnnnnnnnnnnnnnnnnnnnnnnnnnnnnnnnnnnnnnnnnnnnnnnnnnnnnnnnnnnnnnnnnnnnnnnnnnnnnnnnnnnnnnnnnnnnnnnnnnnnnnnnnnnnnnnnnnnnnnnnnnnnnnnnnnnnnnnnnnnnnnnnnnctcatcaaattcacttactaccttaactatcaaaggagtaaagtttcatttgtttatggcagtgacatatgactgaaagagtgtcctgttgtgatttcatttggggacaaaacagaagaatcacaatgtgactccagcatcgyatagctgtagatactgaatgtatctttagaatttaatctacatttctgactggagaaggatcatccaatgmagttcacccatgccarctgtcaaaaaataatccgagtagtcagcaaggtgcagtgtgaactgctccatttgtcaaacttgtgaagttagggcactttcttaagttcccactgcctgaatccattgtaataaatttggactgcatgtcaattactgcaatttacgactacctatctctccattctgaatatgtatgtgattttaatttaaggcttccttactgtacaat

SEQ ID NO: 58257 - DNA, 599 bp, Chicken  19866894315014_2
  misc_feature (1)..(86): n is any nucleotide
nnnnnnnnnnnnnnnnnnnnnnnnnnnnnnnnnnnnnnnnnnnnnnnnnnnnnnnnnnnnnnnnnnnnnnnnnnnnnnnnnnnnnnctcatcaaattcacttactaccttaactatcaaaggagtaaagtttcatttgtttatggcagtgacatatgactgaaagagtgtcctgttgtgatttcatttggggacaaaacagaagaatcacaatgtgactccagcatcgyatagctgtagatactgaatgtatctttagaatttaatctacatttctgactggagaaggatcatccaatgmagttcacccatgccarctgtcaaaaaataatccgagtagtcagcaaggtgcagtgtgaactgctccatttgtcaaacttgtgaagttagggcactttcttaagttcccactgcctgaatccattgtaataaatttggactgcatgtcaattactgcaatttacgactacctatctctccattctgaatatgtatgtgattttaatttaaggcttccttactgtacaatatttattatcagttctctattttaaccagcattgagataactgctattttacactcctccaatgtcttctc

SEQ ID NO: 58258 - DNA, 599 bp, Chicken  19866894315014_3
  misc_feature (1)..(70): n is any nucleotide
nnnnnnnnnnnnnnnnnnnnnnnnnnnnnnnnnnnnnnnnnnnnnnnnnnnnnnnnnnnnnnnnnnnnnnctcatcaaattcacttactaccttaactatcaaaggagtaaagtttcatttgtttatggcagtgacatatgactgaaagagtgtcctgttgtgatttcatttggggacaaaacagaagaatcacaatgtgactccagcatcgyatagctgtagatactgaatgtatctttagaatttaatctacatttctgactggagaaggatcatccaatgmagttcacccatgccarctgtcaaaaaataatccgagtagtcagcaaggtgcagtgtgaactgctccatttgtcaaacttgtgaagttagggcactttcttaagttcccactgcctgaatccattgtaataaatttggactgcatgtcaattactgcaatttacgactacctatctctccattctgaatatgtatgtgattttaatttaaggcttccttactgtacaatatttattatcagttctctattttaaccagcattgagataactgctattttacactcctccaatgtcttctcttttcaaggtcatcag

SEQ ID NO: 58259 - DNA, 600 bp, Chicken  19866894315015_1
ctggaccacagtctgaaatgggactacagagaaggcggtaagaggtggtggtgggtcaacatgggaggtatttgctaactcagggctgaagatttccctatattgtccttggagtgggacacatactgctcattcatgagtgctctttcttgattcctgggtagctgctgagatttttggagaagaatgattttagaaatagtcagctggggcatccattgacagcagaaaactctggcaacagaaggcagagaaatatgtggtgagggagggttatctgctttttaatttagatcctcmatatgtttaatatttggcatttcactgcaactcacagttgaggtgaaggggaggggaattaaaattagattattggctcatgttttcttgttctgtcaaacttattttcctcccttccatggccatgctgctaacctagctgacaaagtcaacrtaggaggcattaacagcattactcaaacacttgagaaatggggaaacagcatcttctggcaaatgaaacacatcctgctgaacaacccagagtctttactgccggagatctccaggtaattctcttcatctggaggcaagatttag

SEQ ID NO: 58260 - DNA, 600 bp, Chicken  19866894315015_2
tcctgggtagctgctgagatttttggagaagaatgattttagaaatagtcagctggggcatccattgacagcagaaaactctggcaacagaaggcagagaaatatgtggtgagggagggttatctgctttttaatttagatcctcmatatgtttaatatttggcatttcactgcaactcacagttgaggtgaaggggaggggaattaaaattagattattggctcatgttttcttgttctgtcaaacttattttcctcccttccatggccatgctgctaacctagctgacaaagtcaacrtaggaggcattaacagcattactcaaacacttgagaaatggggaaacagcatcttctggcaaatgaaacacatcctgctgaacaacccagagtctttactgccggagatctccaggtaattctcttcatctggaggcaagatttagacttcccctggctgtcctgccccaaccaggtttaatcttccttaattttcaagttgttcaagtgtggggagatgaatccgactgttggtatctgttatgctggcagctctgagcaccgtagtaaagtgactaacctgctcatctttattgggaa

SEQ ID NO: 58261 - DNA, 528 bp, Chicken  19866894315018_1
gttaagcagtatctgcttccttattcaacgttcattttgccttatgaagggagacgcttagcccacagcttcccagacagggctgtggctcccactgatgatagcagctggttcagtacagctttggagagcagcaggcaggcaggggaagggctgctccttttggaaaacccaaatgctaagctgttggagccagctttgtctccagcaagtggaccccaaatgcagagcactgtctgtgcttcccagttctcaggagaagaattgcagaactgccctggggatgggcccctgctaggraaaggagggcacagcaatgaggcaagccacagggcttgtaacaccaccacacaactgcccatgtttgcacatatgttaactgctgaggcagcctggcctgggtgaggttgattaaagcactgttagctccaggaaattactcacccttttgtgcccagcctccatcttcctgcctttcaaaacttcattttcctgcattgctcctgttcattcaagtgacatacatga

SEQ ID NO: 58262 - DNA, 600 bp, Chicken  19866894315024_1
tataattttcattcaggctgtgctgaggaattctctgccagctgtgcaggcaggacatgcaatcaaatccgacagtgttctgaccaggcattgctctttctatcccaaagaggctgaaccttctccaatactgacatttttaggtaaaatagctctattattgctttggattcatttgacagttttccccgaagtcacatcaggcatcgtctcaaagcagcaaatccctttctcatctgaaaatctctgcaggagaactctgcagccttatactggtagtatctgtgctcctcactgtgrcagaacaagaagtcttggtgcctggaacagccatcttctgttttaatgccccttctctgttgacaaggctatttccaaacacatacaagcatgcattcagttgaaaatagacttgtgtaatagatttacagcctcagcatttctcaaggcacaaaactcactgtcyattggggaaactgcataaaaaaattaccctctgaattagatttgtgcrttttccctactgcttccgtcaccacataaccgttctaattcccatcacattttacttccacttgctgatgaatagttgttcccagt

SEQ ID NO: 58263 - DNA, 600 bp, Chicken  19866894315024_2
tggattcatttgacagttttccccgaagtcacatcaggcatcgtctcaaagcagcaaatccctttctcatctgaaaatctctgcaggagaactctgcagccttatactggtagtatctgtgctcctcactgtgrcagaacaagaagtcttggtgcctggaacagccatcttctgttttaatgccccttctctgttgacaaggctatttccaaacacatacaagcatgcattcagttgaaaatagacttgtgtaatagatttacagcctcagcatttctcaaggcacaaaactcactgtcyattggggaaactgcataaaaaaattaccctctgaattagatttgtgcrttttccctactgcttccgtcaccacataaccgttctaattcccatcacattttacttccacttgctgatgaatagttgttcccagtggaaagctgtgtaatagcattctagatttaccttcttcatcactgacagaacatctcagcctaccaggcaaataagctcttcctcagttcactcaaagaaaggtgcaagttcaacttgcttgaaaaaatgtatcttccatagctattccttcttcctctctttatc

SEQ ID NO: 58264 - DNA, 600 bp, Chicken  19866894315024_3
aagcagcaaatccctttctcatctgaaaatctctgcaggagaactctgcagccttatactggtagtatctgtgctcctcactgtgrcagaacaagaagtcttggtgcctggaacagccatcttctgttttaatgccccttctctgttgacaaggctatttccaaacacatacaagcatgcattcagttgaaaatagacttgtgtaatagatttacagcctcagcatttctcaaggcacaaaactcactgtcyattggggaaactgcataaaaaaattaccctctgaattagatttgtgcrttttccctactgcttccgtcaccacataaccgttctaattcccatcacattttacttccacttgctgatgaatagttgttcccagtggaaagctgtgtaatagcattctagatttaccttcttcatcactgacagaacatctcagcctaccaggcaaataagctcttcctcagttcactcaaagaaaggtgcaagttcaacttgcttgaaaaaatgtatcttccatagctattccttcttcctctctttatcccaccaattgtatgcattcacagtacattctgaaggacttttaagaca

SEQ ID NO: 58265 - DNA, 600 bp, Chicken  19866894315025_1
cattgcttatagtgcccagaaaaatctaggcatggctatttccccctaataaaacatcagcgtagctctactgggttgcaattaaccttttagtcaaggtttgtctgatctcaaaaggaacagaaataatgaaggcttttaaatcagtgtttcaggaaaccactcaatacctcagactatacagtgaaaacacctgggttaacaatgatattctgcgtaaaaaaacaaagacaaagggtagtaacagcagtgttcatgtggattcctgcctgacggagtgttacaactccagactatggmaagatcattcttcaccccttgctatgtagcatgaaacagttaacacacagagtgtttaaatcatatataccctatgacttatccacaaaagcaaagtgctagcaccactcatttaggcaatttggatgtcaattgataacatggatcatcctcrtgcatcagaacttagcatctacaaacctctattatttatagacatgcagacagtaaggtcattgcaatggcgggctatttgcttttactgcaggtaaaatatggctggaagagctcactctctcatcaaaaacttagtcatcctgc

SEQ ID NO: 58266 - DNA, 548 bp, Chicken  19866894315025_2
ggaaaccactcaatacctcagactatacagtgaaaacacctgggttaacaatgatattctgcgtaaaaaaacaaagacaaagggtagtaacagcagtgttcatgtggattcctgcctgacggagtgttacaactccagactatggmaagatcattcttcaccccttgctatgtagcatgaaacagttaacacacagagtgtttaaatcatatataccctatgacttatccacaaaagcaaagtgctagcaccactcatttaggcaatttggatgtcaattgataacatggatcatcctcrtgcatcagaacttagcatctacaaacctctattatttatagacatgcagacagtaaggtcattgcaatggcgggctatttgcttttactgcaggtaaaatatggctggaagagctcactctctcatcaaaaacttagtcatcctgctgttgctttgttcgagatagagagataaatgggattcctgaataaatagaataatagtcaaacaaagctcaatcactcccatggacgcagaaaaactattca

SEQ ID NO: 58267 - DNA, 600 bp, Chicken  19866894315029_1
accttgtgagaaagtatgaaaatctaacatttatatgcatttttttccacccaaagccctacaaattcacatattcgaatacaaactaagaatttagtttgtattaaagctcacatctataagtagaagctcagaacttcccagattctagtgacttacattaattttatgatttatttaaactgcttacttctaaagagtcagtatacaaacataaacattttcaaagcaagttagcaaattcagccacagagcttccaatggaagatgtatgactaaaacatcttgagacataactcyaaaatcaaggtatggaatttgattgcagtagggtaggtaagtgttgggtctaaaaggaaaaaaaaawctagattcaagcttgctaacatagtgacagcaaccttttggcaggtcacataccatcacatccttatcgttttctcatttttgcccctagtattttatagacttcactgaaatttcttaatgcctcctcaccttaaatacctggatgacaactaccatccagcagcaacatcagcagcagttcctacatttgtaaatgaagcttactcatttgcctgtaacagtatcttagct

SEQ ID NO: 58268 - DNA, 600 bp, Chicken  19866894315029_2
cacatattcgaatacaaactaagaatttagtttgtattaaagctcacatctataagtagaagctcagaacttcccagattctagtgacttacattaattttatgatttatttaaactgcttacttctaaagagtcagtatacaaacataaacattttcaaagcaagttagcaaattcagccacagagcttccaatggaagatgtatgactaaaacatcttgagacataactcyaaaatcaaggtatggaatttgattgcagtagggtaggtaagtgttgggtctaaaaggaaaaaaaaawctagattcaagcttgctaacatagtgacagcaaccttttggcaggtcacataccatcacatccttatcgttttctcatttttgcccctagtattttatagacttcactgaaatttcttaatgcctcctcaccttaaatacctggatgacaactaccatccagcagcaacatcagcagcagttcctacatttgtaaatgaagcttactcatttgcctgtaacagtatcttagctttccttcataagtaacacaggttgtaagcactcacattaatcatatttgccattatttccataaatg

SEQ ID NO: 58269 - DNA, 600 bp, Chicken  19866894315033_1
gataatccaacgctagcagcagcatccttaacacatccaaatggcacatcgttggcctgaagttactgagtgacaattgcacagagttagagaattcacgaggcaactctacatgcattcaataaggtgacgttgcatgaagtaagtcgtcattaattatttaattaaagacattttccagtaaggagatggaaaatagtactctaaatcaaaatacgttacacagctccaaaacccttgtacctttaacaactgaggccaaatgcaaatgattaccgtgggcttgaataaaaattgcaygcttgtagaaaggaacgaaactcagcccccgttaataaccttatcactttttcaaaaagaagtaacaacacatcaagtagtacagtccttacggcttcacacagtgaagttcgtgctgaatctcccagaaggaacagtttttcctcaatagccatcttttgtgaacacatcatcagcttcatcatcatttaaccctctttggtaatgtactgaagagaaggcactccagtgaagacgcttctttttacagataaaccacaccaatcccagaacaaggactaagatgaccagcagggcaaa

SEQ ID NO: 58270 - DNA, 600 bp, Chicken  19866894315039_1
ggcgcggcgaggcgaggcgaagcaatgcgagactaggtgaggcgaggcaaggcaaggcgggcccaggcaaggcgaggttggcgggatggggcgaggcggggcaaggcaggtgaggtagagcgaggcggggcgaggcagggcaaggcggggcggcaagaggcatggtagggcgaggcatggcgaggagaggcgaggcgaggcagggcgaggcgagatgaggcggggcgaggcgaggcgaggagggccgaggcgaggcgaggagggccaaggcgttgcggggcgaggtgtggtgaggggaakcgaggtggggcgagtcgaggtgaggcgaggcgcggcggggcgtggcgagtcttggcaggcgaggcggggcgaggcggggtgaggctatgcggggtggggcgagtgggggcgaggcaaggcaaggcgaggcgtggcaggcgaggcaaagcagggcaaggcgagtagaagcgaggtggggtgaggctagatggggtggggcgaggcggggtgaggcgaggcgaggcggggcaaggagaagcgtggaagggcgaggcggggtgaggcaagccggggcagcgcaagacagggcgaggttgggtg

SEQ ID NO: 58271 - DNA, 600 bp, Chicken  19866894315044_1
tccgctctccagtaggtgatgggcatttggggaataaaacgctaagagcggggcttaacggggctttgtgtgctattgtccagctgtgcttgagactacaacaataaacagtgaaaggaagtagggcttttaaacagacctgcttcttgtctccctattcctgtgttcctggaatatgacaaattctgctttttactccaagcgtattagtaaaaacaacaaggggaggtgcattcagtgcagctcaaagactttggcagtcacttgattgtttttacatgtgcaacctctgtctctgcrtacattcatgcctgtatctgttttggaggtgctgaagaagtcgttctgtttggtggctgtccctcccaggtcygcatctgggctccaaacccagcagccccatygggactccaggttgacaggggctgtccgggctccagctcctgcccctctcctcctgccacatataaggtgttggttttccttgccctctctattrctggtgtggcagctcgttgctgcagagccagccactctcccagtttgtcacccagatgtattygtggtgcttttatccccgcttggtgcgcccacagctct

SEQ ID NO: 58272 - DNA, 600 bp, Chicken  19866894315044_2
tattgtccagctgtgcttgagactacaacaataaacagtgaaaggaagtagggcttttaaacagacctgcttcttgtctccctattcctgtgttcctggaatatgacaaattctgctttttactccaagcgtattagtaaaaacaacaaggggaggtgcattcagtgcagctcaaagactttggcagtcacttgattgtttttacatgtgcaacctctgtctctgcrtacattcatgcctgtatctgttttggaggtgctgaagaagtcgttctgtttggtggctgtccctcccaggtcygcatctgggctccaaacccagcagccccatygggactccaggttgacaggggctgtccgggctccagctcctgcccctctcctcctgccacatataaggtgttggttttccttgccctctctattrctggtgtggcagctcgttgctgcagagccagccactctcccagtttgtcacccagatgtattygtggtgcttttatccccgcttggtgcgcccacagctctgtggaagccgagcaccttctgtcagaggtggctttggaaatgttacrctgaagtcatgcagcaaatgccaaag

SEQ ID NO: 58273 - DNA, 600 bp, Chicken  19866894315044_3
taaacagtgaaaggaagtagggcttttaaacagacctgcttcttgtctccctattcctgtgttcctggaatatgacaaattctgctttttactccaagcgtattagtaaaaacaacaaggggaggtgcattcagtgcagctcaaagactttggcagtcacttgattgtttttacatgtgcaacctctgtctctgcrtacattcatgcctgtatctgttttggaggtgctgaagaagtcgttctgtttggtggctgtccctcccaggtcygcatctgggctccaaacccagcagccccatygggactccaggttgacaggggctgtccgggctccagctcctgcccctctcctcctgccacatataaggtgttggttttccttgccctctctattrctggtgtggcagctcgttgctgcagagccagccactctcccagtttgtcacccagatgtattygtggtgcttttatccccgcttggtgcgcccacagctctgtggaagccgagcaccttctgtcagaggtggctttggaaatgttacrctgaagtcatgcagcaaatgccaaagtctttgctcctttctgcttgcctctgcttgt

SEQ ID NO: 58274 - DNA, 600 bp, Chicken  19866894315044_4
aagcgtattagtaaaaacaacaaggggaggtgcattcagtgcagctcaaagactttggcagtcacttgattgtttttacatgtgcaacctctgtctctgcrtacattcatgcctgtatctgttttggaggtgctgaagaagtcgttctgtttggtggctgtccctcccaggtcygcatctgggctccaaacccagcagccccatygggactccaggttgacaggggctgtccgggctccagctcctgcccctctcctcctgccacatataaggtgttggttttccttgccctctctattrctggtgtggcagctcgttgctgcagagccagccactctcccagtttgtcacccagatgtattygtggtgcttttatccccgcttggtgcgcccacagctctgtggaagccgagcaccttctgtcagaggtggctttggaaatgttacrctgaagtcatgcagcaaatgccaaagtctttgctcctttctgcttgcctctgcttgttgctgtgctcgaagggtttgtgtgctgggcacaacaccacgggctgcagcatcccacaaacccatccctgctgcgagtgcagcggatggagatat

SEQ ID NO: 58275 - DNA, 600 bp, Chicken  19866894315044_5
acttgattgtttttacatgtgcaacctctgtctctgcrtacattcatgcctgtatctgttttggaggtgctgaagaagtcgttctgtttggtggctgtccctcccaggtcygcatctgggctccaaacccagcagccccatygggactccaggttgacaggggctgtccgggctccagctcctgcccctctcctcctgccacatataaggtgttggttttccttgccctctctattrctggtgtggcagctcgttgctgcagagccagccactctcccagtttgtcacccagatgtattygtggtgcttttatccccgcttggtgcgcccacagctctgtggaagccgagcaccttctgtcagaggtggctttggaaatgttacrctgaagtcatgcagcaaatgccaaagtctttgctcctttctgcttgcctctgcttgttgctgtgctcgaagggtttgtgtgctgggcacaacaccacgggctgcagcatcccacaaacccatccctgctgcgagtgcagcggatggagatatccgttctgctgaggggcagataacagaaataatctaacctattccagccaaataaataaggct

SEQ ID NO: 58276 - DNA, 600 bp, Chicken  19866894315044_6
gtttggtggctgtccctcccaggtcygcatctgggctccaaacccagcagccccatygggactccaggttgacaggggctgtccgggctccagctcctgcccctctcctcctgccacatataaggtgttggttttccttgccctctctattrctggtgtggcagctcgttgctgcagagccagccactctcccagtttgtcacccagatgtattygtggtgcttttatccccgcttggtgcgcccacagctctgtggaagccgagcaccttctgtcagaggtggctttggaaatgttacrctgaagtcatgcagcaaatgccaaagtctttgctcctttctgcttgcctctgcttgttgctgtgctcgaagggtttgtgtgctgggcacaacaccacgggctgcagcatcccacaaacccatccctgctgcgagtgcagcggatggagatatccgttctgctgaggggcagataacagaaataatctaacctattccagccaaataaataaggctgaaaataaatctctccctgtattgtctttgtaaatatcttttaaattgagtctgagtgacaagatgtggttgagtcactagaaga

SEQ ID NO: 58277 - DNA, 593 bp, Chicken  19866894315046_1
ttccatcttaccttattgagaggaaagaagaaattggcagcacattgatttgcaaatatctgtgctgtcagacgctgtttttcactgcgctctccctcggtgcaagtaccctgatagatctcagagcagagccagcctttaatggccaacagaacatgggcaacgaagtgccctctgatacaaaacacgtgcaggaaatctgtcatttcttgtatgtacctgcccacgttatgggaggaatacattgcttagcactcactttagcagatacagtgccattttcagctattcaaacactgyaayataaaaagacctttgaaatacagaaggggggaaagaaagacgtggaagctttcaaaacatggaattgttctctaaggtaactgaagtaatttaatgaggaattttgttctcttcagaaaagagcctccgtgtatggctctggtcttgattcattttggctattgcaactgctttaatttcagcttggaaaaagctctccatacggcagttttacgagccatttacttttcagcattgaagtgaatgccgtttgtggatcgccctggccaacaggattacctccttgttca

SEQ ID NO: 58278 - DNA, 590 bp, Chicken  19866894315046_2
catcttaccttattgagaggaaagaagaaattggcagcacattgatttgcaaatatctgtgctgtcagacgctgtttttcactgcgctctccctcggtgcaagtaccctgatagatctcagagcagagccagcctttaatggccaacagaacatgggcaacgaagtgccctctgatacaaaacacgtgcaggaaatctgtcatttcttgtatgtacctgcccacgttatgggaggaatacattgcttagcactcactttagcagatacagtgccattttcagctattcaaacactgyaayataaaaagacctttgaaatacagaaggggggaaagaaagacgtggaagctttcaaaacatggaattgttctctaaggtaactgaagtaatttaatgaggaattttgttctcttcagaaaagagcctccgtgtatggctctggtcttgattcattttggctattgcaactgctttaatttcagcttggaaaaagctctccatacggcagttttacgagccatttacttttcagcattgaagtgaatgccgtttgtggatcgccctggccaacaggattacctccttgttca

SEQ ID NO: 58279 - DNA, 600 bp, Chicken  19866894315047_1
gagatgcatgcgaacggaggcatattaactttatgtactctggacctcaaaaagttagttttacctttctcctcaatttcagggcaaaaattagtcttattaaaaagggaagggtataaactgaagacatttttttctccagaacattcacatccctgggaagagttgatagatgggtttcacagtatttactaacaccattgcccagctactgagctgaaaaataactctgcacagtactgctatacctagtgtgctttttaggcattatcaagtatgtgtgaagacgttcaagcattyatacacatatgtctgtgaaaaaaaagaagaacacaaatgctgctcagaaatgtctggcctctatttatcttaaatagatgcttaggcaatgtcaggagaaaggttacatagtttactgccaataaagtaggggaatgctctgcttgcacacttcaggaaggataaaaacatccattaggattttcatcacacaaatataaatactctcctacgtgagcactgatgacagatgtgtggctaatctaccatgttaacttcatttgagaagttgtggttttgttcaaactttattagttaaac

SEQ ID NO: 58280 - DNA, 600 bp, Chicken  19866894315049_1
tgatagaaccatcagaacacaatggctgaatctttgggtttttcatggcaaagtggtgaatatgcaccactacataacatgcaggaagactagagaatttgagtccatcagtccagtataagtgtaaagctgctccagtataagcgtatagctaaactgttagattcttttatactaaagtttccatctacctgaggaaagctaaggacaatgggctttaaaacataacctgaaagttgacaaatttctgcttttatgaacttgagcagaaactgtgtgctccctaactgactgtcatgsttttggcactcattcttctcttgtagttaaaatagtttggtttatgctttaatgtttgaagggttctcagttgctactggggagaagcaatttctgcacagtcaggagggaagagtttatcttgtttggtgttgcttttagtggtatggatgcttgctcgctagatattatacccgagatcagcaaactcatttcattaaaagtccttcaggtggtagttatatttggttaccaccgagttgatatggatctgaaccagaaatgcagaagtgaaaggctttctatcctactaacaatttc

SEQ ID NO: 58281 - DNA, 544 bp, Chicken  19866894315057_1
tctgattcataattcgagtttctgcagttccattacattattacctatgaaaatcaaaagcctttacgttcacaaagcagcggaaactcacagtttgaaaaaggtcaaaatgccaccaagacgaaatcagataacttcagcactgtgtgtaatgaccagaacttcaaggaactcttacacacacactgtgtcacagaacagaaggaagcctcagaaggtctccacctgctctgaaagccctgagacactcatctgattccatttactgttagctcctggaatagtgagtctgtgactgcycaaagcagactgctcccaccctgaccaaatgaacacacggctgagtcccaggctttctgaggtcagaactgtctctttcaactgaggtttcagcagccaaagccagtgcctgacagcccttgtgtaagtgattcagaatgtaaattcccccaccctcctgaaaaagtcagcaagaaaaccattcaggtgcagtttgccaaaacaagtcccacattcagacctcgtgtcaaaataacttcccaga

SEQ ID NO: 58282 - DNA, 600 bp, Chicken  19866894315062_1
cactgcttttccttctgccctgtctctctcacctcttagctctatttctaacaaacatggtactcagtctgaagaattgggaaccagattctgaagagctttcacatctcagatgtggttcttccagccttcgtggctgtggccactcaaaccatctggattcatgtctggattccaaaccatgaggatgccttgatctgagcactcaggtgagaggctgaggaacgtggcacaaaatcctccgagcagatgagatgcaagacagtggaggagagctgctttctaccagctgtgttttamttgtgctgctgtgtaagatctggagtgcgactggaaatagtctaaggagagtttctcgggcagtattgctccagacacaaggcagcaggagagttagcagtcaacagagtaaagccctggagcccagcaattctctctatttgtgagcatactgcttgcacagaaagcaagagcacaacgtgctggctcactgattccaggccctaaggggtctgcatgataatataaactgcacaaaaagcttgaataatgcatgacattattcaataattcataaaagtcatcagcaacactcaactg

SEQ ID NO: 58283 - DNA, 600 bp, Chicken  19866894315063_1
gaaaaaaaaagattgatgtctttgctgtgagctggaatgctgaactccagcaacagcccgtggaaattgagcacacctgctcagctgagcctgcagaggaatggagccctttgtggcagacatggagcttgagtgacccatggagggtttgcctccacaagggcctgacagcccgacatctccatggagctgcagatgtgcatcagccccaaaatctcctgctgcagctgtctgccaggagtctgcctgagggtgcgtgccagatgggagctgctcagccagtactgctccaagcctttrgtttcccagagctgtaactcacccaggtgcttaagtgctgatacccatctcccctccttctcaccctaaagccactcagctgcacataacaaaggttatgaaccagccatcctctgcagcagagggacgaggcagcagaagtgggggaagctgcaacctggggtgatgctcatccaaaccaattttccttccttggtcaattcttaattcacttccagcttgagatgcatataagtgctgccctcctccttttggtgcgcctgctcaactaaagttcaacaagtccgcaggacaaagcag

SEQ ID NO: 58284 - DNA, 600 bp, Chicken  19866894315065_1
ttagtattatgagatggctttttgagtgttttctattagctgcatgtttgaacttcttcagtttgaagatttgagaatgactcaaggctgtttgattagtattttaaacccagtccctcagcattcacaggtttgtcaagctggtcaaggggttaagtcctgaacaacattcttgcttagtactttcatgcaagtggtaagcaaatgcatttatgtagataagcatcacattttttatgagagtactttcagattgctgactcatttttcaccatctctttcacagaaaaaaaatttcaragagactgaaccgtgcctaaattactttttttctttaattcctcagtgaataaaccttaattttcatttcctcctgttgtttagctttttcccatacagcttagttttcatttattccatttaatttctattttcaagtgacaacatcaagcatcttttcttagctgtttttaaaaactgcaacaatacaatactggtgcaacatagaattattttacatttgttattgaaaaaatcagcaacaggttgtggttaaaaagttgttaagcaaagcacacatgcacacctccatagaatata

SEQ ID NO: 58285 - DNA, 599 bp, Chicken  19866894315068_1
  misc_feature (1)..(46): n is any nucleotide
nnnnnnnnnnnnnnnnnnnnnnnnnnnnnnnnnnnnnnnnnnnnnntacatctctttaactaatacactttattgttacacattgcagctattaactgctctaagttattaagaactgttgtttctggcatctgtggcttttttccatcaagtgttacttccttaagccactttattaacatcaaaagaaggtgaattatttaaggattagaatgaaacacctcatagtaacaattgttaattgacttcagattattattttggcactacttaatgtagtggctgtaatagtactttacrgtagctggtagccagaaatagccattggacccgcaaacctatgatgatcaaaaagcaaattcctcgttcaatggaaaacttgtgatatattgagctttgcttgaagtgagaagaggaagaaatataggtagttttcagtggagcagaatcacaaggcagtgattcattgaatcctgttctatcttgtgctcatcattggatagatagatgattctctatgaaattataaytccttamgtgtcyttttccaagataatacaaattccaatgaggcctgatttgtcaaaatttctgaggaa

SEQ ID NO: 58286 - DNA, 600 bp, Chicken  19866894315068_2
acaattgttaattgacttcagattattattttggcactacttaatgtagtggctgtaatagtactttacrgtagctggtagccagaaatagccattggacccgcaaacctatgatgatcaaaaagcaaattcctcgttcaatggaaaacttgtgatatattgagctttgcttgaagtgagaagaggaagaaatataggtagttttcagtggagcagaatcacaaggcagtgattcattgaatcctgttctatcttgtgctcatcattggatagatagatgattctctatgaaattataaytccttamgtgtcyttttccaagataatacaaattccaatgaggcctgatttgtcaaaatttctgaggaacattcaatccagtatgaaaaaagtcaacatctgcagttggtatagaacaccttctgtgtcattatcacatattacgcaccttctatattccacactctcagcctgcactagcatttagttttgaactttgtcctttgaaaacactgaaacttttgcaggaaaacttttccttcaaatcattaattgctgcattttcaaacaagaccataatgcacttaaaacttaatgcct

SEQ ID NO: 58287 - DNA, 600 bp, Chicken  19866894315068_3
ttaattgacttcagattattattttggcactacttaatgtagtggctgtaatagtactttacrgtagctggtagccagaaatagccattggacccgcaaacctatgatgatcaaaaagcaaattcctcgttcaatggaaaacttgtgatatattgagctttgcttgaagtgagaagaggaagaaatataggtagttttcagtggagcagaatcacaaggcagtgattcattgaatcctgttctatcttgtgctcatcattggatagatagatgattctctatgaaattataaytccttamgtgtcyttttccaagataatacaaattccaatgaggcctgatttgtcaaaatttctgaggaacattcaatccagtatgaaaaaagtcaacatctgcagttggtatagaacaccttctgtgtcattatcacatattacgcaccttctatattccacactctcagcctgcactagcatttagttttgaactttgtcctttgaaaacactgaaacttttgcaggaaaacttttccttcaaatcattaattgctgcattttcaaacaagaccataatgcacttaaaacttaatgcctcataaac

SEQ ID NO: 58288 - DNA, 600 bp, Chicken  19866894315068_4
gacttcagattattattttggcactacttaatgtagtggctgtaatagtactttacrgtagctggtagccagaaatagccattggacccgcaaacctatgatgatcaaaaagcaaattcctcgttcaatggaaaacttgtgatatattgagctttgcttgaagtgagaagaggaagaaatataggtagttttcagtggagcagaatcacaaggcagtgattcattgaatcctgttctatcttgtgctcatcattggatagatagatgattctctatgaaattataaytccttamgtgtcyttttccaagataatacaaattccaatgaggcctgatttgtcaaaatttctgaggaacattcaatccagtatgaaaaaagtcaacatctgcagttggtatagaacaccttctgtgtcattatcacatattacgcaccttctatattccacactctcagcctgcactagcatttagttttgaactttgtcctttgaaaacactgaaacttttgcaggaaaacttttccttcaaatcattaattgctgcattttcaaacaagaccataatgcacttaaaacttaatgcctcataaacgaatgc

SEQ ID NO: 58289 - DNA, 600 bp, Chicken  19866894315074_1
ttcatagcaattttcatgattttggagtttccactgtgaattcctgtgatttctggctgcctgacatacatcctaatgcccccaatgggattcatgattttaatggattttaatttggctccaatgctccaaacagcaaggtgtgaataaaaagaaagaaaaggccatatctccatttggtatttctacacagcctctcatgagagcacgctcctgtgagatttgcatccataagcatgtttgacacaccaaatttggactttagtgatcttgtccaaaaacaacctaagctttcaaacstaccaaagtatgcagaaagaaatttaagttagcaaaactgaatgccaacaagtaaaaacaattattggaaaacaggctgatggaaatgggtaacaatgaccaaatggaagcacagtaaaatatttaaacatgaaagtgatgatgcatacatgtttacttgatttaaatgtcattttagaagatattcagatgccagtactaattatggttaaattggaaaagacactttagatcctacaacttgtcttcctctagtgtttcaagcatgtgacagtcatctatataaatgacaagaagaca

SEQ ID NO: 58290 - DNA, 600 bp, Chicken  19866894315094_1
ggcattgtgggtattactggcattatattcattactggtttctgtcaaggtttctttgagctctaaggagagttgtgtggagctgagctgactcctttttctgaaggaactagaagcctcagctccccttttaattcacatatttgtctccaaacaggtctttggttgttgctgttttttaataaagaacagtcacttcatgaaataatattggttgatatgtcaaatctctaaatttcgtgaaaacatacatgttactggacataaaattgtgtactgtgtgtaaaaataaatacgtakaagtgcatgattttaaatttcattcgttttcccaaatgtaaytttcacaggatgatcatagaatgtgtttcctcatacttgtgttacacatatgtgaattactaagatatattttaaagamgataatcccttgctttcaaggaagggctatctaaatagaaatctagaaatacttaaagagaaaaaaatgtctactatgtcgctgatttcaagtggatcttaacagatgccagtaattttaattactttactttttaaagcaatgatgatcttaagtaaagaatcctaaaataacaataa

SEQ ID NO: 58291 - DNA, 600 bp, Chicken  19866894315094_2
tgtcaaggtttctttgagctctaaggagagttgtgtggagctgagctgactcctttttctgaaggaactagaagcctcagctccccttttaattcacatatttgtctccaaacaggtctttggttgttgctgttttttaataaagaacagtcacttcatgaaataatattggttgatatgtcaaatctctaaatttcgtgaaaacatacatgttactggacataaaattgtgtactgtgtgtaaaaataaatacgtakaagtgcatgattttaaatttcattcgttttcccaaatgtaaytttcacaggatgatcatagaatgtgtttcctcatacttgtgttacacatatgtgaattactaagatatattttaaagamgataatcccttgctttcaaggaagggctatctaaatagaaatctagaaatacttaaagagaaaaaaatgtctactatgtcgctgatttcaagtggatcttaacagatgccagtaattttaattactttactttttaaagcaatgatgatcttaagtaaagaatcctaaaataacaataaaaatacttttaataatcattttaatcacacatctatatggaa

SEQ ID NO: 58292 - DNA, 600 bp, Chicken  19866894315094_3
gctccccttttaattcacatatttgtctccaaacaggtctttggttgttgctgttttttaataaagaacagtcacttcatgaaataatattggttgatatgtcaaatctctaaatttcgtgaaaacatacatgttactggacataaaattgtgtactgtgtgtaaaaataaatacgtakaagtgcatgattttaaatttcattcgttttcccaaatgtaaytttcacaggatgatcatagaatgtgtttcctcatacttgtgttacacatatgtgaattactaagatatattttaaagamgataatcccttgctttcaaggaagggctatctaaatagaaatctagaaatacttaaagagaaaaaaatgtctactatgtcgctgatttcaagtggatcttaacagatgccagtaattttaattactttactttttaaagcaatgatgatcttaagtaaagaatcctaaaataacaataaaaatacttttaataatcattttaatcacacatctatatggaaggaacaaagtgctttagaactttccatatttttcatcaggaaagatacatgaatatttaagtgacataacacatttcaa

SEQ ID NO: 58293 - DNA, 600 bp, Chicken  19866894315095_1
tccaacattctgtttttcttggagctctcagagataggacttttcccagcctggatgagctgctgttatttctatagagtcagcagtacaatagaccctcttgggagccaggaccgtgtctggctactggctcagcctcacaaagcctcagtcctgcgtgcttaacattgctctttggttcccaggattagcatctgactgatggcaggtgagaaggcagaacactgcagcacgaaaggaaagaaatcaattaagttcacattgcgacatgtgctttctcgtggccaggttatggcaatygtcctcgccttagagaaacaggaattgggtagaagacattgttggccctggaagcactgagcaggcagtggtgtgtctgtcagagaagtggaaatgacagcagagagacgttttgctctctttggttttagtatgtgtactacccatactaaatataacactcaacgcagcagttaatatctctgccctgtagctttctcattcttaaaagttgtcttaaacattctcagtctctcagcagactcagtaagatgtgagctaaggcatattagtcacattgttatcaagagatgaaagtga

SEQ ID NO: 58294 - DNA, 600 bp, Chicken  19866894315097_1
aagtgtggtcttgtgagagcggtcttgcatgcaggcaaggaaaaggagaaaatgagggggaaatatgtaaagaatggttgcacacaggagatacgaaactaagaaagaagtgaatcagctgagtaattgaaaataaactttgtattcccttgtctgaagagaagtgcgaaaagaattcatgtcatgattttcagaaataagtaatatttatatgtaataaattaagagcttgaacatatacagcatcttgcaacacataaagactgttagtgtcaaaagacagtgcctttatcttccttwgaaatcactgtttcatctgatcaccttctgtgggggtttaaccagtgattctgagtcattccaggcaagacaggtacctgtttatgagatggattggctctttcagttttcaggcttttgatttatgccccactggtgattccacgaagaatggcaacagctctattcgtagggagcaacctgaattgtgtatttgagagatccccagggaacttttttaataatattgtagttgcttcttgttctgtgtttttcatgtacagatcctctaagagtcttccagattccttctggggctct

SEQ ID NO: 58295 - DNA, 600 bp, Chicken  19866894315103_1
tccatgacataaaaaaatagatacatatacaatatacatagaaaacactgttcttaccttattgcgcttgcagataagtggccataagaaccactggctgacgaactgctacgagaattattgagaattgtgaccaaggaatttggagatgtccgtatcatggtctgaaggtcaaagctgtgatcagataggggggatatagacaacgtacgctttcggcttggtctagctgataatcttggactcggaaacctggtgcctgttatgtaaacacaaataattatccaccaggatacttarttgcatttattttttatcagtgtaagggagtaagggagtcacaagacaccaacactctgtgataagcccactctcttcacttgtgatctactggctatgattgacgaaaattaggatgaaaaatctatcttcctgtggcttacctcagtggagctgtacttattaatttgcaagcaaaatgataaattgctaaacaaaaggaaaagacttttatgagttatccctctcatttctggtgatttatgaatctgatggcttcttagacattcacatcattaattcaaccacatgcaatgagac

SEQ ID NO: 58296 - DNA, 600 bp, Chicken  19866894315105_1
agtgaccctttttggctctttcctaatttgcagatgtgtcaatggttaaagggctggtccgtctcggttccgtgactaatggggcggagggattttgcaaaatctgcgcctccaggaagggaaacaggggaccccagaataattaaaaacaacggcaacaacctgaggagaaacaaactaatttactaaatatagtatcggaatgtaagataacacactataatacaatataaatcaacaataattgagagaaagattgtccgagagccaaaggccttacactaatactgaagccttgcrtgcagtcaggagcagcagtagcgagccgatcygacagggaacacggcgagacgagaagagggacaggtcagatgacctgtgcccttatatctgttcccttgagcaggaatgataacagtactcgaaaaggctcttggggaacgtagttcttcttctcttccagacaggtacccggaactaaagcatttgctccttaactcccagtacactgcatgatgttgtgatgtggaatactgataaccaaaaatcataaaaccatgacattccaccccttattctacatcattacagcatgcttaa

SEQ ID NO: 58297 - DNA, 600 bp, Chicken  19866894315105_2
gatgtgtcaatggttaaagggctggtccgtctcggttccgtgactaatggggcggagggattttgcaaaatctgcgcctccaggaagggaaacaggggaccccagaataattaaaaacaacggcaacaacctgaggagaaacaaactaatttactaaatatagtatcggaatgtaagataacacactataatacaatataaatcaacaataattgagagaaagattgtccgagagccaaaggccttacactaatactgaagccttgcrtgcagtcaggagcagcagtagcgagccgatcygacagggaacacggcgagacgagaagagggacaggtcagatgacctgtgcccttatatctgttcccttgagcaggaatgataacagtactcgaaaaggctcttggggaacgtagttcttcttctcttccagacaggtacccggaactaaagcatttgctccttaactcccagtacactgcatgatgttgtgatgtggaatactgataaccaaaaatcataaaaccatgacattccaccccttattctacatcattacagcatgcttaatatatatacaaacaaacataattataatcaat

SEQ ID NO: 58298 - DNA, 600 bp, Chicken  19866894315110_1
ttcagcaacttgtgatgaatggctgggtttctgtgtacttgacagcactgcccctctgcagtagcttgcaagagcagtcatgtgagggaaaaatgaatgaaaacattacaaaacatattttgtttgtctcatcacctcttgtgaacgctccttcccctccactcacaaagatttggtatgtacggataaattgcaaacctgctgactggtctgcacaactattctctaggccaaagccataaaataagagcaaagcgggcgtgaagctttgatgttcctcaggagctgcaagtagtccayttatgcagcatgtggtggcgtggagccaagagcttctmcacatgctggggtacaactgggcagcaacgcacacatagcctggagcttgctgcgctcagataatgagagaatgagctgggtttctttaccgtcctggcaaaattaatgaatttctgtcagaatttaagggaaagggatgcatatcaggcttcacagaagaggaaatgagagggattgtctgttctgatcaggctgctttttcattatgtagaagtaattctaaatacaagcaacagcacttggccataaagtcccacgtgc

SEQ ID NO: 58299 - DNA, 600 bp, Chicken  19866894315110_2
ttgacagcactgcccctctgcagtagcttgcaagagcagtcatgtgagggaaaaatgaatgaaaacattacaaaacatattttgtttgtctcatcacctcttgtgaacgctccttcccctccactcacaaagatttggtatgtacggataaattgcaaacctgctgactggtctgcacaactattctctaggccaaagccataaaataagagcaaagcgggcgtgaagctttgatgttcctcaggagctgcaagtagtccayttatgcagcatgtggtggcgtggagccaagagcttctmcacatgctggggtacaactgggcagcaacgcacacatagcctggagcttgctgcgctcagataatgagagaatgagctgggtttctttaccgtcctggcaaaattaatgaatttctgtcagaatttaagggaaagggatgcatatcaggcttcacagaagaggaaatgagagggattgtctgttctgatcaggctgctttttcattatgtagaagtaattctaaatacaagcaacagcacttggccataaagtcccacgtgctgaaatgtttattsccttcctcctttacttgataaaat

SEQ ID NO: 58300 - DNA, 600 bp, Chicken  19866894315110_3
gtggcgtggagccaagagcttctmcacatgctggggtacaactgggcagcaacgcacacatagcctggagcttgctgcgctcagataatgagagaatgagctgggtttctttaccgtcctggcaaaattaatgaatttctgtcagaatttaagggaaagggatgcatatcaggcttcacagaagaggaaatgagagggattgtctgttctgatcaggctgctttttcattatgtagaagtaattctaaatacaagcaacagcacttggccataaagtcccacgtgctgaaatgtttattsccttcctcctttacttgataaaatccctttgatgcccttttaagataatcctatttctccctcctttgagcagctttttgccttgatggcagagattttgaaatgacatatttgcaggaaaaatgaagggatcacttgagatgtacagagcttcactcttaactgttagaataggagtaaaagtacagattgatttgtaattggttattcatcagcagtttcttattgatttagagagcggttacaaggagatgttttagcaatttaccttggctgctggtttgaataacatctcattca

SEQ ID NO: 58301 - DNA, 600 bp, Chicken  19866894315141_1
tgggaagtgattaatgaatctgggggaggtgggaatttctgctggggctatggcagctagggagcttgaaagagcaagtgtcaggctgccaggcagttagttactgctagtttcttggcgactaccatggaagacaatatttctgtgaatagtctagccctaaaaataatgagtaggctaactgaatgcagtagtgtcacaaagccaggaggtgttgtcagtccagaggcagactaggttattatccaagaaaatataagtttgaggcacaaagagcagcatttagggaataacaccacraagttctgctatgacttttaagtttgtgcacaagcaatgactgaaggaggggaaggaccccatgtgccagtcagtcacaagatgatcacaagtcacagtcagtcacgagtgtgatgtgattgtttagagagcacatgtggtccaagggcttagcagttcagatctcagaaaagacagaggagtattgggtacccacaccagtgccagaaaatcaaatcaaactagagcaggcacataaaaaagtgatagtggaatacgggagaatgggaagctcaaccaaaggagcttgtctcatttagc

SEQ ID NO: 58302 - DNA, 600 bp, Chicken  19866894315147_1
agggttgattcttatgacctgaagcagagctctgcgtgcctgcagagtccacacagtgtttgtcatgggaaagatcctgttgtgctgagcagtggtgtagttgggtgtatatgctgtctgcactgcgtgatgcgtctcttttctgttcctgaaagaaaactctctttgtattgattaatgaatgggagcagctgcctgctattagaaagtatgtgtcatgtttttacagctacagcagtttcatccaaaattcacaacttaaaaagccaaggaaggggaggttaacactgttaccatccrgtgtttcttttgcrcwgcatttacagcgggtgttgccacagaataaaccccgagaagacattctgtagcgttgaatggggctgagaaggtaatgatttatatgcagagaactctgtaggctgtttgtttactgtggtaggaaaacactgtttttccctaaggtctgttcaaatcactgaagtgcctcatgtaataacrtgagtcacggagaaggtgaggtttctaatattgctgcttctgttagcatcagatgagaaagctgccccatttcagaaygctgtgcctgctgtgcagcagacc

SEQ ID NO: 58303 - DNA, 600 bp, Chicken  19866894315147_2
tgacctgaagcagagctctgcgtgcctgcagagtccacacagtgtttgtcatgggaaagatcctgttgtgctgagcagtggtgtagttgggtgtatatgctgtctgcactgcgtgatgcgtctcttttctgttcctgaaagaaaactctctttgtattgattaatgaatgggagcagctgcctgctattagaaagtatgtgtcatgtttttacagctacagcagtttcatccaaaattcacaacttaaaaagccaaggaaggggaggttaacactgttaccatccrgtgtttcttttgcrcwgcatttacagcgggtgttgccacagaataaaccccgagaagacattctgtagcgttgaatggggctgagaaggtaatgatttatatgcagagaactctgtaggctgtttgtttactgtggtaggaaaacactgtttttccctaaggtctgttcaaatcactgaagtgcctcatgtaataacrtgagtcacggagaaggtgaggtttctaatattgctgcttctgttagcatcagatgagaaagctgccccatttcagaaygctgtgcctgctgtgcagcagacctgatggagagacgc

SEQ ID NO: 58304 - DNA, 600 bp, Chicken  19866894315147_3
acctgaagcagagctctgcgtgcctgcagagtccacacagtgtttgtcatgggaaagatcctgttgtgctgagcagtggtgtagttgggtgtatatgctgtctgcactgcgtgatgcgtctcttttctgttcctgaaagaaaactctctttgtattgattaatgaatgggagcagctgcctgctattagaaagtatgtgtcatgtttttacagctacagcagtttcatccaaaattcacaacttaaaaagccaaggaaggggaggttaacactgttaccatccrgtgtttcttttgcrcwgcatttacagcgggtgttgccacagaataaaccccgagaagacattctgtagcgttgaatggggctgagaaggtaatgatttatatgcagagaactctgtaggctgtttgtttactgtggtaggaaaacactgtttttccctaaggtctgttcaaatcactgaagtgcctcatgtaataacrtgagtcacggagaaggtgaggtttctaatattgctgcttctgttagcatcagatgagaaagctgccccatttcagaaygctgtgcctgctgtgcagcagacctgatggagagacgcgg

SEQ ID NO: 58305 - DNA, 580 bp, Chicken  19866894315147_4
ctattagaaagtatgtgtcatgtttttacagctacagcagtttcatccaaaattcacaacttaaaaagccaaggaaggggaggttaacactgttaccatccrgtgtttcttttgcrcwgcatttacagcgggtgttgccacagaataaaccccgagaagacattctgtagcgttgaatggggctgagaaggtaatgatttatatgcagagaactctgtaggctgtttgtttactgtggtaggaaaacactgtttttccctaaggtctgttcaaatcactgaagtgcctcatgtaataacrtgagtcacggagaaggtgaggtttctaatattgctgcttctgttagcatcagatgagaaagctgccccatttcagaaygctgtgcctgctgtgcagcagacctgatggagagacgcggcagctctcagctggggagagatgtgctggagagggagatctgcttatgacgtggtgtgttctcaggtacaatatttgtgtggtgtgttctcaggtacagacccccagaagggttgaagttgatgtacgtagcccaggatatgacttgaggaccacgagctca

SEQ ID NO: 58306 - DNA, 502 bp, Chicken  19866894315147_5
ggaggttaacactgttaccatccrgtgtttcttttgcrcwgcatttacagcgggtgttgccacagaataaaccccgagaagacattctgtagcgttgaatggggctgagaaggtaatgatttatatgcagagaactctgtaggctgtttgtttactgtggtaggaaaacactgtttttccctaaggtctgttcaaatcactgaagtgcctcatgtaataacrtgagtcacggagaaggtgaggtttctaatattgctgcttctgttagcatcagatgagaaagctgccccatttcagaaygctgtgcctgctgtgcagcagacctgatggagagacgcggcagctctcagctggggagagatgtgctggagagggagatctgcttatgacgtggtgtgttctcaggtacaatatttgtgtggtgtgttctcaggtacagacccccagaagggttgaagttgatgtacgtagcccaggatatgacttgaggaccacgagctca

SEQ ID NO: 58307 - DNA, 600 bp, Chicken  19866894315153_1
gattctccatctttggagatgcccagagctgaactgagtgggaccatgggcacagctattggacctgacctggagctgactttgcagttggttctcctctgagcaaaaagtagaatcaattggaagaaacctctggaatccgttctgcattattctgcaacttgaagggcccttgagcaaaaagaagaaaaaaacccaaaaagtttaaacagaaattgcactctccatgagagttaaggttcagttttgacttcttcataattaaatcctgagttgttttttgagcagcctttgaagaastcgcttccttttggggatgctctgttacctggtgtggaggcaggtagaagatctgctgaggaggttccactttcttcttaatagctttcaaggtactttgtaagtgtgtagcttgttagatggctttgaggtcaagtgaagcaccgaggcttttgtaagtctcctcccaaattaaaggaaatctattttaaagtgtttcatcttcaaggctcgggcaccgatagcagctctctgtcttatctcagatgtctgagaaagagctacgcttgtttatctggcccttactcagtttgcatgtta

SEQ ID NO: 58308 - DNA, 600 bp, Chicken  19866894315154_1
agacgtttggctgaagaactttcttccgggtttgccaagatagcgtgaacaatatgagctgaaaacaggaacttggaattcatgtatataagatgtggattggccaagccaagagtaaactgttttgtcacatttaattcaaatttaggacacgtatttgagaagagttgtcatataagaagtttcaaatcctaggtaacttgcactgtatcggcaaccctgagaacacacatctcactcctgagacgttcacaacccttctcctgcatggagggctcagaaactgattttaatctgagyactatgtgagaaaartggcagacgtaatagaattttccttattttcatcaactgctgctgttgcaggaaccatgtcgagaaatcacagaataaaatgaatttcattcaagatgagcaagagtggatgtcaacacctacaggctgactaactgagacataaggtatggacctcaaaaacaggcatattgcacacagcctgggaaccaccaggaaccagtgagttttggcagcatggaaccattctttgtaagctgtgattcatgatctgaagaattaaattcccttccgttttcattagct

SEQ ID NO: 58309 - DNA, 600 bp, Chicken  19866894315154_2
gaactttcttccgggtttgccaagatagcgtgaacaatatgagctgaaaacaggaacttggaattcatgtatataagatgtggattggccaagccaagagtaaactgttttgtcacatttaattcaaatttaggacacgtatttgagaagagttgtcatataagaagtttcaaatcctaggtaacttgcactgtatcggcaaccctgagaacacacatctcactcctgagacgttcacaacccttctcctgcatggagggctcagaaactgattttaatctgagyactatgtgagaaaartggcagacgtaatagaattttccttattttcatcaactgctgctgttgcaggaaccatgtcgagaaatcacagaataaaatgaatttcattcaagatgagcaagagtggatgtcaacacctacaggctgactaactgagacataaggtatggacctcaaaaacaggcatattgcacacagcctgggaaccaccaggaaccagtgagttttggcagcatggaaccattctttgtaagctgtgattcatgatctgaagaattaaattcccttccgttttcattagctgcctactagaccttt

SEQ ID NO: 58310 - DNA, 599 bp, Chicken  19866894315156_1
  misc_feature (1)..(66): n is any nucleotide
nnnnnnnnnnnnnnnnnnnnnnnnnnnnnnnnnnnnnnnnnnnnnnnnnnnnnnnnnnnnnnnnnnccagttttatatctcccaatcggaaaaacaactaaatgtctgaattactcaattctactaacagcactctcaacagtcagttattgctcatgttctttgcacgtggtacttttataatcactgcctccccctctggcaatttggtacaagtttgattttctgcagagaaggttttgccagggagttactctgtaaatattatttctggaaaagagagatcacttgtgcacatgktgattaaaaattcataattaacacctcgttacctccccaggtgtacattggcatgtccacctacaaccatagccaaaatcatgcagctgttaagccatattttttcagtgaatgtcatgctaaataaatatatttaagtagtggtagctctgagtttcctaaagaaggcatgtttgaagatgaaaatatatgctaaataaaccagccatagtgtatcaaaggcttattcattttacctgaatacatagttgatgtactgttggtccaagtcactgggaaagaagaggaaaaaaataagg

SEQ ID NO: 58311 - DNA, 600 bp, Chicken  19866894315156_2
gtacattggcatgtccacctacaaccatagccaaaatcatgcagctgttaagccatattttttcagtgaatgtcatgctaaataaatatatttaagtagtggtagctctgagtttcctaaagaaggcatgtttgaagatgaaaatatatgctaaataaaccagccatagtgtatcaaaggcttattcattttacctgaatacatagttgatgtactgttggtccaagtcactgggaaagaagaggaaaaaaataaggtattctttcagtaatgctgttcattgatataaatagatcactrtattaagtagtagcacaatattaccatgtatccacataatgttataattatgtaacatgcttatattattacatatattttataaacattcatattacaacattatgttagtagtttatcagcatattaatttacacagcatatgcacaaatttctgttgctattctgttacattgaaagtaaagatatggtgagcctggctaaaatttaaataaagatggaaaatgattttgaaataaaggagcctctctgaaccctcaatacatgtcatgtcacgtacatatacataacacacagtgg

SEQ ID NO: 58312 - DNA, 600 bp, Chicken  19866894315173_1
aaacaaacaaacccctccagcacccatctggtttcctgccctctgtttctgctctggtttgaagctgtgctcaaagtaaataatgggatgtgggctaacctcaagtgagcatctcccacagatggcacaataaaatgagatgccagggaaggtctcttgtgtgggatgcagtgtgttcaggtgaggaacttggggataggcagtgaaattaggacaagaggttcctgctttgttcctccttccaccacagaccctgtgctgtgtttaattcccatccttctgacccagcctttgcctctygaggctttcccctcaccatcatttgaaaaggtgggatttcttcattgaaccacagaatcagccatagaatcacagaattgggttgaaagggactttaaagcccacccagttcaaccccctgccttgggctggtcaccccccacttgaacagggtgcccagagccccatctagcctggccttaaatgcctacatggatggggcatccacatcttcctttggcaactctcttactcttaaattagatgttttggagccagtgcattccactgccccgcatgcacccagcaggaagaggactt

SEQ ID NO: 58313 - DNA, 600 bp, Chicken  19866894315174_1
tggatccagcaaaggatcacaaaagatgaaggaacaggagcatttagtttacagtgagaaacagggagccaggactggttatgctcagaagaaaaggctcagggaggtgatgggtatcacatcaatgtgataaataactgaaaggaagaagcaaaaaaagagccaaactcttcccagtggtattcagtgaaaggacaggaaggaatgggcatgaaatacaggaaattcagtttaaaagcaaaagatacatacatgtatttctttactatgagggcggtcaaatgccggcaactgcccacygaggtggtggagcctagatttctagaggtctgttccaaactcaaacatcttttgattatctgaagttactggattaactcaaactggctgaagagtagataaattttaaaacatgacatactacagcttgagaataatccactacatttatccatgcaaaacaagtacacaaataaaggaaaaaagcccaacatttaaacttaaaaattttaagtttaacaacactgctgcacaacaggctttagaaatcaaataatgaggaaaaaaatggcactattgggaaaccaagcctgctttgcc

SEQ ID NO: 58314 - DNA, 600 bp, Chicken  19866894315175_1
aagccagaaggcctgcattgtatgtgaatatgatcagcactggtgattgtggtttaagtggcctcttgcatatcctacttgcctgctgcgtatttcaaaccacactgagtcatgatttgagatgtggttctcatttcctgacaaagttttggtggttgagctagtgtattgcttttgtgtctcttcagatgctcagctttcagagtaaataatagaaaatgttagtctgtcatcgttgctcttgtatgttgcataactaatgagctgcttacaggctgtgtcaggctggcatgtgcctcrgcttaggatatattgctgtaactcttattgaatcacttaagtcttctctccgtgatgaaatttcttggcataacaatagagaaataaaaagtatgtgttttcatgctggttcggcttgtctgactttttgtttacaccaaaaagtacctttcaatttcagcagcagtttgtaggcggcttggccttccttgtggagaacaatgtgcccccatctacagctgtcgtaaggcccaagctacaggatccatcatatttagaaagtgggaacaaatgttttcttctgcgtgtatttttcccctt

SEQ ID NO: 58315 - DNA, 599 bp, Chicken  19866894315176_1
  misc_feature (1)..(109): n is any nucleotide
nnnnnnnnnnnnnnnnnnnnnnnnnnnnnnnnnnnnnnnnnnnnnnnnnnnnnnnnnnnnnnnnnnnnnnnnnnnnnnnnnnnnnnnnnnnnnnnnnnnnnnnnnnnnntggggctttttgtcttcaatttttacttatttttgtttcaacccgaattcttaccctggcacaccgtgcagtcattctgctcgctggttttcagcagcagctctcctcccactgctctcagctggttgctttgttaaaaaaagagtcagagtgctgatatttctctaaagcagaagctgtgactcctcgcycctatctggtggtggctcagttctgtgtggctgtgtactgttgctgcctcagggtttggaatgaaaggtaccytttgtcagcttgtttatatggggggcayttgggaaagtgaaggtgcactggcagagaggaaatccmcataggtgcacacaagctgttgggttctagcttaaagatagtggataaaacaagtcctctttctttttctttgtattcatgtgaaatgaatatagcacacagatgcacattttgtgtctagttttaagacagatttctctattggatcaaagtttgtgta

SEQ ID NO: 58316 - DNA, 599 bp, Chicken  19866894315176_2
  misc_feature (1)..(36): n is any nucleotide
nnnnnnnnnnnnnnnnnnnnnnnnnnnnnnnnnnnntggggctttttgtcttcaatttttacttatttttgtttcaacccgaattcttaccctggcacaccgtgcagtcattctgctcgctggttttcagcagcagctctcctcccactgctctcagctggttgctttgttaaaaaaagagtcagagtgctgatatttctctaaagcagaagctgtgactcctcgcycctatctggtggtggctcagttctgtgtggctgtgtactgttgctgcctcagggtttggaatgaaaggtaccytttgtcagcttgtttatatggggggcayttgggaaagtgaaggtgcactggcagagaggaaatccmcataggtgcacacaagctgttgggttctagcttaaagatagtggataaaacaagtcctctttctttttctttgtattcatgtgaaatgaatatagcacacagatgcacattttgtgtctagttttaagacagatttctctattggatcaaagtttgtgtaccagaaggaggagtgtttctataattggatttacccaggaggaaagccctccatcgcagggtagacttattat

SEQ ID NO: 58317 - DNA, 599 bp, Chicken  19866894315176_3
  misc_feature (1)..(8): n is any nucleotide
nnnnnnnntggggctttttgtcttcaatttttacttatttttgtttcaacccgaattcttaccctggcacaccgtgcagtcattctgctcgctggttttcagcagcagctctcctcccactgctctcagctggttgctttgttaaaaaaagagtcagagtgctgatatttctctaaagcagaagctgtgactcctcgcycctatctggtggtggctcagttctgtgtggctgtgtactgttgctgcctcagggtttggaatgaaaggtaccytttgtcagcttgtttatatggggggcayttgggaaagtgaaggtgcactggcagagaggaaatccmcataggtgcacacaagctgttgggttctagcttaaagatagtggataaaacaagtcctctttctttttctttgtattcatgtgaaatgaatatagcacacagatgcacattttgtgtctagttttaagacagatttctctattggatcaaagtttgtgtaccagaaggaggagtgtttctataattggatttacccaggaggaaagccctccatcgcagggtagacttattatgcagttggagtgtgcatgctgtctgaca

SEQ ID NO: 58318 - DNA, 600 bp, Chicken  19866894315176_4
ttttgtttcaacccgaattcttaccctggcacaccgtgcagtcattctgctcgctggttttcagcagcagctctcctcccactgctctcagctggttgctttgttaaaaaaagagtcagagtgctgatatttctctaaagcagaagctgtgactcctcgcycctatctggtggtggctcagttctgtgtggctgtgtactgttgctgcctcagggtttggaatgaaaggtaccytttgtcagcttgtttatatggggggcayttgggaaagtgaaggtgcactggcagagaggaaatccmcataggtgcacacaagctgttgggttctagcttaaagatagtggataaaacaagtcctctttctttttctttgtattcatgtgaaatgaatatagcacacagatgcacattttgtgtctagttttaagacagatttctctattggatcaaagtttgtgtaccagaaggaggagtgtttctataattggatttacccaggaggaaagccctccatcgcagggtagacttattatgcagttggagtgtgcatgctgtctgacacggctgtaaagctgatttgcgggtgaggtacgaagttta

SEQ ID NO: 58319 - DNA, 599 bp, Chicken  19866894315178_1
  misc_feature (1)..(5): n is any nucleotide
nnnnnatcggggcccacagtgagaaaactctcctccaccattgatagagggacctccttgataaaagtgcacttgcagtcacattgtgctggaccacaacgaagtatcagattcgtgccttcagaggagttatgcctccaggaccaaacatcataacacttgagctgaaagtgataccttctgttttacccaagcataccagaaagattacacaacatgaccaagagggaagcttgttttctgacaccagtgctctgctcctgtccttaagcaggaagaaatacaaaacctgtcattttywgtctacacagagaatgtagcttactggtggctctaatccctatgtgatcctcacaaagcaatttatctcaattacacttactgctgataactaagtctacgcattaactactaaagcataaaagtgtttcttttcatctgcatccttgttatggttatatacctccaaagttttcctctgtacttgaygtagaattttcagaactaagacaaagagctttggaaaaatccaccctttcattaaacaacttgaaattatctagaacttgggtatatgaccagcaagacaaaagcacctt

SEQ ID NO: 58320 - DNA, 599 bp, Chicken  19866894315178_2
  misc_feature (1)..(4): n is any nucleotide
nnnnatcggggcccacagtgagaaaactctcctccaccattgatagagggacctccttgataaaagtgcacttgcagtcacattgtgctggaccacaacgaagtatcagattcgtgccttcagaggagttatgcctccaggaccaaacatcataacacttgagctgaaagtgataccttctgttttacccaagcataccagaaagattacacaacatgaccaagagggaagcttgttttctgacaccagtgctctgctcctgtccttaagcaggaagaaatacaaaacctgtcattttywgtctacacagagaatgtagcttactggtggctctaatccctatgtgatcctcacaaagcaatttatctcaattacacttactgctgataactaagtctacgcattaactactaaagcataaaagtgtttcttttcatctgcatccttgttatggttatatacctccaaagttttcctctgtacttgaygtagaattttcagaactaagacaaagagctttggaaaaatccaccctttcattaaacaacttgaaattatctagaacttgggtatatgaccagcaagacaaaagcaccttt

SEQ ID NO: 58321 - DNA, 600 bp, Chicken  19866894315178_3
ccaagcataccagaaagattacacaacatgaccaagagggaagcttgttttctgacaccagtgctctgctcctgtccttaagcaggaagaaatacaaaacctgtcattttywgtctacacagagaatgtagcttactggtggctctaatccctatgtgatcctcacaaagcaatttatctcaattacacttactgctgataactaagtctacgcattaactactaaagcataaaagtgtttcttttcatctgcatccttgttatggttatatacctccaaagttttcctctgtacttgaygtagaattttcagaactaagacaaagagctttggaaaaatccaccctttcattaaacaacttgaaattatctagaacttgggtatatgaccagcaagacaaaagcacctttacgcgacattacctgaagaaagcaataccaaagcatagctttagctaggtagcagcacatatctcaccatgctgtataatcccatgctccaaaagcctgcggccaagctgctcagcttcggtccgtgtcgtggcctctccttcctggatcaaccagtcaatgaactccgatgccacaaagggtcgctcg

SEQ ID NO: 58322 - DNA, 600 bp, Chicken  19866894315186_1
gaagcccttttcaagggtgggagatgcagctccctacaaagcacacggcgcaggctcacagcgcatctcgggccaggagccgtgggataatgccagccttgttcgcgctgcctttttactttgttctcaaccgtcgccgtccctttttccactgatttccacaggaacagcagtgaaccctaaattacaaacacctgctcaatagatcatctccaggcctggcagcgccgaaatggaggcgaggatcctcgctgctgcggggaaggctcgctgcagagcccaacgcctgcccaacactcrgcctgaaccagagcacggcagcagaactccgttgtgttcaaaaaaagagtttaatttgcaaatacactcgtgctgaaagagccattcgtgccatgctgacctgtcctccaggaaccattgagcagcaactgtgatctcctaagcaaaggcaaaacgtgtaacctcgaagcagagcactgatgacggaggaaaaaacccgagctgtgtaaataccgggattacagcgcggcgcgtatggagaacgcaaaacatctggctgggtgctggagagaggggacccaagatggcagggacgattaa

SEQ ID NO: 58323 - DNA, 600 bp, Chicken  19866894315190_1
tgaggctggattcagggccttcaccctgccagcgaggggctgcatgctgtgcctggagagaggggagcagagcaggcacgcagctctgctccttcggtgacttggatggagtttgcttcttctaaattagtccccatgcgggctgtggtaggtatgtgcgctgtgcactcattcatcactgcatgagtggtcgagagagctgtgtaccacttatatgaagtgcagtgatgcaatgggaaagcaaatctctagcgtttccaaggcaacctgtgcgtctgcccctggctgggaggcaggagrctgcccatcactgcagacagtggcttcagcaaaccttgccagaaggaagcacgtgctcaccccaagcccctcctggtaytggcatgaagggagcagtgctgcatgttagttttcctggctagaacactctgtgcttttgtgtatgtgtctgtgtgtgggttttctttggatgtgtgtgcctagttcataagctgctcaaaagccacctgtattcagtatatactgtgtagcactaatgatatagctttytcctaaaatgtgacttgcatcatgccttagtaataactgtacagctatttg

SEQ ID NO: 58324 - DNA, 600 bp, Chicken  19866894315190_2
gcagctctgctccttcggtgacttggatggagtttgcttcttctaaattagtccccatgcgggctgtggtaggtatgtgcgctgtgcactcattcatcactgcatgagtggtcgagagagctgtgtaccacttatatgaagtgcagtgatgcaatgggaaagcaaatctctagcgtttccaaggcaacctgtgcgtctgcccctggctgggaggcaggagrctgcccatcactgcagacagtggcttcagcaaaccttgccagaaggaagcacgtgctcaccccaagcccctcctggtaytggcatgaagggagcagtgctgcatgttagttttcctggctagaacactctgtgcttttgtgtatgtgtctgtgtgtgggttttctttggatgtgtgtgcctagttcataagctgctcaaaagccacctgtattcagtatatactgtgtagcactaatgatatagctttytcctaaaatgtgacttgcatcatgccttagtaataactgtacagctatttggattccattgaagtgttttaaaatgcacatcatcttcactgggtyataagaagattaacgcttctgcttgcagagcaca

SEQ ID NO: 58325 - DNA, 600 bp, Chicken  19866894315190_3
tagcgtttccaaggcaacctgtgcgtctgcccctggctgggaggcaggagrctgcccatcactgcagacagtggcttcagcaaaccttgccagaaggaagcacgtgctcaccccaagcccctcctggtaytggcatgaagggagcagtgctgcatgttagttttcctggctagaacactctgtgcttttgtgtatgtgtctgtgtgtgggttttctttggatgtgtgtgcctagttcataagctgctcaaaagccacctgtattcagtatatactgtgtagcactaatgatatagctttytcctaaaatgtgacttgcatcatgccttagtaataactgtacagctatttggattccattgaagtgttttaaaatgcacatcatcttcactgggtyataagaagattaacgcttctgcttgcagagcacagcaaagtcaatatttgatctaatttgaagctgacctgaggtttccgatgaaagtggctctattctgaatgatgtaagatctttgaagctgatgagtccctagcattgcttccataattaaagttgcacggtcagtaaacgtgagttcactctgagtatctttacactgct

SEQ ID NO: 58326 - DNA, 600 bp, Chicken  19866894315190_4
gaagcacgtgctcaccccaagcccctcctggtaytggcatgaagggagcagtgctgcatgttagttttcctggctagaacactctgtgcttttgtgtatgtgtctgtgtgtgggttttctttggatgtgtgtgcctagttcataagctgctcaaaagccacctgtattcagtatatactgtgtagcactaatgatatagctttytcctaaaatgtgacttgcatcatgccttagtaataactgtacagctatttggattccattgaagtgttttaaaatgcacatcatcttcactgggtyataagaagattaacgcttctgcttgcagagcacagcaaagtcaatatttgatctaatttgaagctgacctgaggtttccgatgaaagtggctctattctgaatgatgtaagatctttgaagctgatgagtccctagcattgcttccataattaaagttgcacggtcagtaaacgtgagttcactctgagtatctttacactgctctctggcatgcaatgaacagccttttctttcatgtgattatagctcatgtagaaatagagctaatcaggaattgtctgtcaaaatgtttttaatgg

SEQ ID NO: 58327 - DNA, 600 bp, Chicken  19866894315191_1
attttgtatttttttatctctaaagttctcttagaaagaaggagatcttgtataaactatatacatcacccatcacaagaggatgttttgatccataactgcatcactggataatggaagagcccttgatgtcatctatctagatttcagtaaggacttcgacacactctaccataatattcttctctccaaatggaaatatatggattttatgggtggactgtttgatggatgaggagctggttgtgagatcatacccagagactggagctcagtgtctcagtgtccagatggagatcrgtgacaagtgatgtcccgcagggtgtcagtactggcactggtgctgtttaatatcttcatcgatgagactgacagtgggattgagtgcacccttagcaagtcagtggataacaccatgctgtgggatgtggtcaacacaccagaaggatgggatgcacgtttgccagagttgtggtagatgccccattctggagacaatcaaggtcaggctgagtggggttctgagcaacgtgatctagctgtaggwgtccctgttcattgcaggggggtcggagtacatgacctttaaaggtccttttc

SEQ ID NO: 58328 - DNA, 600 bp, Chicken  19866894315191_2
gagatcatacccagagactggagctcagtgtctcagtgtccagatggagatcrgtgacaagtgatgtcccgcagggtgtcagtactggcactggtgctgtttaatatcttcatcgatgagactgacagtgggattgagtgcacccttagcaagtcagtggataacaccatgctgtgggatgtggtcaacacaccagaaggatgggatgcacgtttgccagagttgtggtagatgccccattctggagacaatcaaggtcaggctgagtggggttctgagcaacgtgatctagctgtaggwgtccctgttcattgcaggggggtcggagtacatgacctttaaaggtccttttcaactcaaagatttctatgattctatgattgacagttttcaagtttctacaaagtatgatacacaattcaattttacactgagaataagatcaaatcttgacactgaaaatagtaatccagaagcaggctggcatccagatgtcaaaaaagctaaaaaatgaaattgttatgtatttacagaactcttaatatcattagctcagactcttttcctaacttcatctattccaaaaattatgtgacaccc

SEQ ID NO: 58329 - DNA, 591 bp, Chicken  19866894315197_1
ggacctttctgttttgattttatttctgccaccttctgaccacgcaggctcggagatggaggcatactcattggggtctgctcttcagctcctcacatggggcagctctggtcaaaaggccaggctggttttgttaaaactgtgcgtgttgagctggagatggctttttcctttccactgtggttctcagggtttctcagtacttgtaattggggcagactgtgcttgcaggagtttagttttctgacaggtactccttttgggtctgagtaggttttaccatacagaggtgagcctttmtttattcctctccgaagtgcaacaagcactgctgttatccattcccaaacagtgcttcctggggagaaaaaaaaaagataatcttcactttttcagtgaaaccaattttcaaggtcaagaactcaagctttctaatggcaggagaagcaaagtcagtatcttattttttcattaactactaggctaagtagtgtttatcacaggctgtagataatacttcttgaaagatgcagatctttgttatctcctgatcttcctaatgacaaagttctgagttacatcagagtaatt

SEQ ID NO: 58330 - DNA, 600 bp, Chicken  19866894315201_1
agcaggtacaacccacaacaagatactgcatgctggttgtagacagttgatcaacacggtttatactggttttgttttgcattattgcaaatagctataaaatactagaattttggagttgtattctgaagcagcccagcccaggagagcataacacgcatgtagctgtatgcagctggactgcatcttgtcaaccactgcaacatatattcccacctatgaatcaaaagcatcaggcttatttctggaaatgtcttccagagttaaagaggtactgaatttataaggatgttgtttgargagttaaggtcatagcactaaaatagctaactctcactaaatcagcaacaacaggatgctttagtgcccatcagtgtgaagagcagtacccaagccaggcactgtggtgcccagtttaatatcttaaattgcttcggagctgatatatgctctgtacctctgaatacctaaacacgtttaggcacagatgagtcttaaagtcatttttgaaaacgccaccttatggtttcattgagatactttactgaggcttattttaaacatttacatttcattttctaacactatttctcctttgtg

SEQ ID NO: 58331 - DNA, 599 bp, Chicken  19866894315202_1
  misc_feature (1)..(55): n is any nucleotide
nnnnnnnnnnnnnnnnnnnnnnnnnnnnnnnnnnnnnnnnnnnnnnnnnnnnnnntggctggagccagtgtccctttctagcaccatgcagcaacttcagctggttgcacatataagcacctgatcctgtggaagagcagcaaactggtgcccttcaggcctacagctgcattctgtatggcaggagctcgcggggaattaccacccatgcactgtggacagcaacctggtgaaggggcaaagcacccccaacctgctggggggcagcagattgcagtagtgcagggcatgtccccagtkccagcaggagtcatgtagcaggacatccaaatccagagccactcctgcaygccaggccwtagcttcagcaaggcagcagctcatttttctatctggcatcttcctcataagatcagttctctatctggatgtcctaatagcatttatcccatctttttttattcttcctcctttatcagcagatgtgcaaactgtcagacttgcattttaactgatcagcaagatactgaatgtrtcgttaaatggaggtgtttggaagccatgtctgcarcccatccttcactgggtcgtggactgct

SEQ ID NO: 58332 - DNA, 599 bp, Chicken  19866894315202_2
  misc_feature (1)..(5): n is any nucleotide
nnnnntggctggagccagtgtccctttctagcaccatgcagcaacttcagctggttgcacatataagcacctgatcctgtggaagagcagcaaactggtgcccttcaggcctacagctgcattctgtatggcaggagctcgcggggaattaccacccatgcactgtggacagcaacctggtgaaggggcaaagcacccccaacctgctggggggcagcagattgcagtagtgcagggcatgtccccagtkccagcaggagtcatgtagcaggacatccaaatccagagccactcctgcaygccaggccwtagcttcagcaaggcagcagctcatttttctatctggcatcttcctcataagatcagttctctatctggatgtcctaatagcatttatcccatctttttttattcttcctcctttatcagcagatgtgcaaactgtcagacttgcattttaactgatcagcaagatactgaatgtrtcgttaaatggaggtgtttggaagccatgtctgcarcccatccttcactgggtcgtggactgctctgccaggcaggtcctggataccactgtgctttctgcagaggctcccaga

SEQ ID NO: 58333 - DNA, 600 bp, Chicken  19866894315202_3
tggagccagtgtccctttctagcaccatgcagcaacttcagctggttgcacatataagcacctgatcctgtggaagagcagcaaactggtgcccttcaggcctacagctgcattctgtatggcaggagctcgcggggaattaccacccatgcactgtggacagcaacctggtgaaggggcaaagcacccccaacctgctggggggcagcagattgcagtagtgcagggcatgtccccagtkccagcaggagtcatgtagcaggacatccaaatccagagccactcctgcaygccaggccwtagcttcagcaaggcagcagctcatttttctatctggcatcttcctcataagatcagttctctatctggatgtcctaatagcatttatcccatctttttttattcttcctcctttatcagcagatgtgcaaactgtcagacttgcattttaactgatcagcaagatactgaatgtrtcgttaaatggaggtgtttggaagccatgtctgcarcccatccttcactgggtcgtggactgctctgccaggcaggtcctggataccactgtgctttctgcagaggctcccagataatccactc

SEQ ID NO: 58334 - DNA, 573 bp, Chicken  19866894315202_4
gggcaaagcacccccaacctgctggggggcagcagattgcagtagtgcagggcatgtccccagtkccagcaggagtcatgtagcaggacatccaaatccagagccactcctgcaygccaggccwtagcttcagcaaggcagcagctcatttttctatctggcatcttcctcataagatcagttctctatctggatgtcctaatagcatttatcccatctttttttattcttcctcctttatcagcagatgtgcaaactgtcagacttgcattttaactgatcagcaagatactgaatgtrtcgttaaatggaggtgtttggaagccatgtctgcarcccatccttcactgggtcgtggactgctctgccaggcaggtcctggataccactgtgctttctgcagaggctcccagataatccactcattgcagaaggccatcaccatttcagtgcaggagctctgcacttcacgctggatccacaccagtaacctggccctgccatctttgctagacgaagcacaacctcctcatttagttcaggaagagacacctggttataggcaggggggga

SEQ ID NO: 58335 - DNA, 537 bp, Chicken  19866894315202_5
ttgcagtagtgcagggcatgtccccagtkccagcaggagtcatgtagcaggacatccaaatccagagccactcctgcaygccaggccwtagcttcagcaaggcagcagctcatttttctatctggcatcttcctcataagatcagttctctatctggatgtcctaatagcatttatcccatctttttttattcttcctcctttatcagcagatgtgcaaactgtcagacttgcattttaactgatcagcaagatactgaatgtrtcgttaaatggaggtgtttggaagccatgtctgcarcccatccttcactgggtcgtggactgctctgccaggcaggtcctggataccactgtgctttctgcagaggctcccagataatccactcattgcagaaggccatcaccatttcagtgcaggagctctgcacttcacgctggatccacaccagtaacctggccctgccatctttgctagacgaagcacaacctcctcatttagttcaggaagagacacctggttataggcaggggggga

SEQ ID NO: 58336 - DNA, 600 bp, Chicken  19866894315203_1
cttatgcacccagcatatgactaactgagctttttagcacagtgctgttatttattaggtactgattatctcttaaaggcacaatcccagagcaaaacttttattgcattgtacagtactagaagaaaactagaagaaacgactgccatctatagcccaaaatacacaactacacacctgaatttataatgcatgccctcagcttcaacactacatgccatcataagctgaccaagcatagagatatcctattgaatttaggtcttactgaaagattttctaagtcattcatctgtctayaaggagaggccatatccaaggactagatcccacgggtgtaatgcyagctacagaaactctccccatctgaggccaaaaattgcatctttcagaataatcattaagatgttgataaccctgagggtaccagcatttaccagcatctccatttccacggggacatttagggaagcctgctctatctgacagtataatgtctcagccttgttcccccctctctggtgaccctgactcccaacttcagaagctgccccatcacccacgtctccgagggaagcaagtggccacttcagccctgtg

SEQ ID NO: 58337 - DNA, 600 bp, Chicken  19866894315203_2
tgttatttattaggtactgattatctcttaaaggcacaatcccagagcaaaacttttattgcattgtacagtactagaagaaaactagaagaaacgactgccatctatagcccaaaatacacaactacacacctgaatttataatgcatgccctcagcttcaacactacatgccatcataagctgaccaagcatagagatatcctattgaatttaggtcttactgaaagattttctaagtcattcatctgtctayaaggagaggccatatccaaggactagatcccacgggtgtaatgcyagctacagaaactctccccatctgaggccaaaaattgcatctttcagaataatcattaagatgttgataaccctgagggtaccagcatttaccagcatctccatttccacggggacatttagggaagcctgctctatctgacagtataatgtctcagccttgttcccccctctctggtgaccctgactcccaacttcagaagctgccccatcacccacgtctccgagggaagcaagtggccacttcagccctgtgttcatatccactgtgtgcagcccttttaccctttgggtgacaagt

SEQ ID NO: 58338 - DNA, 600 bp, Chicken  19866894315205_1
ggagtagcttgatttatctcatttggctgtgcatgatgctctttacgtgcctttactccaaaaatgactccatataatggcctcactggcttctctagtctctgcatgctgaatctcagtaactccaagatcaaatgtgacaagtttgttctttcttttttttccccctagaaacattacctatcatcttaaaattgtgaagggctttttgtatgtcacatcagtaaaaatgatgatttgtcaatgtttttaatggtacataagttgatacacatcgcactgagtgacatggattagtgsgcacagtggtggtgggttgacagttggactagatgatcttagtggtcttttccaaccttaatgattctatgatagttcaagagatcctagaaaagggtgagaatgacaagaggagttataggtggcaggcaaccaaaaatggtgtttattagagatcctttccatgtgtcacactgaaacttaatgtttcaacacgcccatgagaagtactytgttggactgaaagggtaccctgtcataggaacaataattaaaaaatagaaatacgaggaagtgacttcagtgcatccaaccttagcg

SEQ ID NO: 58339 - DNA, 600 bp, Chicken  19866894315205_2
atgtcacatcagtaaaaatgatgatttgtcaatgtttttaatggtacataagttgatacacatcgcactgagtgacatggattagtgsgcacagtggtggtgggttgacagttggactagatgatcttagtggtcttttccaaccttaatgattctatgatagttcaagagatcctagaaaagggtgagaatgacaagaggagttataggtggcaggcaaccaaaaatggtgtttattagagatcctttccatgtgtcacactgaaacttaatgtttcaacacgcccatgagaagtactytgttggactgaaagggtaccctgtcataggaacaataattaaaaaatagaaatacgaggaagtgacttcagtgcatccaaccttagcgttcatgtcttctatctgcaggctttttctagttcagcttctgcttttcacttctattttctctctccactctctcaactgactttgttctgatttttacccacttcttttgccaaatttctagctgttttaattttgctcttgttcacattagagatacagataaagaaatcttctgaccacttgccctgttctgctcatatcagttcctca

SEQ ID NO: 58340 - DNA, 539 bp, Chicken  19866894315206_1
agggagtagaaatggaaatagggctgtgtcgttcaaataaaagcgagtgtgctaaaatagtgttgatgttttgcaggaagagttggatcaagcagcctgaagaccatggagggagactgtctgagctgcatgaagtacctgatgtttcttttcaatttttttatatttgtgagtatttggaatctactttctctctcgattccttttgtttccagcagccaacagaataggctgtaactcagtaaagttgccacaaaagatcccctcagctttgcactagcaatcactaaggatatcaayttatggtgtctgaaggtgctaagacattcagtaaggcaactggatggtcactgctgtctgcattaaggttgtcctttgcaaggaagacaaagaaggaaagctgtaacttgaattcatggtctgttcttgaatggcggaagaaattgttttctagtccttgggtgccctgctgaggttttcactagcaagcagagattttcctaccacattcctggggatccatattgctcatgtctttg

SEQ ID NO: 58341 - DNA, 600 bp, Chicken  19866894315210_1
gcgcgggcccgggggaacaccgtgaccatcttctgttctctttttttcacctccctgagaccccccggtaccacccctcctgcactttcccggggttccttttctctgcttcagtgttcctgagcgggtaattgagatgaggaggacgcgtctccctttgtttactgaagttggcgtatgtgtttcggagagcagagttgtcacaggagcgaagcggctccgattagcgataacccttcccccggctcgttagccgggcgataacataatgctctgccttcggcggttcgtccttagtcscgagaggatttaaaaacattttttctggtgactcggagtcatcgttttgccacatgatctctcctaagaggagcgctgtgccgcgcgtgtggctgcgaggagagcggtgggttgcgttggccgctttcccctccctctaaatcctttctggatttccccagctatctctggcagcactttgcggtgccccctgcttaaatccaacgcaggcgagtatttcgctcgaccaccctccttcgtgtcagggctttgtgcctgtgccgactgctgtacctccattgtgctcagtgcgaggtacgg

SEQ ID NO: 58342 - DNA, 600 bp, Chicken  19866894315222_1
gaagaaaaacatattttaaatcaaaactttgccattgtataacattgagtatttactgaataaaagactgtttcagtgaagtacattgacaaagtggcaatgggcacaacctgaaacacagcaagtaacatctggaattcaggaatcaattgttctaattgtggaggtaacagaacagtggaacaggtagcccaaagaagttgtggaggcctctctttgagcatattcaaaagctgtcttgacgcagccctagtagctttgactggtaaagggaattggaccagatgaacttcagatatsctttccaactgcagtcagtaactctatgaaataatatatcttggaaaataaagtggtcatcagaacatctactggctaatttaactggtttagaagtgtgattctagctctgagagataatgtgaataaaaatctagaggcatgaaaaaaaatgcactataaacatgtacaaacttttacaaacataagtacaggcattaaaaaataagctgcaagtctataagatattcttctcctattatgctctccaggtggcaaatgtgtagctacagatatcatgtacaggacacaggaaaaaca

SEQ ID NO: 58343 - DNA, 581 bp, Chicken  19866894315222_2
ataaagtggtcatcagaacatctactggctaatttaactggtttagaagtgtgattctagctctgagagataatgtgaataaaaatctagaggcatgaaaaaaaatgcactataaacatgtacaaacttttacaaacataagtacaggcattaaaaaataagctgcaagtctataagatattcttctcctattatgctctccaggtggcaaatgtgtagctacagatatcatgtacaggacacaggaaaaacaaatacacacaatcaaagataatcatatccatctttggcagattgggsaaaaaaaaaaatgtaattttgaggtctaaagccaagcagacttgtgacaaactaactttccttattcctytacactgactctctttgaaaacatgaagatcttttttgtacaagtaattaaaacactcatcccagtttgaaagggaaaagggaaaagggaaaaaggaaaagggaaaagggaaaagggaaaaggaaaaaggaaaaaggggaaagggaaaagggaaaagggaaaatggaaaagggaaaaggagaaagggaaagggaaaagggaaagggaaagg

SEQ ID NO: 58344 - DNA, 511 bp, Chicken  19866894315222_3
taatgtgaataaaaatctagaggcatgaaaaaaaatgcactataaacatgtacaaacttttacaaacataagtacaggcattaaaaaataagctgcaagtctataagatattcttctcctattatgctctccaggtggcaaatgtgtagctacagatatcatgtacaggacacaggaaaaacaaatacacacaatcaaagataatcatatccatctttggcagattgggaaaaaaaaaaaatgtaattttgaggtctaaagccaagcagacttgtgacaaactaactttccttattcctytacactgactctctttgaaaacatgaagatcttttttgtacaagtaattaaaacactcatcccagtttgaaagggaaaagggaaaagggaaaaaggaaaagggaaaagggaaaagggaaaaggaaaaaggaaaaaggggaaagggaaaagggaaaagggaaaatggaaaagggaaaaggagaaagggaaagggaaaagggaaagggaaagg

SEQ ID NO: 58345 - DNA, 599 bp, Chicken  19866894315223_1
  misc_feature (1)..(123): n is any nucleotide
nnnnnnnnnnnnnnnnnnnnnnnnnnnnnnnnnnnnnnnnnnnnnnnnnnnnnnnnnnnnnnnnnnnnnnnnnnnnnnnnnnnnnnnnnnnnnnnnnnnnnnnnnnnnnnnnnnnnnnnnnnnatacactagcgatcatactggaatgctgtagcaagtgtaagataagagttcagtttgttaagtcagcatggaagcgtctctaatataatgccagcctttctcttctgtcagcctgcacctcctgcgtggctgagctgtgcagttcttgtagaagttgttcaaggacaaaatacagcygtatgactgagaggggaccagtgtatgattttataattaaagaatgacttaggccacagacacgaagcgtgctakgctaacaattttcctgtgatgtatatattacatatgtatgcaagctaaagactkgagaaaattacagtaaatggcatgtaaattaaattattaagagcaaggtggatgctttcaacatctttgtcatactaaacagatatatgcacatcccacttattgtttccacaaaagatgattttcttcccatacatagcaaaactcaaccagtcctttcaggatgaagt

SEQ ID NO: 58346 - DNA, 599 bp, Chicken  19866894315223_2
  misc_feature (1)..(48): n is any nucleotide
nnnnnnnnnnnnnnnnnnnnnnnnnnnnnnnnnnnnnnnnnnnnnnnnatacactagcgatcatactggaatgctgtagcaagtgtaagataagagttcagtttgttaagtcagcatggaagcgtctctaatataatgccagcctttctcttctgtcagcctgcacctcctgcgtggctgagctgtgcagttcttgtagaagttgttcaaggacaaaatacagcygtatgactgagaggggaccagtgtatgattttataattaaagaatgacttaggccacagacacgaagcgtgctakgctaacaattttcctgtgatgtatatattacatatgtatgcaagctaaagactkgagaaaattacagtaaatggcatgtaaattaaattattaagagcaaggtggatgctttcaacatctttgtcatactaaacagatatatgcacatcccacttattgtttccacaaaagatgattttcttcccatacatagcaaaactcaaccagtcctttcaggatgaagtggrtctcttagagctaaatcatgcgtggtataatcccaattcaattgactgtaatgtaattgtatctttttaatg

SEQ ID NO: 58347 - DNA, 600 bp, Chicken  19866894315223_3
tagcgatcatactggaatgctgtagcaagtgtaagataagagttcagtttgttaagtcagcatggaagcgtctctaatataatgccagcctttctcttctgtcagcctgcacctcctgcgtggctgagctgtgcagttcttgtagaagttgttcaaggacaaaatacagcygtatgactgagaggggaccagtgtatgattttataattaaagaatgacttaggccacagacacgaagcgtgctakgctaacaattttcctgtgatgtatatattacatatgtatgcaagctaaagactkgagaaaattacagtaaatggcatgtaaattaaattattaagagcaaggtggatgctttcaacatctttgtcatactaaacagatatatgcacatcccacttattgtttccacaaaagatgattttcttcccatacatagcaaaactcaaccagtcctttcaggatgaagtggrtctcttagagctaaatcatgcgtggtataatcccaattcaattgactgtaatgtaattgtatctttttaatgcagtggacgcttggcctacttttaaattcacttatggaactcatgcacttaacca

SEQ ID NO: 58348 - DNA, 600 bp, Chicken  19866894315223_4
atgactgagaggggaccagtgtatgattttataattaaagaatgacttaggccacagacacgaagcgtgctakgctaacaattttcctgtgatgtatatattacatatgtatgcaagctaaagactkgagaaaattacagtaaatggcatgtaaattaaattattaagagcaaggtggatgctttcaacatctttgtcatactaaacagatatatgcacatcccacttattgtttccacaaaagatgattttcttcccatacatagcaaaactcaaccagtcctttcaggatgaagtggrtctcttagagctaaatcatgcgtggtataatcccaattcaattgactgtaatgtaattgtatctttttaatgcagtggacgcttggcctacttttaaattcacttatggaactcatgcacttaaccagcttggaatttcttctcaaatttgtctttagaaatagataatggcctcttttattttgctttaattatagataaaaaacaggcatagaaggtcttaactacagggccmtactgctaacaatacccttcttgtcttggggaagtaattttcatcaccagatttcgaatcagctt

SEQ ID NO: 58349 - DNA, 368 bp, Chicken  19866894315223_5
ccacaaaagatgattttcttcccatacatagcaaaactcaaccagtcctttcaggatgaagtggrtctcttagagctaaatcatgcgtggtataatcccaattcaattgactgtaatgtaattgtatctttttaatgcagtggacgcttggcctacttttaaattcacttatggaactcatgcacttaaccagcttggaatttcttctcaaatttgtctttagaaatagataatggcctcttttattttgctttaattatagataaaaaacaggcatagaaggtcttaactacagggccmtactgctaacaatacccttcttgtcttggggaagtaattttcatcaccagatttcgaatcagctttaa

SEQ ID NO: 58350 - DNA, 600 bp, Chicken  19866894315228_1
acgttgcctatgcctatgataccaatgacattcacttcctaggttgacagagggcgaaagtttctcttcctttaactcaacagcagtcttattttgttgggttttttagctttttggctcggtaatcttgtttggatttgcctgttggattttagaagcacccatctggccaggatccttttttgccttaacatctaaatctacgccgctggtgctcatgcagcaaagccccatgtgtttttctgtgcttcagaagggacactgatggctccctccattgatcataggagaagactggcrcagcattgaagatggagtagttgctgcatggagcagcttggttaccatcacaggagatgtgattcccaccatcgttcccagccaaaatgcagtaccctggtcctgccatgctccgaggaatccataaggatcctgtttgaatggaagatgttggatgtgtttgtatatgatggacccaactgagccagcactgtcttggatccttcttgcgtactggggtgggaaaagccatcccttgtgctccttctggcctcagtaatctgcagtaagggtggcacttcatggatgaggagctaacgg

SEQ ID NO: 58351 - DNA, 599 bp, Chicken  19866894315230_1
  misc_feature (1)..(118): n is any nucleotide
nnnnnnnnnnnnnnnnnnnnnnnnnnnnnnnnnnnnnnnnnnnnnnnnnnnnnnnnnnnnnnnnnnnnnnnnnnnnnnnnnnnnnnnnnnnnnnnnnnnnnnnnnnnnnnnnnnnnnnaatacctgcaacatgtagcagagctacatttgatttagtttcagggagagtaggcgaccaaagcagaggggcccctgggttgctgggtcaggcggcatcccacagtttctgctgtgtgtgaagtgggacagatgtcctccctggagaacatgggggcacccttgtaagcttggagaaaaatytgttatttttctataggactgagtacttctgattaggctgcaaaaactacatttctccaaagccttttcccatttacatgccatcagtaattccatatctgttttttagaggaaaatcatttaataaaaagtaaatgagttgtgcatttttcyccactataatagttgatgcatccatatgctttctgttacgcaggtgagcatggcagaaaaactgttgctcttcagggaaacattacggacccttttgaaaacaccttttttgacccaagctgtcaatcacagatgtgatcctgagt

SEQ ID NO: 58352 - DNA, 600 bp, Chicken  19866894315230_2
tagtttcagggagagtaggcgaccaaagcagaggggcccctgggttgctgggtcaggcggcatcccacagtttctgctgtgtgtgaagtgggacagatgtcctccctggagaacatgggggcacccttgtaagcttggagaaaaatytgttatttttctataggactgagtacttctgattaggctgcaaaaactacatttctccaaagccttttcccatttacatgccatcagtaattccatatctgttttttagaggaaaatcatttaataaaaagtaaatgagttgtgcatttttcyccactataatagttgatgcatccatatgctttctgttacgcaggtgagcatggcagaaaaactgttgctcttcagggaaacattacggacccttttgaaaacaccttttttgacccaagctgtcaatcacagatgtgatcctgagtacgtcttaacgcccatactcttaacgtgagaaggggcctcttcataaacatgatatttccacaaaaatatgttgcagcaagcagcccagggctataaaatttytaaaagttgacagcaattcatgcaaaaagagaggcacagaaggaagaagaa

SEQ ID NO: 58353 - DNA, 597 bp, Chicken  19866894315230_3
tttttagaggaaaatcatttaataaaaagtaaatgagttgtgcatttttcyccactataatagttgatgcatccatatgctttctgttacgcaggtgagcatggcagaaaaactgttgctcttcagggaaacattacggacccttttgaaaacaccttttttgacccaagctgtcaatcacagatgtgatcctgagtacgtcttaacgcccatactcttaacgtgagaaggggcctcttcataaacatgatatttccacaaaaatatgttgcagcaagcagcccagggctataaaatttytaaaagttgacagcaattcatgcaaaaagagaggcacagaaggaagaagaaggaaagatgagaagggaaggcagaaggaacctgaaaagcccaagttcctctgaaatcttgtttcctgcttcaaacaattgtgtctgcttgagctggatcaaagcaacctttttggggaggaaaaagcacaagttttgtgtttccctcatgtccagatcctgataacatcctaatatctaaaatgagatgaatagggaaggagcataagtcctcttctttctgcctattcatggatttataaataaa

SEQ ID NO: 58354 - DNA, 600 bp, Chicken  19866894315233_1
aatggttgagagctgggaaggtttgtttagagaagaccagttgttatttatttcctctcttccctgcagtttttcctcagcacttagaactggacacattataaacatacaaatgaacaaggtgctcttactgcccagcactgagatggcagtttttaggttcctactgcccagtggggcaccagaacacagcatgtgctgtgttacactggagtgaaaatgtcatccagcatcagctcagccacatgcagccatctgatgataagaaatgctgtgtgttcccaataatttctgtctctyctctcatcgaggaataactatcatctctccccaaatcaaaacataatctgctcaacaggaagctaataaaagaagtgccattctgaggggaagaatgacagggaaatttttaggcacataaagtattaataaaaaagcctgttgttgttcaaaaatagtctaagctgctaatacatcatttggagttgctttctggacaacaaccaaagcaggctgtctaggaaggggattgcaaacctcatgctttcattaaagatgtgagtaagactcatgccagagactgcagcagtcttgttacct

SEQ ID NO: 58355 - DNA, 600 bp, Chicken  19866894315233_2
agaaccagatttcttctgaaaagatagtcttcttcctatacagatcatcactagtctcaacaatctacagtgagagaagaaggtggctttcatccagcatgctaaaatatctcaaaataagcaaaatcaaagctactgctcctgagtgtccattattggagctacttctatttgcagatgtccaaagcagagacatgtcgaaggaaaacagactgacactcccaacctgatgtgtctatctccagtttcccgctaatctcgtgcaaaaatctacaagaaacaaaaagcattaaatttccwgtccctttaccaaagcatatgggaccaaataacccaccaaactccttctctcacattcccaggctgccagaaaggcagaaccaaccctatcctaggaaagcactgccttyggcactgatttcaccactgtgttttcttttccaacaatattgtccaggtccgtcagcactgcagcaccttttgaatgccaagccccaacaagatgcagaattcacagctgttttacagctaagcaaaagtactgggaaacctcagcacgggtgctcacagactgtagcatgcaccaacggcccagatacc

SEQ ID NO: 58356 - DNA, 600 bp, Chicken  19866894315233_3
ctcaaaataagcaaaatcaaagctactgctcctgagtgtccattattggagctacttctatttgcagatgtccaaagcagagacatgtcgaaggaaaacagactgacactcccaacctgatgtgtctatctccagtttcccgctaatctcgtgcaaaaatctacaagaaacaaaaagcattaaatttccwgtccctttaccaaagcatatgggaccaaataacccaccaaactccttctctcacattcccaggctgccagaaaggcagaaccaaccctatcctaggaaagcactgccttyggcactgatttcaccactgtgttttcttttccaacaatattgtccaggtccgtcagcactgcagcaccttttgaatgccaagccccaacaagatgcagaattcacagctgttttacagctaagcaaaagtactgggaaacctcagcacgggtgctcacagactgtagcatgcaccaacggcccagataccttcagagctagctgggatctaatttggccctagacagcccatcttaagctatcaccatggaaaccaccatgttcctgggtacaaggccaccttttcttgggacagtttgg

SEQ ID NO: 58357 - DNA, 600 bp, Chicken  19866894315237_1
gatctaacagtaaggtcactgttgtagagatttcctcacatcctctgtgttgcaaatagttgttcagacttgtgggagagactttcagtcatctgacaagggaagcattactgctctctagatgtgctgaaccaccattatgttattaataggaacaagacagggaggacgcattgttagaggaacctctttctagaaatgcacgctgcagatactgtgctgaacatttaaatgggcttgccttgtaatctgggtaaacctaagaattgacaaatttattacctaaagaagtgcactgtrtttttctgccagtctgcttggatgctgcaccaagaagcagcattcatttttacatgagaaattccccarctttgcctgtttttttaacatctgacaaaccagaataataaaaatcagggtttgaaactcatttgacatgawcaaaactgtttagatggtgcttagtagctaatttctgtattttaagtacatgagattgttctattctgtgccttgtaatcaggtcagtcttttatctgttagctgagtgggatcacacagtctgacctgtgatctcagcataaattgctcaccaagagt

SEQ ID NO: 58358 - DNA, 559 bp, Chicken  19866894315237_2
ttgtgggagagactttcagtcatctgacaagggaagcattactgctctctagatgtgctgaaccaccattatgttattaataggaacaagacagggaggacgcattgttagaggaacctctttctagaaatgcacgctgcagatactgtgctgaacatttaaatgggcttgccttgtaatctgggtaaacctaagaattgacaaatttattacctaaagaagtgcactgtrtttttctgccagtctgcttggatgctgcaccaagaagcagcattcatttttacatgagaaattccccarctttgcctgtttttttaacatctgacaaaccagaataataaaaatcagggtttgaaactcatttgacatgawcaaaactgtttagatggtgcttagtagctaatttctgtattttaagtacatgagattgttctattctgtgccttgtaatcaggtcagtcttttatctgttagctgagtgggatcacacagtctgacctgtgatctcagcataaattgctcaccaagagttctgatagctgtatttcttttctcccat

SEQ ID NO: 58359 - DNA, 487 bp, Chicken  19866894315237_3
gttattaataggaacaagacagggaggacgcattgttagaggaacctctttctagaaatgcacgctgcagatactgtgctgaacatttaaatgggcttgccttgtaatctgggtaaacctaagaattgacaaatttattacctaaagaagtgcactgtrtttttctgccagtctgcttggatgctgcaccaagaagcagcattcatttttacatgagaaattccccarctttgcctgtttttttaacatctgacaaaccagaataataaaaatcagggtttgaaactcatttgacatgawcaaaactgtttagatggtgcttagtagctaatttctgtattttaagtacatgagattgttctattctgtgccttgtaatcaggtcagtcttttatctgttagctgagtgggatcacacagtctgacctgtgatctcagcataaattgctcaccaagagttctgatagctgtatttcttttctcccat

SEQ ID NO: 58360 - DNA, 600 bp, Chicken  19866894315239_1
ccttttttagttataaacagttaccactgtcctgtcactacactacctgataaaaagtctctccccatcatttttgtaggcctcctttaaatattggaaggccactataaggcctcctcagagccttctctatacttgagaactcaaactttctcaggctttctttgtaggagattcttagaagcctttcttcaaaaaattgtgcagaccaatgctgctgaatttggagggtaaaacggttggatccaagacctactaagcatttgggtggatttttgctttgagttacgctgaatagcyctagtggagggctggagcacctcaggtgcactcctacattatgtcttccagttagtttaatccgaaattcagttcacatgccttcaaatctctctgtaaatcaaagcatagtaagtaaggggtggcaggggtgaacctgggagattcacctcaaaactgcactcattagaaccaaactgttcacattgacacaacctgaggcagtagttgactgaaatcagccaaatgaggacattgggataaagaataagaatagaccagaagaaataaaaataggaataagtggaggaaataaactga

SEQ ID NO: 58361 - DNA, 496 bp, Chicken  19866894315239_2
gtctttatttgtcaggactgaattgagtttgtgatcacagctcagtttttagacagaatcatgaaaatggcatcgctcaaaaccgaggtgcaaaaattgctctcgatcaggaggctgaaaacccagatctctgcgagtacatccacgcgtcagagcgcttcggttttctgcagtccctgcgaactcctgcccttccctcgtaggaagcagaggccactccgcggggctcagcacgggcgccgggacagctccgccggggcccgaaggcgggaagtgcttaccacagccgctcgtgaggcyggcgggacagaggtcggaggagagagcggctccaggactgtgtagtttctaccctgacaagacctctagactcagggcacgggctgggcagaggggagcctcctcccctttgacggtggtgtgatcacttaccggcccgcgagagccgagccgagccgagcctgccgccacccgtcacgtcccgaggggcagagcg

SEQ ID NO: 58362 - DNA, 599 bp, Chicken  19866894315254_1
  misc_feature (1)..(137): n is any nucleotide
nnnnnnnnnnnnnnnnnnnnnnnnnnnnnnnnnnnnnnnnnnnnnnnnnnnnnnnnnnnnnnnnnnnnnnnnnnnnnnnnnnnnnnnnnnnnnnnnnnnnnnnnnnnnnnnnnnnnnnnnnnnnnnnnnnnnnnnnnaccccaggggcagctcctcctccggccgcgctcatctgcgctcccacgcggatgactcactgtgattagatggctcctattttacttgctcatgggtcggaccgtcaggatgtgcttagggaaacttttcttttttgcttttccattggaaaaagttgatttkctgaaataggaaccgtgggaaggagcgggaggcacgtttcctgctgggaggcacgtggggatccaagcagcatcgctctgtttggacactttggaaatgaagatctgctttgattcaggctttcttattttacttatttttctgctcttcaagatttagggcaaattttttttaaggtttgaaaccaaatcaaactatttcccaaccatcacaccggtgcgtttggatgcacccaacctgctttttcctcacatcctcacttcacactcaagctgtcttttcccctctccgtggctgtg

SEQ ID NO: 58363 - DNA, 600 bp, Chicken  19866894315257_1
tgtgctcaatgcaaagctgtgggtcactcccagctatgttctgggggaaaagagagaaaagcaagggcagaaagggaaaatcaagacaattcacatctgctctgagcttccattccatttgtgatgatgttctaactctggggtgtgcagtgaatttggtctggaaggtgaagcacactggtagcatcaccactgctcagctggcatcagaagaacgtcttacagggagtcatagccagacccttagaggctgcagggactttgagcacacagccagctgtgcccacccctcaccaataygcagcagcagcattaaacccaaggggttaacctcagccaagcacagcacatttggcagcatctccctgatccccctgggtttgttgtgagcacagctgatgyctctcttggaaagtttcttagcagggaagtaaggcacatgccactcacctcccctgctggaacacatattgaaatgtttctccaatctgtcaaattattcagtgcttgttaattagacgtggtggagtctgctctccatcacacactctggccactgagctgaaaagagcgaccctgtcagggtcgggactaatgaag

SEQ ID NO: 58364 - DNA, 600 bp, Chicken  19866894315257_2
tgagcttccattccatttgtgatgatgttctaactctggggtgtgcagtgaatttggtctggaaggtgaagcacactggtagcatcaccactgctcagctggcatcagaagaacgtcttacagggagtcatagccagacccttagaggctgcagggactttgagcacacagccagctgtgcccacccctcaccaataygcagcagcagcattaaacccaaggggttaacctcagccaagcacagcacatttggcagcatctccctgatccccctgggtttgttgtgagcacagctgatgyctctcttggaaagtttcttagcagggaagtaaggcacatgccactcacctcccctgctggaacacatattgaaatgtttctccaatctgtcaaattattcagtgcttgttaattagacgtggtggagtctgctctccatcacacactctggccactgagctgaaaagagcgaccctgtcagggtcgggactaatgaagccttcaaaccttgcctgcccacatcttttgtcaggagataattcaccttcatactttgactaattgcaggcgttcagaatggctgcactggctcacatccag

SEQ ID NO: 58365 - DNA, 600 bp, Chicken  19866894315262_1
ctgaccagacctgcaacacaacatccctcaccagaaagcctttctgttcctcaaacagcagcacaaacgtactgacatctaaatactcgaagtgtgctgctttcctttcacagcctaaagctgcggttcctctagcaatgggatctggcctggctggtatagccagcatgctcgattcatggcatgcattgcatgggtatatcccatttgaatgccacaacccagtaacaggacaactgcatgtaaacagcaaagtttgttcaacatttcagaaggtacagatacaacctctttcccackgacacaccactgcaccccttactatctggatcacctacaaagcaccttccacatctcacatttatccctccacaaaggctgaatcgatccatagatacacacttgtttcagtagcatctgcttccattgcagcagatgaagtgtttaagattgatgagacacttcccatacttatgggcaggaatctcagtagtgtttacaaacaaacaaacgctggctccaaatggtgtctcttttctctattgatagactgctcatcctcagaaggacgcatcagcagaaatctgacaggcaaataat

SEQ ID NO: 58366 - DNA, 599 bp, Chicken  19866894315267_1
  misc_feature (1)..(6): n is any nucleotide
nnnnnntatgatatgcttactaataatataaacactggagtagggagaagacaatgtgagaccccctgcagcacctccagccctggaaatgcccatatttctagaggtatgagagtaaattattatatacagggactccaagtggaaaagaagatatttgcacaatgcttaaacatttttttttgtctatagtattccgtatcagtaatatttcaatcagctcttcatcttttcacgttcttttagaatttttataagattatatggtcgcattagcatatctaggattcaatcacaccygygcctgtgtttcaatgcaagaaatagcacagttcagaaatccttacaaaagcaatacacaactgaagtacttgrttatctcaggataaagaggatgtactgtggttaatgaccaactttttttccsctaaggactggagaatcattactgaagagtacctattgcctcccactgggtgcttacaagtattactgaattacaacatcttggaatgtctattagaatttttaaacttattttaattactatcgatgaagacttactctcaatattagattatagtaacattaaagacagc

SEQ ID NO: 58367 - DNA, 599 bp, Chicken  19866894315267_2
  misc_feature (1)..(4): n is any nucleotide
nnnntatgatatgcttactaataatataaacactggagtagggagaagacaatgtgagaccccctgcagcacctccagccctggaaatgcccatatttctagaggtatgagagtaaattattatatacagggactccaagtggaaaagaagatatttgcacaatgcttaaacatttttttttgtctatagtattccgtatcagtaatatttcaatcagctcttcatcttttcacgttcttttagaatttttataagattatatggtcgcattagcatatctaggattcaatcacaccygygcctgtgtttcaatgcaagaaatagcacagttcagaaatccttacaaaagcaatacacaactgaagtacttgrttatctcaggataaagaggatgtactgtggttaatgaccaactttttttccsctaaggactggagaatcattactgaagagtacctattgcctcccactgggtgcttacaagtattactgaattacaacatcttggaatgtctattagaatttttaaacttattttaattactatcgatgaagacttactctcaatattagattatagtaacattaaagacagcaa

SEQ ID NO: 58368 - DNA, 600 bp, Chicken  19866894315267_3
tccagccctggaaatgcccatatttctagaggtatgagagtaaattattatatacagggactccaagtggaaaagaagatatttgcacaatgcttaaacatttttttttgtctatagtattccgtatcagtaatatttcaatcagctcttcatcttttcacgttcttttagaatttttataagattatatggtcgcattagcatatctaggattcaatcacaccygygcctgtgtttcaatgcaagaaatagcacagttcagaaatccttacaaaagcaatacacaactgaagtacttgrttatctcaggataaagaggatgtactgtggttaatgaccaactttttttccsctaaggactggagaatcattactgaagagtacctattgcctcccactgggtgcttacaagtattactgaattacaacatcttggaatgtctattagaatttttaaacttattttaattactatcgatgaagacttactctcaatattagattatagtaacattaaagacagcaaaaaacaaagtcctaactccttaaagactcacctggccaaaggatgctctattcttgcgcatctttaagtggtgt

SEQ ID NO: 58369 - DNA, 600 bp, Chicken  19866894315267_4
tacagggactccaagtggaaaagaagatatttgcacaatgcttaaacatttttttttgtctatagtattccgtatcagtaatatttcaatcagctcttcatcttttcacgttcttttagaatttttataagattatatggtcgcattagcatatctaggattcaatcacaccygygcctgtgtttcaatgcaagaaatagcacagttcagaaatccttacaaaagcaatacacaactgaagtacttgrttatctcaggataaagaggatgtactgtggttaatgaccaactttttttccsctaaggactggagaatcattactgaagagtacctattgcctcccactgggtgcttacaagtattactgaattacaacatcttggaatgtctattagaatttttaaacttattttaattactatcgatgaagacttactctcaatattagattatagtaacattaaagacagcaaaaaacaaagtcctaactccttaaagactcacctggccaaaggatgctctattcttgcgcatctttaagtggtgtctttgaaagagcaatctaacaggaagctctgagcagcaatcatgaaggaaga

SEQ ID NO: 58370 - DNA, 600 bp, Chicken  19866894315267_5
tcctatgagactaataaaaataagcctcctttaacaattctgcaagtcaccgatccaagagtaaaacattaattcatcagactctaaatcattcctctattaaaaacaaaacaatctggtttccatgcagagctagaaataaattagtgtgattgtaactccaagtactttgagtcttgagctgccttgtttctgtcttagaaataaagtactgcagaggtcatggacctcacagcaaggagctcattctgtgctacagcccagtgcgagatacgtttcacaacaccacgtgaaacacastgttcctacagaagagttatggttggctactggaacgctcacacacagctctcaagcatttgtcatccaaggtcaatgaacaagattttcttaaaataaaagcaattaaaaagtatacaatttattcccctcctccaaaaaataaaaaataaattwaaaaggctgcaaggggcaaagaaagaaaattttaaagcattttttgattttctcttcaccctcacaatactgaaataacatcggtcagggttataaacatctgtaattgccaagggaacgtacaatacattcagaaagtgtggg

SEQ ID NO: 58371 - DNA, 600 bp, Chicken  19866894315267_6
aactccaagtactttgagtcttgagctgccttgtttctgtcttagaaataaagtactgcagaggtcatggacctcacagcaaggagctcattctgtgctacagcccagtgcgagatacgtttcacaacaccacgtgaaacacastgttcctacagaagagttatggttggctactggaacgctcacacacagctctcaagcatttgtcatccaaggtcaatgaacaagattttcttaaaataaaagcaattaaaaagtatacaatttattcccctcctccaaaaaataaaaaataaattwaaaaggctgcaaggggcaaagaaagaaaattttaaagcattttttgattttctcttcaccctcacaatactgaaataacatcggtcagggttataaacatctgtaattgccaagggaacgtacaatacattcagaaagtgtgggcgcacgtatcctgtagccctgcacttcacaaacaaaaggttggggaaagaaagagggggtggggtacggggaataaaggcttaaagattaaagtcgcaggcagagacagacggctccgttttttaataactgaaaacacgagttgtgcctgaatgt

SEQ ID NO: 58372 - DNA, 600 bp, Chicken  19866894315275_1
acactaaaaaagagagagcaacaaaaacataaaccttgtccatgtgaaaccaatgcagtctggttcaatggcagaggcagaaattcttagtgagttctccaagtgaatgcctccgtcagtgcctcttttcactgaaccttgcactgggaataggaagctctagaagaaaaacattctctcatgggtattcaataaacctttggaaatcttcttaccacatccccactgtaccttttcttttgttatacactagcccgctgcaccccaccacatcaaacacaagctcttataaaacaatgygggagtgaacgccctgcgatgtgcaggtagaaaggaagaagagagcatccagtgtccaaaagctgagawgaacrggcatatttcaaaagtacaaggaataattgaaaaacccaaatgaaagtacagtatttaccagaagaaacagctgaaacaggaaaacaaatatcttttaaatgagtgtatacagaggcaaagtattttatgctggaaaatcccagtctgtgcaatttctgttgtgacttcatgatctgctgttcatgaaatgacatcctccttttttggtggagtgacaaatgcaaa

SEQ ID NO: 58373 - DNA, 600 bp, Chicken  19866894315275_2
ggcagaggcagaaattcttagtgagttctccaagtgaatgcctccgtcagtgcctcttttcactgaaccttgcactgggaataggaagctctagaagaaaaacattctctcatgggtattcaataaacctttggaaatcttcttaccacatccccactgtaccttttcttttgttatacactagcccgctgcaccccaccacatcaaacacaagctcttataaaacaatgygggagtgaacgccctgcgatgtgcaggtagaaaggaagaagagagcatccagtgtccaaaagctgagawgaacrggcatatttcaaaagtacaaggaataattgaaaaacccaaatgaaagtacagtatttaccagaagaaacagctgaaacaggaaaacaaatatcttttaaatgagtgtatacagaggcaaagtattttatgctggaaaatcccagtctgtgcaatttctgttgtgacttcatgatctgctgttcatgaaatgacatcctccttttttggtggagtgacaaatgcaaaagattaaaccttgcagaagcagagcagaagtactcaggagaaaaaataaccagaagaaaggataggccg

SEQ ID NO: 58374 - DNA, 600 bp, Chicken  19866894315275_3
aggcagaaattcttagtgagttctccaagtgaatgcctccgtcagtgcctcttttcactgaaccttgcactgggaataggaagctctagaagaaaaacattctctcatgggtattcaataaacctttggaaatcttcttaccacatccccactgtaccttttcttttgttatacactagcccgctgcaccccaccacatcaaacacaagctcttataaaacaatgygggagtgaacgccctgcgatgtgcaggtagaaaggaagaagagagcatccagtgtccaaaagctgagawgaacrggcatatttcaaaagtacaaggaataattgaaaaacccaaatgaaagtacagtatttaccagaagaaacagctgaaacaggaaaacaaatatcttttaaatgagtgtatacagaggcaaagtattttatgctggaaaatcccagtctgtgcaatttctgttgtgacttcatgatctgctgttcatgaaatgacatcctccttttttggtggagtgacaaatgcaaaagattaaaccttgcagaagcagagcagaagtactcaggagaaaaaataaccagaagaaaggataggccgaagga

SEQ ID NO: 58375 - DNA, 599 bp, Chicken  19866894315285_1
  misc_feature (1)..(47): n is any nucleotide
nnnnnnnnnnnnnnnnnnnnnnnnnnnnnnnnnnnnnnnnnnnnnnncctggttgctgtgctccctcctccccgtcagtgctggataaggctaaggcacctgttaacacctggcttgccaaaaatcagaagatctcttcacctccagtctagtagtcgggtttttgagtaatttctgttgcacctctcacgttggtatagaagctaacagagaaatacaggcatagcattgtgctgaacagctcttgtattgcgccacgcatgcgctgaatgcactgaactttggaatgggttgctttgstggggaagttccccttatggctgcattaagaattgagttcaggtttctaatcccccagttttgctacagaatcctgcgtgaccttgaacaagtcactcgatttctttccgtcttgttttcccatttgggaaatgatggggcaaataattgttttttatctcacggctataacaagattataaaaatatggtagttctaagaccccgagaaaacggatcaaatgaaaattaaacagatcttgcagtccagatgaaatgagatgaaacaagcatgaaactctcagggaaagaaatgtttct

SEQ ID NO: 58376 - DNA, 600 bp, Chicken  19866894315291_1
ttcacatgcaaaactaatgccagaaggaaagggaaaggtgtaatgaggcagagagaggggtttggttctctgcctttcaaagaaccacgtgcaagtcttagaaaagggaggaggaggacatggagtgcaacagaaaggagcagagcgaggtggtggatggcagtgatctcagagggattacgtgaggtttcaccaggcatccccaggctgaggtgcaggtgctgcagtaccttgtagtccatctgctcagagcagttaaacacatacaccatgatgcccagggctcgccccaagtctttygtagtctcygtcttgccggtgcctgcagggcccgcaggtgctccgctcatggtcagatgcagagactgggtcagggtgatgtaacatcttccacagcaaaagaaagagggaaaaaagagaagagactgagacctggtccaataggtcactgctggggtgcagagcaaagggactgaggcaacatgctctggtgagcctttgttctgcaaagcagtacatgagcacagtgcatgtggaagttgaatttcctcctccatgttaattaccacctctgtctggttgtgggttgttcaagagata

SEQ ID NO: 58377 - DNA, 600 bp, Chicken  19866894315291_2
aaaactaatgccagaaggaaagggaaaggtgtaatgaggcagagagaggggtttggttctctgcctttcaaagaaccacgtgcaagtcttagaaaagggaggaggaggacatggagtgcaacagaaaggagcagagcgaggtggtggatggcagtgatctcagagggattacgtgaggtttcaccaggcatccccaggctgaggtgcaggtgctgcagtaccttgtagtccatctgctcagagcagttaaacacatacaccatgatgcccagggctcgccccaagtctttygtagtctcygtcttgccggtgcctgcagggcccgcaggtgctccgctcatggtcagatgcagagactgggtcagggtgatgtaacatcttccacagcaaaagaaagagggaaaaaagagaagagactgagacctggtccaataggtcactgctggggtgcagagcaaagggactgaggcaacatgctctggtgagcctttgttctgcaaagcagtacatgagcacagtgcatgtggaagttgaatttcctcctccatgttaattaccacctctgtctggttgtgggttgttcaagagatactcatcatc

SEQ ID NO: 58378 - DNA, 599 bp, Chicken  19866894315294_1
  misc_feature (1)..(195): n is any nucleotide
nnnnnnnnnnnnnnnnnnnnnnnnnnnnnnnnnnnnnnnnnnnnnnnnnnnnnnnnnnnnnnnnnnnnnnnnnnnnnnnnnnnnnnnnnnnnnnnnnnnnnnnnnnnnnnnnnnnnnnnnnnnnnnnnnnnnnnnnnnnnnnnnnnnnnnnnnnnnnnnnnnnnnnnnnnnnnnnnnnnnnnnnnnnnnnnnnnnaaaaaaaaaaaaaaaaaaaacccagagagcagaaaaaattgcatcaaaaaatagttttagagatcatttttttaataggaaataattataaaaatgagcattgtrtataagttttgcagttgagattccgtgtcagcaataaatgtgtgttggcttcatttatttacttacttataaattgaaccaattccaattgcactctaaagaaccccaccagaaccttttaaagaaattagttttcatgacgcaatacactttcctgttcgcatgtggatgtggtgcttgagtcatggaatgccacaggccagccttagatgcctttatgcttgttgtactattgactaattgtagtatttgactcacttaacacacacaaattaatactggaagccagctggcagagc

SEQ ID NO: 58379 - DNA, 552 bp, Chicken  19866894315294_2
ctgttcgcatgtggatgtggtgcttgagtcatggaatgccacaggccagccttagatgcctttatgcttgttgtactattgactaattgtagtatttgactcacttaacacacacaaattaatactggaagccagctggcagagccaacaggaggcaatgtcctcaaggctaaagagcagcaggcctggggaagaagttgcagcccaaggcctggctgctggtctggcttctgtaaggcccactttgctctctgggagtacctggtcatcacctcctgagacttcttcaagatgacttcrttgtattaaaatataaatatttttatatataattataaatatattaaaatatttaatatgtctattaaaataggggtggggcgggggggaatctcctcagcctccctgtctgctgtgcattggaaataggcttgaatagatcacagaaaaagtaagatgttgcttttaaagtgcattcctgctccccagtgctggcttcccttcagacagagcagttactgtgataagagcagaggaaaattaccttctgca

SEQ ID NO: 58380 - DNA, 599 bp, Chicken  19866894315303_1
  misc_feature (1)..(44): n is any nucleotide
nnnnnnnnnnnnnnnnnnnnnnnnnnnnnnnnnnnnnnnnnnnntgtttggtcttcttacaaccgcagcgtgaaggacagcttggctcagaggaggctgcactgcatgcaaaggagggagattatccagaaagctaagtagtttcagaagcaatttcatctgtgaagacaagagcaagcacaagccctcaaggccaccgcagccccatcacctgtgccctgaaggcaccgagctgctgcacacaccttcctcaccacctctgtcctctcctgtgtgctttgggacccacaacgaaagtcygagtttggacttggggcataaaatacggcaccataaaatattattgtaggggaagagtgaaaatttactcatttttgagcaggagggcaaggtgattttctctcggtccagtaattccctcatttttattgctggtgttatggaccagcttctccgaggtgcttggattttgcttatattgcgtcctccttcacatccgctttcaacagtaaaacccgtgtggttttgatctcttgctttcatgcctgctgccacactctggaaaatttaagaagggcgcaaggaatgggttagtcaca

SEQ ID NO: 58381 - DNA, 599 bp, Chicken  19866894315311_1
  misc_feature (1)..(10): n is any nucleotide
nnnnnnnnnnacaggctctcattcctaccgcacagcctttggaaaggattaagctagggaacagaacagaggatcccgataagagacacacacattaaaatttcttgttccctggaaaatgcaagagtggaaagaatttatactttgcactgtccagtaagaatgattctccttgtcacagttatcttaataacttcagataaaatacatttgcttttcaggagatgattttactcgttcgctctcagcagatgtgaatcccagagctgcaagattatagcaggcatgtgcctacagacrgagctggccattaccttgtagattgtaattacagaccacagctgcctcacccacattttgaagagaccaggtgtgttctgctgctaaaccyatcttagttaagctccctaggctcctttcttgtctagctccttttttatttcagctacagatgcatgaggagagagcaagtgtacacaaggcagggagatacttggtgtaagaaaataaaatcagaagtattcagctttatttaagctaatattagtgacctgaaatatgtaaataaggtcactttctttgaaagtgaggttcatctg

SEQ ID NO: 58382 - DNA, 600 bp, Chicken  19866894315311_2
acattaaaatttcttgttccctggaaaatgcaagagtggaaagaatttatactttgcactgtccagtaagaatgattctccttgtcacagttatcttaataacttcagataaaatacatttgcttttcaggagatgattttactcgttcgctctcagcagatgtgaatcccagagctgcaagattatagcaggcatgtgcctacagacrgagctggccattaccttgtagattgtaattacagaccacagctgcctcacccacattttgaagagaccaggtgtgttctgctgctaaaccyatcttagttaagctccctaggctcctttcttgtctagctccttttttatttcagctacagatgcatgaggagagagcaagtgtacacaaggcagggagatacttggtgtaagaaaataaaatcagaagtattcagctttatttaagctaatattagtgacctgaaatatgtaaataaggtcactttctttgaaagtgaggttcatctgatctcacagcacaatgaagcagaaaaaaaactttcaggacaactgaataagaaagttacaatatattgtcacaatttacttcggaattcttt

SEQ ID NO: 58383 - DNA, 600 bp, Chicken  19866894315312_1
gcccacaggcagccactggttttttagggacagtgcaatccactcctagaagacaaaactcacttaaggatcgagtacaagtacatttcagattactttgtaaaaaaaaaaaagaaaaaaaatcatattcttaatagattaaaattattttactgtgtcctagcaatataaagtgtccttaaattagaagtttattagtgtaaaataaatgtgactcaagagtatttttgttccctaatacagctttggctgagaaaatcctcagatgttaccgtatttacaataggattaactgtttcwaacaaactgcatttgcattcttattcatgctctctggaacaaaaataatatttactttcttttgtatttcattactgaagaaggttatgtcattatgctttcataacaattgcattagcaacaccattgttagacgcaaagatgtttaggattccatatattttgtttttaaaaaaagaggttactgtcagcatttgtagtatgcatgactaaagagagcaatttgttggttgttttttttttttcactcttatttttttataataattaattggcactctctagcaactaagcctattc

SEQ ID NO: 58384 - DNA, 600 bp, Chicken  19866894315314_1
gtctgaaaaagttgaatgttttgagatgaaagtgagagagaaattagattttatatgaataaagacatgctgaagatagtaggagtacaacatatatccatgtgtccattcagctgtcttaccagtacctgttgtataaaaatataggtctagatcctcaaagttatacctcctgtgcacattcatattggccattcagtaaacagaggaaagatgtttaattggatttgaaggtcagaacctgagtagttaaatcttggttccgggtaacagtttgctagaagtactttgataacataytatcaaaaagtctacaaacaggctactttgtaaaaaatgtcaggtaaatccctttaaaactaaattcataacaagacagatcttactcctttgccggtgtttctgcagtaaacaacaaagttcccatttcaataattgcctggttttatgtacactttaaacacagccacttctacattaaaaaaaaaaaaaaaaaaaaaaaaggctttgagcagtatatttcactttgagattgttctggaatgcttttagcaggccctctgccaaaaacactcagctttcttggttctatggttaata

SEQ ID NO: 58385 - DNA, 600 bp, Chicken  19866894315318_1
tatagctgataggcacggaggcctgaaacgtggagaccagcttctttctgtaaatggagtggtaggaattgattttcactttccttagcagtaacttcttatctccacttgggggcatacgtagaatatacatggcataagcttgaggttgtcttttgatcctagtaaaattgcttctttttgtcctctcaagaacatcttccgtaggtttctgaacctaattctgtgcaatgagagttcttggattatgctttggttatatttttcaactgggaatgtcactatttatgtcagtatttsagattctgagttgttgtataagtctggtaggtgttgtgttctgaaatagtattaaactgccattatggcttcctgttttattaagtttgatgtagattttaacttagttttctgcagcttctaaggtaagtagtaaattatgatgcattattgtagactgagcgggggctctttgacatcattatcccagcaagagcactactgcttaatgaaagctgtagtaagatgaaaaaaaggtggtgttatctttggttatcttaagtgctataagcttcaaaacagtgatttatattttaagga

SEQ ID NO: 58386 - DNA, 600 bp, Chicken  19866894315327_1
ttccaaaagcccttttaaaaagctgacatttatacagttttatgatactgaactcatcaaatccatatgaagaggtaaaatcaccttccttgttgcaataatcattctcctgtaaaaatatccaaatgtcttgtgacccctcttgctgtcttggagggatgctcctcacatctggccctaaatcatctcagctttactctgtaggcaggcagatagaaatcagattttattaacacgtattttatttgaatggatcctgattgctttgtataatggtctccttattcaccattctgaccrtactgggaacacccacagaccttatcagmggtggctttatggttcattccatatgactgatggcagcaggccaccagcaatgcatctatccaacttgttgagcactgcccrttaggtgctgccagacccayacaacacacactactgctgtgtgccaaggcatgtccagtggagtactgctggtggcatggccaaggaggctgctggcaaagtagtctcactagcaaatctctccagatgaattcaggggttgattctctttgggaagggctgaaagaatttccacttccaaaaggctgt

SEQ ID NO: 58387 - DNA, 600 bp, Chicken  19866894315327_2
ttatacagttttatgatactgaactcatcaaatccatatgaagaggtaaaatcaccttccttgttgcaataatcattctcctgtaaaaatatccaaatgtcttgtgacccctcttgctgtcttggagggatgctcctcacatctggccctaaatcatctcagctttactctgtaggcaggcagatagaaatcagattttattaacacgtattttatttgaatggatcctgattgctttgtataatggtctccttattcaccattctgaccrtactgggaacacccacagaccttatcagmggtggctttatggttcattccatatgactgatggcagcaggccaccagcaatgcatctatccaacttgttgagcactgcccrttaggtgctgccagacccayacaacacacactactgctgtgtgccaaggcatgtccagtggagtactgctggtggcatggccaaggaggctgctggcaaagtagtctcactagcaaatctctccagatgaattcaggggttgattctctttgggaagggctgaaagaatttccacttccaaaaggctgtcccattgcaaaattgggcacttttgcttt

SEQ ID NO: 58388 - DNA, 600 bp, Chicken  19866894315327_3
gtaaaaatatccaaatgtcttgtgacccctcttgctgtcttggagggatgctcctcacatctggccctaaatcatctcagctttactctgtaggcaggcagatagaaatcagattttattaacacgtattttatttgaatggatcctgattgctttgtataatggtctccttattcaccattctgaccrtactgggaacacccacagaccttatcagmggtggctttatggttcattccatatgactgatggcagcaggccaccagcaatgcatctatccaacttgttgagcactgcccrttaggtgctgccagacccayacaacacacactactgctgtgtgccaaggcatgtccagtggagtactgctggtggcatggccaaggaggctgctggcaaagtagtctcactagcaaatctctccagatgaattcaggggttgattctctttgggaagggctgaaagaatttccacttccaaaaggctgtcccattgcaaaattgggcacttttgctttggaaccccatcttgtccatgcaagaaaggatttccctgatgtcagtgaaaaatgagaacaaaaattattttaaaaacaaaac

SEQ ID NO: 58389 - DNA, 600 bp, Chicken  19866894315327_4
tgtgacccctcttgctgtcttggagggatgctcctcacatctggccctaaatcatctcagctttactctgtaggcaggcagatagaaatcagattttattaacacgtattttatttgaatggatcctgattgctttgtataatggtctccttattcaccattctgaccrtactgggaacacccacagaccttatcagmggtggctttatggttcattccatatgactgatggcagcaggccaccagcaatgcatctatccaacttgttgagcactgcccrttaggtgctgccagacccayacaacacacactactgctgtgtgccaaggcatgtccagtggagtactgctggtggcatggccaaggaggctgctggcaaagtagtctcactagcaaatctctccagatgaattcaggggttgattctctttgggaagggctgaaagaatttccacttccaaaaggctgtcccattgcaaaattgggcacttttgctttggaaccccatcttgtccatgcaagaaaggatttccctgatgtcagtgaaaaatgagaacaaaaattattttaaaaacaaaacccttccctgtgttgagtcat

SEQ ID NO: 58390 - DNA, 600 bp, Chicken  19866894315330_1
gtaccaagaaggtggatgcaggagaggtaaaggtgtttggagacactgtagtaggctctaaagataatttttctggaagcaaagcaaaacagtgacttgtctactaattcaaagatggtgaatataaagaagtgggcagatatatttactttaaaatgcagaggaaaagtcagttgtacatcaggatataaatgagaaggtttgaatataaatgagaagcacaataaatgacaagatgtaagaagaggaaactttttgctgattaagataatgtattttgttcttttagtctggagactrgagagactgaaagaataaaactataggagcactgagctttagtgatggatacaaaccacagagaggagccttgctcatcctggtgtaaaaccagaggtgccaaactgaagtttgaaaagctgcagtaaagcaaagcaggacaaagtgataatcaggcccaatgtgaacaatctgaagaggcttcattgtgacagctgaagggtttgtagtaggcagagatacttctggtggcagtggaagcaattcagagaagctgttttagctgaggaggagataatttatctaaacattgttgtacat

SEQ ID NO: 58391 - DNA, 600 bp, Chicken  19866894315337_1
atgaggtgagagcagctggagtggggcagggtgaagttatcttctgcacattatttctggtgggcacaaaaaaagtcattaagggaaaattttgaggattgttaagttaaaagttcatctaaaaagctgtttatcaagagcaagaaatttctccgtaaccctcaccgaatgagagttatggggaggagaattataaaggtgtcatggaggaaagttatagttcttgatataactgagatgcccctatttaatgtaaagttgaagtggtacagcataccaaaactttcccaaattataatrcagttttccttgaatgattttggaagatgagctgatgagactgataaaatatatgtaagtatatattttaaaaaggatgcrtatggatgaaaagacaatctgaaattacttcctgaattatttagagtattgtcaggaagaggaaaatgcttagtagtttctgccaggtctgtgatacaacgtgatcgataagcacaagcttttcttaaccttgccccctgatttatggcctccttagtcaagacacccaaaattgcttttattcatcgcttattcaaatagtttggaaaacatatatat

SEQ ID NO: 58392 - DNA, 600 bp, Chicken  19866894315337_2
agggaaaattttgaggattgttaagttaaaagttcatctaaaaagctgtttatcaagagcaagaaatttctccgtaaccctcaccgaatgagagttatggggaggagaattataaaggtgtcatggaggaaagttatagttcttgatataactgagatgcccctatttaatgtaaagttgaagtggtacagcataccaaaactttcccaaattataatrcagttttccttgaatgattttggaagatgagctgatgagactgataaaatatatgtaagtatatattttaaaaaggatgcrtatggatgaaaagacaatctgaaattacttcctgaattatttagagtattgtcaggaagaggaaaatgcttagtagtttctgccaggtctgtgatacaacgtgatcgataagcacaagcttttcttaaccttgccccctgatttatggcctccttagtcaagacacccaaaattgcttttattcatcgcttattcaaatagtttggaaaacatatatattttcaaggctgtggaatttctaatgaggcctccagaagcgtcatgttgttacgaaacgaggaactcaaagtctgagtgatg

SEQ ID NO: 58393 - DNA, 600 bp, Chicken  19866894315345_1
ccagtagtatcattaaccaaggctttttagattattgcaagaatgcaaggtagttcgtatctggtggccagtgtgttatacaaacagtgaataatgctattagacagtatagatgctacctgttgttatgcagcatggactggatgtaatgacatcagctgatgtctttactaactttaatattggggtaggatcttcatgtactgacagctgaatacaatcttttatttaatgttctttcaaataaatgcaatgcttagttttgtaacgtgtattaaggagtggctcttgcagacactraagacttagcagtatttccagcaagtatggatacaaacttcacgatttcaaagcagtggattttgagaactttgtttctgaagtcatttctcatttccacataaataaacagataaataaaccacaacagctaattgtccctctcatcaaaaaaaaaaaaaaaaaaaaggaattactggaaaaacattgcagagaagcattccatgctttttaagttctatctttcagtgatgtactagagactgaaggtgttaatgaccacaccgtatgataaaactccctctgtttgtgagcatctgt

SEQ ID NO: 58394 - DNA, 600 bp, Chicken  19866894315345_2
tactaactttaatattggggtaggatcttcatgtactgacagctgaatacaatcttttatttaatgttctttcaaataaatgcaatgcttagttttgtaacgtgtattaaggagtggctcttgcagacactraagacttagcagtatttccagcaagtatggatacaaacttcacgatttcaaagcagtggattttgagaactttgtttctgaagtcatttctcatttccacataaataaacagataaataaaccacaacagctaattgtccctctcatcaaaaaaaaaaaaaaaaaaarggaattactggaaaaacattgcagagaagcattccatgctttttaagttctatctttcagtgatgtactagagactgaaggtgttaatgaccacaccgtatgataaaactccctctgtttgtgagcatctgtgagggaagtgttgaataacagcttaacagtgcagtctttttttaatttgagatctgaaagtcatgaatgaaaaatctccttgaatagtaaaagaggaaaggtgttttttttttcagtaaaattaacaaaattaaacaaataatctcaatcagtgaggaaaatgtcttc

SEQ ID NO: 58395 - DNA, 600 bp, Chicken  19866894315345_3; identical to SEQ ID NO: 58394

SEQ ID NO: 58396 - DNA, 600 bp, Chicken  19866894315345_4; identical to SEQ ID NO: 58394

SEQ ID NO: 58397 - DNA, 600 bp, Chicken  19866894315349_1
tctccctcttccaaacttggagaagttaattccctattgggatggacctacaaagattgagacttttcagcttggaagatccattttcatctctgaactacaaaagtgaactatggaagagtagttttggcaggcagtagaaaaatgtttgaaatatctaaaggattaatattaaatctagaaagctgtcactaatcttgtcttaaactcacaagtctgacaatgtacaattgcttaggagaaacttcagtttttttgtcttgctatgaagtcaaagggattgttaaatgattgagatgragtgtttgtaccaactcactgaagactgctgatgtgtagtatgataaaacataacgwagttaaaaatgtagttaagatcatttaattagaaattcagagttaacctttctaatgagaactgttgtgtatggagggagtaatgcagcagaaagacactacgatggaggcttgcctggttttgtaaaacatacaatcatctgataaagtagtttatgactcaagttttcatttaagaattcaatagttttactcttcctgagagcatacctaagaaagaggaaatgctttccctcttcctta

SEQ ID NO: 58398 - DNA, 600 bp, Chicken  19866894315349_2
tgagacttttcagcttggaagatccattttcatctctgaactacaaaagtgaactatggaagagtagttttggcaggcagtagaaaaatgtttgaaatatctaaaggattaatattaaatctagaaagctgtcactaatcttgtcttaaactcacaagtctgacaatgtacaattgcttaggagaaacttcagtttttttgtcttgctatgaagtcaaagggattgttaaatgattgagatgragtgtttgtaccaactcactgaagactgctgatgtgtagtatgataaaacataacgwagttaaaaatgtagttaagatcatttaattagaaattcagagttaacctttctaatgagaactgttgtgtatggagggagtaatgcagcagaaagacactacgatggaggcttgcctggttttgtaaaacatacaatcatctgataaagtagtttatgactcaagttttcatttaagaattcaatagttttactcttcctgagagcatacctaagaaagaggaaatgctttccctcttccttatttgataatatctttaattgtatataagaattggatctgactcacagtttctttatt

SEQ ID NO: 58399 - DNA, 600 bp, Chicken  19866894315349_3
acaatcatctgataaagtagtttatgactcaagttttcatttaagaattcaatagttttactcttcctgagagcatacctaagaaagaggaaatgctttccctcttccttatttgataatatctttaattgtatataagaattggatctgactcacagtttctttattcctattataaacagtagttttcagtccttcagcatcaccaccgcacataacatccaagtcttttcatgttgatcatataatcatgtattactcagataccttgtttggcttgcatgcattctatactcttgscagttctcttaaagcatatactgtagccttgccccttcataaaataaaactcttctttgactaactgaatgggagttcaggattttgcttcgaaactgaaatcctgttactaatgttacgtatctttccacactgataaaggaatactgcttcttgttgaaaaaggaagaaagttctttgacaaatgcttacggcttttctgtatagtttgttcttaaatggaatttcagcaaggggaaccaaaattcgttgtcattgtttatgtatgaaatttctcacagagttttatttgttcacata

SEQ ID NO: 58400 - DNA, 600 bp, Chicken  19866894315349_4
acattttggaatcagctcagtatgtgacatcacacccccttacagttttctcataaaataagtcctccaaagaaaatagaaaaattgagacttaatctgaaatctattattacgtcctctaaggcctcattaggcacctcactattttcttttttcttttttttctttttcatttttccaggcagatagactaaatgttacagatcagagcggtaaatattttatggggagagtaggggagaggcacaaggaatagagttttattcccatgtctaccttgtcttcacaaggaaaaaaaamccatgaagatcgtggtgcttagtctttcctcctgagcatcttttcaggctgtgtgagcacacgtgtccaatgtaacatttagcagttgtggttgtttmgctgtgtctctaagagatcaatgagtgactcctagtttatgaggaaagggccgcacagatgaaagcctctgttcagctcagacttcaattctcaacacgctgatgtttcacaaaagcaatttttagagaaaaacatccatttctgccctttgctgggggactgtatgtgctttcctgtgtgtgcttgtggttgcttgcatta

SEQ ID NO: 58401 - DNA, 600 bp, Chicken  19866894315349_5
gaaatctattattacgtcctctaaggcctcattaggcacctcactattttcttttttcttttttttctttttcatttttccaggcagatagactaaatgttacagatcagagcggtaaatattttatggggagagtaggggagaggcacaaggaatagagttttattcccatgtctaccttgtcttcacaaggaaaaaaaamccatgaagatcgtggtgcttagtctttcctcctgagcatcttttcaggctgtgtgagcacacgtgtccaatgtaacatttagcagttgtggttgtttmgctgtgtctctaagagatcaatgagtgactcctagtttatgaggaaagggccgcacagatgaaagcctctgttcagctcagacttcaattctcaacacgctgatgtttcacaaaagcaatttttagagaaaaacatccatttctgccctttgctgggggactgtatgtgctttcctgtgtgtgcttgtggttgcttgcattaatactcttttttttttctgagaagcaaattatttttttccccagcttctttaattgcagtgtgtaaatacggctgtgtacttggtgggaagcatatgt

SEQ ID NO: 58402 - DNA, 600 bp, Chicken  19866894315350_1
cctctttctacaccataagactgatttaaagtacatcgtaaaatatctacacacatactagaaaattgcaaggacagtgtcacacaaaatcaacccaagcccctgatggacatacactgatcttcagaaaactgataaaacaaagatcttcacagtaagaataaagcaaggtgactacagactctaactttattttattttcccgtcacagcaaaattcctctgcaacagaaagagataagacaaaaatcaaaccaagtgctgaaagctcttgtagctcaaacataccacattcacagcrttccctgtcatcagtgattgagttcattcytgtgcaagtattcccataaaatatagcaactgtataaatcaatcagtagcagataccaagttaagaaaagcacagaggaaaatcccaagacttcctcaccttgttgcccagtgaagtggggtagaatttaaatctcctccaagctgatcaacgattgcaccttttgatatatagtatctatacaacaacagaaaaaaaaaaccaacagtaaatcttaatgctcatcttgtttccaaagaaaggacacacagtaagcatgttgttcgacat

SEQ ID NO: 58403 - DNA, 600 bp, Chicken  19866894315350_2
gtacatcgtaaaatatctacacacatactagaaaattgcaaggacagtgtcacacaaaatcaacccaagcccctgatggacatacactgatcttcagaaaactgataaaacaaagatcttcacagtaagaataaagcaaggtgactacagactctaactttattttattttcccgtcacagcaaaattcctctgcaacagaaagagataagacaaaaatcaaaccaagtgctgaaagctcttgtagctcaaacataccacattcacagcrttccctgtcatcagtgattgagttcattcytgtgcaagtattcccataaaatatagcaactgtataaatcaatcagtagcagataccaagttaagaaaagcacagaggaaaatcccaagacttcctcaccttgttgcccagtgaagtggggtagaatttaaatctcctccaagctgatcaacgattgcaccttttgatatatagtatctatacaacaacagaaaaaaaaaaccaacagtaaatcttaatgctcatcttgtttccaaagaaaggacacacagtaagcatgttgttcgacattatggaaaacactgggtcttcatataaact

SEQ ID NO: 58404 - DNA, 600 bp, Chicken  19866894315352_1
gtccttgcaattgtgggccttttagcagtttatgggaaaaaaaggaccaccttaattgtctagatgtggatgtagatatttgctttaggctattcaaacagaagtattttggacagtttctcagcgtattccactattttttaattggagctgagggatttcgcctgaggaagctcaattaagacaactttggcttgcataattgtctcagcaggttaatgactcagtgccaagctccatgaaagtttgaaaacatttgggatttaatggtagaaattttcagtgtgaaactgttcagtrtgttttcagaggttttccagaagctgttgatgttaggggggcttacaaaataggtcctgaagggcttgcctggctgttgttaggaggagaaaatcttagtactgcccagacatttttcttatcacctgcatagtactggtttaaataggagaggtttttgatacgtagctattatgctgctttctaataaactgatttccaggtttctttctccagaaggcaatgactccgtaactaacagatggtgataaaatcccacaactttattactaatgtttgtgcagattgaaatatggatgt

SEQ ID NO: 58405 - DNA, 600 bp, Chicken  19866894315357_1
tgtgtttaatcttccaaagcatatcctgatttttttcaagtcagttgtttatgatataatccatacctactgtattcatatatcttaataaaaattatctagaaatggagactgtagtatttgaagtagtaaagatctctatggacagctcatgagcaataggtctatccaagcatatagagtctgtgcagtgacagatgttttccaaaatcactgtatatgactgtatgttcagcattgggctacaggagctccagctagctgccatatatacaaatcttaacgacgaagcctctctaratgtgtgatcatgcatatattctgtggttttctcttctatttttccctgaggacaattctcagtagcattgtagaggaaagcacagttataagacagtcttaaaatggaatttttagggcttttatcatctcaattgtacatcaatcaagtttgatttccagttaggagtgatggagcctcttggaagcctctgaaacacaaccacagtccacaattggaaacttcagtctgattaccatcatacatttattcatgatagtgtaattaaaagtgatttccatcctgtgatctgtaagtac

SEQ ID NO: 58406 - DNA, 600 bp, Chicken  19866894315357_2
gacaattctcagtagcattgtagaggaaagcacagttataagacagtcttaaaatggaatttttagggcttttatcatctcaattgtacatcaatcaagtttgatttccagttaggagtgatggagcctcttggaagcctctgaaacacaaccacagtccacaattggaaacttcagtctgattaccatcatacatttattcatgatagtgtaattaaaagtgatttccatcctgtgatctgtaagtactgagtagtctatggagagcttctagaggcctcttggctagtacaggctcartacagttgtatttactgcacagggctcacagytctaatgggaaacctttagttgtctacaaacaaaataaagaatatcaagtattagctagtgtcagctcaaatatctctttctccacccagttgtataactataacgtagcagggtgctgtaccatcatttgggggatatggaaatatttgtgttttcatgtatgttatataagtaaaatacatgatatgtatttgtgatttatgttatatatggtatgttacatgtactatatatgttacatgtcttgtgctttatttacccatttag

SEQ ID NO: 58407 - DNA, 600 bp, Chicken  19866894315357_3
cagttataagacagtcttaaaatggaatttttagggcttttatcatctcaattgtacatcaatcaagtttgatttccagttaggagtgatggagcctcttggaagcctctgaaacacaaccacagtccacaattggaaacttcagtctgattaccatcatacatttattcatgatagtgtaattaaaagtgatttccatcctgtgatctgtaagtactgagtagtctatggagagcttctagaggcctcttggctagtacaggctcartacagttgtatttactgcacagggctcacagytctaatgggaaacctttagttgtctacaaacaaaataaagaatatcaagtattagctagtgtcagctcaaatatctctttctccacccagttgtataactataacgtagcagggtgctgtaccatcatttgggggatatggaaatatttgtgttttcatgtatgttatataagtaaaatacatgatatgtatttgtgatttatgttatatatggtatgttacatgtactatatatgttacatgtcttgtgctttatttacccatttaggctcctggtcattccctacacttacagaataa

SEQ ID NO: 58408 - DNA, 402 bp, Chicken  19866894315358_1
tttataagttaatagagataatcttacctgcaatatatttattttctactatatacacagtactttacagaatgctacatttgtaaaaacttgaactgtgaagcacaatctaagacacagtaatatttttaagttgacagtgctaacttatacaacgtatgtgtattttcccagtaaataaaaatatatatgtacatttcttaacacttcagtgaaatgaatacaatccaataaaaaaggcagacccttccagtttgattaattcattatgtgaggtattgtaaaggctgatagttatakaaatgctggatattcaggacttaaaaaatattaaattatagttaaaaaaaaaatgatataaacaaattctaaggatcaacttctttagttctatattacaat

SEQ ID NO: 58409 - DNA, 599 bp, Chicken  19866894315360_1
  misc_feature (1)..(247): n is any nucleotide
nnnnnnnnnnnnnnnnnnnnnnnnnnnnnnnnnnnnnnnnnnnnnnnnnnnnnnnnnnnnnnnnnnnnnnnnnnnnnnnnnnnnnnnnnnnnnnnnnnnnnnnnnnnnnnnnnnnnnnnnnnnnnnnnnnnnnnnnnnnnnnnnnnnnnnnnnnnnnnnnnnnnnnnnnnnnnnnnnnnnnnnnnnnnnnnnnnnnnnnnnnnnnnnnnnnnnnnnnnnnnnnnnnnnnnnnnnnnnnnnnnnnnnncactcccttaaaatcatcaacaatcaactgcagaaagtagaccagaaagaagraaaaaagagataaatgatgcatagttggttttcttttgtcccatttctgtcctaagtaacagtgctggattccatcttcaacttgagttagctcagatagctgcaaagcactatgatacaaattggattattatactcacacagggtctatcttcctcacccagaacaagaaccaacgacttcttcctacagacgtgctgagagatctctgtcaataagccttactgtttcactacagcattagccacaggtcttttggcatgtaacttactagcttcacctgacaccctgcatcaact

SEQ ID NO: 58410 - DNA, 600 bp, Chicken  19866894315360_2
aaggacaagccaaagagcatctctgccaagcagaagcgtgaagacagagggatccagtaacattaatccatacccatgtaaactgaacatcttctttgctagttattcaaaaatcattcttagtaacaagttgtcatggcatttaatattagagtgaaattaattccttaagaaacactacagattccttttcatatgtatatattgctttcactgaaagtgctcttacttagtagtgcgcatagcattataaatctaaacttttactgggactaccagaaattcaagccttctgcccasaggactccagtgatccataacttaaaatgtagtctaaacacattccccataggatcttccactgctcccttctcaagtgcctcggccctgcttaaatggccaacatctttcaccccagaggtaaaacagaacctgataatgtctccatttttgattactgaggaacaaaagacccatttcaaggaaattactccaactgagaggcaatggttcaattcttgcgtagttcctccttacagtggaaacccgaatttcatctgtgaactattaaccccatacaggggggggagatcaataagg

SEQ ID NO: 58411 - DNA, 600 bp, Chicken  19866894315361_1
ttacactgactcctgaatcagtacatctatctgctcttaagcaattaaaaacacgttctcttccacacgacacaaaagtttagttgttttgttgtaataaaactataatattttgaattttttacaagtaagaacaagtctcacttctagaatcacacattacttacttaatacaattacttgcttaaccaactttataggactattataaatttaaagaaataataacaacttaccaatcctgctaaaaaagtcaataaaacaatatgaacctagatacaacacacagcatgcagtaartgaattttgttattttgcttggctaatatttcactgaattgtgaacagtgaatatgagtatctctgaagaccacaaatcccatttatgttttctaaaatagacaatttaattttttgtacaccgattccaacagcaaattatatatgtttaaattgtgaacaccaatgatattggaataaattacacactaccaatatagccctcctgtatatcactttaaagttatgctgaattttatcttttcatgtcttttcagaaagtcatttacaaatttgtgttcagagtcattgtagtcaaac

SEQ ID NO: 58412 - DNA, 600 bp, Chicken  19866894315368_1
tgtagaagttattcttttagagctatgtgagtgcttttggattgagtcaaaataaacacaatatggctacataatcatcgtaattgaaagctctttggattagtacttcaggtctgtgttaatcctttgcacttcgcgatattcttgtcagttgcggtgaacactgctttggcttagccctgctgcagctttctacagctttctttttctgtgttcttctaaaactggtgttcaaagtcttatcctgacaataagtttaagcgtatgtggttcgtagagacaggaaggagggttgcagtytgtagaagccttgtttgcagacttcatattagattgactagtttagtagtgtagctcaataccaaggacaaggggttagtgatgctagactcaagttgtgcaatagtccatagtgcagtatcttttatacgtaaatccactgcagtgctttttctgttttgaaagaaaatatgtatttctgtcacatctttatcatcgtttggggaactcagggaattctgtgcattaatttttctaggttttattccctgcatataagtttatctttttagccttgagaaccgccacagttgcctctct

SEQ ID NO: 58413 - DNA, 599 bp, Chicken  19866894315385_1
  misc_feature (1)..(4): n is any nucleotide
nnnnttcagctgttgagctagaaggagtaacttcagggtgcacagatgctgtgctgagaatgccagagctgagctccatcaaatgcacagtgtagtgcagaaaagcccacagagatgctggaccttcagcagcctaagagcagcagtgctggtgagatgcgtgcactgcagcaagcacctgtgggtgtgggctttgaggtatggtgcaggatggctcgctgctggttttgctagtgggaagatggttgttttagtgagaactgcaagtatagggaagggcgggttatcctgcagctgttwtttcagttcaattgccctgataggtttcctgggtctactgattcaaaggtgttttaggttggtaatttagatgcagcaccagttgtagtggtgacaaaattgcacagaaggagtatccaaaattgaggttaaatttggctatcaaaagtagaacctcaggttgcagtgtagccaaaagtagaacctcaggttgcagtgtagctggtaggggatggatggatccgtgtcaggtgactgtgcctgtaaaagtccaaacttcacgtgccagcagctgagcaaatgaaggagaggaatgctta

SEQ ID NO: 58414 - DNA, 600 bp, Chicken  19866894315386_1
gcctcatgccctgtaaaattctcttatttactttacgatctggggtttggaataggatttcaaaaggcagttgccaaaaaggacttttctggacaaagtattaaatggaaaaaacctacaggctaaactcaatcctaaagctgatgtctgcagtagtgttctctgagctgcagacaggagaaattggctctgtaccatgacagagttggataaaagattcctttggccacctcagtctttcttgctttgaaagctgcaagtatcatttgctctgtcactgagtgaagttgaagaagagamagctgatgtactttagcaaacaggaaggcgtctaacaagataattataaaataatgcttaacagtagagttgtttctgaggcaaaatcctggcctgaataaagacaataaaagtaatcccatagattagagaggagaccaagatttcagccacgatgtagtacatttaaaagctaattcagtgcaatccaagaaatcctgttttggataatgagattcaggcctatttcatgttttggatgctatcataatggtaagttacatgtccagggccagggtgagaatgcaggcaactgtcctt

SEQ ID NO: 58415 - DNA, 600 bp, Chicken  19866894315386_2
ggatttgggttaggatgtctgatttgaccagacttctggtgatatccagctgatagctgatgagagcaatgcaactgcatagagaatattaaacagagacaatgtccaggataactgtaacaaacttaaatttgaacggtgtaaagttagaagtcctttcccactgaagtctgtgaagggaatcaaaactggatataatgacttcctacaaaatgcagggcaccgtgggtcagagctgtgagaacataaccactatattttattttcttcttaaggaatgatacaatggtctttcctttraaacgccagtttaatgctcaatgaactaagcaaaacaaaagatarggcagatgtttgaaagagacatccagagggactgagggtatcactaataagcaaaattaagcacagaaccagttttgagatgaaaataattgtgaagtggggaaatacatgtgagtagtactatatatgcttaccctgctcttactcttctctgcatgcctgttcatagacagtgctgaggcaggttactgggtaaaatgaagcccaggtctggacgggaatggtttacctgcacactggtcttgtttttgtccc

SEQ ID NO: 58416 - DNA, 600 bp, Chicken  19866894315386_3
ccagctgatagctgatgagagcaatgcaactgcatagagaatattaaacagagacaatgtccaggataactgtaacaaacttaaatttgaacggtgtaaagttagaagtcctttcccactgaagtctgtgaagggaatcaaaactggatataatgacttcctacaaaatgcagggcaccgtgggtcagagctgtgagaacataaccactatattttattttcttcttaaggaatgatacaatggtctttcctttraaacgccagtttaatgctcaatgaactaagcaaaacaaaagatarggcagatgtttgaaagagacatccagagggactgagggtatcactaataagcaaaattaagcacagaaccagttttgagatgaaaataattgtgaagtggggaaatacatgtgagtagtactatatatgcttaccctgctcttactcttctctgcatgcctgttcatagacagtgctgaggcaggttactgggtaaaatgaagcccaggtctggacgggaatggtttacctgcacactggtcttgtttttgtcccaccttgcctctccccaccctatccaggtggttctgtgttccatgt

SEQ ID NO: 58417 - DNA, 599 bp, Chicken  19866894315392_1
  misc_feature (1)..(23): n is any nucleotide
nnnnnnnnnnnnnnnnnnnnnnngggaaacagctgtttacaagggtggaatagtgattaggacaagggggaacggttttaaactgagatggagaggtttaagttggatattaggaggaggttttccaccccagagggtggtgacgcactgaacaggttgcccaaggaggctgtggatgccccatccctggaggcattcaaggccaggctggatgtggctctgggcagcctgggctgctggttggcgaccctgcacatagcagggggttggaactggatgagcattgtggcccttttcaayccaggccattctgtgatgctatgatttctgtcatgctggggcaggattcgggtcccacatctgaacgcttccagcacacagcactcaccccaatgctctgcatacttatatctccaggaccaccaacacatacacagccctcacagcagagggaaaactattcctgctttaagggttgggccttcagtaaatgcactcaatataccctatgagcagcacagccacgtcctcacaaagtgcttaytgttattatttgaggaatgaaaagaaaggggaaaaagagtgcagagagaaaaccc

SEQ ID NO: 58418 - DNA, 600 bp, Chicken  19866894315392_2
cgaccctgcacatagcagggggttggaactggatgagcattgtggcccttttcaayccaggccattctgtgatgctatgatttctgtcatgctggggcaggattcgggtcccacatctgaacgcttccagcacacagcactcaccccaatgctctgcatacttatatctccaggaccaccaacacatacacagccctcacagcagagggaaaactattcctgctttaagggttgggccttcagtaaatgcactcaatataccctatgagcagcacagccacgtcctcacaaagtgcttaytgttattatttgaggaatgaaaagaaaggggaaaaagagtgcagagagaaaacccatccccagaagtgctcrctttaaatcctgctgccaacactgagggctgcaccgctcctctgctccatcttcattagagataggcacagagaagcaagcatacccagcaaccaacacaaaagtaaatgtgttccttttgctaattgcatgtttactgtaacaattccatcgctgtacacagcacctttattccatgcagccaagctatgcacagcagcaccttaatttgatgcaaaaatgcagtca

SEQ ID NO: 58419 - DNA, 600 bp, Chicken  19866894315392_3
tgctatgatttctgtcatgctggggcaggattcgggtcccacatctgaacgcttccagcacacagcactcaccccaatgctctgcatacttatatctccaggaccaccaacacatacacagccctcacagcagagggaaaactattcctgctttaagggttgggccttcagtaaatgcactcaatataccctatgagcagcacagccacgtcctcacaaagtgcttaytgttattatttgaggaatgaaaagaaaggggaaaaagagtgcagagagaaaacccatccccagaagtgctcrctttaaatcctgctgccaacactgagggctgcaccgctcctctgctccatcttcattagagataggcacagagaagcaagcatacccagcaaccaacacaaaagtaaatgtgttccttttgctaattgcatgtttactgtaacaattccatcgctgtacacagcacctttattccatgcagccaagctatgcacagcagcaccttaatttgatgcaaaaatgcagtcattcatagggacaagccaggaccgtgcatggttcacatggatacctctgtctgagaataacagtgagcttcag

SEQ ID NO: 58420 - DNA, 600 bp, Chicken  19866894315408_1
tactttgcaataaacaaccagatgttaacttaattttgaatcatggaatggcctgggttgaaaagaacatcaaagatcatctagtttcaacccccctaccatacgcagggttgccaacctccagaccaggctgcccagagccacatccagcctggccttgaatgcctccagggatggggcatccacaacctccttgggcaacctgttccagtgcgtcaccaccctctgtgtggaaaacttcctcctaatatataacctaaaccttccctgtctcagtttaaaactattccctcttgtcckatcactatccaccctcataaccagtcataccccctcctgtttatatgctcccttcaagcactggaaggccacaatgaggtctccccagagccttctctggagtatttaaatgctgctaatagtgtgtgcataaattcagcaggtgaagcaagatccagttcttccatgatattcactgaatttatgtttcctaattccctatgatacaaatgtaacgtgcaagatcccagaagtacatttcaccattgtcagagggcaaagtaccaagcaggattattctggaaacaccaagtgctgttc

SEQ ID NO: 58421 - DNA, 600 bp, Chicken  19866894315410_1
tattacattgtatcagtgtaaaggaactgcagggtacaaactaataaagcgtatgaaattagtataatgtttcttcagaccttaatggcagcccactgctttcacacaatcacacaaaattagcagctaaaaggatgtagaattacaataagaggaatacccacgtgaataatgcaaagatcttacaacgtggctgcttttgatacgtcttctaataaccccaagtgtctttagaaaagatagtttccaggacagacactctcacccatcaaacttagtaccaaggggagcgcccacaarcacactagttattctattatttacagaaactccrcttggcacacaagaaagagatgatgttggaataaaatgaagctcacgagtcttcattcttaagatactaaaaacactgtcactaaatcactactaaatcactatttgtgccctcacaagccctcaattagtggaagcatggtacacttctcacagcaccaggcargcaatatttcacaagagagattgtatttactcgcaaactagcatctgtcatcaagaaatgtctggtacagatacaaaatagcactatctcgattacttaaa

SEQ ID NO: 58422 - DNA, 600 bp, Chicken  19866894315410_2
tacaaactaataaagcgtatgaaattagtataatgtttcttcagaccttaatggcagcccactgctttcacacaatcacacaaaattagcagctaaaaggatgtagaattacaataagaggaatacccacgtgaataatgcaaagatcttacaacgtggctgcttttgatacgtcttctaataaccccaagtgtctttagaaaagatagtttccaggacagacactctcacccatcaaacttagtaccaaggggagcgcccacaarcacactagttattctattatttacagaaactccrcttggcacacaagaaagagatgatgttggaataaaatgaagctcacgagtcttcattcttaagatactaaaaacactgtcactaaatcactactaaatcactatttgtgccctcacaagccctcaattagtggaagcatggtacacttctcacagcaccaggcargcaatatttcacaagagagattgtatttactcgcaaactagcatctgtcatcaagaaatgtctggtacagatacaaaatagcactatctcgattacttaaattacagccagactggtaggacaccttgacttatc

SEQ ID NO: 58423 - DNA, 600 bp, Chicken  19866894315410_3
ttgatacgtcttctaataaccccaagtgtctttagaaaagatagtttccaggacagacactctcacccatcaaacttagtaccaaggggagcgcccacaarcacactagttattctattatttacagaaactccrcttggcacacaagaaagagatgatgttggaataaaatgaagctcacgagtcttcattcttaagatactaaaaacactgtcactaaatcactactaaatcactatttgtgccctcacaagccctcaattagtggaagcatggtacacttctcacagcaccaggcargcaatatttcacaagagagattgtatttactcgcaaactagcatctgtcatcaagaaatgtctggtacagatacaaaatagcactatctcgattacttaaattacagccagactggtaggacaccttgacttatccgaagytggaagggactcacagtgatcacggtctccaacccagtgctgcacacagaaccacccaaaaccaaaccccacacctgagagctgtgaccaaacacygcttgaactccagcagctcagtgccacgatcctggggagcctgttctggggcccaagttccct

SEQ ID NO: 58424 - DNA, 521 bp, Chicken  19866894315410_4
acacaagaaagagatgatgttggaataaaatgaagctcacgagtcttcattcttaagatactaaaaacactgtcactaaatcactactaaatcactatttgtgccctcacaagccctcaattagtggaagcatggtacacttctcacagcaccaggcargcaatatttcacaagagagattgtatttactcgcaaactagcatctgtcatcaagaaatgtctggtacagatacaaaatagcactatctcgattacttaaattacagccagactggtaggacaccttgacttatccgaagytggaagggactcacagtgatcacggtctccaacccagtgctgcacacagaaccacccaaaaccaaaccccacacctgagagctgtgaccaaacacygcttgaactccagcagctcagtgccacgatcctggggagcctgttctggggcccaagttccctctggagttgttcttaacaacttattaacaccaaccaccttaaccaacccactacctagctga

SEQ ID NO: 58425 - DNA, 425 bp, Chicken  19866894315410_5
atttgtgccctcacaagccctcaattagtggaagcatggtacacttctcacagcaccaggcargcaatatttcacaagagagattgtatttactcgcaaactagcatctgtcatcaagaaatgtctggtacagatacaaaatagcactatctcgattacttaaattacagccagactggtaggacaccttgacttatccgaagytggaagggactcacagtgatcacggtctccaacccagtgctgcacacagaaccacccaaaaccaaaccccacacctgagagctgtgaccaaacacygcttgaactccagcagctcagtgccacgatcctggggagcctgttctggggcccaagttccctctggagttgttcttaacaacttattaacaccaaccaccttaaccaacccactacctagctga

SEQ ID NO: 58426 - DNA, 505 bp, Chicken  19866894315416_1
ttgtatgtcagtgctgccagactaaagatgctgctgtccaggaaaatttaattgctgaagaatcttgtttgtttgtttgatcagaaggatatctagaacaaattcaatttgcaatcagaattgagggaaaagtgacaacaatagcaggcttgaatctgaaatattgtgtacttcgtatggatttgagtgattatctattgccagaaaaagcatatttctgcattttgcgtactgcttattgttgtgtctttagctatgctttaagttcttgcagttctgtttttaattatggaaatctayttcaaatcagaacgctagtaaattaataggaacttaaagtggaaattctgaatattttgaaagatgattaaatatatctgtttcccagcaggtaagacgacgaataaaaagacagcccatgaaaagggaagtcctgatgcttggaaagagcaatgcaagcagttgttaaacctgatttacgaaagagaggactctgagcctttta

SEQ ID NO: 58427 - DNA, 531 bp, Chicken  19866894315417_1
caaaataagtttaattactgtttcaaaacatttcagaagcagtcaagacaatacaaagaaaggaaaattcagaacacactaactagctctaagtacagtactctagaacagcatcacatctttcataggatttataaacactagtttaaaaaacatctaacaccacgtttgtgaaaataaatatagaagtgtatccccttggtaataatattttttaatgctcactcgaggagaggatgaaacttaggtctatttattgctgttttcatcctagtagtgttgataagttctaagtgatcratttgattactgacacccacaaatgaaatggaaaagaagtacaccgacaaacaaagcatgagttgtttaaaacaaactaaaaccaaactggaataaatatctatatttatggaaaggggtatggaacatgagaacggaaaacaggaattctgcatgaaatgaagaaaccaaaagaaactgaggaacaaagcaagttctgttaaaaattaagaagcagtacaagagaaacat

SEQ ID NO: 58428 - DNA, 599 bp, Chicken  19866894315419_1
  misc_feature (1)..(62): n is any nucleotide
nnnnnnnnnnnnnnnnnnnnnnnnnnnnnnnnnnnnnnnnnnnnnnnnnnnnnnnnnnnnnnggaaaatattctgtgtgcacgtctgcatatttcctaaaaacagctgtacatccccgctgctttctgtatgtacatcaaccagtgccctactctgaagaggtttcagttgataaatagcctcccaaaaagttgaacaacttaattgattctctatcctaagagtctaaaatgtattcttttgcgtgtaaaaataatgtaggaatgacatttaattttgctctttgtgctaaggatttgrtgtwgctagcacagtgactcaagtttccttctctaacagagttaggagaaggctgggtgttatcgtgaaatccaggttcctgacaatcctttctcattttggggctgtcctttcaaaaagatgtagggccagattcattggtaccctctggctgttttgtgcagttctgctgacacacagcagccataaacctaagttaactggccagttacagctgctctgtgtcaccaaagtgtatctgagaatctggcccatgatctggtgtaagtccttttaggaagaagctaatatttatttct

SEQ ID NO: 58429 - DNA, 599 bp, Chicken  19866894315419_2
  misc_feature (1)..(58): n is any nucleotide
nnnnnnnnnnnnnnnnnnnnnnnnnnnnnnnnnnnnnnnnnnnnnnnnnnnnnnnnnnggaaaatattctgtgtgcacgtctgcatatttcctaaaaacagctgtacatccccgctgctttctgtatgtacatcaaccagtgccctactctgaagaggtttcagttgataaatagcctcccaaaaagttgaacaacttaattgattctctatcctaagagtctaaaatgtattcttttgcgtgtaaaaataatgtaggaatgacatttaattttgctctttgtgctaaggatttgrtgtwgctagcacagtgactcaagtttccttctctaacagagttaggagaaggctgggtgttatcgtgaaatccaggttcctgacaatcctttctcattttggggctgtcctttcaaaaagatgtagggccagattcattggtaccctctggctgttttgtgcagttctgctgacacacagcagccataaacctaagttaactggccagttacagctgctctgtgtcaccaaagtgtatctgagaatctggcccatgatctggtgtaagtccttttaggaagaagctaatatttatttctgttc

SEQ ID NO: 58430 - DNA, 600 bp, Chicken  19866894315421_1
gagcgtgcagtgctgctcctgcccctgggtggaggaggaccgcagccggcagcggatggctgcggtttgtttggtagggatgggactgagtgctgcacagcctcctataacacccatagcaacatctgtatttccttcgcagccaagatgttttagagggtccaaggccgcaagttccctggccagtctgttcattcggtgctgttacaaattcttcccagcattaaaatactcctcctgacagagggttaactgttgcaagagcacacgcagaaatgtgactgatccattgcatcgctmcatcgtgcccgttctgtttgggcttcggaggtctcagcgtgtgctcaaatgctgtcctgcaaagaaaggaagacctcgggacaggaatcgaagccggtgttggttgttctttatttcaaacaggcatacgctcagggctgggttctggcagtaccttcctcctggtttgggtcctgttaataactggacagagcgctttgtccttttgggtcataatgctgaaacctctgaaaggctttacaaactcttatgaaaaaatgctgcaggatttaatgaggtgtaataactgttttatagact

SEQ ID NO: 58431 - DNA, 600 bp, Chicken  19866894315421_2
gcgtgtgctcaaatgctgtcctgcaaagaaaggaagacctcgggacaggaatcgaagccggtgttggttgttctttatttcaaacaggcatacgctcagggctgggttctggcagtaccttcctcctggtttgggtcctgttaataactggacagagcgctttgtccttttgggtcataatgctgaaacctctgaaaggctttacaaactcttatgaaaaaatgctgcaggatttaatgaggtgtaataactgttttatagacttctggaactttcctgtaaaattgttgtcatcttagrgaaagcttcatctacccatgtgtacgtgtgtgtgtgtgtataaaaaagccttgtttttcctttgattgattcaggattattgcagtaggaggtgatttattttttaaggagtctgattggtttctggcttttctatgcagtttttcaatatayatatatatttttttgtaagaaatactgtrtgtgtcttacagrgatggggactttggaggctttgtctaagcctgagtcactgaagaccttgggttcctgctgccaagccctggctgctggtgctgacaacggtaagcctccccgagc

SEQ ID NO: 58432 - DNA, 600 bp, Chicken  19866894315421_3
agagcgctttgtccttttgggtcataatgctgaaacctctgaaaggctttacaaactcttatgaaaaaatgctgcaggatttaatgaggtgtaataactgttttatagacttctggaactttcctgtaaaattgttgtcatcttagrgaaagcttcatctacccatgtgtacgtgtgtgtgtgtgtataaaaaagccttgtttttcctttgattgattcaggattattgcagtaggaggtgatttattttttaaggagtctgattggtttctggcttttctatgcagtttttcaatatayatatatatttttttgtaagaaatactgtrtgtgtcttacagrgatggggactttggaggctttgtctaagcctgagtcactgaagaccttgggttcctgctgccaagccctggctgctggtgctgacaacggtaagcctccccgagcctccccaagtgcccctttctcttttacatctacaaagatgcaaactgaagattgattggacgttaagaccagaacctttcatttcatgaatgtgtatacacatatacatatttatatatatatatataatgtttaatatttggccacttaata

SEQ ID NO: 58433 - DNA, 600 bp, Chicken  19866894315421_4
ttgtccttttgggtcataatgctgaaacctctgaaaggctttacaaactcttatgaaaaaatgctgcaggatttaatgaggtgtaataactgttttatagacttctggaactttcctgtaaaattgttgtcatcttagrgaaagcttcatctacccatgtgtacgtgtgtgtgtgtgtataaaaaagccttgtttttcctttgattgattcaggattattgcagtaggaggtgatttattttttaaggagtctgattggtttctggcttttctatgcagtttttcaatatayatatatayttttttgtaagaaatactgtrtgtgtcttacagrgatggggactttggaggctttgtctaagcctgagtcactgaagaccttgggttcctgctgccaagccctggctgctggtgctgacaacggtaagcctccccgagcctccccaagtgcccctttctcttttacatctacaaagatgcaaactgaagattgattggacgttaagaccagaacctttcatttcatgaatgtgtatacacatatacatatttatatatatatatataatgtttaatatttggccacttaatatattcatc

SEQ ID NO: 58434 - DNA, 600 bp, Chicken  19866894315421_5
ctgaaacctctgaaaggctttacaaactcttatgaaaaaatgctgcaggatttaatgaggtgtaataactgttttatagacttctggaactttcctgtaaaattgttgtcatcttagrgaaagcttcatctacccatgtgtacgtgtgtgtgtgtgtataaaaaagccttgtttttcctttgattgattcaggattattgcagtaggaggtgatttattttttaaggagtctgattggtttctggcttttctatgcagtttttcaatatayatatatatttttttgtaagaaatactgtrtgtgtcttacagrgatggggactttggaggctttgtctaagcctgagtcactgaagaccttgggttcctgctgccaagccctggctgctggtgctgacaacggtaagcctccccgagcctccccaagtgcccctttctcttttacatctacaaagatgcaaactgaagattgattggacgttaagaccagaacctttcatttcatgaatgtgtatacacatatacatatttatatatatatatataatgtttaatatttggccacttaatatattcatctggtattttcattctgttact

SEQ ID NO: 58435 - DNA, 600 bp, Chicken  19866894315421_6
aaggctttacaaactcttatgaaaaaatgctgcaggatttaatgaggtgtaataactgttttatagacttctggaactttcctgtaaaattgttgtcatcttagrgaaagcttcatctacccatgtgtacgtgtgtgtgtgtgtataaaaaagccttgtttttcctttgattgattcaggattattgcagtaggaggtgatttattttttaaggagtctgattggtttctggcttttctatgcagtttttcaatatayatatatatttttttgtaagaaatactgtrtgtgtcttacagrgatggggactttggaggctttgtctaagcctgagtcactgaagaccttgggttcctgctgccaagccctggctgctggtgctgacaacggtaagcctccccgagcctccccaagtgcccctttctcttttacatctacaaagatgcaaactgaagattgattggacgttaagaccagaacctttcatttcatgaatgtgtatacacatatacatatttatatatatatatataatgtttaatatttggccacttaatatattcatctggtattttcattctgttactctttactaatgca

SEQ ID NO: 58436 - DNA, 600 bp, Chicken  19866894315424_1
ggttttcaatgcatctctaaacatgggctggtggaccttgctagcctttgtatgatttttcttacaagaaactccagtagatgtttggtcatatcccctacaaggccatgcttctgaggtcttcactttccatgggaattaatgcttggacagggaccaattagagctgacaatgtttcaaaaacacagtctaatttctcaggagtctataatcagttttcaaatctcaggtaaacaaaacttcatctataaagaaaggacaagctcagaggagttcagagggtgcctcaaacagcacakttacctcctcctgttgaaaagtttacatctgaagtgatagaaacctgagcatcattatcttgcagatgatctgggcagattttaataaataaataaaaagacatgtattttctcctaccaattaggatcaatttttctggactcaggactaacttacagtaaggaaactctcgagttttaaatctgagacaaggtagtttagaaataactcaatatcttaaaacaaacaaacaaataaaaacatttrtaatgtggatgtgcaaaacaaataaacaaacaaacaaaaagcagatcctcctg

SEQ ID NO: 58437 - DNA, 600 bp, Chicken  19866894315424_2
tataaagaaaggacaagctcagaggagttcagagggtgcctcaaacagcacakttacctcctcctgttgaaaagtttacatctgaagtgatagaaacctgagcatcattatcttgcagatgatctgggcagattttaataaataaataaaaagacatgtattttctcctaccaattaggatcaatttttctggactcaggactaacttacagtaaggaaactctcgagttttaaatctgagacaaggtagtttagaaataactcaatatcttaaaacaaacaaacaaataaaaacatttrtaatgtggatgtgcaaaacaaataaacaaacaaacaaaaagcagatcctcctgatatttgtcctgataatctcaaaaattgtttttttcttttgattaaagagttgtggagttgcacaagtgtagctggggagagaactcagtgactaaatatgctattatttatgaataacaagtatttcaggtcttactatttttactagtacatatatgtgtttgtgtgtaattatatatttcaaggatcaagagctaagtgtggttaaacatttatctgcataaatgccaatgaagttttaattct

SEQ ID NO: 58438 - DNA, 600 bp, Chicken  19866894315438_1
acaggaaccactactacaagcgagacccaagtttatgtccactcagaatttccacctcagttaaatcatgccaacacatgtagatgttgaagcagcaaaagaactgttcttcaagagaagagctggagactctgatcttcttccaacatacgcatgtactatcaaaattcttaatgtaagactactgagaactattcacatgctagggacaaatactttttgtctcccacctttccctcctaggaggctgacgcttcttcctcagcgtggtgcttgctgccttgcctcccatttcttgtyttcacatttggttgttaggaagtttatctatccagagaccagtgaagcgctgaagttttaaccaactgaaaacactgcagccctgagccaagttacagcttttctattagagaaactggtttcttccaagtgattctgcactggtcaagtgttagcagaggcttctttgtttcatttctaatgtgaagctttttggcatccgggtcctcctctctgaagtatttactttttgcagttgtattttacttagatgattcaatgtaaactgacaaattccatattcagtccctatttgtattc

SEQ ID NO: 58439 - DNA, 600 bp, Chicken  19866894315441_1
aggagcttttgcagaaaccaagccaaggcttgtgcacagcatcactcccatatccagacttgaaagactccagatcacacacagggacacgtgctgagggaagatgggagctcctggcacagagcagcacctgggaagaatcagacaggcttctcactgcctcttctacatggctgtgaattgtgttctgaagtgccatatgcagctctctgtccctcaggggcactgggcaccaatgtcagaagcagcactaaaccagcgctgtaagagttacaataagatagacatatatatacacaytcactgtacgtatatgtgtgtcccttgtaaacttggcaggactctccttggtaaaaagtaaattaaaagtgcctgtatcattaaaaaaatatgcatgtgttaaagaaataagaagcatgggcaccagagaagcctgttgccttcagaaaacacttatcagcatctttgtcaggaggaaaccttttttctcttttttgataaactaccaaagaagatgggatgcagaaataaatgatgaatgaaaagccttaattaaatacaaaccaagagggacttggggcattgtgctttaattcagtc

SEQ ID NO: 58440 - DNA, 600 bp, Chicken  19866894315441_2
tgggcaccagagaagcctgttgccttcagaaaacacttatcagcatctttgtcaggaggaaaccttttttctcttttttgataaactaccaaagaagatgggatgcagaaataaatgatgaatgaaaagccttaattaaatacaaaccaagagggacttggggcattgtgctttaattcagtcctctgacagctcttcataagcctaaggacagcagctcacattttgtaatgcaaatgagctgctacaccagcaaccttcactcttcaacagaagagatgggagagttgaaagctttgrgaaaaaacacctccaaggggccaagtgggaagagkaatgatgtggtcagcagtttccccaggactcaggagtcccatgagcatcctggccagcccagccagggtaggggggcccacagagacaagggcagaggaaatttggccattcctgcattatggaagcatagggcatgggaaaaaacactgatgagatgggctttgtgtgtctgccttcrcgtgtcagaagacaagtcctgcctgctggctgggtccgactggaaatagggttgcatggctctgagcacattggttgtgggtacag

SEQ ID NO: 58441 - DNA, 600 bp, Chicken  19866894315441_3
cttatcagcatctttgtcaggaggaaaccttttttctcttttttgataaactaccaaagaagatgggatgcagaaataaatgatgaatgaaaagccttaattaaatacaaaccaagagggacttggggcattgtgctttaattcagtcctctgacagctcttcataagcctaaggacagcagctcacattttgtaatgcaaatgagctgctacaccagcaaccttcactcttcaacagaagagatgggagagttgaaagctttgrgaaaaaacacctccaaggggccaagtgggaagagkaatgatgtggtcagcagtttccccaggactcaggagtcccatgagcatcctggccagcccagccagggtaggggggcccacagagacaagggcagaggaaatttggccattcctgcattatggaagcatagggcatgggaaaaaacactgatgagatgggctttgtgtgtctgccttcrcgtgtcagaagacaagtcctgcctgctggctgggtccgactggaaatagggttgcatggctctgagcacattggttgtgggtacagctgtcagagcagcgcgagctggggtgaaatgttgg

SEQ ID NO: 58442 - DNA, 600 bp, Chicken  19866894315441_4
cagctcacattttgtaatgcaaatgagctgctacaccagcaaccttcactcttcaacagaagagatgggagagttgaaagctttgrgaaaaaacacctccaaggggccaagtgggaagagkaatgatgtggtcagcagtttccccaggactcaggagtcccatgagcatcctggccagcccagccagggtaggggggcccacagagacaagggcagaggaaatttggccattcctgcattatggaagcatagggcatgggaaaaaacactgatgagatgggctttgtgtgtctgccttcrcgtgtcagaagacaagtcctgcctgctggctgggtccgactggaaatagggttgcatggctctgagcacattggttgtgggtacagctgtcagagcagcgcgagctggggtgaaatgttgggagagtcctaacaggagggggctacatgggtttagggggacaaaacccttaagaatggtgggaaatgtttttccaaacaatttcagaaccttcataaatgccacctaaaacactgagctgatagactggttgacttggagaagagctgctccttgcacctgagaaggtggaggcaaaag

SEQ ID NO: 58443 - DNA, 600 bp, Chicken  19866894315445_1
ggtgtgctttctcagtggtagtgtgtgtggtgggatcctgtgagcctgcatctgtgaggcagcgtggcatgcagctggcacgtggttgttttcagtgagctatcttacagcagttcaattaatctttcatgtgataatcaaaattccccccactcttggactgctgcatctgccctgttattccagcagtacttcttgtcctgctgttctgcactcctggttggcaaatatgctttcagttttgttttgttggttgtgaataatgacagaaaggaaaaagtgatagaaagcatttacagyctgagtagttaatgaggtgaagtgagatcttgaagctgtactcagcaaactggaagtgtgaccattgccttttgtagaataaagaagcacagtgttgtagtccggagcctttgagatgctgttcaggaaaatgtgagtttacaaaataaataatattagaaataaatgatgtatattcagataacacaagcattttgtacaacattttgatgagatcataagatcagttagatgattcagggttgttgtctttttgctttgtttcagtagtaacttggctaatttgctttacctcaaagc

SEQ ID NO: 58444 - DNA, 600 bp, Chicken  19866894315455_1
ctactaattttgtagaagttaacctaaattagggccaaagctgatgatgttctgtttactaagtgttcttagatgtgagagaactccttaaattggcagaagtttttagtatctcaagcctcctctcttctccctccaaactgataaggaacaaaagacaaccttatacaggttccacacccaaacaaaatttatcatagtttgactgacaggtatatgccaagaatgtctctttattctcttcattcagaaattgtttactgtttagtggttcaatgactgactgtgaacaataatgaraatattcttttctgactcaaaaattgggcactctggcccagctgtgccccgcaggctagtagaaacctgaattctaaggtggygtctgttactcccaagacaagatacttctaaacgtaatgtcaaggcattgaaagttcccagcattggacttttatgacttaaatatataagtccaccttttttctcatgacttttgtctaaaatttgtccttctagtctttagaagaactttatcccacttacctgaaaaacagaacctatcttatgagattttcatgcgtaacttgaagcaattta

SEQ ID NO: 58445 - DNA, 600 bp, Chicken  19866894315455_2
ctccttaaattggcagaagtttttagtatctcaagcctcctctcttctccctccaaactgataaggaacaaaagacaaccttatacaggttccacacccaaacaaaatttatcatagtttgactgacaggtatatgccaagaatgtctctttattctcttcattcagaaattgtttactgtttagtggttcaatgactgactgtgaacaataatgaraatattcttttctgactcaaaaattgggcactctggcccagctgtgccccgcaggctagtagaaacctgaattctaaggtggygtctgttactcccaagacaagatacttctaaacgtaatgtcaaggcattgaaagttcccagcattggacttttatgacttaaatatataagtccaccttttttctcatgacttttgtctaaaatttgtccttctagtctttagaagaactttatcccacttacctgaaaaacagaacctatcttatgagattttcatgcgtaacttgaagcaatttacatagaaatgtcaaggtaaagcttgcaattgctttaccttgggggctcacatatggtaaacaagatacaataggagttgggtt

SEQ ID NO: 58446 - DNA, 600 bp, Chicken  19866894315467_1
ataattagataactccaatagcctgctcctaccttggggcttgctactgaagaactgaatgatagaaattgctccactgaatggctttcctccttacctgctgcaagcagagtttgagggctggcgttggcaggcaggagggatgcttgcaagatctgggacatgacacctgtggggagggaagcacagtgctggcttagaaaagcacaacatggaggatcatcatggattttagtcgagaattgggtgagtggggtgaagggaggcttgagcatccccccactcactggtgcttccttyagtgcttgcattctgtgccttcaggggatgatgccagagttcctattctagccctggggagtatccactgccccagagcaccccattgcttacaattcagaagccaamtagatgagttgtccccacagttctccagcagcagaccaactgtgcmctcctaaaggagagcctggctggatgggtctgctgggatgtatttattttgcaaaactttctaaaaaaaacctcatttctttttatctgttcagaggcagaaatagttttactgactctcttttatctgtcggataggtattcaac

SEQ ID NO: 58447 - DNA, 600 bp, Chicken  19866894315467_2
agagtttgagggctggcgttggcaggcaggagggatgcttgcaagatctgggacatgacacctgtggggagggaagcacagtgctggcttagaaaagcacaacatggaggatcatcatggattttagtcgagaattgggtgagtggggtgaagggaggcttgagcatccccccactcactggtgcttccttyagtgcttgcattctgtgccttcaggggatgatgccagagttcctattctagccctggggagtatccactgccccagagcaccccattgcttacaattcagaagccaamtagatgagttgtccccacagttctccagcagcagaccaactgtgcmctcctaaaggagagcctggctggatgggtctgctgggatgtatttattttgcaaaactttctaaaaaaaacctcatttctttttatctgttcagaggcagaaatagttttactgactctcttttatctgtcggataggtattcaactcaatgctgccataataaccatttagtcccacaatagctcacaaggatacttaagcagaattctctgtgcaacctagttttttattatgttgggtactgctcatgttg

SEQ ID NO: 58448 - DNA, 600 bp, Chicken  19866894315467_3
tctgggacatgacacctgtggggagggaagcacagtgctggcttagaaaagcacaacatggaggatcatcatggattttagtcgagaattgggtgagtggggtgaagggaggcttgagcatccccccactcactggtgcttccttyagtgcttgcattctgtgccttcaggggatgatgccagagttcctattctagccctggggagtatccactgccccagagcaccccattgcttacaattcagaagccaamtagatgagttgtccccacagttctccagcagcagaccaactgtgcmctcctaaaggagagcctggctggatgggtctgctgggatgtatttattttgcaaaactttctaaaaaaaacctcatttctttttatctgttcagaggcagaaatagttttactgactctcttttatctgtcggataggtattcaactcaatgctgccataataaccatttagtcccacaatagctcacaaggatacttaagcagaattctctgtgcaacctagttttttattatgttgggtactgctcatgttgcatacaacacattcccataaaacttgcattttgtatttacagagaa

SEQ ID NO: 58449 - DNA, 555 bp, Chicken  19866894315467_4
acagtgggcagctattattattattatcattactacattgagaaggaaattgatgcattcagaggtttaattgattcgtgcatattcatgtaggaagtcagtggtagagtcacgactggactggattattatgcacttccacgcataataattgtgctgcaacttgtatagagagcagactaccttgctgtaatgtgtgtgggcatttgaagctgagggatgtcatgggagaggaaatgaaaatgacaccttcatcaggagcagatacggatggcatttttaattcttctaggaatagtycatctgtaatacagtaattcagcyaaacctaacgagarcagaaaaaaaaaawcatatattcttactttaatttccacaatatcaaaggttttcgtctatttgatgtaattttaagctacctgtgttaaagcataataaatggaagcccagctttgctctttctgcactcttcctcagatctccctatgttttttcctcttcccctttcacaacagcatcttccttcctaaggctggggttagataccatccgcat

SEQ ID NO: 58450 - DNA, 531 bp, Chicken  19866894315467_5
tatcattactacattgagaaggaaattgatgcattcagaggtttaattgattcgtgcatattcatgtaggaagtcagtggtagagtcacgactggactggattattatgcacttccacgcataataattgtgctgcaacttgtatagagagcagactaccttgctgtaatgtgtgtgggcatttgaagctgagggatgtcatgggagaggaaatgaaaatgacaccttcatcaggagcagatacggatggcatttttaattcttctaggaatagtycatctgtaatacagtaattcagcyaaacctaacgagarcagaaaaaaaaaawcatatattcttactttaatttccacaatatcaaaggttttcgtctatttgatgtaattttaagctacctgtgttaaagcataataaatggaagcccagctttgctctttctgcactcttcctcagatctccctatgttttttcctcttcccctttcacaacagcatcttccttcctaaggctggggttagataccatccgcat

SEQ ID NO: 58451 - DNA, 517 bp, Chicken  19866894315467_6
tgagaaggaaattgatgcattcagaggtttaattgattcgtgcatattcatgtaggaagtcagtggtagagtcacgactggactggattattatgcacttccacgcataataattgtgctgcaacttgtatagagagcagactaccttgctgtaatgtgtgtgggcatttgaagctgagggatgtcatgggagaggaaatgaaaatgacaccttcatcaggagcagatacggatggcatttttaattcttctaggaatagtycatctgtaatacagtaattcagcyaaacctaacgagarcagaaaaaaaaaawcatatattcttactttaatttccacaatatcaaaggttttcgtctatttgatgtaattttaagctacctgtgttaaagcataataaatggaagcccagctttgctctttctgcactcttcctcagatctccctatgttttttcctcttcccctttcacaacagcatcttccttcctaaggctggggttagataccatccgcat

SEQ ID NO: 58452 - DNA, 503 bp, Chicken  19866894315467_7
atgcattcagaggtttaattgattcgtgcatattcatgtaggaagtcagtggtagagtcacgactggactggattattatgcacttccacgcataataattgtgctgcaacttgtatagagagcagactaccttgctgtaatgtgtgtgggcatttgaagctgagggatgtcatgggagaggaaatgaaaatgacaccttcatcaggagcagatacggatggcatttttaattcttctaggaatagtycatctgtaatacagtaattcagcyaaacctaacgagarcagaaaaaaaaaawcatatattcttactttaatttccacaatatcaaaggttttcgtctatttgatgtaattttaagctacctgtgttaaagcataataaatggaagcccagctttgctctttctgcactcttcctcagatctccctatgttttttcctcttcccctttcacaacagcatcttccttcctaaggctggggttagataccatccgcat

SEQ ID NO: 58453 - DNA, 600 bp, Chicken  19866894315477_1
ttccagtttattggatgcattcctggtagtagttgtgcatcaagagaggtattcttgaactttgtgctggatatgctatctttatcgaatacctctgctcatgggaaactgagtctgtagtaatcaacctgagaacgttagccacacagtcttgtctagctttcatgctggttttgcttctttgttaaatgaagctgcctgtgcatcttaacgatatatcttgaatttgggccatatctggcctgatgtgtatcagtttaggtttgtcatgtttccataaagtatccctgcatcttcatrcttatggcaaactgatactgaaacaatgagttggtttatacctggagatactggttctcagaatttcaagatatacttaaattgttgtgccactgtctgacaaacaggtgtaaaaaaaaagaaaaacaaaataagctcatatttgttgggatttgatacaagtgtcttcctaactacactgccaactgtagtgtcaggcagaatgtattattaagccctttaatattaacagacactgtgcctatgctcaaatgttatttggctgaaacattgtaaataaatattataagatcacagtgt

SEQ ID NO: 58454 - DNA, 600 bp, Chicken  19866894315478_1
atatcttgcttcatattatatggtcatagaatcacagaatggcttggttcggaatggacctcaaaagatcatctagtacctatctcccttccaatctcacccactgtacttcctagctaccattcacagttttcctatggtaagtctcggtggacttcagtggaggaatgtattatttcaaatagatcactctgagtaatgtcatttgaggaagcaggatgatgtaaaatcaagataaatagcatggtctatctataacaaactttgattaaactagcacacttctctcatgcaaagtartggtcaaaataattatacaagtctttccatatttttccagaaatgttytaagtaaaggactaagtgacccattaaattattttacctgctccttcccactggtaaaaaaaaaaaagtgcttcccaatgttatggacaatgtgttcatattatgtacaagacttaaacatcttttcagtccaagatgtactgtccttagtgtgtttatcctgtaaaatcctgcttgtttttttcatgaaattttgtacattgacaagctatagggacaataggtccttgggaactcagggaaagatttcca

SEQ ID NO: 58455 - DNA, 600 bp, Chicken  19866894315478_2
tcggaatggacctcaaaagatcatctagtacctatctcccttccaatctcacccactgtacttcctagctaccattcacagttttcctatggtaagtctcggtggacttcagtggaggaatgtattatttcaaatagatcactctgagtaatgtcatttgaggaagcaggatgatgtaaaatcaagataaatagcatggtctatctataacaaactttgattaaactagcacacttctctcatgcaaagtartggtcaaaataattatacaagtctttccatatttttccagaaatgttytaagtaaaggactaagtgacccattaaattattttacctgctccttcccactggtaaaaaaaaaaaagtgcttcccaatgttatggacaatgtgttcatattatgtacaagacttaaacatcttttcagtccaagatgtactgtccttagtgtgtttatcctgtaaaatcctgcttgtttttttcatgaaattttgtacattgacaagctatagggacaataggtccttgggaactcagggaaagatttccagcctcaataaggagtttccatttactacaacatgtttttgcatcacaa

SEQ ID NO: 58456 - DNA, 599 bp, Chicken  19866894315484_1
  misc_feature (1)..(14): n is any nucleotide
nnnnnnnnnnnnnnaaaagctagataaaagaaaaagaagataatgccctaaaaaagaaagctgtatcaaagataaaaagccctttctatgctgatgtttactaaccagcaactcctaccagagatggggaagatgacattctaaaatactaagatctaggggcagagtcagtcccaagtcagttagccacgatccctttatccctttaatgtaaaagggacaaaatcatgggcaagaacaaggaggagaaaaaataaaataaaataaaggaaacaaaaaaatgccatggattaagattgyatgaatgaatgattacagtgtggaatctgtattcccaactgaaagtctttttccctatcgaatgtcagaataactgtaagcttttgaaatgccaaaatcttcgacagatatcataaacatttacttaattgattcaatatttcatatgtcaaaacatatttcatgacagttaactgaaacattctctgtggtcaatatatattcaaacctctcctccccagaatatcagggcctatgagaatagagctttagagattcatttcaagcaacttccatccaaaagattattagtcctattt

SEQ ID NO: 58457 - DNA, 600 bp, Chicken  19866894315490_1
tgactcatccacactttaggcaaactctagttcaaggggaaaatgaaatgacagcccctccccccccctcaaaaaaaaaaaggaattacgaagttaaacaggaagtgatattgaatagtcaacaggccttagaagtagcaaactttagatccacaagaaagcaacaataggctgagagattaattataccagattccccgtctatcctgcacaccagtagaacaccagaccccttctcacaggaacacagactatctcagttcgcatgagaagaggctggctcatgacacaggcatcacwtacagctcctaatcctgagcagcttcaccaatgtacatgtgagcccaggtacaaacacttggctctgcaccaaaaacctgctcgcttgaaaaacaattgtgtcatggtctggcatttcctttcccttctgctgttatccctcgtgttgagtcactgaggtcacagatgattgctttaaagggccacacactgtgtgacaaaggagtgggacaagcctttgtcatccttcccttaccgttcatgaccatgactttcggtcagatgaaacaatactgctgtgtccctgccagccgtgcagtg

SEQ ID NO: 58458 - DNA, 600 bp, Chicken  19866894315490_2
ctcgtgttgagtcactgaggtcacagatgattgctttaaagggccacacactgtgtgacaaaggagtgggacaagcctttgtcatccttcccttaccgttcatgaccatgactttcggtcagatgaaacaatactgctgtgtccctgccagccgtgcagtgacagttcgtgcacttcactccctgttcccggtgtcccgagggcagcagttcaagcagtccattcaccccaagcttctgggcagatgctgacagtgcctggggtggccactgtgcagcgttatgcagcatgtagtgctgytctacataatagacatcaattattaaactcagggttcaggtatatgaatctacctactgttgcataaacaaactctcaagtgatatagaggaattcatgccagatttcactggcgcaaacaagactgacggcagacgaatctcagagtaatgcagtacttgtttcatgtttcacgtatcaatgcattcatctgcaatccatgttttaacatctctgtgatgacctaatgaaagcgcagttgctggtgggctaggaagtgtttccatggaagattggctttgcaacaaaaaagcataatag

SEQ ID NO: 58459 - DNA, 600 bp, Chicken  19866894315494_1
agagggctctggggaggactaagactaatctaagactacatatataaattaatgaacagcagcccttttgagcactaaaatgtgcatcaaaattaactttcagatgaacaagtcaccataggtgtgctccaaactttggtgtagtattcacacaagttggaaaagatatgccacactggaaagggaaagaaaacgaagcctaaaaccacaaatcatattaagaagattctttcttctccgactcccaagctgaaaaatcacaacatcaaagactcgtcctatatcaccatttttgttgcwtacaatcagtagatcagtcagaccaactgaattgctctgttgtaaaagttaaacaacttaccacagattgactgcaaggcatatgcatacacacaatatcttctttaaatagrgaaaaaagcccaccttgctgtagggcatctattgtcacacttctccggtgtgaagctatttggaactgcaagcatattctataaygggcaaagatatcagctgataactgcaaccaatgcaacactgatgtgagtatctcaactaaactgaaggacctctgcaggaacatcaatgcgtaatggtctc

SEQ ID NO: 58460 - DNA, 535 bp, Chicken  19866894315494_2
caccataggtgtgctccaaactttggtgtagtattcacacaagttggaaaagatatgccacactggaaagggaaagaaaacgaagcctaaaaccacaaatcatattaagaagattctttcttctccgactcccaagctgaaaaatcacaacatcaaagactcgtcctatatcaccatttttgttgcwtacaatcagtagatcagtcagaccaactgaattgctctgttgtaaaagttaaacaacttaccacagattgactgcaaggcatatgcatacacacaatatcttctttaaatagrgaaaaaagcccaccttgctgtagggcatctattgtcacacttctccggtgtgaagctatttggaactgcaagcatattctataaygggcaaagatatcagctgataactgcaaccaatgcaacactgatgtgagtatctcaactaaactgaaggacctctgcaggaacatcaatgcgtaatggtctcaagcagttgcaaggacttatttaggcactgactgctacactcagcaaa

SEQ ID NO: 58461 - DNA, 450 bp, Chicken  19866894315494_3
cctaaaaccacaaatcatattaagaagattctttcttctccgactcccaagctgaaaaatcacaacatcaaagactcgtcctatatcaccatttttgttgcwtacaatcagtagatcagtcagaccaactgaattgctctgttgtaaaagttaaacaacttaccacagattgactgcaaggcatatgcatacacacaatatcttctttaaatagrgaaaaaagcccaccttgctgtagggcatctattgtcacacttctccggtgtgaagctatttggaactgcaagcatattctataaygggcaaagatatcagctgataactgcaaccaatgcaacactgatgtgagtatctcaactaaactgaaggacctctgcaggaacatcaatgcgtaatggtctcaagcagttgcaaggacttatttaggcactgactgctacactcagcaaa

SEQ ID NO: 58462 - DNA, 600 bp, Chicken  19866894315502_1
cacggagagaatctaaatgtcctgaataaaagcacctgtgctgaatgaccgaattacagaaattatccaaattctgtcaaaatcaatggcagcctttccacagacctctaagagagtttgactgcatgtgtttgtggccatattttgtcttcactccacggtttctcaaagcacatatgtttattcatagccaaaagtgattacaggtcacaatgtctttacataaaacttgaccccgtatttgaaaggaattagtttctccttgggtagtacttatggtgaattaccgactttcttccktcggagtggagttgcttatcttaaaaaaaaaaaaaggaggttctttttttatctaatctcaggactcactcgtatctctttcttgaacagttgcagtaaatcttagcaggattatcagagttttacaggcttcgggaagctttggatttgccttcatgctgttaggcagtgcaagcatgagaggatgaatctgcatcacagctaaacacctgccacttcaaatcctgcggtggcaatgagggcgtcccaataggatcatcccatttctgcaacttacaaaacatgatttttcctgcaacc

SEQ ID NO: 58463 - DNA, 600 bp, Chicken  19866894315507_1
atcagaatcctactgttaagagaaaaaaggagtttatagatgatggttctccatactctataatctttggtttctcatgtcaaaaacgcttgcacagaatattttcccactggacaacaaacatttacagcttttcacttgtagcaaaagaaagctagtaagcgataattgaaaaggctgacattcaattaggaaatcataaccaagggcagcttaccatttctgcttcggtacgaggtacctaccttacttgaagaacagactgacttttttcacaagctgctttttcatttacactaygactttgaattgcagtgtctgtctgaacctcataaactgaacgtagaatatcaccctgtttactttttctagcagaagcatttactggattcacagtcagtgcagaagtgtttacagctagagcaagaactcgatcatccaacttagaggttaactgcagaccacataattctttgtgtgttctttctatatgtgctcttgtagcactgggattcacttcatgggattttgatgcttcaatacagtcttctgaagtcctgtcaaacagtcttccttgcactctttcctttattgaaaagt

SEQ ID NO: 58464 - DNA, 600 bp, Chicken  19866894315508_1
agacatgttgtctttgggacaaagaaatgcagtgtatgtctgtcattttttcttgtctgtttggcaagacactctgactttttttttctttgaaagtgttgctttttacaggtaacaaactttccccccccccccccagtgcaattcaaacagtcataattctcccaaatcccaagctcagatgtgggtataacagactaatgtagtgtctggaggggaaaaaaaatcatggagcataatcaggaagcacttctgcgctgtgcaagtgacagagcactggcacaggttgcacagagaggyrgtggaatctccttggagatctcccaaaagccacctggacatggccccaggcaccctgctctgtgtgtccctgctggagcagggggtggagcacatggacccagaggtccctgctaacctcagccatgctgtgatcctgtggtgttcactgcatttaatagattgtgtttatctctcctaataatttggtggggcgatgtcaagactcctgacaataatacagtagaaagaattttaaatttaagaaaataattaaaattaagtacagaaaatatactgaagtatggcttttatgatgaa

SEQ ID NO: 58465 - DNA, 600 bp, Chicken  19866894315508_2
gacatgttgtctttgggacaaagaaatgcagtgtatgtctgtcattttttcttgtctgtttggcaagacactctgactttttttttctttgaaagtgttgctttttacaggtaacaaactttccccccccccccccagtgcaattcaaacagtcataattctcccaaatcccaagctcagatgtgggtataacagactaatgtagtgtctggaggggaaaaaaaatcatggagcataatcaggaagcacttctgcgctgtgcaagtgacagagcactggcacaggttgcacagagaggyrgtggaatctccttggagatctcccaaaagccacctggacatggccccaggcaccctgctctgtgtgtccctgctggagcagggggtggagcacatggacccagaggtccctgctaacctcagccatgctgtgatcctgtggtgttcactgcatttaatagattgtgtttatctctcctaataatttggtggggcgatgtcaagactcctgacaataatacagtagaaagaattttaaatttaagaaaataattaaaattaagtacagaaaatatactgaagtatggcttttatgatgaat

SEQ ID NO: 58466 - DNA, 600 bp, Chicken  19866894315508_3
cctaataacttgatctgtgttaggattttacttccagtgaaggtgaagaattagtatcataggaaagcttggagacttttctaaagattggaaatcgggtgatgcagtatctttatgttgcttttttacgacctaagagctgtttggtggcctatttaatatagtcctaattaagttttaggggacagcatcctctgttgcaataaatagcaggcagctatttaaacgggaagatagaaagtctgttatctgggacactgagtcttccagatgacgtgctgccttggctagattctggtkgagctcgcactcttgttccattgttgcttgcttccccctcctcagtccaatgcttgaataccgtggagtctcatagtctgtcttgggaagacaatttccactaggctttatacaatctgtaagtctgtttccattgtaactgagatgattgagatttgcctaatctcacagcacttgtactgcatttgttgttgttcacaggaagctctcttcagtgcgcgctttagcccaccaagctgtggagtgcaagtgaacagactgtggtacaagccagtggagcagttcatcttgccagaggta

SEQ ID NO: 58467 - DNA, 599 bp, Chicken  19866894315513_1
  misc_feature (1)..(24): n is any nucleotide
nnnnnnnnnnnnnnnnnnnnnnnnctgatgaaaagatcctttcctaccacagcagagaccattctggataacaaatacattatctctactatgtttgttatgctacagtccatttacgaatgctactctcacccttccagcaatagctgttcgaggttctcagcaacatttgcaagaaactcaggaatgcacatcagctgattgtatgaaagattaagttgctttagggttggacatctgagatatggatccaaagcaaaggaaggtccaatgtcatttcgagagatatcaagataggcratacagttcattttcarcaaataagtmggaaaagaagtaaatcggttgctgtgcaaatccaaataagtcaagcatttcaagttctgaaagtaaaaaagagatgttaaaaaaagtgaaatgaaaacaygaattcagaggttttacactgatttatgctttatacagcttattatttgatatttgcctgactaggaaaaatagcagaaattatcgataatacaaatgtaaccagtaatatttttattaaggaacaaaatagaagcattatttaaaatcatttagctcagtttcataaaatt

SEQ ID NO: 58468 - DNA, 599 bp, Chicken  19866894315513_2
  misc_feature (1)..(7): n is any nucleotide
nnnnnnnctgatgaaaagatcctttcctaccacagcagagaccattctggataacaaatacattatctctactatgtttgttatgctacagtccatttacgaatgctactctcacccttccagcaatagctgttcgaggttctcagcaacatttgcaagaaactcaggaatgcacatcagctgattgtatgaaagattaagttgctttagggttggacatctgagatatggatccaaagcaaaggaaggtccaatgtcatttcgagagatatcaagataggcratacagttcattttcarcaaataagtmggaaaagaagtaaatcggttgctgtgcaaatccaaataagtcaagcatttcaagttctgaaagtaaaaaagagatgttaaaaaaagtgaaatgaaaacaygaattcagaggttttacactgatttatgctttatacagcttattatttgatatttgcctgactaggaaaaatagcagaaattatcgataatacaaatgtaaccagtaatatttttattaaggaacaaaatagaagcattatttaaaatcatttagctcagtttcataaaatttaayaatcatgaactgc

SEQ ID NO: 58469 - DNA, 600 bp, Chicken  19866894315513_3
atgaaaagatcctttcctaccacagcagagaccattctggataacaaatacattatctctactatgtttgttatgctacagtccatttacgaatgctactctcacccttccagcaatagctgttcgaggttctcagcaacatttgcaagaaactcaggaatgcacatcagctgattgtatgaaagattaagttgctttagggttggacatctgagatatggatccaaagcaaaggaaggtccaatgtcatttcgagagatatcaagataggcratacagttcattttcarcaaataagtmggaaaagaagtaaatcggttgctgtgcaaatccaaataagtcaagcatttcaagttctgaaagtaaaaaagagatgttaaaaaaagtgaaatgaaaacaygaattcagaggttttacactgatttatgctttatacagcttattatttgatatttgcctgactaggaaaaatagcagaaattatcgataatacaaatgtaaccagtaatatttttattaaggaacaaaatagaagcattatttaaaatcatttagctcagtttcataaaatttaayaatcatgaactgcytgcaggtctc

SEQ ID NO: 58470 - DNA, 600 bp, Chicken  19866894315513_4
ctcacccttccagcaatagctgttcgaggttctcagcaacatttgcaagaaactcaggaatgcacatcagctgattgtatgaaagattaagttgctttagggttggacatctgagatatggatccaaagcaaaggaaggtccaatgtcatttcgagagatatcaagataggcratacagttcattttcarcaaataagtmggaaaagaagtaaatcggttgctgtgcaaatccaaataagtcaagcatttcaagttctgaaagtaaaaaagagatgttaaaaaaagtgaaatgaaaacaygaattcagaggttttacactgatttatgctttatacagcttattatttgatatttgcctgactaggaaaaatagcagaaattatcgataatacaaatgtaaccagtaatatttttattaaggaacaaaatagaagcattatttaaaatcatttagctcagtttcataaaatttaayaatcatgaactgcytgcaggtctcagtctcatttgttatgttactcagtgtaacatcctaaagctgttctctgatgtaaacactttaaaacagtcccatgaaaatgtttctgtttccagctgca

SEQ ID NO: 58471 - DNA, 600 bp, Chicken  19866894315513_5
cagttcattttcarcaaataagtmggaaaagaagtaaatcggttgctgtgcaaatccaaataagtcaagcatttcaagttctgaaagtaaaaaagagatgttaaaaaaagtgaaatgaaaacaygaattcagaggttttacactgatttatgctttatacagcttattatttgatatttgcctgactaggaaaaatagcagaaattatcgataatacaaatgtaaccagtaatatttttattaaggaacaaaatagaagcattatttaaaatcatttagctcagtttcataaaatttaayaatcatgaactgcytgcaggtctcagtctcatttgttatgttactcagtgtaacatcctaaagctgttctctgatgtaaacactttaaaacagtcccatgaaaatgtttctgtttccagctgcacttaaatcctgaatgaaaacaagaaatgcatgaagcatgccaaaatatacacccatactcaagagtggtattgtttagagtagatagttaaagaaaaactattttctgtaactaatcttaacttgtgttatataaaattgtgcagcattacctcacacagttgttccggaatgttt

SEQ ID NO: 58472 - DNA, 600 bp, Chicken  19866894315513_6
caaataagtmggaaaagaagtaaatcggttgctgtgcaaatccaaataagtcaagcatttcaagttctgaaagtaaaaaagagatgttaaaaaaagtgaaatgaaaacaygaattcagaggttttacactgatttatgctttatacagcttattatttgatatttgcctgactaggaaaaatagcagaaattatcgataatacaaatgtaaccagtaatatttttattaaggaacaaaatagaagcattatttaaaatcatttagctcagtttcataaaatttaayaatcatgaactgcytgcaggtctcagtctcatttgttatgttactcagtgtaacatcctaaagctgttctctgatgtaaacactttaaaacagtcccatgaaaatgtttctgtttccagctgcacttaaatcctgaatgaaaacaagaaatgcatgaagcatgccaaaatatacacccatactcaagagtggtattgtttagagtagatagttaaagaaaaactattttctgtaactaatcttaacttgtgttatataaaattgtgcagcattacctcacacagttgttccggaatgtttgtaagagcattttg

SEQ ID NO: 58473 - DNA, 600 bp, Chicken  19866894315514_1
cgaggacagctgtttccgtaccttctcctcctttttacccaaattttcataaattgtctctttctgcctgcaagatcaggaagaaacaggaaaaagtgagcagaaggaaaagcctaaccaagccagcaggtagaaagagcactgccaaaagcaagcatagattagcctcgggcttacaccagcacttacttggaggattttcgtgagaccttggcatgcatattcttcactgcaggtgggtaggtaatgttcccatactccgactcattttgcttgcttttctgagactacgggagagaraactcaagctgagaagaatggggtctgggagaagcatgagaggaggcataatggaagaactggggctgtttaatcatgcacatatcatgctaggatctcagtagagattggtgggctgttgaagtccacatgctctgtgcagtgcccacaggtggcccagaggtgagcagcaggaatacgtctgcattcttctacagaagggactagaggggcaacacatttctggaggcaccaacaaacctcactgtcacgtgctggctaaacagtattaaacaacagcaggtagtgaatgttgtcaga

SEQ ID NO: 58474 - DNA, 600 bp, Chicken  19866894315514_2
gcacatatcatgctaggatctcagtagagattggtgggctgttgaagtccacatgctctgtgcagtgcccacaggtggcccagaggtgagcagcaggaatacgtctgcattcttctacagaagggactagaggggcaacacatttctggaggcaccaacaaacctcactgtcacgtgctggctaaacagtattaaacaacagcaggtagtgaatgttgtcagaggctacaaacaaaaaggatgctagtatcagcaagtaggagaaaacctttttcacagaggtttgggagacaactacaraaccaggatggggaagacaaaggaagagagcaaaatctttgcttgtcttagattgagcttgtaactaaaccatgcttagtgaagttacatagaatgtagttgaaattgttgcattaaaacttattactgttcagtggttcacaagagggttgcacttragctgctgccactgtcccctgtattttaaaggatgagggagaagtctcaaatcttgcttcattgtcatagtctacgtaggtcccaaagctagcttagcatttaggaaatagagcacttgggctcagggccaacactacgcag

SEQ ID NO: 58475 - DNA, 600 bp, Chicken  19866894315514_3
caaacctcactgtcacgtgctggctaaacagtattaaacaacagcaggtagtgaatgttgtcagaggctacaaacaaaaaggatgctagtatcagcaagtaggagaaaacctttttcacagaggtttgggagacaactacaraaccaggatggggaagacaaaggaagagagcaaaatctttgcttgtcttagattgagcttgtaactaaaccatgcttagtgaagttacatagaatgtagttgaaattgttgcattaaaacttattactgttcagtggttcacaagagggttgcacttragctgctgccactgtcccctgtattttaaaggatgagggagaagtctcaaatcttgcttcattgtcatagtctacgtaggtcccaaagctagcttagcatttaggaaatagagcacttgggctcagggccaacactacgcagggcctcaattcacaggataggaaagcccattttctcacctggataacctccagctttctctttgttgtctctatgaattggcagatggccatgtagatgaacttgtactgggcttctgtctgcaccatccctgagcgttgggccctcaccatctggat

SEQ ID NO: 58476 - DNA, 547 bp, Chicken  19866894315519_1
taatacgtgcatcccccttctccttggtagggcactgggaccttgtagcaggccagagtaccgtctttgccacttttgaaagaagaagctcatctttttagaccacatgcaaatatattgtttggtcctcgttttgaaaatgtactgtaaaactagaaatcacatcatctttaattaagactatgtagtacattgtaacctaggcacatacctgtaacataccccaagcacagtaaaactcttaggacatgaacagtttaaatcaggcctgaaattacttggcaaaaacaagtcttaacrtgatctggtcttctatctgttgaaataaataaatatctaggagtaagactcagacgtgtagagcattacaggcagctatgatattttatgacaacaatgttttttgctttacaacagaacctcatggaaatccagacctacgtcaacattttacagcagattatccagacaacccctcgtgtgtcccctataactactggcatatctgaggtaagtgttgctgtggtaaatgcatgctgcagggtct

SEQ ID NO: 58477 - DNA, 599 bp, Chicken  19866894315522_1
  misc_feature (1)..(32): n is any nucleotide
nnnnnnnnnnnnnnnnnnnnnnnnnnnnnnnnggagaactgccaaaatggtgtttaaacagcagggctccaactctccatcgccatgcagcactgataaaagccctttggcctccggacgttccaagttctcttatctgaagaacgggaatgaggatttctaacacactttttaacttctccctgtgcagggtgcagtagaatctttgaaatcatcattgctgagagaatttaagatatacggaccttcagttagtaagaaagatgtgatttgaggagaaatgtgaaaaggtgaggtggyatttattgagagaggcaacggcttcttgcaatagaaatcactgacacgtctccatacctctttctgctgcacaagaacatctggtgaatcctaaggtaatgaagcaaacgtttccttgtctttacacccccaacctctatggcctcgaggtagcagaataagatgcatcgttgcacctggtgggctgcgggctttgtgagaggacctcccgagcataaaccatcatccggattatcggcagcacagctgaaactggattgtgccgctccagagctgtggagccgttcttgttgtaggaa

SEQ ID NO: 58478 - DNA, 597 bp, Chicken  19866894315522_2
agaaatcactgacacgtctccatacctctttctgctgcacaagaacatctggtgaatcctaaggtaatgaagcaaacgtttccttgtctttacacccccaacctctatggcctcgaggtagcagaataagatgcatcgttgcacctggtgggctgcgggctttgtgagaggacctcccgagcataaaccatcatccggattatcggcagcacagctgaaactggattgtgccgctccagagctgtggagccgttcttgttgtaggaaggaaggcaggaaagagcagttctgaggagaggygtttgacttctgctggcgggcgggagaggagcgctgccacagggcagccacgctgctgctttcagttacaggagagatcccacgtacgagcctctggtttccgtaggctctgcgggaggccctttctgatgggtatctcctccgactcgtgccaaaccgccgtttacggctcgcgaggccgcacggggcagcccctccacgcgcacacagcgcgctcccagccgcggcagccccgagcccggcgccgggcggagcagcaggccgcccccgctgccgctgttgcccggagacgagcgg

SEQ ID NO: 58479 - DNA, 600 bp, Chicken  19866894315529_1
acgagacccatgacacatactgtgcagacacctaagcctactgtagtctcacaagaaatggaatcccaactggcttctcaatatggtccagtatgagaatttgtttcttaggaagcctcttcacaagccttattgtgctccaaggagctgcactgtgaaaggaacagaaggatgaaagcaggcaaaaaacaactcttaacttaaaatgcttaaattaaaacatgaggctctattttaattcttccccaaatttctggatgtgagaaaatagcaacaatcagaatgcaggaggccctctgstgagcagatgcattaatattttctacaaaaaagtaagcaaaccaaccaatgctggagatgtgattgtgaatcagtgaagttcatctttaccacagctgaaaatgcatctgcataaatgaagacagcaaagctaatctttaccagctagctgaagagtacacagtatcaggcaaaccatgcacatcttctcagcctgtgggtgacagacaactggcaacacttccctaatgctgttccagtcattccctgcaagtatatcaaatgaataacaccttgtgatgacatgtccacatggtacca

SEQ ID NO: 58480 - DNA, 599 bp, Chicken  19866894315531_1
  misc_feature (1)..(183): n is any nucleotide
nnnnnnnnnnnnnnnnnnnnnnnnnnnnnnnnnnnnnnnnnnnnnnnnnnnnnnnnnnnnnnnnnnnnnnnnnnnnnnnnnnnnnnnnnnnnnnnnnnnnnnnnnnnnnnnnnnnnnnnnnnnnnnnnnnnnnnnnnnnnnnnnnnnnnnnnnnnnnnnnnnnnnnnnnnnnnnnnnnnnnnnttgggatgagatagggagaaaactctaattaagtattttagagtccatgtttcaagatcagatggattcttataacaggtaatatatgatcccaaagcctagcctagatcaaagacragtcagtctagatccaacacattttctcctgtaractgcattacattctgatgacttccaactttctaatgtttygtaggaaacaacatgtaaaacttcagccttcttagtcccagagctgtggctttagttctgctgtaaattaaatggtaccactgcccagtgtgatatgcaatgttaccccttttttctttcataacacttgtatctatggtacagtgctcctttttagtactgtcttccacgcaccagtggtacaatatgtctgttctttcaaaataatgaatcactgcttttct

SEQ ID NO: 58481 - DNA, 599 bp, Chicken  19866894315531_2
  misc_feature (1)..(149): n is any nucleotide
nnnnnnnnnnnnnnnnnnnnnnnnnnnnnnnnnnnnnnnnnnnnnnnnnnnnnnnnnnnnnnnnnnnnnnnnnnnnnnnnnnnnnnnnnnnnnnnnnnnnnnnnnnnnnnnnnnnnnnnnnnnnnnnnnnnnnnnnnnnnnnnnnnnnnttgggatgagatagggagaaaactctaattaagtattttagagtccatgtttcaagatcagatggattcttataacaggtaatatatgatcccaaagcctagcctagatcaaagacragtcagtctagatccaacacattttctcctgtaractgcattacattctgatgacttccaactttctaatgtttygtaggaaacaacatgtaaaacttcagccttcttagtcccagagctgtggctttagttctgctgtaaattaaatggtaccactgcccagtgtgatatgcaatgttaccccttttttctttcataacacttgtatctatggtacagtgctcctttttagtactgtcttccacgcaccagtggtacaatatgtctgttctttcaaaataatgaatcactgcttttctttcagtgctacacatcattagtaaacacaactga

SEQ ID NO: 58482 - DNA, 599 bp, Chicken  19866894315531_3
  misc_feature (1)..(108): n is any nucleotide
nnnnnnnnnnnnnnnnnnnnnnnnnnnnnnnnnnnnnnnnnnnnnnnnnnnnnnnnnnnnnnnnnnnnnnnnnnnnnnnnnnnnnnnnnnnnnnnnnnnnnnnnnnnnttgggatgagatagggagaaaactctaattaagtattttagagtccatgtttcaagatcagatggattcttataacaggtaatatatgatcccaaagcctagcctagatcaaagacragtcagtctagatccaacacattttctcctgtaractgcattacattctgatgacttccaactttctaatgtttygtaggaaacaacatgtaaaacttcagccttcttagtcccagagctgtggctttagttctgctgtaaattaaatggtaccactgcccagtgtgatatgcaatgttaccccttttttctttcataacacttgtatctatggtacagtgctcctttttagtactgtcttccacgcaccagtggtacaatatgtctgttctttcaaaataatgaatcactgcttttctttcagtgctacacatcattagtaaacacaactgaagtcttgggaattccactactgatttcaccggagtcagatc

SEQ ID NO: 58483 - DNA, 600 bp, Chicken  19866894315533_1
acagattatgaacgctgatataagggcatgccagccaagactgcagacctgaataaattgttgagttcctggatgcagactttttttttttttttttgcagaaatgtgaagaaaaaccccaacaattagaaaaaaagatcactgcctttcaaagagagagggtttgggaaggggagaggaattgcttgttttctcgttttctcgtaattttcctggcatattccatcaatataaaaacacttgggtcacgcgtgacacaataccgccatatgagggatgtgtttactggatcttacaaayttttcctgacgtcactggtaagaattattcaagactgtaatcctgatctataagacacaaagctcagtgcagtcaaaatcaaaacagcaacaaaagcccttctgcaatgaagttgacaagccatccaaagacagcgagtctgaagttcccatacactgtcccttgtgtacatgatgggcaggggatgatgagaggacacagaaagtccaaggaggtaccagccgckgctcttgtctgcaaagcatctcattaagtgcaccaaatcawcagctggcagttctattcatgtctcatgcattt

SEQ ID NO: 58484 - DNA, 600 bp, Chicken  19866894315533_2
caatataaaaacacttgggtcacgcgtgacacaataccgccatatgagggatgtgtttactggatcttacaaayttttcctgacgtcactggtaagaattattcaagactgtaatcctgatctataagacacaaagctcagtgcagtcaaaatcaaaacagcaacaaaagcccttctgcaatgaagttgacaagccatccaaagacagcgagtctgaagttcccatacactgtcccttgtgtacatgatgggcaggggatgatgagaggacacagaaagtccaaggaggtaccagccgckgctcttgtctgcaaagcatctcattaagtgcaccaaatcawcagctggcagttctattcatgtctcatgcatttcccttctgactgctatgcaatagatgctatttttgtagaataaaataacaggttgataccatacaaaaacttgagaatggagccttggcaggttacagatgcatatttctcagaccttgctaacatatctgatgaattctgtgtaccctaatgaaaatcaagtgtttcttacttttctcaatctttcagagagtatctgcaccatgccacaaaattcccagcagaa

SEQ ID NO: 58485 - DNA, 600 bp, Chicken  19866894315533_3
atatgagggatgtgtttactggatcttacaaayttttcctgacgtcactggtaagaattattcaagactgtaatcctgatctataagacacaaagctcagtgcagtcaaaatcaaaacagcaacaaaagcccttctgcaatgaagttgacaagccatccaaagacagcgagtctgaagttcccatacactgtcccttgtgtacatgatgggcaggggatgatgagaggacacagaaagtccaaggaggtaccagccgckgctcttgtctgcaaagcatctcattaagtgcaccaaatcawcagctggcagttctattcatgtctcatgcatttcccttctgactgctatgcaatagatgctatttttgtagaataaaataacaggttgataccatacaaaaacttgagaatggagccttggcaggttacagatgcatatttctcagaccttgctaacatatctgatgaattctgtgtaccctaatgaaaatcaagtgtttcttacttttctcaatctttcagagagtatctgcaccatgccacaaaattcccagcagaaaagaatttcaagctagtaaaaaaaaagaattcagttattca

SEQ ID NO: 58486 - DNA, 600 bp, Chicken  19866894315539_1
taatctgggaaatttctttagaaatgagtggatttttttttactgaacttcttttacaggattgtgccagttaaatcctggaggattcccttcggtatagggctgcttttagggttttttatgattattttaatctacgtagagaacgcggcgtatatttgtggcttttgatttcatagcttcctggatgtcctggtgctaatttcctaaggaaacctttccccgttatttacaggctcataacacacagtgtgttttatctccgtttgccctaattagctgccccaaaagaaagggaasggaaagaaaaaaaagaaagaaagaaagaaagaaaggaaagaaggaaatccattactgcgtggactcctgcacatcctgggaagttggcagtttcatttctaattcaggtgcagggggaagataaaatctgggtgtctggaataaaacacgtttctaatgggatggaacgacaatcccttattacctcccaccatttttctcatagttttgctccaagtacagcaaatccccgcgctatattttttcataatgtatagcttgctattacctctcaagaacaatttttatagagagggtgcc

SEQ ID NO: 58487 - DNA, 600 bp, Chicken  19866894315539_2
ggaaatttctttagaaatgagtggatttttttttactgaacttcttttacaggattgtgccagttaaatcctggaggattcccttcggtatagggctgcttttagggttttttatgattattttaatctacgtagagaacgcggcgtatatttgtggcttttgatttcatagcttcctggatgtcctggtgctaatttcctaaggaaacctttccccgttatttacaggctcataacacacagtgtgttttatctccgtttgccctaattagctgccccaaaagaaagggaasggaaagsaaaaaaagaaagaaagaaagaaagaaaggaaagaaggaaatccattactgcgtggactcctgcacatcctgggaagttggcagtttcatttctaattcaggtgcagggggaagataaaatctgggtgtctggaataaaacacgtttctaatgggatggaacgacaatcccttattacctcccaccatttttctcatagttttgctccaagtacagcaaatccccgcgctatattttttcataatgtatagcttgctattacctctcaagaacaatttttatagagagggtgccctgttca

SEQ ID NO: 58488 - DNA, 600 bp, Chicken  19866894315546_1
cattacctacccgtgcaatttcagatctcacatggaaatacccaaagtaaataaaagtatctgccaatttttatgccaggttcctcagatggataatggaagaggactagattcccctgcaatcttccacttgcaggtgaaggcagctaagccagcacacctttgtaagtgcaaactaaacaacccagactttcaggtatgcaggtgttgctctgcccagcaagacctaaagagtttggactatggctttcatgtttgatgtgggtcacaagggcagaagatcagatccagtagggactyaggtgccttgaagttaattcctgcaacactcaagttctgacatctgcttctcagggcagatagctgggctccttctgcagcaggggaagggctgcaatgcaaagcagctggtaagtgcctggaatgggccagctgagaaacttgaagagcagagataaatctgtaaaggtcctcatcagtggacctcactcggtgctttaggaactgtaaccattcactctgcatctacagcttggcacttcttgaaggggattttcagcatctctcctttcagaaattcaacacagataatttttctcc

SEQ ID NO: 58489 - DNA, 600 bp, Chicken  19866894315547_1
atcgagatgaagaatgagcacatccacggcctggacaagaagctgctgaacctggagagtgtggtgggttcaagggggtgtgcagatgggttttgctctttctatctcttgatattcacctgaatgcatctcttctccccacctgaatactgcccagtatctggggctgaatggagctggatggagcctggttcctcccttagggcagggaggtgccattgagatggcttcccactgagcgcagcactgggggacacacgtgggtgctccccaagccccctcctcaccctggcgttcccyttgcaggcagaaagaaaccttctgctggaggagaaggtgaagaccttgcagcaagagaatgaggacctgcaggtgcgcacccagaaccacctggtgatgacaaggtaagcayacatccatcagcttcatggcygagggtggcacctgagggggcagaggggacagtggtggggacgtggatcccacagcgttgcccttcgcccacaggcagctgtcagaggagctgctggccatccgcggggcactggagaaggagtcgaagctgcgggagcaggctcaccatgagaaggaggagctgct

SEQ ID NO: 58490 - DNA, 600 bp, Chicken  19866894315547_2
tattcacctgaatgcatctcttctccccacctgaatactgcccagtatctggggctgaatggagctggatggagcctggttcctcccttagggcagggaggtgccattgagatggcttcccactgagcgcagcactgggggacacacgtgggtgctccccaagccccctcctcaccctggcgttcccyttgcaggcagaaagaaaccttctgctggaggagaaggtgaagaccttgcagcaagagaatgaggacctgcaggtgcgcacccagaaccacctggtgatgacaaggtaagcayacatccatcagcttcatggcygagggtggcacctgagggggcagaggggacagtggtggggacgtggatcccacagcgttgcccttcgcccacaggcagctgtcagaggagctgctggccatccgcggggcactggagaaggagtcgaagctgcgggagcaggctcaccatgagaaggaggagctgctgtaccgcgtgctcaacgggggggatggccgccccttccccatcgctgccagtgaygtgcctctcattgccacgtagcgcacagcccgggggtggcactgctgtgagtgctcc

SEQ ID NO: 58491 - DNA, 600 bp, Chicken  19866894315547_3
tctccccacctgaatactgcccagtatctggggctgaatggagctggatggagcctggttcctcccttagggcagggaggtgccattgagatggcttcccactgagcgcagcactgggggacacacgtgggtgctccccaagccccctcctcaccctggcgttcccyttgcaggcagaaagaaaccttctgctggaggagaaggtgaagaccttgcagcaagagaatgaggacctgcaggtgcgcacccagaaccacctggtgatgacaaggtaagcayacatccatcagcttcatggcygagggtggcacctgagggggcagaggggacagtggtggggacgtggatcccacagcgttgcccttcgcccacaggcagctgtcagaggagctgctggccatccgcggggcactggagaaggagtcgaagctgcgggagcaggctcaccatgagaaggaggagctgctgtaccgcgtgctcaacgggggggatggccgccccttccccatcgctgccagtgaygtgcctctcattgccacgtagcgcacagcccgggggtggcactgctgtgagtgctcccactctccagggctggccctt

SEQ ID NO: 58492 - DNA, 491 bp, Chicken  19866894315547_4
agaatgaggacctgcaggtgcgcacccagaaccacctggtgatgacaaggtaagcayacatccatcagcttcatggcygagggtggcacctgagggggcagaggggacagtggtggggacgtggatcccacagcgttgcccttcgcccacaggcagctgtcagaggagctgctggccatccgcggggcactggagaaggagtcgaagctgcgggagcaggctcaccatgagaaggaggagctgctgtaccgcgtgctcaacgggggggatggccgccccttccccatcgctgccagtgaygtgcctctcattgccacgtagcgcacagcccgggggtggcactgctgtgagtgctcccactctccagggctggcccttggggtggccccgtgcaatggagcgcttcccaggacacctgcgcccgcctttccctggcctctgctgcagagggggctgcactgtgccacccccacaggggtgagactgggtca

SEQ ID NO: 58493 - DNA, 599 bp, Chicken  19866894315548_1
  misc_feature (1)..(201): n is any nucleotide
nnnnnnnnnnnnnnnnnnnnnnnnnnnnnnnnnnnnnnnnnnnnnnnnnnnnnnnnnnnnnnnnnnnnnnnnnnnnnnnnnnnnnnnnnnnnnnnnnnnnnnnnnnnnnnnnnnnnnnnnnnnnnnnnnnnnnnnnnnnnnnnnnnnnnnnnnnnnnnnnnnnnnnnnnnnnnnnnnnnnnnnnnnnnnnnnnnnnnnnnnactgagctctcctgtctggtaaaagctacaaaactgtggcatagagctgcatcaggggatggtcaggatgggaatgagaaaaaggaacatgtctcaccyatcgaagagtagtatctgacactaaatgtaaactaattaacatgtaaaacaacagcaactacaaaatggcctcagcatcagcatggttgygtttcccctaaggacattcgcagccattcttgccttgcaagaacttgagtatgtgaacactgaagtaccccatccagatggggtgccactgaatacacacactgggacagacagcttcctttttcagaagaaacccaattgacatgacttgaaaaacatggacatggcattaataggatccacgtctttcccccaagttctctgactaa

SEQ ID NO: 58494 - DNA, 599 bp, Chicken  19866894315548_2
  misc_feature (1)..(111): n is any nucleotide
nnnnnnnnnnnnnnnnnnnnnnnnnnnnnnnnnnnnnnnnnnnnnnnnnnnnnnnnnnnnnnnnnnnnnnnnnnnnnnnnnnnnnnnnnnnnnnnnnnnnnnnnnnnnnnnactgagctctcctgtctggtaaaagctacaaaactgtggcatagagctgcatcaggggatggtcaggatgggaatgagaaaaaggaacatgtctcaccyatcgaagagtagtatctgacactaaatgtaaactaattaacatgtaaaacaacagcaactacaaaatggcctcagcatcagcatggttgygtttcccctaaggacattcgcagccattcttgccttgcaagaacttgagtatgtgaacactgaagtaccccatccagatggggtgccactgaatacacacactgggacagacagcttcctttttcagaagaaacccaattgacatgacttgaaaaacatggacatggcattaataggatccacgtctttcccccaagttctctgactaataaatactgtttcccctcagctatctttgcagagagaaagtaaaaattcttccagcttctgaaaacataacaaatagccttaacctgtac

SEQ ID NO: 58495 - DNA, 600 bp, Chicken  19866894315549_1
gtctttctttcctaccacagaaacaagtaaatatttaccaaataacacacaaattattgcattttaatctactttagttctttgtcatttatggtctatcagaatctttttaaaccaggctgatgaataggcttaaattatcattttatgcctcttttttcatcaaattaagcttgaactctgaaaactagagtgtctgagtgacagtggtgctactcaaatgaaatgttcattagatccatgcagctgtcatgagatgtttgtttcccctgacttgcagattctcctaatcctctcctrgtgactgcagcatgcaggcggctggtacccgtgtcctgttacctgctccaggcaaagtgggccagataagattagtactttaaatcagtggcctgagctaacttgtctggatttttgcttgtgtgataagatagcagaccgctttcatgtgagtgccagttctgcagaggaggtggtggtaatcatggcagagaggcaggcggcaagttcacgtggttaaagtcatcttcaaggctttgcattgaatagaattgatgatgctgataatatttggaaaacatagagctaatccctgctgat

SEQ ID NO: 58496 - DNA, 600 bp, Chicken  19866894315549_2
tgtcctgttacctgctccaggcaaagtgggccagataagattagtactttaaatcagtggcctgagctaacttgtctggatttttgcttgtgtgataagatagcagaccgctttcatgtgagtgccagttctgcagaggaggtggtggtaatcatggcagagaggcaggcggcaagttcacgtggttaaagtcatcttcaaggctttgcattgaatagaattgatgatgctgataatatttggaaaacatagagctaatccctgctgatgtaattttacagtccctgagaatgattagcygagttcagttttgtaatacccaataaccctgtttgtgtttgtggaaagcaaaatgtggcaagtgaccttggaggctggtagttatcacttctgttctcttgagtattaaaactggagctctaagccagctccccattcaaatattcaaacagctttttcaaagctgatggcttccaactggaaaagtaaataactttgtgataaggagaagtcaatggagtcattgtgagcaggctgcacctgtgacctaaggtgcttgtcttaaatgtacagtaataacaagaacggcacagaatgcag

SEQ ID NO: 58497 - DNA, 600 bp, Chicken  19866894315551_1
aagattagtcctctgttgaagactgtttattcttttttattattattatgacttgtgcttaagttatttctgttaaaaatctgagctattaaaattaaaatcttattctctttataggatttcttaggaaggatgatgctaacttgtggcagcagcctaatcatgaatttgtgcagcctcactctgtgggcagttcccctttttgcattccttttcccagctgccctggtctccttgtgttgttctgcatagtgcatggatagactttgtgcaaggaacacactatgcacagtgggaccrtttcttatattttgggcctatggacaaatcacagtgttgttctgcagtctgtgctgcttctggagtagcagtcataggctccctgcgtttgagtttttggtttgcagtatgtatggtgtcaagtctgctcccttagtctcatcagcctaagtattactaatacactctccatggaaaggaataagatcatattcccactgaaatctctcaatttacagtccttcctcaggtgttcagggaaaatgtcttgttttcagccacttcaaagataagcatgtgggaacccatttcatgggtata

SEQ ID NO: 58498 - DNA, 600 bp, Chicken  19866894315552_1
ataaaaacctaggaagttagtaagctttattttgcagaaatgtgactgaccgatggttgaaagactgcagttagttctgctttaaaaatggtgtttttagtctaactgccctggctattccatgccattatgcataccagtaagaagaacacggagtacagctgtatgaattattgtggcttagtgtttttacagtacctgtgccataattaaaataccagctatttgaatgtgctgggaaatgccataaattaacatttttccaccacttgcaaataatcagcagaacgctccttctayaccagatgtagttaaaaaatagaaaatgatcatttccagtgctcagtaggagcataaactgtcatggcaacagctatcagtggtaatggcagctgcagtaactcagggctgagtggatgcagaagaggaggtcgtggggcctgtttgtagtgcctcctgcaatgcagcagtgtcactgcaggactctgcatttacatttattctcaggagggagagcagagctagctcctcaaaaagcacgttgttggattgcgtacagcttgtcttgctgctctactactggagctggggatgctgggg

SEQ ID NO: 58499 - DNA, 600 bp, Chicken  19866894315556_1
acccattttaatttgatgatatgaaattctttactagtctttccttacatgtgatgagtgggtgactactgaataatgaataacatatttaaaataacattgatatttgaagatttatttagacttcacttcatttcaattgcatggtcaccttttcttgtatttagcctacctatccctcatggcaggagctatgtttttacattgtcctagaggtcttgaataaatttatcaggactagagttgcctttcaggtggttgttgtgaggttattttttcttaggttagttttttgggggrtgtgggtttgggaaatgaaggctaaatttcatgtgatctgagtgccacagatctmatgggaaacaacagattaaaactgctgttgtttgtactcaccatgctgcataaaataggtagaaatatggttatggttgctggattgctaacaaactctgtaaccagggacactaaaatgcaggccagtagagttacagcccagtagggaagactgctcagggacagcatttggcgtccaatccatgtagagaggccagaggtctgaggaaaggacataagcacaacaatgactaagtaggatgt

SEQ ID NO: 58500 - DNA, 600 bp, Chicken  19866894315556_2
gagtgggtgactactgaataatgaataacatatttaaaataacattgatatttgaagatttatttagacttcacttcatttcaattgcatggtcaccttttcttgtatttagcctacctatccctcatggcaggagctatgtttttacattgtcctagaggtcttgaataaatttatcaggactagagttgcctttcaggtggttgttgtgaggttattttttcttaggttagttttttgggggrtgtgggtttgggaaatgaaggctaaatttcatgtgatctgagtgccacagatctmatgggaaacaacagattaaaactgctgttgtttgtactcaccatgctgcataaaataggtagaaatatggttatggttgctggattgctaacaaactctgtaaccagggacactaaaatgcaggccagtagagttacagcccagtagggaagactgctcagggacagcatttggcgtccaatccatgtagagaggccagaggtctgaggaaaggacataagcacaacaatgactaagtaggatgtttgtcaaccacattgttttcttcaggatagtttgcattagagaatgtcaccagca

SEQ ID NO: 58501 - DNA, 600 bp, Chicken  19866894315557_1
tttcttgctcatcatgctttggtggtctgttctctgtcagacaagacactgccattaatatccaggcaagatgctggctcctctcctatcttccagcttagatgtgcttcttgcagttgtccatgattgcaagtaactttttcccaattagatcagagaagtccttctccctccaggaaaagtcatccaagtggattccttcctcttcctcaactacttggctcacacagtcagccaccctggaaagcaaagaccaaggtcatgagatttgtttgaatcacatccagtttactattaaaygcaaatgaacatcacagaaayttgctatggtaactcttactttcaatccaagcaaattgctccataatctttttaaaaagaaaaacaatactatttttgttgttgttttcctatttcattgatattttcaaaatttccaaaacaaacatgcacatacagttagaattacaaagtatcacatctgcttacctggaaacaccgcttgggcatttgatagagcatctacttgtctacatcaaaacatttactgaaattcctgaacaaaatgcttaatatttattaaagttttagcttattctc

SEQ ID NO: 58502 - DNA, 600 bp, Chicken  19866894315557_2
gtggtctgttctctgtcagacaagacactgccattaatatccaggcaagatgctggctcctctcctatcttccagcttagatgtgcttcttgcagttgtccatgattgcaagtaactttttcccaattagatcagagaagtccttctccctccaggaaaagtcatccaagtggattccttcctcttcctcaactacttggctcacacagtcagccaccctggaaagcaaagaccaaggtcatgagatttgtttgaatcacatccagtttactattaaaygcaaatgaacatcacagaaayttgctatggtaactcttactttcaatccaagcaaattgctccataatctttttaaaaagaaaaacaatactatttttgttgttgttttcctatttcattgatattttcaaaatttccaaaacaaacatgcacatacagttagaattacaaagtatcacatctgcttacctggaaacaccgcttgggcatttgatagagcatctacttgtctacatcaaaacatttactgaaattcctgaacaaaatgcttaatatttattaaagttttagcttattctcaactttctttcatttatttgg

SEQ ID NO: 58503 - DNA, 600 bp, Chicken  19866894315562_1
ttgatgatacatctcaaatcctctactgcatttccctcactttgtaaggggttggaagagtggcagatgtaatgcaccagtgagtgtgtgatgctcagctactacatctacaggaaactaaacgttaatattgcattactgtatgcaatatttgtcaaaagaaacctttaaatagtatgaggaattgagaaaagaaagaccagtgtcaaaaatctcctatattctttatgcaagtgagatcgtgtttaatgccaggcctcaagcaagagactacttgcctaattacaaaaaataaaaatwaaaattaaaaaaaagtgaaaacagctgctgttatagactccaagttagaggcaaatggtgaactgaggcttggagaagttaagtgatttgccttaggccacagagggaagtagtgtcagacccaagattagaaatcacaagttttcctcatacatttctaagctcagatcacaaaactgcaccatctggacattcacagataaatattggggtctgtctgtcattcctatctctaaaataatctcctatcctcttgcagtcccccataatttctcagcaaaaactgttttatttatgtgc

SEQ ID NO: 58504 - DNA, 600 bp, Chicken  19866894315562_2
tacatctcaaatcctctactgcatttccctcactttgtaaggggttggaagagtggcagatgtaatgcaccagtgagtgtgtgatgctcagctactacatctacaggaaactaaacgttaatattgcattactgtatgcaatatttgtcaaaagaaacctttaaatagtatgaggaattgagaaaagaaagaccagtgtcaaaaatctcctatattctttatgcaagtgagatcgtgtttaatgccaggcctcaagcaagagactacttgcctaattacaaaaaataaaaatwaaaattwaaaaaaagtgaaaacagctgctgttatagactccaagttagaggcaaatggtgaactgaggcttggagaagttaagtgatttgccttaggccacagagggaagtagtgtcagacccaagattagaaatcacaagttttcctcatacatttctaagctcagatcacaaaactgcaccatctggacattcacagataaatattggggtctgtctgtcattcctatctctaaaataatctcctatcctcttgcagtcccccataatttctcagcaaaaactgttttatttatgtgcagtttct

SEQ ID NO: 58505 - DNA, 600 bp, Chicken  19866894315564_1
gtaatgcagcagagaacatcctgatgctatcatgttttgagtctttatgcaatgacatgaagacggatcaataaacctgttggatatttggcagaaatgacagtgcaggaatcacggctatcactcgtctgtgtagctgaagtcctttgacatctggaaccactaaagatggagcaaccataggaggagtaagttacagtaagttacaaacgcaacttaaaactttgaatttctatttccctggacattttggtatgtcagcatttccagtgaaactgaaagtccattaaagtgtaccamaaaaagagattgcaggcgagtctgcagacactgacagctttttttccccctccaattaatatgctccttttcttcttcaaagcattagcctatttcattacaaactcaaataggggatactttgatctaaaaagtcaggtgtttcagatctgtgttaattagcagctgtccttaaagatttttacaataaatctgatgaaaaaatatgttataatctgtcatgcttgctatgtgcttagtacaagaaaagcataggtgagaatkatgtcatgtgtaataggagaaaagcataggtggaga

SEQ ID NO: 58506 - DNA, 600 bp, Chicken  19866894315564_2
ttccagtgaaactgaaagtccattaaagtgtaccamaaaaagagattgcaggcgagtctgcagacactgacagctttttttccccctccaattaatatgctccttttcttcttcaaagcattagcctatttcattacaaactcaaataggggatactttgatctaaaaagtcaggtgtttcagatctgtgttaattagcagctgtccttaaagatttttacaataaatctgatgaaaaaatatgttataatctgtcatgcttgctatgtgcttagtacaagaaaagcataggtgagaatkatgtcatgtgtaataggagaaaagcataggtggagatgatgtcatgtgacatatcatctgtgtatccatgtgttggacatattgaaaccggagtttagaaacaggaaagtgcaaatacaataagtatagtcaaaatcaattggtgaagttatccagattgcaatatccatattgctatgaccatgaagtatttacttccaaaccacattacaacctcgatttaaagataaaatgaatagaaaatgtaaacaaatcatatacactttattattttttagtaagttttttttttttttccca

SEQ ID NO: 58507 - DNA, 600 bp, Chicken  19866894315569_1
cagggaaggggaagttaatctcttactcaacagtaattgcaggaagcaaacaaggctggaaaatgaaacttgtaaaatgaaagatagcttagcagctttaatatctccacaatgctgacaaatcacgtgggagaagaaatgttctttcttagcaacaaagagcccctttctgatgcagcagaggaaaaagacatttgccacaggcctctactttttcagaccataaagcacaaagatggagcagtaagtttccattcggtagtcccttctcttctcacatgctaccaaccattcaaagargaaaggcacagtccaaatctataacatgccctgagaagcaaagagaagggaaaagtaagggtgacacatttattcacagctctaaaagttcctatttgttttagacagctactctagattagcagatatagctaataaaagtgagtcagaygatcataaaaagcagcacttccttycaggcccacagatttatctgtgaggaattgcccactgcatttctggcaagtgaactgaatggtatatttctgaaaataaaataaaaaatcaccttgtccttatgagaaactatgggcctgatgg

SEQ ID NO: 58508 - DNA, 600 bp, Chicken  19866894315569_2
gcaacaaagagcccctttctgatgcagcagaggaaaaagacatttgccacaggcctctactttttcagaccataaagcacaaagatggagcagtaagtttccattcggtagtcccttctcttctcacatgctaccaaccattcaaagargaaaggcacagtccaaatctataacatgccctgagaagcaaagagaagggaaaagtaagggtgacacatttattcacagctctaaaagttcctatttgttttagacagctactctagattagcagatatagctaataaaagtgagtcagaygatcataaaaagcagcacttccttycaggcccacagatttatctgtgaggaattgcccactgcatttctggcaagtgaactgaatggtatatttctgaaaataaaataaaaaatcaccttgtccttatgagaaactatgggcctgatgggaatagcaggcggtcattggtagtcactgtctgaaagcctacactggctggtagtacactctcacctgagcacagcccagtggcttttgtgagctggtggacacatcagacagatgattatttggaaaattatctaagtacagaagataaa

SEQ ID NO: 58509 - DNA, 600 bp, Chicken  19866894315569_3
agcagaggaaaaagacatttgccacaggcctctactttttcagaccataaagcacaaagatggagcagtaagtttccattcggtagtcccttctcttctcacatgctaccaaccattcaaagargaaaggcacagtccaaatctataacatgccctgagaagcaaagagaagggaaaagtaagggtgacacatttattcacagctctaaaagttcctatttgttttagacagctactctagattagcagatatagctaataaaagtgagtcagaygatcataaaaagcagcacttccttycaggcccacagatttatctgtgaggaattgcccactgcatttctggcaagtgaactgaatggtatatttctgaaaataaaataaaaaatcaccttgtccttatgagaaactatgggcctgatgggaatagcaggcggtcattggtagtcactgtctgaaagcctacactggctggtagtacactctcacctgagcacagcccagtggcttttgtgagctggtggacacatcagacagatgattatttggaaaattatctaagtacagaagataaaagagaaatgctgcaaggtattgaga

SEQ ID NO: 58510 - DNA, 600 bp, Chicken  19866894315571_1
tcataaataagttcattcaagaataaaacatctttaagttacctgaggacagatgttttttttctgtcttcttttccataaacataagaatgtgtaatgtacatgcattcaaaaggaaacttagtggcatgtaaagagagtggcaaggcccagccatttggaagaggctgcctctgctatcttgggtttgtagtaagaagtgagaaagtagtgtaccccttgttcttcacagacagaagtatagaaatttttattgtgggctttttactctttccccaagaatagaaaattctgaggaarttgctgttcccagtcagttacagtcacaaaacagactcaaagtatatagaaatatggcagaagcaattttgcaataggtattaacwttttttttyccttttatttggggtgggggggccatagtgggggaggagggttttgtatgtcagaaggtgaagctaaaatgtggtaacacaagtggtatgactgctagttcctccatttatgcatctcataccctacatcatggcatgcaggctgygtaccatgattctgtcattttctattcacgtctgagaataatcaggtcctgagatgctg

SEQ ID NO: 58511 - DNA, 600 bp, Chicken  19866894315571_2
agaatgtgtaatgtacatgcattcaaaaggaaacttagtggcatgtaaagagagtggcaaggcccagccatttggaagaggctgcctctgctatcttgggtttgtagtaagaagtgagaaagtagtgtaccccttgttcttcacagacagaagtatagaaatttttattgtgggctttttactctttccccaagaatagaaaattctgaggaarttgctgttcccagtcagttacagtcacaaaacagactcaaagtatatagaaatatggcagaagcaattttgcaataggtattaacwttttttttyccttttatttggggtgggggggccatagtgggggaggagggttttgtatgtcagaaggtgaagctaaaatgtggtaacacaagtggtatgactgctagttcctccatttatgcatctcataccctacatcatggcatgcaggctgygtaccatgattctgtcattttctattcacgtctgagaataatcaggtcctgagatgctgtgctgtaaggcacagcatatataacactcatttcaagctcagctctgcaggctgcttttggagctccttgctttctgtagaaatct

SEQ ID NO: 58512 - DNA, 600 bp, Chicken  19866894315571_3
aatgtacatgcattcaaaaggaaacttagtggcatgtaaagagagtggcaaggcccagccatttggaagaggctgcctctgctatcttgggtttgtagtaagaagtgagaaagtagtgtaccccttgttcttcacagacagaagtatagaaatttttattgtgggctttttactctttccccaagaatagaaaattctgaggaarttgctgttcccagtcagttacagtcacaaaacagactcaaagtatatagaaatatggcagaagcaattttgcaataggtattaacwttttttttyccttttatttggggtgggggggccatagtgggggaggagggttttgtatgtcagaaggtgaagctaaaatgtggtaacacaagtggtatgactgctagttcctccatttatgcatctcataccctacatcatggcatgcaggctgygtaccatgattctgtcattttctattcacgtctgagaataatcaggtcctgagatgctgtgctgtaaggcacagcatatataacactcatttcaagctcagctctgcaggctgcttttggagctccttgctttctgtagaaatctgctttcaga

SEQ ID NO: 58513 - DNA, 493 bp, Chicken  19866894315571_4
tagaaatttttattgtgggctttttactctttccccaagaatagaaaattctgaggaarttgctgttcccagtcagttacagtcacaaaacagactcaaagtatatagaaatatggcagaagcaattttgcaataggtattaacwttttttttyccttttatttggggtgggggggccatagtgggggaggagggttttgtatgtcagaaggtgaagctaaaatgtggtaacacaagtggtatgactgctagttcctccatttatgcatctcataccctacatcatggcatgcaggctgygtaccatgattctgtcattttctattcacgtctgagaataatcaggtcctgagatgctgtgctgtaaggcacagcatatataacactcatttcaagctcagctctgcaggctgcttttggagctccttgctttctgtagaaatctgctttcagacatgaaggcaatttaaaatgttgtgatctaatatacagg

SEQ ID NO: 58514 - DNA, 600 bp, Chicken  19866894315579_1
acctgaaactaatctgaaatagctgatcaggcaacatatcaatagctccatctcaatggctaagagccacagagcagccctaggctctgggacttaagtgccagtgctgctagagttctggactagcccctagcactactcatcaggcagctcatctccaaaccattcctgggcatggcccagtagccaacagaggccagggaccattctgcacctacagccaaatatggctactgtagtttttataacagtatgaatttgggacactgagtgaattggcctgagaggcagagaatgctyctgggcaagcacatgtgtaggaaagggaatgaaaccatgagaggcagagcactaggtcctatttcatatgtcttatgtaagagccaatgaagcaagtcttgctagatttagtgattcaaatagtatatataaatcaagaagaagcgagtagtagtacatcctatttccaacacaataatcatagttatctttcagaatacacttgatgccagtaaccctaatagtgcaacaaaaatcagaaagagcaaagtttacttttaaatctgaggttaagtttagaaaagcagaagttatgacagt

SEQ ID NO: 58515 - DNA, 600 bp, Chicken  19866894315590_1
tcataaaagcaaggataatgctttttttttggacttgctttgttttcagtcagggcgttagggaggaaaagagactttttttttttaaagaggattgtaaccaataacccatgtatgcatttttatacaaatgctttagtgaaggcagtttgatttctcaagacattatttattactccttgatgtatttttactttttgatctagaaatctgtgttgtgggtttgtttaataatctgagagagagaaagaagcaaaactttgatagtgcttttggcaggactatacattttgtggatgkagatgtgggaaacggaactcgtgaggttcttggctgctaagtatcccggtttgtgccacatcacagccgtgctctggctgtggagcccatctggttttcagggtgctaaccccagcagaagagtaatctgaggcggctttctggttgcgtatttgagaaactgccatgtgatgaccgcagttctgctggcttcaaggggtaaaaatgagctgcttgcagcaaaagaagggatgaagcatacaaagtcctcctgcagagcttcagttttagtcttttacagctgtcacaaatcagaacagg

SEQ ID NO: 58516 - DNA, 600 bp, Chicken  19866894315608_1
ggactttttcagcttttttctcagtccttgggcaacttcagtgtacttctgcctgctgcataaggaacccaagtcttcatccccactacataaatctcatctgcaattaagcaatataaaatagttccaattgctccttccaagcattacctcttacttacttactgcatctctctcctgctccttagggtttcgttcagtcatcaaacagatcctcagctcgcatcaccccaatgtggtttgttgcctgggattgttaccagcttgcctttgaacagatttgttggccactgctggaaygcacacatcaaatactactgccaacaccacgactgcccactgcactgacagcagctgaaaaccagcgyctctcagaacgagtggtcggctctgctcaaacaggagctaccgcacttctggagagcaattccctccacrctgcaggaattcagtggttccataaccactcacccacttagcaaacataacgttgtttgagtgctagtaagccgcgaatctcacaccgctctgcttttgaggatggctgagggctgcagcccatccctactagttctgttcgcacacacactccatcaggcc

SEQ ID NO: 58517 - DNA, 541 bp, Chicken  19866894315608_2
ccaagtcttcatccccactacataaatctcatctgcaattaagcaatataaaatagttccaattgctccttccaagcattacctcttacttacttactgcatctctctcctgctccttagggtttcgttcagtcatcaaacagatcctcagctcgcatcaccccaatgtggtttgttgcctgggattgttaccagcttgcctttgaacagatttgttggccactgctggaaygcacacatcaaatactactgccaacaccacgactgcccactgcactgacagcagctgaaaaccagcgyctctcagaacgagtggtcggctctgctcaaacaggagctaccgcacttctggagagcaattccctccacrctgcaggaattcagtggttccataaccactcacccacttagcaaacataacgttgtttgagtgctagtaagccgcgaatctcacaccgctctgcttttgaggatggctgagggctgcagcccatccctactagttctgttcgcacacacactccatcaggcctcccccaca

SEQ ID NO: 58518 - DNA, 471 bp, Chicken  19866894315608_3
tccaagcattacctcttacttacttactgcatctctctcctgctccttagggtttcgttcagtcatcaaacagatcctcagctcgcatcaccccaatgtggtttgttgcctgggattgttaccagcttgcctttgaacagatttgttggccactgctggaaygcacacatcaaatactactgccaacaccacgactgcccactgcactgacagcagctgaaaaccagcgyctctcagaacgagtggtcggctctgctcaaacaggagctaccgcacttctggagagcaattccctccacrctgcaggaattcagtggttccataaccactcacccacttagcaaacataacgttgtttgagtgctagtaagccgcgaatctcacaccgctctgcttttgaggatggctgagggctgcagcccatccctactagttctgttcgcacacacactccatcaggcctcccccaca

SEQ ID NO: 58519 - DNA, 600 bp, Chicken  19866894315610_1
attgttctaacacttgctgtttgttattcattgtaggggaatttcaggctctctactctggggactaatttttcccaaagagttcatctacattggcttccttggaagttaaagccaatgtaacagcagggggaatctgctctcagattgtatgactagaatttctataaataggagggactgatatagtgctatgaaaataattgacatttcagtgtgatagctgaacaaaaaattgagaagaaaaataatgtagtccatttcagctcaatttgttgccgatggttttgtatatgtgtrtgtttctgtgggctgagcaaaatatttcattcaacttcagacataaccattcatttcccagcctggctatttttgatgaaaagcaagttgttggaacagacaggatagatttaatcatcatctacagagcagataaggaactgcaaatgttcctcctacttaatggtctaccaggtaatgcactcctctggggtgcaggtgatggactctccagaaaagatgcagcatctgcccggactcatcttcaaacctaatcagtgaacaaggcatggagagattaacccagccaccctgcctggc

SEQ ID NO: 58520 - DNA, 600 bp, Chicken  19866894315615_1
attcaagactttcctttaaaaaacaatgcagtaataattactagtagtttaaaagcttcatactatttctttctctttactcctcacactctgtcttgaaagtccagtatcatcattgcttcaaatagttcgggtgtttccaacatagtgcagaactaagtaataggggaggcaagtaggaatgagacaagggcccacaggaaagatggattggaaggtagctgataaggaagggagagaagatagagtcactgtagttgaagtggttagaaaaaagaaagcaaccaaagctataaaaayaaaagttattgtgggaaatgaagaacaagaaaaaggaaaggtgagaagaaagaaacaaagaaaaatggttaaaaggcaaaatagaaacttggtacaaggaaataaatcacaattgactgatgatacatcatttttcctgggtcaaaaaaaaaaaagaaaaagtaatgaggtataggacaaatcataaatatgtgggcatcctagagctgatgctagctctaaggaataaagacttttttctgttaactactcaggctatggggtggagatagaagcaaactggtcaaaacagagactttt

SEQ ID NO: 58521 - DNA, 405 bp, Chicken  19866894315616_1
aacctggatctaagattaaccttttcaaagcttgtcttttatccacaagtctgctgcacttgacattttaacatctgttttcatttatctcatgtctttatttcattctgctaatgctgagaatatgttcttgtatgaatgtggaattttatctttctttcctcccaagtcagtgtgcacatctggtctaaatgaatgtttactctgcctactgagtttgaagagggaaggtacaagggttgctccaaaagcagtatctcctattttattctgttggtcttcagtgtcagaagtaggtgytggtggtatggcagtggagtctgaacattctcaccagtgttcaattacattttgttgccgtgcaagagatggcagcagaggtgcagtctgacaaaacatcatctg

SEQ ID NO: 58522 - DNA, 600 bp, Chicken  19866894315618_1
tgtttcatactgagcagagcagctgtgtccgttggaatgtacgaatgagtctcccttccacttgagtcaaggacaatcaattttatttttaaaatgtcataatcggtgatattgatcaacactccttaatggggttgctttcgaatccatactggcttgggttattgctacttcccttgcaattcatgctcaattaggctgccttgctaatgcatgtcagcttcatttaatcgctcccaggcctgcagtgtgagaaaagagagagctgacagagtaatcccgtgctttcacttttcagtragctgcctatttgtcttatttgttcacattttaasggctaagcacttgttatactgaaaacacagaaaagcagaagtcaagaattgctaataacccttggaaagcagagttagaactcaattgcttgtgcaaagaatttctgacattttcggtattttgaaaataaggaggtgtttgtaattagggtgctaatgagtagagtttgcctcaaaaaaactacagaaagaaatggtgagaagcaaacatcttctgctggctacatccttggaaaaacagcctgtttatttgccggttggctga

SEQ ID NO: 58523 - DNA, 600 bp, Chicken  19866894315618_2
aatgtacgaatgagtctcccttccacttgagtcaaggacaatcaattttatttttaaaatgtcataatcggtgatattgatcaacactccttaatggggttgctttcgaatccatactggcttgggttattgctacttcccttgcaattcatgctcaattaggctgccttgctaatgcatgtcagcttcatttaatcgctcccaggcctgcagtgtgagaaaagagagagctgacagagtaatcccgtgctttcacttttcagtragctgcctatttgtcttatttgttcacattttaasggctaagcacttgttatactgaaaacacagaaaagcagaagtcaagaattgctaataacccttggaaagcagagttagaactcaattgcttgtgcaaagaatttctgacattttcggtattttgaaaataaggaggtgtttgtaattagggtgctaatgagtagagtttgcctcaaaaaaactacagaaagaaatggtgagaagcaaacatcttctgctggctacatccttggaaaaacagcctgtttatttgccggttggctgaggataatgtggcagaagcagctaggattagctggg

SEQ ID NO: 58524 - DNA, 600 bp, Chicken  19866894315622_1
tgctgcagaaaactgaggtgggagagctttcttcaggtggctcagacaggagtccctcaaacagttttgcttgctgtgccatccaaggagaaaccacactcccacagtaaagtattgcagcagaaggggatcccaaaccccaagacagccagcacagcaaagaggctgaaagtgctggatcctcaacacgggaccaagctccctccctgcatccacagtcccttggcaaaagctccccaccacaccagttaattcccagttcatcaggtctggagaaggcctgggagcaagcatacaackgggttgctctcctaagtgtcaaagagggaccagagagcacactctacaaaggcagccctcagctgcacatacatcagccacccgccagacaacgcggcagcacagcagctcatccaaccagtagcactgcacccccagagacctaatttgcagagcctgtgaataaggaagtgtacctcaaagaccaaaaaaacccacaccaaactattaaaaacttctcatttcaaaagggctctgctgtggctccagcagtcatcccatttcaagccttcagcccaggggtgaaggtaagagccagtc

SEQ ID NO: 58525 - DNA, 600 bp, Chicken  19866894315625_1
tagtatgtttcgcttaaatggactgtcagtgtaacgtctttaacaataataaatgaggtgcgatgatattgtatcattcagagaaccacctttctactgcagtgctgcccaggaagtgtctgtttccctttctgacagttgtttttgttgcaggagaaggacagaattctttgaacttgtcggtaaaggtggttatgattggaatgttaaaaaccatcgagaaatatttcggtgagctctatcattccttgctttctgttatttcaacatgtaaccctatttgttaaaggagattcttaygtcgtggaggaaagattaaagcaataagagaagatagcttgctttaaaaatgcaatctatgatatgaaacacatgatatgatttctaaaygttactaaactttagcagaagtataatcagtacaacttcaccttttccattccagccccaccagtgactgctcagcctttctgctcattctcaaaaaagcatcagtaccctgccttaggacccaaagatcttccttttctgtttccttttctctcctcctctcagctcctctctgtcacaggctgtttctctccgttcttgttgtctgta

SEQ ID NO: 58526 - DNA, 600 bp, Chicken  19866894315625_2
tttctactgcagtgctgcccaggaagtgtctgtttccctttctgacagttgtttttgttgcaggagaaggacagaattctttgaacttgtcggtaaaggtggttatgattggaatgttaaaaaccatcgagaaatatttcggtgagctctatcattccttgctttctgttatttcaacatgtaaccctatttgttaaaggagattcttaygtcgtggaggaaagattaaagcaataagagaagatagcttgctttaaaaatgcaatctatgatatgaaacacatgatatgatttctaaaygttactaaactttagcagaagtataatcagtacaacttcaccttttccattccagccccaccagtgactgctcagcctttctgctcattctcaaaaaagcatcagtaccctgccttaggacccaaagatcttccttttctgtttccttttctctcctcctctcagctcctctctgtcacaggctgtttctctccgttcttgttgtctgtaactgggaatttgcagatacacaatattcttctaacacttaagaatgacctgagcatgcacccttataggtacttcaaatggtgggtgtgc

SEQ ID NO: 58527 - DNA, 600 bp, Chicken  19866894315642_1
cctagctcagtgtgatttaccctgttgttttctgctgtgcaaaactttttcagtggagctgcgatttcaggaggatgtttgcacagaaacataatgagccttggctggtcctcgggagcaggagctaggctgaatggctgatgacctcacagagaatctgggctatgctcaggcagaaaccactgagccagaaacaaaaacctggaggagctaaagcaggctctccatccctactccatgctagtcaagaggctttgtccagaagtccgtggcaaatgctagaaggatcattcatacttyttcattttttattttaaaaagtactaaaactttttwttttttttaatggatctgtgcttttcaatgtgtttgtataaactactcacttgtaaatgagctgtccctcttgctggctctgttcttatgagyagctttraacttgctcttcctcatgggcatgggacccaccagctgagtccctacgtaggctctgtgaaaatgggtttcttttacactcttgaaactacacagagcaaggttggtttgctttgtagtcaggtttagctgttcccattttgtaagcaactgtatagcagtatc

SEQ ID NO: 58528 - DNA, 600 bp, Chicken  19866894315642_2
gtgcaaaactttttcagtggagctgcgatttcaggaggatgtttgcacagaaacataatgagccttggctggtcctcgggagcaggagctaggctgaatggctgatgacctcacagagaatctgggctatgctcaggcagaaaccactgagccagaaacaaaaacctggaggagctaaagcaggctctccatccctactccatgctagtcaagaggctttgtccagaagtccgtggcaaatgctagaaggatcattcatacttyttcattttttattttaaaaagtactaaaactttttwttttttttaatggatctgtgcttttcaatgtgtttgtataaactactcacttgtaaatgagctgtccctcttgctggctctgttcttatgagyagctttraacttgctcttcctcatgggcatgggacccaccagctgagtccctacgtaggctctgtgaaaatgggtttcttttacactcttgaaactacacagagcaaggttggtttgctttgtagtcaggtttagctgttcccattttgtaagcaactgtatagcagtatctttctgattttcactgtcgtacaatacatagcattg

SEQ ID NO: 58529 - DNA, 600 bp, Chicken  19866894315642_3
ctgaatggctgatgacctcacagagaatctgggctatgctcaggcagaaaccactgagccagaaacaaaaacctggaggagctaaagcaggctctccatccctactccatgctagtcaagaggctttgtccagaagtccgtggcaaatgctagaaggatcattcatacttyttcattttttattttaaaaagtactaaaactttttwttttttttaatggatctgtgcttttcaatgtgtttgtataaactactcacttgtaaatgagctgtccctcttgctggctctgttcttatgagyagctttraacttgctcttcctcatgggcatgggacccaccagctgagtccctacgtaggctctgtgaaaatgggtttcttttacactcttgaaactacacagagcaaggttggtttgctttgtagtcaggtttagctgttcccattttgtaagcaactgtatagcagtatctttctgattttcactgtcgtacaatacatagcattggrggaaaaatataagcaggatctatgtttgaacaaggagcaggacaaagccagaatttttgtccaatagcacttttctggcctcttctagcaa

SEQ ID NO: 58530 - DNA, 600 bp, Chicken  19866894315642_4
gctgatgacctcacagagaatctgggctatgctcaggcagaaaccactgagccagaaacaaaaacctggaggagctaaagcaggctctccatccctactccatgctagtcaagaggctttgtccagaagtccgtggcaaatgctagaaggatcattcatacttyttcattttttattttaaaaagtactaaaactttttwttttttttaatggatctgtgcttttcaatgtgtttgtataaactactcacttgtaaatgagctgtccctcttgctggctctgttcttatgagyagctttraacttgctcttcctcatgggcatgggacccaccagctgagtccctacgtaggctctgtgaaaatgggtttcttttacactcttgaaactacacagagcaaggttggtttgctttgtagtcaggtttagctgttcccattttgtaagcaactgtatagcagtatctttctgattttcactgtcgtacaatacatagcattggrggaaaaatataagcaggatctatgtttgaacaaggagcaggacaaagccagaatttttgtccaatagcacttttctggcctcttctagcaattaacta

SEQ ID NO: 58531 - DNA, 527 bp, Chicken  19866894315642_5
ttttttaatggatctgtgcttttcaatgtgtttgtataaactactcacttgtaaatgagctgtccctcttgctggctctgttcttatgagyagctttraacttgctcttcctcatgggcatgggacccaccagctgagtccctacgtaggctctgtgaaaatgggtttcttttacactcttgaaactacacagagcaaggttggtttgctttgtagtcaggtttagctgttcccattttgtaagcaactgtatagcagtatctttctgattttcactgtcgtacaatacatagcattggrggaaaaatataagcaggatctatgtttgaacaaggagcaggacaaagccagaatttttgtccaatagcacttttctggcctcttctagcaattaactaccttacagtaataaatcacattttgcactacagggatgtaaagccttgaacagtaaggctgcgggttatagaattgctcctcacaatgctgactctgacctctttccaaaatctgttctgctttcagaa

SEQ ID NO: 58532 - DNA, 599 bp, Chicken  19866894315664_1
  misc_feature (1)..(138): n is any nucleotide
nnnnnnnnnnnnnnnnnnnnnnnnnnnnnnnnnnnnnnnnnnnnnnnnnnnnnnnnnnnnnnnnnnnnnnnnnnnnnnnnnnnnnnnnnnnnnnnnnnnnnnnnnnnnnnnnnnnnnnnnnnnnnnnnnnnnnnnnnntgtatgctgcacatatttgaagtcccatatgctgaggcatatgttgtaaggtattgtttctagttatgaatttacggtccgtataggatagctatacaggggataaaactaagctcttctgctttccactaacagtaaatagagataaggcagcatctactrctaaagatgacttttacctttatcctcctcttcagctgtcctagagctcccatccttttgggtgtgcaaaatgaagtcatttgtagtatcttggagaaattttctcctctctaggtgacctgataatggcagtgtctgatgtaagtgatagccaagtgtggaagttcattcttacagcagtgatagtttaacgtgagcagtaggcatacagtgactctgtggccaattctcaacgctgatggaaggttctcctggggatagcttttatatggtgacctaaaaacctcgagttcaggagg

SEQ ID NO: 58533 - DNA, 600 bp, Chicken  19866894315664_2
gtggccaattctcaacgctgatggaaggttctcctggggatagcttttatatggtgacctaaaaacctcgagttcaggaggcaattaggtggctatcaggattgtgccctttaatgctaggatagcatttagttaatagcccatctactaacgtgtgagagatacataccctttcccccccatttgcagcctgtactatgtgtgttgttcaaaaccaaatatttacgctcagatcaatgtttgagctttaaataattgctggaatctttactaccggctggtgtcttttgtcttctagarcctaagtgaccactatcaaaataattttaaaatgctaaacttttgccacaaaattcatgtgggaaaactttaacaaaatgcttgatcattttgtagctgggcatactgttactaatggttgcgtttagtgatggaggctataaactgtaaatcataccagtgtttcccatggcagagcaagctgcagtagtgatctgacagtgccctttgacccctctaaagaaggcatagtgggaagtatgtgaggacactatgcttgattagtctctccctagtttgcctgggtaggaagataattga

SEQ ID NO: 58534 - DNA, 600 bp, Chicken  19866894315669_1
ttgcacggatctggctgtgatgtgaaggctaaagcaggaggctgtaattagtggggtttttgtgttacagctttatgttaggtaggggtgtaacctgcggctgtgctgggtgagagctctgacacagggaacagcgctgggggtgtgagtgctgctatcagccttcctacacatggcttcaaaccaaaaggggctgatttagactggatataaagaaaaaactctttgcaataagggtgctgaggcactggctcaggttgcccagagggtgcagcagtcaggggatgggctgagagcacytaatggagctgtgggtgcccatgtactgcaggggaygggactgagggcctttagaagtcccttccaacttaaaccattctgtgaaaagcagcattctccagttgctttacccagtcagtgtccctcatggtctaatgctgttttatttctttttttcctaggaaccttgggaaatctggtctgcgtgtttcgtgcctcggcctgggtgagtgcatggcccgagcaccatggcttctgggcagagctttacttctgaagtgctacagggaagaacagggctttattccagcagtgctgggt

SEQ ID NO: 58535 - DNA, 600 bp, Chicken  19866894315669_2
ggaggctgtaattagtggggtttttgtgttacagctttatgttaggtaggggtgtaacctgcggctgtgctgggtgagagctctgacacagggaacagcgctgggggtgtgagtgctgctatcagccttcctacacatggcttcaaaccaaaaggggctgatttagactggatataaagaaaaaactctttgcaataagggtgctgaggcactggctcaggttgcccagagggtgcagcagtcaggggatgggctgagagcacytaatggagctgtgggtgcccatgtactgcaggggaygggactgagggcctttagaagtcccttccaacttaaaccattctgtgaaaagcagcattctccagttgctttacccagtcagtgtccctcatggtctaatgctgttttatttctttttttcctaggaaccttgggaaatctggtctgcgtgtttcgtgcctcggcctgggtgagtgcatggcccgagcaccatggcttctgggcagagctttacttctgaagtgctacagggaagaacagggctttattccagcagtgctgggtcgggttggatattaggaaatattttctctctgaaga

SEQ ID NO: 58536 - DNA, 590 bp, Chicken  19866894315672_1
gtgaagtgacagtctggatctcatgtcttctgccagctaagttaatggctattaacaaaatcagtttcaaaaccacagagttgtagctttttcaagaatggttcacaggcagtccatgaaacacgagaattgtggtgttcctcttgcttcctcctcccaaaaatgttttctggtctacgtttccacggatatgagcaaccaacatcaccatctgggggtgcagctttcccaggcacatctgactgccctgaagatgagagctagtctggagaagaaaaaagaaagtgaatgtatacacayatttggcagtacctaccaattgtgtatattcactatgtaacatcatayaactcctgcactgagacagtcacacagtcaccatctctaacagggaattcaacaggagttctctgattcatggagccaagttccagtcctgtgatccagagaaagtgagtgctccagcagctcagtcacaaacaaaccttccagggaaacctgagactcaacttcagaacataaaggcaatctgtacagaacaccctgagcaagctagggaacagtgagtgctttagaaacttcaggcaatg

SEQ ID NO: 58537 - DNA, 542 bp, Chicken  19866894315672_2
ctattaacaaaatcagtttcaaaaccacagagttgtagctttttcaagaatggttcacaggcagtccatgaaacacgagaattgtggtgttcctcttgcttcctcctcccaaaaatgttttctggtctacgtttccacggatatgagcaaccaacatcaccatctgggggtgcagctttcccaggcacatctgactgccctgaagatgagagctagtctggagaagaaaaaagaaagtgaatgtatacacayatttggcagtacctaccaattgtgtatattcactatgtaacatcatayaactcctgcactgagacagtcacacagtcaccatctctaacagggaattcaacaggagttctctgattcatggagccaagttccagtcctgtgatccagagaaagtgagtgctccagcagctcagtcacaaacaaaccttccagggaaacctgagactcaacttcagaacataaaggcaatctgtacagaacaccctgagcaagctagggaacagtgagtgctttagaaacttcaggcaatg

SEQ ID NO: 58538 - DNA, 599 bp, Chicken  19866894315673_1
  misc_feature (1)..(40): n is any nucleotide
nnnnnnnnnnnnnnnnnnnnnnnnnnnnnnnnnnnnnnnncccataatttgctccattctaatcgagagaagtttatatgaaacaaatgctcgctttccttctcttctctcttcacatcagtcactgtcagcttgatatagaaaatatggctgttaatagcttgcagtggaacaaacatttgcataactgttacctcagagcccataactctgagctaattggctgatggtgattaaaatgattaagtgactgtaatttatatgattaaccaattaagccattctcctgtgattggcctrgggtaggctctgggatgtgcgtttgtttcccagcatgcatgccggcagtgcgtgatattaaatattcttttaaatacttgctattgttcctgccaacagcactcaaggtactttaaaggtagttaattactgcacatcactcgtgtaacacagagagtcgtaagttgaaggcaacacatgaattattaacaaaataaatctagcaccactaggataacacggaattactgaaggcagtaactaggacagtgagtttgatcatccagaactgatggatgactgactggtgtaaatggata

SEQ ID NO: 58539 - DNA, 600 bp, Chicken  19866894315673_2
ttcagctgctgtgtgtcctgaaatcttaaatccattcccagttagcctgagctatctgttctgatgctgcaacgcactaggcttttaagagatgagaatactacactttttgcagtatccttcagagcaggttgcaatttcctttgtgttttctcattttcttgattagttagtaaggtcaatataataaagattgctagcgttttactatcatgtgggttaactagttccatgtgcagggctatcctgaatggtggccttggcaagcgggcaaatatcgtactttgctgttgtagcaayttctgatacttaactgctttaagtgtcattgtgatgctaaccgggtatccccagtgcttggctggatggttttttaactcacattttggtattttaggataacaaatgtatgaaatgttgactgcttcttgtttttaatctgaatgttttgttcaaaaaggctttggcaggttggcttctgtgtcaggatgtctgctttacagtacgctgctgtgaaattaaacaacttgccaatgctcctgtgctgagcctaaggaaaggcagagattcatcctcagttctgcctgttagatgacagcg

SEQ ID NO: 58540 - DNA, 600 bp, Chicken  19866894315677_1
ggcgtgcctggttgtgccaaagatgatgaaaaataaatctccaccgggacgaggcagcctggcacagccgcagcccattgccaggatatcccgatgcgcgtcacgctggcaccatcgtggtatgggcacggtggcggtgacacttctctcccttgcaggtggtggtggcacaatggaggcagagggcagccgggtgcgccgcaggaagcccgacatggccctctatgtgcccaaagcgcggcgggagagagcggcacaagaggcggccgccagccaccgggagcctgagaagcagcgccyggcgctggacatccccaagggtggctctgaggggcagaggcraagccccggagccaggacacacgtgggcagagcagctggcagggagagcaaggctgcggccacggagccacgggcagcttctgctggggacagacaggcagcaggagcgtcgcccactgtgcaggagccgagcctggagccagctgctgcacagcccccgggcagagcatcccgggatgcagggcatggggagcacagccatggggtgaggacggtgccggaccctctgggtgcccatcctgtggcagcctctgagca

SEQ ID NO: 58541 - DNA, 600 bp, Chicken  19866894315677_2
accgggacgaggcagcctggcacagccgcagcccattgccaggatatcccgatgcgcgtcacgctggcaccatcgtggtatgggcacggtggcggtgacacttctctcccttgcaggtggtggtggcacaatggaggcagagggcagccgggtgcgccgcaggaagcccgacatggccctctatgtgcccaaagcgcggcgggagagagcggcacaagaggcggccgccagccaccgggagcctgagaagcagcgccyggcgctggacatccccaagggtggctctgaggggcagaggcraagccccggagccaggacacacgtgggcagagcagctggcagggagagcaaggctgcggccacggagccacgggcagcttctgctggggacagacaggcagcaggagcgtcgcccactgtgcaggagccgagcctggagccagctgctgcacagcccccgggcagagcatcccgggatgcagggcatggggagcacagccatggggtgaggacggtgccggaccctctgggtgcccatcctgtggcagcctctgagcattgtggtgatcctgatgtatgtaatgatggtgtaatggcagc

SEQ ID NO: 58542 - DNA, 600 bp, Chicken  19866894315684_1
aaaggcggctatagaatgctctccactgagagcagcaaaactctccggcatgcaaagggcgttagaacagagttacttatcttggatagcatcattaaatcacagaatcattaaggttggaggagggtctgaccacttaaccccaccccacccccatgcccactgcccacgtccctcagtgccacatccccatggctctgggacacccccagggatggtgaccccccaactccccgggcagctgtgccactgcctgactgctctttggagaaggaatggtccctaatacccaacctgacyctacctcagtgcaacctgaggcygtcacctcttgtcctgaatgacactacacgagacactaacaccaaattaacagcattctgaattcacaaagcacggccccactcccaggaagaaccacaaacgtttctgcactcccacacttgctagttgtgacaaatagggacagtctctatagagtcattttcatttggtacacagctgtgagccacacagctcctcttgtttcaggaaacagcggtcttttcaacagataagtttccctatttagtgttttgagttatatttcctttccaaaat

SEQ ID NO: 58543 - DNA, 600 bp, Chicken  19866894315684_2
cactgagagcagcaaaactctccggcatgcaaagggcgttagaacagagttacttatcttggatagcatcattaaatcacagaatcattaaggttggaggagggtctgaccacttaaccccaccccacccccatgcccactgcccacgtccctcagtgccacatccccatggctctgggacacccccagggatggtgaccccccaactccccgggcagctgtgccactgcctgactgctctttggagaaggaatggtccctaatacccaacctgacyctacctcagtgcaacctgaggcygtcacctcttgtcctgaatgacactacacgagacactaacaccaaattaacagcattctgaattcacaaagcacggccccactcccaggaagaaccacaaacgtttctgcactcccacacttgctagttgtgacaaatagggacagtctctatagagtcattttcatttggtacacagctgtgagccacacagctcctcttgtttcaggaaacagcggtcttttcaacagataagtttccctatttagtgttttgagttatatttcctttccaaaatacccttcctttggaaaagtcttc

SEQ ID NO: 58544 - DNA, 600 bp, Chicken  19866894315693_1
aactgccagaactgaaggaaagaaaaaagaaaaagagaaagaaaagaatgagcctttcttaagagctcatattcatgccaagcaactgtctcttgaagcagcacaggaattaatctaaagcatggatatgtgcaaattctatcccaaactacttcaggctaatggcctaacttgctgaccaagctaccacgtgactgtatttcccatggcagaggatatcatttggaaacaaacagtcctgcagccaggagggaggaaagattcaatatgggaactatgctaatattattggggtgacascaagggcttcagctgataaacaatcgagcagacagtttggtgagcctcacacttggattctccyccgcaacacagctctggccagagagcctctgtcatgatcaagtccctagattttcctttctccatatttcaatcaagactcggatatgtgctgtcatagagagggacacatgtagtgactaaagaccgtcttgaggtgttatccatctccttgatagatgaggaggatgcaggtagtggacagagcagatgtttccagctgatggaaccttttaatggagaaggctggaaaggagg

SEQ ID NO: 58545 - DNA, 575 bp, Chicken  19866894315693_2
gctcatattcatgccaagcaactgtctcttgaagcagcacaggaattaatctaaagcatggatatgtgcaaattctatcccaaactacttcaggctaatggcctaacttgctgaccaagctaccacgtgactgtatttcccatggcagaggatatcatttggaaacaaacagtcctgcagccaggagggaggaaagattcaatatgggaactatgctaatattattggggtgacascaagggcttcagctgataaacaatcgagcagacagtttggtgagcctcacacttggattctccyccgcaacacagctctggccagagagcctctgtcatgatcaagtccctagattttcctttctccatatttcaatcaagactcggatatgtgctgtcatagagagggacacatgtagtgactaaagaccgtcttgaggtgttatccatctccttgatagatgaggaggatgcaggtagtggacagagcagatgtttccagctgatggaaccttttaatggagaaggctggaaaggaggtccgtggggatggcctaaaggagccatttccagagtcat

SEQ ID NO: 58546 - DNA, 600 bp, Chicken  19866894315694_1
gataaagacagaagaactgtgctggcaacattaaattatcgccctgttgcgctccagcagagtaatttgggaacggtgctgcaaactttcttctgttttgcattgggagtacagagaaataacctctattttccaattgcaaaaggaattctggttgtttttgtgaagagccatgacaaagcgttacgtaggaattaacagctcgcccatttaaactagtcgtgtttggctcccttctggttcagaagaaagaaactgaatgcttcaggatgagattcaactcatctccctgaagtgtgyctattggcagaagatgcaccktacctatttcccactatccataacgactccagacaggtgctccaggtctgggtgaacgcagtggaatgaagtcctcattcatcccagaggacgtgtgtttgggcatctatttcagtcatggtgccttttattacctgacctcacaacctggcccctgaggtctctggctctcccattttcactggtctcagtgccctgtgtccatttcagaagccatcactgtatgctgtttaataaaaccatggtgcaaggactactgaaattgtttctgttttcagg

SEQ ID NO: 58547 - DNA, 600 bp, Chicken  19866894315694_2
ctggcaacattaaattatcgccctgttgcgctccagcagagtaatttgggaacggtgctgcaaactttcttctgttttgcattgggagtacagagaaataacctctattttccaattgcaaaaggaattctggttgtttttgtgaagagccatgacaaagcgttacgtaggaattaacagctcgcccatttaaactagtcgtgtttggctcccttctggttcagaagaaagaaactgaatgcttcaggatgagattcaactcatctccctgaagtgtgyctattggcagaagatgcaccktacctatttcccactatccataacgactccagacaggtgctccaggtctgggtgaacgcagtggaatgaagtcctcattcatcccagaggacgtgtgtttgggcatctatttcagtcatggtgccttttattacctgacctcacaacctggcccctgaggtctctggctctcccattttcactggtctcagtgccctgtgtccatttcagaagccatcactgtatgctgtttaataaaaccatggtgcaaggactactgaaattgtttctgttttcaggctgcagggctcctaccagaac

SEQ ID NO: 58548 - DNA, 600 bp, Chicken  19866894315695_1
aacagacgtcatgttaaaaggaaagaataaaagatagcaaacagtgaatgaatgctattaatgtatgttagaatataaataaacatttataacacagatgctggtggtttggggatctttgctatttcctgcttttggtcacttatcagtagcgtataaatccgtcacccaatattggattttattaaatctctactaactaaatctgtgttggttggacaaactgtccttccctgggcaataccatatgcttttcacagaaataaagacaactctgggccccctttacttaactgtatwcactgcttgtataaaagtcatcctgggaccttgtactgacacacgtctaaaaacacatttcctgacctgaaagtgtaattcacattaccttgtactcagaggattaccaatgatattctacagtgaaaaagattgtgctggcatagacgtgctcaattccaatcagtaggccagctgtaaattatcaaagtgcttatagggcagcaagtgatttaatataggaagaagcagtaagtcaaaataataaaaaagcaggcacataactctaccttctttgaatctgattgaaatttagtttta

SEQ ID NO: 58549 - DNA, 469 bp, Chicken  19866894315703_1
tcagaggtggacacttcagtgctgcatttcattgccagcatctgtgctcggatcctggcattcactaactcttgtgtcaacccatttgcactctacttgctcagcaagagctttcggaaacagttcaacaaccagctattctgctgcagagctcgcctcctcatccgctcccagagcatggctaggagcaccacacggatgacctccctcaagagcaccaaccactccctggccaccttcagccttatcaatggcaaccatgtctgccatgaaggctatgtctaaaacacatagctgggracagctgcatggcatgcctagcgcaactgcttagttctatggggatgatgagtagtgcaaatatctgtgcatgcatgcatatgtgtgtgcaaaggaagtctgatgcactcagagaactcaggagagctggaagcatcccacatctcatcctgggctgcagtatgtctgg

SEQ ID NO: 58550 - DNA, 600 bp, Chicken  19866894315740_1
ccaacagaatttgtgatgagagccctggagtgtgtttaccacttaagctgcttctgttgctgtgtttgtgagcgacagctgagaaaaggggatgagtttgttcttaaggaagggcagttgctctgtaaaagtgactatgagaaagagaaggacctgttgagctccgtcagcccagacgattccgactcaggtgagcgttcccacttctatcccagctggaaaaactggaagagtttgcagagtgtttttacagaaaagcacatccactttctctctatgcatttgtcacccatacagttwcagctcttagcaggcacagctaaaaatctcagctaccagttcttcctgactttgttcctttccttaatctgctgctgtcttagtaaagttgaaaaaatgttgggggctcttgagggtcaatactgtgtgtttctatgagatcacagcacgtgaatcagactgacttcagtttcctgggacctcaatcaaagcctactcttttccacaggctttctttcctcctgaaatatttttgccctgatatcagggaatcttctgctcatatactttcaatagcgagccagaaaaatgggtagaagg

SEQ ID NO: 58551 - DNA, 600 bp, Chicken  19866894315741_1
gtgttcaggtctctgactagcttcagagaaagggggagttggcagtttcacatgagcgtggagaggtaggaaggaacatcctgtcaaagcacagctaaccctcagcactctgtgagagggctgctactttcccagcatcataaaagatgcagttttggctgctgtgatttaccttcccttggcacagtcctgcaaacagccatcttcacttaaagccaaaaaaacttccctaaggaaatgctctgaagtctcttagctgatttagaggacaaaagcaggaacacaacggcttaacagtcwttctcaggactttctcttcamtttcttaagtgttcacttaaacttttagtcttggaacaactttgagaaacactttacccgttgaaaatcagctgcctggtccagtctccatccccttccaggtcacatcaggatcctacagttgcaggcagtttagcagtctccactgatatgcaatgacagactcttaccttggaagaagaggccgctgggtaactttgctgcctcagatgatactgccaaccacaccactgtatcagctccctgcgcctctgtgcgcaggctgttcttcatcttctg

SEQ ID NO: 58552 - DNA, 600 bp, Chicken  19866894315741_2
ttcagagaaagggggagttggcagtttcacatgagcgtggagaggtaggaaggaacatcctgtcaaagcacagctaaccctcagcactctgtgagagggctgctactttcccagcatcataaaagatgcagttttggctgctgtgatttaccttcccttggcacagtcctgcaaacagccatcttcacttaaagccaaaaaaacttccctaaggaaatgctctgaagtctcttagctgatttagaggacaaaagcaggaacacaacggcttaacagtcwttctcaggactttctcttcamtttcttaagtgttcacttaaacttttagtcttggaacaactttgagaaacactttacccgttgaaaatcagctgcctggtccagtctccatccccttccaggtcacatcaggatcctacagttgcaggcagtttagcagtctccactgatatgcaatgacagactcttaccttggaagaagaggccgctgggtaactttgctgcctcagatgatactgccaaccacaccactgtatcagctccctgcgcctctgtgcgcaggctgttcttcatcttctgatagaagtctggcatcgacga

SEQ ID NO: 58553 - DNA, 600 bp, Chicken  19866894315753_1
taataatctgagaagattctttgcatgaaaaaaaccaattttggactgaagatatatgaggatgattggtgagccactcttgcctatctaccagcgctcctggatgactggagaggttccagaggattggaggcttgccgatgtgactcccatctacaggaagggccataaggaggatctggggaactacaggcccatcagcctgacctcggtgccagggaaggtcatggaacaaatcatcctgggacagatcacacagttcatgcgtggtgtccaggggatcaggcccagccagcacakgttcatgaaaggcaggtcatgcttgaccaacctcatctccttctatgactgggtgaccagactggtagatgagggaaaggctatggatgtagtctacctagacttcagcaaagcctttgacacggtctctcacagtattcttctggggaaactggctgcccgtggcctggacagttttaccctctgtggggtaaggaactggcttttataacatattattattatattatatgtatattatatatatatacacatgtatatatgtatatattataacatatataaaatatatttataaca

SEQ ID NO: 58554 - DNA, 600 bp, Chicken  19866894315757_1
tgcacaggagaaggagcatgtaatcctaagtcaacaattctgaagtgacaaaacattaaaaaaaaaaatgaataccaatgatatcagaatattaaaatgctaatttaggcttatctacaagtgaaagcttacaatagattaataggaatttccaacaggaagctgccttgcaggtcactgaacttgcatcagcctctcacgttggcagcaacacaaggcgtaatttcaagtacacatttacaaagcttgctctaagagcagccaagtgcactgctctgacttctgtggctcctgctgtaycacttcaagtgcagaaattgtctattttttcaataaggtatttctgtcatcttgtcacctcgtgaacttaagttcctcttcacaaagcactttgttttctctctcttcctctactactaccactggaaagttgtcctggagtttcctattcctagaaggaagctcttcacaagtaattttcagctgaagtttttatacttgtttatatacatttgcattaacactgttctagcagtagtaatacatttccttatttggtgcttcttctctatacttcatttgctttttttttttcttttt

SEQ ID NO: 58555 - DNA, 600 bp, Chicken  19866894315773_1
ccttgttcagttctgtgctatagaagttaaattgcaaaccagtaccccagtagctcactaaaaaagctaattctgttattcctccattatgctgaaatctgaagtacagctctaaccaaaactgaggtacattaacaaaatatctgacatacctatagcacacaatatttttctcatgaatgctataagcatacacttggctctgtatttttacgaattattgtccctgtagctactatagagcacaattaatgagacccagtatatccaagaaataatagatccaaaggaagatgcacwttttmtatgatggaaacaaaagataactgtctaacttaatgtttgttccagtatctagcagttcttaattcaaaggacacaaaatatataaattaaaaaaggatattccgtaattgaagaacgaacataggtatttctaagcctttactgtgggaatcttttttggaacataaaatagtggaagaagttcagagtttaagcagcatactctccattcttatgtattattaactgttttaacagaagtagcatgtacatgtcaacatctgttagaacaatcgaagcatgttaatctattta

SEQ ID NO: 58556 - DNA, 600 bp, Chicken  19866894315773_2
ttcagttctgtgctatagaagttaaattgcaaaccagtaccccagtagctcactaaaaaagctaattctgttattcctccattatgctgaaatctgaagtacagctctaaccaaaactgaggtacattaacaaaatatctgacatacctatagcacacaatatttttctcatgaatgctataagcatacacttggctctgtatttttacgaattattgtccctgtagctactatagagcacaattaatgagacccagtatatccaagaaataatagatccaaaggaagatgcacwttttmtatgatggaaacaaaagataactgtctaacttaatgtttgttccagtatctagcagttcttaattcaaaggacacaaaatatataaattaaaaaaggatattccgtaattgaagaacgaacataggtatttctaagcctttactgtgggaatcttttttggaacataaaatagtggaagaagttcagagtttaagcagcatactctccattcttatgtattattaactgttttaacagaagtagcatgtacatgtcaacatctgttagaacaatcgaagcatgttaatctatttaaggac

SEQ ID NO: 58557 - DNA, 599 bp, Chicken  19866894315774_1
  misc_feature (1)..(203): n is any nucleotide
nnnnnnnnnnnnnnnnnnnnnnnnnnnnnnnnnnnnnnnnnnnnnnnnnnnnnnnnnnnnnnnnnnnnnnnnnnnnnnnnnnnnnnnnnnnnnnnnnnnnnnnnnnnnnnnnnnnnnnnnnnnnnnnnnnnnnnnnnnnnnnnnnnnnnnnnnnnnnnnnnnnnnnnnnnnnnnnnnnnnnnnnnnnnnnnnnnnnnnnnnnnattgcaggctattctaggtattgtaggtagcaagaatgcagacaaaaagaatataatcaatgttcttttcacgtacatgtgtgctagataccaacawtttgatttaaattattcttcatgagccatactattatcatcctgagataaagcatcctcgaacaggttaataaacagcatttatctaaatccatttcattatctgctcttgaaaatatataaaaaaaaacttcagtaagaagtatcttctttactcttaagagcataaactgaagaaaaaaaatgttttccagtactgacactgggaggtgctgatatattcagagaaactacttagaagcaggatggaaaattcacaggagacagagtttaacaaatgaggaaggcaaagaagcaaca

SEQ ID NO: 58558 - DNA, 600 bp, Chicken  19866894315785_1
gttttctctaaaagcttttagtaggtgtacatgtgcttaagaaagtaaattctccttcatgatttgataccaattcaacaatgaaataattgcccacacgtaattttgccttgtccatccaaatatcaatatgcatttgatcaaataatctgaaatatagagtcatgagtgaaactgttgtcatggtctctagaggaggaaagagaatgaagagaatggacaagttataaatgatgaacagattgacacaagaaaagctactaatggcatgttccactcatcatttctgaaagaaaaaawtattagaaattatccagaaagtttctctagtcatgaataatgaaacctgtcttgactaaatagaaaaaactgcatttcaacagacctgaaggaaagagaaatatatatatatatatatacacacacacaccagagcttttctgttgcatttgatgaaaccaaaaagacaaaaaaagacaagactaacagaataacagaaaggaggatgacaacaaaaaggacgaagacgaatacactaactgtacactgagatgtgagttttaaaaaagagataaaaacaaaaaaatgctaagacttaag

SEQ ID NO: 58559 - DNA, 498 bp, Chicken  19866894315785_2
caaatatcaatatgcatttgatcaaataatctgaaatatagagtcatgagtgaaactgttgtcatggtctctagaggaggaaagagaatgaagagaatggacaagttataaatgatgaacagattgacacaagaaaagctactaatggcatgttccactcatcatttctgaaagaaaaaawtattagaaattatccagaaagtttctctagtcatgaataatgaaacctgtcttgactaaatagaaaaaactgcatttcaacagacctgaaggaaagagaaatatatatatatatatatwcacacacacaccagagcttttctgttgcatttgatgaaaccaaaaagacaaaaaaagacaagactaacagaataacagaaaggaggatgacaacaaaaaggacgaagacgaatacactaactgtacactgagatgtgagttttaaaaaagagataaaaacaaaaaaatgctaagacttaaggtaaggaaaaacacatt

SEQ ID NO: 58560 - DNA, 497 bp, Chicken  19866894315785_3
aaatatcaatatgcatttgatcaaataatctgaaatatagagtcatgagtgaaactgttgtcatggtctctagaggaggaaagagaatgaagagaatggacaagttataaatgatgaacagattgacacaagaaaagctactaatggcatgttccactcatcatttctgaaagaaaaaawtattagaaattatccagaaagtttctctagtcatgaataatgaaacctgtcttgactaaatagaaaaaactgcatttcaacagacctgaaggaaagagaaatatatatatatatatatawacacacacaccagagcttttctgttgcatttgatgaaaccaaaaagacaaaaaaagacaagactaacagaataacagaaaggaggatgacaacaaaaaggacgaagacgaatacactaactgtacactgagatgtgagttttaaaaaagagataaaaacaaaaaaatgctaagacttaaggtaaggaaaaacacatt

SEQ ID NO: 58561 - DNA, 600 bp, Chicken  19866894315788_1
gtcctcccagcagagaattaacatttgcagctgaattgtgtgatgatagaatagccaatatatgaagagatgttgctgtcagcagcatggcaataaaagcatagcaaaaatggacaggtccagcactcagaatactgagcaacacttgtgaaggcagttctacagctttgcaattgctaaaatgatgtgctctgttatgtgaaatttgtatgtaagctcaaggtcaaaagtttaaaacactcagcactgtaaaatattcttatggtatttagtggatggaaatgacctccaaaagaattrcatgtggataaatggaacagagctgaccttttttgagaagtaactgtatgcaatgatggcttttttctgtgtcttctgccacamtgacaagtccaatgagggtaaatgtgctctgttatcctaggattaagatggaagatcctggagaaagattcrgccttgccttacagcagcttgctggagaacgcaacattggagctgagtcaacatgcggcttagggcaggctgcaacctctgctatcacagaatcatagagccattgaggttgggaaggaccactgagatcatctagttagccca

SEQ ID NO: 58562 - DNA, 600 bp, Chicken  19866894315788_2
gcatggcaataaaagcatagcaaaaatggacaggtccagcactcagaatactgagcaacacttgtgaaggcagttctacagctttgcaattgctaaaatgatgtgctctgttatgtgaaatttgtatgtaagctcaaggtcaaaagtttaaaacactcagcactgtaaaatattcttatggtatttagtggatggaaatgacctccaaaagaattrcatgtggataaatggaacagagctgaccttttttgagaagtaactgtatgcaatgatggcttttttctgtgtcttctgccacamtgacaagtccaatgagggtaaatgtgctctgttatcctaggattaagatggaagatcctggagaaagattcrgccttgccttacagcagcttgctggagaacgcaacattggagctgagtcaacatgcggcttagggcaggctgcaacctctgctatcacagaatcatagagccattgaggttgggaaggaccactgagatcatctagttagcccatcatcaccatggccactaaccatgtccctcaatgccacacctacatgtttcttgagcacctccaaggatgtctctaggcaagtg

SEQ ID NO: 58563 - DNA, 539 bp, Chicken  19866894315788_3
gttctacagctttgcaattgctaaaatgatgtgctctgttatgtgaaatttgtatgtaagctcaaggtcaaaagtttaaaacactcagcactgtaaaatattcttatggtatttagtggatggaaatgacctccaaaagaattrcatgtggataaatggaacagagctgaccttttttgagaagtaactgtatgcaatgatggcttttttctgtgtcttctgccacamtgacaagtccaatgagggtaaatgtgctctgttatcctaggattaagatggaagatcctggagaaagattcrgccttgccttacagcagcttgctggagaacgcaacattggagctgagtcaacatgcggcttagggcaggctgcaacctctgctatcacagaatcatagagccattgaggttgggaaggaccactgagatcatctagttagcccatcatcaccatggccactaaccatgtccctcaatgccacacctacatgtttcttgagcacctccaaggatgtctctaggcaagtgcatgtcagctt

SEQ ID NO: 58564 - DNA, 599 bp, Chicken  19866894315797_1
  misc_feature (1)..(180): n is any nucleotide
nnnnnnnnnnnnnnnnnnnnnnnnnnnnnnnnnnnnnnnnnnnnnnnnnnnnnnnnnnnnnnnnnnnnnnnnnnnnnnnnnnnnnnnnnnnnnnnnnnnnnnnnnnnnnnnnnnnnnnnnnnnnnnnnnnnnnnnnnnnnnnnnnnnnnnnnnnnnnnnnnnnnnnnnnnnnnnnnnnnnataactatggttggagctggaatagttcttctgttagtctgtgtcaaaatcatgtaatgcagatgagatgatttggaaatttttgatatgctctgaatacctttgtagcaactcactaasagtactgtgattagatctcgttatgttcacatgcttaaaattgcccatgtgctccggtgctgcgggcctaaaagcagagtcattcagctgctggatctgatggcccacttcttccttggaagaggtggggaacagctgtttgggcagcgtgttttgctctgcttgtcagccatctgtaccagcccagagctggaatctgaactgtgcatctatctccctaggaaaagcagggacacagtacgtgcgtccttcatgtatacttgtctggaactcagtgccaagagacactgcagaaatgt

SEQ ID NO: 58565 - DNA, 600 bp, Chicken  19866894315798_1
aggccctaaagaattttaggttcagggctcagaggcaccaagttgaacgtgaacattattaaaccacgtatcactcatagtcctcttctattgggagaagcagtctcttgaacaagctgaccttttcctgttccataaccaagcattttgctactgaaagagacatgcaaagcagacatacttacctgtaaaccatatcctggcactttagaaggaatgggtttccaggaggagttgtttgtcttcttctgagacctaaagaaaaaagagaacagtacttttgaagcagatgaacttcartaatccyatattttgcatrttcaaatrtcaaaaatatattactgatgcaaaaacaaaagtarcaatacataaatgtttaggtaaactaagagcattaattagaaagatacgattcaaagatcagaaacagatgaaaaacaaaacaagaagataaaacatacctggctttgcttctctcctcatcactgctggcactttcactgctagagctgtgacgtcgatgcttcttgtgcttcttcttcttctctttcttcttctttttctcttttttatctaaactgttttgcagctataaagcaa

SEQ ID NO: 58566 - DNA, 600 bp, Chicken  19866894315798_2
aaagaattttaggttcagggctcagaggcaccaagttgaacgtgaacattattaaaccacgtatcactcatagtcctcttctattgggagaagcagtctcttgaacaagctgaccttttcctgttccataaccaagcattttgctactgaaagagacatgcaaagcagacatacttacctgtaaaccatatcctggcactttagaaggaatgggtttccaggaggagttgtttgtcttcttctgagacctaaagaaaaaagagaacagtacttttgaagcagatgaacttcartaatccyatattttgcatrttcaaatrtcaaaaatatattactgatgcaaaaacaaaagtarcaatacataaatgtttaggtaaactaagagcattaattagaaagatacgattcaaagatcagaaacagatgaaaaacaaaacaagaagataaaacatacctggctttgcttctctcctcatcactgctggcactttcactgctagagctgtgacgtcgatgcttcttgtgcttcttcttcttctctttcttcttctttttctcttttttatctaaactgttttgcagctataaagcaacacgatt

SEQ ID NO: 58567 - DNA, 600 bp, Chicken  19866894315798_3
gttcagggctcagaggcaccaagttgaacgtgaacattattaaaccacgtatcactcatagtcctcttctattgggagaagcagtctcttgaacaagctgaccttttcctgttccataaccaagcattttgctactgaaagagacatgcaaagcagacatacttacctgtaaaccatatcctggcactttagaaggaatgggtttccaggaggagttgtttgtcttcttctgagacctaaagaaaaaagagaacagtacttttgaagcagatgaacttcartaatccyatattttgcatrttcaaatrtcaaaaatatattactgatgcaaaaacaaaagtarcaatacataaatgtttaggtaaactaagagcattaattagaaagatacgattcaaagatcagaaacagatgaaaaacaaaacaagaagataaaacatacctggctttgcttctctcctcatcactgctggcactttcactgctagagctgtgacgtcgatgcttcttgtgcttcttcttcttctctttcttcttctttttctcttttttatctaaactgttttgcagctataaagcaacacgatttattagcagtaa

SEQ ID NO: 58568 - DNA, 600 bp, Chicken  19866894315798_4
ctcagaggcaccaagttgaacgtgaacattattaaaccacgtatcactcatagtcctcttctattgggagaagcagtctcttgaacaagctgaccttttcctgttccataaccaagcattttgctactgaaagagacatgcaaagcagacatacttacctgtaaaccatatcctggcactttagaaggaatgggtttccaggaggagttgtttgtcttcttctgagacctaaagaaaaaagagaacagtacttttgaagcagatgaacttcartaatccyatattttgcatrttcaaatrtcaaaaatatattactgatgcaaaaacaaaagtarcaatacataaatgtttaggtaaactaagagcattaattagaaagatacgattcaaagatcagaaacagatgaaaaacaaaacaagaagataaaacatacctggctttgcttctctcctcatcactgctggcactttcactgctagagctgtgacgtcgatgcttcttgtgcttcttcttcttctctttcttcttctttttctcttttttatctaaactgttttgcagctataaagcaacacgatttattagcagtaattactgtc

SEQ ID NO: 58569 - DNA, 600 bp, Chicken  19866894315798_5
accacgtatcactcatagtcctcttctattgggagaagcagtctcttgaacaagctgaccttttcctgttccataaccaagcattttgctactgaaagagacatgcaaagcagacatacttacctgtaaaccatatcctggcactttagaaggaatgggtttccaggaggagttgtttgtcttcttctgagacctaaagaaaaaagagaacagtacttttgaagcagatgaacttcartaatccyatattttgcatrttcaaatrtcaaaaatatattactgatgcaaaaacaaaagtarcaatacataaatgtttaggtaaactaagagcattaattagaaagatacgattcaaagatcagaaacagatgaaaaacaaaacaagaagataaaacatacctggctttgcttctctcctcatcactgctggcactttcactgctagagctgtgacgtcgatgcttcttgtgcttcttcttcttctctttcttcttctttttctcttttttatctaaactgttttgcagctataaagcaacacgatttattagcagtaattactgtctctgcacttgggcagtcagtatcataaggcaaggg

SEQ ID NO: 58570 - DNA, 599 bp, Chicken  19866894315803_1
  misc_feature (1)..(119): n is any nucleotide
nnnnnnnnnnnnnnnnnnnnnnnnnnnnnnnnnnnnnnnnnnnnnnnnnnnnnnnnnnnnnnnnnnnnnnnnnnnnnnnnnnnnnnnnnnnnnnnnnnnnnnnnnnnnnnnnnnnnnnnaaaaatggaaaaaagcagtagggctgaaccacctcctcctcttgtccagctgctccctcctccaggtgagtgttgccttcaccacatctgctcttcaaaccaacaaaagatctgggggcaaaggggagtcctctgaagtggtaaagacttcttaggagcactgaggtgttgatgccgctgyttgttggcagcctcatgagtttctatgcaagcacaggactccaaaaggaccggttgagcttccaaacccagtcctagggggatgaggtacaattccactggcaaaaaaggagcaagaaagcctgagtccaacttccactgatgtcagtggaaggacatcgctcacatgaaggtatataaaaatggctttaataatattttcagagaatttcagcttttaatgaaacaagctgaagtgagggggagcatgtcaaagtgagctcagtctaagtagttagcataataaaggatgaaatagca

SEQ ID NO: 58571 - DNA, 599 bp, Chicken  19866894315809_1
  misc_feature (1)..(74): n is any nucleotide
nnnnnnnnnnnnnnnnnnnnnnnnnnnnnnnnnnnnnnnnnnnnnnnnnnnnnnnnnnnnnnnnnnnnnnnnnnaaacaagcaaaatatccacattattttactgtttttcagtcatctccacagtgattacactgaatcctcaattctacatcacagttattcagtatagtactataatcatcatttgaacagctgttatataattataacgcaaataacaaaacagctgatgcttcactaatggcagaaaatccaacacagaaatagaatcaaggaaaaataaccatgacttcaaatsaggtaaaaaaaaaaaaaatgttaggcttagcttaagattcttcacagccctaattatggaagtgactgtggttacaaagttttatttttaatgaaaattatatagaatacaacaatacagtatttaaactagtagcactaagaagaaggaaagaaagaaaaggaaaaaaaatcattaaaaacgcaatataaagttcattatgaaacaagtagaaaagcaagacaaattttctctttagttgttcctaataaagtgatcaataatattttcagttcatcatctgatgaacatgttgttca

SEQ ID NO: 58572 - DNA, 599 bp, Chicken  19866894315810_1
  misc_feature (1)..(91): n is any nucleotide
nnnnnnnnnnnnnnnnnnnnnnnnnnnnnnnnnnnnnnnnnnnnnnnnnnnnnnnnnnnnnnnnnnnnnnnnnnnnnnnnnnnnnnnnnnntaaagttcagaaattcattttaaaacaaacaaaacccaaagacctaatgaaaaagaaaagacttattttattcctaactccacaaaagaggttccagatacaaggtgcttttctcattttgaatgctcaaaaaatgtggcatccctttcaagtttaaagggcttgaaatatatattcaccacccagaatgttctatcatgtttctcccraagtgcatgctatgcttctcctcaggtgcttgataaaggattcatagcttccttaagttgccaatatttaccagaatccaatatggtgacggctgtaactaagataastggaaagcaaaacccagttccaagtaattgttttcacaagacactgcagttaatttttaatacctatagagttcaaagcttgcatatctcaaaaacagatggcaaaagaaacatgtatcaattactaaaaaataaggctgcaactgtcacatttgtgtagaaagagaagcatgtaagtgagaggaatgtat

SEQ ID NO: 58573 - DNA, 600 bp, Chicken  19866894315810_2
ttttaaaacaaacaaaacccaaagacctaatgaaaaagaaaagacttattttattcctaactccacaaaagaggttccagatacaaggtgcttttctcattttgaatgctcaaaaaatgtggcatccctttcaagtttaaagggcttgaaatatatattcaccacccagaatgttctatcatgtttctcccraagtgcatgctatgcttctcctcaggtgcttgataaaggattcatagcttccttaagttgccaatatttaccagaatccaatatggtgacggctgtaactaagataastggaaagcaaaacccagttccaagtaattgttttcacaagacactgcagttaatttttaatacctatagagttcaaagcttgcatatctcaaaaacagatggcaaaagaaacatgtatcaattactaaaaaataaggctgcaactgtcacatttgtgtagaaagagaagcatgtaagtgagaggaatgtataaatattgacaaactcactgtctatcaaaccacaaccaaacaccaaacctctgcaattctcagtgtcagagatcatccctctgtccaaaagccattcaaggaagcaaag

SEQ ID NO: 58574 - DNA, 599 bp, Chicken  19866894315818_1
  misc_feature (1)..(173): n is any nucleotide
nnnnnnnnnnnnnnnnnnnnnnnnnnnnnnnnnnnnnnnnnnnnnnnnnnnnnnnnnnnnnnnnnnnnnnnnnnnnnnnnnnnnnnnnnnnnnnnnnnnnnnnnnnnnnnnnnnnnnnnnnnnnnnnnnnnnnnnnnnnnnnnnnnnnnnnnnnnnnnnnnnnnnnnnnnnnncaaaaaaatgatcccctggatcactgatagaattattgaggtctattaaattttaaatgcaaaaaattaggatgattgaatgtgacagccaaaggcaatgccctgtttgtggtgtttcttaagatcratgttagtgtgggtatatagattctcatragcaactgaaggagattaggaaactgtcaggaaaaaaagtatcaattggtatttggagtttctctttagaagtcactctgcatcaccttaacactagctctgttataaatttgctgagttgtgccagagagagaaaaaaaaatgacaatgtatttttttccaatacagttatacctactgggtgtcccttcctgtctgggaaatcatgtgactatagaaagtgcctgtcagggttacagcacaggatgatagcaaagccttagaagacaa

SEQ ID NO: 58575 - DNA, 599 bp, Chicken  19866894315818_2
  misc_feature (1)..(144): n is any nucleotide
nnnnnnnnnnnnnnnnnnnnnnnnnnnnnnnnnnnnnnnnnnnnnnnnnnnnnnnnnnnnnnnnnnnnnnnnnnnnnnnnnnnnnnnnnnnnnnnnnnnnnnnnnnnnnnnnnnnnnnnnnnnnnnnnnnnnnnnnnnnnnnnncaaaaaaatgatcccctggatcactgatagaattattgaggtctattaaattttaaatgcaaaaaattaggatgattgaatgtgacagccaaaggcaatgccctgtttgtggtgtttcttaagatcratgttagtgtgggtatatagattctcatragcaactgaaggagattaggaaactgtcaggaaaaaaagtatcaattggtatttggagtttctctttagaagtcactctgcatcaccttaacactagctctgttataaatttgctgagttgtgccagagagagaaaaaaaaatgacaatgtatttttttccaatacagttatacctactgggtgtcccttcctgtctgggaaatcatgtgactatagaaagtgcctgtcagggttacagcacaggatgatagcaaagccttagaagacaagaagrgtgtgggattagaaaggcaaaggt

SEQ ID NO: 58576 - DNA, 600 bp, Chicken  19866894315818_3
tagtgtgggtatatagattctcatragcaactgaaggagattaggaaactgtcaggaaaaaaagtatcaattggtatttggagtttctctttagaagtcactctgcatcaccttaacactagctctgttataaatttgctgagttgtgccagagagagaaaaaaaaatgacaatgtatttttttccaatacagttatacctactgggtgtcccttcctgtctgggaaatcatgtgactatagaaagtgcctgtcagggttacagcacaggatgatagcaaagccttagaagacaagaagrgtgtgggattagaaaggcaaaggtatgaacactgagtataaataatcaattaatgatcactgaaggaatacagctctgtggactaggatgaaccagctttaggtcatggcagaagacagggaatacacatccagtacacaaccaacacaagctttgagaaaatacaaggagataaccaggatgcttgagaacaacagcccatgcaaaactgggagcaggagaggaagtgggaggaatggctccaacagtgccagcccaggttcacctgcagcgggcagacaaccttatagtgttctttac

SEQ ID NO: 58577 - DNA, 599 bp, Chicken  19866894315820_1
  misc_feature (1)..(118): n is any nucleotide
nnnnnnnnnnnnnnnnnnnnnnnnnnnnnnnnnnnnnnnnnnnnnnnnnnnnnnnnnnnnnnnnnnnnnnnnnnnnnnnnnnnnnnnnnnnnnnnnnnnnnnnnnnnnnnnnnnnnnntgctgaaatcttgtctttgccggaaaatatagaattgcttttcccagtatctagttctcgtgcttttagttcagcctgccgtttgttctgtatcctatgagcctggcagtcacttctgttgacataatttacaaatgagacttgcattatctttagttccagtcaagaaatagaaacactgyggcgttcccagctttttttcattcagctgtgtctaagtgcagacagtgttccagcacctaattatttttaaagagggaaggtgattgacaatttcatttgcgtacttacctcccttggcaggtaacaacaaagtcaaccagtggattttcagcttgactttctgtcatctggatgcttgtcatctgaataatatttacctcaaggattccctctaggagaggaaacagatgtcaacagtaggacacgtgacaagactgtgtgtacagaacctcaagtgtttggccgatgctcaggttag

SEQ ID NO: 58578 - DNA, 600 bp, Chicken  19866894315826_1
agagagggacgaggaagttgcttaccttcagaagtcctacaacatcctcagatagataggaatctttagatggaggcctttgcctccattgccagctcttaaatgaggtctgagaaggggtgcatcctggctccacctcttccagtcactcagctgcattgcttgcacctgggctggcactgccttcccaccaggtgctcaatcaccggttcaagcaacgacagcatttccactacagtgaatcattggcttctcctgcaagtgtaatggctccatctgctagcacagggaatgaggacygagtaacaacttacataaaatggcagtcactgagttggcatattggtacatgtttctgtgttattggtgccccagtttcaaaggctgtgtttwgtttgtacacaagtggcagaccacgctttgtaacaatccaaaattcagagaaatatatgctcactgtgatgtgatgagtaaggcagacatatcagtgcttacataasctctttatgacagtccattaatttcagcaatttaaaaagattaaaaaaaaccaaccatactctgccatttggcygctatctctctgaatcatacartgtg

SEQ ID NO: 58579 - DNA, 600 bp, Chicken  19866894315826_2
agctcttaaatgaggtctgagaaggggtgcatcctggctccacctcttccagtcactcagctgcattgcttgcacctgggctggcactgccttcccaccaggtgctcaatcaccggttcaagcaacgacagcatttccactacagtgaatcattggcttctcctgcaagtgtaatggctccatctgctagcacagggaatgaggacygagtaacaacttacataaaatggcagtcactgagttggcatattggtacatgtttctgtgttattggtgccccagtttcaaaggctgtgtttwgtttgtacacaagtggcagaccacgctttgtaacaatccaaaattcagagaaatatatgctcactgtgatgtgatgagtaaggcagacatatcagtgcttacataasctctttatgacagtccattaatttcagcaatttaaaaagattaaaaaaaaccaaccatactctgccatttggcygctatctctctgaatcatacartgtgagtcgctcttcctacaaagtaaatatcatatcctggataagtaggacagctgtgtttgggttttacatccccttatcttagagataaatgcat

SEQ ID NO: 58580 - DNA, 600 bp, Chicken  19866894315826_3
aatcaccggttcaagcaacgacagcatttccactacagtgaatcattggcttctcctgcaagtgtaatggctccatctgctagcacagggaatgaggacygagtaacaacttacataaaatggcagtcactgagttggcatattggtacatgtttctgtgttattggtgccccagtttcaaaggctgtgtttwgtttgtacacaagtggcagaccacgctttgtaacaatccaaaattcagagaaatatatgctcactgtgatgtgatgagtaaggcagacatatcagtgcttacataasctctttatgacagtccattaatttcagcaatttaaaaagattaaaaaaaaccaaccatactctgccatttggcygctatctctctgaatcatacartgtgagtcgctcttcctacaaagtaaatatcatatcctggataagtaggacagctgtgtttgggttttacatccccttatcttagagataaatgcatatagtgagttaactcagagcatgtttagtaaggttttcactgttgaatctttttacataattatatgtgaccgcaaatctagtgaagtacataaaccagatgaaaaa

SEQ ID NO: 58581 - DNA, 600 bp, Chicken  19866894315826_4
atctgctagcacagggaatgaggacygagtaacaacttacataaaatggcagtcactgagttggcatattggtacatgtttctgtgttattggtgccccagtttcaaaggctgtgtttwgtttgtacacaagtggcagaccacgctttgtaacaatccaaaattcagagaaatatatgctcactgtgatgtgatgagtaaggcagacatatcagtgcttacataasctctttatgacagtccattaatttcagcaatttaaaaagattaaaaaaaaccaaccatactctgccatttggcygctatctctctgaatcatacartgtgagtcgctcttcctacaaagtaaatatcatatcctggataagtaggacagctgtgtttgggttttacatccccttatcttagagataaatgcatatagtgagttaactcagagcatgtttagtaaggttttcactgttgaatctttttacataattatatgtgaccgcaaatctagtgaagtacataaaccagatgaaaaatctcaaatgtcttggaggcatacatgtcttcatttttcaatatgttttgactagataggaatatcgatgacctg

SEQ ID NO: 58582 - DNA, 600 bp, Chicken  19866894315826_5
gacygagtaacaacttacataaaatggcagtcactgagttggcatattggtacatgtttctgtgttattggtgccccagtttcaaaggctgtgtttwgtttgtacacaagtggcagaccacgctttgtaacaatccaaaattcagagaaatatatgctcactgtgatgtgatgagtaaggcagacatatcagtgcttacataasctctttatgacagtccattaatttcagcaatttaaaaagattaaaaaaaaccaaccatactctgccatttggcygctatctctctgaatcatacartgtgagtcgctcttcctacaaagtaaatatcatatcctggataagtaggacagctgtgtttgggttttacatccccttatcttagagataaatgcatatagtgagttaactcagagcatgtttagtaaggttttcactgttgaatctttttacataattatatgtgaccgcaaatctagtgaagtacataaaccagatgaaaaatctcaaatgtcttggaggcatacatgtcttcatttttcaatatgttttgactagataggaatatcgatgacctggatgaggggatagaatgcaccc

SEQ ID NO: 58583 - DNA, 600 bp, Chicken  19866894315830_1
ctttccacgagggagatgctggcacatcatccacctactcccagtcataccaagccaaggttttttcccagctgctcaacacctgggcattcttccatgctcaccactgctctgtaccccagcagcaagcttcccccgaaaacacgagattgcctttaacagccaccagatttttcttcttacatacccctccatactgggctcctcctgttcctcccacctcccgagcaaggaaggtgacattcgcttcacagcttcgaacgctcaggaagaagcctggaaacgtgcaaagaaaactgmgattctcacacaaatctgctcccaccacctgcatggcgaggagatggagaggcatgggatccgctcactggagctgctaccatggtcccaccacttcaaaagccccaagggacatccccaggaggggatccccactggaggatgctctaaacccaataaccagcctcttgctctcctctagctctaactcatccccaccaagctctgcaagcaggtatggcacacacagatgtgctgcayctggatggagtgagggaggaaactgggaatcattgctgcattattattcttttctaagat

SEQ ID NO: 58584 - DNA, 600 bp, Chicken  19866894315830_2
cattcgcttcacagcttcgaacgctcaggaagaagcctggaaacgtgcaaagaaaactgmgattctcacacaaatctgctcccaccacctgcatggcgaggagatggagaggcatgggatccgctcactggagctgctaccatggtcccaccacttcaaaagccccaagggacatccccaggaggggatccccactggaggatgctctaaacccaataaccagcctcttgctctcctctagctctaactcatccccaccaagctctgcaagcaggtatggcacacacagatgtgctgcayctggatggagtgagggaggaaactgggaatcattgctgcattattattcttttctaagatggaacagaaaatcatgactttgaccccctctctggaggaaagatgagtcgtgagagctcgttgtctgctggtgcgtcacccctggcagctttcaaattcatgagccacttccacttccaagaaaattcagcagtgggtctcagaaataactcagatcattgcacaagtgctgctgttgagtagaggagaagagaccgagtttgaggctgtgctgggatgaaggcaagcaaaccagcaggg

SEQ ID NO: 58585 - DNA, 600 bp, Chicken  19866894315847_1
ttcagatctacttttaatcccagcctgtattccgctgatctgctatgccttcccatttctactatgaagacaatgcaggaacacatctcaagggcaaaaccaacagcaaagatgcctcatgccccttgcattcacatcttattttgcttcccaaaccatagctgacatcaagcagtggagagaaaagaaaagaacaacaaagagaagggtcttcagctacagatggtaatgaaattctgctcacaagagccaaacaacctaaatccttgccaaatcaaaacgttcttactcctaatttgygctgccagtaaaacgttcttactcctaatttatgctgccagcagtcctcgagaggctggaaggttaggaacatgtcacagcagtaacagccaatcccccatacgctgcactcctgcacagcaaagctgaacttttttagggactggagttaccaaaaccttaagtgtaaactgtgcatttaaggagcatttacaggcctaagaagataggaaaaaaaaatccaaaaaggtttttggttttttttggaagcaaaatttaactactagatcaatatcaagtggagctgaacctgctttatgg

SEQ ID NO: 58586 - DNA, 599 bp, Chicken  19866894315848_1
  misc_feature (1)..(90): n is any nucleotide
nnnnnnnnnnnnnnnnnnnnnnnnnnnnnnnnnnnnnnnnnnnnnnnnnnnnnnnnnnnnnnnnnnnnnnnnnnnnnnnnnnnnnnnnnnaatatcttatttgatctgtgaagtgttttatattattaactaatcctaaagcatgggttacctacaatgtacttaattaaagtaagcttatttctgtatttgaaaataaatattcttgcaaactcagattactatgaatccatgatctaggtttgcatgctttctcattttatgaggctaattctcacctaattttttgttttgttgttstgttggttttgttgttgtttttccaatgaacaagtaataaagcatcataaccctagggaatatcaggcagtaagatgcacacaaaaggtgttggacaatctctgctgtgggtacaaggaaaatgctcttcaaagtctttcacccagggaacagtgacagaggcttaggttaggcagcctcaaattggcaaatgaagccctgtatgtgcacatcagtgctgggcatgctacagaggtagtccaagaattacagcctggaaggcatagctcctgcagcagcttgccacatggaaggatgtg

SEQ ID NO: 58587 - DNA, 600 bp, Chicken  19866894315848_2
ctctgctgtgggtacaaggaaaatgctcttcaaagtctttcacccagggaacagtgacagaggcttaggttaggcagcctcaaattggcaaatgaagccctgtatgtgcacatcagtgctgggcatgctacagaggtagtccaagaattacagcctggaaggcatagctcctgcagcagcttgccacatggaaggatgtgcctactatggcagactttccaagaactgcctgagatctctgcaggtttacactcctgtctttttcacagctggcaggaggagacagagaggaagtatacwgagaagtatggcagataggcagtggaggccttcatcatcattattttgctctcgtggcctgtcaggtattattgatggcctgtgcctcctctgcctctgtccctgcccaaagccacctctgaatgtgatctgtgcactcgagatgctrcatgacatacatctctcttcctctaaacagttgcctacaatgygccacagacctggcccatagactgcttttgccctcaccaccacctcacaaacataaagcacaagttaagttaataaaatatgcctttaatgtggtctgtcttgaaatgc

SEQ ID NO: 58588 - DNA, 600 bp, Chicken  19866894315848_3
tacagcctggaaggcatagctcctgcagcagcttgccacatggaaggatgtgcctactatggcagactttccaagaactgcctgagatctctgcaggtttacactcctgtctttttcacagctggcaggaggagacagagaggaagtatacwgagaagtatggcagataggcagtggaggccttcatcatcattattttgctctcgtggcctgtcaggtattattgatggcctgtgcctcctctgcctctgtccctgcccaaagccacctctgaatgtgatctgtgcactcgagatgctrcatgacatacatctctcttcctctaaacagttgcctacaatgygccacagacctggcccatagactgcttttgccctcaccaccacctcacaaacataaagcacaagttaagttaataaaatatgcctttaatgtggtctgtcttgaaatgcttaacacattcaaagtctagcaccatgtttatgatcatcttagcacattattcctcctgcctctccataatccgctccatacaacaaactgtactccaccgtcagaatgcaattgcaatgaattggttgcagtgaaattctttggaaa

SEQ ID NO: 58589 - DNA, 561 bp, Chicken  19866894315848_4
aaggatgtgcctactatggcagactttccaagaactgcctgagatctctgcaggtttacactcctgtctttttcacagctggcaggaggagacagagaggaagtatacwgagaagtatggcagataggcagtggaggccttcatcatcattattttgctctcgtggcctgtcaggtattattgatggcctgtgcctcctctgcctctgtccctgcccaaagccacctctgaatgtgatctgtgcactcgagatgctrcatgacatacatctctcttcctctaaacagttgcctacaatgygccacagacctggcccatagactgcttttgccctcaccaccacctcacaaacataaagcacaagttaagttaataaaatatgcctttaatgtggtctgtcttgaaatgcttaacacattcaaagtctagcaccatgtttatgatcatcttagcacattattcctcctgcctctccataatccgctccatacaacaaactgtactccaccgtcagaatgcaattgcaatgaattggttgcagtgaaattctttggaaaataa

SEQ ID NO: 58590 - DNA, 600 bp, Chicken  19866894315849_1
ctgtaaatcctgatgatagtcaaggtagaatatgttgtaacctatttcagtaacaatactgaagtaaaattaactaaaggatttgcctcaaggtcaaattcaactattttttttctaatattaccacatcccatgttaaattgaaagataaaagttaaatgtgatgttaaaatccttgcaagttgaggtagtggaatattacagtatgtatctaatcacactttggaggactttgacctgatccagatatcagaagggtaagtgcttgggatacaatccacccgtgaagaggcattaccyatcaccttgctgggcaggtcttcccttttaaactgttttctttattgttgggaagatttaaaaaatataaccctgcagttttctttctgtattgtgcagtgtttcatatccctattaagagagttaacaaatgatatataagccagcagagaaataactgcaatacaggagaatgaagatggctaagctagtttccccggctcttaagacattttggtaattgagaacttgtttctgcaacccaacgtgaattaaaaaggcagtaattatggaatctcaatcctatcatgatgtattaat

SEQ ID NO: 58591 - DNA, 502 bp, Chicken  19866894315853_1
gacacagagcaaggaaccagtattctaactgtacagaaaggttatcagtgatgtaacagctgtggggagtggtgggaggtgatatgtcacattggggagcagggggcaatcaccccagctggccacagctccaacagcattcctcagggctcagttagatgcctcctatgggttatgaagcaccaggactgggacacaaagaactttctggcctaacagcaggtctctatgcatgcatcttggcttgaatctttaaacttactgctttttttcaatttaaacagcaaagagtttcaaaaygtattctttccccatttactatccttctcattttacacccttcttcaggatgtgtgggctttgcctctcttcgttactgaaatgagctgccccattgaaacccatcacattgctctgcatgctcccatcccaccacgtgaagccatgcccaaggacagggtgcaggagcacaggctccctcacaccacagatgggaaaacaa

SEQ ID NO: 58592 - DNA, 600 bp, Chicken  19866894315874_1
tgttacaccctatgcatcctatctccaaggttcctttcttgctgtgctacctccccgtgatcgaggggcacatggatgagtgcactgctcctggctgtggctggtgacttgagcttggtttgaaatggaaaagctggatgataggggtatgcaagtgctgtaataccagccagggcctgagcttgcatattcctgtgtctctgagggtggctgttgccagatgtgtcagagaaaggtgccaaaaattccttagtgtgctttataaaaaatgtcagactttttctgtcctctccactgagygatggcatctttcatgtcttcagatgtgcctccatattaaaaatggtagttctgtaccttgttccagagcttgctgggtttcatttggctggagctccgcatccctcctgtgctcctgccccaggagctttggccttaatgcatttatctgtgtacaaggagaagggaacatttctgtttttacagatggcgtggattcaggaaatccagtcagctggtgtggatctggaaaccattctgcccttattaacaccctccaatgatataaacagagaatccccaaagcaaggagcagtctaa

SEQ ID NO: 58593 - DNA, 600 bp, Chicken  19866894315875_1
ttccgtaatggaaacttcatgaaagattaggaagaaatgtcaaacccatatgcacttttttgcactggactgggttttctgtcttataatgcataccatttaacgtcttaatcctgtgaccattatgttagcacataaaaagaaacaaaaacctaaccctttttttaaactagcctttttgggattttcttgtgttcagctattaaaaaaaaaaaaaagaaagaaagaaaaaaagaaagaaaatgaagaaaatgagtctgcaaaagcaattacattgatacatagctcaaatagagatawtacaaaatggcaatcaaggaagattatccagtacagcaaactagagaagatttatttgtaggccatagtaggactttcagaactaataattcttttgaaaaataaatgatgaaaggtatgggcatgcagtaatgtggtccactagcatagagtaacatacaatgttgatgactgattatcattttgacaaaatactgctatacatgagctcaaacatttgggtttaatttacagctcgtgtcatacagctgttaacttataatgaaaatacactagattaatgacttgttggcctgcttg

SEQ ID NO: 58594 - DNA, 600 bp, Chicken  19866894315887_1
ctgctttcctatttggcagacaaaatgtcatttaaaatgcaagaaattgccaaaggagttaaattatcttatgatttttttttaaattattattattttcaacacagagagtctgaaaacatgctatctgttgtattgaggagactgtaagcatgtgttgcagctacttattatggttactttgagaaatatctttgcttaaggccatgggaaatccaagctacttctattcatgtactgagctctgattatctctgtatgtacttgctgtatattggaatttcttcctatgctggctgrtggatttgggaatgtggaggaatgtgatagaagctcttaatcctttggattattttgtctctaatgaaagtttgggatagcaattgatgagatgatatttatagttgttacagaattaagtatgaatttaaatgttaatctctactcttgcttgtttgggggtcatgcagtcacattatcttggtttgggtcgattgtttgctctgtctgtgtatttcagtaaatccttttgacatcactatggcttcccatctccttacaaacaagcagggagctgcaaatgattaaacaagctctgaa

SEQ ID NO: 58595 - DNA, 600 bp, Chicken  19866894315890_1
taaaaatgattcggaagcagctcaatacctcattttatagaaaacaatagcccaggacacaaatcaacagcagtagggaaattatcagccagagagtgcaccgctttttgctgcagaagtgctggcaggctctgctccttccctccctgaagcaggggcaggtagagcagtgcaaggcatgcaagagcaatgcaatctcagggcacagccctgcttgtggcgatgcagacagacagtggaggattgcacatcacctgttcagcagcacagttcagtttccccactctgcagcaaggaagygtttcctgattagctgagtaaatccacagctgcactcgttgtcaccttggtaatctgcttggagcagtttcttccttcaatagctctcaaaattggcactgaaaggacgataagtttttaaaacacctgggaaacatttctggacttctcatctgaaagccatctagatgggcacacgccattgctcccataacgtggaggctgaatttccttgctgccagtgacaggatgaagaggcacaatcacttaatacaaagaacacatgcaagagcggtttgttaaggactgatatcagaacaa

SEQ ID NO: 58596 - DNA, 600 bp, Chicken  19866894315895_1
cctcataaatagcacgggggcaaagaagaaaaaggagatgctgcataccctttgaagcagccaccatctcataccctttgcagtatttattcatgcttttgtgctgctgtaatggttccttgaaaaaggacctgagtttcataatgatatatggcaatatttgcctgactagcaactatgattgtggttgttaaatatctatctgaaatcagaagagctaaacagttcttacagtaattaggtctcaaagggttttctcttcctactgcaactccaaaagagaatcagcttcaaaacacrtattaaatgcttcaactgtggattagctgagggtatttctcagtaaaggctctgaggattcagaacatgaggctattgattacatactatttttgctttccacagaaggtttccaagaaggtggctaactagaactgaatacacaaccacatttgtgctgaatagatagaaagcaaaggaaacacattatgtggtttctcaaaacttttgtgaattatggaaaagatacgtaacgtttctgcagaataataaaaaaaaaatctgtcacagttatctatactttctttgttcaactccaag

SEQ ID NO: 58597 - DNA, 600 bp, Chicken  19866894315899_1
cttagtctatctggttagtaatagttttccctataacttgcattattttctaggtatctgagaatctttcaaaatgtggacctttctagcaacttctattttaggtaagtattggttattggattgtattgttcctcttgattttgataatcaacatttttaggttgttatcctagagaagtaagacagatgtgatcacactgtccattttctgtcttttgaacctactttctacttcaacagaataaatagggatagagcctcaactgaaagcctctactgggaaactgtagaaatatwagtgacagggtagggggtcaatagtgaaatttagtattttgttaacagaaaaactgcaatgtatgctcagcagtaatctcttctgtttgatgtgcaacctggtcagtctgcgcatgagcaccatgtggagatctttgaatttggagaggaatctgtagagtagagagaattgtagagctgacgaattgaagaatatcattggaattgtggcatcactgttttcttgcagttgtaagtatgagtacattgaactgaaataaatacagttctgcagctcagacaacaacatgatttcttttt

SEQ ID NO: 58598 - DNA, 599 bp, Chicken  19866894315905_1
  misc_feature (1)..(121): n is any nucleotide
nnnnnnnnnnnnnnnnnnnnnnnnnnnnnnnnnnnnnnnnnnnnnnnnnnnnnnnnnnnnnnnnnnnnnnnnnnnnnnnnnnnnnnnnnnnnnnnnnnnnnnnnnnnnnnnnnnnnnnnnnaaaatgagtaggtggggaaagctccttcttcagcaatatggctgaaggcagtggaaatcacttgccagtgctggctcctccagagcaaacatattaggggtcctgctggtttctggatctgctagcagcttttttgattccatgaaatgagagtgtgtaagtgctaaaatccctctcartggatttgctgaagcttggcaattgcagatcttgcagagaaaggacaaatgatacacacacacaggcttcttctgagcctacttggcttactgaagtaacatgggctaggccaaattctgcatccaacaacatgagggagtgagatgccattaatatgtagcctgggattcctcaktgcaaatgaccatgtacccatttgtactttgatcttaataaagaacatgaaagaataggagtaayaaggtggtggcttgggaaaaaacacatgaaataaaatgatctttatttaaagtgttta

SEQ ID NO: 58599 - DNA, 600 bp, Chicken  19866894315905_2
aatcacttgccagtgctggctcctccagagcaaacatattaggggtcctgctggtttctggatctgctagcagcttttttgattccatgaaatgagagtgtgtaagtgctaaaatccctctcartggatttgctgaagcttggcaattgcagatcttgcagagaaaggacaaatgatacacacacacaggcttcttctgagcctacttggcttactgaagtaacatgggctaggccaaattctgcatccaacaacatgagggagtgagatgccattaatatgtagcctgggattcctcaktgcaaatgaccatgtacccatttgtactttgatcttaataaagaacatgaaagaataggagtaayaaggtggtggcttgggaaaaaacacatgaaataaaatgatctttatttaaagtgtttaaaataaaaagaaactagtaatatgacaagcagcagcacaaatttgtgttgggactcaaattaggcacatgttaataacatactttggttcatgaattaacaacagtttgtcagtcatataatgtgagtagtgggaagcagtcatagctcttcctacacactgtaaggtcattgtatt

SEQ ID NO: 58600 - DNA, 600 bp, Chicken  19866894315905_3
gctagcagcttttttgattccatgaaatgagagtgtgtaagtgctaaaatccctctcartggatttgctgaagcttggcaattgcagatcttgcagagaaaggacaaatgatacacacacacaggcttcttctgagcctacttggcttactgaagtaacatgggctaggccaaattctgcatccaacaacatgagggagtgagatgccattaatatgtagcctgggattcctcaktgcaaatgaccatgtacccatttgtactttgatcttaataaagaacatgaaagaataggagtaayaaggtggtggcttgggaaaaaacacatgaaataaaatgatctttatttaaagtgtttaaaataaaaagaaactagtaatatgacaagcagcagcacaaatttgtgttgggactcaaattaggcacatgttaataacatactttggttcatgaattaacaacagtttgtcagtcatataatgtgagtagtgggaagcagtcatagctcttcctacacactgtaaggtcattgtattcatataactaataactacattacactaaataaaacaaataataacaaaagacttaagcaagtggt

SEQ ID NO: 58601 - DNA, 600 bp, Chicken  19866894315915_1
ggcatctgatatccggctggtcaccaaagtttttgtaagtgatatagttttctgaacagatcagcaccccactaggtccatcagaaccaccaggaactggaacacaacaaggaaacatcactacaagcacaattcttaccacaaatctgaactgctatttatgaaagatttattttggttctttgaaacagcatagctcttattgctctgtatcaccttgaatatatgaaaatttctgaggggaaagatcaacgctgaatacagcttttcatgcgggcataaaaacagcagaatgaactraaggaccaggaaaaagmaaaacaaaggattcatctccaagtaaattgcttgtttcatcctttatgtctcattctcatcgagaaagccacgtcgggcccaaaatactacatcagcaacttgtcagtgactggcatgtttgcttgctgtcataataccagatgtttttctgacacatctttcatctaagaatgtttattaaaacggttctgttgggagcccagcacaacggaacactctactgaagggcagcagcaagcagatccagcccggtatttgtttatgacagctgccaacagacga

SEQ ID NO: 58602 - DNA, 600 bp, Chicken  19866894315915_2
tggtcaccaaagtttttgtaagtgatatagttttctgaacagatcagcaccccactaggtccatcagaaccaccaggaactggaacacaacaaggaaacatcactacaagcacaattcttaccacaaatctgaactgctatttatgaaagatttattttggttctttgaaacagcatagctcttattgctctgtatcaccttgaatatatgaaaatttctgaggggaaagatcaacgctgaatacagcttttcatgcgggcataaaaacagcagaatgaactraaggaccaggaaaaagmaaaacaaaggattcatctccaagtaaattgcttgtttcatcctttatgtctcattctcatcgagaaagccacgtcgggcccaaaatactacatcagcaacttgtcagtgactggcatgtttgcttgctgtcataataccagatgtttttctgacacatctttcatctaagaatgtttattaaaacggttctgttgggagcccagcacaacggaacactctactgaagggcagcagcaagcagatccagcccggtatttgtttatgacagctgccaacagacgatacaacaacagagtaag

SEQ ID NO: 58603 - DNA, 600 bp, Chicken  19866894315915_3
ggttctgttgggagcccagcacaacggaacactctactgaagggcagcagcaagcagatccagcccggtatttgtttatgacagctgccaacagacgatacaacaacagagtaagcatacctagcttccagcttctttccacttggagaggaaatatctgcaattcagcacttcctcaagctgaaagtgttagctttgcatcaaatcctggtagatgggtctttagtacatgcttatttactggctttctgcatgcacattagctgctcaaattccattcaaaagagtagagcagcactyatgcattacctcaaattacattcttttgcatgtcaccacctaattttgtttaatatgtggcttttgaacaacgagaatccaaagtatacataagagaaatacagagccatcttcaaacctcagctttatctacgcagttttgcatatttccacagataaaccgttactcatgacttggctcatcaattaatttatactaatggttcagactactaaccaaacaactcctagcacctaaagcatatcaatactgtgcccttcagaaaaggaaccgaacagatcttcagtaaggtgacttag

SEQ ID NO: 58604 - DNA, 600 bp, Chicken  19866894315916_1
ctgtatgttatattttgtttcaaaacacccaggtatgtaggcaatttgaaaggaacagagttgccaaaaccaggcaaatgtgtgataaagtagggtttcgcaaaaataccaatagtacccattagttctggatgattttatgggatattgaaagtccaaacttcatggatggaaaccagttttttacattcctattatataagaatctgcttgaataacctgagaattaaacaaacaaacaaacctcaatttatcctgcaagtaaatggatcagtttctgtttcattctctcattcaatytcccctttggctgtgtggtacataattgcttgagaatgtattatccatttgcagtagcatccacctctctcaaagagtggtaatgagattcagagaaatgcagacataacttatcatgaagcttagtttctaaaggccgtaccctgaagttgatattcaggcaaaattcatgagatttattttttgcctaagtaatgagaggactgagtaaagactcatcgaaattattaaacttttgtacctttgtgtgaattaccattaagaagaagagaggtcaaagaaaaaaacacccgtgtactt

SEQ ID NO: 58605 - DNA, 600 bp, Chicken  19866894315918_1
tgcatgaaaccccaataccctgtatttgttttggacagcctggcaaacccacttgcataaaagctgggcctgtggcaccttcttaagagttccagcaagacaagcacatagagtagtaacagaagattaatgtacaaattatacacacacatcatcgatcttaatctgacttgtcttggtagtgaccaagagcatcaacttctgtggttctgtggtttggatacaccaagttggagtgactcaggagtcatgtgtatgtctccaaggcattgtagagagtgacaaaatacttatcagaaytgctgaatacgccaagcaacaaggcatcagaaggccaatgttagcagtgctgagtgtccgtcttctgatccttctgaaaatscagtgccttccacaacttcccacagcttggcttggacttaaatgcaggatggtaggagcagcagttctacaagaccggccaaattcctgtccctgtgagctkcataccaagaacttcatattgggggggaccacaagatacataccacctatcgtaaagggcaaaggggaagcagatgtctgtagttgatttaccacaactgacatctcaaatggatg

SEQ ID NO: 58606 - DNA, 600 bp, Chicken  19866894315918_2
ttaagagttccagcaagacaagcacatagagtagtaacagaagattaatgtacaaattatacacacacatcatcgatcttaatctgacttgtcttggtagtgaccaagagcatcaacttctgtggttctgtggtttggatacaccaagttggagtgactcaggagtcatgtgtatgtctccaaggcattgtagagagtgacaaaatacttatcagaaytgctgaatacgccaagcaacaaggcatcagaaggccaatgttagcagtgctgagtgtccgtcttctgatccttctgaaaatscagtgccttccacaacttcccacagcttggcttggacttaaatgcaggatggtaggagcagcagttctacaagaccggccaaattcctgtccctgtgagctkcataccaagaacttcatattgggggggaccacaagatacataccacctatcgtaaagggcaaaggggaagcagatgtctgtagttgatttaccacaactgacatctcaaatggatgtaggcgctccacagtgcagtagaactgacaagatgttgatcagacagcagagtggagctttctgaaaaaaaaaacattttgg

SEQ ID NO: 58607 - DNA, 550 bp, Chicken  19866894315918_3
accaagagcatcaacttctgtggttctgtggtttggatacaccaagttggagtgactcaggagtcatgtgtatgtctccaaggcattgtagagagtgacaaaatacttatcagaaytgctgaatacgccaagcaacaaggcatcagaaggccaatgttagcagtgctgagtgtccgtcttctgatccttctgaaaatscagtgccttccacaacttcccacagcttggcttggacttaaatgcaggatggtaggagcagcagttctacaagaccggccaaattcctgtccctgtgagctkcataccaagaacttcatattgggggggaccacaagatacataccacctatcgtaaagggcaaaggggaagcagatgtctgtagttgatttaccacaactgacatctcaaatggatgtaggcgctccacagtgcagtagaactgacaagatgttgatcagacagcagagtggagctttctgaaaaaaaaaacattttggtcatacaagcaactcacacagcctcactctggattttccatcaaccatagca

SEQ ID NO: 58608 - DNA, 600 bp, Chicken  19866894315925_1
atgggcagcagcaggacggggtcatttcagtgctgctccctttgcagcaccacgctgttctccttctccttgcagctgtgtcagccctcaggtcctgcgttacgtagcagaccaaggagaaacactttgcctgaggtgtgcctggaattgtctcaaaggcttggaagagcattgccttgacgacagacagaaggctggagacttgggggaggagagtcctgtgaaaaatgagatggccttgctctgtccaaaacgttcccattgtgctgtaagaagttctgactgcaaacttgtttttgmtggacttgtttattgccaactcacttgcagtcctggatggcacacctgtacatctaggagacaaagaatgatgccagagagatccttgaggatcttttttgagactttcatgctgcaaaactatgggacaagcaagatcacacgccaaggaccctccgcatctgttggctggaccagtgatctctttctctgtccctctctatctctttccccactctgtctctctctttttgttcttgtcatctcattggagatgagaggagatgaggctcctcttcctctcataaagattaggcttac

SEQ ID NO: 58609 - DNA, 600 bp, Chicken  19866894315925_2
cttaacagtacaaattctcatctacaaagcactgtttttcaacagagtctccactatcagctatgcatgtttgccagtgattaacataatatagggaggcctagcaatatggatcggtatattaccttaaggaccaagatattacttaagtaaaaggaatcaatgtgtgccaggtctaaaagtgagctaaaagttcagctttgcttggtgtgctaacagtcttgtttttctcaatgatcctgcttcactgaagctctgaagtcacaataagactactgcaatctttgcatccgccaggtrcaaggactttttcttgggtttcatataaattgttgtgagttacagtgtcccaagatagaaagttgttcattatggcatagcaagcaaaggaaacttgctaaactggggaaaaacagctgaagatcggccacaagtcacagcgattaagctgaaggagaaataaaggggaggaaacaagtcactgtacctctacctaagatgcaactgtgcatgcccagggagacattagcatatattagtgaggttttggtaaagaatgaatgcatttgccaatgaattgygtatgtatatgctttgaaa

SEQ ID NO: 58610 - DNA, 544 bp, Chicken  19866894315925_3
tctttgcatccgccaggtrcaaggactttttcttgggtttcatataaattgttgtgagttacagtgtcccaagatagaaagttgttcattatggcatagcaagcaaaggaaacttgctaaactggggaaaaacagctgaagatcggccacaagtcacagcgattaagctgaaggagaaataaaggggaggaaacaagtcactgtacctctacctaagatgcaactgtgcatgcccagggagacattagcatatattagtgaggttttggtaaagaatgaatgcatttgccaatgaattgygtatgtatatgctttgaaatctgacggggtcgacagtaaggacacagacaccaacagaagggatgggctcattttttctgtccatttcaaagtaatacaaaaataaagctgcgcctatagtcaatggataagcttaacattacagaaaataagcaaagtaatgcatctactcattactgcatgacgttagcgatagtgattaagaaagagacatcaccaacagacctcatacactaccatcatc

SEQ ID NO: 58611 - DNA, 599 bp, Chicken  19866894315926_1
  misc_feature (1)..(114): n is any nucleotide
nnnnnnnnnnnnnnnnnnnnnnnnnnnnnnnnnnnnnnnnnnnnnnnnnnnnnnnnnnnnnnnnnnnnnnnnnnnnnnnnnnnnnnnnnnnnnnnnnnnnnnnnnnnnnnnnnnttttagcaggagagagaggaattcatgtgcaaacacaagtaccacctttacagagatagatggcaaacgctaaggtcagctggcactacccagcagctgctgctcactacgggctcaaagcatagaaccctagaatgctacaatcattaaggttggaaaagaccactgagatcaccaagcccaagyccaagccatgcccaccatgcccatacaaaccacatccctcagtgccrcatcacaccggggggcttagaggtggaccagctctcactcctgcacagatgctttgttcacatcgttggactgacccaggctggacaccgaggacsactatccctgcaatgaaatgcatttctgtcctcttctgaaacagcaatggaatctcttcttgctggaaggtgactgtggcagagcatggagcatggcacatgatgccgccccccacgccggcacctgcttggaatgaacacccccaaaaagctgcc

SEQ ID NO: 58612 - DNA, 599 bp, Chicken  19866894315926_2
  misc_feature (1)..(67): n is any nucleotide
nnnnnnnnnnnnnnnnnnnnnnnnnnnnnnnnnnnnnnnnnnnnnnnnnnnnnnnnnnnnnnnnnnnttttagcaggagagagaggaattcatgtgcaaacacaagtaccacctttacagagatagatggcaaacgctaaggtcagctggcactacccagcagctgctgctcactacgggctcaaagcatagaaccctagaatgctacaatcattaaggttggaaaagaccactgagatcaccaagcccaagyccaagccatgcccaccatgcccatacaaaccacatccctcagtgccrcatcacaccggggggcttagaggtggaccagctctcactcctgcacagatgctttgttcacatcgttggactgacccaggctggacaccgaggacsactatccctgcaatgaaatgcatttctgtcctcttctgaaacagcaatggaatctcttcttgctggaaggtgactgtggcagagcatggagcatggcacatgatgccgccccccacgccggcacctgcttggaatgaacacccccaaaaagctgccaaaacctggagtgctggctgcctttgggaagcaacaaaaataaacag

SEQ ID NO: 58613 - DNA, 600 bp, Chicken  19866894315926_3
caaacacaagtaccacctttacagagatagatggcaaacgctaaggtcagctggcactacccagcagctgctgctcactacgggctcaaagcatagaaccctagaatgctacaatcattaaggttggaaaagaccactgagatcaccaagcccaagyccaagccatgcccaccatgcccatacaaaccacatccctcagtgccrcatcacaccggggggcttagaggtggaccagctctcactcctgcacagatgctttgttcacatcgttggactgacccaggctggacaccgaggacsactatccctgcaatgaaatgcatttctgtcctcttctgaaacagcaatggaatctcttcttgctggaaggtgactgtggcagagcatggagcatggcacatgatgccgccccccacgccggcacctgcttggaatgaacacccccaaaaagctgccaaaacctggagtgctggctgcctttgggaagcaacaaaaataaacagagcctcgtgactaccactgacatccaacgcacgacaacaaccaaaaagtttccttcctaatttcagcttctggtcgtaaaattttactttcatgtaa

SEQ ID NO: 58614 - DNA, 600 bp, Chicken  19866894315928_1
aataccgtgcaatagcataagttgttgctcacccgagctagcaaagaacctgctaaactcagatgaaataatattttaccaccttaatttgtcattttctgaagctgataatggtttcctgggaaaaaaaaaaaaaggtgctctaaaatggtacttcatggctctgtgaatatatctgcactattaaaaatgcctctactgtagacatgccatcatgagaaaatacataattttaatcaaaatgctggatcaaccagtatgaccttagaggggagacactgatctctactgtctggtgayggcatcagggcccaagagagcagcatggagctgcatcaagggagggtcaggctgggtgctaggaaaaggttcctcaccagagggtggtcaggcatggaacaggctccccagggcagtggtcatggcctcaagctgatggagctcaagaagcatttggacaatgccctgagacgtagggattaatttttaggtagtcctctgtgaaactggaagctgaacttgatccatgtgagtcccttccaacttaggataatctgcaattctctattactacagagtccttgcatttagttagtaatc

SEQ ID NO: 58615 - DNA, 599 bp, Chicken  19866894315935_1
  misc_feature (1)..(65): n is any nucleotide
nnnnnnnnnnnnnnnnnnnnnnnnnnnnnnnnnnnnnnnnnnnnnnnnnnnnnnnnnnnnnnnnnaaaaaataatccaaaaagcacagaacaatctgctataatctgcagatacaaggacccagtaacctcttttaagcaaaggacaactcagtgggcagctgcaaacagaaagtaagggtgttcgtgtgttgtatgcgggataaaaacaaagctaaaagttctccatttccccaccccaaagatataaagggggaagacttcattgtgagcatacagaaaagtgctgttaaagtaacaratagcagtactggtctcccatccaatcccaaacagaaactacaacaagcaaggcaccamsttgccttgccattatccctgacaaattagcatctgtacagctcattccagcacacactgtactggccacagatggcttttttgaaatctttccaagtcaaaacctctttttgctgtgcttctttatttcctagggtctgttagacatctgatcacaattctaagtctcaggatcagaaaagtttcaaaggcagctctgctaaatcttaccatcctcacccattgaaaacacagcatgta

SEQ ID NO: 58616 - DNA, 599 bp, Chicken  19866894315935_2
  misc_feature (1)..(6): n is any nucleotide
nnnnnnaaaaaataatccaaaaagcacagaacaatctgctataatctgcagatacaaggacccagtaacctcttttaagcaaaggacaactcagtgggcagctgcaaacagaaagtaagggtgttcgtgtgttgtatgcgggataaaaacaaagctaaaagttctccatttccccaccccaaagatataaagggggaagacttcattgtgagcatacagaaaagtgctgttaaagtaacaratagcagtactggtctcccatccaatcccaaacagaaactacaacaagcaaggcaccamsttgccttgccattatccctgacaaattagcatctgtacagctcattccagcacacactgtactggccacagatggcttttttgaaatctttccaagtcaaaacctctttttgctgtgcttctttatttcctagggtctgttagacatctgatcacaattctaagtctcaggatcagaaaagtttcaaaggcagctctgctaaatcttaccatcctcacccattgaaaacacagcatgtaccacttcttaggcagagtaaagtttggtaaccttcatgcaaatgtatttgggcgtttca

SEQ ID NO: 58617 - DNA, 599 bp, Chicken  19866894315935_3
  misc_feature (1)..(5): n is any nucleotide
nnnnnaaaaaataatccaaaaagcacagaacaatctgctataatctgcagatacaaggacccagtaacctcttttaagcaaaggacaactcagtgggcagctgcaaacagaaagtaagggtgttcgtgtgttgtatgcgggataaaaacaaagctaaaagttctccatttccccaccccaaagatataaagggggaagacttcattgtgagcatacagaaaagtgctgttaaagtaacaratagcagtactggtctcccatccaatcccaaacagaaactacaacaagcaaggcaccamsttgccttgccattatccctgacaaattagcatctgtacagctcattccagcacacactgtactggccacagatggcttttttgaaatctttccaagtcaaaacctctttttgctgtgcttctttatttcctagggtctgttagacatctgatcacaattctaagtctcaggatcagaaaagtttcaaaggcagctctgctaaatcttaccatcctcacccattgaaaacacagcatgtaccacttcttaggcagagtaaagtttggtaaccttcatgcaaatgtatttgggcgtttcat

SEQ ID NO: 58618 - DNA, 600 bp, Chicken  19866894315940_1
gttctatgattctgtgagcagttacagcacgtggattatgatatttcagtaggggagaagcgcttgtgggctggcattcagctccattatagtgtaaacattgatcagcttgctgctcaaagtgctgcagaaatcaccctgctcaaagtgcgttgcccatgtagagaatggagtacttgaagtttctgtctctctcctaacagagcacttccatatgcagtcagaatctctgataaagcccttaatgcaaacaatttcacaccagcactacagagttcgtgtggatgtaattcaggctaytggaacagtgatacagtttggaaatgggaagtctgtggatgatgttctgtctcatctggcccagcgattatttgatgagattcccaaggtgtcatttttcttcttttttgggagggtcggggggcattattttaaatctagcttcccatttgtttttcccctyggttttcagcactcgtgcattcatttcaggtatgtaagcttgtcacatatggtctcagtcagctgtggactatccaaaagcagggtgaatggcctgttccactgctgtctggttctacacactgttgtagtgcgtag

SEQ ID NO: 58619 - DNA, 600 bp, Chicken  19866894315940_2
gagaatggagtacttgaagtttctgtctctctcctaacagagcacttccatatgcagtcagaatctctgataaagcccttaatgcaaacaatttcacaccagcactacagagttcgtgtggatgtaattcaggctaytggaacagtgatacagtttggaaatgggaagtctgtggatgatgttctgtctcatctggcccagcgattatttgatgagattcccaaggtgtcatttttcttcttttttgggagggtcggggggcattattttaaatctagcttcccatttgtttttcccctyggttttcagcactcgtgcattcatttcaggtatgtaagcttgtcacatatggtctcagtcagctgtggactatccaaaagcagggtgaatggcctgttccactgctgtctggttctacacactgttgtagtgcgtaggcarctttatgttaaaggaggccttcagttctgkctaaatwcttatggcagatctctctgggattttgttctatttattttttatgcttaactaacacagtttgggtcccttcataattgctgtagtccttcagatatatgctatgtaaccatcactaagata

SEQ ID NO: 58620 - DNA, 600 bp, Chicken  19866894315940_3
acagtgatacagtttggaaatgggaagtctgtggatgatgttctgtctcatctggcccagcgattatttgatgagattcccaaggtgtcatttttcttcttttttgggagggtcggggggcattattttaaatctagcttcccatttgtttttcccctyggttttcagcactcgtgcattcatttcaggtatgtaagcttgtcacatatggtctcagtcagctgtggactatccaaaagcagggtgaatggcctgttccactgctgtctggttctacacactgttgtagtgcgtaggcarctttatgttaaaggaggccttcagttctgkctaaatwcttatggcagatctctctgggattttgttctatttattttttatgcttaactaacacagtttgggtcccttcataattgctgtagtccttcagatatatgctatgtaaccatcactaagatattctattttttgagtgggtgcattcaaactacttaactttggcttccattatagtaaatagataaagttgtcttctggagaaatgctggaaaggtgcaaatttcagagaaatttacatttcttacgttctcagagagatac

SEQ ID NO: 58621 - DNA, 600 bp, Chicken  19866894315940_4
gtggatgatgttctgtctcatctggcccagcgattatttgatgagattcccaaggtgtcatttttcttcttttttgggagggtcggggggcattattttaaatctagcttcccatttgtttttcccctyggttttcagcactcgtgcattcatttcaggtatgtaagcttgtcacatatggtctcagtcagctgtggactatccaaaagcagggtgaatggcctgttccactgctgtctggttctacacactgttgtagtgcgtaggcarctttatgttaaaggaggccttcagttctgkctaaatwcttatggcagatctctctgggattttgttctatttattttttatgcttaactaacacagtttgggtcccttcataattgctgtagtccttcagatatatgctatgtaaccatcactaagatattctattttttgagtgggtgcattcaaactacttaactttggcttccattatagtaaatagataaagttgtcttctggagaaatgctggaaaggtgcaaatttcagagaaatttacatttcttacgttctcagagagatactaactatgagaagttaaagcattctgattt

SEQ ID NO: 58622 - DNA, 600 bp, Chicken  19866894315940_5
atgttctgtctcatctggcccagcgattatttgatgagattcccaaggtgtcatttttcttcttttttgggagggtcggggggcattattttaaatctagcttcccatttgtttttcccctyggttttcagcactcgtgcattcatttcaggtatgtaagcttgtcacatatggtctcagtcagctgtggactatccaaaagcagggtgaatggcctgttccactgctgtctggttctacacactgttgtagtgcgtaggcarctttatgttaaaggaggccttcagttctgkctaaatwcttatggcagatctctctgggattttgttctatttattttttatgcttaactaacacagtttgggtcccttcataattgctgtagtccttcagatatatgctatgtaaccatcactaagatattctattttttgagtgggtgcattcaaactacttaactttggcttccattatagtaaatagataaagttgtcttctggagaaatgctggaaaggtgcaaatttcagagaaatttacatttcttacgttctcagagagatactaactatgagaagttaaagcattctgatttgggcctg

SEQ ID NO: 58623 - DNA, 600 bp, Chicken  19866894315946_1
cccattatttttagtgaagtaacctactgtcctgtgttttcaacaggagaacctgaagtagagatgctgctgttgcccactgatttcttctgtacatttgtatttctaggatagagtagtttaaaatgaatttttcacaaatcaatatcattgaccttacttacttctttgggaagtctctcaagaataaagtctgaggaaacaacttactctgtctcacagctcaaaatagactgtttccacattgattcttctcactggctgcatgaaaaacaatcaactcctcagattaatgtagcrgttatagatttcattgtgttagtgtagacttcaaagcagattatctgacttccatgtaggtaggggaagaaacttcccatttttgaagatatgcttgaagattttactgaagggactgctaaaatccaaagcatgcttcagacaatgtagaaactatacagatttttcacttccctctctagacctaatagactttatagagaagttcctataaacttatacaaaaatctgaagttttggagtacttcttttttagtagcttatgtgtatctttgtgttcctagtgttttgttttgtttt

SEQ ID NO: 58624 - DNA, 600 bp, Chicken  19866894315946_2
atctgacttccatgtaggtaggggaagaaacttcccatttttgaagatatgcttgaagattttactgaagggactgctaaaatccaaagcatgcttcagacaatgtagaaactatacagatttttcacttccctctctagacctaatagactttatagagaagttcctataaacttatacaaaaatctgaagttttggagtacttcttttttagtagcttatgtgtatctttgtgttcctagtgttttgttttgtttttcaaattgttttcctttattaaatccaggaaaaatgatattyagaagaatttagcttgtcataacatcatggggtactgacctttatttaatgagtaactatacagttcccaaaaggtgcaaaattttacattctctactcccattgttggcccgtgaactgttattaaaagttttatatgggttgatgaaatctgtgctctgaggaagccctaataagtggtaatatgggagtactaaattagtttaaggaacttcaaaggaaatcagtagagctactgtgaagcacagcgttagttgtcaagaaagaaaggaaaattaatttttatgacagattcacttc

SEQ ID NO: 58625 - DNA, 600 bp, Chicken  19866894315946_3
aataagccctgcctctcagggataaaaatcactgtgcagttttctattccagcttggcacaatatgccagagatgaaaaatgcactttcagtttcttccacactccacagttctccagcattgtttcattgaactaattccccaaattggagatctctgccagtgatttactttattgatctgtggacttgtaatctcaaagagtggtgctgctttattaacatataaggttttgaagcatattgtggatctttgcaaatcagatttttttctttttatcactttcacctgtgatagtcrtgatttaagtatatctcaggtagagtcttttaaggatcataaagctgctgttgaatgactcttactgaagaaacagatagcaaaattaactctttttttatacagcatctgtgaaaccaacacatttttatgaagataaagggacttcttctaaatgattgaggtgtagttctgagatttctgttgtgtttttttttcatatctcttctaaacaggtaaatttacagattgaattagcatattttctattaacatggtgactgctgataccttttagaaagtgcttagcattgatcagac

SEQ ID NO: 58626 - DNA, 600 bp, Chicken  19866894315952_1
gtgcatccagctcacatttgctcatcttttttcaacattttgataacacatctatgattgttcttactgttttcctaaaattattacattctggtcattttaataatgatttaagaggtgctttcagtgaaatccacagagagaaaatattctgagagtaggcaatattctctcttcctatgtgaagagctttgggataccttgtcttagcatttatctttgaaacctaaaatattagttttcactagctaagaattgtttcttcagctttgtcaataatatcctgcagaaaaagaaacrattctacctctgttgcatcctactcatcaaggagaaaactaytccctaactttatacaatggcacaatgattacagtcatttccagcagcatgcatagtaccaaggatgtcttaagtggcacaaaaccacatttctgaaaaaaacagacaagtagtagcatttatccctaactttacctcctctggtatttctgtcttggctctgtaaaggtgatttactgatctcttttctgctgccagtggttggagatgcaaaaagagaaaagaaaactccaacagacaatgaatctagaactaaac

SEQ ID NO: 58627 - DNA, 600 bp, Chicken  19866894315952_2
ataacacatctatgattgttcttactgttttcctaaaattattacattctggtcattttaataatgatttaagaggtgctttcagtgaaatccacagagagaaaatattctgagagtaggcaatattctctcttcctatgtgaagagctttgggataccttgtcttagcatttatctttgaaacctaaaatattagttttcactagctaagaattgtttcttcagctttgtcaataatatcctgcagaaaaagaaacrattctacctctgttgcatcctactcatcaaggagaaaactaytccctaactttatacaatggcacaatgattacagtcatttccagcagcatgcatagtaccaaggatgtcttaagtggcacaaaaccacatttctgaaaaaaacagacaagtagtagcatttatccctaactttacctcctctggtatttctgtcttggctctgtaaaggtgatttactgatctcttttctgctgccagtggttggagatgcaaaaagagaaaagaaaactccaacagacaatgaatctagaactaaacctcaataatctacggctgtgacttcagacataggatatttac

SEQ ID NO: 58628 - DNA, 600 bp, Chicken  19866894315965_1
aaactgtatgtaaatgatatattcttttgtacttcagtagcactttatctttttaaaaataaacactggagaagaaacaatgcacttcaatctcaaaatacagattgctttctgtgtcaccatctatagacagattatagactaatataaagtcaggtgagacatatctgacagacttatttcattgttacatctgctagtcctcgatggcaaactttcattcacaatatttctattagtagaggcataatatggtaggggaaaaaaaaagaaaaaagaaagaaaaaaaaaaagaactaktactgactctcctttgtagcactggctcaaactcaaaggaaaactgcctacacttctgtgactaaaactagacagggcagattctgtggcagattcgtgtaccgctcagtagttcttgttatttctatagcagcaagtgtttttacagcagcccacttcactcatccgaggcatttgtgtcctcggattttagctgcagccatgtttcaaaggatcttgttttgattagatgttttgctgtgctgaaggaaaaggccacagctaaggtaacaattttgtggtttaaactgtggttaagaa

SEQ ID NO: 58629 - DNA, 600 bp, Chicken  19866894315966_1
gaaacttctgaaggtctactggaccaatccctgctccaggcttactctgaagtttggtcaggtcactcaggtcctgtccagagaagttctggaggtctgcagggatggagataacacatcctctctgaatgactgcttgcagtacttgatctctgttacagtgaaatttgttcttctgacatcttctgcctttgctgcatcatgaccatttcatttgattatcttcagagaagtatgcttgagaaaagactggctccatcttttccacattcagcatccatattccagttccccattagraagctgaaggcagtaatttgttcccctcatcacattttttgtctccaggccaatctaacaccccttctcatagggttgctccacaacatctgattaggaaggtgtgtgcattaatggaagctgggatcagatcccaggcacrgattacaacactactgtagatagattgtaccagcttctagcagatctgaaataatagagaagctcatttttcttattttcccctcatcctttatgaagtctggtccagtttatcatgtcaatcactgcactgaggttgaagtgttttgtctgtcactg

SEQ ID NO: 58630 - DNA, 600 bp, Chicken  19866894315966_2
tacttgatctctgttacagtgaaatttgttcttctgacatcttctgcctttgctgcatcatgaccatttcatttgattatcttcagagaagtatgcttgagaaaagactggctccatcttttccacattcagcatccatattccagttccccattagraagctgaaggcagtaatttgttcccctcatcacattttttgtctccaggccaatctaacaccccttctcatagggttgctccacaacatctgattaggaaggtgtgtgcattaatggaagctgggatcagatcccaggcacrgattacaacactactgtagatagattgtaccagcttctagcagatctgaaataatagagaagctcatttttcttattttcccctcatcctttatgaagtctggtccagtttatcatgtcaatcactgcactgaggttgaagtgttttgtctgtcactgaatcaatagggatcagacttttcccagtgcaacaaaggactaagactatgagttcccatccacagcaaacccagactgaagtcaaaatgcttgctatgacaaaaataaataaataaataaataaaaagtattttaacagctt

SEQ ID NO: 58631 - DNA, 600 bp, Chicken  19866894315966_3
tccagtttatcatgtcaatcactgcactgaggttgaagtgttttgtctgtcactgaatcaatagggatcagacttttcccagtgcaacaaaggactaagactatgagttcccatccacagcaaacccagactgaagtcaaaatgcttgctatgacaaaaataaataaataaataaataaaaagtattttaacagcttgatggaagattgagcattcagttgtcacttgcttttgaagaaggccttcatcagttataagggcacttattttagaagtagatagaaatgaagtttctgaaawttttgaaatcttcactttgccgtaaattacatctcataaaactgagccattaattgtattgccttcccttatagcaatttcaccatgcaaggtgaaaaacattgtcatctcatagtataataatctattttatgataagtattctgctgcttttcttaagcagttatctcagtgcccacacaagttgcagagacagggagcagtctgtctgctggctttgcacttttgttgtccttcaaattatatctgggctgctttaactatgtcaaaagcactagccctcagggacaaataacaaag

SEQ ID NO: 58632 - DNA, 600 bp, Chicken  19866894315968_1
agtgagtagtgatcttcaagaggattgctattggaccaacactatttagtatctacataaatgttgaagatagagcgattgattacaccctcagcaagcaaagacgccaacttgagtggtgcagttcatacacttgtgggaatggatgctatccacagggactgtgacaagtttcagaactggacacatgaaactcatgaagttcaacaaagccaaaagcaatgtcctgcaacaaaggaagactaaggagaatctctagttagatgtggggggaaacacagtaatgaaggagaaaaaaargctaaggtacttaatgccttctttccctcagtctttaccagtaagatcaatcgttctttggtacccagtaccctccttgagctggaagatagggatagggagcacaaagtggcccttgtaatctaagagcaaatggttaccaacctgccacagcacttagatgcacagaattttatggggccagatgggatacacttcaggggtactgacaaagccagctgacaagctcatcgagtcactttagataatgttagcagtcctggctattctggaagatctcagttgactggaggttagcaa

SEQ ID NO: 58633 - DNA, 600 bp, Chicken  19866894315969_1
ctcagaaagaaaagtttgagctttattttatttgtattgagctcattgacatctctaataaatgtttatctcacacaagtttcaacaaatgcaaataattaacattagccttaattacatcaattaagaataactggaaccaacactctgaacaaaataacaattaattttaattcaagcagagtctaggagcagaacatattttataagtctgaacctgcatttagatcaatgggattataaatacgaacaaacatatttgtgtgcatgcaaaattgggccctgagacattcaaaatcrtgggacttgacttgctcgatcagtgctgctggagcaccacatcatgctaggccacactgatagagtaaatgtaaaactgctaatggtggaattcaagctaaagaaaatttagcttaaatgmtagtgtatcagattcaacaggagcgctgctgttgttcctttggtgaaaataactcaccattaggttctggcacacaaaaaaatgtatgtgtatatatatatacacacacaaatatgtatatataaaatatagtgccttatatatatacatatataaagtgtgtaaaaacttggtgtcag

SEQ ID NO: 58634 - DNA, 600 bp, Chicken  19866894315969_2
aattaagaataactggaaccaacactctgaacaaaataacaattaattttaattcaagcagagtctaggagcagaacatattttataagtctgaacctgcatttagatcaatgggattataaatacgaacaaacatatttgtgtgcatgcaaaattgggccctgagacattcaaaatcrtgggacttgacttgctcgatcagtgctgctggagcaccacatcatgctaggccacactgatagagtaaatgtaaaactgctaatggtggaattcaagctaaagaaaatttagcttaaatgmtagtgtatcagattcaacaggagcgctgctgttgttcctttggtgaaaataactcaccattaggttctggcacacaaaaaaatgtatgtgtatatatatatacacacacaaatatgtatatataaaatatagtgccttatatatatacatatataaagtgtgtaaaaacttggtgtcagaycttgaaccacagcaaaggagaaggtgagtcaatggctttaacagtactcaaacttttttgacatgtccataggattctagggatgtcttcagtcaagtcattgcctagaaagcacaatg

SEQ ID NO: 58635 - DNA, 600 bp, Chicken  19866894315969_3
ggacttgacttgctcgatcagtgctgctggagcaccacatcatgctaggccacactgatagagtaaatgtaaaactgctaatggtggaattcaagctaaagaaaatttagcttaaatgmtagtgtatcagattcaacaggagcgctgctgttgttcctttggtgaaaataactcaccattaggttctggcacacaaaaaaatgtatgtgtatatatatatacacacacaaatatgtatatataaaatatagtgccttatatatatacatatataaagtgtgtaaaaacttggtgtcagaycttgaaccacagcaaaggagaaggtgagtcaatggctttaacagtactcaaacttttttgacatgtccataggattctagggatgtcttcagtcaagtcattgcctagaaagcacaatgaggaagcaaatgcattaactttctaagtgaaagcagaacttctctttgatgtcatgcttctttcgcatctcctgccctgttactttgcagttccaactcatggctggaaaaagagactctcatgatttattatgtagactttgccctcattaatagtccttggggattcttatgattcatc

SEQ ID NO: 58636 - DNA, 600 bp, Chicken  19866894315972_1
ccttgtatttttggctttgtgtaggaagatgcatttgtcagccaccccaaatagaaaaatgggggtgttagggatctcggttaaacggttccggaccggtgattgagatctcttcatttgaagtgctgccatcacatgtgtgcttttgaaccttgaggctgcatcccttccaaaagtggaggagagagcgaagggggctgcaggcacagctatcagtaacataacccccatagaggactttctcctatgcttccttttatagggatggaatgcattttagacttattttctgctttcctyttccaatctctattatgagcaggtgcagaggctatcccaagtgaagggcatcacagccaagaggtacaaccaaaaaaaccaacacacatacatgtaaacccatactctaattaaaccaactgtgccactatgcacggaatactccatgcagcaattccactttgggggttcagcagcagaccaccccaagtcacctgttagcttacagaaaggcaaaaatgttagcagaaaagcagccacaggaacagttgggagtcatttacaaaagcaatggatattaactaagcaaaaaaccttctg

SEQ ID NO: 58637 - DNA, 600 bp, Chicken  19866894315976_1
gtgcagctaactttcttgaacagctgtctgctcaagacttgcagagtagtttatgaatggaggaaaatcaggaggaatgcagtacaatcagcatgtttaaacacctgtcattaagacatcccacaacttatgagccagctttaccttgcattactagaactacaaattttggttaattttttttttaatgtaatttacctttcagtttcaaagtaagcaggggaaagagcctgcctgtaaatattaatgataacagaatgtcaaagcatacatatataagccaatgttagcttacaagaraaagcactgagctagtactgtgattttgtttctgctggggatcagtaatgtcaattaaggtcttactataccctcttaccacgtgtagcatgccaactgctctacagactgcacactaaattgttgaaaccttttaatacagaacaaatgtatcagcagtgcgcttttttctcttttctaagaaaatggtgctaacaacgtccccttcccaatgaagggtgcaacaaatcagcttttaactagaaatgtaacattcggaaggcagaagtccaagagacagctgatttacattgaggttgc

SEQ ID NO: 58638 - DNA, 600 bp, Chicken  19866894315982_1
cctttatcttcttacacagaaaaagacaagcacaaagaagaggggttggtggagtaatttacattttctacttcaagtaggtagcagaatttcttacatatgtttaagcactcatgcatgcacacacacagcagaatgcattggtacatcgaaaaggagttcgagatgattgtctccaaaggcttcactcctgttttaacagagagtccttcaggtaagatgtaggcaaactcaaatcttgtgatgcactgatgtttaacatctccttcttttctttggaagagagggtatgtattttayggtctgtgttgctaggtacaatagatacagcagatacgtgtaagatgtgaagcatgcataatgtactgtgggctgttttcaccttgactcactttggaacaatctgacgacatgaatccagcacacagggcgatgtacagcaagtgagagctgttgtcatgttttagtttccatatgaggacgtagccatactgcagcccgcacaacggaaacagtgatcacagtgagttttgtgtaaattttgttccacctcagccctccatgcatacgcctggttagctgtctggcaggacgaggtga

SEQ ID NO: 58639 - DNA, 600 bp, Chicken  19866894315982_2
tgtgttgctaggtacaatagatacagcagatacgtgtaagatgtgaagcatgcataatgtactgtgggctgttttcaccttgactcactttggaacaatctgacgacatgaatccagcacacagggcgatgtacagcaagtgagagctgttgtcatgttttagtttccatatgaggacgtagccatactgcagcccgcacaacggaaacagtgatcacagtgagttttgtgtaaattttgttccacctcagccctccatgcatacgcctggttagctgtctggcaggacgaggtgagaarggtttcagacagccccccaccccctccaccctcttatccctgcttcctggaggaggagaakattgctcttgctcccatgccaaaagctactctgcttagatgggcgaacaacagaggccagrgcatgcatatcagcagctggctctgaacacccagggacagatgtagcatcactagcagcagcaggcaggctgactccaactgcaggacagtgcctgagcctttagtggaaaattgatgctgggaaagctcggaggatttgcatgtctgctaccaactaattcatttggaaccgaagct

SEQ ID NO: 58640 - DNA, 600 bp, Chicken  19866894315982_3
ctgtgggctgttttcaccttgactcactttggaacaatctgacgacatgaatccagcacacagggcgatgtacagcaagtgagagctgttgtcatgttttagtttccatatgaggacgtagccatactgcagcccgcacaacggaaacagtgatcacagtgagttttgtgtaaattttgttccacctcagccctccatgcatacgcctggttagctgtctggcaggacgaggtgagaarggtttcagacagccccccaccccctccaccctcttatccctgcttcctggaggaggagaakattgctcttgctcccatgccaaaagctactctgcttagatgggcgaacaacagaggccagrgcatgcatatcagcagctggctctgaacacccagggacagatgtagcatcactagcagcagcaggcaggctgactccaactgcaggacagtgcctgagcctttagtggaaaattgatgctgggaaagctcggaggatttgcatgtctgctaccaactaattcatttggaaccgaagctctcttttttgttattaattaaataaattcttccatgttatccataaagcataatacatgct

SEQ ID NO: 58641 - DNA, 600 bp, Chicken  19866894315982_4
agggcgatgtacagcaagtgagagctgttgtcatgttttagtttccatatgaggacgtagccatactgcagcccgcacaacggaaacagtgatcacagtgagttttgtgtaaattttgttccacctcagccctccatgcatacgcctggttagctgtctggcaggacgaggtgagaarggtttcagacagccccccaccccctccaccctcttatccctgcttcctggaggaggagaakattgctcttgctcccatgccaaaagctactctgcttagatgggcgaacaacagaggccagrgcatgcatatcagcagctggctctgaacacccagggacagatgtagcatcactagcagcagcaggcaggctgactccaactgcaggacagtgcctgagcctttagtggaaaattgatgctgggaaagctcggaggatttgcatgtctgctaccaactaattcatttggaaccgaagctctcttttttgttattaattaaataaattcttccatgttatccataaagcataatacatgctgctacataaaggataacacatgctgctacatgcaaagcaagacgggggcaggaggctctgt

SEQ ID NO: 58642 - DNA, 600 bp, Chicken  19866894315982_5
ctaccaactaattcatttggaaccgaagctctcttttttgttattaattaaataaattcttccatgttatccataaagcataatacatgctgctacataaaggataacacatgctgctacatgcaaagcaagacgggggcaggaggctctgtttttctctccatttctgtgtaaaggcaacatggtctggaggaaagacatacaattagattcagccatttctccaggctctgccaaagagacttttagaggtcccctcctccagtcttgctgctccccaagatgggctgcagcagggasctcaggaaccaagagccgatcgtgccacaggaagtttcaagatcaagcaccatttaggcactgaagtcctcctgggagggcaatttcatgctgtccctgcttgatcttccacaagrcccattcccttcagtaccagcactgccaggctcccaccaccaggtgctctgcagcctcttagcactgcctgtactaaggaaagcaaagacaggaagactaaggacgctgattcctcaaggccggggaatgagtgacagaatggtgctcagctattcccatgcatgtgggcagcctttataagtg

SEQ ID NO: 58643 - DNA, 600 bp, Chicken  19866894315982_6
ctacatgcaaagcaagacgggggcaggaggctctgtttttctctccatttctgtgtaaaggcaacatggtctggaggaaagacatacaattagattcagccatttctccaggctctgccaaagagacttttagaggtcccctcctccagtcttgctgctccccaagatgggctgcagcagggasctcaggaaccaagagccgatcgtgccacaggaagtttcaagatcaagcaccatttaggcactgaagtcctcctgggagggcaatttcatgctgtccctgcttgatcttccacaagrcccattcccttcagtaccagcactgccaggctcccaccaccaggtgctctgcagcctcttagcactgcctgtactaaggaaagcaaagacaggaagactaaggacgctgattcctcaaggccggggaatgagtgacagaatggtgctcagctattcccatgcatgtgggcagcctttataagtgcccctaagtcaggacacatgtggatgacacagcacagcggcagaaaccatttggtgctgctggcccacagagattgcttcatcctacagtaggaagctggctctattttggaggcc

SEQ ID NO: 58644 - DNA, 600 bp, Chicken  19866894315993_1
aaagcttcaaccctttagaggttgccccgggatatctgcctttcagggactctttttagagcaagtttagcagagagggtgtcaggtctgagggaagtgtatgtgataacgtaagacatcctgaaataaattccaagagtactaaagaaacaagacaggaaattatatgcaattcataataaattcaaactgtcccataaaatgaatgtaactcattttgtttccatatgaatgtactataggggtgtcaaatttccccttctagctttgttggatataatctcagtccctgtttgaagyttgctagtgtattgttcagatcctgtgctatatcaacagaaacagaagtgaaaagaaatacagggagcaataaggtctcctaccgttctcatgctggcattggattggtggatcatttatttatttactgactgactgactgacttaaatccctgtgtttctctcagcctcggctgttaaaatcatctgttgttgaggctaatataactgcccttaacaagcccagggttgtacttttctttttcattttggatgaaaaagaatgtgaatggattatgattgtgaatacattctggatat

SEQ ID NO: 58645 - DNA, 599 bp, Chicken  19866894316002_1
  misc_feature (1)..(81): n is any nucleotide
nnnnnnnnnnnnnnnnnnnnnnnnnnnnnnnnnnnnnnnnnnnnnnnnnnnnnnnnnnnnnnnnnnnnnnnnnnnnnnnnncattagaaactttagaatctaagctgtgataaaaggaaagacttccacggtatgagatgtgaggaaaaatattgcagttatttgaatgtcatttaggaatttccaggacagagagcagtggtgacccacaaaatgtctgcaaaaaaaaaaaaaaaaacccaaaaacaaaaaacaacccaaccatactgtatacatgtacatatgtaaaaaaagggtatkaaagaaagtaacaaacaacaactgaaggtamtgcttatttttatctaggtgcaaatgaaagccagcattatcctatcctgaaaggcagactgcaaagcacagagaaataaaggagtttagtacagaaaaagctcacaggcagaaacaatagcaaaaatgttaaatggaggaggaaagaatctggactgtatcttcaaaagcagtgtactttgccattcatggtatatgcatattcttactattcttagcataactaagggggtaaagtaagtttagggaatgagtccctatcctgattt

SEQ ID NO: 58646 - DNA, 599 bp, Chicken  19866894316002_2
  misc_feature (1)..(50): n is any nucleotide
nnnnnnnnnnnnnnnnnnnnnnnnnnnnnnnnnnnnnnnnnnnnnnnnnncattagaaactttagaatctaagctgtgataaaaggaaagacttccacggtatgagatgtgaggaaaaatattgcagttatttgaatgtcatttaggaatttccaggacagagagcagtggtgacccacaaaatgtctgcaaaaaaaaaaaaaaaaacccaaaaacaaaaaacaacccaaccatactgtatacatgtacatatgtaaaaaaagggtatkaaagaaagtaacaaacaacaactgaaggtamtgcttatttttatctaggtgcaaatgaaagccagcattatcctatcctgaaaggcagactgcaaagcacagagaaataaaggagtttagtacagaaaaagctcacaggcagaaacaatagcaaaaatgttaaatggaggaggaaagaatctggactgtatcttcaaaagcagtgtactttgccattcatggtatatgcatattcttactattcttagcataactaagggggtaaagtaagtttagggaatgagtccctatcctgatttggaacactgaaactaaaaaacaattttgatg

SEQ ID NO: 58647 - DNA, 600 bp, Chicken  19866894316008_1
cagatcccctttaccatcaatgggaagagagcacttaaaaagaaagactaatgcaaagacagtcagaagaactgttctttcaaagtgcctttttttctccatttaatataaatagagtttacataagtagctcatttgccactgtgcgctgtaattgcctaaggagcctaatcacagtcatgcagttgcaggttcaaatagtttaaatctgacaggatactgactacatcacccaacttctgcacatttttgtctgtgaatccaattgtttgaaattcattttgagtaaatttactttcrggttctaatcctaaataggagaacacaaagaccttttccaaacttgtctagatttggaaataaaggcaaatttaaggccttgctacatttgtggaaggtgtaatgattaagaaagattatggtggacctatttcaacaaaatgcagcttaacataaccaaggaatagctttactctgtgggatagaatgcagggctacagaacaagaactacatattatgaaggaaaagtgtcatggatttaggagtaccagttgacaagcagctcaacaccctagtgttaatgttagctttaggtgtta

SEQ ID NO: 58648 - DNA, 600 bp, Chicken  19866894316009_1
tttaatttaattaactctttgtcagattctgtattcttcatattatctttctttgtaaaattactaagagtaattttttaataaaaacttttgtgtaaataaaatataataaaatatgaacataatgtgtatacacagaaaaaaaatggcaagatgcatacacataagataaaagaattcagacaactacttcagaatctaatttagtagtcatgcaaaattctgcctaacttccttagctgagttacagggttttgtagtcacaggctcatgatttgcccttgctgtcagtacaaatgsygtttgtagaaatggatatctgtttaccctttcaagtggaaaatgggacttgatagatcagacagacagagcaagagagatcagaaaacaagttgattagatttttgatcccagaatcgctgagaaatgagggtgcagctctcagggtagtagcaatgcaccagtgaaggagatggtgtaaggagaacggacatcagtgtagagaaaaatatcctagtcactgaagtaagacagcagattcacagagaatctatgtggacagaaaggatgaaaagcctgcacaaaatcaagggtctttgt

SEQ ID NO: 58649 - DNA, 600 bp, Chicken  19866894316009_2
ttaatttaattaactctttgtcagattctgtattcttcatattatctttctttgtaaaattactaagagtaattttttaataaaaacttttgtgtaaataaaatataataaaatatgaacataatgtgtatacacagaaaaaaaatggcaagatgcatacacataagataaaagaattcagacaactacttcagaatctaatttagtagtcatgcaaaattctgcctaacttccttagctgagttacagggttttgtagtcacaggctcatgatttgcccttgctgtcagtacaaatgsygtttgtagaaatggatatctgtttaccctttcaagtggaaaatgggacttgatagatcagacagacagagcaagagagatcagaaaacaagttgattagatttttgatcccagaatcgctgagaaatgagggtgcagctctcagggtagtagcaatgcaccagtgaaggagatggtgtaaggagaacggacatcagtgtagagaaaaatatcctagtcactgaagtaagacagcagattcacagagaatctatgtggacagaaaggatgaaaagcctgcacaaaatcaagggtctttgtg

SEQ ID NO: 58650 - DNA, 600 bp, Chicken  19866894316009_3
tgtggacagaaaggatgaaaagcctgcacaaaatcaagggtctttgtgcaggattcaacacaaaatgggacaaggaaattccaaagattgatagaaattgatggaaatttatatactgtcatcctggagtattcatttttcttccctatattaatttcttttcttcatctaccaccagcgaataatagaaaattgttttatatttccttttatttttgcaaatacaattctacatatgaatttctaaaataagtccagttgcatattccccatatgatattcatttcaggaatgcagcarggttcatcttccwaattyctctcaatgaactaatcagccttttcatcatcttccctaagatttggcctgtgctgaataatcattttcaaattagccttacgcctcttacaacaattatccaaaaacaaatcagtactcttattccagcagaacttcaatagtgtccatccttgtttgtgctataatcccctccttttcttcctttttttccatgcatctccttctttcagttacttgaaaagggttaaaaaacctttagccacttgaacagtaaatttattatgcaatttctctaactag

SEQ ID NO: 58651 - DNA, 600 bp, Chicken  19866894316009_4
gatgaaaagcctgcacaaaatcaagggtctttgtgcaggattcaacacaaaatgggacaaggaaattccaaagattgatagaaattgatggaaatttatatactgtcatcctggagtattcatttttcttccctatattaatttcttttcttcatctaccaccagcgaataatagaaaattgttttatatttccttttatttttgcaaatacaattctacatatgaatttctaaaataagtccagttgcatattccccatatgatattcatttcaggaatgcagcarggttcatcttccwaattyctctcaatgaactaatcagccttttcatcatcttccctaagatttggcctgtgctgaataatcattttcaaattagccttacgcctcttacaacaattatccaaaaacaaatcagtactcttattccagcagaacttcaatagtgtccatccttgtttgtgctataatcccctccttttcttcctttttttccatgcatctccttctttcagttacttgaaaagggttaaaaaacctttagccacttgaacagtaaatttattatgcaatttctctaactagtgtcggaatcctg

SEQ ID NO: 58652 - DNA, 600 bp, Chicken  19866894316009_5
aaagcctgcacaaaatcaagggtctttgtgcaggattcaacacaaaatgggacaaggaaattccaaagattgatagaaattgatggaaatttatatactgtcatcctggagtattcatttttcttccctatattaatttcttttcttcatctaccaccagcgaataatagaaaattgttttatatttccttttatttttgcaaatacaattctacatatgaatttctaaaataagtccagttgcatattccccatatgatattcatttcaggaatgcagcarggttcatcttccwaattyctctcaatgaactaatcagccttttcatcatcttccctaagatttggcctgtgctgaataatcattttcaaattagccttacgcctcttacaacaattatccaaaaacaaatcagtactcttattccagcagaacttcaatagtgtccatccttgtttgtgctataatcccctccttttcttcctttttttccatgcatctccttctttcagttacttgaaaagggttaaaaaacctttagccacttgaacagtaaatttattatgcaatttctctaactagtgtcggaatcctgtgatt

SEQ ID NO: 58653 - DNA, 600 bp, Chicken  19866894316011_1
tttagagccaaagatgcttgtccttccaaagtgttttgctttggtatcttttaggtctatttttttctttacttgagcatgttattttaacctcgtgccattatataatagtagaataataatgagtaatagtaccaggctcttacactatttgcgcagtgtttccctggggtttgatgcatgcttgctttcctacccttgctctctctgtcagtcttctccagcaaggcagagcctgccctctctctgctcctcctgcagaagctgcagacggctctcctgcacctgcggtgcattaawccacatgtacacagcacagtgtccacaaggtcagaggtgctgaacactcaggtgaagccagaggaggcaatgatgatgtcttctctggtttggcatgcagtgagagccatgacagaaccaagaagagactttcatgcccatactgctttccttcctcagggcagtggatgtgcaaggtgtccctgccccccacattcccgttcttttgtgtctagggttggtgccccataggaggtggtaggcagcaccttgaacccacaagccatcggctacaccagaccatctgcatgcaagcacagg

SEQ ID NO: 58654 - DNA, 599 bp, Chicken  19866894316022_1
  misc_feature (1)..(88): n is any nucleotide
nnnnnnnnnnnnnnnnnnnnnnnnnnnnnnnnnnnnnnnnnnnnnnnnnnnnnnnnnnnnnnnnnnnnnnnnnnnnnnnnnnnnnnnncacaggtgaattgccttcacctgtgctcccacagctgactcactgcttgccttagtgcttgcttcaggtgattgatcagaggttccagccatgattcagcagttcccatacactccaccccttcatggcatgaaccaatgtttgagttaactagagggtaagtcttccctaatacatagatctgacacatcacaatgcttatacagttcccygtcgcgaagtatgtcgacacaatttaagatgagtgataktggtgaaagttcatgttctttcacggaccactgcttgatgttactggaggcatgtggtagtgaggtggaggtccatcctatgctccatcagtcccatgtagcccatcaccaaatgtcgcacatcatctcacagcaacaccggaatgctttgatggcatttatttccttcaggtgatcctagaggctgaaagactcatgaggaataatacaaatgtttcagagttaccaggaggggaaggtctgccctccagggcaagata

SEQ ID NO: 58655 - DNA, 599 bp, Chicken  19866894316022_2
  misc_feature (1)..(49): n is any nucleotide
nnnnnnnnnnnnnnnnnnnnnnnnnnnnnnnnnnnnnnnnnnnnnnnnncacaggtgaattgccttcacctgtgctcccacagctgactcactgcttgccttagtgcttgcttcaggtgattgatcagaggttccagccatgattcagcagttcccatacactccaccccttcatggcatgaaccaatgtttgagttaactagagggtaagtcttccctaatacatagatctgacacatcacaatgcttatacagttcccygtcgcgaagtatgtcgacacaatttaagatgagtgataktggtgaaagttcatgttctttcacggaccactgcttgatgttactggaggcatgtggtagtgaggtggaggtccatcctatgctccatcagtcccatgtagcccatcaccaaatgtcgcacatcatctcacagcaacaccggaatgctttgatggcatttatttccttcaggtgatcctagaggctgaaagactcatgaggaataatacaaatgtttcagagttaccaggaggggaaggtctgccctccagggcaagatacaggctgtatttctatcctgggtcaacactttggcttgt

SEQ ID NO: 58656 - DNA, 600 bp, Chicken  19866894316022_3
actgcttgatgttactggaggcatgtggtagtgaggtggaggtccatcctatgctccatcagtcccatgtagcccatcaccaaatgtcgcacatcatctcacagcaacaccggaatgctttgatggcatttatttccttcaggtgatcctagaggctgaaagactcatgaggaataatacaaatgtttcagagttaccaggaggggaaggtctgccctccagggcaagatacaggctgtatttctatcctgggtcaacactttggcttgtatggggacatgccccagctgcctgtaccayaccttctggccagacatctgcagctgtataactgtatcaggcatcaaaggaggtgtcttgatctgccacagggacatgatgagggtccctttagcaatgaagatcggagtgttgaccacaatgtccgtaggccatgtacctattactggagggactactgagccttccacctccaataatctcccccaaggtgcaagtaggccacaccactttggtcctacctgcaccttccaaggccattttattctatgggtacttggatctaaattctcaggggcaggaagcagaagattattttca

SEQ ID NO: 58657 - DNA, 374 bp, Chicken  19866894316025_1
tctggctgactaagaactgagactgtgtcatcatttcaaattcaaagtaaatgcaaaaatagcaccctcgtagcgcgctgacttggtttgaaatctacacgcaggtcatatcctcagacagcatgagtttgtttagcttcagtgtcccagttccaacagatgactggctggcagggtagcgttagctagcccactgcaaatacttactgctatcgcctttaaggttcatctgatttgccataccaagatctgttttgttttctctccccactgacaaacagcccccaaaagccccaacascygggaacatcgctgcctccatactgtaagaacagcgcttacagccaaagcaacatccccaaaatgccagcgtc

SEQ ID NO: 58658 - DNA, 372 bp, Chicken  19866894316025_2
tggctgactaagaactgagactgtgtcatcatttcaaattcaaagtaaatgcaaaaatagcaccctcgtagcgcgctgacttggtttgaaatctacacgcaggtcatatcctcagacagcatgagtttgtttagcttcagtgtcccagttccaacagatgactggctggcagggtagcgttagctagcccactgcaaatacttactgctatcgcctttaaggttcatctgatttgccataccaagatctgttttgttttctctccccactgacaaacagcccccaaaagccccaacascygggaacatcgctgcctccatactgtaagaacagcgcttacagccaaagcaacatccccaaaatgccagcgtc

SEQ ID NO: 58659 - DNA, 600 bp, Chicken  19866894316029_1
gaaaagtcactctcagcattttaattattttcttacagcaggactgacatttaaatcactgtgcttttactaaccctttaaaggtcaaattacataagagatcccagcaccacaaggtaacggaggtaacgtgccaacctcctgaaaactcagctatttgcatatcccttttgcaggcctctgcagcctgtcttcatcttatttgatcaccccctgttttcccaactgttgtgataaactaaagcagcagaggagctgcatgtaagcaggcaccaggatagagaaggccatgtacagaaygtccctaccaagctgcagatcagatgcttgaagacagttcctgttacagcacagtgctggtgttgcttcatttccccacttagctcttcagacaaaagcttcagaggactgaaatgccaaccttaattcaaaaggcractttcataaagcagtgaaagtacacagggaggtgtaaagcagtctgaggatgggtgcaagcaagctttgtaagctggaccaccttctcttatttatcatctctgcccagacagcagagtgccatccagtaagatctcatgatctggggaggaaatgcatgac

SEQ ID NO: 58660 - DNA, 600 bp, Chicken  19866894316029_2
cctcctgaaaactcagctatttgcatatcccttttgcaggcctctgcagcctgtcttcatcttatttgatcaccccctgttttcccaactgttgtgataaactaaagcagcagaggagctgcatgtaagcaggcaccaggatagagaaggccatgtacagaaygtccctaccaagctgcagatcagatgcttgaagacagttcctgttacagcacagtgctggtgttgcttcatttccccacttagctcttcagacaaaagcttcagaggactgaaatgccaaccttaattcaaaaggcractttcataaagcagtgaaagtacacagggaggtgtaaagcagtctgaggatgggtgcaagcaagctttgtaagctggaccaccttctcttatttatcatctctgcccagacagcagagtgccatccagtaagatctcatgatctggggaggaaatgcatgactattttcaacactaaatgtaattttatggtttccttagccctgagtgcctatcatggccagtctgcactaccaccttcccttctgcaaaggaaatgacactcttcactgggatcactcattaacaaaacctagcaat

SEQ ID NO: 58661 - DNA, 600 bp, Chicken  19866894316032_1
ctaggaggttaagcactgctggaacaacttgccttcaacatatttccttcagtccctctctgaaaataaaatacaataaattttttttaaaacaaactctctgtaatgtatccttaacttatacaaattatgtctagaggcttagatttcatttgcaatttataacactaaaaacaaagtatttagaaagaaaaaaaatggtgtatttttattcattttctatcagctcaaaaccacatctaaaataaattagattcctgagtttactgcagtccttcaaaatacctatgtaggagaacwctttcattaacatctcaataaaaatattctgtaatcagtcagatcatagaaaacaaggttraattcaacagccttttataaaagtgtgtcatttttgscatagatgtaatcttgttgaaatcttgctaaactactatctttccaaagtgcttattacattttcttaaaaacacratgatatttcacccgaakccygtatcagtaggtacattaaaaaaaatcaagtactcaaggaaattagagtatgtcagaattacaggtgtccaggaagcatgatttgttacatggcagcataagatg

SEQ ID NO: 58662 - DNA, 600 bp, Chicken  19866894316032_2
gaaaataaaatacaataaattttttttaaaacaaactctctgtaatgtatccttaacttatacaaattatgtctagaggcttagatttcatttgcaatttataacactaaaaacaaagtatttagaaagaaaaaaaatggtgtatttttattcattttctatcagctcaaaaccacatctaaaataaattagattcctgagtttactgcagtccttcaaaatacctatgtaggagaacwctttcattaacatctcaataaaaatattctgtaatcagtcagatcatagaaaacaaggttraattcaacagccttttataaaagtgtgtcatttttgscatagatgtaatcttgttgaaatcttgctaaactactatctttccaaagtgcttattacattttcttaaaaacacratgatatttcacccgaakccygtatcagtaggtacattaaaaaaaatcaagtactcaaggaaattagagtatgtcagaattacaggtgtccaggaagcatgatttgttacatggcagcataagatgacatgaaatattatcttacccctgatcrcagcagataacccagaaagccggaatagatata

SEQ ID NO: 58663 - DNA, 600 bp, Chicken  19866894316032_3
ctctgtaatgtatccttaacttatacaaattatgtctagaggcttagatttcatttgcaatttataacactaaaaacaaagtatttagaaagaaaaaaaatggtgtatttttattcattttctatcagctcaaaaccacatctaaaataaattagattcctgagtttactgcagtccttcaaaatacctatgtaggagaacwctttcattaacatctcaataaaaatattctgtaatcagtcagatcatagaaaacaaggttraattcaacagccttttataaaagtgtgtcatttttgscatagatgtaatcttgttgaaatcttgctaaactactatctttccaaagtgcttattacattttcttaaaaacacratgatatttcacccgaakccygtatcagtaggtacattaaaaaaaatcaagtactcaaggaaattagagtatgtcagaattacaggtgtccaggaagcatgatttgttacatggcagcataagatgacatgaaatattatcttacccctgatcrcagcagataacccagaaagccggaatagatataatgcaggacacccaaatttggtagttcctgcttccag

SEQ ID NO: 58664 - DNA, 548 bp, Chicken  19866894316032_4
caaagtatttagaaagaaaaaaaatggtgtatttttattcattttctatcagctcaaaaccacatctaaaataaattagattcctgagtttactgcagtccttcaaaatacctatgtaggagaacwctttcattaacatctcaataaaaatattctgtaatcagtcagatcatagaaaacaaggttraattcaacagccttttataaaagtgtgtcatttttgscatagatgtaatcttgttgaaatcttgctaaactactatctttccaaagtgcttattacattttcttaaaaacacratgatatttcacccgaakccygtatcagtaggtacattaaaaaaaatcaagtactcaaggaaattagagtatgtcagaattacaggtgtccaggaagcatgatttgttacatggcagcataagatgacatgaaatattatcttacccctgatcrcagcagataacccagaaagccggaatagatataatgcaggacacccaaatttggtagttcctgcttccaggattttgagcttcacaaattactg

SEQ ID NO: 58665 - DNA, 530 bp, Chicken  19866894316032_5
aaaaaatggtgtatttttattcattttctatcagctcaaaaccacatctaaaataaattagattcctgagtttactgcagtccttcaaaatacctatgtaggagaacwctttcattaacatctcaataaaaatattctgtaatcagtcagatcatagaaaacaaggttraattcaacagccttttataaaagtgtgtcatttttgscatagatgtaatcttgttgaaatcttgctaaactactatctttccaaagtgcttattacattttcttaaaaacacratgatatttcacccgaakccygtatcagtaggtacattaaaaaaaatcaagtactcaaggaaattagagtatgtcagaattacaggtgtccaggaagcatgatttgttacatggcagcataagatgacatgaaatattatcttacccctgatcrcagcagataacccagaaagccggaatagatataatgcaggacacccaaatttggtagttcctgcttccaggattttgagcttcacaaattactg

SEQ ID NO: 58666 - DNA, 527 bp, Chicken  19866894316032_6
aaatggtgtatttttattcattttctatcagctcaaaaccacatctaaaataaattagattcctgagtttactgcagtccttcaaaatacctatgtaggagaacwctttcattaacatctcaataaaaatattctgtaatcagtcagatcatagaaaacaaggttraattcaacagccttttataaaagtgtgtcatttttgscatagatgtaatcttgttgaaatcttgctaaactactatctttccaaagtgcttattacattttcttaaaaacacratgatatttcacccgaakccygtatcagtaggtacattaaaaaaaatcaagtactcaaggaaattagagtatgtcagaattacaggtgtccaggaagcatgatttgttacatggcagcataagatgacatgaaatattatcttacccctgatcrcagcagataacccagaaagccggaatagatataatgcaggacacccaaatttggtagttcctgcttccaggattttgagcttcacaaattactg

SEQ ID NO: 58667 - DNA, 394 bp, Chicken  19866894316032_7
ctgtaatcagtcagatcatagaaaacaaggttraattcaacagccttttataaaagtgtgtcatttttgscatagatgtaatcttgttgaaatcttgctaaactactatctttccaaagtgcttattacattttcttaaaaacacratgatatttcacccgaakccygtatcagtaggtacattaaaaaaaatcaagtactcaaggaaattagagtatgtcagaattacaggtgtccaggaagcatgatttgttacatggcagcataagatgacatgaaatattatcttacccctgatcrcagcagataacccagaaagccggaatagatataatgcaggacacccaaatttggtagttcctgcttccaggattttgagcttcacaaattactg

SEQ ID NO: 58668 - DNA, 600 bp, Chicken  19866894316036_1
tttgaagtctgtacttgttgggaagagaaatttggaagtttgtttcatcctaaacagtgatggaattcatggtataaagctgcattccacatggctgatagaatctcagaatagattctaagaaagtattatttggaatgaatgtatgagaaactctgcattcagttcacctacaatcccaaatctgtattctttcatattaattgatttcctgtttgaagtcatctttgaatctgtgcatatattaaggggggcagcccttgttctgctttgaaaagctaagagctctaattgcaaggraagctccagggcaactattgattatcacaacaagtttgtattgttaaggtaaatgtagactccacgtagttttgacctcacctagatcccatattcaattatccttcattcacagcattcatcccactctgatacaaaccttatggcttctcttcattattttctaatttctattctttgaactattttcctacagcaaatactgaccagttaagcccaaaaagaaacagtggtgatgatctataagagtacaaaccatgttcttctcttaaggtggagtgtttcccttgttcaatggaa

SEQ ID NO: 58669 - DNA, 599 bp, Chicken  19866894316046_1
  misc_feature (1)..(48): n is any nucleotide
nnnnnnnnnnnnnnnnnnnnnnnnnnnnnnnnnnnnnnnnnnnnnnnngctcggctcctcagcattaccagtgcatcagaaggccctattctgtttctgagacaatgggataggacctccaaaggcgtttatatgtctaaaccaggtgaatgtgtctcttgtcttcctccccttattgcccatatcttaaaggaattgctcaggaacaagcatctgttttttcttgaatgtaagcacacgacaaggcacatcggacgtgagcatacatatccagctaagcctttatccatctaagcaccrgcagcagtgcctgtatccagtctgcagcagtaacctccacgtggaacagaaaccagaagacatcccttggaccctccctaaaagcccaagtttctcacctggtttcttcagtggccatgtagaaaacatcatctggtgcatcaatccagttcatcctcctccttttcactggaggcatggatccaccacgaattaatcggacttttgttgggtatgatttcccattgagcagcaagtttcggcttggtccctgacgtgatacataaagaagcacagttaggrgctgcaacaaacctgca

SEQ ID NO: 58670 - DNA, 600 bp, Chicken  19866894316046_2
ttatccatctaagcaccrgcagcagtgcctgtatccagtctgcagcagtaacctccacgtggaacagaaaccagaagacatcccttggaccctccctaaaagcccaagtttctcacctggtttcttcagtggccatgtagaaaacatcatctggtgcatcaatccagttcatcctcctccttttcactggaggcatggatccaccacgaattaatcggacttttgttgggtatgatttcccattgagcagcaagtttcggcttggtccctgacgtgatacataaagaagcacagttaggrgctgcaacaaacctgcaacagcatgcgataagcactcaaaccaaggagaagagaattaagagctttcatattggttgttcagaggctctgcaaaacatgtacccttcttgcccatgactgaatgcagagttcacacaaaagcaattgtccacaagcagtagaagttaggcacctccattgtacaacagggcagcaatgttcagcgacagaacacattgtaaatggaaggcgtcgccaataatctgttgtttgtgtctgaaagatgacatcaagtttgaaagaccgagcacgtgacttgga

SEQ ID NO: 58671 - DNA, 566 bp, Chicken  19866894316046_3
acaaatctagaactacgaagcttaacatctctcatcataaaacccctttagcatttaacaacacgaatttcccaaataggatacgttccctttgtgaaatgacacagctctattgttttccagaccccacagcccccttccactcaactggcataatgtgagctgttaatgagagaggtgcagatgcaagggagcaaaagattaagcttcgcaaacgcagcagtccttgatcatttgaagtccagttctgctgcccctcttcctgctgattagcacattgagaaatcccactgaaatccstaacactgggcagtcaggaaagatgcaaaataagggcccagaaaaattgatatgcrtgaattaaagctggtcagaaaacgccaagaaatgccagacaatttgcttctggtacatcacaggccagaccacctcccctgatgcaccaaggcttcccattgagcgtgaaatgggaaactgagcgcgttcaggaagggggggtcccacctggggagagccaccccaaagggaaaagtggggacacgaggtgtactcaagccctaaaatgg

SEQ ID NO: 58672 - DNA, 510 bp, Chicken  19866894316046_4
aacaacacgaatttcccaaataggatacgttccctttgtgaaatgacacagctctattgttttccagaccccacagcccccttccactcaactggcataatgtgagctgttaatgagagaggtgcagatgcaagggagcaaaagattaagcttcgcaaacgcagcagtccttgatcatttgaagtccagttctgctgcccctcttcctgctgattagcacattgagaaatcccactgaaatccstaacactgggcagtcaggaaagatgcaaaataagggcccagaaaaattgatatgcrtgaattaaagctggtcagaaaacgccaagaaatgccagacaatttgcttctggtacatcacaggccagaccacctcccctgatgcaccaaggcttcccattgagcgtgaaatgggaaactgagcgcgttcaggaagggggggtcccacctggggagagccaccccaaagggaaaagtggggacacgaggtgtactcaagccctaaaatgg

SEQ ID NO: 58673 - DNA, 600 bp, Chicken  19866894316048_1
ctaaaagtggcctcatccatcagggcagagtagagggggaggatcacttctaagcttgagttcagttagccaaagaggaggaaacttgtgtggaccatttttcccctgtgccaagctacttgttggcaagttagcatgatactgcccagtaatgcttagaaattcctgggtgctcaagaaccagtcagctgagtcattgcaatgtcatgtgctgtgtggacaaacacagaaatgtttgcacaagcagttgttctagaggcctcagctttagtaaaatgtgacagtgacgttctttttccrtgcttgctgtataaatgcctttcactctagcattttggagagatgaaagtagtaagtaagcccagtattttaactgctctcattctcaaattacctaaaataattttgctttgttttttaaaggaaacaaacttttacagtgtctatgggctttgaatgaatgagctggaccctgcatttattcacaaatagcttgttactaatgtttttggttttacttgcttaaagaaaaacctctcttaaccaaacgttttcatgcccttaaattcttgatacggaaatctttattatagtccagaa

SEQ ID NO: 58674 - DNA, 600 bp, Chicken  19866894316048_2
cttaaagaaaaacctctcttaaccaaacgttttcatgcccttaaattcttgatacggaaatctttattatagtccagaagtagcaagtttccacattaagaatatgaaatgtgctaaacaaactctgatcatagagtcacctgagtaggaaggatccataaggatcaccgagtccaacccctgactccacacagcatcactcatcaatcagaccctgtgtctgagtgtgctgtccaaacactccttgatctccagcacctctgtacccactgccctgggcaggctgttccgtgcccaccrccctctggtgcagaccctgtccccaacccccactgcccctcccctgrcacagctccatgccgttccctcgggccctgtcgctgttacagagagcmgagctcagtgctgcctctcsgctccttgtgaggagctgcagctgccatcaggcctcccctcagctcctctgctctgggttgagcaaactgtctttgtagccctcctttggacactctccagtagttctgtgtcctttccattctgtagtgcccagagctgcacacagtactcaaggtgaggctaacattcacattctctttatcc

SEQ ID NO: 58675 - DNA, 600 bp, Chicken  19866894316048_3
cttgatacggaaatctttattatagtccagaagtagcaagtttccacattaagaatatgaaatgtgctaaacaaactctgatcatagagtcacctgagtaggaaggatccataaggatcaccgagtccaacccctgactccacacagcatcactcatcaatcagaccctgtgtctgagtgtgctgtccaaacactccttgatctccagcacctctgtacccactgccctgggcaggctgttccgtgcccaccrccctctggtgcagaccctgtccccaacccccactgcccctcccctgrcacagctccatgccgttccctcgggccctgtcgctgttacagagagcmgagctcagtgctgcctctcsgctccttgtgaggagctgcagctgccatcaggcctcccctcagctcctctgctctgggttgagcaaactgtctttgtagccctcctttggacactctccagtagttctgtgtcctttccattctgtagtgcccagagctgcacacagtactcaaggtgaggctaacattcacattctctttatccagacttctctgtatattccaaaaaagctgccacctaagacaatccaa

SEQ ID NO: 58676 - DNA, 600 bp, Chicken  19866894316048_4
ttaagaatatgaaatgtgctaaacaaactctgatcatagagtcacctgagtaggaaggatccataaggatcaccgagtccaacccctgactccacacagcatcactcatcaatcagaccctgtgtctgagtgtgctgtccaaacactccttgatctccagcacctctgtacccactgccctgggcaggctgttccgtgcccaccrccctctggtgcagaccctgtccccaacccccactgcccctcccctgrcacagctccatgccgttccctcgggccctgtcgctgttacagagagcmgagctcagtgctgcctctcsgctccttgtgaggagctgcagctgccatcaggcctcccctcagctcctctgctctgggttgagcaaactgtctttgtagccctcctttggacactctccagtagttctgtgtcctttccattctgtagtgcccagagctgcacacagtactcaaggtgaggctaacattcacattctctttatccagacttctctgtatattccaaaaaagctgccacctaagacaatccaagtgggggcttgttaatcagcagtggctgtagcaacctgtttttcataa

SEQ ID NO: 58677 - DNA, 600 bp, Chicken  19866894316048_5
aaacaaactctgatcatagagtcacctgagtaggaaggatccataaggatcaccgagtccaacccctgactccacacagcatcactcatcaatcagaccctgtgtctgagtgtgctgtccaaacactccttgatctccagcacctctgtacccactgccctgggcaggctgttccgtgcccaccrccctctggtgcagaccctgtccccaacccccactgcccctcccctgrcacagctccatgccgttccctcgggccctgtcgctgttacagagagcmgagctcagtgctgcctctcsgctccttgtgaggagctgcagctgccatcaggcctcccctcagctcctctgctctgggttgagcaaactgtctttgtagccctcctttggacactctccagtagttctgtgtcctttccattctgtagtgcccagagctgcacacagtactcaaggtgaggctaacattcacattctctttatccagacttctctgtatattccaaaaaagctgccacctaagacaatccaagtgggggcttgttaatcagcagtggctgtagcaacctgtttttcataaagcgcggggctgtcactaga

SEQ ID NO: 58678 - DNA, 600 bp, Chicken  19866894316050_1
cataaaggcacaaaatgagtagatctgtaatgaccacggtcttcacaatactagcaaggtgggatggtgatagagaggaatttcctttttattacaaataactcctggtggaatttctaaacggaggagctataacttaaaagcagaagctgtcaatggagatattaacacactgaaccagattctgagctgccataaatcaaggcagcactattaatttcagtagaactgtatttcaactcagtgagaagaagctgcactcctcacgatatgactgcaaatctgtggcttgattcaccrtagaaaagtgttctggcagcagctgttggtttggttgtacaatagtgttctggctttgaaggatttccagcagctaagggggatttttagcaccctgtaccaccctacccacgttccatttcctgggtgagcagtgggtttgctcttttcctttgcagtgtcctggacctattggcagccccactgcaagctggcctcaccaaatgtagtcagcaggactgggtcttcaaaatagaaccacagggcagggctgagagatgctcagtttgtactcttcctcatgtattttcattcactacc

SEQ ID NO: 58679 - DNA, 600 bp, Chicken  19866894316060_1
aaaatgcgcagctgagttacacataaaaaagctcttagtaggaaacagcaatatttggtagtaagcaggtatttacagatattaaaaagctgcgtcaaggaagttggttcaataagcccgaggcatgggattttagaaggtttatgaattgaaccatatacttttttccccagttctcagtgtttcattgtaggctttaaaatagtatgcatatactatgtgtagcaggagactgtggtcagtttcaagattatgtatacatatttcagttatttgactcttacttagaccctgtctctytgctgacggctttatgtttccaccagtatttgtacaatgaatattggtttcagcattctgtgttcaccccctgctgattttgctgggctagcaaakgaatatatcagagaagaaaatattcctacrtacataatgagaaaaactagccattagtttaacaaagtgctttagtttttgctttttaagcataagccctgtgatgcaaattacactgttgagaaaaatgtgactttaggcccagtcctgtggattctgtgaacaagtgtgtgcttccgagattggtctttttggaatagggag

SEQ ID NO: 58680 - DNA, 600 bp, Chicken  19866894316060_2
aaggaagttggttcaataagcccgaggcatgggattttagaaggtttatgaattgaaccatatacttttttccccagttctcagtgtttcattgtaggctttaaaatagtatgcatatactatgtgtagcaggagactgtggtcagtttcaagattatgtatacatatttcagttatttgactcttacttagaccctgtctctytgctgacggctttatgtttccaccagtatttgtacaatgaatattggtttcagcattctgtgttcaccccctgctgattttgctgggctagcaaakgaatatatcagagaagaaaatattcctacrtacataatgagaaaaactagccattagtttaacaaagtgctttagtttttgctttttaagcataagccctgtgatgcaaattacactgttgagaaaaatgtgactttaggcccagtcctgtggattctgtgaacaagtgtgtgcttccgagattggtctttttggaatagggagttactttcagaaaatcaagagatatccgtgtgttatacctctaagagagtagatacattccagtgtggttatgattatgcttatagtaacagcaga

SEQ ID NO: 58681 - DNA, 600 bp, Chicken  19866894316060_3
gggattttagaaggtttatgaattgaaccatatacttttttccccagttctcagtgtttcattgtaggctttaaaatagtatgcatatactatgtgtagcaggagactgtggtcagtttcaagattatgtatacatatttcagttatttgactcttacttagaccctgtctctytgctgacggctttatgtttccaccagtatttgtacaatgaatattggtttcagcattctgtgttcaccccctgctgattttgctgggctagcaaakgaatatatcagagaagaaaatattcctacrtacataatgagaaaaactagccattagtttaacaaagtgctttagtttttgctttttaagcataagccctgtgatgcaaattacactgttgagaaaaatgtgactttaggcccagtcctgtggattctgtgaacaagtgtgtgcttccgagattggtctttttggaatagggagttactttcagaaaatcaagagatatccgtgtgttatacctctaagagagtagatacattccagtgtggttatgattatgcttatagtaacagcagaaatggcacaagatcttctggattactgcag

SEQ ID NO: 58682 - DNA, 600 bp, Chicken  19866894316063_1
aggaagtaatgagaataggagaagagctgtggtgtaaaataggtgattctgaggattggatgttgaagagctgctcatatttctgctcttgtatgtaactaaaaatacatattactctcttagcaagtaggtatttgtttttacatagaggatatgataactgtaaagaaatacccacatttcagctccatgttttgctcctgtggttaacatattgctcacactcttaagtaaaatctttatgctttgtgactgtctgtgccactggaatattatcagatgtttctattctgttctttrttactgtactttaataaagttctaatttgattcaaggaaagctaatataaactgtatctggaatagtggattttaatttgtagaagtatagcttctctgttggtcttaggatgtgaaccaaagccagattagaatgatcaggaaattcatcacagatgtacctttttaatttaaactaacaagttactaaggatgtatgctccacaggagcactgaagtccacaaagcacaggtaagtggtaccaaaactctgacgaaaaaggagacagaaagagcactgatcttggcaaacttcaaaca

SEQ ID NO: 58683 - DNA, 600 bp, Chicken  19866894316064_1
acaaaactgcatgtgatattggcagggaggtctagcttctacaacataacaccaacatcctcctctgacatcctgaagcagtgtaataaaagaggaggcattaatttcggagaccaaacagcggatgtgagcacagtgaagtgatgggtgatgcatttcagcagtggtaacagtgacacaaaagagaagccatgttctgggtggccattcagatttttaacagcatgacatgtaagctcttcttgatcactggctaaagcatctgtccccttctttagatactgaaaggccactctcagstctctccagagccttctcttctccrwtctgaacagtctcaactctctctgtctgtccacacagaagaggtgttccatctcttggattattttttttttggccctcctctggatgcattccaacagattcaatcctctcttgttgtgaggactctgcattcaaacataatactccaggtgaagtctcacctacacatagaagagggacaggatcacttcctttgacctgctggtcacaattcttttgatgcagcccaggacatggttggctttctgggctgctctgaatactttcctggct

SEQ ID NO: 58684 - DNA, 600 bp, Chicken  19866894316064_2
ggaggtctagcttctacaacataacaccaacatcctcctctgacatcctgaagcagtgtaataaaagaggaggcattaatttcggagaccaaacagcggatgtgagcacagtgaagtgatgggtgatgcatttcagcagtggtaacagtgacacaaaagagaagccatgttctgggtggccattcagatttttaacagcatgacatgtaagctcttcttgatcactggctaaagcatctgtccccttctttagatactgaaaggccactctcagstctctccagagccttctcttctccrwtctgaacagtctcaactctctctgtctgtccacacagaagaggtgttccatctcttggattattttttttttggccctcctctggatgcattccaacagattcaatcctctcttgttgtgaggactctgcattcaaacataatactccaggtgaagtctcacctacacatagaagagggacaggatcacttcctttgacctgctggtcacaattcttttgatgcagcccaggacatggttggctttctgggctgctctgaatactttcctggctccaaagtcaaaccaacaagactata

SEQ ID NO: 58685 - DNA, 600 bp, Chicken  19866894316064_3
gaggtctagcttctacaacataacaccaacatcctcctctgacatcctgaagcagtgtaataaaagaggaggcattaatttcggagaccaaacagcggatgtgagcacagtgaagtgatgggtgatgcatttcagcagtggtaacagtgacacaaaagagaagccatgttctgggtggccattcagatttttaacagcatgacatgtaagctcttcttgatcactggctaaagcatctgtccccttctttagatactgaaaggccactctcagstctctccagagccttctcttctccrwtctgaacagtctcaactctctctgtctgtccacacagaagaggtgttccatctcttggattattttttttttggccctcctctggatgcattccaacagattcaatcctctcttgttgtgaggactctgcattcaaacataatactccaggtgaagtctcacctacacatagaagagggacaggatcacttcctttgacctgctggtcacaattcttttgatgcagcccaggacatggttggctttctgggctgctctgaatactttcctggctccaaagtcaaaccaacaagactatag

SEQ ID NO: 58686 - DNA, 440 bp, Chicken  19866894316067_1
aaatgctctttgatttttttttgtactttcctacgtaaataattctattaataatatgtcttccatttttcagaacgttttctgagaaaatcagttggtatgatcataagtgactttaacaatttagtcattttgcatgtatttgtataaaaattacagaatcattttcactagtttgatgttattgagttggaaaatggaaatatttactgatttatagaattctgatcagttacattattttttttttgccctacctttctctccttttcatgtaggtaaaaaaatgttttattcttwactgacatagcaatttcctgaagtcaagacaaatgagaaattgtctttataagaaatcactaagataatgtgtaatattcattttcaactcataacaagctagcttgcctggagaaaagggtgggtggaaaatggtggat

SEQ ID NO: 58687 - DNA, 600 bp, Chicken  19866894316068_1
aaatgcaatctgactgctgagatgtagacctatgggacaaatgtgtgcgataaccctattccagagtaaattcaaccacaatattaaggagtaatttgagtaacaaaaaaaagtttcattaagtgtaaatcaaaaaacatattatccttggaaggtaattttaagctttctgtttcctacacccttcctgtacccttcattacaatataattgattaggaaccaagactaggatgcaaagcagccccaaacaccaaagaatatttgaaattgcttatatccagtcatgggattctacacraagaatcayagaatgatatgagttggacaggatcattaaagattatctagtccaattccactgcaatgaacagggacacctacagctagatcaggttgctcagagcccagtccagcctgatattgaatgtctccagggatgggtcatccaccacctctctgggcaatctgttccactgcttcactactcttattgtagaaaacatttttctttcatccaatctaaawctcctttcttgtagtctgaaatgattttcccatgtcctgtcacagcagactctgttaaagaatctatcgcatt

SEQ ID NO: 58688 - DNA, 600 bp, Chicken  19866894316068_2
ctgactgctgagatgtagacctatgggacaaatgtgtgcgataaccctattccagagtaaattcaaccacaatattaaggagtaatttgagtaacaaaaaaaagtttcattaagtgtaaatcaaaaaacatattatccttggaaggtaattttaagctttctgtttcctacacccttcctgtacccttcattacaatataattgattaggaaccaagactaggatgcaaagcagccccaaacaccaaagaatatttgaaattgcttatatccagtcatgggattctacacraagaatcayagaatgatatgagttggacaggatcattaaagattatctagtccaattccactgcaatgaacagggacacctacagctagatcaggttgctcagagcccagtccagcctgatattgaatgtctccagggatgggtcatccaccacctctctgggcaatctgttccactgcttcactactcttattgtagaaaacatttttctttcatccaatctaaawctcctttcttgtagtctgaaatgattttcccatgtcctgtcacagcagactctgttaaagaatctatcgcattctttcttgt

SEQ ID NO: 58689 - DNA, 482 bp, Chicken  19866894316068_3
ctaggatgcaaagcagccccaaacaccaaagaatatttgaaattgcttatatccagtcatgggattctacacraagaatcayagaatgatatgagttggacaggatcattaaagattatctagtccaattccactgcaatgaacagggacacctacagctagatcaggttgctcagagcccagtccagcctgatattgaatgtctccagggatgggtcatccaccacctctctgggcaatctgttccactgcttcactactcttattgtagaaaacatttttctttcatccaatctaaawctcctttcttgtagtctgaaatgattttcccatgtcctgtcacagcagactctgttaaagaatctatcgcattctttcttgtagcctctctttaggtactgaaaggctgttatcaggtctccctgctcctctccagcctgagctctcagccagtcctcgtaggggaggtgttctgtccctca

SEQ ID NO: 58690 - DNA, 600 bp, Chicken  19866894316077_1
gccagcttattagtataaaaaggttgcagtaaagattaatctagttctgaaattcaaaagctttcaggtaagcaaggaatgcatagactccatgaaaactattaacctctaattaagtgaaaatgaatgtggcacagctgaagagaatgaggagagaaactctgccttatacagtcagttttggagggaaaaactggacctgaaaagcagggatgtagtctgtctcttctatctccatgcctgtgatatagaacagaagaagagctcaagacaaagctcaacagtctgtattttagcagyatctctctatgctgtctcagtacagacaaggtgaagggacatcaagaatcttgaaaaacatcagattaattttagaggaacatttcctggccccacctgcagactaaggctatggcacaaaatgaacacaaccaagctgcaattctcctctgaagaaaaactagggcttctgtaataaatgctcaaacatatttcctcctttttttctttctttttttttttcccctctcgaaatactgccttggtttcctgcaatgtctaactttggccctttgagacagatatcttatcttttcatac

SEQ ID NO: 58691 - DNA, 600 bp, Chicken  19866894316079_1
tgccatttctgcattataagataagttaaatgaaagaagccagctattgacttctcaagttacaagagttaccacaataacaaaacaaagctcacaatgctgatctattccagtggttatggccagtcctgtctggaacgatagccgcagcagaacccacatggtgcagcaaggatgtgctgcttaaaaaaatactgctttgcaaagtttgttaggatccagtggcagacatccttgagatatattgctcccttgtgacagatattgtctgtcattcaattaacacatatttaaactgaraagacaggctctgggcaagaggcatttgcattgtgtagttcaacagataaaatagttgtttgctttgttacacaaaaatactcagtggtagaagtgtgcacccttgtcagctgacaactactctacactagggtgctactcaaatatctgcagcattgcagacaaaatggaataggaattgyaacagcttgacacaactgtgtacaagctggtgatgctttattaatagataccaagagccacaaagtcacatgctgtcagctgttaccatctactcttcctctgttttcctaccagcag

SEQ ID NO: 58692 - DNA, 538 bp, Chicken  19866894316079_2
cttaaaaaaatactgctttgcaaagtttgttaggatccagtggcagacatccttgagatatattgctcccttgtgacagatattgtctgtcattcaattaacacatatttaaactgaraagacaggctctgggcaagaggcatttgcattgtgtagttcaacagataaaatagttgtttgctttgttacacaaaaatactcagtggtagaagtgtgcacccttgtcagctgacaactactctacactagggtgctactcaaatatctgcagcattgcagacaaaatggaataggaattgyaacagcttgacacaactgtgtacaagctggtgatgctttattaatagataccaagagccacaaagtcacatgctgtcagctgttaccatctactcttcctctgttttcctaccagcagtcagcgctgcacctttagagagtgactgaggattttggcacagactattcatttgatctaagtgaagagcctgtatctaaagctcatccagcacagctggcctggtattccttcctttta

SEQ ID NO: 58693 - DNA, 600 bp, Chicken  19866894316080_1
tccctgggctgaggggagaccctgccctgcagcccctccctttcctcctgcatctgcagtgcacctgcctgagcaggcacagctgtgctgtggaaggcggacatctgaagcctctgactgcagttaatgggtcctccagggacctcagaacagctaggaggagcagataagagaagccatgtatcttgccagaactctttgtagctgttcttaggaatacaaacctaataaagtgcaattttacaatgtagcttatggatttcattaaccctatcagaaggtgtcagagatgagacaaakattscataaagcattccatgtgcagtcacagaaaaagaatgaatgaggttgtgtatcactgatgaactatttaggatgtatttgaggtgatrttccatgtttgttcactgtggaataccacagttctgaaaactgcyacttraaacaaatgaggtcaaaggtggatttcctaaatctgtggatttcttgtatgtatgcacatttatttcttacttgcctccttgctttggatttttagatgtcaaaagctggctggtgatgttcggatttcagcttagcaacattattcctggcttccct

SEQ ID NO: 58694 - DNA, 600 bp, Chicken  19866894316080_2
tgggctgaggggagaccctgccctgcagcccctccctttcctcctgcatctgcagtgcacctgcctgagcaggcacagctgtgctgtggaaggcggacatctgaagcctctgactgcagttaatgggtcctccagggacctcagaacagctaggaggagcagataagagaagccatgtatcttgccagaactctttgtagctgttcttaggaatacaaacctaataaagtgcaattttacaatgtagcttatggatttcattaaccctatcagaaggtgtcagagatgagacaaakattscataaagcattccatgtgcagtcacagaaaaagaatgaatgaggttgtgtatcactgatgaactatttaggatgtatttgaggtgatrttccatgtttgttcactgtggaataccacagttctgaaaactgcyacttraaacaaatgaggtcaaaggtggatttcctaaatctgtggatttcttgtatgtatgcacatttatttcttacttgcctccttgctttggatttttagatgtcaaaagctggctggtgatgttcggatttcagcttagcaacattattcctggcttccctagag

SEQ ID NO: 58695 - DNA, 600 bp, Chicken  19866894316080_3
gaaggcggacatctgaagcctctgactgcagttaatgggtcctccagggacctcagaacagctaggaggagcagataagagaagccatgtatcttgccagaactctttgtagctgttcttaggaatacaaacctaataaagtgcaattttacaatgtagcttatggatttcattaaccctatcagaaggtgtcagagatgagacaaakattscataaagcattccatgtgcagtcacagaaaaagaatgaatgaggttgtgtatcactgatgaactatttaggatgtatttgaggtgatrttccatgtttgttcactgtggaataccacagttctgaaaactgcyacttraaacaaatgaggtcaaaggtggatttcctaaatctgtggatttcttgtatgtatgcacatttatttcttacttgcctccttgctttggatttttagatgtcaaaagctggctggtgatgttcggatttcagcttagcaacattattcctggcttccctagagcaaaaatgtactttgtgtcacctccatacgagctgactgagagtcaagcgtgtgaaaatggacaggtaggcagaaacatgaagtcctc

SEQ ID NO: 58696 - DNA, 600 bp, Chicken  19866894316080_4
agggacctcagaacagctaggaggagcagataagagaagccatgtatcttgccagaactctttgtagctgttcttaggaatacaaacctaataaagtgcaattttacaatgtagcttatggatttcattaaccctatcagaaggtgtcagagatgagacaaakattscataaagcattccatgtgcagtcacagaaaaagaatgaatgaggttgtgtatcactgatgaactatttaggatgtatttgaggtgatrttccatgtttgttcactgtggaataccacagttctgaaaactgcyacttraaacaaatgaggtcaaaggtggatttcctaaatctgtggatttcttgtatgtatgcacatttatttcttacttgcctccttgctttggatttttagatgtcaaaagctggctggtgatgttcggatttcagcttagcaacattattcctggcttccctagagcaaaaatgtactttgtgtcacctccatacgagctgactgagagtcaagcgtgtgaaaatggacaggtaggcagaaacatgaagtcctctttcctgataaatttgcctctctctgtgaatagaactgctggctc

SEQ ID NO: 58697 - DNA, 600 bp, Chicken  19866894316080_5
cctcagaacagctaggaggagcagataagagaagccatgtatcttgccagaactctttgtagctgttcttaggaatacaaacctaataaagtgcaattttacaatgtagcttatggatttcattaaccctatcagaaggtgtcagagatgagacaaakattscataaagcattccatgtgcagtcacagaaaaagaatgaatgaggttgtgtatcactgatgaactatttaggatgtatttgaggtgatrttccatgtttgttcactgtggaataccacagttctgaaaactgcyacttraaacaaatgaggtcaaaggtggatttcctaaatctgtggatttcttgtatgtatgcacatttatttcttacttgcctccttgctttggatttttagatgtcaaaagctggctggtgatgttcggatttcagcttagcaacattattcctggcttccctagagcaaaaatgtactttgtgtcacctccatacgagctgactgagagtcaagcgtgtgaaaatggacaggtaggcagaaacatgaagtcctctttcctgataaatttgcctctctctgtgaatagaactgctggctctccag

SEQ ID NO: 58698 - DNA, 599 bp, Chicken  19866894316081_1
  misc_feature (1)..(97): n is any nucleotide
nnnnnnnnnnnnnnnnnnnnnnnnnnnnnnnnnnnnnnnnnnnnnnnnnnnnnnnnnnnnnnnnnnnnnnnnnnnnnnnnnnnnnnnnnnnnnnnnnctggattttactgatgtagtcagtgggggcaaatagagaggatagttactgagagtgcttaagatgtatattcgtatctgaaggcaagactgagccagaattcctgactgaagttaaacatttaaagttaacttcctgtgggttgctggtactattttagggcagcctatggtttttcttgtttcatcagtgctggctgtatrtgtctggacacaataataacgcgataacttgttttttttctgcactgttgtaaaatggtttcagctgtggctgtattacctggakttgctctttttgattcagtatttattgacaactgtaagatatgacctgttttggtttctgaaggaaaaggaaaagtatctcagctatgtttctgtaaacttaatatagactagaactttgtgtgtgtgaagcggctagtaggggggaaaactacgttacaggtgtttttttctgagagcttgagattaatgtttgaatatgagttattgcatgc

SEQ ID NO: 58699 - DNA, 599 bp, Chicken  19866894316081_2
  misc_feature (1)..(12): n is any nucleotide
nnnnnnnnnnnnctggattttactgatgtagtcagtgggggcaaatagagaggatagttactgagagtgcttaagatgtatattcgtatctgaaggcaagactgagccagaattcctgactgaagttaaacatttaaagttaacttcctgtgggttgctggtactattttagggcagcctatggtttttcttgtttcatcagtgctggctgtatrtgtctggacacaataataacgcgataacttgttttttttctgcactgttgtaaaatggtttcagctgtggctgtattacctggakttgctctttttgattcagtatttattgacaactgtaagatatgacctgttttggtttctgaaggaaaaggaaaagtatctcagctatgtttctgtaaacttaatatagactagaactttgtgtgtgtgaagcggctagtaggggggaaaactacgttacaggtgtttttttctgagagcttgagattaatgtttgaatatgagttattgcatgctttgagattaaaccattgtatctgtgttgcagtttgctaatggtgtaaactgctagaagagcatttkctccttaaaagttcagga

SEQ ID NO: 58700 - DNA, 600 bp, Chicken  19866894316081_3
gtggctgtattacctggakttgctctttttgattcagtatttattgacaactgtaagatatgacctgttttggtttctgaaggaaaaggaaaagtatctcagctatgtttctgtaaacttaatatagactagaactttgtgtgtgtgaagcggctagtaggggggaaaactacgttacaggtgtttttttctgagagcttgagattaatgtttgaatatgagttattgcatgctttgagattaaaccattgtatctgtgttgcagtttgctaatggtgtaaactgctagaagagcatttkctccttaaaagttcaggacaaaataaagcaagagccacagtctttaatataagtctacattttttttctgcaactttttgtactgtattattggcaagtattttatattcatagtagcgcaagagccaggtctttgtgtgtttatgtgggtgtggaaataaacaacatcagcctcaaacaatatcgtaatcttcatgatcttaaaagtttagtctcattaaaatgaataagtaaataagcatggtttgagttgtctgctggactctgatggggcctaccaaatctaccccttttgttaag

SEQ ID NO: 58701 - DNA, 600 bp, Chicken  19866894316084_1
caatatgagctcgctcctatctaaaaagtcccagaagctacattttattaacgcacatataaggaaacatagtaagaactcttgcatttaaagaaattcatatagcaacatttgaaaatgatggaaatgaggcctcattagtaaaaatttcacagaataacatgattgatatcataagaaacttcaaaaatatcgtatggaaatatactcgggaaagtcctcacttttctgttacgtttcctccagaacacatttgaacatcatttttgagggagagagataaaatccccaaaaattacmcatgccaactaccaagtggcctacagtagtcaaacataagctagattacttctgaacagtaggcattccataacagacacatacaagtactgagaaataaatttgttatttaatgatggagaatatgactgatgatgaaagacagaaatgttactatttcaacatttacttttgttctaacttctagcaagctaaagagcagaatgaaatactctgaaatcttcaaagcttttcttagtaaaagaaatcaagaaactctgaccatctctatctcctttgaaccatgatgcatcttcagat

SEQ ID NO: 58702 - DNA, 577 bp, Chicken  19866894316091_1
cctgaatacaacagtcttggtagctacagcaatagagctcattaagtccgcagtcccttttagctatggcaaatgcaaagcaactttagccgttttatcaagcatattaagaaggaacaagaacttgaagaccagaaaatgcttgtttgtttgtttatgtatatttccccccaaactcccacacattaaaaacagatgccaaaggaaattctgttttagcatattccagtatcatccagcataagaaaataaatatgaattaatacatttctatttagtctcctgatttaatataacaawtttttgtttaaatggaataccttgtctgcttccatttactgggttgtttagcagacatcttagatactgcaggatatcttagaaatttcatttttaaggatcacttaagtaccaaaaagactagtgatcaagataaaaagttatgaatcatttacactggtaggagatcatttgttctatatctatctcaaagggaactgtacagtacacttattaatcatttcaacaagatatgcacagagtgtgtagtataaaaagatttttaatattagtctca

SEQ ID NO: 58703 - DNA, 599 bp, Chicken  19866894316095_1
  misc_feature (1)..(101): n is any nucleotide
nnnnnnnnnnnnnnnnnnnnnnnnnnnnnnnnnnnnnnnnnnnnnnnnnnnnnnnnnnnnnnnnnnnnnnnnnnnnnnnnnnnnnnnnnnnnnnnnnnnnnccaatatctgagctggctgcttgcaaatgggtttgggtgagtcaccagaattacaatgcagcgtaagcatgctctatagtattgtgatgctattgtaatcacaaaacagcccctatgtaggaagagttgcatatcaaaaaaaaaaaaaaaaaaagtgaagtaaaatttaatgtatggtaatgcataatgaaaggactcmaagcaacttaacttccctttccttccacgttatcaaatctttgattatttactccacaaacttaaaaagaaagtctgaccttataatttgaattttaaatgagtacatatttttttattctatccatgaaagtgaaaagtttaattattacattttagggaatggttattgaagagattcttagtgtaaaactagacaaaatagcagtaattggattgaagcgtaaatcaatgaaacattattcatggcaacctgaaggacaagtaaaacactgcttctgtatttctgcattctggttg

SEQ ID NO: 58704 - DNA, 600 bp, Chicken  19866894316113_1
tttagttagcaagctgactatgcccttagtacttacacttcccttaaccagtcatacaaagtgaatattttcacatggaatcaccccaacaacactttcccaagaaagctaatattaattattatttgcttaagttttcctttcacttgaagtttcccctgaataacattagactgacctgctttagcagggagttagacactctaaggtctctagaggttccttccaactcctacaactctgagattctgtggtttcctctcttcagatgagaaggcatgcagctaagactttaggtawaggatggcgtttggatgttgtgttgagggacatggtttagcgagaaccattggtgaagggcgratggttggactggatgatcctgtgggtcttttccaaccttagcaattctatgattctatgattatatggtatcaaggacatawcaggaaattgtctccttccttctgttgtcaatgaagaatttcttttttacaacagtagcaattggacagaccaatacaatgggaaaggtgctacaacaaaggtgtgatgacaaaaggactggcataatagagaggtactataaaggaagggaag

SEQ ID NO: 58705 - DNA, 600 bp, Chicken  19866894316113_2
aatattttcacatggaatcaccccaacaacactttcccaagaaagctaatattaattattatttgcttaagttttcctttcacttgaagtttcccctgaataacattagactgacctgctttagcagggagttagacactctaaggtctctagaggttccttccaactcctacaactctgagattctgtggtttcctctcttcagatgagaaggcatgcagctaagactttaggtawaggatggcgtttggatgttgtgttgagggacatggtttagcgagaaccattggtgaagggcgratggttggactggatgatcctgtgggtcttttccaaccttagcaattctatgattctatgattatatggtatcaaggacatawcaggaaattgtctccttccttctgttgtcaatgaagaatttcttttttacaacagtagcaattggacagaccaatacaatgggaaaggtgctacaacaaaggtgtgatgacaaaaggactggcataatagagaggtactataaaggaagggaagaagattggtcaaccgtatcagaagattctaggttcacagaggaaagcttcaccaaagagggat

SEQ ID NO: 58706 - DNA, 600 bp, Chicken  19866894316113_3
ttgaagtttcccctgaataacattagactgacctgctttagcagggagttagacactctaaggtctctagaggttccttccaactcctacaactctgagattctgtggtttcctctcttcagatgagaaggcatgcagctaagactttaggtawaggatggcgtttggatgttgtgttgagggacatggtttagcgagaaccattggtgaagggcgratggttggactggatgatcctgtgggtcttttccaaccttagcaattctatgattctatgattatatggtatcaaggacatawcaggaaattgtctccttccttctgttgtcaatgaagaatttcttttttacaacagtagcaattggacagaccaatacaatgggaaaggtgctacaacaaaggtgtgatgacaaaaggactggcataatagagaggtactataaaggaagggaagaagattggtcaaccgtatcagaagattctaggttcacagaggaaagcttcaccaaagagggatctccaaccagagatccttccccagtggcagtcagcccttaaatgagstctaagagaggtgcacccaggctccacctcttctgg

SEQ ID NO: 58707 - DNA, 600 bp, Chicken  19866894316113_4
ctatgattctatgattatatggtatcaaggacatawcaggaaattgtctccttccttctgttgtcaatgaagaatttcttttttacaacagtagcaattggacagaccaatacaatgggaaaggtgctacaacaaaggtgtgatgacaaaaggactggcataatagagaggtactataaaggaagggaagaagattggtcaaccgtatcagaagattctaggttcacagaggaaagcttcaccaaagagggatctccaaccagagatccttccccagtggcagtcagcccttaaatgagstctaagagaggtgcacccaggctccacctcttctggtcacacagctgaactgtcttcaccggtgctcccagggctgatggggtcctttcccccggtgctcaatcagtggctcaggccgtgactcaacagttaccatacaacaacatattcccagtagttttaaatcagtctggcaatggatttcagagctttgcagccccaaggggttaaaataataataataataatcagaaatggtcttacaattccctcggctcagtgtcttctctcagtattgacccttcagtaccactgagatat

SEQ ID NO: 58708 - DNA, 599 bp, Chicken  19866894316114_1
  misc_feature (1)..(118): n is any nucleotide
nnnnnnnnnnnnnnnnnnnnnnnnnnnnnnnnnnnnnnnnnnnnnnnnnnnnnnnnnnnnnnnnnnnnnnnnnnnnnnnnnnnnnnnnnnnnnnnnnnnnnnnnnnnnnnnnnnnnnnctgatgtttgactggctagattgtgagttgacggttccaaaaggaaattaagcagaaccaagtgttacctcctgatacttaatgaaatcagcagaagcatatcgttgactaaggttctgttctctaaaataaagtgttttctcccctgtttaccattaggttttcccactcttccacttctsgaaacataggctgtttgtttggaatacagtctctgtcccatctggtttgtaacatgttcctatttgggcatttggcagtcaagggaagtgtgtgagttaacaaacatttctgagacttaaacattcttctgaacaaygcctatcagaatctgggtaccagaagtggcagatagagcatgtgctcagcaagagaaacgctgcattgcagataaagggaaatggcaacgtcaagattccgtgtgtgtctaatggtaatcacaacagggacttacaaatcttaacgtgccacgaagttctta

SEQ ID NO: 58709 - DNA, 600 bp, Chicken  19866894316114_2
attgtgagttgacggttccaaaaggaaattaagcagaaccaagtgttacctcctgatacttaatgaaatcagcagaagcatatcgttgactaaggttctgttctctaaaataaagtgttttctcccctgtttaccattaggttttcccactcttccacttctsgaaacataggctgtttgtttggaatacagtctctgtcccatctggtttgtaacatgttcctatttgggcatttggcagtcaagggaagtgtgtgagttaacaaacatttctgagacttaaacattcttctgaacaaygcctatcagaatctgggtaccagaagtggcagatagagcatgtgctcagcaagagaaacgctgcattgcagataaagggaaatggcaacgtcaagattccgtgtgtgtctaatggtaatcacaacagggacttacaaatcttaacgtgccacgaagttcttacggaaataacagcagaatcagcagaatgacaaatgtaataccctcctttaattattatcttttaagtgtatttggattttgaaagcattcctgcccttaaacagcacagtgccttttaaagccatgtatcaagtgact

SEQ ID NO: 58710 - DNA, 469 bp, Chicken  19866894316114_3
agaatctgggtaccagaagtggcagatagagcatgtgctcagcaagagaaacgctgcattgcagataaagggaaatggcaacgtcaagattccgtgtgtgtctaatggtaatcacaacagggacttacaaatcttaacgtgccacgaagttcttacggaaataacagcagaatcagcagaatgacaaatgtaataccctcctttaattattatcttttaagtgtatttggattttgaaagcattcctgcccttaaacagcacagtgccttttaaagccatgtatcaagtgacttgttccrtactgactcactatttattcttccaccaacagtgttttgtgaagccgagagctaccaaccatgtaagcaccttaaactgagttgcataattttagctattgtgagctatgcacagcaaataaccagggtaatacagtgagaaaagctatgcttttactgcaggccattt

SEQ ID NO: 58711 - DNA, 600 bp, Chicken  19866894316115_1
aaaatcatggcactgtgacccaggcagccagtttagccaaattatcaggaatcatggatgagaattaaaatagggtataaggtttaaagcgtcttctatacatttgacgttaaaagcctcaggattagcgtaaatcttatcttttcagtacctctctctgttcaaacatgtgcatcagaataatacttgggtggagagggcctgggaactttcatttgtgctgcacatcaaacttgtctcccacacagcaaaatctcactgtgtttctttggctgggatgggctgccagcatccccttgmactgaggtgcagtgcaaggcagtgagtgctgtgttagggaccagccaaatgccagaactgtgcagtgctggttttgcatcccagctcatcgtctttgctggcaacctgttgtcagcctacacagatttcagactgaaatctaactggctgcacagtgccatgtggatgtgttgtgctgggtggctgctgactgactgtgaataggcattcctgagtttgggagatcatctgagaagaagcagctgtgctcagtcaggagcacagttttaaccatcttgacaaatggaagttgctgtgagt

SEQ ID NO: 58712 - DNA, 600 bp, Chicken  19866894316115_2
ggaagttgctgtgagtactccattatcatccttgacttgtttgactttttcctgtgtctttcttgggagcactgtgaaagccaaatttgtgtttacattcctcctccttggcagtctccttattcttttggaaacatactaagtgagacacaaaaactgcatgctgactgcacatttctagtaaccctaactttgcctattcgtaaaataagaaatatgacaaacggcagtttaaccttcagcatctccttctgaaaataatacaagaaaggcatacacactctctgtcatttaaacagmgtatgcatgctgtgaactagtccagaaaatgacagcactttactgggttctgtgctaagatcaaagaaacttacagcctcttcctaattagaacttattgtgcagtgccagtgaaagaacagatagacagggttggttgggagacaacgaaaagaccaaggagagcttttcattatgaagtcctctcctatatctgaaggtctgggactcatttcctcaaacctcctacagacccaggagtcttatcagttttcccacaagatatgccaaaggcaaatatgcaattatttaataactata

SEQ ID NO: 58713 - DNA, 600 bp, Chicken  19866894316122_1
gctctgtgctgatctccccacaagaccccgaggatccgggagcgacccctccacagccacagagcagctggggggaactctgctcctgcaggagggcccccccccagtgctggggtactgcagagcgctgggggcagagagggaaccggagcggaaccgagggttgactttcttagcagtagccaatgatccgtttatagtagcagctgtcttagatacgcatcgttgtagagcgcggcgccgccgccagcatcacctcatccatatagtgacgagaaattcaaaagagagggggggggraaaaataataataataaaaaaagttaaaaaaaaaaaaaaagaaaaaaccaaacctaattttaaaagtaatttaagcaaaatgtttgtgtgtaagaaagggttgaaaccgtcacacgtctgtgtcccacgccggtgggatctgagaaggtacccgcgagatgttcaccccgtcctgctctctgtggtgctgagtgtttgcttggtgtgtacttctgacctggagcttgttgtaaatactgtttttagtactatgattattactatgatgatgattattctccgaaatgttgtactcatgag

SEQ ID NO: 58714 - DNA, 600 bp, Chicken  19866894316122_2
ctctgtgctgatctccccacaagaccccgaggatccgggagcgacccctccacagccacagagcagctggggggaactctgctcctgcaggagggcccccccccagtgctggggtactgcagagcgctgggggcagagagggaaccggagcggaaccgagggttgactttcttagcagtagccaatgatccgtttatagtagcagctgtcttagatacgcatcgttgtagagcgcggcgccgccgccagcatcacctcatccatatagtgacgagaaattcaaaagagagggggggggrraaaataataataataaaaaaagttaaaaaaaaaaaaaaagaaaaaaccaaacctaattttaaaagtaatttaagcaaaatgtttgtgtgtaagaaagggttgaaaccgtcacacgtctgtgtcccacgccggtgggatctgagaaggtacccgcgagatgttcaccccgtcctgctctctgtggtgctgagtgtttgcttggtgtgtacttctgacctggagcttgttgtaaatactgtttttagtactatgattattactatgatgatgattattctccgaaatgttgtactcatgagc

SEQ ID NO: 58715 - DNA, 600 bp, Chicken  19866894316130_1
acagtgtaagtagtgtcaaggaaaaaaaaaaaacctgctgcttctctatgtattaaaatacctggaacaagcttacagcaaatgatccttttcagacttctagctttctagtatgttaagagttttgcagtgtcaggcaagaaacattcttgaatcatcctggagagagatctgagattccttataaggtatctgtatgtttttaatgcctgctttgttcctgttgtagtgtagtttccagatggtgtggaaagctgcaagtttttcaaaagtgtagaataaaaatggcctttttaaaayttrtgtttctttaaaagatggtatcttctctcctgggtgctctacagcaaagatattttcgtgtttgcaaattttcatctctggtagcrttcttttatttaagaattaacatgtaaaaatgctttgtatamaaagttcagtgacttgcactgattgaaggctgaaagtggaagtataggaacactaaaaggcgttgacaataccattacttaaaactttatcaatcttgctaagaaccgtagagaacccagctaacagttgtgatcctaatctctacttgtttgcttcatcatcctaaat

SEQ ID NO: 58716 - DNA, 600 bp, Chicken  19866894316130_2
gtgtaagtagtgtcaaggaaaaaaaaaaaacctgctgcttctctatgtattaaaatacctggaacaagcttacagcaaatgatccttttcagacttctagctttctagtatgttaagagttttgcagtgtcaggcaagaaacattcttgaatcatcctggagagagatctgagattccttataaggtatctgtatgtttttaatgcctgctttgttcctgttgtagtgtagtttccagatggtgtggaaagctgcaagtttttcaaaagtgtagaataaaaatggcctttttaaaayttrtgtttctttaaaagatggtatcttctctcctgggtgctctacagcaaagatattttcgtgtttgcaaattttcatctctggtagcrttcttttatttaagaattaacatgtaaaaatgctttgtatamaaagttcagtgacttgcactgattgaaggctgaaagtggaagtataggaacactaaaaggcgttgacaataccattacttaaaactttatcaatcttgctaagaaccgtagagaacccagctaacagttgtgatcctaatctctacttgtttgcttcatcatcctaaatacc

SEQ ID NO: 58717 - DNA, 600 bp, Chicken  19866894316130_3
tttcagacttctagctttctagtatgttaagagttttgcagtgtcaggcaagaaacattcttgaatcatcctggagagagatctgagattccttataaggtatctgtatgtttttaatgcctgctttgttcctgttgtagtgtagtttccagatggtgtggaaagctgcaagtttttcaaaagtgtagaataaaaatggcctttttaaaayttrtgtttctttaaaagatggtatcttctctcctgggtgctctacagcaaagatattttcgtgtttgcaaattttcatctctggtagcrttcttttatttaagaattaacatgtaaaaatgctttgtatamaaagttcagtgacttgcactgattgaaggctgaaagtggaagtataggaacactaaaaggcgttgacaataccattacttaaaactttatcaatcttgctaagaaccgtagagaacccagctaacagttgtgatcctaatctctacttgtttgcttcatcatcctaaataccaaatcgattgaacagagctcttgtgtgttcagtagagttgttgtaagaaaaggttttgcatcagtagtgattgtagttgtgaagac

SEQ ID NO: 58718 - DNA, 600 bp, Chicken  19866894316130_4
gtcaggcaagaaacattcttgaatcatcctggagagagatctgagattccttataaggtatctgtatgtttttaatgcctgctttgttcctgttgtagtgtagtttccagatggtgtggaaagctgcaagtttttcaaaagtgtagaataaaaatggcctttttaaaayttrtgtttctttaaaagatggtatcttctctcctgggtgctctacagcaaagatattttcgtgtttgcaaattttcatctctggtagcrttcttttatttaagaattaacatgtaaaaatgctttgtatamaaagttcagtgacttgcactgattgaaggctgaaagtggaagtataggaacactaaaaggcgttgacaataccattacttaaaactttatcaatcttgctaagaaccgtagagaacccagctaacagttgtgatcctaatctctacttgtttgcttcatcatcctaaataccaaatcgattgaacagagctcttgtgtgttcagtagagttgttgtaagaaaaggttttgcatcagtagtgattgtagttgtgaagacgttatgagcacataaacgactgttttttggctggaagcattc

SEQ ID NO: 58719 - DNA, 600 bp, Chicken  19866894316134_1
cctacctacagtgtaaatttgttaactttcaggatgaactgtaaactccatctctttctctgcttccaggcaggatgtgaccaacgggtgaggctcaggaaaggacctggggtctagtggagatttgttctactgggacaatagtgtggaatacttgataaactgtttattatagcagtacctttttaagctgttgccaaggatgcctgggccaatcaaagtagacaaataaatcgcagcaggcatccaacctatgacttgataacgtgggaccaaagtaagtgtgtaaagcttacaggkttactgcacccagcaggggaaggtaggattttctttgaagtgacagtgactgagatggaggtgatacccttccattcatgatcagctgacaaataccaacagtgcagcacacaaccaggcatcattaatcccagacagttacttatctccagtatctgtcctgctttttacagttattgctgttctgtgagaaaaaatgaaataaaacccagaggcatatggtttgtatagttttggttgacacaagccctgtgcagaataattctagagacttaacatcttacagacaaaaccatagtt

SEQ ID NO: 58720 - DNA, 600 bp, Chicken  19866894316137_1
gaactaaatgcaaatgaagggaccttgccaattattttcctttcccagaccttcgattgggatggatgaggatacaggtgaagacgagaggctgaactgacctggattccccttccacctgccaagtgatcgtaaagatcaatagagacatgaaatgaggctttctgatcttcctgtctgcagcagagctgatgttcttgtaaatgaaggtgctgaaatgcaccattgccttttacctatgccattgcctctttaccttcaaactgctgagcacccacttaactccccatagaagcagtrggacttgcagggtatcagactgctcctagatacctgtgcatagatttgggcttggaaatctggtccacagtgttcgttcagcatgagttaattttttctccacagagaagtggcacatttccccagctgtttgcaaacttgtcatactgcaacacccgtaacagcagcacttagcagcttggtgtatgagagcgggtcttttaatccagaacagaaggataagtcataaggtcaggtggttgctgttaatgctgagcatggccttctgtttgactctcataatcagcagcagctgtgtgg

SEQ ID NO: 58721 - DNA, 600 bp, Chicken  19866894316148_1
cccagcattactgacctgcctgtatctgaagtataaccttctgctggtagccagagctcttctcacagactcacatgcctcctagaagaggagcctgagcaaccaaaaatgagtttgcaaaatgcagttctgtcccctgttcatccttccttgctgatgcatcctggaatgaccatgaaaaactactctcagttatttgctcatctctgtaaccagtcaccagtaggagagggtccctttcaggagcttagccatcaactgctccatgttgacttccactgcattctggaaactgatgtsctggaacttggtgacatgtagaaagcttcttgtgacacgatatgtttctagtgtttgttttttttttcctgctgttataatggcctcataagtaggagctaacttttctaccacagtacaacaggccatcatcccaaaayacagtagagagatgagaatgaatgacatacaggattcatgtagtctgggttacttcatggcatcagctgacagaagtgctatcctgtgtgctgtgaatagttcaacaagatgcatgcctrtatgcaccagctttgtatttccaggtgatccagtaaggca

SEQ ID NO: 58722 - DNA, 600 bp, Chicken  19866894316148_2
tcatccttccttgctgatgcatcctggaatgaccatgaaaaactactctcagttatttgctcatctctgtaaccagtcaccagtaggagagggtccctttcaggagcttagccatcaactgctccatgttgacttccactgcattctggaaactgatgtsctggaacttggtgacatgtagaaagcttcttgtgacacgatatgtttctagtgtttgttttttttttcctgctgttataatggcctcataagtaggagctaacttttctaccacagtacaacaggccatcatcccaaaayacagtagagagatgagaatgaatgacatacaggattcatgtagtctgggttacttcatggcatcagctgacagaagtgctatcctgtgtgctgtgaatagttcaacaagatgcatgcctrtatgcaccagctttgtatttccaggtgatccagtaaggcataaatccaatcttagtgatcatctgaccacagcctaaatgctcagtgcttggctccatcattaatctcactgtgtgattttagacaagccattttcccttccctgaagatcacttttcctcagtcagaaaatgggacgta

SEQ ID NO: 58723 - DNA, 600 bp, Chicken  19866894316148_3
gctccatgttgacttccactgcattctggaaactgatgtsctggaacttggtgacatgtagaaagcttcttgtgacacgatatgtttctagtgtttgttttttttttcctgctgttataatggcctcataagtaggagctaacttttctaccacagtacaacaggccatcatcccaaaayacagtagagagatgagaatgaatgacatacaggattcatgtagtctgggttacttcatggcatcagctgacagaagtgctatcctgtgtgctgtgaatagttcaacaagatgcatgcctrtatgcaccagctttgtatttccaggtgatccagtaaggcataaatccaatcttagtgatcatctgaccacagcctaaatgctcagtgcttggctccatcattaatctcactgtgtgattttagacaagccattttcccttccctgaagatcacttttcctcagtcagaaaatgggacgtaacargttcttgtaaacccaaagctcttgaaggtttagtgttccactatgggatataggtaggttgtgctaagagacgatatgtatttgcaaacagaaataaataataataataataataa

SEQ ID NO: 58724 - DNA, 600 bp, Chicken  19866894316148_4
tagagagatgagaatgaatgacatacaggattcatgtagtctgggttacttcatggcatcagctgacagaagtgctatcctgtgtgctgtgaatagttcaacaagatgcatgcctrtatgcaccagctttgtatttccaggtgatccagtaaggcataaatccaatcttagtgatcatctgaccacagcctaaatgctcagtgcttggctccatcattaatctcactgtgtgattttagacaagccattttcccttccctgaagatcacttttcctcagtcagaaaatgggacgtaacargttcttgtaaacccaaagctcttgaaggtttagtgttccactatgggatataggtaggttgtgctaagagacgatatgtatttgcaaacagaaataaataataataataataataataataaagaggtgagaaataagagagtggaaaataactgagttttaaaggttggttggagactgtctccaaaaataagcacgcactatttttattcagaaaactactttaagagcaataagtgtgttctctgttgaccctctagatgcaactagtccaaaggagcactttctgatggctgtgct

SEQ ID NO: 58725 - DNA, 599 bp, Chicken  19866894316151_1
  misc_feature (1)..(53): n is any nucleotide
nnnnnnnnnnnnnnnnnnnnnnnnnnnnnnnnnnnnnnnnnnnnnnnnnnnnncgatcgatgtaagttgatcatagagcaattctgtagacctaatgcgtggggtactgttaatgaccagcaaatgctaaatgagcataaccaatgctgctgatgtggaggggccggcctacttgcctgtagtggccttcctttatcagctcccttcgcacaccgtcagctcacctgtcagtctgaaaagcaaccaaggaaaatccttccagaatgtgccaagctgttgtcccacagccatggtggtggwkggactggatcatcatggtggtttttccaacattaatggttctatgcagacttgcttgtgtgcgtgttgttatcgtaccctaagggaacgtggctctactctctgaggtcatttttgagccttgttttcacagtggcaagaagaaaggaggagaaatagtcaggtgtttgctttactggctgttcttatagataagctgtaaatacgtcaagtcttgaatctgattaatgatggcagtctatcagagtcctgtgtgttgtcacagcagtttgggggagcagttcaggtgttcataaaat

SEQ ID NO: 58726 - DNA, 599 bp, Chicken  19866894316151_2
  misc_feature (1)..(52): n is any nucleotide
nnnnnnnnnnnnnnnnnnnnnnnnnnnnnnnnnnnnnnnnnnnnnnnnnnnncgatcgatgtaagttgatcatagagcaattctgtagacctaatgcgtggggtactgttaatgaccagcaaatgctaaatgagcataaccaatgctgctgatgtggaggggccggcctacttgcctgtagtggccttcctttatcagctcccttcgcacaccgtcagctcacctgtcagtctgaaaagcaaccaaggaaaatccttccagaatgtgccaagctgttgtcccacagccatggtggtggwkggactggatcatcatggtggtttttccaacattaatggttctatgcagacttgcttgtgtgcgtgttgttatcgtaccctaagggaacgtggctctactctctgaggtcatttttgagccttgttttcacagtggcaagaagaaaggaggagaaatagtcaggtgtttgctttactggctgttcttatagataagctgtaaatacgtcaagtcttgaatctgattaatgatggcagtctatcagagtcctgtgtgttgtcacagcagtttgggggagcagttcaggtgttcataaaatg

SEQ ID NO: 58727 - DNA, 599 bp, Chicken  19866894316153_1
  misc_feature (1)..(190): n is any nucleotide
nnnnnnnnnnnnnnnnnnnnnnnnnnnnnnnnnnnnnnnnnnnnnnnnnnnnnnnnnnnnnnnnnnnnnnnnnnnnnnnnnnnnnnnnnnnnnnnnnnnnnnnnnnnnnnnnnnnnnnnnnnnnnnnnnnnnnnnnnnnnnnnnnnnnnnnnnnnnnnnnnnnnnnnnnnnnnnnnnnnnnnnnnnnnnnctttttgtttatctccttctgaaacagcagggcacttcagcacacacttaggctgactggagtggcccacgtgttcacagctcactgtgtgcctgtttgctctgctcagygttgccctgcctcatgtcagtcacaggaaccccttccataagttacttcacaacgactgcgctcactacacagtggctggactaaacagatggtaaagaaatataactttcatgaagaaataaaagcaattggattcattcagcctacagatgtgaggctcaggggaatcaagctgtgttcaagcataaagattattttcagaacttgctatgatgcattctcctcaaaataagctgagtgaatgcagtgtgaatatctaagcacaggaatatctggcacatgggggacgctctgcatc

SEQ ID NO: 58728 - DNA, 600 bp, Chicken  19866894316154_1
tgaactaactaggtcattgtagtttgtatctctttgacatatccaggctatgctgcccagtaggacagactcttttcaattgtttcatcatctagaatgaggactgaaaaactgcctgttaggaactgttaggtcattgcctaaactgatgattgagcacctggtgaaggggtatggctagcccaggaggcacaggtgcaaataatttgtgtgcttcccacctgaccaaagcaggtggaccctggatcactccctaccacccctctccctccccctcctcttatttaaggtctagcctgkgaagggagattatctcctggatgaaggctgcttccttagaaggagtgttccatggccagagaccctcatcgccagctgggtgagtcaactttttcctgtgtatgactattggtattccyagcaattgaacttgtcagaagcagtttcattgcttcataggacaaacagtgaataaaatgatctgaagggatctattcagccatgsaatttggttttcagctggttaattccatcttggtgtgtcataagaaagagaaggggacgtttgtatgatgtaacatatggttcttattgctacca

SEQ ID NO: 58729 - DNA, 600 bp, Chicken  19866894316154_2
taggaactgttaggtcattgcctaaactgatgattgagcacctggtgaaggggtatggctagcccaggaggcacaggtgcaaataatttgtgtgcttcccacctgaccaaagcaggtggaccctggatcactccctaccacccctctccctccccctcctcttatttaaggtctagcctgkgaagggagattatctcctggatgaaggctgcttccttagaaggagtgttccatggccagagaccctcatcgccagctgggtgagtcaactttttcctgtgtatgactattggtattccyagcaattgaacttgtcagaagcagtttcattgcttcataggacaaacagtgaataaaatgatctgaagggatctattcagccatgsaatttggttttcagctggttaattccatcttggtgtgtcataagaaagagaaggggacgtttgtatgatgtaacatatggttcttattgctaccacaaattattattgaaaactttaaagaacatgaaaatctaaatcaattttgtagggctaggtgctaatgtgttaagctatcaggagaaataacagatgaaagaattttaaggtacaagaa

SEQ ID NO: 58730 - DNA, 600 bp, Chicken  19866894316154_3
tttgtgtgcttcccacctgaccaaagcaggtggaccctggatcactccctaccacccctctccctccccctcctcttatttaaggtctagcctgkgaagggagattatctcctggatgaaggctgcttccttagaaggagtgttccatggccagagaccctcatcgccagctgggtgagtcaactttttcctgtgtatgactattggtattccyagcaattgaacttgtcagaagcagtttcattgcttcataggacaaacagtgaataaaatgatctgaagggatctattcagccatgsaatttggttttcagctggttaattccatcttggtgtgtcataagaaagagaaggggacgtttgtatgatgtaacatatggttcttattgctaccacaaattattattgaaaactttaaagaacatgaaaatctaaatcaattttgtagggctaggtgctaatgtgttaagctatcaggagaaataacagatgaaagaattttaaggtacaagaacttttaatcaaaagttgatatctactccttattctcaaaactagtactaccaaatctcgaaagtggaatgaagtgattcagtagga

SEQ ID NO: 58731 - DNA, 600 bp, Chicken  19866894316170_1
atgtagaaggctctgtctattcttgaaaagctgctgaagcatgtcttgggtgagaggagaaaattctgaaatctggaaagtactcaaaggagtagggagaaaagttgtccctgcttgcctgctgctcctttgtgctgggaaaggagctctaacacccagctctttgtctctgtagctgagactgagtgagcatttagcagttctggcacagatgtgtgtgcctgaaagggaaatacatgaagagtggggccattgcacatatacttgctgtggttcctggcagtgtcaatgaccatgggsaaggagggacagatggacctggctaaaatatgcctgccaagaactgaaaycagagagccagaagtggcttggagccagtataaccctgactcctagattcttgtttctctgccaggcctctaaaagcgtagcacagaaaaacctatctgaaactcctattacaaagatttattctccattatttcccccatagcagaagcgtaaagggctcagcaggtctgttctgcgtaggattatagatgggtgtgtgttatgcaaattaattgattttttttttaattgatggtaagaagtgagggt

SEQ ID NO: 58732 - DNA, 600 bp, Chicken  19866894316170_2
tgagaggagaaaattctgaaatctggaaagtactcaaaggagtagggagaaaagttgtccctgcttgcctgctgctcctttgtgctgggaaaggagctctaacacccagctctttgtctctgtagctgagactgagtgagcatttagcagttctggcacagatgtgtgtgcctgaaagggaaatacatgaagagtggggccattgcacatatacttgctgtggttcctggcagtgtcaatgaccatgggsaaggagggacagatggacctggctaaaatatgcctgccaagaactgaaaycagagagccagaagtggcttggagccagtataaccctgactcctagattcttgtttctctgccaggcctctaaaagcgtagcacagaaaaacctatctgaaactcctattacaaagatttattctccattatttcccccatagcagaagcgtaaagggctcagcaggtctgttctgcgtaggattatagatgggtgtgtgttatgcaaattaattgattttttttttaattgatggtaagaagtgagggttacttactgcttagcacttgtgaaaaccaggccacttatttatgaacata

SEQ ID NO: 58733 - DNA, 600 bp, Chicken  19866894316173_1
caaatgtttctatcctaatgccactcatctcatacctttcagaagaagtctaattactctaattttctggaaatactgtgagaacaaaaggagaattctaacttaactttccccaccatgtcaatgtcttcagcaatgtttccaagtcagctatctgcgcccgcgctgccgtgagaatacacacacacacacacacacacacacacacacacactttgctgggttccaaaggttattaagtggttctgtatcctccttaattttcaatgctttcacatcttcctttgctttaaaaagaawttttttcccttgtgaaatgtttcccaaattttaatgcagtccaagaattttgattttgttttgttataaagcaataaaaatagagaacagaaaaggaaggatgaagaaaagagagaaataaaakgtataatcatactctacagtaagcttccaatgctcaattttactctttggagaatttaaaatgagaagaaattaatccaaactaaaaattactaaatcactaaatgtaatctgagaaaataaaatgtctctgcttccaccatttccgaataaagaaacactgccaaagtaagataa

SEQ ID NO: 58734 - DNA, 600 bp, Chicken  19866894316173_2
tgtcttcagcaatgtttccaagtcagctatctgcgcccgcgctgccgtgagaatacacacacacacacacacacacacacacacacacactttgctgggttccaaaggttattaagtggttctgtatcctccttaattttcaatgctttcacatcttcctttgctttaaaaagaawttttttcccttgtgaaatgtttcccaaattttaatgcagtccaagaattttgattttgttttgttataaagcaataaaaatagagaacagaaaaggaaggatgaagaaaagagagaaataaaakgtataatcatactctacagtaagcttccaatgctcaattttactctttggagaatttaaaatgagaagaaattaatccaaactaaaaattactaaatcactaaatgtaatctgagaaaataaaatgtctctgcttccaccatttccgaataaagaaacactgccaaagtaagataagccaactctacacagctgtatttttaataggctaatcwtggctccatagaaacaggtttcccttccaggcttatcaggcagtacattctatatttgttgcttccactatgaattctgataatct

SEQ ID NO: 58735 - DNA, 600 bp, Chicken  19866894316173_3
gtccaagaattttgattttgttttgttataaagcaataaaaatagagaacagaaaaggaaggatgaagaaaagagagaaataaaakgtataatcatactctacagtaagcttccaatgctcaattttactctttggagaatttaaaatgagaagaaattaatccaaactaaaaattactaaatcactaaatgtaatctgagaaaataaaatgtctctgcttccaccatttccgaataaagaaacactgccaaagtaagataagccaactctacacagctgtatttttaataggctaatcwtggctccatagaaacaggtttcccttccaggcttatcaggcagtacattctatatttgttgcttccactatgaattctgataatcttccattagtaaacactggaagttggacagtctgacagtgctttggaaagaaaagaattagctgagataagtcacaatgcctgtgaatttagtaagacaaaagatacagaattagctyggtaagacaagcttcctttaaactaccaagaggagaaggtgcttcttagaggtagtaaaatatttatagctctgcagctttaacagctcaacatctc

SEQ ID NO: 58736 - DNA, 600 bp, Chicken  19866894316173_4
aataaaatgtctctgcttccaccatttccgaataaagaaacactgccaaagtaagataagccaactctacacagctgtatttttaataggctaatcwtggctccatagaaacaggtttcccttccaggcttatcaggcagtacattctatatttgttgcttccactatgaattctgataatcttccattagtaaacactggaagttggacagtctgacagtgctttggaaagaaaagaattagctgagataagtcacaatgcctgtgaatttagtaagacaaaagatacagaattagctyggtaagacaagcttcctttaaactaccaagaggagaaggtgcttcttagaggtagtaaaatatttatagctctgcagctttaacagctcaacatctccatgctccacctcaaagatatcccaagtaaatagactgatctaaaccaatttttgaaggaaatttagaagggcagttcctgaaatgtttattcatattttaactaaaagataggacagacgcaaaaaagaatccttagcaaacctcatctttgttactaccaagaaatactgccactatatgttagtgttttaaagacaagtg

SEQ ID NO: 58737 - DNA, 600 bp, Chicken  19866894316175_1
gtctcattgtacatttgctcatggaataggaattgtattatagcaatagggctaccatacatctgatgtttttcccctttgatgacagctctccttcccttcacctgtcctctgggtcccatctgggtaaccttttcataattacactctgtgttttaaaatctctgccaaagtggtaactggggctttttgttttgtattctctcttgctcacttgctttgttttgcagcagggagaagtaggctatggctggtcttgttcctgtgtggtatctaatgagagaacggtaacagagcacrggggggagaggcaaagcaatggcagtgacatggtggcacttggtggaacagcttgatgcagactcaaactgtcttccgcagtgtgagggttgatacttatgagagaagaggctctaggatgggttgctaaggagcatagtgttaatttgtgaggggcctctgagtgcaggtgaagtctggggtagtgacctaagctaagaaacatttggggaaagacacaagaggtttggagtttgaaaacgccctcaaactttggagtttgatgatctctgagtcaggagaatttaggattctccccct

SEQ ID NO: 58738 - DNA, 600 bp, Chicken  19866894316178_1
ttttctcctttgcattttccccaaaagtaattctagaggtgtgtgccatcagctccaaaccccataaataaaacttcaaagtctgtcacagcatccttcgtggaaaaaactctacgatcagtgttatctctcacctagggaagagtaaacttaaagtcagtgaagtttcccaggagcagcaatgtaactaagctggttgcctgtctcttctgtccattgccatcagtggagaaactcctggtacagcacagcagtggctaaggtgaactgcagtctccttccatagatatctctatctcrgcatgtagacacacttctgatatgaccctcatccctgaggatgatcaaggccacgttggattggctctgggcagcctgttctggtgggtggcaatcagcctgtggcaggggattggaactgaatggtcttaaagccattctatgattctttgtccgctggatacttctgtaaacatatttggtacagaggcaacctatgaaaattacttccgccatcagtacttgaaggaatgaggggaagaagctgtgttttatttccttcctcagcatctcagttactcattgagataaggcaccctt

SEQ ID NO: 58739 - DNA, 600 bp, Chicken  19866894316185_1
aagaaagacccaaaaccatctgaaatgagacattttttggctctattcagcttccaaatggccaaactcattaaaagactgtgtgctggagggaaggaggtgtgcttcaagtagagaaatggttcacaatgtcaaatctgaggcaaaataagtatcaaagaaaaaagaaagaggtaaaactgatgatatgccacataaaaggggggaattttcagcagagcatgatgttcctgagcacagctgcttcgtgcagtgcattgctgtgccatagagtgctgcacaagtggcagctgctggacrggctttggatgggagcaaactgtgccctgcctcagagctgggctgagctgagggcacgctgcagatggcagctaacctcggaatcgtgctggcccccagatcttgctgcatcgcacttggctctgtgatttccagctcttctttctgcctcgcctttgataaaacattatcacagcctttcagtactttggctgccggtccccagagggacggggaaaagcagagmcaagagaaaattaaagagatgtttgccaacataaaacataatttaaaaagaaaaaaaagaactcttttctgagt

SEQ ID NO: 58740 - DNA, 600 bp, Chicken  19866894316185_2
gttcctgagcacagctgcttcgtgcagtgcattgctgtgccatagagtgctgcacaagtggcagctgctggacrggctttggatgggagcaaactgtgccctgcctcagagctgggctgagctgagggcacgctgcagatggcagctaacctcggaatcgtgctggcccccagatcttgctgcatcgcacttggctctgtgatttccagctcttctttctgcctcgcctttgataaaacattatcacagcctttcagtactttggctgccggtccccagagggacggggaaaagcagagmcaagagaaaattaaagagatgtttgccaacataaaacataatttaaaaagaaaaaaaagaactcttttctgagtcattattgaattttcagattgtaagagcttaagagattcctgcagatctactttactccccacttctttttctccactgtttattttttcatatttctatcagatgaagaaataaaaccaggcagccccaaatgcttttgccccctgtcagtttttctctgtgtttcttgtgtgtgttgggaaaagcaatgtggggagaacacctaaggaggagtgcacagcggga

SEQ ID NO: 58741 - DNA, 600 bp, Chicken  19866894316187_1
tgcattctttttgatatccctattcctggtttttccaactccttgtgccggagattgcacttcaatttaatttttacattgagaaagtgaaagaaattgtaaaacaatgtaggactaactctctaagatgttattaaagtgtgtgctcacaggggataataggtatatacaggatatcttatggtattttgtgttaggacctcttacagatgattttctatttagtttccttattttcatcaccaagtaaaacctcttgatgctattaataaagaattgttatcatggcttgcttgtatstgacaagactgcatgtaggatgacatatatttaacactgcagaacaccaagagatcaagacttgaaaaagagcagttaaattaaaaccatgcattttttatgattgcaaataaaaacgcattaaaaaaaacaaaacaaaacaaaaaaaamcaaaaagttctgtacattttctgaggagcaagaaaaagagtctaatgtatttgaggagatttttcatatgtgcactataaaaaatatctcagcatgacaatatgtaagtatgggtatagcttgaatatttttcagacttctcagatactg

SEQ ID NO: 58742 - DNA, 600 bp, Chicken  19866894316187_2
taagatgttattaaagtgtgtgctcacaggggataataggtatatacaggatatcttatggtattttgtgttaggacctcttacagatgattttctatttagtttccttattttcatcaccaagtaaaacctcttgatgctattaataaagaattgttatcatggcttgcttgtatstgacaagactgcatgtaggatgacatatatttaacactgcagaacaccaagagatcaagacttgaaaaagagcagttaaattaaaaccatgcattttttatgattgcaaataaaaacgcattsaaaaaaacaaaacaaaacaaaaaaaamcaaaaagttctgtacattttctgaggagcaagaaaaagagtctaatgtatttgaggagatttttcatatgtgcactataaaaaatatctcagcatgacaatatgtaagtatgggtatagcttgaatatttttcagacttctcagatactgttcccctttcccccttcaaccctgcccttgggacatccaattcaagtatgataaagtgagtacatatatgagcccattaatacttatcaaatatttcaaaaattataggattataaacatatc

SEQ ID NO: 58743 - DNA, 600 bp, Chicken  19866894316187_3
aggggataataggtatatacaggatatcttatggtattttgtgttaggacctcttacagatgattttctatttagtttccttattttcatcaccaagtaaaacctcttgatgctattaataaagaattgttatcatggcttgcttgtatstgacaagactgcatgtaggatgacatatatttaacactgcagaacaccaagagatcaagacttgaaaaagagcagttaaattaaaaccatgcattttttatgattgcaaataaaaacgcattaaaaaaaacaaaacaaaacaaaaaaaamcaaaaagttctgtacattttctgaggagcaagaaaaagagtctaatgtatttgaggagatttttcatatgtgcactataaaaaatatctcagcatgacaatatgtaagtatgggtatagcttgaatatttttcagacttctcagatactgttcccctttcccccttcaaccctgcccttgggacatccaattcaagtatgataaagtgagtacatatatgagcccattaatacttatcaaatatttcaaaaattataggattataaacatatctaaagtttttcaaaactgtgttagtat

SEQ ID NO: 58744 - DNA, 600 bp, Chicken  19866894316188_1
caaacaacaaaaaggtgttgcctaaataataagatatattagatatattttatgtttaactccccttgaaatgcagctctgtcactacaggtaactgagaaaacagaagtcttcactcagcactggacattctggactttttcttcaagcagctttaattttgatggctgatgttgaaacggcacagagatttcagacagacactgctcacatggagtgcatgggggtcacaccactgagaagcatcacatcacaggggggctcagacacccaccagtgcagttgtgaagacttacagtyttatagaggagatacagcttctgtggacagaaaatgacttyggtggcaagatcctgctaactcctgcaggtcttttctagaatcttggatttacactcagatgaatttgctccagcagcctcatggtattttggcagcccatgagccccccctccccccagatttaattaactctcagatgctctcttttgcttttaggaggcaaaagggcagaaagagctgcttgttagaagtacctgcatgtacacagagatgacagcaatacctgagcttcacgggcagccaagccctgctgctgct

SEQ ID NO: 58745 - DNA, 600 bp, Chicken  19866894316188_2
gatatattttatgtttaactccccttgaaatgcagctctgtcactacaggtaactgagaaaacagaagtcttcactcagcactggacattctggactttttcttcaagcagctttaattttgatggctgatgttgaaacggcacagagatttcagacagacactgctcacatggagtgcatgggggtcacaccactgagaagcatcacatcacaggggggctcagacacccaccagtgcagttgtgaagacttacagtyttatagaggagatacagcttctgtggacagaaaatgacttyggtggcaagatcctgctaactcctgcaggtcttttctagaatcttggatttacactcagatgaatttgctccagcagcctcatggtattttggcagcccatgagccccccctccccccagatttaattaactctcagatgctctcttttgcttttaggaggcaaaagggcagaaagagctgcttgttagaagtacctgcatgtacacagagatgacagcaatacctgagcttcacgggcagccaagccctgctgctgctggggaagcacattcactcaaaggaggaggtaatataaaaga

SEQ ID NO: 58746 - DNA, 600 bp, Chicken  19866894316188_3
gctaactcctgcaggtcttttctagaatcttggatttacactcagatgaatttgctccagcagcctcatggtattttggcagcccatgagccccccctccccccagatttaattaactctcagatgctctcttttgcttttaggaggcaaaagggcagaaagagctgcttgttagaagtacctgcatgtacacagagatgacagcaatacctgagcttcacgggcagccaagccctgctgctgctggggaagcacattcactcaaaggaggaggtaatataaaagaaagtcaaggaatcrgtcatctaatgaattcaaggctgagttattatgtaagtagataygatattagaaaaggaggcagccctaaatgtgttaacattcacccagacaaatactgacattgaatccagtaggattactcccctgagacatgttaagcgtacacccaaatctttgtggaatttgggcttaggtttgttgaataaacagctgtcagagaattattcattttgttatatatggcatcatctgtaggagtactgataaaataatytgaatactgctgaaatggtgattttataaaatactcagctggtc

SEQ ID NO: 58747 - DNA, 600 bp, Chicken  19866894316188_4
gatgaatttgctccagcagcctcatggtattttggcagcccatgagccccccctccccccagatttaattaactctcagatgctctcttttgcttttaggaggcaaaagggcagaaagagctgcttgttagaagtacctgcatgtacacagagatgacagcaatacctgagcttcacgggcagccaagccctgctgctgctggggaagcacattcactcaaaggaggaggtaatataaaagaaagtcaaggaatcrgtcatctaatgaattcaaggctgagttattatgtaagtagataygatattagaaaaggaggcagccctaaatgtgttaacattcacccagacaaatactgacattgaatccagtaggattactcccctgagacatgttaagcgtacacccaaatctttgtggaatttgggcttaggtttgttgaataaacagctgtcagagaattattcattttgttatatatggcatcatctgtaggagtactgataaaataatytgaatactgctgaaatggtgattttataaaatactcagctggtcttcttatgyggctgagggataaggcaggtacagayacagtgcat

SEQ ID NO: 58748 - DNA, 476 bp, Chicken  19866894316188_5
ttcactcaaaggaggaggtaatataaaagaaagtcaaggaatcrgtcatctaatgaattcaaggctgagttattatgtaagtagataygatattagaaaaggaggcagccctaaatgtgttaacattcacccagacaaatactgacattgaatccagtaggattactcccctgagacatgttaagcgtacacccaaatctttgtggaatttgggcttaggtttgttgaataaacagctgtcagagaattattcattttgttatatatggcatcatctgtaggagtactgataaaataatytgaatactgctgaaatggtgattttataaaatactcagctggtcttcttatgyggctgagggataaggcaggtacagayacagtgcatttgggaaataggagaaacttagtcacattacaacaaacactgttcatttccttagtgtaattaggcttattaaaaaccaaggtaagat

SEQ ID NO: 58749 - DNA, 423 bp, Chicken  19866894316188_6
tgaattcaaggctgagttattatgtaagtagataygatattagaaaaggaggcagccctaaatgtgttaacattcacccagacaaatactgacattgaatccagtaggattactcccctgagacatgttaagcgtacacccaaatctttgtggaatttgggcttaggtttgttgaataaacagctgtcagagaattattcattttgttatatatggcatcatctgtaggagtactgataaaataatytgaatactgctgaaatggtgattttataaaatactcagctggtcttcttatgyggctgagggataaggcaggtacagayacagtgcatttgggaaataggagaaacttagtcacattacaacaaacactgttcatttccttagtgtaattaggcttattaaaaaccaaggtaagat

SEQ ID NO: 58750 - DNA, 397 bp, Chicken  19866894316188_7
agtagataygatattagaaaaggaggcagccctaaatgtgttaacattcacccagacaaatactgacattgaatccagtaggattactcccctgagacatgttaagcgtacacccaaatctttgtggaatttgggcttaggtttgttgaataaacagctgtcagagaattattcattttgttatatatggcatcatctgtaggagtactgataaaataatytgaatactgctgaaatggtgattttataaaatactcagctggtcttcttatgyggctgagggataaggcaggtacagayacagtgcatttgggaaataggagaaacttagtcacattacaacaaacactgttcatttccttagtgtaattaggcttattaaaaaccaaggtaagat

SEQ ID NO: 58751 - DNA, 600 bp, Chicken  19866894316189_1
gcctactgaactcgattttccaatgcagaatgacactgtgctgttaaataataaggctgttctagaattgcaataaggccgctgaagggaatttgatttatcaagacataatcatctcctggaggggaatgaagacacctggctgccttctgcagtcaaaatttaatattaacatttataacaacccccctgccttacataatgcttacttaataatttaattatccaaatatgtacagtttatgtttttccccctactggatgcctaatagagctcacattactgtttttgtaaacacycagaagcagatctctctccatgctgaaaagttcctgcagagacacagtaccatgctgtggaatttgcttcaccatggaatcaatgtcatgccaaaatagcttttatcaagaagcgctgcctagatacttatttgagttcaacgagatattttacactaatgcttacactcaatgtttaagtcttcaaaatgttccacagaggctccccagactgataactgaagattaatcctcttcaaagatacactcaaagctgtcaatttctggatcaagactgttttcctaagatcctgccttttg

SEQ ID NO: 58752 - DNA, 600 bp, Chicken  19866894316190_1
gatgcgtgctgtcctcactggcttgtgtcccaggttacaggtgtactgccaagacctccacaaagcctgtgtcacatccccactatcatgtttgaccttttctgatgaaaagacagtctaacatttttgagcaaattgagagatctcatccagctttgtatatgcctagttaagacggtacatttggctctatggcaccacgtgcagtcctataaacaagtgctgtcttgagaaaacagtctcaaagaactgttgagcagtctttccactaaaatgttcatgaagtatgcactatcatcraaagctgtatgctacaggagaaataagcaatttaaaatacagattaaaaaaggaagacaaagggagaaaactcctgtgtgtgcagtgtacagctgtcctctttttgctgtcgaggatggctgaatatggtcctggtaagaaaaagaggatcgttttctctccctgtattgtccacttgttccatactgtaggattcttctcaagcttactgaargtgtggccacccagtcctggtatattcttgataattttctatctaaatgctcagcaaatactctggctgttgtgctagacagagag

SEQ ID NO: 58753 - DNA, 600 bp, Chicken  19866894316190_2
aacaagtgctgtcttgagaaaacagtctcaaagaactgttgagcagtctttccactaaaatgttcatgaagtatgcactatcatcraaagctgtatgctacaggagaaataagcaatttaaaatacagattaaaaaaggaagacaaagggagaaaactcctgtgtgtgcagtgtacagctgtcctctttttgctgtcgaggatggctgaatatggtcctggtaagaaaaagaggatcgttttctctccctgtattgtccacttgttccatactgtaggattcttctcaagcttactgaargtgtggccacccagtcctggtatattcttgataattttctatctaaatgctcagcaaatactctggctgttgtgctagacagagagcagaaagctcttgctcatctggcatttgttatctacrgctgtctttccctctttcatagttatttcaggttatgggtaagctagaggaaaataaaagggagtttctcataccaccagtttcaatttgaagcttaagaactccaaactgctggtctcacaaaaacattctcctgtctttctggctgaattaaacgttgggtctttctactatgtc

SEQ ID NO: 58754 - DNA, 513 bp, Chicken  19866894316190_3
tacagattaaaaaaggaagacaaagggagaaaactcctgtgtgtgcagtgtacagctgtcctctttttgctgtcgaggatggctgaatatggtcctggtaagaaaaagaggatcgttttctctccctgtattgtccacttgttccatactgtaggattcttctcaagcttactgaargtgtggccacccagtcctggtatattcttgataattttctatctaaatgctcagcaaatactctggctgttgtgctagacagagagcagaaagctcttgctcatctggcatttgttatctacrgctgtctttccctctttcatagttatttcaggttatgggtaagctagaggaaaataaaagggagtttctcataccaccagtttcaatttgaagcttaagaactccaaactgctggtctcacaaaaacattctcctgtctttctggctgaattaaacgttgggtctttctactatgtcttatattatgagctgcttgtggatctttatatctga

SEQ ID NO: 58755 - DNA, 599 bp, Chicken  19866894316197_1
  misc_feature (1)..(76): n is any nucleotide
nnnnnnnnnnnnnnnnnnnnnnnnnnnnnnnnnnnnnnnnnnnnnnnnnnnnnnnnnnnnnnnnnnnnnnnnnnnnggttagagatttagattagatgttgggtggaaatttttcactaggagagtggtgaggtcttgcccagaaaggctgtggatgccctgtccctggaggtgtttaaggccaggttggatggggccctggtcaatctgatctagtacttgatcaagcagatggcaaccttgccagcgccagaaagtttggaagctgatgatgcttgagatccattccaactcacatcwttcactgattccatgattctatgattctgtgattagaacactggaatataagggggctcaagagagcttgctgacatttcaagcactactgtctccaagcccatgactggtgcatccctgtcaataacasatcaagcagaggtatcaagagacctgcatggatgagcaaggagctcatgaaaaacctcacatggaaggaggaacttttacagaatatggaaaaatactaggatagtttgagaggaatataggaacattatgagagcatgcagggatgcaacaaggaagtctgaggcccr

SEQ ID NO: 58756 - DNA, 600 bp, Chicken  19866894316197_2
aggtcttgcccagaaaggctgtggatgccctgtccctggaggtgtttaaggccaggttggatggggccctggtcaatctgatctagtacttgatcaagcagatggcaaccttgccagcgccagaaagtttggaagctgatgatgcttgagatccattccaactcacatcwttcactgattccatgattctatgattctgtgattagaacactggaatataagggggctcaagagagcttgctgacatttcaagcactactgtctccaagcccatgactggtgcatccctgtcaataacasatcaagcagaggtatcaagagacctgcatggatgagcaaggagctcatgaaaaacctcacatggaaggaggaacttttacagaatatggaaaaatactaggatagtttgagaggaatataggaacattatgagagcatgcagggatgcaacaaggaagtctgaggcccrattggaattaaatttggtgatggaggtcaaggagagcaagaagggctttcagtatcaaaaggragatgatggaaaagtgggtccactactggatgaggtggatgatctgaaaatggaggacactgagaaag

SEQ ID NO: 58757 - DNA, 600 bp, Chicken  19866894316197_3
wttcactgattccatgattctatgattctgtgattagaacactggaatataagggggctcaagagagcttgctgacatttcaagcactactgtctccaagcccatgactggtgcatccctgtcaataacasatcaagcagaggtatcaagagacctgcatggatgagcaaggagctcatgaaaaacctcacatggaaggaggaacttttacagaatatggaaaaatactaggatagtttgagaggaatataggaacattatgagagcatgcagggatgcaacaaggaagtctgaggcccrattggaattaaatttggtgatggaggtcaaggagagcaagaagggctttcagtatcaaaaggragatgatggaaaagtgggtccactactggatgaggtggatgatctgaaaatggaggacactgagaaagaggagttattgaatgccttctttgcttcagttttcactgctaatactgcctctcagaaatcccagaacatggaggtaagagatacagtctggagaacaaaagctwtccccttgtttgaggargatctggttagagatcacctaggcaaactcaacacctggagatattt

SEQ ID NO: 58758 - DNA, 600 bp, Chicken  19866894316197_4
agagcttgctgacatttcaagcactactgtctccaagcccatgactggtgcatccctgtcaataacasatcaagcagaggtatcaagagacctgcatggatgagcaaggagctcatgaaaaacctcacatggaaggaggaacttttacagaatatggaaaaatactaggatagtttgagaggaatataggaacattatgagagcatgcagggatgcaacaaggaagtctgaggcccrattggaattaaatttggtgatggaggtcaaggagagcaagaagggctttcagtatcaaaaggragatgatggaaaagtgggtccactactggatgaggtggatgatctgaaaatggaggacactgagaaagaggagttattgaatgccttctttgcttcagttttcactgctaatactgcctctcagaaatcccagaacatggaggtaagagatacagtctggagaacaaaagctwtccccttgtttgaggargatctggttagagatcacctaggcaaactcaacacctggagatatttggcctgcagaagagatggctcagaggggaacatattaacacttttacaactaaggggcagttg

SEQ ID NO: 58759 - DNA, 427 bp, Chicken  19866894316197_5
tttgagaggaatataggaacattatgagagcatgcagggatgcaacaaggaagtctgaggcccrattggaattaaatttggtgatggaggtcaaggagagcaagaagggctttcagtatcaaaaggragatgatggaaaagtgggtccactactggatgaggtggatgatctgaaaatggaggacactgagaaagaggagttattgaatgccttctttgcttcagttttcactgctaatactgcctctcagaaatcccagaacatggaggtaagagatacagtctggagaacaaaagctwtccccttgtttgaggargatctggttagagatcacctaggcaaactcaacacctggagatatttggcctgcagaagagatggctcagaggggaacatattaacacttttacaactaaggggcagttg

SEQ ID NO: 58760 - DNA, 410 bp, Chicken  19866894316197_6
aacattatgagagcatgcagggatgcaacaaggaagtctgaggcccrattggaattaaatttggtgatggaggtcaaggagagcaagaagggctttcagtatcaaaaggragatgatggaaaagtgggtccactactggatgaggtggatgatctgaaaatggaggacactgagaaagaggagttattgaatgccttctttgcttcagttttcactgctaatactgcctctcagaaatcccagaacatggaggtaagagatacagtctggagaacaaaagctwtccccttgtttgaggargatctggttagagatcacctaggcaaactcaacacctggagatatttggcctgcagaagagatggctcagaggggaacatattaacacttttacaactaaggggcagttg

SEQ ID NO: 58761 - DNA, 600 bp, Chicken  19866894316200_1
caagagcacagccttgtacttgggttggggaaatcccagatacgtttacattctgggaaaagaactcactgagaacagccctgccaagaaggacttcagggtcctggcagatgtaacacttaacataagccagcatgtgtacttccagtctggaaggccaacatcatccttagctgcatcaaaagaggggcggcagcagggcaagggaggggactgtctttctccactctgtccctgcaaagcccccacctggaatactgcaaccaggcgtagagcctacagtaaaagaaaaatgcggargttttggagtgggtgcagagaagggccatgaaggtgctcagagggctggagcacctcttgtatgaagaaaggctgagggagctgggcttgttcakcctggaaaagagaaggctctggggagacctcattgtagccttccaaattacagcttacaggagcttacaggatggagactgactttggctgtttttttgtttttgtttttcacagtctgatggtgataagacaaagatgaatctttttaacataaaagaggggagatttatattgcacatcactggaaatttttaactgagagac

SEQ ID NO: 58762 - DNA, 600 bp, Chicken  19866894316200_2
tcagggtcctggcagatgtaacacttaacataagccagcatgtgtacttccagtctggaaggccaacatcatccttagctgcatcaaaagaggggcggcagcagggcaagggaggggactgtctttctccactctgtccctgcaaagcccccacctggaatactgcaaccaggcgtagagcctacagtaaaagaaaaatgcggargttttggagtgggtgcagagaagggccatgaaggtgctcagagggctggagcacctcttgtatgaagaaaggctgagggagctgggcttgttcakcctggaaaagagaaggctctggggagacctcattgtagccttccaaattacagcttacaggagcttacaggatggagactgactttggctgtttttttgtttttgtttttcacagtctgatggtgataagacaaagatgaatctttttaacataaaagaggggagatttatattgcacatcactggaaatttttaactgagagactggtgaggtgctggaacaggctgccaagagaagttgtggatgcctcgtacctggaggtgctcaaggtcagcttaaatagggccctgggcagcctg

SEQ ID NO: 58763 - DNA, 600 bp, Chicken  19866894316201_1
aacctccagcaaaactatgactgtgattctgaccagaacaggctttcagttttatttaacaaatctggtagcatgatactaaaaattacaattgtagtgatccaaaagtggtctaaaatcatgcagaagcctcatgttttaggctagtgcttgggcatacaaaatgaaggtgtgcttgatgcctagcttcctgtattatgaaaaatcaggaaactgcggcaattgcttaaaataatttgttagttataattattttctcagcctcctgagataggagataggtctctgtacctttgcggmaaagatgtgatcataaaatgccttttttgtatgtgtgaaggagcactggcactgaagaacagaggtagaggtgtgtgtggaggaagggaaccatgggataagagagatgcatgccacttcagtgagactcttttatccaaggttggtgagaggtgaaaaggaaggaaattcccaatgacatcctcttaaatttattaaaattctgacattttctctcttcccctctcactgaggtaccagtgcagaacagaaaggaatcaaagagaaagttattttcactgcagactgctgcaattaatt

SEQ ID NO: 58764 - DNA, 600 bp, Chicken  19866894316215_1
atgtatgacatgttcacagagagagatgggaagaaaagccaccagtgaggactgtcacatggctgagatactgcttgctgaccacaccacagcccagagcacaacaagtttacagaggatccaaactgaaacacctggatttagaaatcaacacctcctcaccctgcaggtatcagggctgcgtgcctctgtcatattcatcctgacagggccggatgcagcagttatgggcacgagagatggggagaggcagtgctgcctcctgccattgcagttcccttctgcacggctgcagcaccrgggtgcccaatgcagatttcacttcaagctgaatttctcttttatccacggggacaggcggcttctctatcaaacagtctgaaagagagaattttaatggcagagatcagagagaagcttaaagctcggggtgtttgttttaaacacttgatgttcccttcgcttggttattttggcctttggttgagctcctttttatgttacacataaagataatttcttcttttgtacattagggctgatcagaaccaggagtgacttccttccaaaaaattttccaacaaattaaaatgacttaat

SEQ ID NO: 58765 - DNA, 599 bp, Chicken  19866894316223_1
  misc_feature (1)..(149): n is any nucleotide
nnnnnnnnnnnnnnnnnnnnnnnnnnnnnnnnnnnnnnnnnnnnnnnnnnnnnnnnnnnnnnnnnnnnnnnnnnnnnnnnnnnnnnnnnnnnnnnnnnnnnnnnnnnnnnnnnnnnnnnnnnnnnnnnnnnnnnnnnnnnnnnnnnnnncctatataaagtcaactctgaagagttgcaggaggttctcacaatattaaatggcatctgctaaaacagcaagtgaaaatcaatgatgccaaatgccaagttgtgaccttcactaaacagtcacagtgaggaacgccagttcatctagcarttgttagtacttaggaaaagagatcctggaatcygggtggaatttcagcttmctgaaatctcagtactcagtaatagtttaaaaataggaaagacagcagaatttagacataagcagtagtacaggatatatactayagatatattatatataaaagtacagaagcagtcaacaaggataaacataaatatgaaacaatatgtcacgtgaagaaagattaaatgaaatagaccttttcatttctggggggaaaaaaaagcctttgagggttatgatagaaatcgtggatggtattgaag

SEQ ID NO: 58766 - DNA, 599 bp, Chicken  19866894316223_2
  misc_feature (1)..(115): n is any nucleotide
nnnnnnnnnnnnnnnnnnnnnnnnnnnnnnnnnnnnnnnnnnnnnnnnnnnnnnnnnnnnnnnnnnnnnnnnnnnnnnnnnnnnnnnnnnnnnnnnnnnnnnnnnnnnnnnnnnncctatataaagtcaactctgaagagttgcaggaggttctcacaatattaaatggcatctgctaaaacagcaagtgaaaatcaatgatgccaaatgccaagttgtgaccttcactaaacagtcacagtgaggaacgccagttcatctagcarttgttagtacttaggaaaagagatcctggaatcygggtggaatttcagcttmctgaaatctcagtactcagtaatagtttaaaaataggaaagacagcagaatttagacataagcagtagtacaggatatatactayagatatattatatataaaagtacagaagcagtcaacaaggataaacataaatatgaaacaatatgtcacgtgaagaaagattaaatgaaatagaccttttcatttctggggggaaaaaaaagcctttgagggttatgatagaaatcgtggatggtattgaagagaaaaggtataaaactcaacaataaatcatttt

SEQ ID NO: 58767 - DNA, 599 bp, Chicken  19866894316223_3
  misc_feature (1)..(97): n is any nucleotide
nnnnnnnnnnnnnnnnnnnnnnnnnnnnnnnnnnnnnnnnnnnnnnnnnnnnnnnnnnnnnnnnnnnnnnnnnnnnnnnnnnnnnnnnnnnnnnnnncctatataaagtcaactctgaagagttgcaggaggttctcacaatattaaatggcatctgctaaaacagcaagtgaaaatcaatgatgccaaatgccaagttgtgaccttcactaaacagtcacagtgaggaacgccagttcatctagcarttgttagtacttaggaaaagagatcctggaatcygggtggaatttcagcttmctgaaatctcagtactcagtaatagtttaaaaataggaaagacagcagaatttagacataagcagtagtacaggatatatactayagatatattatatataaaagtacagaagcagtcaacaaggataaacataaatatgaaacaatatgtcacgtgaagaaagattaaatgaaatagaccttttcatttctggggggaaaaaaaagcctttgagggttatgatagaaatcgtggatggtattgaagagaaaaggtataaaactcaacaataaatcattttcaagaggacaagaggatt

SEQ ID NO: 58768 - DNA, 599 bp, Chicken  19866894316223_4
  misc_feature (1)..(12): n is any nucleotide
nnnnnnnnnnnncctatataaagtcaactctgaagagttgcaggaggttctcacaatattaaatggcatctgctaaaacagcaagtgaaaatcaatgatgccaaatgccaagttgtgaccttcactaaacagtcacagtgaggaacgccagttcatctagcarttgttagtacttaggaaaagagatcctggaatcygggtggaatttcagcttmctgaaatctcagtactcagtaatagtttaaaaataggaaagacagcagaatttagacataagcagtagtacaggatatatactayagatatattatatataaaagtacagaagcagtcaacaaggataaacataaatatgaaacaatatgtcacgtgaagaaagattaaatgaaatagaccttttcatttctggggggaaaaaaaagcctttgagggttatgatagaaatcgtggatggtattgaagagaaaaggtataaaactcaacaataaatcattttcaagaggacaagaggatttccataatcttagtgtatcaagtgccagaagcatgtgagttctggaatccaccaagagaactgggtgtaaaagcagcagtcagag

SEQ ID NO: 58769 - DNA, 600 bp, Chicken  19866894316239_1
aaaaatgcattcatttctgataacagcaacaaaacaggggaggaggtgcattagagcaagaaatgcattcatatattcagaaagtagttgaggcaggagacagagacggaaattcaaaataggaggcatttcctgaagattaatgagtgggtggtagtatctgatagccaagggcacaatgggctctgcaatcagcacaactctgactgcagccccaggcaacacaaatgaggattgtgctaatttttttcctttgttgctgtactcatttctctcaaccattaactggaatttcccttyaccctaacactgttgttctttcagagtcaaaccacgtctgagtagtgctaccaaagtaaaggacatccataaaattatggatgtaattcctggtgcaaaaggccagatacctttttcaagtttaagcaaattcttctgatcttctcatatagagagaacaaatgaatttcaagcttccttaggaagccacatacactaacatgttacttaacatgtcccataccaaccatcatcacatcttcaccactgtaaatctgtactaacctgtgactggtgcatctatgtccagcaaattttttt

SEQ ID NO: 58770 - DNA, 600 bp, Chicken  19866894316244_1
gctcttagcttcccaggctctgacagtagcttcttatcacaggaatactcctcacatcacaatgtcaatattattattgcgtgcatactgtcccagaagtggaataaggtgttatgagagaaggatttgagtttaaacattaaagaacaaactccaataattataaaaagtttgaagaaaggaatgctgaaggggatttcagtatgctggttggaaaatcaaacttccttattacttacttaatggtcatcatctgtaaaggtcctgctctgaaaagccagagggtcactgtgcattttyragcttactgcgagatttgagacatcttaaggagatcacctcaacacccagattctttgactgcaaaggaatgctcaatgtctttgtctgctgaagagtttcatgttaaaaraaaattctagagaatagaagctcaacttttttcttttgaaacactgattttttttttttacaagttcccacggttttgttcagagatggatgctaattattactctgctgtaatattacattatgagatgataacagaaaatttccgatttttctatctttaaagccagccactacttagttgctaat

SEQ ID NO: 58771 - DNA, 600 bp, Chicken  19866894316244_2
ctcttagcttcccaggctctgacagtagcttcttatcacaggaatactcctcacatcacaatgtcaatattattattgcgtgcatactgtcccagaagtggaataaggtgttatgagagaaggatttgagtttaaacattaaagaacaaactccaataattataaaaagtttgaagaaaggaatgctgaaggggatttcagtatgctggttggaaaatcaaacttccttattacttacttaatggtcatcatctgtaaaggtcctgctctgaaaagccagagggtcactgtgcattttyragcttactgcgagatttgagacatcttaaggagatcacctcaacacccagattctttgactgcaaaggaatgctcaatgtctttgtctgctgaagagtttcatgttaaaaraaaattctagagaatagaagctcaacttttttcttttgaaacactgattttttttttttacaagttcccacggttttgttcagagatggatgctaattattactctgctgtaatattacattatgagatgataacagaaaatttccgatttttctatctttaaagccagccactacttagttgctaatc

SEQ ID NO: 58772 - DNA, 600 bp, Chicken  19866894316244_3
tatgagagaaggatttgagtttaaacattaaagaacaaactccaataattataaaaagtttgaagaaaggaatgctgaaggggatttcagtatgctggttggaaaatcaaacttccttattacttacttaatggtcatcatctgtaaaggtcctgctctgaaaagccagagggtcactgtgcattttyragcttactgcgagatttgagacatcttaaggagatcacctcaacacccagattctttgactgcaaaggaatgctcaatgtctttgtctgctgaagagtttcatgttaaaaraaaattctagagaatagaagctcaacttttttcttttgaaacactgattttttttttttacaagttcccacggttttgttcagagatggatgctaattattactctgctgtaatattacattatgagatgataacagaaaatttccgatttttctatctttaaagccagccactacttagttgctaatcataatacttttatattctttttctgtttcaaagtatttcctgtctgtatagtaatgaagcgtattaacataagacaaggcaaccaatttggaagtgcaaagctaattcctc

SEQ ID NO: 58773 - DNA, 600 bp, Chicken  19866894316262_1
gtaaatggagaatattaatttatattatcccacaccttgcacaaatcagatattaactcaacaggtgtatgaaagtacctcgagatatattagggtttgaagcccatttcttccttttgctgggtccttacccgttgtcttctgagcaagcagtctaattaatggcatgtaattgttttttattttattttaaaagcaacttccaaaatttaatactcagtgttccggttacataagaccacatcttgcttttcagctgtgttttgcatacttgaaaatgtctgtttcatcatatgaccrtatgaattatagcagtgctggaaaatggctctttgaagactatggatttcttcctacttacaagctaggaaagaactgttttctwcttcacacttagactttttattcaagttctcctatccagtctctttggctccatcttgtgatatgcttgtattagagtctgtacgttgcaatcaccacctccttttttgctttttcataaagtcctgtgattgttttttgttgttgttgttttgttttgttttgttttttccaataatcagaaagttcaatttgcagcagctcagggccctgaat

SEQ ID NO: 58774 - DNA, 600 bp, Chicken  19866894316262_2
tatattagggtttgaagcccatttcttccttttgctgggtccttacccgttgtcttctgagcaagcagtctaattaatggcatgtaattgttttttattttattttaaaagcaacttccaaaatttaatactcagtgttccggttacataagaccacatcttgcttttcagctgtgttttgcatacttgaaaatgtctgtttcatcatatgaccrtatgaattatagcagtgctggaaaatggctctttgaagactatggatttcttcctacttacaagctaggaaagaactgttttctwcttcacacttagactttttattcaagttctcctatccagtctctttggctccatcttgtgatatgcttgtattagagtctgtacgttgcaatcaccacctccttttttgctttttcataaagtcctgtgattgttttttgttgttgttgttttgttttgttttgttttttccaataatcagaaagttcaatttgcagcagctcagggccctgaatggattttgtatatcagcttctatacagaaaaacagtggaagtggagaaagctctagcgatgtagtcccttcagatttacctcaac

SEQ ID NO: 58775 - DNA, 599 bp, Chicken  19866894316268_1
  misc_feature (1)..(105): n is any nucleotide
nnnnnnnnnnnnnnnnnnnnnnnnnnnnnnnnnnnnnnnnnnnnnnnnnnnnnnnnnnnnnnnnnnnnnnnnnnnnnnnnnnnnnnnnnnnnnnnnnnnnnnnnnttcatggtgagcgtagggccaagttgttttcccccccacgtgcctcactttgcttgcagcagcactgaatgcccaatgccatcttaccactgtagctcagtcctgggagttcctttcatggcctggccacagctcctgacgaagccaacaaattcacataccgctgggtgtgccttgtcattacatggggacacrtaccatattgctatccacgttactccatccatgctatcatgaggttatgagagcaagttatagaagccagtgacacttccctagaacatttcatttacccagaggtgctaactcttccctcaattctgtttcccaccaatgaacccaaaggccagcctcagcagtctgtatttccgtgttttgcccatctctctggtgctcgagtggaatgaggagcatttggcagcagctcaggcccaaggcttctggagacatgttgcttgcgaataaagaacaaaataatctgtttctctttttcc

SEQ ID NO: 58776 - DNA, 600 bp, Chicken  19866894316268_2
tgaggagcatttggcagcagctcaggcccaaggcttctggagacatgttgcttgcgaataaagaacaaaataatctgtttctctttttcccttttccttgattgcccctgcttgtctctgcaggcttcctgtctctgctgtgtttggaaagctcagtggtttcagttttcatgcttctaccacgcctgtcccatctgtcttagggttttgcgtttaccctggcagggtgtgtgctcttctccatctcccatgcttggaacagcctctcctttttacctctcttttacttttcacctctcrgagcctccttgcaagcccagctgcagtccaagtctraacagaaacagccaaagacctcagaaccctccacaaacacactatttctgcccacccattaccattgctcccagatytatttattttttcaatattgaggctggtttatatgtacatatatttgatctcagatggattattgcagccaaaaaaagagtaaataatgcagcgctgaattacaaaaatgaataccttaagatgaaacctgccttagcagagccctatgagaatcgtcgctccataatgtgagtggctgtgatttat

SEQ ID NO: 58777 - DNA, 600 bp, Chicken  19866894316268_3
ctggagacatgttgcttgcgaataaagaacaaaataatctgtttctctttttcccttttccttgattgcccctgcttgtctctgcaggcttcctgtctctgctgtgtttggaaagctcagtggtttcagttttcatgcttctaccacgcctgtcccatctgtcttagggttttgcgtttaccctggcagggtgtgtgctcttctccatctcccatgcttggaacagcctctcctttttacctctcttttacttttcacctctcrgagcctccttgcaagcccagctgcagtccaagtctraacagaaacagccaaagacctcagaaccctccacaaacacactatttctgcccacccattaccattgctcccagatytatttattttttcaatattgaggctggtttatatgtacatatatttgatctcagatggattattgcagccaaaaaaagagtaaataatgcagcgctgaattacaaaaatgaataccttaagatgaaacctgccttagcagagccctatgagaatcgtcgctccataatgtgagtggctgtgatttatgaccttctgataaagacaccctgatggagaaaagat

SEQ ID NO: 58778 - DNA, 600 bp, Chicken  19866894316268_4
gtctctgcaggcttcctgtctctgctgtgtttggaaagctcagtggtttcagttttcatgcttctaccacgcctgtcccatctgtcttagggttttgcgtttaccctggcagggtgtgtgctcttctccatctcccatgcttggaacagcctctcctttttacctctcttttacttttcacctctcrgagcctccttgcaagcccagctgcagtccaagtctraacagaaacagccaaagacctcagaaccctccacaaacacactatttctgcccacccattaccattgctcccagatytatttattttttcaatattgaggctggtttatatgtacatatatttgatctcagatggattattgcagccaaaaaaagagtaaataatgcagcgctgaattacaaaaatgaataccttaagatgaaacctgccttagcagagccctatgagaatcgtcgctccataatgtgagtggctgtgatttatgaccttctgataaagacaccctgatggagaaaagatgcggttacaggtaggcaggagagatgtcacatagtttatgggatttgaacttttattttggtactagaagcatgaac

SEQ ID NO: 58779 - DNA, 444 bp, Chicken  19866894316268_5
ggtttatatgtacatatatttgatctcagatggattattgcagccaaaaaaagagtaaataatgcagcgctgaattacaaaaatgaataccttaagatgaaacctgccttagcagagccctatgagaatcgtcgctccataatgtgagtggctgtgatttatgaccttctgataaagacaccctgatggagaaaagatgcggttacaggtaggcaggagagatgtcacatagtttatgggatttgaacttttattttggtactagaagcatgaacataaaaggctatttatcagagccargcaggaaaaggaggtattttctgatgattttaacacattacctcaaaacattgctgaaaaagtttgggttttccagcaagaaatttcagaccaacttgaaggtacatttccttccaaaatattaatattttcccctatttattc

SEQ ID NO: 58780 - DNA, 600 bp, Chicken  19866894316270_1
ctctccctttattccaggtggtccatcccttcctggcagtccatgaggtccaggaggtcccatttctcctggcttgcctcgtggtccctaaaagaaatccactcagtaagtgagtctgacaggtaagagaaatgttagccctgcagagtgactccctagctcagggcctctgctgctcgtccactcacagtaacacaactgggagaatcacaaacaggaggaaaaaaagggaaaaaagaagtaggcttgccctgccatttcaactgttccacagaagctaatactctgataagccactcrtgctcatttctgtggagccaaaccacttccctctcccacctccaagtggaaaagcaaccatgcataagtatcagtgcaaattagctccaattaaggctactgaaggataaaacaatccacagaggtagcttgtcttaccttttctccatcatggcctggaggacccggtaagccaatttcaccctgaaacacaaaattgttactttggccatttaaaagcagccttgtgtacccagaatgacagttcgtggccccaccactgtaacagtctccaactaacaccatccctgcagagaccaa

SEQ ID NO: 58781 - DNA, 600 bp, Chicken  19866894316279_1
gtaccggctggctgcctccatcctgcactcatctttcatgtctcaggtgtgctttggaaatgaacaccacttgaccatattaatgggaagaagtactgggggaaggaggtgagaaaagttcctctgtgattgtgaactgtacagctggggaaggaaaacaactgctttaaggacaaagtattgactgaaagaacagggagaagttaatagatattgacttgcatttgctgtaaataggtcacattacactggcatgctcctctctgaggcatggtgaaacacagcaagtgccacaatagkcaaacttttaacgttacgtacatgtcattcccwgctacagagagacagcattttcccatgcaaaagccctgacatctgctgcaggatgaaacctcctacagggcagcactgatggcgctgggagtggtgagagctcagcttggctcgagcagcaatctgcacctccccaaatctgcacacaagatcattcaaataaccctttaatttacactaattaaagaaggaacatcacaattatctattgtatatctggggaaactgcgggaggagaaatccttccataccagagcataaattcag

SEQ ID NO: 58782 - DNA, 600 bp, Chicken  19866894316279_2
tttcatgtctcaggtgtgctttggaaatgaacaccacttgaccatattaatgggaagaagtactgggggaaggaggtgagaaaagttcctctgtgattgtgaactgtacagctggggaaggaaaacaactgctttaaggacaaagtattgactgaaagaacagggagaagttaatagatattgacttgcatttgctgtaaataggtcacattacactggcatgctcctctctgaggcatggtgaaacacagcaagtgccacaatagkcaaacttttaacgttacgtacatgtcattcccwgctacagagagacagcattttcccatgcaaaagccctgacatctgctgcaggatgaaacctcctacagggcagcactgatggcgctgggagtggtgagagctcagcttggctcgagcagcaatctgcacctccccaaatctgcacacaagatcattcaaataaccctttaatttacactaattaaagaaggaacatcacaattatctattgtatatctggggaaactgcgggaggagaaatccttccataccagagcataaattcagtcgccatgcaattaactcagttacatggctaca

SEQ ID NO: 58783 - DNA, 600 bp, Chicken  19866894316281_1
attttgagaaatgaaggtgtcaccaagttgcagtaaaaattatacttagcaccaatgcactttgtaagccctgacaaattggcccttgcaacaaccctgatgcactcctcttttattaataggaattaaggagccagttgtttcatatcggaagtgaagaataacacagacactgggaagccaactctccgccgtaccagcagatcctatcccagtgcagctgctgcactgttcttgccatccagctgcctctcacacaccgtgggtgccatgggtaggcaggctggctggcttggggcygcyggctcacycgctcccaaacatttgggaaatggcacacggctgtgcctggggccatgcctgcaggccggcagtgtttgtggcagaccagcccttcttrgggcagccctttgcgtgcagactgggcggcgttcttaagtgagaaatgagaggccacattgccagattctgaagtatagcactaagaacaccactgctgtcacaacactatttcctcttctaaattatttatgtatttattgtattttacatgagccgtggaagctagaggcatttttgcagtgtcaggtcattctaaag

SEQ ID NO: 58784 - DNA, 600 bp, Chicken  19866894316281_2
ttgagaaatgaaggtgtcaccaagttgcagtaaaaattatacttagcaccaatgcactttgtaagccctgacaaattggcccttgcaacaaccctgatgcactcctcttttattaataggaattaaggagccagttgtttcatatcggaagtgaagaataacacagacactgggaagccaactctccgccgtaccagcagatcctatcccagtgcagctgctgcactgttcttgccatccagctgcctctcacacaccgtgggtgccatgggtaggcaggctggctggcttggggcygcyggctcacycgctcccaaacatttgggaaatggcacacggctgtgcctggggccatgcctgcaggccggcagtgtttgtggcagaccagcccttcttrgggcagccctttgcgtgcagactgggcggcgttcttaagtgagaaatgagaggccacattgccagattctgaagtatagcactaagaacaccactgctgtcacaacactatttcctcttctaaattatttatgtatttattgtattttacatgagccgtggaagctagaggcatttttgcagtgtcaggtcattctaaagtac

SEQ ID NO: 58785 - DNA, 600 bp, Chicken  19866894316281_3
tgaaggtgtcaccaagttgcagtaaaaattatacttagcaccaatgcactttgtaagccctgacaaattggcccttgcaacaaccctgatgcactcctcttttattaataggaattaaggagccagttgtttcatatcggaagtgaagaataacacagacactgggaagccaactctccgccgtaccagcagatcctatcccagtgcagctgctgcactgttcttgccatccagctgcctctcacacaccgtgggtgccatgggtaggcaggctggctggcttggggcygcyggctcacycgctcccaaacatttgggaaatggcacacggctgtgcctggggccatgcctgcaggccggcagtgtttgtggcagaccagcccttcttrgggcagccctttgcgtgcagactgggcggcgttcttaagtgagaaatgagaggccacattgccagattctgaagtatagcactaagaacaccactgctgtcacaacactatttcctcttctaaattatttatgtatttattgtattttacatgagccgtggaagctagaggcatttttgcagtgtcaggtcattctaaagtacattccata

SEQ ID NO: 58786 - DNA, 600 bp, Chicken  19866894316281_4
tgcactcctcttttattaataggaattaaggagccagttgtttcatatcggaagtgaagaataacacagacactgggaagccaactctccgccgtaccagcagatcctatcccagtgcagctgctgcactgttcttgccatccagctgcctctcacacaccgtgggtgccatgggtaggcaggctggctggcttggggcygcyggctcacycgctcccaaacatttgggaaatggcacacggctgtgcctggggccatgcctgcaggccggcagtgtttgtggcagaccagcccttcttrgggcagccctttgcgtgcagactgggcggcgttcttaagtgagaaatgagaggccacattgccagattctgaagtatagcactaagaacaccactgctgtcacaacactatttcctcttctaaattatttatgtatttattgtattttacatgagccgtggaagctagaggcatttttgcagtgtcaggtcattctaaagtacattccatacaaagaatagggctggaaagtacagttgtacgtggtattgttcattaatattacataattactgcacacaaaatagttctctgggcagt

SEQ ID NO: 58787 - DNA, 600 bp, Chicken  19866894316293_1
ataaatacccaatgaatatcagggaaaaaaaaatcactatgcagtcatatttgttgtacatgacgacaaagtactttagaaccgaactccgaatgacacattcatgaaatgccttctttgaaaaagaacttccaatgattttgatgagaataatcttagaagtgttgttttaccattagcagagatattatcatctgtgttctgcagttaccatatgtcaatatttcagtcatcgataattctgtatgcgcagtaagaaattgcttttgagaagagtgatacagtggcagccgctcaaayggtggtgttgactgtcaatagagttatgagagtttatatctgttgaggatctgccaataaacttttttcagcttgaaaawaagatctgaaagaatgcttaattaatattgggtacctctctttctattatcatgacaatgctagacaacattagaaaccagaccatctgaaaatcagcttaattttccctccaattaatttctatttacaaacattagtttgtattttagcacttgaattactggaggacaaaaccaaacaaaattttgaaaaccaaaaacagcataacaacaattaaaa

SEQ ID NO: 58788 - DNA, 600 bp, Chicken  19866894316293_2
accgaactccgaatgacacattcatgaaatgccttctttgaaaaagaacttccaatgattttgatgagaataatcttagaagtgttgttttaccattagcagagatattatcatctgtgttctgcagttaccatatgtcaatatttcagtcatcgataattctgtatgcgcagtaagaaattgcttttgagaagagtgatacagtggcagccgctcaaayggtggtgttgactgtcaatagagttatgagagtttatatctgttgaggatctgccaataaacttttttcagcttgaaaawaagatctgaaagaatgcttaattaatattgggtacctctctttctattatcatgacaatgctagacaacattagaaaccagaccatctgaaaatcagcttaattttccctccaattaatttctatttacaaacattagtttgtattttagcacttgaattactggaggacaaaaccaaacaaaattttgaaaaccaaaaacagcataacaacaattaaaaaaaacctctttaaacagataatgaattagaaacttgttagaaaaaatgcttgggaagattatggctacaagctaacttac

SEQ ID NO: 58789 - DNA, 600 bp, Chicken  19866894316300_1
agggagattctcatcgctgctgggtggaggagtaagattatctcctgaaagaaggtcaagattaaagaaaatacattattcttgtgtgtgtatatgtacgtaagtatacacacatatataaataatctctggatgaaatgatggagtccctcttacattttgatctgggaaaaccagccccagaaattcttttagaagatgccgatgtttcctgctgctagaaagcagctctcccccaagctgtgcccactgctggagctaaaagcctgctctacctcctcctctatctgatgtgaatgytagttcacacagtgagaaggtgggcagctgcagcagtcagcacgaggaacagcctggtggcagcaaagaggggagaaaaagaaagacaaatattaaaacaagtatttattattgtttctacttttttaagtgagggaaatttgtaggtaaacataagatcagaagraaaagaaaacttcacttcaggagacacagccatcaggcagtgtacaaaacaattctgaccctgaaaacagtataatgcagagaacaaaggaataagcagatcaggggaaagtggaaattaagtgggttgctcca

SEQ ID NO: 58790 - DNA, 600 bp, Chicken  19866894316300_2
gggaaaaccagccccagaaattcttttagaagatgccgatgtttcctgctgctagaaagcagctctcccccaagctgtgcccactgctggagctaaaagcctgctctacctcctcctctatctgatgtgaatgytagttcacacagtgagaaggtgggcagctgcagcagtcagcacgaggaacagcctggtggcagcaaagaggggagaaaaagaaagacaaatattaaaacaagtatttattattgtttctacttttttaagtgagggaaatttgtaggtaaacataagatcagaagraaaagaaaacttcacttcaggagacacagccatcaggcagtgtacaaaacaattctgaccctgaaaacagtataatgcagagaacaaaggaataagcagatcaggggaaagtggaaattaagtgggttgctccaaaagtaatgcctcgtatttatttacatgggaacaatagcagctacaaagagcacaataacactatttgataaagcaaattctcaactaccaaacacagtttttcaacataatcaccaccattagctctgcattttcattagcaccactgctgaaacacaccaccca

SEQ ID NO: 58791 - DNA, 599 bp, Chicken  19866894316302_1
  misc_feature (1)..(157): n is any nucleotide
nnnnnnnnnnnnnnnnnnnnnnnnnnnnnnnnnnnnnnnnnnnnnnnnnnnnnnnnnnnnnnnnnnnnnnnnnnnnnnnnnnnnnnnnnnnnnnnnnnnnnnnnnnnnnnnnnnnnnnnnnnnnnnnnnnnnnnnnnnnnnnnnnnnnnnnnnnnnntaaaccaactgttcccaaatggaaggatgctcaagggggccatctgaatctcaatccaactctgcctcagtgcgtgcaagaatgtgatttgggctgacccctaatgtcattagccaacccatcctacttttctccttcacacrgatgagcacaccaggcaggagctctgtcatctgcttcctgtgggtcgtacaacccctgagcatcagttggatgtgcatctctctgccaatttaattttgcttgaaagggtcaatcgccagcagttccccatccctggctgtcgtgttcctgcagagctccataccagatgctctctgcaaatggactgtaacatctgaaagtcagtaaccaaagttattggactgactttgtgccaaggtttttattaaagctatgactgacaaaaaaaaaaaggaaaaaaatacctaaaaaaattgaa

SEQ ID NO: 58792 - DNA, 600 bp, Chicken  19866894316308_1
aaaccaaaacacaaagccacgcaaatcccacagactgttccatttattgcacagttgttaccacaaagaattgcagaccaaagccacgctgtgcactcactgcacagtgagtgcaatccagaggtgtgcagtcagaagccaggcctcccgttctccaggttgcatggattgaaggtatcagtgtaaaaataaacagagaggtgttccctgaaggctctgtggtctggaacctcctgagtgggaggtttgtcagtgctttgtggagctgcactggcagttccactggagctgcacactcayyrgagtccaagcagtctccaacacaccagaagttataaatggctttatatttcagactcctgaggcaaacgtggggatttcagggagcacaaaagctgactgttaggagttattttaacttgcagctcacctggaaggaaatatctaggagaggagtgttagtgctaaaaagaaacactgatgagagcagagcaacaccgggcaggatgcactcactgtgtaaaagctgagatggaggctggtatttgggtggttgcatgcagaccagcagtccagggctggttttggtccttcccaagg

SEQ ID NO: 58793 - DNA, 600 bp, Chicken  19866894316308_2
aaccaaaacacaaagccacgcaaatcccacagactgttccatttattgcacagttgttaccacaaagaattgcagaccaaagccacgctgtgcactcactgcacagtgagtgcaatccagaggtgtgcagtcagaagccaggcctcccgttctccaggttgcatggattgaaggtatcagtgtaaaaataaacagagaggtgttccctgaaggctctgtggtctggaacctcctgagtgggaggtttgtcagtgctttgtggagctgcactggcagttccactggagctgcacactcayyrgagtccaagcagtctccaacacaccagaagttataaatggctttatatttcagactcctgaggcaaacgtggggatttcagggagcacaaaagctgactgttaggagttattttaacttgcagctcacctggaaggaaatatctaggagaggagtgttagtgctaaaaagaaacactgatgagagcagagcaacaccgggcaggatgcactcactgtgtaaaagctgagatggaggctggtatttgggtggttgcatgcagaccagcagtccagggctggttttggtccttcccaagga

SEQ ID NO: 58794 - DNA, 600 bp, Chicken  19866894316308_3
accaaaacacaaagccacgcaaatcccacagactgttccatttattgcacagttgttaccacaaagaattgcagaccaaagccacgctgtgcactcactgcacagtgagtgcaatccagaggtgtgcagtcagaagccaggcctcccgttctccaggttgcatggattgaaggtatcagtgtaaaaataaacagagaggtgttccctgaaggctctgtggtctggaacctcctgagtgggaggtttgtcagtgctttgtggagctgcactggcagttccactggagctgcacactcayyrgagtccaagcagtctccaacacaccagaagttataaatggctttatatttcagactcctgaggcaaacgtggggatttcagggagcacaaaagctgactgttaggagttattttaacttgcagctcacctggaaggaaatatctaggagaggagtgttagtgctaaaaagaaacactgatgagagcagagcaacaccgggcaggatgcactcactgtgtaaaagctgagatggaggctggtatttgggtggttgcatgcagaccagcagtccagggctggttttggtccttcccaaggac

SEQ ID NO: 58795 - DNA, 600 bp, Chicken  19866894316319_1
gcctatgtttacatagaacaccagttttacaatgaggtctgctgccttcaccagcaggagagggtccagctgcaggagtactccagggctggatggactttccatgccaaaggtaagatgtctgtttctcaggaggacttattcagaaagcacgtgtgctttgcatatattttgattgtgcaactggtgaggggatggttgggtgctgagtctggattcaaccttcaaaagtactcagccaatgtttaaacatcctgcttgtctaagcctggaaggtttgaatcacccaggagacaagcrtgcaaagttacatcttgcctctggatttccagtttaaatgtagtcctagggattatacaagaatcatcctgatggtgacagtaagatatgataataatgataagatatcgtactgcctcaggatgaaatggaagaaggcatctagatggatatttatttatatatttatatatatatgtttatatataaaaaatgattgcratagcaattrcaattcctatatccctcttgatagtttgagcaaagagaattgatggctgtaccatgggcccagtgctgtgagaacgttgtggtcctgga

SEQ ID NO: 58796 - DNA, 600 bp, Chicken  19866894316319_2
ggtgctgagtctggattcaaccttcaaaagtactcagccaatgtttaaacatcctgcttgtctaagcctggaaggtttgaatcacccaggagacaagcrtgcaaagttacatcttgcctctggatttccagtttaaatgtagtcctagggattatacaagaatcatcctgatggtgacagtaagatatgataataatgataagatatcgtactgcctcaggatgaaatggaagaaggcatctagatggatatttatttatatatttatatatatatgtttatatataaaaaatgattgcratagcaattrcaattcctatatccctcttgatagtttgagcaaagagaattgatggctgtaccatgggcccagtgctgtgagaacgttgtggtcctggactctgggtcttcctggaagcagagctttgtggggtgacccacacttcagagaatttgtaccaggtcccctttatggcacatggtgaagttcagagtactgattaggtgcatcctggtgccttctgggagttggaggggaagttgttgagaaatggatgttgcttaacaaatgtagatgattaaaacaaaaaataaataagt

SEQ ID NO: 58797 - DNA, 600 bp, Chicken  19866894316319_3
ctggattcaaccttcaaaagtactcagccaatgtttaaacatcctgcttgtctaagcctggaaggtttgaatcacccaggagacaagcrtgcaaagttacatcttgcctctggatttccagtttaaatgtagtcctagggattatacaagaatcatcctgatggtgacagtaagatatgataataatgataagatatcgtactgcctcaggatgaaatggaagaaggcatctagatggatatttatttatatatttatatatatatgtttatatataaaaaatgattgcratagcaattrcaattcctatatccctcttgatagtttgagcaaagagaattgatggctgtaccatgggcccagtgctgtgagaacgttgtggtcctggactctgggtcttcctggaagcagagctttgtggggtgacccacacttcagagaatttgtaccaggtcccctttatggcacatggtgaagttcagagtactgattaggtgcatcctggtgccttctgggagttggaggggaagttgttgagaaatggatgttgcttaacaaatgtagatgattaaaacaaaaaataaataagtactggcataa

SEQ ID NO: 58798 - DNA, 600 bp, Chicken  19866894316319_4
ccagtcccctagggcagtgtggttcctgtaagcagtgccctatctgacagccagtttcctcaggctgtgcaggggggcattgtcactgcagcacgtgtctggtgagaagggtggacggatgcgccctgagccagcactggcctgttccagggccctgaccagtagttcagcttgatttgtttgtttgagattagctgttaacgactgtgggaatgcctctatctaactggcttcctgcagggctgttcggaagagggttcagaggtggcagggagagaaagctgctgagtgggccttctsttgtctgaagaaaatacacacatgttactgagttgcctatatatagaagccgcgagccttcctgacgcatgctgtgccctggtggcagtgacatcagcctctgcagctgcaaagccctatctcggtgcctcgtggtgcctgcctggctggaagcgttgcgtgtgccgccttccaggaagcacctgcttaagagctctgtgctttgtaggttgatcctcttgctgggcactgctggcttacagtggggtttcccttgttggccctcactgagcgtggcagctctcccaggatcccagaggg

SEQ ID NO: 58799 - DNA, 599 bp, Chicken  19866894316325_1
  misc_feature (1)..(30): n is any nucleotide
nnnnnnnnnnnnnnnnnnnnnnnnnnnnnntgggcaccattcaaaagtagaaaaaagaaccagctgggggaaagaggattgtctggtatgtttctgcaatgtgctttgctgcagtaggtctctcagaaaaaagaataatgctataggtagcagtcactcattgtgtattggtattttcgttctgagattatgccaaggaaaggtgggactttatggaccccctcatcttggtagtgcagttgatccttgacaagctttgttttgtccttctttacatagtcagtgttgttttctagtccytttattgtcattattcaaaacatgaatagaagtggatatcctctaagttatgaatgtaatcaattttgagtctttaattgtaattttttttccataaaattcttttaatttagtctaatataatggcacatcaagcagtaatgggtacattaaattgaatcatgatgttcatatacacattttatgacacaatcaaatatcccaatgcattaattcatgtcaatcagttaataaaatcaagtaggaaacatttctctagtgctgttaactgcgcttctcccatttagtgggtgacaaga

SEQ ID NO: 58800 - DNA, 535 bp, Chicken  19866894316325_2
atcctctaagttatgaatgtaatcaattttgagtctttaattgtaattttttttccataaaattcttttaatttagtctaatataatggcacatcaagcagtaatgggtacattaaattgaatcatgatgttcatatacacattttatgacacaatcaaatatcccaatgcattaattcatgtcaatcagttaataaaatcaagtaggaaacatttctctagtgctgttaactgcgcttctcccatttagtgggtgacaagatggtgcagacctttacgtcttgccacgttcacgttttyctgtcagtgttggagtcaatacatttgtacttgatgaggacaaaacatgtcgtttcccagtggcccttgaccaaaacagagcaactgggagctgaaggcctcatctctatttcattctgccctggttcctttggtacagtcctatccccaaggattcccacaaagaaggaagaaatattaactgtgaacttgggaaataacttctttaaagattttttcacttctgatgttcacc

SEQ ID NO: 58801 - DNA, 599 bp, Chicken  19866894316340_1
  misc_feature (1)..(212): n is any nucleotide
nnnnnnnnnnnnnnnnnnnnnnnnnnnnnnnnnnnnnnnnnnnnnnnnnnnnnnnnnnnnnnnnnnnnnnnnnnnnnnnnnnnnnnnnnnnnnnnnnnnnnnnnnnnnnnnnnnnnnnnnnnnnnnnnnnnnnnnnnnnnnnnnnnnnnnnnnnnnnnnnnnnnnnnnnnnnnnnnnnnnnnnnnnnnnnnnnnnnnnnnnnnnnnnnnnnncacggccccattcaaagtgaagcatggcaacacctggtgtttgtgtgaaaccatcccagaaggtttacaaattcaattaagaaaaaaygcaatgagctgtggcagggaagataagtgctatacaggcaggaaggcattacttatagtgacaaatctgctggcaycactcaagtgtctgtgcctaaagaaggagactgaatgtgacaggaaaacaacccttaacagaaatgttattcttctactttatcgagatttcttagtgaactttgggrtgcagttgcaatcacacatccttatctgttacattttaaattgctactgcttgctttcacacacgcaccaatccagttgaaatgcaaaactattaagatgtacataaagtcgtga

SEQ ID NO: 58802 - DNA, 599 bp, Chicken  19866894316340_2
  misc_feature (1)..(136): n is any nucleotide
nnnnnnnnnnnnnnnnnnnnnnnnnnnnnnnnnnnnnnnnnnnnnnnnnnnnnnnnnnnnnnnnnnnnnnnnnnnnnnnnnnnnnnnnnnnnnnnnnnnnnnnnnnnnnnnnnnnnnnnnnnnnnnnnnnnnnnnncacggccccattcaaagtgaagcatggcaacacctggtgtttgtgtgaaaccatcccagaaggtttacaaattcaattaagaaaaaaygcaatgagctgtggcagggaagataagtgctatacaggcaggaaggcattacttatagtgacaaatctgctggcaycactcaagtgtctgtgcctaaagaaggagactgaatgtgacaggaaaacaacccttaacagaaatgttattcttctactttatcgagatttcttagtgaactttgggrtgcagttgcaatcacacatccttatctgttacattttaaattgctactgcttgctttcacacacgcaccaatccagttgaaatgcaaaactattaagatgtacataaagtcgtgaggtatcttagaggctcggataaaacacagaaaatttcaaaacttcagattccactaagaatgaaaaataaaaataa

SEQ ID NO: 58803 - DNA, 599 bp, Chicken  19866894316340_3
  misc_feature (1)..(28): n is any nucleotide
nnnnnnnnnnnnnnnnnnnnnnnnnnnncacggccccattcaaagtgaagcatggcaacacctggtgtttgtgtgaaaccatcccagaaggtttacaaattcaattaagaaaaaaygcaatgagctgtggcagggaagataagtgctatacaggcaggaaggcattacttatagtgacaaatctgctggcaycactcaagtgtctgtgcctaaagaaggagactgaatgtgacaggaaaacaacccttaacagaaatgttattcttctactttatcgagatttcttagtgaactttgggrtgcagttgcaatcacacatccttatctgttacattttaaattgctactgcttgctttcacacacgcaccaatccagttgaaatgcaaaactattaagatgtacataaagtcgtgaggtatcttagaggctcggataaaacacagaaaatttcaaaacttcagattccactaagaatgaaaaataaaaataataaaaaaacatacctgatgaatgcttacatatgtcctctcagagtgctcagcctctgtctggttcccaatgcaaggcaaagaatcgtagaatcatttgcagttggaaa

SEQ ID NO: 58804 - DNA, 600 bp, Chicken  19866894316344_1
ttgactctgagtgtttggtcatgtttactcttttcctcctgcactcccaaactctggactcattccacaacccttgagatcagtatttttttcagccctgactttttgcatgcaagtttgatttcagtcacagttgctccctacagatattcctttgattgagaaaataacacaaccatacagtgttgtttctacatcatccttgcaatttttagctctgtgtctgcttgagatagtcagtctaactttcaagcccagaccctaggtgtgtgtgtgtttcactttgattctgagtgtaartatgaaamccraagctcgtcctgagcaaagttagagaaaaccaggctggagtctgtggggagagcatkgcaagtcatggctgggaggaagtgttgrcaatgcagcycttagctgcctggccaggaaaacccagggcctagctgtagggatggtgttcctccactaggaagcaccctgagagcctactgcctccctgtgctgactgtggcagagcctcttctcccttcctctcctccctcagtaaacattcagcataactcaagagaaggacagacctccttggaacactgccccagcctt

SEQ ID NO: 58805 - DNA, 600 bp, Chicken  19866894316344_2
gagtgtttggtcatgtttactcttttcctcctgcactcccaaactctggactcattccacaacccttgagatcagtatttttttcagccctgactttttgcatgcaagtttgatttcagtcacagttgctccctacagatattcctttgattgagaaaataacacaaccatacagtgttgtttctacatcatccttgcaatttttagctctgtgtctgcttgagatagtcagtctaactttcaagcccagaccctaggtgtgtgtgtgtttcactttgattctgagtgtaartatgaaamccraagctcgtcctgagcaaagttagagaaaaccaggctggagtctgtggggagagcatkgcaagtcatggctgggaggaagtgttgrcaatgcagcycttagctgcctggccaggaaaacccagggcctagctgtagggatggtgttcctccactaggaagcaccctgagagcctactgcctccctgtgctgactgtggcagagcctcttctcccttcctctcctccctcagtaaacattcagcataactcaagagaaggacagacctccttggaacactgccccagccttgggtggga

SEQ ID NO: 58806 - DNA, 600 bp, Chicken  19866894316344_3
tgtttggtcatgtttactcttttcctcctgcactcccaaactctggactcattccacaacccttgagatcagtatttttttcagccctgactttttgcatgcaagtttgatttcagtcacagttgctccctacagatattcctttgattgagaaaataacacaaccatacagtgttgtttctacatcatccttgcaatttttagctctgtgtctgcttgagatagtcagtctaactttcaagcccagaccctaggtgtgtgtgtgtttcactttgattctgagtgtaartatgaaamccraagctcgtcctgagcaaagttagagaaaaccaggctggagtctgtggggagagcatkgcaagtcatggctgggaggaagtgttgrcaatgcagcycttagctgcctggccaggaaaacccagggcctagctgtagggatggtgttcctccactaggaagcaccctgagagcctactgcctccctgtgctgactgtggcagagcctcttctcccttcctctcctccctcagtaaacattcagcataactcaagagaaggacagacctccttggaacactgccccagccttgggtgggaggt

SEQ ID NO: 58807 - DNA, 600 bp, Chicken  19866894316344_4
aacccttgagatcagtatttttttcagccctgactttttgcatgcaagtttgatttcagtcacagttgctccctacagatattcctttgattgagaaaataacacaaccatacagtgttgtttctacatcatccttgcaatttttagctctgtgtctgcttgagatagtcagtctaactttcaagcccagaccctaggtgtgtgtgtgtttcactttgattctgagtgtaartatgaaamccraagctcgtcctgagcaaagttagagaaaaccaggctggagtctgtggggagagcatkgcaagtcatggctgggaggaagtgttgrcaatgcagcycttagctgcctggccaggaaaacccagggcctagctgtagggatggtgttcctccactaggaagcaccctgagagcctactgcctccctgtgctgactgtggcagagcctcttctcccttcctctcctccctcagtaaacattcagcataactcaagagaaggacagacctccttggaacactgccccagccttgggtgggaggtgacagatgccaggaactggttgatgcctttctgtaggaggactcctggccagacctg

SEQ ID NO: 58808 - DNA, 600 bp, Chicken  19866894316344_5
cctgactttttgcatgcaagtttgatttcagtcacagttgctccctacagatattcctttgattgagaaaataacacaaccatacagtgttgtttctacatcatccttgcaatttttagctctgtgtctgcttgagatagtcagtctaactttcaagcccagaccctaggtgtgtgtgtgtttcactttgattctgagtgtaartatgaaamccraagctcgtcctgagcaaagttagagaaaaccaggctggagtctgtggggagagcatkgcaagtcatggctgggaggaagtgttgrcaatgcagcycttagctgcctggccaggaaaacccagggcctagctgtagggatggtgttcctccactaggaagcaccctgagagcctactgcctccctgtgctgactgtggcagagcctcttctcccttcctctcctccctcagtaaacattcagcataactcaagagaaggacagacctccttggaacactgccccagccttgggtgggaggtgacagatgccaggaactggttgatgcctttctgtaggaggactcctggccagacctgctgtcctgcagtgagattggtgcctggg

SEQ ID NO: 58809 - DNA, 600 bp, Chicken  19866894316344_6
tgcatgcaagtttgatttcagtcacagttgctccctacagatattcctttgattgagaaaataacacaaccatacagtgttgtttctacatcatccttgcaatttttagctctgtgtctgcttgagatagtcagtctaactttcaagcccagaccctaggtgtgtgtgtgtttcactttgattctgagtgtaartatgaaamccraagctcgtcctgagcaaagttagagaaaaccaggctggagtctgtggggagagcatkgcaagtcatggctgggaggaagtgttgrcaatgcagcycttagctgcctggccaggaaaacccagggcctagctgtagggatggtgttcctccactaggaagcaccctgagagcctactgcctccctgtgctgactgtggcagagcctcttctcccttcctctcctccctcagtaaacattcagcataactcaagagaaggacagacctccttggaacactgccccagccttgggtgggaggtgacagatgccaggaactggttgatgcctttctgtaggaggactcctggccagacctgctgtcctgcagtgagattggtgcctggggctgatgcaa

SEQ ID NO: 58810 - DNA, 424 bp, Chicken  19866894316344_7
agcataactcaagagaaggacagacctccttggaacactgccccagccttgggtgggaggtgacagatgccaggaactggttgatgcctttctgtaggaggactcctggccagacctgctgtcctgcagtgagattggtgcctggggctgatgcaatcagcatgttgaacgagaggacgcataaatggggcaagcacacagcataaccagaggcaacagaaaaaaatgtgtgcaagttcagttaggtaacatcctgagttagtttagatctgaccatatcccttagtatttcacatgtayggcacaatccgcgttcactgtgcttagacatccatcagtgcttccaaagcaaaaggctggtgaagcaaaagcccatgcctgatttaacagagatgcatgagctgtgttggtgctgctggacaaa

SEQ ID NO: 58811 - DNA, 600 bp, Chicken  19866894316349_1
ctggctgcctcattagataagagcttatcttccccagcatatatcgagcatgttgtgcgatgtcattagattgcaactcgtatcaagcagttgatctacagttatccataaatctttggttcccacttttattacacaaaacaagagagcaattacttaaatttaacatatgactcattacagattagttcatgaagtgaataacccctcctcatcccttatgtcataggaaatcactcaaatgcagtgtttcatagtatctacacccatctcccactgcgcacattaatatttatacaygagataacctgtgtcatctatgtgcgtaccacctgtgaaataacaagttgtgaggtaacgygtagctgtggagctcaccatttgctgacaaaggctgcatcacttactgaaggacacagcagcgaggctggtaaataaatcctaacggtttgctgtgcaggcaagggcaaggtgaagcaagttttctcctgttctggattggcaagtgctctgagacaagtcaaaggaagcaagatgctctgtgggaaggtaggtggggagaatcccagatctgctgggaagaagagagaaagaagtcca

SEQ ID NO: 58812 - DNA, 600 bp, Chicken  19866894316349_2
gtcattagattgcaactcgtatcaagcagttgatctacagttatccataaatctttggttcccacttttattacacaaaacaagagagcaattacttaaatttaacatatgactcattacagattagttcatgaagtgaataacccctcctcatcccttatgtcataggaaatcactcaaatgcagtgtttcatagtatctacacccatctcccactgcgcacattaatatttatacaygagataacctgtgtcatctatgtgcgtaccacctgtgaaataacaagttgtgaggtaacgygtagctgtggagctcaccatttgctgacaaaggctgcatcacttactgaaggacacagcagcgaggctggtaaataaatcctaacggtttgctgtgcaggcaagggcaaggtgaagcaagttttctcctgttctggattggcaagtgctctgagacaagtcaaaggaagcaagatgctctgtgggaaggtaggtggggagaatcccagatctgctgggaagaagagagaaagaagtccatgctcacagaaccgggtgtggttccatctgcagttggagaaagctggccaagatgagctga

SEQ ID NO: 58813 - DNA, 600 bp, Chicken  19866894316350_1
tttatcaaatttgacttaactgatgaaacccaaacagcgtcagcctaaactaactggaagatttgtaattaaatgtactaccaaagtagattgatatcacctagcaatcagttaaaacctgcaggcttggaaaaggttgtgagaagaaaaaagccttaacctagcttctagttcatggtctggctgggatttagggagatcttctcttctaagagactctttagtatttccatgccttctcttttcacagagcgtcttgttttcccttgccaccacaaggttaaaattaaagtgtgataracagcatgtagcaagagctaaaaacaactgcagaacagaaatgtcaaggtagttgttttttctaactgagagcattaaagctttctgcttgcagggaaaggccttatttcagcaggagggtcgtgactagtgatcataccagacagtacagtgatggcatatggarcattttagttctgggtcgttggwttcaaatctgacctagctctcaatatccagtagtaattaccatctgttaactattagtggctatttgaattggtcctctattcaaatcctagtaaaatgattcycttttac

SEQ ID NO: 58814 - DNA, 600 bp, Chicken  19866894316350_2
tctagttcatggtctggctgggatttagggagatcttctcttctaagagactctttagtatttccatgccttctcttttcacagagcgtcttgttttcccttgccaccacaaggttaaaattaaagtgtgataracagcatgtagcaagagctaaaaacaactgcagaacagaaatgtcaaggtagttgttttttctaactgagagcattaaagctttctgcttgcagggaaaggccttatttcagcaggagggtcgtgactagtgatcataccagacagtacagtgatggcatatggarcattttagttctgggtcgttggwttcaaatctgacctagctctcaatatccagtagtaattaccatctgttaactattagtggctatttgaattggtcctctattcaaatcctagtaaaatgattcycttttacaggtaaagataatatctcagattctgttaggtgtccctccatcttttcatcctcctgcagaatggccactttataagaaatcattttcctaacaaagttgggccctaaatgaaggattcgggtttatcagagaggatgtttgcactgatgcttatcatgtagtacc

SEQ ID NO: 58815 - DNA, 600 bp, Chicken  19866894316350_3
tttagggagatcttctcttctaagagactctttagtatttccatgccttctcttttcacagagcgtcttgttttcccttgccaccacaaggttaaaattaaagtgtgataracagcatgtagcaagagctaaaaacaactgcagaacagaaatgtcaaggtagttgttttttctaactgagagcattaaagctttctgcttgcagggaaaggccttatttcagcaggagggtcgtgactagtgatcataccagacagtacagtgatggcatatggarcattttagttctgggtcgttggwttcaaatctgacctagctctcaatatccagtagtaattaccatctgttaactattagtggctatttgaattggtcctctattcaaatcctagtaaaatgattcycttttacaggtaaagataatatctcagattctgttaggtgtccctccatcttttcatcctcctgcagaatggccactttataagaaatcattttcctaacaaagttgggccctaaatgaaggattcgggtttatcagagaggatgtttgcactgatgcttatcatgtagtacctactgtgcagataaagaaaattt

SEQ ID NO: 58816 - DNA, 573 bp, Chicken  19866894316350_4
gtgataracagcatgtagcaagagctaaaaacaactgcagaacagaaatgtcaaggtagttgttttttctaactgagagcattaaagctttctgcttgcagggaaaggccttatttcagcaggagggtcgtgactagtgatcataccagacagtacagtgatggcatatggarcattttagttctgggtcgttggwttcaaatctgacctagctctcaatatccagtagtaattaccatctgttaactattagtggctatttgaattggtcctctattcaaatcctagtaaaatgattcycttttacaggtaaagataatatctcagattctgttaggtgtccctccatcttttcatcctcctgcagaatggccactttataagaaatcattttcctaacaaagttgggccctaaatgaaggattcgggtttatcagagaggatgtttgcactgatgcttatcatgtagtacctactgtgcagataaagaaaattttcatgcttcagggctggcaatctggccatctttcacagaatcaaaaattttaacaccagggagcaacataaaaccat

SEQ ID NO: 58817 - DNA, 600 bp, Chicken  19866894316351_1
gcaatgcgtgatccaaatgaaatggaaaaaagagtaaaaggggacaagagagcatgatgtcaggagcaaatgagggatacggtgcctctgtgggctggggctctgcatccagctggaatcagcatgctcatcttcctggaaatttggcaggggaatgagatttcaggctcccttatgcccatctccacccattaaataaaagagtgtttactgaaaggaggagagctgttccaagtccttctcatttcaggaaaccatttcttccttgcggacatctcctggtagaagggattggcagcrcagaggacagcagccaacctgagagctgctggcttttgctgtcctccttagaccaatgcaggacttgcccatgtgagcagctctgcttttctatctcccacttcaatccctggctgaccaccagcatcccgtgcttgggcaaagggaagcttttggagaggtcagaaagtgtacaagacttgcaagatcaggtacatttatatcaaattccttccgtgggcagtgagccatggtagaacagggagtgagaggatggcttggataactctcctcttcctggcaatgcctctgatcagagta

SEQ ID NO: 58818 - DNA, 600 bp, Chicken  19866894316352_1
cgtgctctcctggaacaccctcagtgccaccgggctgaccctgcgtgcctgtccataggtctgtgctggtggcaggaaggggagggggaacaaagttatgccttccaggaaaccattgacaaatggatgttaattgctgattactaattttactgctacctgtggtttgcagaaggtaaacacggctcttcccagggtcagggtatgtcagactgtttttctgctctttgtttgactctgtatctgttcagttcttctcgtttcgcatgatttttaatgagtgcttatatcaacagcatrcagtttaaccaaacaaagcaaaacgttgtggtcagtcctatttctatttgctatgagccacggcttgtaacacagctctgccttcctgcaactcactggagagggatgcaatgtgcctcagcttctggctggggcactgggctgggtctgctcccagctctgcctttcctgcaggtttccctaaggcacagagaggaactcggtgctgcactgctcactgtcaagtagggttgcagtttccccgcagcactgacacatctaagtttggatgctgcagtcaggatgatgcaaaaggtgtga

SEQ ID NO: 58819 - DNA, 391 bp, Chicken  19866894316360_1
gcttgcgcagcctgactgactgcaggagctggcactaagagcactgtgtgcttaatgtccataagtactccccaaacagcaaaggaatgctgtgctttctctttgctgccctgagctgagggagctttaatatacagtctgtgatgtggtgcccctttaaaaaaaaaaaaagtcacgactcttctctctctggtttgattttcattctcttggcttgctgctgtgcagctcagagtgagtcacagtttgctcaggtgaatgttaaaccctgatgaggaaggtgggaggcagtgtgcttgygagcaaactgacccgtggctgcagagctgtacggcctctctgagcctataagtgttctcagctgatgaatgttcttgttcctttgttccta

SEQ ID NO: 58820 - DNA, 600 bp, Chicken  19866894316364_1
ggagaggattagaagcataacaccaataaaagagcaagtactaagaaagttttatgtaataaccctaactgcgttcactaatgagtttttttcttttaattcaacacttcagaccactacattgataaaacaagttcatggttccactatcctttttgtccattcttagcactcactgcagcactctctaaacaactgaactgcactccaaagaataggacagttttcattccttcagtcatctccattgtatgtcatagcttaaatcacaatgctaaacctaacttcagctgatgaagwaaaaagcttgccttccaagctgtataagaccctgcagaaagcaatactgaaagttaaaatgtcatgattaagtactcaagaactacaagcagcattatacttgaaggcctgatttaactgactccttctacctttattcattctctcctggcattcagagagctaatatgaatattcattaggaaagttacctgagactttttaaggcattgtttaatttattcctaacttgctcagatcttaatcatgggaggtgatcaccttctttacttgcagtgtttctgaataggtcagctaaaa

SEQ ID NO: 58821 - DNA, 600 bp, Chicken  19866894316367_1
gtgcatgatgaaggacaaacagccattctctcagagtgaacatcttcaaaagctataaaatcagtaaccaggtatgttgtgggtgccccatccttggaggggctcaaggccaggtgggatggggccctgggctgcctgatctggtaggtagcagccagcccacagcagggggttggaattgggtgggctttgtgttcccttccaacccaaaccattctgcggttgaatgatcagaaatgtgaagagagataacagctttaagacagctatgaacacttcaccttctaaaagactgcataraaggattttctgtgcattaatgaaacacctcattgcaattttaaagacatactgagaaaaagagggtctggaacagattgcccagggaggtggtagagtcaagcatccctggaggtggccaggaactgtagagatgtggcactgaggggcatggttagtgggcatggtggggatgagttgggatggcgctggatgatctcagaggtcttttccaaccctaatggttttatgtgtcaatgattctaccttccttgacagcttgatccaatgcctgacctccttctccatggagaaatcctt

SEQ ID NO: 58822 - DNA, 600 bp, Chicken  19866894316369_1
atcactgctcatgtacatgagatttgtactcctatttgtaaggcttgagctgaatcatcaccacgcatttgaaataacccctaagcctccatccaaggagtttacactgccacctttaggaaaaagagctctgtattctttatctttctttgtagcacaagtgttaagagcaggggaagctcgcatccagtagcaaggaagggattctgcaacagagcacagagcctcaggatacaacaggcttggcagtggtgtatttaaagctggggcaaactctttcgagcaaacagtaaactgttytgcaccctcggtgccaataatttcagtaaggcagagagatttggcccctgttcaggttgcagaggaaaggacaacatgttcttagagtgcaggaagctgtcagtcagctgctttgctgtgatatgctggaaacgattgcttcctcctagctggtcactgtttgccttattgcatgcctgaggaccttcactgggctttatattccggtgcaggggtaagtcagtattactagaccaacagcacagaaaagactgtcacacccaggtaaggctgtctttcaggaagggagattggcttgcc

SEQ ID NO: 58823 - DNA, 600 bp, Chicken  19866894316370_1
aaggccagtgagttatttttgttaaacaagtgtcagcagaactttgaaataatgaattatggttacttcttttgaccaaaagctaaaatattgcaattaaacacggtaaatccattagcatttaagtgataacattgacatcatttctacttatgatcatgaattagtaaagattaacactttgctaaaagaattagtggtacaaagcctagatttgtaaatggagatgaattctccattgcccagcctaattgtgtttaaaagtcagcttatgcaatttgagctagcacattttctttmaactgggtaataaagatttcttactaacgcgttatggctgcttgatggaaatattcccattgagttgaaaacattctgaccctcccagccaaagatgttgagaagtgacttttgtggaagcaaactggcttgtcatatagggtaacgtgccacttatgctttttaaaagtatttttatgatagattaatataattacttctaacgattagagaaagtcatatttaaaaggacatttcaccttttttggagtggtgctatgagacatatgcatcacaaaaactttgtcaaataaagatact

SEQ ID NO: 58824 - DNA, 591 bp, Chicken  19866894316370_2
gatgttgagaagtgacttttgtggaagcaaactggcttgtcatatagggtaacgtgccacttatgctttttaaaagtatttttatgatagattaatataattacttctaacgattagagaaagtcatatttaaaaggacatttcaccttttttggagtggtgctatgagacatatgcatcacaaaaactttgtcaaataaagatactcatcatgagaatttgtggttgattcagctgtttttcttaccctaggctattatcctctgctgcctctttcttttgatccagactcaggtttcygtaagaattctttcacgtgttgttttacagtcagtatccaggttcctaatcatgggcaaattctaggaaataggaarcgctgtcagsagaagatagttgagaaagtaaaatacacttcttattgaataacagtaggcaagcagagttgtgaaagggaagacttagttttaattattgtttttgctacatggtggcatccagtaaccaagcatcagtagaaggtggtaggaatcctacagctgtagaaattacaaggggaagtgtcctgtctggaagctatacctctccagt

SEQ ID NO: 58825 - DNA, 514 bp, Chicken  19866894316370_3
atttttatgatagattaatataattacttctaacgattagagaaagtcatatttaaaaggacatttcaccttttttggagtggtgctatgagacatatgcatcacaaaaactttgtcaaataaagatactcatcatgagaatttgtggttgattcagctgtttttcttaccctaggctattatcctctgctgcctctttcttttgatccagactcaggtttcygtaagaattctttcacgtgttgttttacagtcagtatccaggttcctaatcatgggcaaattctaggaaataggaarcgctgtcagsagaagatagttgagaaagtaaaatacacttcttattgaataacagtaggcaagcagagttgtgaaagggaagacttagttttaattattgtttttgctacatggtggcatccagtaaccaagcatcagtagaaggtggtaggaatcctacagctgtagaaattacaaggggaagtgtcctgtctggaagctatacctctccagt

SEQ ID NO: 58826 - DNA, 504 bp, Chicken  19866894316370_4
tagattaatataattacttctaacgattagagaaagtcatatttaaaaggacatttcaccttttttggagtggtgctatgagacatatgcatcacaaaaactttgtcaaataaagatactcatcatgagaatttgtggttgattcagctgtttttcttaccctaggctattatcctctgctgcctctttcttttgatccagactcaggtttcygtaagaattctttcacgtgttgttttacagtcagtatccaggttcctaatcatgggcaaattctaggaaataggaarcgctgtcagsagaagatagttgagaaagtaaaatacacttcttattgaataacagtaggcaagcagagttgtgaaagggaagacttagttttaattattgtttttgctacatggtggcatccagtaaccaagcatcagtagaaggtggtaggaatcctacagctgtagaaattacaaggggaagtgtcctgtctggaagctatacctctccagt

SEQ ID NO: 58827 - DNA, 600 bp, Chicken  19866894316379_1
aaggctttcacatatattctccactcttaatcctctgaggtgagttttagttctggtccttcagtaaggtcagatgtcataggtgagtgcctggattcattgagccaagtgcaagttttaaggtgactttttttagagaccgagacttagacaggatgagcagtaggcacaggtgaacctcatgaggttcagcaaatccaagtgcagggtcttgcaccttgatcagtgcaacccttgctatcagcacaaactgggggatgtaaggatggaacccagtcctgcagaaaagatcttggttayactgatggaaagctgagcatgagccagcagtgtgcccctgcagcccagaacgccaactatatcctaggctgcatcaaatgaagcccagttagcagggtgagggaggtgatcctgctgctctgctctgtcacctggagtactgagaccaaatatggagtcctcagtacatgagagacgtggagctgttggagtgtgtccagaggagggccacaacagtgctccaaggaatggaacacctcccctgtaagaaaaagctgagagctggggctggtcaacctggagaagaaaaggccccagggg

SEQ ID NO: 58828 - DNA, 600 bp, Chicken  19866894316381_1
taatttcttaaatttcaaaactttcccacatcaaccagtagctttatttccataagctaatattaaaacatttgaaatgctgtgtatcagcagaaaaggttccccatagttgcaactatcagcaaaagcaagaattttagagtatacactccagatgaatgagtcatgaatatgtgttgtatccacgctaaactgtatgtatgggttagcctaagcagacctgtgacagggtcttggcagtgtgattgcaggtttcaacagtgttctcagggaaagcatcaaaaatgaagtgaaaactawgacaatttgactccaaaatagttttattgaaatacctgataggagcatgtctatccaattagtaacttagttgtataactgtgaaagtgtgctcccccttgtccctgacctcatcctttggcctggctcttayacctaaggccttgctcaggactgataacattgtcctgctaaatactaactgtgaatcaatcatcttactccataaatagtgagcaggccaagagccccttgagctacaaacctcatgacaagactgcatgtgacctctccaattccttttaaatattagggagcttg

SEQ ID NO: 58829 - DNA, 600 bp, Chicken  19866894316381_2
attttagagtatacactccagatgaatgagtcatgaatatgtgttgtatccacgctaaactgtatgtatgggttagcctaagcagacctgtgacagggtcttggcagtgtgattgcaggtttcaacagtgttctcagggaaagcatcaaaaatgaagtgaaaactawgacaatttgactccaaaatagttttattgaaatacctgataggagcatgtctatccaattagtaacttagttgtataactgtgaaagtgtgctcccccttgtccctgacctcatcctttggcctggctcttayacctaaggccttgctcaggactgataacattgtcctgctaaatactaactgtgaatcaatcatcttactccataaatagtgagcaggccaagagccccttgagctacaaacctcatgacaagactgcatgtgacctctccaattccttttaaatattagggagcttgagtcattatagtctcagggtggattttgtagaataattactgggggagacttcttgagataatttacctcctaagagagagtacatttcagaggacacctccaggatggaatgtggttaatgtgcaaggaatc

SEQ ID NO: 58830 - DNA, 599 bp, Chicken  19866894316382_1
  misc_feature (1)..(151): n is any nucleotide
nnnnnnnnnnnnnnnnnnnnnnnnnnnnnnnnnnnnnnnnnnnnnnnnnnnnnnnnnnnnnnnnnnnnnnnnnnnnnnnnnnnnnnnnnnnnnnnnnnnnnnnnnnnnnnnnnnnnnnnnnnnnnnnnnnnnnnnnnnnnnnnnnnnnnnntatttaggcatttgtattttgctttacagaaattgcatgtagtacttcatgagaatattagtccattcctgctccctgctaacaatatacattaagagctctgaaaaaataaaatagaataattcttctagaataattttcaatcactrtctgaaaagaaaaatgatgatcagaaaccttttccaagaataaaacataatgccagaacaaaatagaggagtactagaacccttaaagctaatgaaattctaaatcctttaacagttttaaaaaattatttatttgagaagaattacatattgtaaataattacagttgttcacaaggaataataaaattagaaaaaaagaaattttatcagggtaaacccaatgaagactgacaaacttgacttctaatttcatgaaaggccacaacagactactgtattacagttctcaaaaatttt

SEQ ID NO: 58831 - DNA, 600 bp, Chicken  19866894316383_1
ggagctgagcttcccatgagccagtgctgatttctttggggtagaacattttattataaaacaccagatctgtcatagcggatccatcaaggttatcccctgcacggtagctttcctgctatgctatcaaaaataaataatatcacgtaaaatctaaacatcttcatcaagcgcttataaattaagggattccctttgggggacaagtcacactatgtgcattttatcataaaatattcacatattctgtgacatctgcatagtacaagggagtataatattaaacagtgttcggaatgyaattgaaaacatagaagagcaaatagaaatgttacacagtatttcatactgtgcttataaaattattatgggaatataaaaagctcataacactaacatcctgaaatatagttatagacttttttggggtacagattgcatattccaatttaatatccattacatttgtataataatgcatattgtaaatacacatatgcaaacgtgctgttccrcacaagtgcatgctatgccatagatgttgctaaggtgtatttatcacactttctattttattttgtacattagtattaaaaccaa

SEQ ID NO: 58832 - DNA, 574 bp, Chicken  19866894316383_2
tgtgcattttatcataaaatattcacatattctgtgacatctgcatagtacaagggagtataatattaaacagtgttcggaatgyaattgaaaacatagaagagcaaatagaaatgttacacagtatttcatactgtgcttataaaattattatgggaatataaaaagctcataacactaacatcctgaaatatagttatagacttttttggggtacagattgcatattccaatttaatatccattacatttgtataataatgcatattgtaaatacacatatgcaaacgtgctgttccrcacaagtgcatgctatgccatagatgttgctaaggtgtatttatcacactttctattttattttgtacattagtattaaaaccaagaaaacaggtatattttcactctaaattcataactatttgaatggataaacaggaacgatgtgacatagagggaattttattctggaaagctgtcaggattaagctctctgactgactacaaattcaaaggcgaaacttcgaacagtgggtggtgtatgagcacagaggcaaaccagcatagagctcag

SEQ ID NO: 58833 - DNA, 600 bp, Chicken  19866894316390_1
aatttagaaggaaaaaaggtgtaaaatcttcctttagccgtgtgaccatgtactaattgcatgtcatgtgtcaaaataatgcaacccactttgcctaaagcaattagacatacagaactctattaatgaagcactgtctgtcactaaaaatgttttcagagctatagttgaagattaaaatattaacttctcaaatatttatgatagttactgacagcatttcaaaatgttacttttaacaaaagtattttattcagctccagtttttaatttggattttatattcaaagacattattawcatatgggagtcacgtgaaatttctatgatctccactgagacttctttacagaggtacatcagctccttgaagcatasagcacctttttctgttgtaatataaactctttcagaacaacaacaaaaagtttaaaacttgtcctttcttcaaaagtccacaaagaaaaaaagagagaaacaaaaaaaaagagagagagaagggggaatttcttgttgtactccatccatgtcctgaacttgagagaagaaaatggctcttcctgtcaatctagcatttggtgttctccttcctcttacagt

SEQ ID NO: 58834 - DNA, 574 bp, Chicken  19866894316390_2
atgcaacccactttgcctaaagcaattagacatacagaactctattaatgaagcactgtctgtcactaaaaatgttttcagagctatagttgaagattaaaatattaacttctcaaatatttatgatagttactgacagcatttcaaaatgttacttttaacaaaagtattttattcagctccagtttttaatttggattttatattcaaagacattattawcatatgggagtcacgtgaaatttctatgatctccactgagacttctttacagaggtacatcagctccttgaagcatasagcacctttttctgttgtaatataaactctttcagaacaacaacaaaaagtttaaaacttgtcctttcttcaaaagtccacaaagaaaaaaagagagaaacaaaaaaaaagagagagagaagggggaatttcttgttgtactccatccatgtcctgaacttgagagaagaaaatggctcttcctgtcaatctagcatttggtgttctccttcctcttacagtcattggtcatctgtgttcatatgtatacccttatgaagtaggaaggcaggga

SEQ ID NO: 58835 - DNA, 600 bp, Chicken  19866894316393_1
acatcaacgccgaccattttaagggtaaatgcaaagtgaattaagtgtaaatataactgtatatttactctttgcttctgatctcaggttctgttatcaaagtctggatggaattccctttcctaccatcagtggctgagatccaccactaactgccatctgccttctcatttcctccaagtctagtaactacaacacatacatggctaggcttgtttgctctgctagttcatttacctttacccaatcgttgccaaatcaaacaccctttttactcacatgaagttaaaagagtgacaygagtgagaagaggaaaggaacagtttttctcactttgagtttgtattttaggtgagacatatttttgcagcgttgcacgtttagcagtgattttacttttaaactatctcaaaacaagatcatttcaatgcagtttgaagtagtactgaaaaatcattagctgagtctctgaatgaagggaaacatttcagaaattgtactgctggcaagagrtgacgcagaraacttcattcctaagtatttgggagagaggactggggaatgcatttcacattgaccacacacttcaggcagtaatta

SEQ ID NO: 58836 - DNA, 476 bp, Chicken  19866894316393_2
tgtttgctctgctagttcatttacctttacccaatcgttgccaaatcaaacaccctttttactcacatgaagttaaaagagtgacaygagtgagaagaggaaaggaacagtttttctcactttgagtttgtattttaggtgagacatatttttgcagcgttgcacgtttagcagtgattttacttttaaactatctcaaaacaagatcatttcaatgcagtttgaagtagtactgaaaaatcattagctgagtctctgaatgaagggaaacatttcagaaattgtactgctggcaagagrtgacgcagaraacttcattcctaagtatttgggagagaggactggggaatgcatttcacattgaccacacacttcaggcagtaattaaacagcaggaaaacaaaagcagtaaatcatccccactatgactggcactgctgcagcggactacatcagttctggaaatacagcagggc

SEQ ID NO: 58837 - DNA, 466 bp, Chicken  19866894316393_3
gctagttcatttacctttacccaatcgttgccaaatcaaacaccctttttactcacatgaagttaaaagagtgacaygagtgagaagaggaaaggaacagtttttctcactttgagtttgtattttaggtgagacatatttttgcagcgttgcacgtttagcagtgattttacttttaaactatctcaaaacaagatcatttcaatgcagtttgaagtagtactgaaaaatcattagctgagtctctgaatgaagggaaacatttcagaaattgtactgctggcaagagrtgacgcagaraacttcattcctaagtatttgggagagaggactggggaatgcatttcacattgaccacacacttcaggcagtaattaaacagcaggaaaacaaaagcagtaaatcatccccactatgactggcactgctgcagcggactacatcagttctggaaatacagcagggc

SEQ ID NO: 58838 - DNA, 600 bp, Chicken  19866894316398_1
ctttgttcctgctaaacaaacacagaactttataggtttgcagtggtttcaggcaatacggtctctgctcctaaatggaatacggtggaggtttcacgtctgtggttaaactgactgtgaagagagggaaagaagtataaaagaagaagaaagcaagccacatctaactgtggagagaggagaacagctctgcctagatattcactggggtttgaactaaggggagaaaaaaacagggcagattgcaccccattggaagatgaaaggaatgggaaataaggaaggatgcagagaaaaaamaaaaaaacacyragcatttaaggaaagggttttgattactcatgaagaagcagcggaataaaactaaggaagtgcagtggcagcacacagaggcaggagtwtgaatttttggtagcagaaggggtctttgatgtgccacaagtggccaaagcaccaagcagaaaccaggaccttgggcaggaaacatcagctgagcaaaaagcacagaggttgtttcaatccaagctggaatatgtggtcatgtgagcagcagaggggatagaaagacygcagaaacttaggataaaaagcagaatgtct

SEQ ID NO: 58839 - DNA, 600 bp, Chicken  19866894316398_2
ctaaacaaacacagaactttataggtttgcagtggtttcaggcaatacggtctctgctcctaaatggaatacggtggaggtttcacgtctgtggttaaactgactgtgaagagagggaaagaagtataaaagaagaagaaagcaagccacatctaactgtggagagaggagaacagctctgcctagatattcactggggtttgaactaaggggagaaaaaaacagggcagattgcaccccattggaagatgaaaggaatgggaaataaggaaggatgcagagaaaaaamaaaaaaacacyragcatttaaggaaagggttttgattactcatgaagaagcagcggaataaaactaaggaagtgcagtggcagcacacagaggcaggagtwtgaatttttggtagcagaaggggtctttgatgtgccacaagtggccaaagcaccaagcagaaaccaggaccttgggcaggaaacatcagctgagcaaaaagcacagaggttgtttcaatccaagctggaatatgtggtcatgtgagcagcagaggggatagaaagacygcagaaacttaggataaaaagcagaatgtctcagggaggttc

SEQ ID NO: 58840 - DNA, 600 bp, Chicken  19866894316398_3
taaacaaacacagaactttataggtttgcagtggtttcaggcaatacggtctctgctcctaaatggaatacggtggaggtttcacgtctgtggttaaactgactgtgaagagagggaaagaagtataaaagaagaagaaagcaagccacatctaactgtggagagaggagaacagctctgcctagatattcactggggtttgaactaaggggagaaaaaaacagggcagattgcaccccattggaagatgaaaggaatgggaaataaggaaggatgcagagaaaaaamaaaaaaacacyragcatttaaggaaagggttttgattactcatgaagaagcagcggaataaaactaaggaagtgcagtggcagcacacagaggcaggagtwtgaatttttggtagcagaaggggtctttgatgtgccacaagtggccaaagcaccaagcagaaaccaggaccttgggcaggaaacatcagctgagcaaaaagcacagaggttgtttcaatccaagctggaatatgtggtcatgtgagcagcagaggggatagaaagacygcagaaacttaggataaaaagcagaatgtctcagggaggttca

SEQ ID NO: 58841 - DNA, 600 bp, Chicken  19866894316398_4
gtggttaaactgactgtgaagagagggaaagaagtataaaagaagaagaaagcaagccacatctaactgtggagagaggagaacagctctgcctagatattcactggggtttgaactaaggggagaaaaaaacagggcagattgcaccccattggaagatgaaaggaatgggaaataaggaaggatgcagagaaaaaamaaaaaaacacyragcatttaaggaaagggttttgattactcatgaagaagcagcggaataaaactaaggaagtgcagtggcagcacacagaggcaggagtwtgaatttttggtagcagaaggggtctttgatgtgccacaagtggccaaagcaccaagcagaaaccaggaccttgggcaggaaacatcagctgagcaaaaagcacagaggttgtttcaatccaagctggaatatgtggtcatgtgagcagcagaggggatagaaagacygcagaaacttaggataaaaagcagaatgtctcagggaggttcagtggtgggtataaaatggggaactgtttatgttcatcataatgaaacctcaacaatagaaaaagcaaaaaggtttgtcagtgaccatgg

SEQ ID NO: 58842 - DNA, 600 bp, Chicken  19866894316398_5
tgggaaataaggaaggatgcagagaaaaaamaaaaaaacacyragcatttaaggaaagggttttgattactcatgaagaagcagcggaataaaactaaggaagtgcagtggcagcacacagaggcaggagtwtgaatttttggtagcagaaggggtctttgatgtgccacaagtggccaaagcaccaagcagaaaccaggaccttgggcaggaaacatcagctgagcaaaaagcacagaggttgtttcaatccaagctggaatatgtggtcatgtgagcagcagaggggatagaaagacygcagaaacttaggataaaaagcagaatgtctcagggaggttcagtggtgggtataaaatggggaactgtttatgttcatcataatgaaacctcaacaatagaaaaagcaaaaaggtttgtcagtgaccatgggaagagatgttaaagaaatgtggggacatcacattacctatctcattactcagcctagcccacaaagccttgctgcagataaaaggtaatgctggcaagggcagaggtgccactgactcagtggtgcaggaacccaccagatgagtgcttacctacctaaagctgctc

SEQ ID NO: 58843 - DNA, 516 bp, Chicken  19866894316399_1
aatagggaagaaaagaaagtgcccacctggttcaagcagcataaacagcagcagcagcagcaagtcaaacaaagttgccaaattgccatcggtgaataacgttcacgcaaaacacactggtgcaatcccagggacacaaggactgatgaacaattctcttcttcatcaggtaggaacttttgtcttgaagtaagccagtacgaacgcgtccctttgtatgctgatatttagatgtgctctcttaattattaatagccaatttcagatgcttcaaggaaaggacagttctcttgcttgttygtactctttgagtcttttttatagtacctttgtgcaggatttttatatacactgtagtgtaaagtgtgagtttattcatgtgcttttgaagccaccttaaacacaacatccggggtccccacagatgcgctccctgtgaatcgctctcagatggaaatcaattcttgcatttaaaaacaaataataattgttataaaatcttgcagccagccatgg

SEQ ID NO: 58844 - DNA, 599 bp, Chicken  19866894316406_1
  misc_feature (1)..(150): n is any nucleotide
nnnnnnnnnnnnnnnnnnnnnnnnnnnnnnnnnnnnnnnnnnnnnnnnnnnnnnnnnnnnnnnnnnnnnnnnnnnnnnnnnnnnnnnnnnnnnnnnnnnnnnnnnnnnnnnnnnnnnnnnnnnnnnnnnnnnnnnnnnnnnnnnnnnnnnatattcatgtgtacctagaggacccgatgtatggaagagataaatgatgtgttcaacgttacacgggagcctgaggtggaagaaagcctgagtatgtctgagcatgcctggctagtgctgcggctactgggctgttaggaaggatactgmctgcttagaagggctgctgcgtcagcctccgccagcggccctttgactcttcttgtggaatcatctataattttggttcttgtggaagtttctcagttacagaactgtcattcctcttggtagttttcatacatccagaagacatggctcccgcctagctacatttttcttttctttgtaccaatcccttgttcctgttttcaggtaccatgctatgaacagcgtgatatctgccactgaaatatttacgtgtgctgtttgcagtgttttgtctttcctcagtgttcctgtggaccttc

SEQ ID NO: 58845 - DNA, 600 bp, Chicken  19866894316406_2
tttcatttcatacaattgtccttagaaaagtaagtctataaatgaggaaaaaaaaaaatacaaagtgtagccaagttagaaggaaaaagttttaactagcttttttgtcaagcttcaaacaatgctttctctgattctgactttctctttctggccagtgcctgtttacattcactcatcattaactatatgtatttatcaggctttgcagttatcgctggcctatttgatacttctctttttaaacaaaaacaccctcagaaattgataccgcagccaaaatggtattcataaaaaatktaagaaagacctctcagcgttaaaaaagaaaaaaagaaattttttttttgaaggagctgaaaagaaaaaggtcttggaattacaagcagttagacttgggtttttgcgtaatgactcctggtatcccactgtgagaagactttccccagcttctcgtctgcattcttcctctttccctgcgggagaatgagttggatttgtctgccatattcacagcaatcgaggtgatccaggttgaaagaaaatcaataagatgtgtccatttatgcctcacaaaggaagaaaggtctaaagaacaga

SEQ ID NO: 58846 - DNA, 600 bp, Chicken  19866894316407_1
attttttaaatggaaagttgtaattctcccaacagaataggagagctttaaagaactgagctgcccgtatattaacaataagcatcaagtacagctgtacagtatctcatgatattttagctctgtcaggtacgttctaggacaggccgtgcattgcattcgggctgtgtgtacaagcaggtatagtggcagtaatgttttgcatatcacagctttctgaaaaagatcaaaatcctaagcagatctttgaagtcttttctgggacagacgattgaacaaagggcagtggtgaagaagacrcacgcttacacaatctgtcttgtggtggcatcaggactgcacccaacacatgcctcccttgtgatagagcayagccctctgttttcccagtaagttgtttacagcccggtgtgaatttccctcttgggaattccattaaagttatcataaaaatagttgtctttgcattcatattcctcagcctcacctcccttgtcagtatcacttcagaatatagactccccagctcctcttttcyttctttctctctcycctggctccacactgccggggccatttcagccttttctattgattcca

SEQ ID NO: 58847 - DNA, 600 bp, Chicken  19866894316407_2
taacaataagcatcaagtacagctgtacagtatctcatgatattttagctctgtcaggtacgttctaggacaggccgtgcattgcattcgggctgtgtgtacaagcaggtatagtggcagtaatgttttgcatatcacagctttctgaaaaagatcaaaatcctaagcagatctttgaagtcttttctgggacagacgattgaacaaagggcagtggtgaagaagacrcacgcttacacaatctgtcttgtggtggcatcaggactgcacccaacacatgcctcccttgtgatagagcayagccctctgttttcccagtaagttgtttacagcccggtgtgaatttccctcttgggaattccattaaagttatcataaaaatagttgtctttgcattcatattcctcagcctcacctcccttgtcagtatcacttcagaatatagactccccagctcctcttttcyttctttctctctcycctggctccacactgccggggccatttcagccttttctattgattccatttggtcttgagtgttattttctgcctctaagagcttaaactccttcaagtgcgcagcgatttaagcaactt

SEQ ID NO: 58848 - DNA, 600 bp, Chicken  19866894316407_3
gcagatctttgaagtcttttctgggacagacgattgaacaaagggcagtggtgaagaagacrcacgcttacacaatctgtcttgtggtggcatcaggactgcacccaacacatgcctcccttgtgatagagcayagccctctgttttcccagtaagttgtttacagcccggtgtgaatttccctcttgggaattccattaaagttatcataaaaatagttgtctttgcattcatattcctcagcctcacctcccttgtcagtatcacttcagaatatagactccccagctcctcttttcyttctttctctctcycctggctccacactgccggggccatttcagccttttctattgattccatttggtcttgagtgttattttctgcctctaagagcttaaactccttcaagtgcgcagcgatttaagcaacttcatagcctgtttgtatctaggggttagccttgggctactgaatttctctttcctgattccatacaacagctgagttttacccacttcagaggataagtacattaagaacaactaagactgattcccaaagtaatctgtagcccgctttcatgtctgcttgaggcag

SEQ ID NO: 58849 - DNA, 600 bp, Chicken  19866894316407_4
tcttttctgggacagacgattgaacaaagggcagtggtgaagaagacrcacgcttacacaatctgtcttgtggtggcatcaggactgcacccaacacatgcctcccttgtgatagagcayagccctctgttttcccagtaagttgtttacagcccggtgtgaatttccctcttgggaattccattaaagttatcataaaaatagttgtctttgcattcatattcctcagcctcacctcccttgtcagtatcacttcagaatatagactccccagctcctcttttcyttctttctctctcycctggctccacactgccggggccatttcagccttttctattgattccatttggtcttgagtgttattttctgcctctaagagcttaaactccttcaagtgcgcagcgatttaagcaacttcatagcctgtttgtatctaggggttagccttgggctactgaatttctctttcctgattccatacaacagctgagttttacccacttcagaggataagtacattaagaacaactaagactgattcccaaagtaatctgtagcccgctttcatgtctgcttgaggcagatcccttccctcct

SEQ ID NO: 58850 - DNA, 600 bp, Chicken  19866894316416_1
cgctgctgctctttgtccttaccttttcctctccatcccttcgctgctgactcttcctgcatggacctttatattggatttttgctaacagcagctcaaccttcttggtattggaaatgggcggagtttaagtcagtggcttgtagaagctcctttaaaagaattgcctttgtttcttcttttatgcttctgcatcccgtgttttctttcctatcaactatgatctctgtgcaacaccagtcactgttcagcattcagagcaccccactgaactactgatctctaaatacatcactgtgygtactagaagattgcatttaaaggaggcagtgtctgttccagtagctgagtgttccctcttggatcttcccttcctccaggcctagctcagtcctgctagaacatgagatcaccctggatgggacgatagtcagcatggccttcgatgactctttagaaatgggaattgtgggcaccactgcaggaacgctgtggtacatcaactggaaggagagcacaagcatccggctcatcagtggccacaaaagcaaggtttgagggacggggacggtgtactttgccatgcggagcagcgggtgt

SEQ ID NO: 58851 - DNA, 599 bp, Chicken  19866894316423_1
  misc_feature (1)..(158): n is any nucleotide
nnnnnnnnnnnnnnnnnnnnnnnnnnnnnnnnnnnnnnnnnnnnnnnnnnnnnnnnnnnnnnnnnnnnnnnnnnnnnnnnnnnnnnnnnnnnnnnnnnnnnnnnnnnnnnnnnnnnnnnnnnnnnnnnnnnnnnnnnnnnnnnnnnnnnnnnnnnnnnctgggagtgaggatgcagctatgatatgaatcctggtacagaaactgtgaagttctccaatatcccacaagtttaaagttttgctcttactttcattccattttgtttcatcagtctggcagagctgaaagtgttccttaawaagcttcaggtattgcacaaatgtcacaaagctgtgatcatacctcctgaatttcaaatgattatgtgtttttttctctccataacaggtaagatgagattcagcctctttccttttctctttcccaaacagcaccatccctcaagtctttttgataaagagtattgctaaatagttaatgaagaaattcacctggaaaaaaaaattctagttctaggtgcactttcacctgaactcattctgctccactggacaatgcatgccctattagttaatggctccgggttttagaataaggg

SEQ ID NO: 58852 - DNA, 600 bp, Chicken  19866894316427_1
ccttagacaggaacaagaagcagcccttgcagggagacacagcactgagcaaagcccgcagagaaatcagaaataaggcacacatctcactcgggttacttgagcttctcctacagaaatatcgtagcataggtgacctttaattcctgagcacagccctccctctatgtttgtgtgctgcaggaacctgcaaatggctccagttcttctggcctaacaacacaagccctttgaagagcattggactgtcaggaagagcagagcagtcagctctggagtgccgtggcaggcctctgggaygcagccttactgctctgcttcacacttcactctttttaagccagttagttgcagttgccagacagaagctccaaacacaggctggcaggggaggacaaggtacttaccccagacctctcttgcatctgggattctgaccttcrttgtcmagagcttcagccattccagagttgttgctccccagccccagcccctccgtccagccctgctgctccagaaccttcctgccaaagccctgagagagcagaaaaactcgtaaggatgttggacaaagcccactctcatcttctcagaacttcc

SEQ ID NO: 58853 - DNA, 600 bp, Chicken  19866894316427_2
ttcctgagcacagccctccctctatgtttgtgtgctgcaggaacctgcaaatggctccagttcttctggcctaacaacacaagccctttgaagagcattggactgtcaggaagagcagagcagtcagctctggagtgccgtggcaggcctctgggaygcagccttactgctctgcttcacacttcactctttttaagccagttagttgcagttgccagacagaagctccaaacacaggctggcaggggaggacaaggtacttaccccagacctctcttgcatctgggattctgaccttcrttgtcmagagcttcagccattccagagttgttgctccccagccccagcccctccgtccagccctgctgctccagaaccttcctgccaaagccctgagagagcagaaaaactcgtaaggatgttggacaaagcccactctcatcttctcagaacttccctctctaaggcccacatattttgaacgtcaccagtgcagcctttccccatccactcggtatccaaagctcaccttggtgtatctctcaaaggtgccaatttgctgccttgaagtagacccatcctccaaaccatcttcgaagt

SEQ ID NO: 58854 - DNA, 600 bp, Chicken  19866894316427_3
agcacagccctccctctatgtttgtgtgctgcaggaacctgcaaatggctccagttcttctggcctaacaacacaagccctttgaagagcattggactgtcaggaagagcagagcagtcagctctggagtgccgtggcaggcctctgggaygcagccttactgctctgcttcacacttcactctttttaagccagttagttgcagttgccagacagaagctccaaacacaggctggcaggggaggacaaggtacttaccccagacctctcttgcatctgggattctgaccttcrttgtcmagagcttcagccattccagagttgttgctccccagccccagcccctccgtccagccctgctgctccagaaccttcctgccaaagccctgagagagcagaaaaactcgtaaggatgttggacaaagcccactctcatcttctcagaacttccctctctaaggcccacatattttgaacgtcaccagtgcagcctttccccatccactcggtatccaaagctcaccttggtgtatctctcaaaggtgccaatttgctgccttgaagtagacccatcctccaaaccatcttcgaagtctcttt

SEQ ID NO: 58855 - DNA, 600 bp, Chicken  19866894316439_1
gtatttatcatggtatgacttgaagacctaacgttcaattcaagagcttcctgtccaacaaaagacagaagaaacaattgctaagctatctcaaggactcacaaaaaggcaggtgcacactgccttgcagcttctagaacaggctacagtacaagcatccccaaagccatctctctgctttattggtgttgcactggggttgacctcagcaaggtggccctgcttagcagtgtcactaatgtcacgcatgcacacaacactgggagccctgtgctatttgttactttattccaccaaatyayaatctgagatctgacatggcaaggttagaagataacctaacaatattgaaagttgatttttaatagcaacgatgttccaaatagttctcaatgtatatttttcattgcatatctgctgctacaaaggataaatgaaaaagaaaaggaaaacacgaaacacagaactgcatgtttaggaatggggaagtccacaagggaacaattagtaccgaagtaagctgtgctgacaatgctggagaacaaaatcctcgatccacataacagaaacaacttgatactataagctccccaatgctac

SEQ ID NO: 58856 - DNA, 600 bp, Chicken  19866894316439_2
atttatcatggtatgacttgaagacctaacgttcaattcaagagcttcctgtccaacaaaagacagaagaaacaattgctaagctatctcaaggactcacaaaaaggcaggtgcacactgccttgcagcttctagaacaggctacagtacaagcatccccaaagccatctctctgctttattggtgttgcactggggttgacctcagcaaggtggccctgcttagcagtgtcactaatgtcacgcatgcacacaacactgggagccctgtgctatttgttactttattccaccaaatyayaatctgagatctgacatggcaaggttagaagataacctaacaatattgaaagttgatttttaatagcaacgatgttccaaatagttctcaatgtatatttttcattgcatatctgctgctacaaaggataaatgaaaaagaaaaggaaaacacgaaacacagaactgcatgtttaggaatggggaagtccacaagggaacaattagtaccgaagtaagctgtgctgacaatgctggagaacaaaatcctcgatccacataacagaaacaacttgatactataagctccccaatgctactg

SEQ ID NO: 58857 - DNA, 600 bp, Chicken  19866894316443_1
gtttttgtagtttggggctataaactattgtagttacatttcttagaagggaggaagtaaggttggataaagacctaatggtatggataggatgaggggtgctgaagtgagctttgctgttttggatgaaccaaggtatatttcaagctaattccaactgcttagttgggtatataaattgtggcacatccttttatttacctttgttgtgatattgtgacataatgtgaattgttttcaaattagcaaattagcattgacagtgcttatgtagcgtgttacattaacaaggtggtttgkttttttttttgtttgtttgtttgtttgtcttcctgtttccctaacatgcttatttagggttatctggtcctcctggtgctgggaaatcaactttcattgaatgctttgggaaaatgcttacagaaaggggacacaaagtgtcagtgctggctgtagacccctcctctagtacaagtggtggtaagtaggtcttaatgtttcagtcaggtttctaatatattttgaaatgtataaatacctctttggggcaaatgcaggataagttagggtgcctataaggtattaaaaactaacattatg

SEQ ID NO: 58858 - DNA, 599 bp, Chicken  19866894316445_1
  misc_feature (1)..(96): n is any nucleotide
nnnnnnnnnnnnnnnnnnnnnnnnnnnnnnnnnnnnnnnnnnnnnnnnnnnnnnnnnnnnnnnnnnnnnnnnnnnnnnnnnnnnnnnnnnnnnnnnctttttgctaaacacattatcattcttcctgtccgtttcatgtgtgttttgcacagaaaaaaaccccacataatatatacactatatccatttttttccttaatcccatctatgttgtcagaattcttggctttctccatacacaggcatctttatatcctcattcttttcactactcattattagttggcttgttttgtctaytttcctcaaattttacttcaagtttatttaagatggaatcycacggtgattatttttttggaaaccaagacctactgcagcactaacccacctgattcctgtccctggcatttgcgtagcggaatcgctggatgtaatagaagaccagccatgccagagagatgatcatcagcacaatgaaggagatggagacaaacaccacggaggtccggctgacgtacttctgcaggttgcgcgtcccaattgttatatacatcatcacagtgatgttcctctccaggaggctcactatctctttt

SEQ ID NO: 58859 - DNA, 599 bp, Chicken  19866894316445_2
  misc_feature (1)..(55): n is any nucleotide
nnnnnnnnnnnnnnnnnnnnnnnnnnnnnnnnnnnnnnnnnnnnnnnnnnnnnnnctttttgctaaacacattatcattcttcctgtccgtttcatgtgtgttttgcacagaaaaaaaccccacataatatatacactatatccatttttttccttaatcccatctatgttgtcagaattcttggctttctccatacacaggcatctttatatcctcattcttttcactactcattattagttggcttgttttgtctaytttcctcaaattttacttcaagtttatttaagatggaatcycacggtgattatttttttggaaaccaagacctactgcagcactaacccacctgattcctgtccctggcatttgcgtagcggaatcgctggatgtaatagaagaccagccatgccagagagatgatcatcagcacaatgaaggagatggagacaaacaccacggaggtccggctgacgtacttctgcaggttgcgcgtcccaattgttatatacatcatcacagtgatgttcctctccaggaggctcactatctcttttcctttgggttcaggaatcattattgctacaacatcatctag

SEQ ID NO: 58860 - DNA, 600 bp, Chicken  19866894316446_1
taggaggtcagtgctgggcaagtctttctgtgtggataggcttctgaagtacaagatgtcacaatagggtgaaatagccacaagagccacaggaataaaccatctttttgtctgtgatttcttttttaacacacttggacacttcatgctcacctcagtcctggtttaggctgacactgttgacccatgttgtcagggcaccaagaccaattgctcagcgtgtctgatgctgggttgttggctcagccgtctcacattgggcagactttctatgtggcatcagcatctgtgtgtgaagtkttcagtgaaaagcaaatgttttcatgttctattgcactttactatcagtgctacattaaaaaccctgtcttgccagttcataaggcaccaagccagtcactttgatttcttttttttccccacatctaaaaccaaatagcatttgttggttgaattactgttacctttgagcttcccttcccaaatgatttgcagggatgggaagttggcaacaactgtacaacagctataagtctgtgctgctttgttttccagtgcttacctaagccattaaagcaagactgagtagtcaaaatctga

SEQ ID NO: 58861 - DNA, 599 bp, Chicken  19866894316447_1
  misc_feature (1)..(33): n is any nucleotide
nnnnnnnnnnnnnnnnnnnnnnnnnnnnnnnnnctgatcccaaaagggaagccttttcttgttgggcagagctccgacttgtgttgcaaaatcatctccgggtggtaagaggcacccgtgcccaccggaaacgaaacctctttctcctgctctcctagctgcaatttcaccggtggatttgctaggactaacttcccaggttcccattcttcagcttttgcaatcagagacggatttgtgcaccgctgtctcatttccctgcagttggcacagtgcttttggtccagcagggctggaagyctccccctccacgggctcttccaggccccccctacaattttctgaggggacctctgtgtcctagggctctactctacaccgcaacaggaacagctgttgctcttcccaatggccttactatctctgttcctcaatccatttttttcctttctcttgctcagctctctttggatctaccaccctgttccaccttgctcatcttggccttcctcagcctgcatccttctgcagcttttccccaaagtctcatcactacataaacaactagcatgacatttcagtttcacctcctcctctcc

SEQ ID NO: 58862 - DNA, 600 bp, Chicken  19866894316457_1
tgattctttaatattatttttgtgtttcattttaatcattgtgttatcttttcattatcaatacaaaatgaaactttgaatgtaaccattagaggcatgattggtatggagtctgttggtctctgaatttctttaaaacagacactttcttgcaaatgagaagagtttgaaatcctctgtttgactaaaaatgtcagcataatattttagcagcttgttaacaggcctgcagacaggtactaattacagcccaatttacaatacatcagtttagcgctattgatctgtttaaaaaaagaraaaaaaaagaaaaaagaaagaaaaaaaaagtaaactgagcaaaaaccagtcttgttgctgaaggaatgatgtattgattccatctgacagtgctttgtctacagatcaatgtagatgtacaggacagaccacaagaatgagacagggtcgccaaaggtcagcaaaaagaacaggatgtccaagattattggatacaatgaaatgaacatatcataaagtagatctgattggtatttggaaaaggaatccaccagtagtgggttttatcttatgagagaggaataatgtgttctaatttat

SEQ ID NO: 58863 - DNA, 599 bp, Chicken  19866894316463_1
  misc_feature (1)..(125): n is any nucleotide
nnnnnnnnnnnnnnnnnnnnnnnnnnnnnnnnnnnnnnnnnnnnnnnnnnnnnnnnnnnnnnnnnnnnnnnnnnnnnnnnnnnnnnnnnnnnnnnnnnnnnnnnnnnnnnnnnnnnnnnnnnnnncaggaagatgagcacaacagacagggagaacagggacggcctatggggagagctgagcgctgcgcttggcaaagcgactcttcctctcctcaagcagaaccagccagggtccaggctggactgacagaaacaacgcagccaaaccataaggataaagacagcacagccagaggartgccctgccatcagcctgtccgccgagctttaaataccccaccagagtaaaggacgcaacggctatgcttggaagagttcggtccccttacggaagctgagcaccaggcgaggcagaaggaggaagtttttgggacgctccgcacgcacacaggacagaagcctccagcccagcgcccctctgcgccgctccgtacccgcggatgctctgaagcrcacacagctcaggagacccgcaggaccggcccgccccgcgccctcagcaacaggcggcgatcagccgctcctaccgacagcgtc

SEQ ID NO: 58864 - DNA, 600 bp, Chicken  19866894316463_2
caagcagaaccagccagggtccaggctggactgacagaaacaacgcagccaaaccataaggataaagacagcacagccagaggartgccctgccatcagcctgtccgccgagctttaaataccccaccagagtaaaggacgcaacggctatgcttggaagagttcggtccccttacggaagctgagcaccaggcgaggcagaaggaggaagtttttgggacgctccgcacgcacacaggacagaagcctccagcccagcgcccctctgcgccgctccgtacccgcggatgctctgaagcrcacacagctcaggagacccgcaggaccggcccgccccgcgccctcagcaacaggcggcgatcagccgctcctaccgacagcgtcagcccgggcacgaaaaacgccccgttctcttttaaaaaaagcagagccgggttctgaactaacggccctcggcagcccgcctccacagctgacagcccgggccgccgccagccccgccccgcagcacctctgccccggcagctgcccgcggccccgccgcctcacccgcggactcgccggtgttgatccagtcggggttggccaggctggcgatgg

SEQ ID NO: 58865 - DNA, 600 bp, Chicken  19866894316466_1
actacatttagatataacaagccctccctcctcccccagccgagtcaggcagacccacagctaccaaccatgcccccaaaggcacccagggcagagctgagggagaaatagcatgcaggaggaaggagcctacacatcctgcatctgaagtgctcctcagcacttttacccacatttaaaagtggatggtaacaaatttgagggggtgcagaagtgccataaaaatgactgaaggatcagaaagctgccttacaaagagaggcttagggaattcagcacgtttggtttttcagagagatkgagaagygaggtgattacaggatgtaagtacttccccaaggtaaaacaccgcgaggtggggaggagaggagtacaaagaattgttggggcagaaaaacagggcccaatcgctgcagtgcgagactaaccacagaaaaatacattaggccttaccctgaaacagtgaaaaacttcaaaggtcattcataaaggatcaaacaggacgctccatttcttgaggatatgttcaaatcagaattggattcctctctggaagaaactgactggcaaaactttgaaacttaactggctgatgacaaa

SEQ ID NO: 58866 - DNA, 600 bp, Chicken  19866894316466_2
ttagatataacaagccctccctcctcccccagccgagtcaggcagacccacagctaccaaccatgcccccaaaggcacccagggcagagctgagggagaaatagcatgcaggaggaaggagcctacacatcctgcatctgaagtgctcctcagcacttttacccacatttaaaagtggatggtaacaaatttgagggggtgcagaagtgccataaaaatgactgaaggatcagaaagctgccttacaaagagaggcttagggaattcagcacgtttggtttttcagagagatkgagaagygaggtgattacaggatgtaagtacttccccaaggtaaaacaccgcgaggtggggaggagaggagtacaaagaattgttggggcagaaaaacagggcccaatcgctgcagtgcgagactaaccacagaaaaatacattaggccttaccctgaaacagtgaaaaacttcaaaggtcattcataaaggatcaaacaggacgctccatttcttgaggatatgttcaaatcagaattggattcctctctggaagaaactgactggcaaaactttgaaacttaactggctgatgacaaacaggtca

SEQ ID NO: 58867 - DNA, 600 bp, Chicken  19866894316469_1
caatttgctacagatggatcacctttttttggggctttataacaaagctgttggatatcagtgtaatattatttaaagttttaaaaaaaatctgatgcttcagaattaggaaaaaaaacaaatttccattttcataattataaagttcctctttgacaaactatagtagaatttgatgctattgaaatacattaacactgaaatgtgatatcagaattatttaaagctatctgatataagctagcagccaaaggtcattctgaccagtcagtcttggctgctcttgaggtaagcctttcwtggcagttacctgattgtgattgctctgtgtatactactgtagtagcatggatttactcacaaactgttgaagttataacactagagaaaaaattgcgctctcacgttgtctttttctaacctaaatttggtttgaaacacagactgccatgccacagtggttccttctcatgtctttgagctgctacgaagttctgctgtgcaattagcctcaacagctagagtattttctttgcattaataatgcaagaagaataacataaactaagccttctgcaagcatgcccagaaacaagggca

SEQ ID NO: 58868 - DNA, 600 bp, Chicken  19866894316475_1
aaaacaaaaggggaaataggcacaaacaaccctaaagatccttgatttagaaaggagtatcctgctcctatcagtatgtaaacagaactgatatcaatattcacatttcacacgatttttaaaaacactgatgtatgcttgctttcaattaactctatttgatgggaaaaattacatatctctgtaaagaagaaaaaaaagatttgttattgttggatgtagttgattttatgaatatattactacttcagaatgatataaagagagcagattgactgtaactttttaagcttaaagatwtttttttcagccactagggagttacggcttactattttggaaaccaaacagaactattctcagctttgtgatcattgtgagtatatgctaggcttcataatacattgatgagaaagtaatcacattacctccacagaaatgaaaccttctttatttttgacwatgataccatttaagtaatctctgcatctggaaatgatctcttgaagaccctaaaggtatagatagaaatgactcccattgtttagcaagcatactttggcagagggaatgaatgtgtaatcaaaaatggcataaaat

SEQ ID NO: 58869 - DNA, 600 bp, Chicken  19866894316475_2
tgggaaaaattacatatctctgtaaagaagaaaaaaaagatttgttattgttggatgtagttgattttatgaatatattactacttcagaatgatataaagagagcagattgactgtaactttttaagcttaaagatwtttttttcagccactagggagttacggcttactattttggaaaccaaacagaactattctcagctttgtgatcattgtgagtatatgctaggcttcataatacattgatgagaaagtaatcacattacctccacagaaatgaaaccttctttatttttgacwatgataccatttaagtaatctctgcatctggaaatgatctcttgaagaccctaaaggtatagatagaaatgactcccattgtttagcaagcatactttggcagagggaatgaatgtgtaatcaaaaatggcataaaatattccatcagcagtaaatgagactaaaaaaacagaacgggatgttggtgtttttgttgttttttttttaattacttttatatgtgtcacagttttatgatttctgttattggtattccacatcataatgtcatgcagtgcactgagagttaaaaagttaatg

SEQ ID NO: 58870 - DNA, 600 bp, Chicken  19866894316476_1
aatctgattatgggctttatccctgacacttctgatttaccagagaagagggaaaactacaagagacaacattctgtttttcacacctgagtacagataaagcttgaggcattataatgttctttgatatgtgtgcctattttatattgcaaatgtgatttttcttgctactgtgatatcctttaccatcatagcaccccttgctttcagctcttccctttctgccagtaccacagggaggcttttgagtcacagccttcattttactcactgagctcactaaaatagcgttatccatgstctcaaaagatgacaaaacacaaccaaaaacaaacaagcaaataaaaaaaaaccaacccagcctggtttgcagcagaataattcaaagaatataaatggcaaaaataggttaaccatcctaataagtatgctgacactgaacataaatattggctttttctctactaatttaagtttactattttccttttctttttctggtatgtggagaggacatccctgattagagtgaaatacattcttcttattgattagccttcattcattaaagattaagcacacacacaaaagtaagcccaa

SEQ ID NO: 58871 - DNA, 600 bp, Chicken  19866894316477_1
ttactttaatcatagcctgtcaatatttttaatatagcatctctcccagtgcgttccatatgaatccttcagctgtcagctgtacagcccatacgtaaaagacaagcattcagtgggaaacctttgttgattccagtggaaagaaggatctctaaaaatgagagtagagcacttaagctctgagaacacactggagattagaagaacacttattttaaaacaaacaaatacaagtgaacaccaacagcaagtatagaacttaacatagagcttgtcatttccatgcagtttagaacagtyacttgcatgagaaatgtctcctgttaatggttttactgttcagcyacacgttgtgggttactctgcaatagaagtgtaagttttctgcctattaggtacttagattcagcagtaatgtgaagtggaatctcagtgggytgtacacacttgctctatcagtgatactttgcacgatgacttcactatcagctgtcttaaggaaaagatatcatctgatgcagagtatcttgtggctttactaaagcttcattactagattcttctcaagggaaaggaagaatggattatttctcacacttt

SEQ ID NO: 58872 - DNA, 600 bp, Chicken  19866894316477_2
ccagtgcgttccatatgaatccttcagctgtcagctgtacagcccatacgtaaaagacaagcattcagtgggaaacctttgttgattccagtggaaagaaggatctctaaaaatgagagtagagcacttaagctctgagaacacactggagattagaagaacacttattttaaaacaaacaaatacaagtgaacaccaacagcaagtatagaacttaacatagagcttgtcatttccatgcagtttagaacagtyacttgcatgagaaatgtctcctgttaatggttttactgttcagcyacacgttgtgggttactctgcaatagaagtgtaagttttctgcctattaggtacttagattcagcagtaatgtgaagtggaatctcagtgggytgtacacacttgctctatcagtgatactttgcacgatgacttcactatcagctgtcttaaggaaaagatatcatctgatgcagagtatcttgtggctttactaaagcttcattactagattcttctcaagggaaaggaagaatggattatttctcacactttctctcagatttgactacagacttaacacaggaagagatctttatt

SEQ ID NO: 58873 - DNA, 600 bp, Chicken  19866894316477_3
gaaagaaggatctctaaaaatgagagtagagcacttaagctctgagaacacactggagattagaagaacacttattttaaaacaaacaaatacaagtgaacaccaacagcaagtatagaacttaacatagagcttgtcatttccatgcagtttagaacagtyacttgcatgagaaatgtctcctgttaatggttttactgttcagcyacacgttgtgggttactctgcaatagaagtgtaagttttctgcctattaggtacttagattcagcagtaatgtgaagtggaatctcagtgggytgtacacacttgctctatcagtgatactttgcacgatgacttcactatcagctgtcttaaggaaaagatatcatctgatgcagagtatcttgtggctttactaaagcttcattactagattcttctcaagggaaaggaagaatggattatttctcacactttctctcagatttgactacagacttaacacaggaagagatctttatttccaaatatttgcctggcttgttgccacttctgtctgcactctaaatacttaatgaaaattatgtaaagtgttttcagcctcagcaagtcaca

SEQ ID NO: 58874 - DNA, 499 bp, Chicken  19866894316477_4
ctctatcagtgatactttgcacgatgacttcactatcagctgtcttaaggaaaagatatcatctgatgcagagtatcttgtggctttactaaagcttcattactagattcttctcaagggaaaggaagaatggattatttctcacactttctctcagatttgactacagacttaacacaggaagagatctttatttccaaatatttgcctggcttgttgccacttctgtctgcactctaaatacttaatgaaaattatgtaaagtgttttcagcctcagcaagtcacagctgactaggarcaccagctcacacttcaactttctgagacttctgttactttttaagtagccaaggtatcaaagcatacactttccattttggaattacatcagatcaccaaaggtataaaggatacagactctgctctgaacagcttccttctactttcaagaaaaggtagtctagatacaaactctgctgacctaatgacagaaaaca

SEQ ID NO: 58875 - DNA, 599 bp, Chicken  19866894316487_1
  misc_feature (1)..(34): n is any nucleotide
nnnnnnnnnnnnnnnnnnnnnnnnnnnnnnnnnntaataataaaatgcttaacagcagggagaaattggcgtattttttaatagttggccgctatcttccgttcattctttcccttcgccactttcaaactgtttgatgcctacgtgctttttttttttccaccaccttctacttcactcctgaagctacatcctgttcctcctccctcacacctgcctgagcgttacagtgccttagtttggaggctgtcctccttgccttataaacacaggctccaacagcactgacacagaaccctyccctcagtacccactgctctccttacctcccatgtgtgctgctcagccccttyrcctccgccgatcctcacaacctttgttttcaccaaagtaaaatgaaggyataggcagcaatgagaaacagattaacgaaagcttgaaaccacggccattcctcaggtctcgctgcacacgtcataacttcaaaagcagtctttccccaggctgtgctcctaatgatagaccaatattccgacaccttaacacaagaaaatcagacacttgacttcaaaatgagtttctaacctcacagctaattg

SEQ ID NO: 58876 - DNA, 600 bp, Chicken  19866894316487_2
agcagggagaaattggcgtattttttaatagttggccgctatcttccgttcattctttcccttcgccactttcaaactgtttgatgcctacgtgctttttttttttccaccaccttctacttcactcctgaagctacatcctgttcctcctccctcacacctgcctgagcgttacagtgccttagtttggaggctgtcctccttgccttataaacacaggctccaacagcactgacacagaaccctyccctcagtacccactgctctccttacctcccatgtgtgctgctcagccccttyrcctccgccgatcctcacaacctttgttttcaccaaagtaaaatgaaggyataggcagcaatgagaaacagattaacgaaagcttgaaaccacggccattcctcaggtctcgctgcacacgtcataacttcaaaagcagtctttccccaggctgtgctcctaatgatagaccaatattccgacaccttaacacaagaaaatcagacacttgacttcaaaatgagtttctaacctcacagctaattgctctgggtgtaacggcactgaagggaccggagacctgcagtgttcagctggtgt

SEQ ID NO: 58877 - DNA, 600 bp, Chicken  19866894316487_3
gcagggagaaattggcgtattttttaatagttggccgctatcttccgttcattctttcccttcgccactttcaaactgtttgatgcctacgtgctttttttttttccaccaccttctacttcactcctgaagctacatcctgttcctcctccctcacacctgcctgagcgttacagtgccttagtttggaggctgtcctccttgccttataaacacaggctccaacagcactgacacagaaccctyccctcagtacccactgctctccttacctcccatgtgtgctgctcagccccttyrcctccgccgatcctcacaacctttgttttcaccaaagtaaaatgaaggyataggcagcaatgagaaacagattaacgaaagcttgaaaccacggccattcctcaggtctcgctgcacacgtcataacttcaaaagcagtctttccccaggctgtgctcctaatgatagaccaatattccgacaccttaacacaagaaaatcagacacttgacttcaaaatgagtttctaacctcacagctaattgctctgggtgtaacggcactgaagggaccggagacctgcagtgttcagctggtgtg

SEQ ID NO: 58878 - DNA, 600 bp, Chicken  19866894316487_4
cattctttcccttcgccactttcaaactgtttgatgcctacgtgctttttttttttccaccaccttctacttcactcctgaagctacatcctgttcctcctccctcacacctgcctgagcgttacagtgccttagtttggaggctgtcctccttgccttataaacacaggctccaacagcactgacacagaaccctyccctcagtacccactgctctccttacctcccatgtgtgctgctcagccccttyrcctccgccgatcctcacaacctttgttttcaccaaagtaaaatgaaggyataggcagcaatgagaaacagattaacgaaagcttgaaaccacggccattcctcaggtctcgctgcacacgtcataacttcaaaagcagtctttccccaggctgtgctcctaatgatagaccaatattccgacaccttaacacaagaaaatcagacacttgacttcaaaatgagtttctaacctcacagctaattgctctgggtgtaacggcactgaagggaccggagacctgcagtgttcagctggtgtgggatgtgaatcaggcccctgcgggtcttgctttaggctcctgactgcag

SEQ ID NO: 58879 - DNA, 568 bp, Chicken  19866894316494_1
caaataagtacaagaataatgaggttactgctgttgttattagtagtatgtgcaactgtgcctaggaaccttaattacaggctggactctgctgggtgagctgccattcaataccagaacaaaaagatgatttgaacactcttttggacagggaccaagtattacattatctgttctgaagaaatgcatgagcagaaataaaggcaagtcatcaaatacactgtttgcccacagctactgtgtatgtcttgaatgttggaagctggataagcacgtgccatttgctgccagcataggtcygtctggattgaaaggagttcagtctagtacagatgtagccagagagaatcttttgtttatactagaaacttattgacactaaataaacattttctttatttggaaagtagacaattcatgaataactatatgtccccagatttacacgaatagttgactgcaaaccccttttgttctgaaaggctgagagggaattcctattttagctgtgctgaaatgacagaggtaggcaattcaggtaatgggctgttagtcagttattaaatat

SEQ ID NO: 58880 - DNA, 600 bp, Chicken  19866894316504_1
ttgtattctgttgcttcgtagtattgtgtttaaatatcataatatagcattttttactgttttgaagtgagttttctatcttaatgttatggaatttaaaccattaatgctatggactaaaatagtatcaataccaaaatggaattaggtaggagtatggtagagcagtcttctgttcccctttgaaatttgtggcagtttgatttggaggagaaagcaatttttacctgcatttctggctttgtgtggggcaagtggtttaccttagagaaagagaaaggaatcagtcaaatagaaatrtttcttctggttttgatagccaaagagagaaaggaacataatgtcaggcagtttttatggataagtttagtgctcaggagtttaagaaaggtaccctgtgctctattttcttttttttctaaaaatcgtaattttcctttctccatgtattttcacctttttcttctctgctccactttaccccaatttctgttgacttctatttttttccctacatattctgtctcattcacctttgtcaagcaaacaatcatgttcagagatagccaggggaatcttttttaatgttgttgaggaaaa

SEQ ID NO: 58881 - DNA, 600 bp, Chicken  19866894316517_1
actgagaatctgtattctagctctaggtagcacgtaattcttatcctctgttaccagcagccaaaatactgtgcagactgcagttttaaacatgagagtcctgtaacacagctgatggctgctcatgttcacctgtgccttgttgcatgtcacatactctaagctcagaaatgccatctgcaagtaagaatgaaactatttaagttaaaagggccatcaagtttaaaaaagtatcttcctctgtgttaactccaccttcagttatcactacgttgttgttgattctttgtacactgtagrtagtttccagccaccagtcaaatgctcctaggcttgccatgcttgtttgctgccacaaacaccaacacaagctctgatccatccatgggtgcccctttatccacccacatagcagtctgtggtacaatactggaccacagctcaagaagcccagagattcctcatccatctcaagtccaagttctcatgaactcacgtgatgctgcagtgctttgggtggaaattaaaacaagttgtagtcaaagtaggaaaaaaaaaaaaaaaaagaaatgccccacatgtgtgaggctttgaaaagat

SEQ ID NO: 58882 - DNA, 600 bp, Chicken  19866894316526_1
taggacactgtcattgtctaagtgtaggatcaagtctctctgaagagaagcagatttgagtgaaggacttctacatcagatgtatattttaaaaactgctaaaacaggagaggtgttctgtatctagacccatttcaaaggatttgatgctccgattttggaaaaggtacattatcttacaaaacagttatagttccataaggataattaacccttgagttgaaggtttttccttgagctgaaagtgtaaaatgcattagtcctgatgaattttaggacaaaccatgcctaaaatattascatagctagctttctgattgatataccgtcttatgtgaatactactctgaaaatcttgactctacacaggttggcaaattagcagctactttggaaaagttgtaccctgcatgcacatactgaaacacagaatctatttctaactgatcacatacataactaattaatgtgttctaattattattaaaccttatggattaatcgtatatacctacggaactgcttgttgcacagatatgttataaaagtacttcttataaactaatgttatcatttgctaattggcccttttgtattttg

SEQ ID NO: 58883 - DNA, 600 bp, Chicken  19866894316527_1
accaggggaatggacaagatttttcctgagtgacttatggagaagatcttgagcacgatgattgccaaggtcacaaatgcatttcttgtaccagaagagtttcagctcttccggatttctgtttaatgtttatattgagtttaactctaattttgaccttggatgactcatacagaaagcagcaaaaaaaaagtggctttggtatgagaatatctttctcattaactgaaggcacagccatacaggacatctatctttaacctaaattaatgataacccttggattacaacaaagtatgyatttttacttgcttgagaaaacacctcttttattsagtatatcagtttcagaagggatgcctattttttagggtgcatgttcttacataacayactcttcctgtgctacactgcttcaagtgtcaaactaagaattgaatggaagtgattctttctcacaagaagaaaactcatctcgcaggtctaagtgaatgcctcagaaggttaacagcaaatagataatytaccttgatacaggaaggaatttgcatggatttgtttttatacctactgtgatagctgcagccccaaagctttctt

SEQ ID NO: 58884 - DNA, 600 bp, Chicken  19866894316527_2
tatggagaagatcttgagcacgatgattgccaaggtcacaaatgcatttcttgtaccagaagagtttcagctcttccggatttctgtttaatgtttatattgagtttaactctaattttgaccttggatgactcatacagaaagcagcaaaaaaaaagtggctttggtatgagaatatctttctcattaactgaaggcacagccatacaggacatctatctttaacctaaattaatgataacccttggattacaacaaagtatgyatttttacttgcttgagaaaacacctcttttattsagtatatcagtttcagaagggatgcctattttttagggtgcatgttcttacataacayactcttcctgtgctacactgcttcaagtgtcaaactaagaattgaatggaagtgattctttctcacaagaagaaaactcatctcgcaggtctaagtgaatgcctcagaaggttaacagcaaatagataatytaccttgatacaggaaggaatttgcatggatttgtttttatacctactgtgatagctgcagccccaaagctttcttggattaactcaattattcatcatctgtttatcatc

SEQ ID NO: 58885 - DNA, 600 bp, Chicken  19866894316527_3
gaagagtttcagctcttccggatttctgtttaatgtttatattgagtttaactctaattttgaccttggatgactcatacagaaagcagcaaaaaaaaagtggctttggtatgagaatatctttctcattaactgaaggcacagccatacaggacatctatctttaacctaaattaatgataacccttggattacaacaaagtatgyatttttacttgcttgagaaaacacctcttttattsagtatatcagtttcagaagggatgcctattttttagggtgcatgttcttacataacayactcttcctgtgctacactgcttcaagtgtcaaactaagaattgaatggaagtgattctttctcacaagaagaaaactcatctcgcaggtctaagtgaatgcctcagaaggttaacagcaaatagataatytaccttgatacaggaaggaatttgcatggatttgtttttatacctactgtgatagctgcagccccaaagctttcttggattaactcaattattcatcatctgtttatcatccacaggtggttgaaatgattttcagggtaaaataaagcaacaaggaatttgaagcagt

SEQ ID NO: 58886 - DNA, 600 bp, Chicken  19866894316527_4
actgaaggcacagccatacaggacatctatctttaacctaaattaatgataacccttggattacaacaaagtatgyatttttacttgcttgagaaaacacctcttttattsagtatatcagtttcagaagggatgcctattttttagggtgcatgttcttacataacayactcttcctgtgctacactgcttcaagtgtcaaactaagaattgaatggaagtgattctttctcacaagaagaaaactcatctcgcaggtctaagtgaatgcctcagaaggttaacagcaaatagataatytaccttgatacaggaaggaatttgcatggatttgtttttatacctactgtgatagctgcagccccaaagctttcttggattaactcaattattcatcatctgtttatcatccacaggtggttgaaatgattttcagggtaaaataaagcaacaaggaatttgaagcagttgctaaaagaacagtccaatgatgtagcaattcctaatttacacaagtcaaacaggaattgccatgtgggtcaagtgaatggttcctttcatcctccctcttacagtgccctagaaggggaaaaaaaaatt

SEQ ID NO: 58887 - DNA, 600 bp, Chicken  19866894316531_1
aaacatgatcaggtagtttcatgtgcatttaagagtagttttaaagaaaactgcagctaaaatgtatataaacttatcaccaaagccaaaaaaaaaagtttggctgtatattagaaaaatattttcatctgttcgtattggatggtgtgagttagaaaacttcaagtacaaggtgtacatgaaaatattgtgagaatattattttctttgacatggtacttttaaagcccatactttttcacacagcatgcatactgccataagcagacagcaatgaaatagctaatgactccagtgcakttaaaggtatgtgaacaccttttgtccartttagatgatagcaataaacttaaatgttccatgctattctgtgcttacatacgtattctgaaggcacagatctgctccattctgttcctttgttcaaataagtcaatagaaacagtttttaaaaaatgcaagcaactgattacagtgcctggtagttagaattcacaaatcaataaatcttcagtctggtaagcgtgtgtgccatttaacatttctgtcttgtattattgacctgaggtgggttgctcatgctttgtgaaattagatttg

SEQ ID NO: 58888 - DNA, 600 bp, Chicken  19866894316531_2
taagagtagttttaaagaaaactgcagctaaaatgtatataaacttatcaccaaagccaaaaaaaaaagtttggctgtatattagaaaaatattttcatctgttcgtattggatggtgtgagttagaaaacttcaagtacaaggtgtacatgaaaatattgtgagaatattattttctttgacatggtacttttaaagcccatactttttcacacagcatgcatactgccataagcagacagcaatgaaatagctaatgactccagtgcakttaaaggtatgtgaacaccttttgtccartttagatgatagcaataaacttaaatgttccatgctattctgtgcttacatacgtattctgaaggcacagatctgctccattctgttcctttgttcaaataagtcaatagaaacagtttttaaaaaatgcaagcaactgattacagtgcctggtagttagaattcacaaatcaataaatcttcagtctggtaagcgtgtgtgccatttaacatttctgtcttgtattattgacctgaggtgggttgctcatgctttgtgaaattagatttgtaatgtgcctggcactttcagtagcactg

SEQ ID NO: 58889 - DNA, 564 bp, Chicken  19866894316535_1
aatcagaagtgaaatagagagttcagagttctacaccagcaatcaagacataatcaaggttggagaagagtatcaagacaattgcgaccactcaacaagaactggaaaagccttttttcttaagaaatgttcccccgctccatgcagcaacatctccagaccagtggttttactgcttctgaaccccaaagaggtgacacccacaaacatgctctggctggctgtaggtatggcaaaccaagttttacactcacataaaacaggatgtaaggccaaagcgtggggcctctcacacccaayatcaaggcaagaaggaatcaggtttccagatatgcccaaggcagagccagcagcaggtctgagcccacccattttcagggctatctagagttgtgcatatgttgaccaagaggacatggtggtctttttccacagtttgggaacagttactctgaagaacccgagggccacagtaactgctgagcaaattaaaccccagagaactctgactaaagtaccgtgcaacaaagcacaggatgaccatatggggcagcaagggcaaga

SEQ ID NO: 58890 - DNA, 600 bp, Chicken  19866894316537_1
taaatccatgagaataatgtgacagattaaaataataatagggaaactgccaaaaagcaagaaatgttttgcactgttttttttttgttgacactgcacagtgtaaataacagaaggaggtagaaagtgagaacaatactgtctctattttatttctgtcccaaacacatgagatattgcaccaaaagtaattgcgtgagtttaaaaaacagtaaaccaattaaaataaaaaagtatctgaaagactccatgctcggtagttttcatgaatagaaacgtaaaatgtcattaaaaaaaaamcacactttttgatcagcttccttttctgttgcagcaatcattactttgcagttctttataacaagcatcgtatgtctgagcggagtgttgtgggtttgccctggtaggcagctcagcaccacccagctatttgcttgctcatttcctgctggtgggatggggaagagaatgtgaagggcaaaagcaagagaacttgcgggttaagttaaggacagttcaataggtaagcaaaagctgtgcgtgcaagaagagcaaaataagtaattcattcatcgttccccatcggcatgcagatgttca

SEQ ID NO: 58891 - DNA, 600 bp, Chicken  19866894316541_1
gttactaaacttttcttgaactcagcagttgagaaaacttttccccattctgtttcctttagtcagtttttactgtgttactattttaataatgccgcatgagtatgactagcagtaaatggcacttctggaaaagcattttattcttcctccttccctctttctgcctctgtaagtgcagctgccagcgactgagaaggatgcaaaggattcaaagtgtacggaattaaatttagtgcagcactgaagaaatgtgtgatgtttttctgacttatcctcacccagcacgtctgagaacaygatacacaaacgccagtcaaattgtgataaaattaggcttgaaggagctgaactgagtagcttcacatttaaagacttcccacttttctgttatgcatgtgctgtaattgcactcctcaccagccctggagcctgaggtgctgcctgcagcggttggtctgtatggcattggggtggctgggtcaggcctgtagggctgctcacagggatttagactagatattaggaagacattctttactgtgaggttggtgagacactggaacaggttgcccagtgaatgtgaatgggttgggctgt

SEQ ID NO: 58892 - DNA, 599 bp, Chicken  19866894316555_1
  misc_feature (1)..(84): n is any nucleotide
nnnnnnnnnnnnnnnnnnnnnnnnnnnnnnnnnnnnnnnnnnnnnnnnnnnnnnnnnnnnnnnnnnnnnnnnnnnnnnnnnnnntggaaagcctggtctttggtttacagtatcagtggccttgccaagtaatctcagaatgtctggactacagtgatcctgtagggcaggataaattaaaaagaaatgcccacagatcttcatagcactggtaggaaagacttctgagcaacagatcttctggagatacttccagcttccatatctcattgtgaaaaagcaaactcaaaaattacagtscaaataatgtggcctataaggcagaataaaaatattaattctaaatctccttcccaaagcagtgtagcaagtttttacaaactggaataccggcctgaattagatcagaaaactaaaaaatctgtattagtcttctccttactgaatgtgtaatgaaacagatgaatatttggacaagatttatttaattcactgtcagaaactgtaaaattagaaagcaataactggttctcatgccagctccaaaactctggattaaattagacagcccttgaatatgtgtgttgcattcttttagt

SEQ ID NO: 58893 - DNA, 600 bp, Chicken  19866894316555_2
ttaaattagacagcccttgaatatgtgtgttgcattcttttagtaagcagtatcagagcatttcagcaacccagaatctttactctttaaaaagcaaatcctccttttataaacttacagacaaagcactttaaaaaaagaaaagagaaacaaagcacatcattgctgaaagagctgatgttctctttgtaatgcagtgaataactagttcatgggtaggctgctgaaaatatgttaaaatactcctacagaggttagtagaaaagcatttttcataagaaatatgagtttctgtgaaayaaaaaccacaaaaatgctggtgcttttttacatacctcttctttgaaatgttcatttgttttctatctgtgtactaggcatatgtagagcagtatcatacagcagattttttcttttttttttttctgtatgtctttgcaaaatgcatctccactccctaaacctcctcttcattctagctgcactcttctctaaggcaagaaaatggcctataaaatgttttgaatgttaattttcaaccagtaccagaatggctcttaaaagcaagcttgtactataaaatcctgcttcgagctacaa

SEQ ID NO: 58894 - DNA, 600 bp, Chicken  19866894316557_1
ccatgctccacaggagtggtgtttttaagaatctaacacattctatcgatctagttttatcatggtgactgtttcttattgcactgtgcagtctacatggaagcttgcagcttaccaagctgcagtcaacactgacttaccctgtcaaaatggttgaaagaggctcggaactcattcatctgttcctggcttattcctttggcatcacgggtcagaatctggttttccacttcattaatggttctagcaattgttgttaatagctgctcccagcccacacgaatatgctggaaaaaaaargagaataagacaattttaaaattaaaaagtagctcttctgcctatgaggctgctagatcaarcatgccacttatggcaaattaagtgatcctgatggccaaggcagtcatagaagcatgcttagaagagcctctttctcatccgcagcatgagtcacctggatgtttaaaatgtgaattttgactgcagaaagtattgaagaggccactttctgctcataataaagtgctggtcctattgcaaaggtcctttcctttgtagctcagcacagtgggagcctttaacacaaaagataatcaa

SEQ ID NO: 58895 - DNA, 600 bp, Chicken  19866894316557_2
tggtgactgtttcttattgcactgtgcagtctacatggaagcttgcagcttaccaagctgcagtcaacactgacttaccctgtcaaaatggttgaaagaggctcggaactcattcatctgttcctggcttattcctttggcatcacgggtcagaatctggttttccacttcattaatggttctagcaattgttgttaatagctgctcccagcccacacgaatatgctggaaaaaaaargagaataagacaattttaaaattaaaaagtagctcttctgcctatgaggctgctagatcaarcatgccacttatggcaaattaagtgatcctgatggccaaggcagtcatagaagcatgcttagaagagcctctttctcatccgcagcatgagtcacctggatgtttaaaatgtgaattttgactgcagaaagtattgaagaggccactttctgctcataataaagtgctggtcctattgcaaaggtcctttcctttgtagctcagcacagtgggagcctttaacacaaaagataatcaaaactgatgcttataggatttatttggacagaaaactctttacgtgaacaaagaaaacaaatg

SEQ ID NO: 58896 - DNA, 600 bp, Chicken  19866894316557_3
tgagtcacctggatgtttaaaatgtgaattttgactgcagaaagtattgaagaggccactttctgctcataataaagtgctggtcctattgcaaaggtcctttcctttgtagctcagcacagtgggagcctttaacacaaaagataatcaaaactgatgcttataggatttatttggacagaaaactctttacgtgaacaaagaaaacaaatgaaccacaatccttggaacacactggtgctccactgcatctatggccggagctggccagaaaccaaaaagcaagtttcaaagcctgtytgtgttctgatggactcatgctgaattcaggttgtttccacgaaacctcatgttgtcaacagaaagccagactcttatcttgaaaaggttctgatggacttttttctttttccatgctatagcagctgaaaatcaccaactcttgtctgggctttctaattccagcttgtggcctaacacagcctgactacaagaccagccaattttttcaagcaataccgttgatcttatttaggttatttctattgttgtatgtggaaatacaacggactgggttggcataaagtacagtaaggctga

SEQ ID NO: 58897 - DNA, 600 bp, Chicken  19866894316557_4
caccaactcttgtctgggctttctaattccagcttgtggcctaacacagcctgactacaagaccagccaattttttcaagcaataccgttgatcttatttaggttatttctattgttgtatgtggaaatacaacggactgggttggcataaagtacagtaaggctgaaaaaaaattcagtgacatgatgttgcatgcttggccatcctgtcaagctctctgctttcctgagaaccacaacatattgcctgaactggatgcggccggtgcaacaacagatcaagctgtctgatctgctggyggtacattccagcagggaaaaggcactgcaaaacatttacctccatggtgtagttggtgtgcttgttgtcaaagataagcgcctcctggatctgttggtggtctccttccaactggtcgatctttggtttgtaattcacaatgcttttctcatactgccgcaagtggttgagctggtcctccagagtcccatgcatctctattgaaatgcggccaatctcctgtgttagcaaagccaaaggtattagaccctgttagaaggaagagccttcacatggctgacatttattaatgcagatat

SEQ ID NO: 58898 - DNA, 600 bp, Chicken  19866894316566_1
gctacaaaagcagaaagcttgaggctgtcaccgggtgttttgtgcacacaaatgctacctgaggcttcggttctttaccgggaggcagtaggtggcatttccatctgcgctgacgttttggagaatgggaggcaggatgtgcacaggtcggaaatggagacgcgctgggaagcggtggcagcgctccggtggcagctcgtgcaggagttcatcccgagcctcccccggtgcctttgatcactttgttaatggtgtctcagctctttcaagtcctgcgcaaacaatggttagcgccgtgtrtttttccaggagctaccagtgtttagagttaaaacgtttctttttagatttgggagggaaaaaatttaaaaaaagctaaaaaaaaaaaaaagcgtaacaggtcaaagcccacttcaaatcgaataatttagggtttgaaaatatgtttgaaaggagaatgaaaggaaaagcaacaatttaaagagaactccaagcctgtgttttatctggagcgttacatttgcttaagaaatgaagttctctactcagagttatttaacctcttcacctggttttcccttaagctgattctgaaaatta

SEQ ID NO: 58899 - DNA, 599 bp, Chicken  19866894316571_1
  misc_feature (1)..(78): n is any nucleotide
nnnnnnnnnnnnnnnnnnnnnnnnnnnnnnnnnnnnnnnnnnnnnnnnnnnnnnnnnnnnnnnnnnnnnnnnnnnnnnacctccctacaacacaagtgatcttgagcctgcgcccatcaacacagcatctataggccattaaggagcatcttggaaagcacatgggaagactgccacttgctgcaataggcccagcagctctctgcctcctacagacatcacaggagatgcgaagctcctacagcaaaaacctttggagaataaaaatcttcactcgcagctccacgaaacacatcagtmctgccccagcagttgagcaggagccatgaggctttcaggctcatctctttccaatcttttttgcataagatgagatactttcttgttgccaaggcacagctcagcaagagaaataagttaactttctttcaacagttcctgtgctattcgtactttaatcgttttgggtgcatttcagttatcaggcatactggcttcaaagcacaagcaatgacaattctcgacctatattcccttgggttttaaggcctcttctcctgaaatccacacaagtcccactcccagatgccacagaccag

SEQ ID NO: 58900 - DNA, 600 bp, Chicken  19866894316574_1
ttgggggaaaagggaaacgtgtgagcttggggtgagcaaggtgctgagagcttggggagggggaagaccttgcgggggcacatgggaggggagatgctcctctccccacaccgtgcctgctgcctgcgggtgacagcaaatcagcaagctgcaggtttttccccaggctcgtccatccacagagactccagagcacaagatccaccccaggtctggctctgtccacgctgcaccccctgcatggcactgctggtcctcacaagggaggtgaccagagggacaggccttttccttgctggsaagttcagagctgagcaccctgatgcattactcacaaaattccggcagtcattccaaacccatccatagtcatatgccagccccaatgaccgtgatggcaatcacttctaagggcagaaagcactggcaggtggatggggacaaggtccatagtggggtacagatactcctccaagcagagatgctgtcttgggagacmgggaggtggatgaagtgtgggagacaggagatgagggtggtacagccaacacaggcagatgtggagaagaagatgtgtaggactcacagtgtgcaagctaa

SEQ ID NO: 58901 - DNA, 490 bp, Chicken  19866894316574_2
atccaccccaggtctggctctgtccacgctgcaccccctgcatggcactgctggtcctcacaagggaggtgaccagagggacaggccttttccttgctggsaagttcagagctgagcaccctgatgcattactcacaaaattccggcagtcattccaaacccatccatagtcatatgccagccccaatgaccgtgatggcaatcacttctaagggcagaaagcactggcaggtggatggggacaaggtccatagtggggtacagatactcctccaagcagagatgctgtcttgggagacmgggaggtggatgaagtgtgggagacaggagatgagggtggtacagccaacacaggcagatgtggagaagaagatgtgtaggactcacagtgtgcaagctaaggacctgcagggtgcacagcagccagcaggatgccaaggagcatcctgcaccttgcaccagagtccggtactgctcctcacccaacaca

SEQ ID NO: 58902 - DNA, 600 bp, Chicken  19866894316578_1
atgaggctcaatttccttgaaatcagagaaagtcatttagcaagagaccatcaatttccttgttgtgccaaggccccttttcagccagtgcttgaaaacacccacttcatgaattttggcatccctgaacaagcaagtggagcagcaggctgtcttgcattttcccatactacgtaaacatctagctgaattgcaaataatgtttatacccataacaagctgcaaagtgcaaaactatgttgtaataattggaagatcaaaaggtagagtaactctggcactttggccttctcagtgtgrtgctcacactgctagctggatatattggattactttttgcctcttttctaatcactgttgtgttcttcattgcaacaaatgaagcattgctttcttgatagtcaggttttattcaattcattgccgccgcatgacatcttagcatagcaaaatcagaagctacactggataagttaaatataatgcgtgaaaaagcctacttggaatgttccagaatttccagttttttaacagcatctgcacataaagaccctttccccatgcaagcaacatgtttatttacagcatgtgcatttgagg

SEQ ID NO: 58903 - DNA, 570 bp, Chicken  19866894316598_1
tcaagaaacacttttctttgacatctttgtttgcatttgtatgtgcacgtgtattactttcccaagttatccttcaaagtaagcgcaggtgagcattaaaatgacagcaaagttatgttttaactgaaagagctggtttttaattttagtctccatttgatacaggggaacttgtttcatgtgtttatacttcattgagttgctgaactgcctgatcctgataagccaacactcccaagcacatggacacataatggagcttgagaactgttagctcagctaatgtcagcaatcacacckcccacacctatattcttctttactcacacagtcacctagctgccatctgctcaatgcagagtggaattaatcccttttgatgggagctaacagtatagttggatcagttaaaaaaaaaaaaaaaaaaaaaggaaaaggaaagaaaagaaaagaaagaaaagaaaagaaaagaaaagaaaagaaaagaaaagaaaagaaaagaaaagaaaagaaaagaaaagaaaagaaaagaaaagaaaagaaaagaaaagaaaagaaaagaaaagaaaa

SEQ ID NO: 58904 - DNA, 600 bp, Chicken  19866894316601_1
tatcgccttgcttagcctcttttaaaatgcctgctacctgccactctgttccagttttgtgaggtcgtcattagagagagattattttccttctatgttggaaaaaatattttgttctgagatgtaatctgaaagaaatattgtaaataataggatggcttttcaagacttttgttgcatgtcttacttaatagcattgaaatgacagcttaggtgttgataggcaacagaaagcacaaggccaaaccaagtattcaaacacattgaattagactcctagaaacactcaaggtcgctttwaagacggtgatttaaaaataaacagaagtaaatactgctgcttgaatcaatgtcatattttcagaagcattgtgccactgtgaaaggctgcaaccttttgttagaaattatacagatcctttcataatcatacaattccaagacctcattgaaggataggaatattactgtactattgcagcttttgagtacttgtcctcaggcattaaaagctaaaaaacattcaacactgagaagttttgaagatatctaaatgtgctgaattatgacaacaattaaactctatagagaaactaagag

SEQ ID NO: 58905 - DNA, 599 bp, Chicken  19866894316602_1
  misc_feature (1)..(143): n is any nucleotide
nnnnnnnnnnnnnnnnnnnnnnnnnnnnnnnnnnnnnnnnnnnnnnnnnnnnnnnnnnnnnnnnnnnnnnnnnnnnnnnnnnnnnnnnnnnnnnnnnnnnnnnnnnnnnnnnnnnnnnnnnnnnnnnnnnnnnnnnnnnnnnntgatctctgaagtccaggcttaatggcagaactcctgctttgccattcctatatctgaggagagagggaatggggaggatgtacccatctgaaagctttatcctgaaggagaatacaaaaatggaaaagtcagggggatgagaaaagtccttacagragctgaaaatgcagcttgcattcagtgtaaatagaggaaacctggtttagccttcaaattccaaaataacatttctcactaagaatctaaatcatcctcaaggaaattggggaaaaaaaaatcaaaactcctcaaaatgtcagagccctcaaatccccatggcttatagtttctatgtatatctaagctatttataaagccaatcaccacagtttctaccataaatttcagttacacatgtcctgagctagcaaattagtggatacaactctgatctacagaaccatggtaataagcac

SEQ ID NO: 58906 - DNA, 600 bp, Chicken  19866894316604_1
tggaactacacgtatacgttggcaagtgcatgtgaaagcataccccacttaagcaacaattctgcatgcacggtctgaaaagggagtcaacacagactaccaagggagcttgggagagaatacagtgtaagaagcaacaatttcactgtgatggaaataaacccctggagaaccatctgaatgccacagaagaaccatgggagggaaatgttattttgctgtttggagtaaccatgctgtgggcagcaaagatgctgtcatcctttactgaatcccagtcatctcgcaaaaacataaacsttgtgtggatgggatgtatagacaggggtttgtgcgtatctcctcttgctgtacttcagatcaaagagacatctgaggcaaactgaccatcgtcttcagctgtcacatttggggagaacagaaagaggaggaccagaagactagaaaaagaacagcacaaaaatgctacaggcagacagatgcatctccactccaaaagaaaatgactcctaacactcctaataaattaatgcaacgttttgtaggcattgaaaatattcctaaacgtggcttagtgtaaacagcaagctgggtttcctc

SEQ ID NO: 58907 - DNA, 600 bp, Chicken  19866894316606_1
ataattaagtgacaactctggaaatgtctccaaaaattaagcaagtttgaacatttcaaaggggtgatgccccaaaccagttgcaactttgttcatttcaacctttgacactgtgaatgtttccaaggacttgtcttctgaacatgtttaccttgtgaggtggcttcctgggtaagttcacattgctcgtatattcttaagaggaaacttttgaccttggtttacttcaaagatctaatagtttctcttctcttccacaccccatcccccattttgtcatctcccctttctttgtgcatragttaatacaggccttttgttcttcagtatcaaaagttatggagtattgtcttattctttgtatgccctaaaaaatcatcatctgttctgatccattgcagaacagtgataagctctgcttggagtatgtatacgactgtatggaatgttcttgaatagacatagtatgtgttagagcagaaaagcattttatcctagtgatgtatttgacttcaggcgcacttaaaggatgtcttccactctgtcactggaaactactgcagtagtcaattgtatctgagaagaacatgacttgaaaag

SEQ ID NO: 58908 - DNA, 600 bp, Chicken  19866894316614_1
gagactcagatatgagatattaaacgaaatatcaactctttccattactgcaaaaacacacctcaagagataaaagttacctgttgtaaaattctgaccattttaccatatccagaaactgagaaaccagcattaaacccccaaatcattgttattttcctttagctacaatggaaactcttaaaacgatacctgaagcatatattttctattcatttgaactgtggttctcatttggtgttggaacttgaagttagacaaaggcaactaactgtgctagactgcaagaacctgctactratctatcccaactttactgaaactgaagagtttttgccaacatcccatcagaaggaagcagcacgtgctgcagctgtttccttacagattaggaggaaggtgtgcagtaaagtttttcctgcaggaacaggtaggggtcatgtggctgactgcatcatgctttgggtaatatctgtgtccagagcagagcsagtcatctagaatagctcttccttaatgctcaggaaatgagttttagtgcactaggttaatggaagattgactttttgttcctagctgctgtctgttgcttctatgaag

SEQ ID NO: 58909 - DNA, 541 bp, Chicken  19866894316614_2
cctgaagcatatattttctattcatttgaactgtggttctcatttggtgttggaacttgaagttagacaaaggcaactaactgtgctagactgcaagaacctgctactratctatcccaactttactgaaactgaagagtttttgccaacatcccatcagaaggaagcagcacgtgctgcagctgtttccttacagattaggaggaaggtgtgcagtaaagtttttcctgcaggaacaggtaggggtcatgtggctgactgcatcatgctttgggtaatatctgtgtccagagcagagcsagtcatctagaatagctcttccttaatgctcaggaaatgagttttagtgcactaggttaatggaagattgactttttgttcctagctgctgtctgttgcttctatgaagtctggcactttcgctgtcccattctggcccaccaacaccatgtacaggtaaatcaatgcaaatcaatgtccacttttatagagttcactcagacaagaaattaagcctacagtacacacagaaatacaacaa

SEQ ID NO: 58910 - DNA, 600 bp, Chicken  19866894316617_1
aatggagaggacaaaggggccattttcacagcagagtcccacagaggtctgtgctacagccgatactgattagtatcttcgtaagtgttaccaaaaagtggcatgaataataagatgacagatttggagatgatgccaacttactggagataataaagacaaagactggcagcaaaaagtggcaaagttccttttcatgttgaatccctaagtaatgaagtgacagatgaagtgagagatgaaatttggtatgggtaaagtccagagtagtggggcatgaattctagcattacatggatratgatgagcacagaattgaatattgtcacatgggaaaaaaggtgccgttacagcactgtgctttgaaagcatcacctcagtgattagtatttgttaaaagaaagcagtcttactgttaggagctgctagtatttgacactttggacatccatgctttgcccgcattttgaatacttggttcggttccagcccttcagacacagcaggactggaaaaggcttggaaaatgaggctgagtgtgactttgtatgacaaatcacaaaatagcgtagaattcttgaaaaaagagatgagggcaca

SEQ ID NO: 58911 - DNA, 599 bp, Chicken  19866894316620_1
  misc_feature (1)..(49): n is any nucleotide
nnnnnnnnnnnnnnnnnnnnnnnnnnnnnnnnnnnnnnnnnnnnnnnnngggtgcagtcttgggggaggcaagatgtacctgggacttctccccacccctctttgctcttaggacagacctttctctccttctgacatccctttctgattttctctctctctccttttttctccctgatgctattatttaatactgctccaactgtccttaccatctaaccaaacttgtttccttttaacgtgtagttaagcttttagacctcgataactaaaaggggtgcctgaaaagcacacatttcyraaaagatgaaagcggttccgaatgtcccaggccaggtttttggtaggctttttaaaacctcattcctgcttagttttactgttgttaataaacttttgtctccaagcttaaagaagcacgggggcctcagagggatcttgtttaatacttattaaagagtttcttatggcttagaagtctccatgcactatttggcaatgctgatttaggtctgctctgaatttaatgcagactgcgggcagttgggtgcagtgatactgggaggctcacgctgcatttctctcctctttagrcttcr

SEQ ID NO: 58912 - DNA, 599 bp, Chicken  19866894316620_2
  misc_feature (1)..(48): n is any nucleotide
nnnnnnnnnnnnnnnnnnnnnnnnnnnnnnnnnnnnnnnnnnnnnnnngggtgcagtcttgggggaggcaagatgtacctgggacttctccccacccctctttgctcttaggacagacctttctctccttctgacatccctttctgattttctctctctctccttttttctccctgatgctattatttaatactgctccaactgtccttaccatctaaccaaacttgtttccttttaacgtgtagttaagcttttagacctcgataactaaaaggggtgcctgaaaagcacacatttcyraaaagatgaaagcggttccgaatgtcccaggccaggtttttggtaggctttttaaaacctcattcctgcttagttttactgttgttaataaacttttgtctccaagcttaaagaagcacgggggcctcagagggatcttgtttaatacttattaaagagtttcttatggcttagaagtctccatgcactatttggcaatgctgatttaggtctgctctgaatttaatgcagactgcgggcagttgggtgcagtgatactgggaggctcacgctgcatttctctcctctttagrcttcrc

SEQ ID NO: 58913 - DNA, 600 bp, Chicken  19866894316620_3
atttcyraaaagatgaaagcggttccgaatgtcccaggccaggtttttggtaggctttttaaaacctcattcctgcttagttttactgttgttaataaacttttgtctccaagcttaaagaagcacgggggcctcagagggatcttgtttaatacttattaaagagtttcttatggcttagaagtctccatgcactatttggcaatgctgatttaggtctgctctgaatttaatgcagactgcgggcagttgggtgcagtgatactgggaggctcacgctgcatttctctcctctttagrcttcrcttatgcaaggtttgatgtgaagggcaaatggatgctttcttttgctatcctttggtaagctttgcttcacaggcatgttttgaatcacttccctgtcacagcatcatcaggcaaatatttgtctccctgttttcctttgaggtcttctgacaactcttctagtagagaacaggagtgactttgagccaggctgggaatgcagttgtatcaatctcaacctgttctgacttgctgattctgcgtagcaagtagttgcttaaatatctgtgaatacagcataattattcagaaatg

SEQ ID NO: 58914 - DNA, 600 bp, Chicken  19866894316620_4
yraaaagatgaaagcggttccgaatgtcccaggccaggtttttggtaggctttttaaaacctcattcctgcttagttttactgttgttaataaacttttgtctccaagcttaaagaagcacgggggcctcagagggatcttgtttaatacttattaaagagtttcttatggcttagaagtctccatgcactatttggcaatgctgatttaggtctgctctgaatttaatgcagactgcgggcagttgggtgcagtgatactgggaggctcacgctgcatttctctcctctttagrcttcrcttatgcaaggtttgatgtgaagggcaaatggatgctttcttttgctatcctttggtaagctttgcttcacaggcatgttttgaatcacttccctgtcacagcatcatcaggcaaatatttgtctccctgttttcctttgaggtcttctgacaactcttctagtagagaacaggagtgactttgagccaggctgggaatgcagttgtatcaatctcaacctgttctgacttgctgattctgcgtagcaagtagttgcttaaatatctgtgaatacagcataattattcagaaatggtacc

SEQ ID NO: 58915 - DNA, 600 bp, Chicken  19866894316627_1
ttcttaggatagcctttttagtgttttgttcattactgacttccttttgagtgttctttacttgcccgcaagaaattcgatctactgatgacttctttaatcaggaactgaaaacatggaacctggctggtcccatcatggtgttttggatgtggttaggaaggacatttgacctatcaacccaccccacctgtatcatcttgagtttatgaaaaatgaagtgctgttcagcaattgagttgatactccttcagcagctcgttccttgaaaaaatccttctattccaaatgtgaagtgtrtgctaatgaatgtggttgcttctaggaacatcctgaaakattttctatgtcaatgttttagtaattaacacattctacacattttcccaacctttctgtttgttacactgagtacagtatagatgattagctgaccttctgctggttaggttaagtcttgatttttataatactgatttattgcatggttttctgtcttctctcagaaaaaaatgtgctatctggtattttgcaaaccaacagctagcattgtgaaggagtaaatttacttatgttttgtctaacagtactagtgatatg

SEQ ID NO: 58916 - DNA, 600 bp, Chicken  19866894316627_2
cttccttttgagtgttctttacttgcccgcaagaaattcgatctactgatgacttctttaatcaggaactgaaaacatggaacctggctggtcccatcatggtgttttggatgtggttaggaaggacatttgacctatcaacccaccccacctgtatcatcttgagtttatgaaaaatgaagtgctgttcagcaattgagttgatactccttcagcagctcgttccttgaaaaaatccttctattccaaatgtgaagtgtrtgctaatgaatgtggttgcttctaggaacatcctgaaakattttctatgtcaatgttttagtaattaacacattctacacattttcccaacctttctgtttgttacactgagtacagtatagatgattagctgaccttctgctggttaggttaagtcttgatttttataatactgatttattgcatggttttctgtcttctctcagaaaaaaatgtgctatctggtattttgcaaaccaacagctagcattgtgaaggagtaaatttacttatgttttgtctaacagtactagtgatatgggaaaaagcattctgtttacacagaagtctcattttcta

SEQ ID NO: 58917 - DNA, 599 bp, Chicken  19866894316631_1
  misc_feature (1)..(146): n is any nucleotide
nnnnnnnnnnnnnnnnnnnnnnnnnnnnnnnnnnnnnnnnnnnnnnnnnnnnnnnnnnnnnnnnnnnnnnnnnnnnnnnnnnnnnnnnnnnnnnnnnnnnnnnnnnnnnnnnnnnnnnnnnnnnnnnnnnnnnnnnnnnnnnnnnnataggcccccgccccgcccttcgcccaccggcacgagcctccccccagcccttcacaccacccgcccctcatgtgagaggaacgtcgggcgaacgccttaccgcctcaccgccgtagcggcggggaaagaggacaggcggtgcctccgcggccyttatatagcgcccgctgctcccgcgagatccgcgcgctcccgacgccgctggaacggscggggagggggagccagcgggatgggtgccgccgcctattggtcgagcaggagcacgtgactggaggcggcattccgcctctcacctgacgggcagcggggtgtgcgtgcgggtcttggggccgctgcagctgggggagggcctcaggctcctcagtcaggagggcctgcggggcttctgttgggacatggctgctcagctctacccagatgacagctgcacgggtccggaggtctttaat

SEQ ID NO: 58918 - DNA, 599 bp, Chicken  19866894316631_2
  misc_feature (1)..(88): n is any nucleotide
nnnnnnnnnnnnnnnnnnnnnnnnnnnnnnnnnnnnnnnnnnnnnnnnnnnnnnnnnnnnnnnnnnnnnnnnnnnnnnnnnnnnnnnnataggcccccgccccgcccttcgcccaccggcacgagcctccccccagcccttcacaccacccgcccctcatgtgagaggaacgtcgggcgaacgccttaccgcctcaccgccgtagcggcggggaaagaggacaggcggtgcctccgcggccyttatatagcgcccgctgctcccgcgagatccgcgcgctcccgacgccgctggaacggscggggagggggagccagcgggatgggtgccgccgcctattggtcgagcaggagcacgtgactggaggcggcattccgcctctcacctgacgggcagcggggtgtgcgtgcgggtcttggggccgctgcagctgggggagggcctcaggctcctcagtcaggagggcctgcggggcttctgttgggacatggctgctcagctctacccagatgacagctgcacgggtccggaggtctttaatgtgcagacattcggtgtgaagtatcagctgcatagaggttttgaggagctaaatacgg

SEQ ID NO: 58919 - DNA, 600 bp, Chicken  19866894316637_1
tcccattccggccggcggaccgcatcgtgtgctcctggactgccatgcagagggctgatgagaacaacgggtgcctagttgtcctgccagggacacacacattgcctctgaagcctcacggctatccggagtgggaggtagagttgcatggaggcactgggggtgtgtgtgtgtgtgtgctggggccacgctgcagctggggagggttcacatggagagatggtgctcaggacaaagctgaggctttcagcaatggcttttctgtctgtccaaacactcattgttgctttctggcagagytgcttagtttacttcactccgtataactcagcagtggctctcctgaacctggcagatttgctcttgtacccaacttcacgtaaagccctgtggagtgaggttgctttgtttcttcatcaagaaacgcctggtaaatcatggagaaatgttggcctactctccagtatactctccaacttgtggacctaggtgttggaggggattcttttctggaactgaattgcaccccaagttcagggccaggacctaaggcttctgaatagtctggcacattgtagcaaagctgcataaacatatgca

SEQ ID NO: 58920 - DNA, 599 bp, Chicken  19866894316644_1
  misc_feature (1)..(38): n is any nucleotide
nnnnnnnnnnnnnnnnnnnnnnnnnnnnnnnnnnnnnnggacggccccggcagtccccagctccgggacatacaggagaaaaacatagacctgcaaaataaagagaaatatttcctcatgcacagcgaccggacagagtgggacttgggaaagggaatggaggagccccgttgtccccccgcggaggggcccggggcacaagggacgatcccacccgcggtacccggggccgtaccgggaggagtgtggcatctgcggggctacacctcccgaaaatgagcgctgaaaatctctgggtcytttccctgtgctccrtggagagccccgcccgaggatgaagcgaacgcacaccttcttttccttcttcctatcattttaataagcgaaaggattatccrgaactaagtggcagcggtcgtgttgctacagctatgctaaaggtacgtaaacacatcggcaagcttaaaagatgcttcatactcacagacatgtctgtgcaagtgctgtatttgcaggcatagcattgtacaccatctgagtttgtgcttcaaggatgtgtcgggatacctgactccacaaactcaggtcrgggttatggc

SEQ ID NO: 58921 - DNA, 599 bp, Chicken  19866894316644_2
  misc_feature (1)..(23): n is any nucleotide
nnnnnnnnnnnnnnnnnnnnnnnggacggccccggcagtccccagctccgggacatacaggagaaaaacatagacctgcaaaataaagagaaatatttcctcatgcacagcgaccggacagagtgggacttgggaaagggaatggaggagccccgttgtccccccgcggaggggcccggggcacaagggacgatcccacccgcggtacccggggccgtaccgggaggagtgtggcatctgcggggctacacctcccgaaaatgagcgctgaaaatctctgggtcytttccctgtgctccrtggagagccccgcccgaggatgaagcgaacgcacaccttcttttccttcttcctatcattttaataagcgaaaggattatccrgaactaagtggcagcggtcgtgttgctacagctatgctaaaggtacgtaaacacatcggcaagcttaaaagatgcttcatactcacagacatgtctgtgcaagtgctgtatttgcaggcatagcattgtacaccatctgagtttgtgcttcaaggatgtgtcgggatacctgactccacaaactcaggtcrgggttatggcacaccagactgactt

SEQ ID NO: 58922 - DNA, 599 bp, Chicken  19866894316644_3
  misc_feature (1)..(21): n is any nucleotide
nnnnnnnnnnnnnnnnnnnnnggacggccccggcagtccccagctccgggacatacaggagaaaaacatagacctgcaaaataaagagaaatatttcctcatgcacagcgaccggacagagtgggacttgggaaagggaatggaggagccccgttgtccccccgcggaggggcccggggcacaagggacgatcccacccgcggtacccggggccgtaccgggaggagtgtggcatctgcggggctacacctcccgaaaatgagcgctgaaaatctctgggtcytttccctgtgctccrtrgagagccccgcccgaggatgaagcgaacgcacaccttcttttccttcttcctatcattttaataagcgaaaggattatccrgaactaagtggcagcggtcgtgttgctacagctatgctaaaggtacgtaaacacatcggcaagcttaaaagatgcttcatactcacagacatgtctgtgcaagtgctgtatttgcaggcatagcattgtacaccatctgagtttgtgcttcaaggatgtgtcgggatacctgactccacaaactcaggtcrgggttatggcacaccagactgacttaa

SEQ ID NO: 58923 - DNA, 599 bp, Chicken  19866894316644_4; identical to SEQ ID NO: 58922
  misc_feature (1)..(21): n is any nucleotide

SEQ ID NO: 58924 - DNA, 600 bp, Chicken  19866894316644_5
taaagagaaatatttcctcatgcacagcgaccggacagagtgggacttgggaaagggaatggaggagccccgttgtccccccgcggaggggcccggggcacaagggacgatcccacccgcggtacccggggccgtaccgggaggagtgtggcatctgcggggctacacctcccgaaaatgagcgctgaaaatctctgggtcytttccctgtgctccrtggagagccccgcccgaggatgaagcgaacgcacaccttcttttccttcttcctatcattttaataagcgaaaggattatccrgaactaagtggcagcggtcgtgttgctacagctatgctaaaggtacgtaaacacatcggcaagcttaaaagatgcttcatactcacagacatgtctgtgcaagtgctgtatttgcaggcatagcattgtacaccatctgagtttgtgcttcaaggatgtgtcgggatacctgactccacaaactcaggtcrgggttatggcacaccagactgacttaaagaaaaaagaagaaagagtggatttattcttactgattttattacagtatttctaaatggaaagcaagcagtattatgtaag

SEQ ID NO: 58925 - DNA, 600 bp, Chicken  19866894316644_6
tctctgggtcytttccctgtgctccrtggagagccccgcccgaggatgaagcgaacgcacaccttcttttccttcttcctatcattttaataagcgaaaggattatccrgaactaagtggcagcggtcgtgttgctacagctatgctaaaggtacgtaaacacatcggcaagcttaaaagatgcttcatactcacagacatgtctgtgcaagtgctgtatttgcaggcatagcattgtacaccatctgagtttgtgcttcaaggatgtgtcgggatacctgactccacaaactcaggtcrgggttatggcacaccagactgacttaaagaaaaaagaagaaagagtggatttattcttactgattttattacagtatttctaaatggaaagcaagcagtattatgtaagttacatgacttccatgactacactgtaggaacacattataaaatatgggcacgggctgcatgcatattgtttgcacattggatataaaatatataggagtaaccagcatccacattcttctctttattctggaaagctctcatatattttcagagtctgacagtgaaacagagcagacggtttatagattc

SEQ ID NO: 58926 - DNA, 599 bp, Chicken  19866894316649_1
  misc_feature (1)..(207): n is any nucleotide
nnnnnnnnnnnnnnnnnnnnnnnnnnnnnnnnnnnnnnnnnnnnnnnnnnnnnnnnnnnnnnnnnnnnnnnnnnnnnnnnnnnnnnnnnnnnnnnnnnnnnnnnnnnnnnnnnnnnnnnnnnnnnnnnnnnnnnnnnnnnnnnnnnnnnnnnnnnnnnnnnnnnnnnnnnnnnnnnnnnnnnnnnnnnnnnnnnnnnnnnnnnnnnntaataagtcagatttctgtttacctttctctcatccatccatgaactcctcaactgtcagattttgttccatttggcaaatggatctcttcasctcyctccatcctttttaccactttgtttggcagcaacacctgtttccgacttgagggccaaaaatccacgtgtcacattcaacgtgatcctctctatgtattcgggtcagttttccagttacgtgcaccatttagtgcaatgcactgtctaaccctgagaaaatgaaatcttactttaaggtacacatttactacacatgtaaaatactgctgctaaaaacagcttccctcatatacatttctcctttctatctagcagctgctctcctgcctctgtcactgtaatacataatagctc

SEQ ID NO: 58927 - DNA, 599 bp, Chicken  19866894316649_2
  misc_feature (1)..(203): n is any nucleotide
nnnnnnnnnnnnnnnnnnnnnnnnnnnnnnnnnnnnnnnnnnnnnnnnnnnnnnnnnnnnnnnnnnnnnnnnnnnnnnnnnnnnnnnnnnnnnnnnnnnnnnnnnnnnnnnnnnnnnnnnnnnnnnnnnnnnnnnnnnnnnnnnnnnnnnnnnnnnnnnnnnnnnnnnnnnnnnnnnnnnnnnnnnnnnnnnnnnnnnnnnnntaataagtcagatttctgtttacctttctctcatccatccatgaactcctcaactgtcagattttgttccatttggcaaatggatctcttcasctcyctccatcctttttaccactttgtttggcagcaacacctgtttccgacttgagggccaaaaatccacgtgtcacattcaacgtgatcctctctatgtattcgggtcagttttccagttacgtgcaccatttagtgcaatgcactgtctaaccctgagaaaatgaaatcttactttaaggtacacatttactacacatgtaaaatactgctgctaaaaacagcttccctcatatacatttctcctttctatctagcagctgctctcctgcctctgtcactgtaatacataatagctcacag

SEQ ID NO: 58928 - DNA, 600 bp, Chicken  19866894316649_3
caacgtgatcctctctatgtattcgggtcagttttccagttacgtgcaccatttagtgcaatgcactgtctaaccctgagaaaatgaaatcttactttaaggtacacatttactacacatgtaaaatactgctgctaaaaacagcttccctcatatacatttctcctttctatctagcagctgctctcctgcctctgtcactgtaatacataatagctcacagggttgctatcagggcattcaggacttctttgcatgctgtcaatcaggatgccatcagccttcaccccactgacttaygtcagctcccactcctctgtccttatctttagagaagctactaaacatccacatctaattttccctcttaacgttcctttgctgagctccataaacaagagtttcaacagcagtgagacaatctacctactgatcaatgctggcttaatgtcaccttgtgtttttattacctactttcatctgttgtctaaagcgttacctcttaaaaaactccaggttttaaaaatatgtgtaytgagcatttctcttggtttcatgttttcttcaattttttattcttctgaaagatctccttcaccc

SEQ ID NO: 58929 - DNA, 600 bp, Chicken  19866894316649_4
ggcattcaggacttctttgcatgctgtcaatcaggatgccatcagccttcaccccactgacttaygtcagctcccactcctctgtccttatctttagagaagctactaaacatccacatctaattttccctcttaacgttcctttgctgagctccataaacaagagtttcaacagcagtgagacaatctacctactgatcaatgctggcttaatgtcaccttgtgtttttattacctactttcatctgttgtctaaagcgttacctcttaaaaaactccaggttttaaaaatatgtgtaytgagcatttctcttggtttcatgttttcttcaattttttattcttctgaaagatctccttcacccaaacaggtcatacagcacatttttcttcaccaaccccagtaaacctgtacatgttttggtttagatkcacgtttccaccacactgcccttatttcttctgagaagaccttacagaatacatctcgcttacccaccttgttccatttctcctttcatttacacagaagatgaaaactttattaatccttctcaraagtaagagctgttcataatagagtcaaacatttctgcagca

SEQ ID NO: 58930 - DNA, 600 bp, Chicken  19866894316649_5
ttaacgttcctttgctgagctccataaacaagagtttcaacagcagtgagacaatctacctactgatcaatgctggcttaatgtcaccttgtgtttttattacctactttcatctgttgtctaaagcgttacctcttaaaaaactccaggttttaaaaatatgtgtaytgagcatttctcttggtttcatgttttcttcaattttttattcttctgaaagatctccttcacccaaacaggtcatacagcacatttttcttcaccaaccccagtaaacctgtacatgttttggtttagatkcacgtttccaccacactgcccttatttcttctgagaagaccttacagaatacatctcgcttacccaccttgttccatttctcctttcatttacacagaagatgaaaactttattaatccttctcaraagtaagagctgttcataatagagtcaaacatttctgcagcaggagacagaaggctgctggatttataatatccctaatcttctgctctacgctgtgagtcaaygttcagttaaaaagcttctgattatacttgacagtcttctctcttcttagctgaaggacrttttttaaac

SEQ ID NO: 58931 - DNA, 600 bp, Chicken  19866894316649_6
cgttacctcttaaaaaactccaggttttaaaaatatgtgtaytgagcatttctcttggtttcatgttttcttcaattttttattcttctgaaagatctccttcacccaaacaggtcatacagcacatttttcttcaccaaccccagtaaacctgtacatgttttggtttagatkcacgtttccaccacactgcccttatttcttctgagaagaccttacagaatacatctcgcttacccaccttgttccatttctcctttcatttacacagaagatgaaaactttattaatccttctcaraagtaagagctgttcataatagagtcaaacatttctgcagcaggagacagaaggctgctggatttataatatccctaatcttctgctctacgctgtgagtcaaygttcagttaaaaagcttctgattatacttgacagtcttctctcttcttagctgaaggacrttttttaaaccatttctgaattggaaatgctctttaaaaaaaaatgaagaatcagcaaaamaaacgcctttagcctctttcttctattcttcaaatgttaaggaatccacaaaacaggaatgcagaaagaacactc

SEQ ID NO: 58932 - DNA, 553 bp, Chicken  19866894316649_7
cccaaacaggtcatacagcacatttttcttcaccaaccccagtaaacctgtacatgttttggtttagatkcacgtttccaccacactgcccttatttcttctgagaagaccttacagaatacatctcgcttacccaccttgttccatttctcctttcatttacacagaagatgaaaactttattaatccttctcaraagtaagagctgttcataatagagtcaaacatttctgcagcaggagacagaaggctgctggatttataatatccctaatcttctgctctacgctgtgagtcaaygttcagttaaaaagcttctgattatacttgacagtcttctctcttcttagctgaaggacrttttttaaaccatttctgaattggaaatgctctttaaaaaaaaatgaagaatcagcaaaamaaacgcctttagcctctttcttctattcttcaaatgttaaggaatccacaaaacaggaatgcagaaagaacactccatttcagccttcttgctagtgccaaggtggtccaccagagcaatgccatcccccag

SEQ ID NO: 58933 - DNA, 493 bp, Chicken  19866894316649_8
ggtttagatkcacgtttccaccacactgcccttatttcttctgagaagaccttacagaatacatctcgcttacccaccttgttccatttctcctttcatttacacagaagatgaaaactttattaatccttctcaraagtaagagctgttcataatagagtcaaacatttctgcagcaggagacagaaggctgctggatttataatatccctaatcttctgctctacgctgtgagtcaaygttcagttaaaaagcttctgattatacttgacagtcttctctcttcttagctgaaggacrttttttaaaccatttctgaattggaaatgctctttaaaaaaaaatgaagaatcagcaaaamaaacgcctttagcctctttcttctattcttcaaatgttaaggaatccacaaaacaggaatgcagaaagaacactccatttcagccttcttgctagtgccaaggtggtccaccagagcaatgccatcccccag

SEQ ID NO: 58934 - DNA, 432 bp, Chicken  19866894316649_9
catctcgcttacccaccttgttccatttctcctttcatttacacagaagatgaaaactttattaatccttctcaraagtaagagctgttcataatagagtcaaacatttctgcagcaggagacagaaggctgctggatttataatatccctaatcttctgctctacgctgtgagtcaaygttcagttaaaaagcttctgattatacttgacagtcttctctcttcttagctgaaggacrttttttaaaccatttctgaattggaaatgctctttaaaaaaaaatgaagaatcagcaaaamaaacgcctttagcctctttcttctattcttcaaatgttaaggaatccacaaaacaggaatgcagaaagaacactccatttcagccttcttgctagtgccaaggtggtccaccagagcaatgccatcccccag

SEQ ID NO: 58935 - DNA, 600 bp, Chicken  19866894316655_1
atgcaagagaaatacaaatattctctctgaagctgatgttaaagctaggagacatcagtatggcagtgctcaaggctgtaatgaattcctcacagcaagtgttgaaaaggaaggtgcaggatgaatcccataggtaggattcatgccttgcttattcggagcagcttaacttcaaaggcaaggagcaagatttgtgtggttccccctctgccttttcttaatgtatatttcagttcaattaatttttctttttcctaagtagtagttaacagggctgatgatacacttggagaaatccarctcagccaggttatagaatctgacttttcagatgtcatgggcttatatatatatatgtgcttgttctttttgttatcactgataacaaagataagttgtccaaagtttggagtgcagyggagcctgggagagctgagaaagctcaaaaaagatggacaaatgtgatattttttcctactttttaactaccacakctctggtgaaacaaatcaaacacagatttaaaacttccctgcttgaacttctctttcccttccctctccccggggtttctgttttagagctcttgaactgatttgt

SEQ ID NO: 58936 - DNA, 600 bp, Chicken  19866894316655_2
ggatgaatcccataggtaggattcatgccttgcttattcggagcagcttaacttcaaaggcaaggagcaagatttgtgtggttccccctctgccttttcttaatgtatatttcagttcaattaatttttctttttcctaagtagtagttaacagggctgatgatacacttggagaaatccarctcagccaggttatagaatctgacttttcagatgtcatgggcttatatatatatatgtgcttgttctttttgttatcactgataacaaagataagttgtccaaagtttggagtgcagyggagcctgggagagctgagaaagctcaaaaaagatggacaaatgtgatattttttcctactttttaactaccacakctctggtgaaacaaatcaaacacagatttaaaacttccctgcttgaacttctctttcccttccctctccccggggtttctgttttagagctcttgaactgatttgttgagacagatcaaagtataaagtatttctcagctggtcttacttctctcactggattgtagtggcaggagacaggcagctcattacaactgggagagcattgccgtgaaactgacttg

SEQ ID NO: 58937 - DNA, 600 bp, Chicken  19866894316655_3
tgtggttccccctctgccttttcttaatgtatatttcagttcaattaatttttctttttcctaagtagtagttaacagggctgatgatacacttggagaaatccarctcagccaggttatagaatctgacttttcagatgtcatgggcttatatatatatatgtgcttgttctttttgttatcactgataacaaagataagttgtccaaagtttggagtgcagyggagcctgggagagctgagaaagctcaaaaaagatggacaaatgtgatattttttcctactttttaactaccacakctctggtgaaacaaatcaaacacagatttaaaacttccctgcttgaacttctctttcccttccctctccccggggtttctgttttagagctcttgaactgatttgttgagacagatcaaagtataaagtatttctcagctggtcttacttctctcactggattgtagtggcaggagacaggcagctcattacaactgggagagcattgccgtgaaactgacttgagaaaaataagattctgctggagctgtagtccagtctcaccatcacagaagcaaattagtttagaatgaataaata

SEQ ID NO: 58938 - DNA, 599 bp, Chicken  19866894316658_1
  misc_feature (1)..(216): n is any nucleotide
nnnnnnnnnnnnnnnnnnnnnnnnnnnnnnnnnnnnnnnnnnnnnnnnnnnnnnnnnnnnnnnnnnnnnnnnnnnnnnnnnnnnnnnnnnnnnnnnnnnnnnnnnnnnnnnnnnnnnnnnnnnnnnnnnnnnnnnnnnnnnnnnnnnnnnnnnnnnnnnnnnnnnnnnnnnnnnnnnnnnnnnnnnnnnnnnnnnnnnnnnnnnnnnnnnnnnnnntgaggcctttcttcctttttccttttccttttccgtttcctttcctcatggcacttctgagtggtggtgtgacagttctagtgwagcatggtctgastacaactggatggagaagaacagtgctaaraaatgccatgtaaaagagggggacagaggaaatgtttcctcccttataaagtygggaaactttcgaaagatggttgctgcggattatgaaaacattcagctctttacagctctaaaacwcaaattggcagcttaaacaacatttgaaatttgggaggtgctctgcttttartaacattctgtaactgcttactgaccattgtctgcccttctaactctcccaggaagtatttatttccagaaagcaagcttgtgtc

SEQ ID NO: 58939 - DNA, 599 bp, Chicken  19866894316658_2
  misc_feature (1)..(203): n is any nucleotide
nnnnnnnnnnnnnnnnnnnnnnnnnnnnnnnnnnnnnnnnnnnnnnnnnnnnnnnnnnnnnnnnnnnnnnnnnnnnnnnnnnnnnnnnnnnnnnnnnnnnnnnnnnnnnnnnnnnnnnnnnnnnnnnnnnnnnnnnnnnnnnnnnnnnnnnnnnnnnnnnnnnnnnnnnnnnnnnnnnnnnnnnnnnnnnnnnnnnnnnnnnntgaggcctttcttcctttttccttttccttttccgtttcctttcctcatggcacttctgagtggtggtgtgacagttctagtgwagcatggtctgastacaactggatggagaagaacagtgctaaraaatgccatgtaaaagagggggacagaggaaatgtttcctcccttataaagtygggaaactttcgaaagatggttgctgcggattatgaaaacattcagctctttacagctctaaaacwcaaattggcagcttaaacaacatttgaaatttgggaggtgctctgcttttartaacattctgtaactgcttactgaccattgtctgcccttctaactctcccaggaagtatttatttccagaaagcaagcttgtgtcaatgagactttca

SEQ ID NO: 58940 - DNA, 599 bp, Chicken  19866894316658_3
  misc_feature (1)..(173): n is any nucleotide
nnnnnnnnnnnnnnnnnnnnnnnnnnnnnnnnnnnnnnnnnnnnnnnnnnnnnnnnnnnnnnnnnnnnnnnnnnnnnnnnnnnnnnnnnnnnnnnnnnnnnnnnnnnnnnnnnnnnnnnnnnnnnnnnnnnnnnnnnnnnnnnnnnnnnnnnnnnnnnnnnnnnnnnnnnnnntgaggcctttcttcctttttccttttccttttccgtttcctttcctcatggcacttctgagtggtggtgtgacagttctagtgwagcatggtctgastacaactggatggagaagaacagtgctaaraaatgccatgtaaaagagggggacagaggaaatgtttcctcccttataaagtygggaaactttcgaaagatggttgctgcggattatgaaaacattcagctctttacagctctaaaacwcaaattggcagcttaaacaacatttgaaatttgggaggtgctctgcttttartaacattctgtaactgcttactgaccattgtctgcccttctaactctcccaggaagtatttatttccagaaagcaagcttgtgtcaatgagactttcatctaaaataacaatacttattagtaattaa

SEQ ID NO: 58941 - DNA, 599 bp, Chicken  19866894316658_4
  misc_feature (1)..(120): n is any nucleotide
nnnnnnnnnnnnnnnnnnnnnnnnnnnnnnnnnnnnnnnnnnnnnnnnnnnnnnnnnnnnnnnnnnnnnnnnnnnnnnnnnnnnnnnnnnnnnnnnnnnnnnnnnnnnnnnnnnnnnnnntgaggcctttcttcctttttccttttccttttccgtttcctttcctcatggcacttctgagtggtggtgtgacagttctagtgwagcatggtctgastacaactggatggagaagaacagtgctaaraaatgccatgtaaaagagggggacagaggaaatgtttcctcccttataaagtygggaaactttcgaaagatggttgctgcggattatgaaaacattcagctctttacagctctaaaacwcaaattggcagcttaaacaacatttgaaatttgggaggtgctctgcttttartaacattctgtaactgcttactgaccattgtctgcccttctaactctcccaggaagtatttatttccagaaagcaagcttgtgtcaatgagactttcatctaaaataacaatacttattagtaattaacttaagtgttgactttttgtttcagaagtgactttgtggaaccttcatgggta

SEQ ID NO: 58942 - DNA, 599 bp, Chicken  19866894316658_5
  misc_feature (1)..(54): n is any nucleotide
nnnnnnnnnnnnnnnnnnnnnnnnnnnnnnnnnnnnnnnnnnnnnnnnnnnnnntgaggcctttcttcctttttccttttccttttccgtttcctttcctcatggcacttctgagtggtggtgtgacagttctagtgwagcatggtctgastacaactggatggagaagaacagtgctaaraaatgccatgtaaaagagggggacagaggaaatgtttcctcccttataaagtygggaaactttcgaaagatggttgctgcggattatgaaaacattcagctctttacagctctaaaacwcaaattggcagcttaaacaacatttgaaatttgggaggtgctctgcttttartaacattctgtaactgcttactgaccattgtctgcccttctaactctcccaggaagtatttatttccagaaagcaagcttgtgtcaatgagactttcatctaaaataacaatacttattagtaattaacttaagtgttgactttttgtttcagaagtgactttgtggaaccttcatgggtacagccagaccggttgagcccaagagtccagctctctcatccacaagctctcatgggcttaagtgga

SEQ ID NO: 58943 - DNA, 599 bp, Chicken  19866894316658_6
  misc_feature (1)..(2): n is any nucleotide
nntgaggcctttcttcctttttccttttccttttccgtttcctttcctcatggcacttctgagtggtggtgtgacagttctagtgwagcatggtctgastacaactggatggagaagaacagtgctaaraaatgccatgtaaaagagggggacagaggaaatgtttcctcccttataaagtygggaaactttcgaaagatggttgctgcggattatgaaaacattcagctctttacagctctaaaacwcaaattggcagcttaaacaacatttgaaatttgggaggtgctctgcttttartaacattctgtaactgcttactgaccattgtctgcccttctaactctcccaggaagtatttatttccagaaagcaagcttgtgtcaatgagactttcatctaaaataacaatacttattagtaattaacttaagtgttgactttttgtttcagaagtgactttgtggaaccttcatgggtacagccagaccggttgagcccaagagtccagctctctcatccacaagctctcatgggcttaagtggaggcccttgctcacaacatcggagtctggagcagatgggactttcgtcaaagg

SEQ ID NO: 58944 - DNA, 600 bp, Chicken  19866894316659_1
attcacagaggactgctgaagagctggacagggtaatcacccaggccaaagaaacacatttccaaatgaacacaggcacccttgatttccactctcctcctcttgctaattcaagcttggtttttaggtcatttaatatggatgcttacagttcccacctgtgcatgaagtgggaatgtgacaggtccactggcacccctctaaatgcgtaacactttatttcagtggcttgcctcctcaatcacttgctcaaattgcaattaacagagcatgcatttccttttcctaagatttctcccrtttcttcataactcacagggcattcacctttcaactactgtcagagctccccttcttcctcctggttattttgggtctgcatttcacaccwcggctttctgctttcatctgtagcgtgagctacctgttcttccaatccagctacttctttaggcccttcaggaaacactaaggaacaggttgtttgttctcactccacttcagccaaaccacaggcaactttttaaatatcctctctgatgaccacaacgccgcaggagctgtctttcccctggctctgaccccagctccctttgagta

SEQ ID NO: 58945 - DNA, 600 bp, Chicken  19866894316659_2
ctctcctcctcttgctaattcaagcttggtttttaggtcatttaatatggatgcttacagttcccacctgtgcatgaagtgggaatgtgacaggtccactggcacccctctaaatgcgtaacactttatttcagtggcttgcctcctcaatcacttgctcaaattgcaattaacagagcatgcatttccttttcctaagatttctcccrtttcttcataactcacagggcattcacctttcaactactgtcagagctccccttcttcctcctggttattttgggtctgcatttcacaccwcggctttctgctttcatctgtagcgtgagctacctgttcttccaatccagctacttctttaggcccttcaggaaacactaaggaacaggttgtttgttctcactccacttcagccaaaccacaggcaactttttaaatatcctctctgatgaccacaacgccgcaggagctgtctttcccctggctctgaccccagctccctttgagtagatcatcacatctactacactcaacctactgaatgcaaggacctacttactcagcatttttttttacattgcgctgtgatttcttgtacgt

SEQ ID NO: 58946 - DNA, 599 bp, Chicken  19866894316665_1
  misc_feature (1)..(45): n is any nucleotide
nnnnnnnnnnnnnnnnnnnnnnnnnnnnnnnnnnnnnnnnnnnnnctgaaattctctcctttccctttttcttctttttctccccattagcaccagctgaggctatatccttcctatcatgtcatgtggtctgacagtagcagagcacttcgtcacattaccctttcccacttcagacctgggatgcagccattcatatcagctgttgttgttgtgttgcatcaggcaaaatcacatggagagattttgtgtcctccattcctggagagaatacgcatttcaaggtttctttaatgaggratgtacttctaatgcttatgactcaagataagtacttgaaaacactgcctgagcatcaccagtctacaatctagaaagtaagaacttagcacttgaaacaaagccatgaagtttataacctgtcactttacaatatcagagcttggtcaatattttaagcattattacttcaaattaagggctgctatytaaatgcaatttgatttagatcagccaattcagwaaataataacagataattgtcaccatcaccccttctcctgtgatttttaatctgagtttgtacaggaaagtttcat

SEQ ID NO: 58947 - DNA, 600 bp, Chicken  19866894316665_2
ccattcatatcagctgttgttgttgtgttgcatcaggcaaaatcacatggagagattttgtgtcctccattcctggagagaatacgcatttcaaggtttctttaatgaggratgtacttctaatgcttatgactcaagataagtacttgaaaacactgcctgagcatcaccagtctacaatctagaaagtaagaacttagcacttgaaacaaagccatgaagtttataacctgtcactttacaatatcagagcttggtcaatattttaagcattattacttcaaattaagggctgctatytaaatgcaatttgatttagatcagccaattcagwaaataataacagataattgtcaccatcaccccttctcctgtgatttttaatctgagtttgtacaggaaagtttcatacggcagttctttcatcctttatgatggagaaggtgctcagaaggattatgtggtgtctgaagagattgctaatgtctgtgttttaggraacaggaaccttcaaacaatgcatcaatttggagctgtccgcagacaggcacaactgtaattcatcatttactttmtcgggaagaaagagttttcagcaaa

SEQ ID NO: 58948 - DNA, 600 bp, Chicken  19866894316665_3
aggcaaaatcacatggagagattttgtgtcctccattcctggagagaatacgcatttcaaggtttctttaatgaggratgtacttctaatgcttatgactcaagataagtacttgaaaacactgcctgagcatcaccagtctacaatctagaaagtaagaacttagcacttgaaacaaagccatgaagtttataacctgtcactttacaatatcagagcttggtcaatattttaagcattattacttcaaattaagggctgctatytaaatgcaatttgatttagatcagccaattcagwaaataataacagataattgtcaccatcaccccttctcctgtgatttttaatctgagtttgtacaggaaagtttcatacggcagttctttcatcctttatgatggagaaggtgctcagaaggattatgtggtgtctgaagagattgctaatgtctgtgttttaggraacaggaaccttcaaacaatgcatcaatttggagctgtccgcagacaggcacaactgtaattcatcatttactttmtcgggaagaaagagttttcagcaaagacaattatggatgagcacaagtagttggtaatt

SEQ ID NO: 58949 - DNA, 600 bp, Chicken  19866894316665_4
gcacttgaaacaaagccatgaagtttataacctgtcactttacaatatcagagcttggtcaatattttaagcattattacttcaaattaagggctgctatytaaatgcaatttgatttagatcagccaattcagwaaataataacagataattgtcaccatcaccccttctcctgtgatttttaatctgagtttgtacaggaaagtttcatacggcagttctttcatcctttatgatggagaaggtgctcagaaggattatgtggtgtctgaagagattgctaatgtctgtgttttaggraacaggaaccttcaaacaatgcatcaatttggagctgtccgcagacaggcacaactgtaattcatcatttactttmtcgggaagaaagagttttcagcaaagacaattatggatgagcacaagtagttggtaattggggttaaagattgttcaggtaattcattacctacaaatccctctccatagttgattacaattggaggtatgagaaatactcttgacccctgaatttattggatcttcgttttgcattcagaagagaaggtctcatttagggggtacatatatacatgcaaatgg

SEQ ID NO: 58950 - DNA, 600 bp, Chicken  19866894316665_5
ttacttcaaattaagggctgctatytaaatgcaatttgatttagatcagccaattcagwaaataataacagataattgtcaccatcaccccttctcctgtgatttttaatctgagtttgtacaggaaagtttcatacggcagttctttcatcctttatgatggagaaggtgctcagaaggattatgtggtgtctgaagagattgctaatgtctgtgttttaggraacaggaaccttcaaacaatgcatcaatttggagctgtccgcagacaggcacaactgtaattcatcatttactttmtcgggaagaaagagttttcagcaaagacaattatggatgagcacaagtagttggtaattggggttaaagattgttcaggtaattcattacctacaaatccctctccatagttgattacaattggaggtatgagaaatactcttgacccctgaatttattggatcttcgttttgcattcagaagagaaggtctcatttagggggtacatatatacatgcaaatggattctatcaaaaacaattccacattttgaaaacggtatcttatcagactaagattaacagcaaactacaggaaaaa

SEQ ID NO: 58951 - DNA, 600 bp, Chicken  19866894316672_1
cagaccaaaagcagaaggcaactctgatgctgcagcagcatccaaaacaccttcactgctctcttaaaagaagtttaatctttccaggagtactttatgcctactcctagtcttggggctggtaggttctctttgctgttgtacagcttcctttgggtctttttttggagactgaacctagatcttttggcattagatgtgaaagctcatggaattgctagaagatcaattacatcagcagactgcagtgtgaggctcctgcaccaattcatctgccagcactagaagacttgagtcccktatctttcatttttaggaaagtccaggatctcttttttaagaatgaacatttttatttgcttctgcaagtattttctgagtggtttggtatgattttaaaattaaagtgttttcagtccagctcttggccaaggggaacccttttccctggttgctctctgctggtttgggagcaatttcagtgcaagtgaggtgtaccataggcagaagttatactttccacaggctgctgctgctcagtacctgtttgctggctgaattgcagagtccagacacacagatgatgtggaacaagaacta

SEQ ID NO: 58952 - DNA, 599 bp, Chicken  19866894316675_1
  misc_feature (1)..(81): n is any nucleotide
nnnnnnnnnnnnnnnnnnnnnnnnnnnnnnnnnnnnnnnnnnnnnnnnnnnnnnnnnnnnnnnnnnnnnnnnnnnnnnnnnaaaagaaagttcaggacttcaaaagttcagtttttgccttccaacagttgccagcttttgacatctagactctgaagcaaggttgatctttgctctcaaaattgctaattctgtctcagaggttgaaattatcagggaaaaaagcagacctccataaagctgaattttggttttcattttgacagattgcttctgtgtagggattgtcagagtgactgygcagtttttcacttgccctatgtctgccttgtatgaatggagttgattgggaattttctaattaaagaaatctcatctaattctgattcataaaaattcatctcaaccacactttaggagtggaagagaatagggaataagaggagtgtggatgttctgctgccaagtatcaagtaactccatcatgaaagcttctactgggaagctgaagtttgggctgagattaccatttctcctgaactcatgaagtcaatttcccccagcctccacctatccacaggccaggtctctctgtttgt

SEQ ID NO: 58953 - DNA, 600 bp, Chicken  19866894316675_2
ggaataagaggagtgtggatgttctgctgccaagtatcaagtaactccatcatgaaagcttctactgggaagctgaagtttgggctgagattaccatttctcctgaactcatgaagtcaatttcccccagcctccacctatccacaggccaggtctctctgtttgtacaaggggcaatagctctgatggagctggggatactttctccaaagtagtttgtgaacaggcaaaagctttggagtcttagagaccaaggtttgacctcctttactgaataactgagaaaaattaatttttgaraaaacttgagcacaatccttgtgtttrcaaaggattttctgccatgcaaaatctcatgtcaagcaaatcagatgcttgagtttgtgtctctgatggctgggatgtgtgcccttagagctaggatgaattatatctgagtctataatggagagtgaatgacaaactttggaggccttcatccatcctgatgtgaaattaggagtgaatcagggttctgtggcaagttatgctttctattaggtctcagctttgccgtggaaggtatgtaggcagtgagcgacgaaacgggaaaaggaagaa

SEQ ID NO: 58954 - DNA, 584 bp, Chicken  19866894316675_3
tgccaagtatcaagtaactccatcatgaaagcttctactgggaagctgaagtttgggctgagattaccatttctcctgaactcatgaagtcaatttcccccagcctccacctatccacaggccaggtctctctgtttgtacaaggggcaatagctctgatggagctggggatactttctccaaagtagtttgtgaacaggcaaaagctttggagtcttagagaccaaggtttgacctcctttactgaataactgagaaaaattaatttttgaraaaacttgagcacaatccttgtgtttrcaaaggattttctgccatgcaaaatctcatgtcaagcaaatcagatgcttgagtttgtgtctctgatggctgggatgtgtgcccttagagctaggatgaattatatctgagtctataatggagagtgaatgacaaactttggaggccttcatccatcctgatgtgaaattaggagtgaatcagggttctgtggcaagttatgctttctattaggtctcagctttgccgtggaaggtatgtaggcagtgagcgacgaaacgggaaaaggaagaaagcaaaaggag

SEQ ID NO: 58955 - DNA, 600 bp, Chicken  19866894316680_1
ctgcacgtttctgatatacatgtgctctgtaagctgtacacgcctgcccaatctccgccatgggctttcttttggctgctggtggaaaagagccttaggacgcagcagggagatcgctgctgctgtttttattgctcttgtagtgtcattgcgaagtgcttccatgctttcaagctgtgacattgtgtgctggccctgctgcacggctggtcttgggaaagcaggcgttgattacgagttagcagatggtaaaaatttgaggagtcccaccttgagcacggtcataatcacagcactcgyggattgggaacagccgagtaaaacagctgctgtgtgacacagtaggtcagaagctgagggtgggatacagagctgttgttgatccgtaaatttacacagttgttccgtaaatgaatggcattttaatttggtgatgtactttgacgctgtacccttcttctaacagttttgtaacgagtttccagcacactggatgcttgggttacctgaagtttagaagttccctgctcagcccgctgagcagctgctttagttatactgtgttgtgagaagagctctgtattcaccgctgcttccgtg

SEQ ID NO: 58956 - DNA, 600 bp, Chicken  19866894316689_1
ccagcaggatttcagaatacattacaactgctagcaatgatcaacagaaaatggagctatttttcttctgcatgaacacttgactggcttccagcaaacaccctgcacatacagactgaacactgcagagctgccaacagctcggtgcttcggcaagattgtgttaatatagataatttgctggaattcccagtaaggcaatgcatccagaatcttttcttttgtcaaaactttaacttctacagctgcactgttattttcccctgaagtgaaggggaaattaagaatatatatatatayaccttgctttggtcaaagatgaccccagtatgagaaccaaggtcagactctgagcacatctcaacaggttttggcaccttgtttttcctgcaatctggtggaaggccatacgatttcctgtgaaacctgaagttgcttcctttgtttccttggcaattctgctactctgagatgctgtgcaaggccagcaagcgcagtctggggtggaagctgtcaggaacacaatggaaaccctcacagagccagagctccatggaagtacttggtcctgcaccagggctaacgggactggaaggtgac

SEQ ID NO: 58957 - DNA, 599 bp, Chicken  19866894316691_1
  misc_feature (1)..(153): n is any nucleotide
nnnnnnnnnnnnnnnnnnnnnnnnnnnnnnnnnnnnnnnnnnnnnnnnnnnnnnnnnnnnnnnnnnnnnnnnnnnnnnnnnnnnnnnnnnnnnnnnnnnnnnnnnnnnnnnnnnnnnnnnnnnnnnnnnnnnnnnnnnnnnnnnnnnnnnnnntaaaaactgaaagaaaaccttaaaaaatagtacaataaagcatactttataagacaaaattatttactttgtcttccttatccttgctctaagcatagctcaacacagggagaaattcactcttctcctctacttctttgaggaccraagaagctttttcagccagtatttctttaagacacaattatcacacacagctctagtaggctatcctcatttcattaggcctggaaaagctgtaaggctgtgctaattacaaattatcagatgctgtgctagctcctcctccagtggtccttttcctttttctagctccagtcccctctgtctccctaagtcagtggggytatctttttgtttctatcaaagaataagaaaagaaggctctttcctaaaggctagaaaacaaggtaagctactgcagtacttggaaagagcygttggta

SEQ ID NO: 58958 - DNA, 600 bp, Chicken  19866894316691_2
tataagacaaaattatttactttgtcttccttatccttgctctaagcatagctcaacacagggagaaattcactcttctcctctacttctttgaggaccraagaagctttttcagccagtatttctttaagacacaattatcacacacagctctagtaggctatcctcatttcattaggcctggaaaagctgtaaggctgtgctaattacaaattatcagatgctgtgctagctcctcctccagtggtccttttcctttttctagctccagtcccctctgtctccctaagtcagtggggytatctttttgtttctatcaaagaataagaaaagaaggctctttcctaaaggctagaaaacaaggtaagctactgcagtacttggaaagagcygttggtattaactgaacrttctggtttcctttatcttgctggatatgaaataaatctggcttttaaggctcttgaagtctatttcctgttgtcttctaagagttcctggctagttctgtgttttcaatgtgactttgctgttagctttaggtggaacccaccaaaatggctcatcaagacaacttagggcactcccmcatccccgtgg

SEQ ID NO: 58959 - DNA, 600 bp, Chicken  19866894316691_3
gaggaccraagaagctttttcagccagtatttctttaagacacaattatcacacacagctctagtaggctatcctcatttcattaggcctggaaaagctgtaaggctgtgctaattacaaattatcagatgctgtgctagctcctcctccagtggtccttttcctttttctagctccagtcccctctgtctccctaagtcagtggggytatctttttgtttctatcaaagaataagaaaagaaggctctttcctaaaggctagaaaacaaggtaagctactgcagtacttggaaagagcygttggtattaactgaacrttctggtttcctttatcttgctggatatgaaataaatctggcttttaaggctcttgaagtctatttcctgttgtcttctaagagttcctggctagttctgtgttttcaatgtgactttgctgttagctttaggtggaacccaccaaaatggctcatcaagacaacttagggcactcccmcatccccgtggaggagaatgatgcagcaggaaaccaaggccagcagggtgctagaccacggcaaactagatttcgaagaaaatgcaagcagctgcattcagca

SEQ ID NO: 58960 - DNA, 600 bp, Chicken  19866894316691_4
ttcagccagtatttctttaagacacaattatcacacacagctctagtaggctatcctcatttcattaggcctggaaaagctgtaaggctgtgctaattacaaattatcagatgctgtgctagctcctcctccagtggtccttttcctttttctagctccagtcccctctgtctccctaagtcagtggggytatctttttgtttctatcaaagaataagaaaagaaggctctttcctaaaggctagaaaacaaggtaagctactgcagtacttggaaagagcygttggtattaactgaacrttctggtttcctttatcttgctggatatgaaataaatctggcttttaaggctcttgaagtctatttcctgttgtcttctaagagttcctggctagttctgtgttttcaatgtgactttgctgttagctttaggtggaacccaccaaaatggctcatcaagacaacttagggcactcccmcatccccgtggaggagaatgatgcagcaggaaaccaaggccagcagggtgctagaccacggcaaactagatttcgaagaaaatgcaagcagctgcattcagcacggccagggggagaagaa

SEQ ID NO: 58961 - DNA, 600 bp, Chicken  19866894316691_5
gtcagtggggytatctttttgtttctatcaaagaataagaaaagaaggctctttcctaaaggctagaaaacaaggtaagctactgcagtacttggaaagagcygttggtattaactgaacrttctggtttcctttatcttgctggatatgaaataaatctggcttttaaggctcttgaagtctatttcctgttgtcttctaagagttcctggctagttctgtgttttcaatgtgactttgctgttagctttaggtggaacccaccaaaatggctcatcaagacaacttagggcactcccmcatccccgtggaggagaatgatgcagcaggaaaccaaggccagcagggtgctagaccacggcaaactagatttcgaagaaaatgcaagcagctgcattcagcacggccagggggagaagaaactagggttttgcaaggtaatcagcaagaagaggatgcttgtatggggtaggaggaaggataattttaatgtgacttcaactgcctataagcgctcctgaagcaaggaagcactgaaacaggctgccctgggaggttgtggattctccttctctggagatgttcaagatctgcctggat

SEQ ID NO: 58962 - DNA, 600 bp, Chicken  19866894316692_1
tggcaagtgaaagccatgcaaaatcgggaggaaaggctaaagcacagaagagagaccattctgaagagaaaaaaggaaaagcatatatgcttcttttaagacatgaaatcgatgtaaagagcaaaagatgttcctttaatgatgggaaacagcatgcaaaaaagtagaaatcagttctttatgacagaatattaattgtatataaaacattttcagctatcaagcacagcaaagtgtgcgttatctctaacagaggacagaacgacacaagaaaacggtgtattttgtagcaagaagacmctttatgctacttttgctctgattttacagttatccccatcagtgatactgagcatttgtgggtaacttttaaaaggctccatttccttggactgaaagaataaatataaatattcttatctgatctgaaactgaaaaagaaacacgcaaccttagtgaacagaatgaaaaagcagggatctgtataacctgattactgtttctccaatatctgcattctcaaattcttaaaaatgttttggtaytttcacagttcatacctttcaccttataatacaaggtcagtaaaaagagtcgtcg

SEQ ID NO: 58963 - DNA, 600 bp, Chicken  19866894316692_2
tctaacagaggacagaacgacacaagaaaacggtgtattttgtagcaagaagacmctttatgctacttttgctctgattttacagttatccccatcagtgatactgagcatttgtgggtaacttttaaaaggctccatttccttggactgaaagaataaatataaatattcttatctgatctgaaactgaaaaagaaacacgcaaccttagtgaacagaatgaaaaagcagggatctgtataacctgattactgtttctccaatatctgcattctcaaattcttaaaaatgttttggtaytttcacagttcatacctttcaccttataatacaaggtcagtaaaaagagtcgtcgttttcttctatcamgatagaaaaaaatgagactaatgagcttgtaacatttggagagaagtcccagaacagaattcgggtttttctgatttctactctgatctttcagctgtgcctcttgaggaaccaatgcgagtcagtaggcgaggtaactaccctggaatgtttgaaaaagcctccagccactgtatggtatttaggcatctagttaaaaatctagcccacagcaaagcaatttttacatct

SEQ ID NO: 58964 - DNA, 600 bp, Chicken  19866894316692_3
tgctctgattttacagttatccccatcagtgatactgagcatttgtgggtaacttttaaaaggctccatttccttggactgaaagaataaatataaatattcttatctgatctgaaactgaaaaagaaacacgcaaccttagtgaacagaatgaaaaagcagggatctgtataacctgattactgtttctccaatatctgcattctcaaattcttaaaaatgttttggtaytttcacagttcatacctttcaccttataatacaaggtcagtaaaaagagtcgtcgttttcttctatcamgatagaaaaaaatgagactaatgagcttgtaacatttggagagaagtcccagaacagaattcgggtttttctgatttctactctgatctttcagctgtgcctcttgaggaaccaatgcgagtcagtaggcgaggtaactaccctggaatgtttgaaaaagcctccagccactgtatggtatttaggcatctagttaaaaatctagcccacagcaaagcaatttttacatctagtacttactgctggggaaaaaaaaataatcaaaaaaaaaaaaaaacccacttcagttctgaattaaag

SEQ ID NO: 58965 - DNA, 599 bp, Chicken  19866894316695_1
  misc_feature (1)..(125): n is any nucleotide
nnnnnnnnnnnnnnnnnnnnnnnnnnnnnnnnnnnnnnnnnnnnnnnnnnnnnnnnnnnnnnnnnnnnnnnnnnnnnnnnnnnnnnnnnnnnnnnnnnnnnnnnnnnnnnnnnnnnnnnnnnnnnaaggacgcaggatttttgtccatacaaagaagtattttaggttgaagcatcattcctgaagaacacttttctgtagatgcttttacttgactaacgtctaaatcttgttgatttctgctgtgggaatcaacaagattttttctttttttttttcttttcttttttttgttctccrcatgtagttcagccctgactaatgcctatgaaagctttgtgttctgtttcgcttaccatagcaaatgtttttcttgtcttggcaattgtagtattccttcctgatagccatatggaggagcctctaggaaggcccttccttaccctgtcccctgaccaagccattctctgtatcttttcctgcctcccctcccaccacaccagcaagaagcaggctgttctcatttgcagggttactcacggcctctctcttctatccatccctaccctctttattgctttccagtcacccaactccaa

SEQ ID NO: 58966 - DNA, 600 bp, Chicken  19866894316695_2
tgaaagctttgtgttctgtttcgcttaccatagcaaatgtttttcttgtcttggcaattgtagtattccttcctgatagccatatggaggagcctctaggaaggcccttccttaccctgtcccctgaccaagccattctctgtatcttttcctgcctcccctcccaccacaccagcaagaagcaggctgttctcatttgcagggttactcacggcctctctcttctatccatccctaccctctttattgctttccagtcacccaactccaacagcaggaagctgatgcctctatgggtcytatcgtgctgacctgcactgccatcaacacctgtgttgtgtcctctgtctctcctatgacagcttttagtacttgtttcacttcactattcttatgttgtctatttatttgtcatttcaaggaacaggattctggtttaaatattaggttttggggcactgtagtaacacagataatttactgaagcagtacgtgagactgtgtgtagatgttagctttcattttattgatgtattccttcattttctgctatggctgaagtcttttcctggcttgtgtatgacctacagatttcagtga

SEQ ID NO: 58967 - DNA, 600 bp, Chicken  19866894316702_1
cattttgaaaaagggtatacacacctgctttctcctggaaggcactaaggaggaagctgctgactttaaaagttctcaaagaaggagtctgatcactggaatgagccttctgtgctggagtctaaagcagatgctcaggtcatgctgatggaaatggcaacctatgaaccatcatggagcttcaaaaaaggctctcccagagcctttggggtgaaattttgtggtctgaaatatgtttaattttacttctgatttcaacacactgggaaagcaggggattattttttaattttgcatgakctgagaatgagtaactctttatagttctcgtgaactgagggtctcaaggtccatatcagactaaataatcttgagaatgtctctataagatgggtaaagaaaagggagtatatcagcacttgagattttaaaaagtataggtacacatagaatataaaattagactaggtagtctgctgaaagagcactgctgcgtgtttacttccctctcctcttctactgaagtcccattgacctttccacatacagcagagaaagactatggggagaagtagaaatagtggttaggactttttattt

SEQ ID NO: 58968 - DNA, 600 bp, Chicken  19866894316713_1
agttcaaacttccttatctggcatagcagagcacttcctgtcttttgatagaacagcaggctgccactactactgctgatgctgcctgcagccatcagagagaagtacattaatgacaaagttgctgttgctgcatttcagccagagtaggacagcaaatggtaagattggcagagaaggtgaaggcgatggttttacagttgtatgcattctcttattttacagtcatttttgtctgcccagctatctctggcaatacaaggcatctctcttcttaaataacattttgtgcagtgtctygtctttctcagccttcgagagatgttacctgagaatgctgttggctagtcagaaattgtcctgagtatcagaggcttccagaaaaagcctgtggttgttcaaatgtaggagtcaagttactccctgtggtattcaactcattcaaaagtggagatgacacaagagttatgagatagccatgaccttccagaaacatgtctagaataggtctatatcccaaggcactgaagttgcactagagttctgcatttaggaaaattagttgagtttctttactttgaatctagtcctaagtttgga

SEQ ID NO: 58969 - DNA, 600 bp, Chicken  19866894316719_1
gtacataggtgaaatgttctctttaggccacctttctgagcgtaagatgtgagaaacaagggcagccaggctgtcgtgcaggcttcaggtagaagaattgtacgctcctttcattaaaagaattctgcaggtgaaccttggaaaacagaatttttttttaggaaaggaacttccactgtattataggaaaaacgatgtatcaagcgtggccaactaataacctcatgctttaattaagcggtgacacggttgcttttaacctaaacatagcttttccttggacgtatcagcattggcagygatgatgtcaaagcagtgctctcataggctgtgcttggcttccccagggagaacctccatcagccgagcccaactgtccttggctttgtgccctgaggtttcgggactccgtgctctctccaggcggatgcrtttgcgctttgcaaagggtgttcttgaagccatccaggtgtggagacaggcagtacatacagaggctttgagaacctgcaggagttgttcccgttgcgttctgtcttctcacctgtccattttcaggtcttctttttgcctttagcccctcctgttgcttttatggaa

SEQ ID NO: 58970 - DNA, 600 bp, Chicken  19866894316719_2
gaaccttggaaaacagaatttttttttaggaaaggaacttccactgtattataggaaaaacgatgtatcaagcgtggccaactaataacctcatgctttaattaagcggtgacacggttgcttttaacctaaacatagcttttccttggacgtatcagcattggcagygatgatgtcaaagcagtgctctcataggctgtgcttggcttccccagggagaacctccatcagccgagcccaactgtccttggctttgtgccctgaggtttcgggactccgtgctctctccaggcggatgcrtttgcgctttgcaaagggtgttcttgaagccatccaggtgtggagacaggcagtacatacagaggctttgagaacctgcaggagttgttcccgttgcgttctgtcttctcacctgtccattttcaggtcttctttttgcctttagcccctcctgttgcttttatggaacccacttgtcagactgcttacacccttcgagcacgtgatgagcgaattaaacacaaattgaaatccggtcaataagaaatcccagcagaaatgcattgactaaatctgttagtgttacctgagggaattgag

SEQ ID NO: 58971 - DNA, 599 bp, Chicken  19866894316720_1
  misc_feature (1)..(83): n is any nucleotide
nnnnnnnnnnnnnnnnnnnnnnnnnnnnnnnnnnnnnnnnnnnnnnnnnnnnnnnnnnnnnnnnnnnnnnnnnnnnnnnnnnnctgtgaaaaattggtttaaaattcgactaaaactttcagcctgacatctgcacgatttgagccatttagtataacatcagactcacataaatattaactatcttatctacataataaaaattgctagctttattggcttactaaaatcagtaagatcaatggtctttattttatcagctcattcattcatctcaggcaagatgccatgcacattttraacctcaaaaccaatatacatatatatatatgaataaatatacgtatgtgttgacacatgatccatttgattacagtgctattcatttcattttacaaatttacaccatctaaatggaaatgaatcccatagtttcagaactgtgctatagtcactcaccwaacacgcaaacttatgggaattattctttcatgtataattccttgttacaaagtgaggcctcccctcagccttctctgctctgggcccaataaacccaggctaaagcccaaactgaacacagcaytcaaggtgtggcc

SEQ ID NO: 58972 - DNA, 600 bp, Chicken  19866894316720_2
agactcacataaatattaactatcttatctacataataaaaattgctagctttattggcttactaaaatcagtaagatcaatggtctttattttatcagctcattcattcatctcaggcaagatgccatgcacattttraacctcaaaaccaatatacatatatatatatgaataaatatacgtatgtgttgacacatgatccatttgattacagtgctattcatttcattttacaaatttacaccatctaaatggaaatgaatcccatagtttcagaactgtgctatagtcactcaccwaacacgcaaacttatgggaattattctttcatgtataattccttgttacaaagtgaggcctcccctcagccttctctgctctgggcccaataaacccaggctaaagcccaaactgaacacagcaytcaaggtgtggcctcatcrggacaacayataagaggacaattgcttccctagttttgcaggccacattatttctgatacaagacaggatgtcactggccctcttgaccacctgggcagactgctggctcacgttcaaccagcactcccaagtccatttgtgatggacagctttcc

SEQ ID NO: 58973 - DNA, 533 bp, Chicken  19866894316720_3
ccatgcacattttraacctcaaaaccaatatacatatatatatatgaataaatatacgtatgtgttgacacatgatccatttgattacagtgctattcatttcattttacaaatttacaccatctaaatggaaatgaatcccatagtttcagaactgtgctatagtcactcaccwaacacgcaaacttatgggaattattctttcatgtataattccttgttacaaagtgaggcctcccctcagccttctctgctctgggcccaataaacccaggctaaagcccaaactgaacacagcaytcaaggtgtggcctcatcrggacaacayataagaggacaattgcttccctagttttgcaggccacattatttctgatacaagacaggatgtcactggccctcttgaccacctgggcagactgctggctcacgttcaaccagcactcccaagtccatttgtgatggacagctttccaggcactcttgtctaagcctgtatcacttcattatagaatcacagaatcataaaatca

SEQ ID NO: 58974 - DNA, 514 bp, Chicken  19866894316720_4
caaaaccaatatacatatatatatatgaataaatatacgtatgtgttgacacatgatccatttgattacagtgctattcatttcattttacaaatttacaccatctaaatggaaatgaatcccatagtttcagaactgtgctatagtcactcaccwaacacgcaaacttatgggaattattctttcatgtataattccttgttacaaagtgaggcctcccctcagccttctctgctctgggcccaataaacccaggctaaagcccaaactgaacacagcaytcaaggtgtggcctcatcrggacaacayataagaggacaattgcttccctagttttgcaggccacattatttctgatacaagacaggatgtcactggccctcttgaccacctgggcagactgctggctcacgttcaaccagcactcccaagtccatttgtgatggacagctttccaggcactcttgtctaagcctgtatcacttcattatagaatcacagaatcataaaatca

SEQ ID NO: 58975 - DNA, 505 bp, Chicken  19866894316720_5
tatacatatatatatatgaataaatatacgtatgtgttgacacatgatccatttgattacagtgctattcatttcattttacaaatttacaccatctaaatggaaatgaatcccatagtttcagaactgtgctatagtcactcaccwaacacgcaaacttatgggaattattctttcatgtataattccttgttacaaagtgaggcctcccctcagccttctctgctctgggcccaataaacccaggctaaagcccaaactgaacacagcaytcaaggtgtggcctcatcrggacaacayataagaggacaattgcttccctagttttgcaggccacattatttctgatacaagacaggatgtcactggccctcttgaccacctgggcagactgctggctcacgttcaaccagcactcccaagtccatttgtgatggacagctttccaggcactcttgtctaagcctgtatcacttcattatagaatcacagaatcataaaatca

SEQ ID NO: 58976 - DNA, 599 bp, Chicken  19866894316723_1
  misc_feature (1)..(167): n is any nucleotide
nnnnnnnnnnnnnnnnnnnnnnnnnnnnnnnnnnnnnnnnnnnnnnnnnnnnnnnnnnnnnnnnnnnnnnnnnnnnnnnnnnnnnnnnnnnnnnnnnnnnnnnnnnnnnnnnnnnnnnnnnnnnnnnnnnnnnnnnnnnnnnnnnnnnnnnnnnnnnnnnnnnnnnngaactttcctgtacatgcatgcacagctaaaacattagatactttattaactttttttattcctttaaaaaaaatattcattatagatttcagctggcctgctagaagaatgctaaatgttgcagaattatcwcattttataacttatatattgaagatccaaaagttacmactactaaaacaaaaacccacacaaacaaacaaacaaaaaaaaccaattacaattatgttcttttgaaacaggcaaatataataatactttatttctaaacagcaattgtattttatcctttttcattgttagaaatcaaaacatcactaatacagggatcctgtatacttttaataaaacaagtccaaagggccataaatttgaaagagtttgctgaggaaaataaagcaaaaaggctttggcccttctttgtatagtgc

SEQ ID NO: 58977 - DNA, 599 bp, Chicken  19866894316723_2
  misc_feature (1)..(129): n is any nucleotide
nnnnnnnnnnnnnnnnnnnnnnnnnnnnnnnnnnnnnnnnnnnnnnnnnnnnnnnnnnnnnnnnnnnnnnnnnnnnnnnnnnnnnnnnnnnnnnnnnnnnnnnnnnnnnnnnnnnnnnnnnnnnnnnnngaactttcctgtacatgcatgcacagctaaaacattagatactttattaactttttttattcctttaaaaaaaatattcattatagatttcagctggcctgctagaagaatgctaaatgttgcagaattatcwcattttataacttatatattgaagatccaaaagttacmactactaaaacaaaaacccacacaaacaaacaaacaaaaaaaaccaattacaattatgttcttttgaaacaggcaaatataataatactttatttctaaacagcaattgtattttatcctttttcattgttagaaatcaaaacatcactaatacagggatcctgtatacttttaataaaacaagtccaaagggccataaatttgaaagagtttgctgaggaaaataaagcaaaaaggctttggcccttctttgtatagtgcttgctgaacatatcagaattgacttgacacatttgcag

SEQ ID NO: 58978 - DNA, 600 bp, Chicken  19866894316723_3
gatcctgtatacttttaataaaacaagtccaaagggccataaatttgaaagagtttgctgaggaaaataaagcaaaaaggctttggcccttctttgtatagtgcttgctgaacatatcagaattgacttgacacatttgcaggaaaaaaagtatattggaagttagaagctgcacaaaggttgtaagtaatgcgtacaatatggctgcattatctcctgcactaacattttgcttcttcatgcaacatactgttgcaaaaattgcatctgcagaacacatgatcactgaatttgtggggmaaaaaaatcttcattctaatattaaacaataacatctaggcaaatgtataccttgaacaatatttgaatcaggctgtactgtacacacaatagatattctgactactgaataggaaatctgcagaaaatttggtaataccctttgaagtctattctttgaagacagtactttaattgaaatgagcttacttataaaagaagtgcttttttgtgaatgtttttatgagagacacatttcaaatagctttaaatatcatttccaccttggcactccagcaatttgaaataactatttattaa

SEQ ID NO: 58979 - DNA, 600 bp, Chicken  19866894316731_1
ctttcatagcaaattccaaagtcaccacaaagcactttaattattgaataggcaagagctaatgcaggcgggaagggctctgtatttctctgcatgttaatctcctacctcccacccccttctgtccaagtccccttggttaatcaggttatgttcgccctatttatctccaggagcaagcagaatgcagcatcagttaagagagaggctagaaaggaagagaagggcgctctgaaagcaagagtgggttgctgatgctccagaaacgaaagcttccctctggcagggttcccacgatcrcagcaggatggctgcgggatgtctctgacctgtcgcactgacgtgtttaatctygtctccccggctgtgtgccaaagggcagtgactttgccttttgtgctcagtctggaagcattagtggtccctgcagccagcagccccctccccaagcactcattcggcagcctgtgtcagctgggagcctgtagggggctgatgtccctaggggagcatgctctgcctgtcctgaaacagtggttaaacctggggrgaggctaggggctgtttcagcacagrcaaaagctgtrtgtgctgaacgcc

SEQ ID NO: 58980 - DNA, 600 bp, Chicken  19866894316731_2
agagctaatgcaggcgggaagggctctgtatttctctgcatgttaatctcctacctcccacccccttctgtccaagtccccttggttaatcaggttatgttcgccctatttatctccaggagcaagcagaatgcagcatcagttaagagagaggctagaaaggaagagaagggcgctctgaaagcaagagtgggttgctgatgctccagaaacgaaagcttccctctggcagggttcccacgatcrcagcaggatggctgcgggatgtctctgacctgtcgcactgacgtgtttaatctygtctccccggctgtgtgccaaagggcagtgactttgccttttgtgctcagtctggaagcattagtggtccctgcagccagcagccccctccccaagcactcattcggcagcctgtgtcagctgggagcctgtagggggctgatgtccctaggggagcatgctctgcctgtcctgaaacagtggttaaacctggggrgaggctaggggctgtttcagcacagrcaaaagctgtrtgtgctgaacgcctctgcgcagtgattctttctgcactcatcttcttgaacacatggctgcaagcca

SEQ ID NO: 58981 - DNA, 600 bp, Chicken  19866894316731_3
gctgatgctccagaaacgaaagcttccctctggcagggttcccacgatcrcagcaggatggctgcgggatgtctctgacctgtcgcactgacgtgtttaatctygtctccccggctgtgtgccaaagggcagtgactttgccttttgtgctcagtctggaagcattagtggtccctgcagccagcagccccctccccaagcactcattcggcagcctgtgtcagctgggagcctgtagggggctgatgtccctaggggagcatgctctgcctgtcctgaaacagtggttaaacctggggrgaggctaggggctgtttcagcacagrcaaaagctgtrtgtgctgaacgcctctgcgcagtgattctttctgcactcatcttcttgaacacatggctgcaagccacagaaaaatagcgcagatggatccgctgcagtgatggatggatgggagacagggagcctgcatgcgcacagccagcatcattcacctgctgtgcttttgtgctgggttgtgctggcaagcctcagctctctttacatgtggtgatctggagatcagctttgaggtttgcacggcccttggtgtggatgcatgcctt

SEQ ID NO: 58982 - DNA, 600 bp, Chicken  19866894316731_4
cctctggcagggttcccacgatcrcagcaggatggctgcgggatgtctctgacctgtcgcactgacgtgtttaatctygtctccccggctgtgtgccaaagggcagtgactttgccttttgtgctcagtctggaagcattagtggtccctgcagccagcagccccctccccaagcactcattcggcagcctgtgtcagctgggagcctgtagggggctgatgtccctaggggagcatgctctgcctgtcctgaaacagtggttaaacctggggrgaggctaggggctgtttcagcacagrcaaaagctgtrtgtgctgaacgcctctgcgcagtgattctttctgcactcatcttcttgaacacatggctgcaagccacagaaaaatagcgcagatggatccgctgcagtgatggatggatgggagacagggagcctgcatgcgcacagccagcatcattcacctgctgtgcttttgtgctgggttgtgctggcaagcctcagctctctttacatgtggtgatctggagatcagctttgaggtttgcacggcccttggtgtggatgcatgccttggaaatgctctcacctccatctataa

SEQ ID NO: 58983 - DNA, 600 bp, Chicken  19866894316731_5
gttcccacgatcrcagcaggatggctgcgggatgtctctgacctgtcgcactgacgtgtttaatctygtctccccggctgtgtgccaaagggcagtgactttgccttttgtgctcagtctggaagcattagtggtccctgcagccagcagccccctccccaagcactcattcggcagcctgtgtcagctgggagcctgtagggggctgatgtccctaggggagcatgctctgcctgtcctgaaacagtggttaaacctggggrgaggctaggggctgtttcagcacagrcaaaagctgtrtgtgctgaacgcctctgcgcagtgattctttctgcactcatcttcttgaacacatggctgcaagccacagaaaaatagcgcagatggatccgctgcagtgatggatggatgggagacagggagcctgcatgcgcacagccagcatcattcacctgctgtgcttttgtgctgggttgtgctggcaagcctcagctctctttacatgtggtgatctggagatcagctttgaggtttgcacggcccttggtgtggatgcatgccttggaaatgctctcacctccatctataatgggcaatgcc

SEQ ID NO: 58984 - DNA, 599 bp, Chicken  19866894316738_1
  misc_feature (1)..(19): n is any nucleotide
nnnnnnnnnnnnnnnnnnncctggtgtcctcgtagcacgacaccatcctcacagcctctatggggtcgtcccagtagaggttttcagggcacacagctggttattggggccacactggttattttgcagtcgatgcccccggcagcacacagaggtaccgatggacacccaggggcctggccccagctctgctgctgggaagcgcttctctgaaggctgctttgggcttaaaaggaaatcacacatcgtcagggctcagcagaagggatgcatccttcctgcagcagggctgctcccacrttcccaggtgccagcggtaacttacagtcacttgcacggcgcaagtccggcggctgcaatcttccttggcctctgtcaagcgattgcacgaagtgctgctcacacagagcggctccagtcgggtcctgacctggccctgacctccaccatctggaccaggcaccagcagctcattacacacggatcagatgctgcccgagctgacaccaacccgacygcgtgctgagccgggagctttgaagagctctgctgctgtgacagggatgcttgggctgctctcagcgctgatccctctttaa

SEQ ID NO: 58985 - DNA, 600 bp, Chicken  19866894316738_2
tgctttgggcttaaaaggaaatcacacatcgtcagggctcagcagaagggatgcatccttcctgcagcagggctgctcccacrttcccaggtgccagcggtaacttacagtcacttgcacggcgcaagtccggcggctgcaatcttccttggcctctgtcaagcgattgcacgaagtgctgctcacacagagcggctccagtcgggtcctgacctggccctgacctccaccatctggaccaggcaccagcagctcattacacacggatcagatgctgcccgagctgacaccaacccgacygcgtgctgagccgggagctttgaagagctctgctgctgtgacagggatgcttgggctgctctcagcgctgatccctctttaacaccgacactcggatgtgtccaagaggcatctgtgacatctcaggagctgcattggtgtatgtgggaggatggggtgctgggctggcagggcacctcctggttggtggtttgggggtcaattttgcagttgttctctatttatatcagggaagaacgtgtcctgaaagggactcctcactttcactaaatcagtgaatgactcacgagtgactcaact

SEQ ID NO: 58986 - DNA, 599 bp, Chicken  19866894316739_1
  misc_feature (1)..(96): n is any nucleotide
nnnnnnnnnnnnnnnnnnnnnnnnnnnnnnnnnnnnnnnnnnnnnnnnnnnnnnnnnnnnnnnnnnnnnnnnnnnnnnnnnnnnnnnnnnnnnnnncagaatgcatgtaatttgccagttacagttaccaggctttttttccccataattggaaccccgtaagttccacttagaattctgagactgcctatggtgatactgtgcctctgagcatgtgtgggagttattatttaggcaacctggaagcagcttcactgtgttagacagcattcaaagtggtaacagtgggtagcttatgtrtttaggtcctacttttaagtatggatgcctgaaatttatttaactgagatttagtaaggatatacagaatcagttaatgattcttaggctctcatgtctgagatgcagtatctctttgttgtctggaagaatcccaaataatttttttctatcttgttttccttttctaatcctcttgaataaattacttttatctgatggcatagctcagtttttcagagtacgttcaagggttttatttccttgttctatttgcagtactaacctttagtttagattatataatactgatactgtcc

SEQ ID NO: 58987 - DNA, 600 bp, Chicken  19866894316740_1
aggattcttggtgggagctgctcagcagactgattctcaagtccctccatgacccccacaggaggcctggcgctgcccctttgcttcccctaccttcaccacgaggatgtactcctctgggggcaggatgctgatctcattcttcagctgcaggacggccctcaccaggtccataacgttgctgtacaccatgtcatccgtgcggtccaggttggcagtgggggctggctggatggactggtggagaacagggccacggtgggctcaggatagcaagggagcaagcagggaatagaccarcatcggtgggaagccctggccagtctctgcaccccagacccatccacctcccactcatgacttgsacactgcttagttggtccaagaagtcctatctcrcagacaaacagaagtaaatggtcgtgggggaagacttggaccatagtgrytgtctgaggaggtcttacctgtgccccaagtcttggaggcttctgggggggggccgtgaaytccgctacaccatcagtaagggaaaggaaggagagttactctggatgctctctggacatgtgtgcatgtccctcatgccccaacaccact

SEQ ID NO: 58988 - DNA, 600 bp, Chicken  19866894316740_2
cctggcgctgcccctttgcttcccctaccttcaccacgaggatgtactcctctgggggcaggatgctgatctcattcttcagctgcaggacggccctcaccaggtccataacgttgctgtacaccatgtcatccgtgcggtccaggttggcagtgggggctggctggatggactggtggagaacagggccacggtgggctcaggatagcaagggagcaagcagggaatagaccarcatcggtgggaagccctggccagtctctgcaccccagacccatccacctcccactcatgacttgsacactgcttagttggtccaagaagtcctatctcrcagacaaacagaagtaaatggtcgtgggggaagacttggaccatagtgrytgtctgaggaggtcttacctgtgccccaagtcttggaggcttctgggggggggccgtgaaytccgctacaccatcagtaagggaaaggaaggagagttactctggatgctctctggacatgtgtgcatgtccctcatgccccaacaccactcaggacaccccaacttgacccggctgtgtgccacctcccctccaccatcggggcaaggaaaaggg

SEQ ID NO: 58989 - DNA, 600 bp, Chicken  19866894316740_3
cacgaggatgtactcctctgggggcaggatgctgatctcattcttcagctgcaggacggccctcaccaggtccataacgttgctgtacaccatgtcatccgtgcggtccaggttggcagtgggggctggctggatggactggtggagaacagggccacggtgggctcaggatagcaagggagcaagcagggaatagaccarcatcggtgggaagccctggccagtctctgcaccccagacccatccacctcccactcatgacttgsacactgcttagttggtccaagaagtcctatctcrcagacaaacagaagtaaatggtcgtgggggaagacttggaccatagtgrytgtctgaggaggtcttacctgtgccccaagtcttggaggcttctgggggggggccgtgaaytccgctacaccatcagtaagggaaaggaaggagagttactctggatgctctctggacatgtgtgcatgtccctcatgccccaacaccactcaggacaccccaacttgacccggctgtgtgccacctcccctccaccatcggggcaaggaaaaggggatgcctgcagctcagccccccacatgtggaaca

SEQ ID NO: 58990 - DNA, 600 bp, Chicken  19866894316740_4
tgcaggacggccctcaccaggtccataacgttgctgtacaccatgtcatccgtgcggtccaggttggcagtgggggctggctggatggactggtggagaacagggccacggtgggctcaggatagcaagggagcaagcagggaatagaccarcatcggtgggaagccctggccagtctctgcaccccagacccatccacctcccactcatgacttgsacactgcttagttggtccaagaagtcctatctcrcagacaaacagaagtaaatggtcgtgggggaagacttggaccatagtgrytgtctgaggaggtcttacctgtgccccaagtcttggaggcttctgggggggggccgtgaaytccgctacaccatcagtaagggaaaggaaggagagttactctggatgctctctggacatgtgtgcatgtccctcatgccccaacaccactcaggacaccccaacttgacccggctgtgtgccacctcccctccaccatcggggcaaggaaaaggggatgcctgcagctcagccccccacatgtggaacaggcagagcccctggggcaggcagagccactcctggtgacgattgctgga

SEQ ID NO: 58991 - DNA, 600 bp, Chicken  19866894316740_5
gcaggacggccctcaccaggtccataacgttgctgtacaccatgtcatccgtgcggtccaggttggcagtgggggctggctggatggactggtggagaacagggccacggtgggctcaggatagcaagggagcaagcagggaatagaccarcatcggtgggaagccctggccagtctctgcaccccagacccatccacctcccactcatgacttgsacactgcttagttggtccaagaagtcctatctcrcagacaaacagaagtaaatggtcgtgggggaagacttggaccatagtgrytgtctgaggaggtcttacctgtgccccaagtcttggaggcttctgggggggggccgtgaaytccgctacaccatcagtaagggaaaggaaggagagttactctggatgctctctggacatgtgtgcatgtccctcatgccccaacaccactcaggacaccccaacttgacccggctgtgtgccacctcccctccaccatcggggcaaggaaaaggggatgcctgcagctcagccccccacatgtggaacaggcagagcccctggggcaggcagagccactcctggtgacgattgctggaa

SEQ ID NO: 58992 - DNA, 600 bp, Chicken  19866894316740_6
gttggcagtgggggctggctggatggactggtggagaacagggccacggtgggctcaggatagcaagggagcaagcagggaatagaccarcatcggtgggaagccctggccagtctctgcaccccagacccatccacctcccactcatgacttgsacactgcttagttggtccaagaagtcctatctcrcagacaaacagaagtaaatggtcgtgggggaagacttggaccatagtgrytgtctgaggaggtcttacctgtgccccaagtcttggaggcttctgggggggggccgtgaaytccgctacaccatcagtaagggaaaggaaggagagttactctggatgctctctggacatgtgtgcatgtccctcatgccccaacaccactcaggacaccccaacttgacccggctgtgtgccacctcccctccaccatcggggcaaggaaaaggggatgcctgcagctcagccccccacatgtggaacaggcagagcccctggggcaggcagagccactcctggtgacgattgctggaacagggctggtgcaaaaggcagcagggacactcactgtaatctgtctccttctccgggtgca

SEQ ID NO: 58993 - DNA, 600 bp, Chicken  19866894316746_1
agaactttggtgaacaaatgcaaaatctgaggaaaagagagtcatttgtttataaaatgttggttaaatcccattattctggctgtactactaacattaataccaggtctgttggtcataactctttctcaaattgcacataatgggcagtcaagatcaagatcagttgcccctgagccaagcagaccaggagaccaccaggactacttcttccatgactgcccctattgatgggattgttgcagaaggggtatcatgagggttgggtctcagcctagtaaagagcagggtaggtcactkggactgcatagctttggttcgaagcaagaaaggatgtgtctggctgtttgctgctgtgtgtgctcctggtgccagctccacttctggcccagagacccccagctggacagaataaaatcargcagaatgcatcaaggagaacgrgaacagtatttaattcacctgcagtggccctctttttctagtcctagtagagccagtcaaaatattttgaaccaggaggttttccactggaaaatgctattctttctgaagtcaaacaggaacttgttcaaatgtcagtgacagtttttggtctgg

SEQ ID NO: 58994 - DNA, 600 bp, Chicken  19866894316746_2
ctctttctcaaattgcacataatgggcagtcaagatcaagatcagttgcccctgagccaagcagaccaggagaccaccaggactacttcttccatgactgcccctattgatgggattgttgcagaaggggtatcatgagggttgggtctcagcctagtaaagagcagggtaggtcactkggactgcatagctttggttcgaagcaagaaaggatgtgtctggctgtttgctgctgtgtgtgctcctggtgccagctccacttctggcccagagacccccagctggacagaataaaatcargcagaatgcatcaaggagaacgrgaacagtatttaattcacctgcagtggccctctttttctagtcctagtagagccagtcaaaatattttgaaccaggaggttttccactggaaaatgctattctttctgaagtcaaacaggaacttgttcaaatgtcagtgacagtttttggtctggaagaagtcaaaacattacagtttgatagtgcagtttcaatttgtgacattttgactttcatatcataatacaattctgttctattagagtgcagtatgttggactacataatcagtcataa

SEQ ID NO: 58995 - DNA, 600 bp, Chicken  19866894316746_3
gggcagtcaagatcaagatcagttgcccctgagccaagcagaccaggagaccaccaggactacttcttccatgactgcccctattgatgggattgttgcagaaggggtatcatgagggttgggtctcagcctagtaaagagcagggtaggtcactkggactgcatagctttggttcgaagcaagaaaggatgtgtctggctgtttgctgctgtgtgtgctcctggtgccagctccacttctggcccagagacccccagctggacagaataaaatcargcagaatgcatcaaggagaacgrgaacagtatttaattcacctgcagtggccctctttttctagtcctagtagagccagtcaaaatattttgaaccaggaggttttccactggaaaatgctattctttctgaagtcaaacaggaacttgttcaaatgtcagtgacagtttttggtctggaagaagtcaaaacattacagtttgatagtgcagtttcaatttgtgacattttgactttcatatcataatacaattctgttctattagagtgcagtatgttggactacataatcagtcataaagtttgatatagtggtaaaagtc

SEQ ID NO: 58996 - DNA, 600 bp, Chicken  19866894316749_1
caaatgggaataactaatgcgtgggagtgcaggcttccagtcagcgctagcagcgtgtcttggacttaatatagctagaatgttgcatgtttgtgaaggactaggtccattcagtgacaaagccctgtgctcttctgaagagaaaggacaagagcagaggtggtcacttgttcattgatttctagcggggcaataagtgatcaataaataattccactacagtaactaaaaagagtttttgcatgatgaaatgtatctcgttgcttctgtgtttggcttggaacgtatgacctccaggcwagaagcagatgttgctacaaatctccttgaacctgttttgcctttgaaattggcaggttggaattgattatgtacttgacgttgttcaactcatattcttagattctatgtgtttagaaaaaaatggaatacggttactttgcctttttttgtttgtttgtttgcttcccttctgtcctctgggtccccctgtcttcacccagcctgcaactgggactggtcagctaatgcacaaygttgcgtctttccaaygagcagcaagcaggtargagctcctggtgtgaaaacttgcctacggaa

SEQ ID NO: 58997 - DNA, 600 bp, Chicken  19866894316749_2
ttttgcatgatgaaatgtatctcgttgcttctgtgtttggcttggaacgtatgacctccaggcwagaagcagatgttgctacaaatctccttgaacctgttttgcctttgaaattggcaggttggaattgattatgtacttgacgttgttcaactcatattcttagattctatgtgtttagaaaaaaatggaatacggttactttgcctttttttgtttgtttgtttgcttcccttctgtcctctgggtccccctgtcttcacccagcctgcaactgggactggtcagctaatgcacaaygttgcgtctttccaaygagcagcaagcaggtargagctcctggtgtgaaaacttgcctacggaactttaattgcaaagttcttgtgccagtaaataaaagaggctgtgaggccacttgaattgcacgcgtttaactaatccaggcaattgtttctgagcattcttgttgcgttagttttcagacrtctcgtagctgtaaaatatcgttagggatatttttaggatgaacggrctcaatccgctagaatacaaatcatatctgaactccctccaagtttcagtctgaataggttttgaggt

SEQ ID NO: 58998 - DNA, 600 bp, Chicken  19866894316749_3
gtatctcgttgcttctgtgtttggcttggaacgtatgacctccaggcwagaagcagatgttgctacaaatctccttgaacctgttttgcctttgaaattggcaggttggaattgattatgtacttgacgttgttcaactcatattcttagattctatgtgtttagaaaaaaatggaatacggttactttgcctttttttgtttgtttgtttgcttcccttctgtcctctgggtccccctgtcttcacccagcctgcaactgggactggtcagctaatgcacaaygttgcgtctttccaaygagcagcaagcaggtargagctcctggtgtgaaaacttgcctacggaactttaattgcaaagttcttgtgccagtaaataaaagaggctgtgaggccacttgaattgcacgcgtttaactaatccaggcaattgtttctgagcattcttgttgcgttagttttcagacrtctcgtagctgtaaaatatcgttagggatatttttaggatgaacggrctcaatccgctagaatacaaatcatatctgaactccctccaagtttcagtctgaataggttttgaggttcagaaagtttcaatt

SEQ ID NO: 58999 - DNA, 600 bp, Chicken  19866894316749_4
tgtttggcttggaacgtatgacctccaggcwagaagcagatgttgctacaaatctccttgaacctgttttgcctttgaaattggcaggttggaattgattatgtacttgacgttgttcaactcatattcttagattctatgtgtttagaaaaaaatggaatacggttactttgcctttttttgtttgtttgtttgcttcccttctgtcctctgggtccccctgtcttcacccagcctgcaactgggactggtcagctaatgcacaaygttgcgtctttccaaygagcagcaagcaggtargagctcctggtgtgaaaacttgcctacggaactttaattgcaaagttcttgtgccagtaaataaaagaggctgtgaggccacttgaattgcacgcgtttaactaatccaggcaattgtttctgagcattcttgttgcgttagttttcagacrtctcgtagctgtaaaatatcgttagggatatttttaggatgaacggrctcaatccgctagaatacaaatcatatctgaactccctccaagtttcagtctgaataggttttgaggttcagaaagtttcaattaattttttcatcttttt

SEQ ID NO: 59000 - DNA, 566 bp, Chicken  19866894316749_5
aaatggaatacggttactttgcctttttttgtttgtttgtttgcttcccttctgtcctctgggtccccctgtcttcacccagcctgcaactgggactggtcagctaatgcacaaygttgcgtctttccaaygagcagcaagcaggtargagctcctggtgtgaaaacttgcctacggaactttaattgcaaagttcttgtgccagtaaataaaagaggctgtgaggccacttgaattgcacgcgtttaactaatccaggcaattgtttctgagcattcttgttgcgttagttttcagacrtctcgtagctgtaaaatatcgttagggatatttttaggatgaacggrctcaatccgctagaatacaaatcatatctgaactccctccaagtttcagtctgaataggttttgaggttcagaaagtttcaattaattttttcatctttttctttttctttttttttttcttttcattaacactttgctttcaaatgtccaaattcagagagcactgatgtgctctgttagggtgtattcttgtcttatttctaaaccaaccagaagca

SEQ ID NO: 59001 - DNA, 519 bp, Chicken  19866894316749_6
ccttctgtcctctgggtccccctgtcttcacccagcctgcaactgggactggtcagctaatgcacaaygttgcgtctttccaaygagcagcaagcaggtargagctcctggtgtgaaaacttgcctacggaactttaattgcaaagttcttgtgccagtaaataaaagaggctgtgaggccacttgaattgcacgcgtttaactaatccaggcaattgtttctgagcattcttgttgcgttagttttcagacrtctcgtagctgtaaaatatcgttagggatatttttaggatgaacggrctcaatccgctagaatacaaatcatatctgaactccctccaagtttcagtctgaataggttttgaggttcagaaagtttcaattaattttttcatctttttctttttctttttttttttcttttcattaacactttgctttcaaatgtccaaattcagagagcactgatgtgctctgttagggtgtattcttgtcttatttctaaaccaaccagaagca

SEQ ID NO: 59002 - DNA, 600 bp, Chicken  19866894316764_1
cactccttaggatgccagctccagggaaaaaagccattatatgctcctcattgctttatgaatgcttgggtttgtgtttaacttaactactcacttgaatggagactggatcagacctcataaggctatgtataatgaatggttttaatgaggtgcaccatattttcatttacattttacccaagattgtgaaaaataaaaataaaaaacaaaaatgcgggaattgggtgaagaaaatggctgagcatgtctcagagatatatctgatttgtttgctaataggttttttgttccaagtcrtctgtttacagagaagtgctcatgtcaaatacagatcttttgtgctcagaaagggataaactgctcacatccttatggcaagcactgctaggcattctcacctattggctccacagaaatagctcttagcagcttgtacaaaatacaccacagggattaatctctagcttgatactgactgattcacaacagcagcagagcttctttttgctgaccaccagagagaccaagcccttttgtatgatcctcaaatgagttgactgcggtgggtctagcaacatttccattgtgctgctgtgg

SEQ ID NO: 59003 - DNA, 600 bp, Chicken  19866894316768_1
tgcattaatctgtaatccacacacctttatcagcccttgtctgaaatgaaagtagttgcatatccgagtcttgatctatggcctttctgcgtttaaaagctatacccatgaaagcaactcctcctacagtaaacacaattaggagttggccaaaaataagtctctctccatgtggtttgtatctagtccttaagcaaaacatgctacagtagcaaacagatttcttggccagcatttgtgcgggggctatactgctattgccacatcagcaaaaggctctcactcctcactgccatttcyatgccagtaaaagtttaaagtgtaggctgggaccacgtcttcatactttcccacagtcacccctagctctccacagccccgtggtgctgctctcagtttcagtagccttcctgcacctttccccttacctgcatttcccaagtgagatggccccagttgcttaaacatgtctgccactgtgcccacactgaatacacgttgccagcaagtaggcaaaaagcagcaagatatagatcatatatctgggttttcactggcaacacagaggtgaaagctcaagtgtttttaatccataactca

SEQ ID NO: 59004 - DNA, 600 bp, Chicken  19866894316774_1
atgagtacgggaacacgagaccttctctggagctgcagcctgaactcctcccgctgcccagattcctgctgcggcctgcaggcgggtctccctggcgggctgtgtcacacagccttatttcacagcagctgcagcgctgggggccatcccccacagtttgggggtgctgagggaagggacaggcagggagctgctgcaggggacccggcagagctttgagcacatcactgtgcccacaatcccaccacacatcctatagggacagcaccaatgctcccgtgtgggacaggaccccaggaygggatgaggacctcctcaccccccccatatcacagctcagccctcctcgcacccactgcctgtacgggggggatgcagtctgcagccacccgcacggctcccacgcaaaccctgcccggatcgccggcggcggcaccacaacagcgctgagacgcgttggcacctcacggccgaggagctgcgcggccccaacgcacagcgattgcgatcccgcaccccacgagcggcaaacaaacaacggccggagcgctctgcagggcgcagaggagctgagagccgctcacggcagagcgggggcgg

SEQ ID NO: 59005 - DNA, 600 bp, Chicken  19866894316780_1
gctttccaccggggcaaagtgaaaactgaaaagatctgaaagcttctgctcgaagtgcaatggtgtgggggtgtgagaccagccctaccactgccctatggtgctgtactggggagcatcacatacctgctgtgtgcattggtttgcccacagatctgcagcctgtagcaccagaactctcttctctcgaacacagtgggacttccaggtggaaactttccgataggacaaatgcacactgccagcacctgggatgtggactggcagcacggtgagattgggtccccatgactggagctrcagggatacagcrtgctgagatggaaaaaaggatgggaagaagttgaaggtttctgctctgctgccatgaagcgctcaagcctgcacctaacatcaaggcattgaaatcagccttgctgacatggggcttcaagtgattaagaacattctaatggaacaaatgtttacctcctggaaaacaccattttatccaaaataaaatctttgcaagaaggaaaatttaatttacagatcaaacaaaaatagtcctaatgaagcagtgctgcacagctggaagtttccgatctaatttgtcaaaat

SEQ ID NO: 59006 - DNA, 600 bp, Chicken  19866894316780_2
gcaaagtgaaaactgaaaagatctgaaagcttctgctcgaagtgcaatggtgtgggggtgtgagaccagccctaccactgccctatggtgctgtactggggagcatcacatacctgctgtgtgcattggtttgcccacagatctgcagcctgtagcaccagaactctcttctctcgaacacagtgggacttccaggtggaaactttccgataggacaaatgcacactgccagcacctgggatgtggactggcagcacggtgagattgggtccccatgactggagctrcagggatacagcrtgctgagatggaaaaaaggatgggaagaagttgaaggtttctgctctgctgccatgaagcgctcaagcctgcacctaacatcaaggcattgaaatcagccttgctgacatggggcttcaagtgattaagaacattctaatggaacaaatgtttacctcctggaaaacaccattttatccaaaataaaatctttgcaagaaggaaaatttaatttacagatcaaacaaaaatagtcctaatgaagcagtgctgcacagctggaagtttccgatctaatttgtcaaaatgaacattaatatt

SEQ ID NO: 59007 - DNA, 600 bp, Chicken  19866894316784_1
ttcattcttttactttcaagggtaggagagttgcaggtgaattcatcctgcttgttaggctttaaataggaaggagtaattaggagcaaataatgttatttagaactgtcaggccaacacctgtgcatattagtcttttttgtattctcttgaattttagaatttgcaaacatatatactttctcagaaggttttcatctgtgctgtctggtgggaaacattagaataagcagcagagcaacatactagctcctagagttggtcctgttcatttgtgagcgctagttcttgtttgagtawgtctgtttccatttcacatttttctcttccaggctctgttagttcaagttattgatatcactgcctcctttcacagaatagtaggggttggaagggactgctggagaccccctctgctaaagcaggttctctagagtaggttgcacaagaaagcgtccaggtgggttttgaatatctccagagaaggagactctacagtctctttgggtagcctgttctggtgctctatcgccctcaaagtaaagaagttctttctcacgtttcttactatgttccagtttctgcctgttgtcccttgtt

SEQ ID NO: 59008 - DNA, 582 bp, Chicken  19866894316784_2
tctgttagttcaagttattgatatcactgcctcctttcacagaatagtaggggttggaagggactgctggagaccccctctgctaaagcaggttctctagagtaggttgcacaagaaagcgtccaggtgggttttgaatatctccagagaaggagactctacagtctctttgggtagcctgttctggtgctctatcgccctcaaagtaaagaagttctttctcacgtttcttactatgttccagtttctgcctgttgtcccttgttatgtcgctgggtaccactgaaaagagcttggctycattcccttgacacctaacctttagatatttgtgtatgtgtatcccctctcctccaagctaaacagtcccaggtctctcagcctttcctcataagagatgctccaggctcttaatcatctttgtatccctctgctggacttcctagaagttccttgtctttcttgaactgaggagcctggaactgggctctgtactccagatgtggcctcatcagggcagagtaaatggggggagaactttccttgaggccatactttcaatgtacctcaggatactttgga

SEQ ID NO: 59009 - DNA, 600 bp, Chicken  19866894316785_1
taccactcctttttgggtccacttacccttgcgattttggacgagttctggagctgacaggcagtgctgcagtcattcagcctctcacacaggctcctgatgtctcctgtctcgatggctttgttggtcaccttggctggaaagagcacagggagaaaagggaaatcatgcttctgaaaatgcaaccactttctacaggggatacacagaggacagagtggggacaagaagagagctgctcacagtgcctctccctcctgtaaacagggcccagcccgtggggctctggtagtgctgtgraggagagtggagtgctggygcacatcctccctactcaccttggattcggagaagggagctcagrcaggtgacagccaactggcgggaggtgggcatggggtcacacgtcagaggtgccagcaatcccaccaaggagccaaagtgcttgcaggcatctcctctctgcaggggtgagaggcaggataaaagctgtaggcagccccagctctccctagcttctcccatctgtgccttccccacgcagtgagtgacagcatgcacagctgggaggagctcgccttccagctcagaagcgttggg

SEQ ID NO: 59010 - DNA, 600 bp, Chicken  19866894316785_2
cacttacccttgcgattttggacgagttctggagctgacaggcagtgctgcagtcattcagcctctcacacaggctcctgatgtctcctgtctcgatggctttgttggtcaccttggctggaaagagcacagggagaaaagggaaatcatgcttctgaaaatgcaaccactttctacaggggatacacagaggacagagtggggacaagaagagagctgctcacagtgcctctccctcctgtaaacagggcccagcccgtggggctctggtagtgctgtgraggagagtggagtgctggygcacatcctccctactcaccttggattcggagaagggagctcagrcaggtgacagccaactggcgggaggtgggcatggggtcacacgtcagaggtgccagcaatcccaccaaggagccaaagtgcttgcaggcatctcctctctgcaggggtgagaggcaggataaaagctgtaggcagccccagctctccctagcttctcccatctgtgccttccccacgcagtgagtgacagcatgcacagctgggaggagctcgccttccagctcagaagcgttggggagggagcaaggacatgcg

SEQ ID NO: 59011 - DNA, 600 bp, Chicken  19866894316785_3
tgctgcagtcattcagcctctcacacaggctcctgatgtctcctgtctcgatggctttgttggtcaccttggctggaaagagcacagggagaaaagggaaatcatgcttctgaaaatgcaaccactttctacaggggatacacagaggacagagtggggacaagaagagagctgctcacagtgcctctccctcctgtaaacagggcccagcccgtggggctctggtagtgctgtgraggagagtggagtgctggygcacatcctccctactcaccttggattcggagaagggagctcagrcaggtgacagccaactggcgggaggtgggcatggggtcacacgtcagaggtgccagcaatcccaccaaggagccaaagtgcttgcaggcatctcctctctgcaggggtgagaggcaggataaaagctgtaggcagccccagctctccctagcttctcccatctgtgccttccccacgcagtgagtgacagcatgcacagctgggaggagctcgccttccagctcagaagcgttggggagggagcaaggacatgcggggctctttactcactccacgctcttcacaagcagccagcagctg

SEQ ID NO: 59012 - DNA, 600 bp, Chicken  19866894316794_1
gaaagaatagcaaatattttaaaatggattctactttgattatctcatattctcctactacagaacagtgacacaggtcacacaacagaacctcaacaccatagcaatgtccactagctgctttccgagtcttactctgaaatgaacttgccataaattttaagagagggaaataaccataccactagcaagcccatttgacttatgagaagcctaacaatgaaggttgcttccatctgccaagaagcagaaggtgagaaaaccagtaggtgcaacaaacttgttccataatttcctaasttatgttctgcaatgagctctcctgcacctataaccttatttcagtttttagaaagtattgtaaatggcagtaataataaaataataaaaaactaacaatctcatgctgtcccaaatgagtaagatttttatgggacacatagaaccttagaaatctttagaagtaatgtttaatagacaatatgcacaggatttgtaccaagtcatacatggcatttttgggtgccacttgccctgaaattaggaatgctataaagttaaacaaaacaaaataaagctaactaaattaagtagaatact

SEQ ID NO: 59013 - DNA, 599 bp, Chicken  19866894316798_1
  misc_feature (1)..(44): n is any nucleotide
nnnnnnnnnnnnnnnnnnnnnnnnnnnnnnnnnnnnnnnnnnnnccctcggggttctccagctcgtagatgtccatcaccacctgcggcacgggccggctaggagagggccacgcagcccccattcctttggggcagcttctgagactccctgccctgcagcatgcagccctcactcactcacctcaaaggagatctcatcaaagtagaggcggtcacacatgtcatagtcagtgctcacagtctcagggttgtaattcaccatgatggtcttgaagcccatctgtagggcagagcaacrcggtgaggccagggacagccccggccccactcctccccacatccctgcgtcccacygacyccakcccaccttgcgcagctcctggatgcagccgacagcgcaccagtcgaactcgacggagctgccgatgcggtaaacaccagaaccgatgaccatgacgtggggctggcggaagggcaggtcgtgctcggcaccattgtaggtcaggtagaggtagttggtctgcgccggccactcggccgccaccgtgtcgatctgcttcaccaccggcaggatgcccaggtcgcgccgcatcttcc

SEQ ID NO: 59014 - DNA, 596 bp, Chicken  19866894316798_2
tccagctcgtagatgtccatcaccacctgcggcacgggccggctaggagagggccacgcagcccccattcctttggggcagcttctgagactccctgccctgcagcatgcagccctcactcactcacctcaaaggagatctcatcaaagtagaggcggtcacacatgtcatagtcagtgctcacagtctcagggttgtaattcaccatgatggtcttgaagcccatctgtagggcagagcaacrcggtgaggccagggacagccccggccccactcctccccacatccctgcgtcccacygacyccakcccaccttgcgcagctcctggatgcagccgacagcgcaccagtcgaactcgacggagctgccgatgcggtaaacaccagaaccgatgaccatgacgtggggctggcggaagggcaggtcgtgctcggcaccattgtaggtcaggtagaggtagttggtctgcgccggccactcggccgccaccgtgtcgatctgcttcaccaccggcaggatgcccaggtcgcgccgcatcttccgcacggccagctacggtgctgcagggggcaaggggtgagcaccaggcccgtgg

SEQ ID NO: 59015 - DNA, 592 bp, Chicken  19866894316798_3
gctcgtagatgtccatcaccacctgcggcacgggccggctaggagagggccacgcagcccccattcctttggggcagcttctgagactccctgccctgcagcatgcagccctcactcactcacctcaaaggagatctcatcaaagtagaggcggtcacacatgtcatagtcagtgctcacagtctcagggttgtaattcaccatgatggtcttgaagcccatctgtagggcagagcaacrcggtgaggccagggacagccccggccccactcctccccacatccctgcgtcccacygacyccakcccaccttgcgcagctcctggatgcagccgacagcgcaccagtcgaactcgacggagctgccgatgcggtaaacaccagaaccgatgaccatgacgtggggctggcggaagggcaggtcgtgctcggcaccattgtaggtcaggtagaggtagttggtctgcgccggccactcggccgccaccgtgtcgatctgcttcaccaccggcaggatgcccaggtcgcgccgcatcttccgcacggccagctacggtgctgcagggggcaaggggtgagcaccaggcccgtgg

SEQ ID NO: 59016 - DNA, 588 bp, Chicken  19866894316798_4
gtagatgtccatcaccacctgcggcacgggccggctaggagagggccacgcagcccccattcctttggggcagcttctgagactccctgccctgcagcatgcagccctcactcactcacctcaaaggagatctcatcaaagtagaggcggtcacacatgtcatagtcagtgctcacagtctcagggttgtaattcaccatgatggtcttgaagcccatctgtagggcagagcaacrcggtgaggccagggacagccccggccccactcctccccacatccctgcgtcccacygacyccakcccaccttgcgcagctcctggatgcagccgacagcgcaccagtcgaactcgacggagctgccgatgcggtaaacaccagaaccgatgaccatgacgtggggctggcggaagggcaggtcgtgctcggcaccattgtaggtcaggtagaggtagttggtctgcgccggccactcggccgccaccgtgtcgatctgcttcaccaccggcaggatgcccaggtcgcgccgcatcttccgcacggccagctacggtgctgcagggggcaaggggtgagcaccaggcccgtgg

SEQ ID NO: 59017 - DNA, 600 bp, Chicken  19866894316804_1
aatctgctctctttgtttttcagcttagcatagacgatttcacgtactacagtgaatcctatggtaacaagaacccatttcaaaatgttcaggcaagcatttctctcttttacttccttatatgcatgtttttttaattaaaaactatgtaagaaggatgcaaacagacaataactggcaatattaaactgaactgcagcagtttgccaatttatttattgagattatttcagtttgagcatatgggctaaagaaaaacaacagagaatggagaaatgtcttttgaggatattttatttyaaaaaacaggttttcagaattatcttaactgaaaatattgtttctaagcatgttgcaatttggaataataaaaaactatgtctagacatagacataattcccagactgacaccccaaaatagtgttttgaagccacacagagaaaagaagtgaagaatcaagtatgtactccagattttcaaagctgaatrcttattttattttcatgcraagtgaagctgatttatctcacccagacagctaatttattcctagaatcatagaatatactgagctrgaaggaaccaataaggatcgtca

SEQ ID NO: 59018 - DNA, 600 bp, Chicken  19866894316804_2
aactgcagcagtttgccaatttatttattgagattatttcagtttgagcatatgggctaaagaaaaacaacagagaatggagaaatgtcttttgaggatattttatttyaaaaaacaggttttcagaattatcttaactgaaaatattgtttctaagcatgttgcaatttggaataataaaaaactatgtctagacatagacataattcccagactgacaccccaaaatagtgttttgaagccacacagagaaaagaagtgaagaatcaagtatgtactccagattttcaaagctgaatrcttattttattttcatgcraagtgaagctgatttatctcacccagacagctaatttattcctagaatcatagaatatactgagctrgaaggaaccaataaggatcgtcaagtccagctcctggctccacacgggaccacacaaaaagatgcrtgagagcattgtccaaatgcttcttgaactctggagagctcagtgccatgaccacttctctgggaagaagcttctccagtgcctgagcaccctcttggtgaagcactttctattgattgctagcttgaacttcccatgtctcagctcc

SEQ ID NO: 59019 - DNA, 600 bp, Chicken  19866894316804_3
tttatttattgagattatttcagtttgagcatatgggctaaagaaaaacaacagagaatggagaaatgtcttttgaggatattttatttyaaaaaacaggttttcagaattatcttaactgaaaatattgtttctaagcatgttgcaatttggaataataaaaaactatgtctagacatagacataattcccagactgacaccccaaaatagtgttttgaagccacacagagaaaagaagtgaagaatcaagtatgtactccagattttcaaagctgaatrcttattttattttcatgcraagtgaagctgatttatctcacccagacagctaatttattcctagaatcatagaatatactgagctrgaaggaaccaataaggatcgtcaagtccagctcctggctccacacgggaccacacaaaaagatgcrtgagagcattgtccaaatgcttcttgaactctggagagctcagtgccatgaccacttctctgggaagaagcttctccagtgcctgagcaccctcttggtgaagcactttctattgattgctagcttgaacttcccatgtctcagctccatgtcattccctgtttgaa

SEQ ID NO: 59020 - DNA, 600 bp, Chicken  19866894316804_4
gtcttttgaggatattttatttyaaaaaacaggttttcagaattatcttaactgaaaatattgtttctaagcatgttgcaatttggaataataaaaaactatgtctagacatagacataattcccagactgacaccccaaaatagtgttttgaagccacacagagaaaagaagtgaagaatcaagtatgtactccagattttcaaagctgaatrcttattttattttcatgcraagtgaagctgatttatctcacccagacagctaatttattcctagaatcatagaatatactgagctrgaaggaaccaataaggatcgtcaagtccagctcctggctccacacgggaccacacaaaaagatgcrtgagagcattgtccaaatgcttcttgaactctggagagctcagtgccatgaccacttctctgggaagaagcttctccagtgcctgagcaccctcttggtgaagcactttctattgattgctagcttgaacttcccatgtctcagctccatgtcattccctgtttgaatagtgtgaatatatgcctagatactggattgctttaatatttgtgctacttcagtaatccaaaataa

SEQ ID NO: 59021 - DNA, 600 bp, Chicken  19866894316804_5
ctaagcatgttgcaatttggaataataaaaaactatgtctagacatagacataattcccagactgacaccccaaaatagtgttttgaagccacacagagaaaagaagtgaagaatcaagtatgtactccagattttcaaagctgaatrcttattttattttcatgcraagtgaagctgatttatctcacccagacagctaatttattcctagaatcatagaatatactgagctrgaaggaaccaataaggatcgtcaagtccagctcctggctccacacgggaccacacaaaaagatgcrtgagagcattgtccaaatgcttcttgaactctggagagctcagtgccatgaccacttctctgggaagaagcttctccagtgcctgagcaccctcttggtgaagcactttctattgattgctagcttgaacttcccatgtctcagctccatgtcattccctgtttgaatagtgtgaatatatgcctagatactggattgctttaatatttgtgctacttcagtaatccaaaataaactccaggcacagaatctgagttggtcatgagcttaaacttctgttcccagtgaagaggtttatag

SEQ ID NO: 59022 - DNA, 600 bp, Chicken  19866894316808_1
acaacctagctttgaagcttttgggtcaagctgaaacactagtctctgaactgaagcacatgggcgtatgggcatagaggagcctcctgtccctccacttttgctttttaggaggtgtctctagaaaatgaatgaggcagaaatgccagagaaaagcattgggcgtatcagcagagattcagcttacttcgtcaaatgaagtctttgtgcttgctctactgctggatgtgcattccaggagagacatctgatcacctcaggtgaagactattgccaaggtatttctgtggttggccttcractttgcaacacagatgtcttagccctctgctcaccttgcagtgtgtgcctttttgttccctgacatctggcagaactcttggatatgacttcgtgtaatataagtgcaattgaacactaataaaaaaaggtatttggttttgtgtttgtgtggacattccagtacttagaatttaacttctgcacaaatgtttggactgagctgaagcagggttcttgcaatataactaaagaaaagaaaaaaaaacaccagaagaaaaccctgaaaaatcctaattaattcactgacagtaagaaggg

SEQ ID NO: 59023 - DNA, 600 bp, Chicken  19866894316809_1
cacctggaaaaatgagataattttcacattcttttcatgttaacacacaattggagtattcaggaaatcttaattagctgttaacacacgtctccagttgtcacgatgccacattacatacactttgatcgtggcctgtcaatcagtgctatatgcctttacgaacttatatgcacaaatgtgaattcatataatgtcaaaacttcacagaaatattttacatcagcagcaaaactatggcaaggatgcagttttttgacagctgagaaatgatttctaatgcatttatttggccttctmtaacaaattgcttgtatcgctgtcatccacgatagcatgaaatatgccactattattattgtcacagcaacagcacctaatctgtaggtataatactgtttacataaatcctccagtgacattttttgctaaggcgtataaagcatgaccagcaaggctcacctggtaaagtttcacagacttgtgcagaagaacgcggccctccttccagcagtttgcctggtgcccgttcaggctcagcagcacctggtcatattcatctggcttctggtaccgcagcttgatcttcagggtgccaac

SEQ ID NO: 59024 - DNA, 599 bp, Chicken  19866894316810_1
  misc_feature (1)..(165): n is any nucleotide
nnnnnnnnnnnnnnnnnnnnnnnnnnnnnnnnnnnnnnnnnnnnnnnnnnnnnnnnnnnnnnnnnnnnnnnnnnnnnnnnnnnnnnnnnnnnnnnnnnnnnnnnnnnnnnnnnnnnnnnnnnnnnnnnnnnnnnnnnnnnnnnnnnnnnnnnnnnnnnnnnnnnnagtgacgcgcagtgattgtaaatctcgtgctctcctgcacttggagcaaaaaccctcatctcatggacagaccctgctaatgcagccgggtgggaagggcagggttgagtgggaaaatgagggagcttcacactyaatgcaggattttactgrgtggtggggtcagtgctggggtttaactgaaggccaggtttgctcagtggaggtctctgtcaarggatatgtacatgaggctcttcccagcatctgctccctgctgagatccagcgatcccaaaggatgctcatggccaataggaacaaaagtgttttacaggtgcctttgctgatccatcctccaaggataacccatagagaaccaacccaaggacaggacacagtgacttcagatctctctgtgggacgcattgcagctgctggaccagagcgtttccc

SEQ ID NO: 59025 - DNA, 599 bp, Chicken  19866894316810_2
  misc_feature (1)..(147): n is any nucleotide
nnnnnnnnnnnnnnnnnnnnnnnnnnnnnnnnnnnnnnnnnnnnnnnnnnnnnnnnnnnnnnnnnnnnnnnnnnnnnnnnnnnnnnnnnnnnnnnnnnnnnnnnnnnnnnnnnnnnnnnnnnnnnnnnnnnnnnnnnnnnnnnnnnnagtgacgcgcagtgattgtaaatctcgtgctctcctgcacttggagcaaaaaccctcatctcatggacagaccctgctaatgcagccgggtgggaagggcagggttgagtgggaaaatgagggagcttcacactyaatgcaggattttactgrgtggtggggtcagtgctggggtttaactgaaggccaggtttgctcagtggaggtctctgtcaarggatatgtacatgaggctcttcccagcatctgctccctgctgagatccagcgatcccaaaggatgctcatggccaataggaacaaaagtgttttacaggtgcctttgctgatccatcctccaaggataacccatagagaaccaacccaaggacaggacacagtgacttcagatctctctgtgggacgcattgcagctgctggaccagagcgtttcccaccatagccagtgccatg

SEQ ID NO: 59026 - DNA, 599 bp, Chicken  19866894316810_3
  misc_feature (1)..(83): n is any nucleotide
nnnnnnnnnnnnnnnnnnnnnnnnnnnnnnnnnnnnnnnnnnnnnnnnnnnnnnnnnnnnnnnnnnnnnnnnnnnnnnnnnnnagtgacgcgcagtgattgtaaatctcgtgctctcctgcacttggagcaaaaaccctcatctcatggacagaccctgctaatgcagccgggtgggaagggcagggttgagtgggaaaatgagggagcttcacactyaatgcaggattttactgrgtggtggggtcagtgctggggtttaactgaaggccaggtttgctcagtggaggtctctgtcaarggatatgtacatgaggctcttcccagcatctgctccctgctgagatccagcgatcccaaaggatgctcatggccaataggaacaaaagtgttttacaggtgcctttgctgatccatcctccaaggataacccatagagaaccaacccaaggacaggacacagtgacttcagatctctctgtgggacgcattgcagctgctggaccagagcgtttcccaccatagccagtgccatggcagaccctgcacactgtgcctctatgggagggaatccacccctatgggagggaagcagaacca

SEQ ID NO: 59027 - DNA, 600 bp, Chicken  19866894316813_1
atggcacttaactggtgcttactttctaatatcaatatatacatatggaaacatacagaggtttgcatttaaacaatacacttactttaagaaataatttaataaattaattgacaattattttttcatcagtaggctgatctttatcttgcatatgtacagggctttattcatatttatttaaatgcaaagtaggcaagcccctatttacagtcatcagaaaccttcaggtattgaaatgcagaggcctcatccttgagaactttgcatattagagatttgcccataaaagctcctcartagctacactactgtgcattgctttaagtattttagtgcacttgctcatgtactgcttctataaatattgtgaagttcctgctttgtgggatattgctttttaagagataccacatgagagtactggaatcaagttcagaatttaatagaacagcagccagttcgttccatggcacagtttctttgaggcaaatgagacatcaagttcactcttaaaaatacttgagtttctatcagtcttgttcgttaaattatcagcactccttgcctatatgattgccatcacacttagttgtaatg

SEQ ID NO: 59028 - DNA, 600 bp, Chicken  19866894316818_1
gatggaggtcactctttcatcactttgctaggaggatccagagctgcactgatcactcatgactcaaccttgagatatggaataagaagaagataataggaaagtggcagcctttcatcctcctccattaagatcatgattcaagaaaatgttaactatacttcaaaatgcaatacggagcagaggacttattcatggtgtactgctgtacatttaggcatgtatcaaagcgaagctatgtctttttctcaggttgccttacttaagcctcttctgtcttgttaccattaatagcaaagrtaaaatacagagtttagtaaacatagttcataacaacaaatacagatatctcaacaaaaatccatgtgaactttcattaggaatgaacagaaacgagttttccaaatttcacatcactagatgaacttctacagtcacagtgcaaatttaaactaactttctactggtaaatagacatttcatggacattatcaactacaaattatatatggaaaagtatgcttactattacttttttttttttgctagaaatataagtctccgaggttgtgttttattctttgcttttatagttagttt

SEQ ID NO: 59029 - DNA, 600 bp, Chicken  19866894316820_1
agtaggagaggacttcatgctccaggcatttttgtcctgtacaatgaagttgttagaaaatgcctacagtacactgggaaaatctagctctgctgttattgttggtaacgtttgcagttgatttgtagtaaaatgcaagtcactctagtctgtgaataaatatctgactgcacaggatgataattgctctgcctgcactttctttggcacctacttatctcagctgcaatgattgataaaaatatatttgtagtgatgttgaacacttctaaattatataatgatttttgtattatttcrcatttactctgaagaaagttcatgctaaattgagtttcagtgctttcagtatctttattaaccagaataggaaaagtatggtatgtttccccttcttgcaccagatcgatttttaaagcaagacttcctttttctttttgtggaacgatgcagagttatggacgaggatatcaagtaactgacttcaaacagaacacaaattcactaaagtgaaaatgattgtgatagttttctaatttcccccacagtgtatgtaaaactgacttttaaagtgtttagtggataatggatcatgtaagg

SEQ ID NO: 59030 - DNA, 600 bp, Chicken  19866894316821_1
tgaggttctcgttcgctcacaagttataactaccagtgattcacttcctgcaagtgtcacatggacaccttggtcagtgaggaccttgggagactactcagatattttagcacctcggccctaagtacttcttctgaacctgaagcgctcggtttgagctttgtggtgcgctgcatgctgagtcctcagctgcctgagcttctgtcccttcctacatcttgccagtcacccctgggcagcctgatctggtgggtggcagccctgcccatggaagtgagttggagctcgatgatctttgargtcccttccagctcaagccgwtctgtgattctgtgatgatttcctcaatggtctactgatgagcaatcaaaacaaaactcccaggaggccagaggcatcctagcagcagcaggtctgggggatccccatggcttggagagcccatccagatatcttgacaccggatccctatgaccaaggctcctggagcctcaccatgtgggaggctgggaggtggatgaatgcctgaaatcttcccatagaagttgccagtcgtttgtaacgctcctccactcagctctgctccagcaaagctgatct

SEQ ID NO: 59031 - DNA, 600 bp, Chicken  19866894316821_2
agttataactaccagtgattcacttcctgcaagtgtcacatggacaccttggtcagtgaggaccttgggagactactcagatattttagcacctcggccctaagtacttcttctgaacctgaagcgctcggtttgagctttgtggtgcgctgcatgctgagtcctcagctgcctgagcttctgtcccttcctacatcttgccagtcacccctgggcagcctgatctggtgggtggcagccctgcccatggaagtgagttggagctcgatgatctttgargtcccttccagctcaagccgwtctgtgattctgtgatgatttcctcaatggtctactgatgagcaatcaaaacaaaactcccaggaggccagaggcatcctagcagcagcaggtctgggggatccccatggcttggagagcccatccagatatcttgacaccggatccctatgaccaaggctcctggagcctcaccatgtgggaggctgggaggtggatgaatgcctgaaatcttcccatagaagttgccagtcgtttgtaacgctcctccactcagctctgctccagcaaagctgatctttaatatcttcagtgtttctc

SEQ ID NO: 59032 - DNA, 600 bp, Chicken  19866894316825_1
ctcccccctacagctccccgaagcccacatggcagcctgcagacacctgatttctgaaaatcccattaacagaaaagccggttttaaatctgcctaatgggaaaacttggagctgtgtggccgctcccatgcctggctctctccctctcgttcaccctcagcattttggatccctcctttgggcgattccctttttccttctgcttcttccccccctgctggtggtcgggttgaggatgaaattcactgtccgggtgcaaacacttccaccaaaaagctgtaaatgtgcacttaaccccmagatttaggaaaactaacccagctctgtgctggaaatcagagacctcagcrgagcatcctttggtcacatcagagtgggtgtaatggcacaaccaggtgtttctggagccaggcagcaggcgagaacagaggaaattagttgttaaatacctggtgggttgttgtgttggttaattaaccattgctttgaataggcttcttgtgtcaccgcttggcttatgtaaattggttcgtggccattaccgggaccggctgcaccgcgtgctgttccttgtgagaatttggctttatcaaacgtgg

SEQ ID NO: 59033 - DNA, 600 bp, Chicken  19866894316825_2
ttctgaaaatcccattaacagaaaagccggttttaaatctgcctaatgggaaaacttggagctgtgtggccgctcccatgcctggctctctccctctcgttcaccctcagcattttggatccctcctttgggcgattccctttttccttctgcttcttccccccctgctggtggtcgggttgaggatgaaattcactgtccgggtgcaaacacttccaccaaaaagctgtaaatgtgcacttaaccccmagatttaggaaaactaacccagctctgtgctggaaatcagagacctcagcrgagcatcctttggtcacatcagagtgggtgtaatggcacaaccaggtgtttctggagccaggcagcaggcgagaacagaggaaattagttgttaaatacctggtgggttgttgtgttggttaattaaccattgctttgaataggcttcttgtgtcaccgcttggcttatgtaaattggttcgtggccattaccgggaccggctgcaccgcgtgctgttccttgtgagaatttggctttatcaaacgtggctccaggctgtaattcttccccttcacaaacacgggtccttgcagtattgc

SEQ ID NO: 59034 - DNA, 600 bp, Chicken  19866894316827_1
gtgcactcggagaataacatttttcttcctcttcaaaaacctaatgtggattctgctgttaaaagcaggaagtaagcagggaaaaagtaaacaggaggatgtaaaaggcataaataatgctcccaggatgcttgcaagagggcaggagcatgtaacatctgttctgtaagcacatcagactgatgtggcttatcctggagacaagattaatgcaataaacaggacaacattgaagcagaagtaaggagcagctgacctgagtgaagctgcattaaataaactgttatgggaaggatttargagaacaaatgaaacaaggaaaggtctctgaggtgtcttgcttctggcagaatatactgtgaggaactagaggatgtcgtgttagtgtgacacacctgttatatgtacactgtgatttgaatgtatgttaaattctggaagcaagttactttgccaaaagatactttagtgctttatgctattgtatggcaggtttgtaacagagtaacttcagcagctttgtgtagtggtttaaagatgctaaaacgtttagttcaatgtaataagacggactgtaaatttaaacagtgctatccattt

SEQ ID NO: 59035 - DNA, 600 bp, Chicken  19866894316827_2
ggaactagaggatgtcgtgttagtgtgacacacctgttatatgtacactgtgatttgaatgtatgttaaattctggaagcaagttactttgccaaaagatactttagtgctttatgctattgtatggcaggtttgtaacagagtaacttcagcagctttgtgtagtggtttaaagatgctaaaacgtttagttcaatgtaataagacggactgtaaatttaaacagtgctatccatttcagatttttgtgttttatgtatatttatttactactttgggtgcctttaggccttggtgctyggggcagcctgcctgctttgtgtatggatgagaccaccggtggctcacatcacaggggaggacactacaacagggtccttaggaagcaaatgctaacttgcattgtagcttcttaaattatgaaactgtagattcctaatcagtgacatggaagaaagatagttttattgcagttttattctcttgcttagcccttattccaagtggaatatgctgcccttgcagggaaggtaaagatggatgttcyggaagaacatctgyagctttttgaagcttgagttcttcctctccatctgccaa

SEQ ID NO: 59036 - DNA, 600 bp, Chicken  19866894316827_3
gtgttttatgtatatttatttactactttgggtgcctttaggccttggtgctyggggcagcctgcctgctttgtgtatggatgagaccaccggtggctcacatcacaggggaggacactacaacagggtccttaggaagcaaatgctaacttgcattgtagcttcttaaattatgaaactgtagattcctaatcagtgacatggaagaaagatagttttattgcagttttattctcttgcttagcccttattccaagtggaatatgctgcccttgcagggaaggtaaagatggatgttcyggaagaacatctgyagctttttgaagcttgagttcttcctctccatctgccaacactaaatcgttcctgctcaagccaagtatgtctgctgagacaaaccgttttgcctgagcagaatggtatgctttcctgcatctcccaatccccccaattcctatttcatcactgcctgatcccagcgtggctttagaggaaatgcaaaacattctcgccacctctaggtggtactgctgagaccagtgggttcagagccctgacttgaggggagtcccctcctgcattcagttccttttagatgtg

SEQ ID NO: 59037 - DNA, 600 bp, Chicken  19866894316827_4
tttatttactactttgggtgcctttaggccttggtgctyggggcagcctgcctgctttgtgtatggatgagaccaccggtggctcacatcacaggggaggacactacaacagggtccttaggaagcaaatgctaacttgcattgtagcttcttaaattatgaaactgtagattcctaatcagtgacatggaagaaagatagttttattgcagttttattctcttgcttagcccttattccaagtggaatatgctgcccttgcagggaaggtaaagatggatgttcyggaagaacatctgyagctttttgaagcttgagttcttcctctccatctgccaacactaaatcgttcctgctcaagccaagtatgtctgctgagacaaaccgttttgcctgagcagaatggtatgctttcctgcatctcccaatccccccaattcctatttcatcactgcctgatcccagcgtggctttagaggaaatgcaaaacattctcgccacctctaggtggtactgctgagaccagtgggttcagagccctgacttgaggggagtcccctcctgcattcagttccttttagatgtgagctggagtaggtg

SEQ ID NO: 59038 - DNA, 600 bp, Chicken  19866894316827_5
gggcacagcgaaaggctatgcctgagcagctgtctgccctccagcttcgtaagggaacagcagaacaattttttccctagcatattgtgtttagcaaaggaatccttcagcattagtagtagatgagatatgtatttgggtagatcccaagaggtatttgcctcttttataacgcaccctttttctcaaggggttaaatcattctctgctgacacttgtaagatttgaaatggcttagcagctatgaaataaaatcctttactagtttctgatacttaaacagatttgcatgactttcastttttacacgggagttgtaacgagcttgactagcgcttaaagtacatactcagtacttcagtatgtatgtgctaaactgaatggctctaggagggtctctgtgatctttaaagcaaaagcatattaaaaattgaggaaaatctgccttgttttatgtacaagatcagtgtggttttgaaaagcatgacttgcgctgtcttagacacgaatgtgggaaaagcaggattttatttacccctcttcagttcaatgttcctctgccatatctgaaactaatgaatgtaaacttgtgcctgtttt

SEQ ID NO: 59039 - DNA, 600 bp, Chicken  19866894316828_1
ctgagcaatgccacatacagaagtgataaagtcacaattcttcccaagggttaagaagaacgttattggtaaagaaaagagatctaaagatgcaagggaggcacatggagagtggagaagaaacaaaataacgctccaagggaaggaagaaaaaaaggcaaagtatgtatgggacagtgagaggcatgcagatgggggtagtggggacccacaagaaaaaaaataacagattaaatggtctggtttgttacaatgaagtctgaaccaaaattaggcatgaggaataatgcaggaagaacrcacagttgttctctgtgagcgttgaacaaaaccaaaagggaacaatccataggcaatccaactgctctgaaacaagcttccctttggatcactgttaaaaaacaaagggttctacccacactaggaaaacaacatgcattaaacaaggaagggatgaagaccagtggtgaaaatattttacatcagagacaagaaggttttctcgtagtgagtgctatgtctcccggtagtacatattttaaaatcagacgtacctatcacattttaaaccttctgactgtaattccaactagtgcacac

SEQ ID NO: 59040 - DNA, 599 bp, Chicken  19866894316833_1
  misc_feature (1)..(108): n is any nucleotide
nnnnnnnnnnnnnnnnnnnnnnnnnnnnnnnnnnnnnnnnnnnnnnnnnnnnnnnnnnnnnnnnnnnnnnnnnnnnnnnnnnnnnnnnnnnnnnnnnnnnnnnnnnnnaatgggttgttttaacataaaaacagacatcgaaagcatatgaattttgcagaatatattatttcttattttcctcacagttgctcagtatttaaaaagaacagggcagaagttttacgtgaaagatatggtgtgtcactttctccagaaaatcgtgcattgaatttttttcccatctcttctactctatgytcttagggaagaagtaaacagaaaaatggaggtgcaagccaaagggaattataggaggaacaattttattttgtccacacagttctgttagcttcatgtttattattacctctatgctgttcattacctgcattctcttggctcttatcttctaattgcaatcaagatctcttcatattatatctaagagcttattagtataatagatcaacaaaagggatttctacatgtggatttcacaaaggtaaccttttatgattctctwacaaaaattgaagtaattttgttatttaattatg

SEQ ID NO: 59041 - DNA, 589 bp, Chicken  19866894316833_2
cattgaatttttttcccatctcttctactctatgytcttagggaagaagtaaacagaaaaatggaggtgcaagccaaagggaattataggaggaacaattttattttgtccacacagttctgttagcttcatgtttattattacctctatgctgttcattacctgcattctcttggctcttatcttctaattgcaatcaagatctcttcatattatatctaagagcttattagtataatagatcaacaaaagggatttctacatgtggatttcacaaaggtaaccttttatgattctctwacaaaaattgaagtaattttgttatttaattatgaaatatgtaacctattttagccttctgtagcatgaaaccattgaagctaacaatgcagttgcatttacctatgggttgatgagctctgagagttaagcacaggcaactctygaagcataagcatcttctcaagttcttaattcctaattactacaagaaggaagatccctccagagagggactactttcattctgtacctgacaggtagaaattagttgcctaatagaatggaatagtactgcaaaatgaaagaa

SEQ ID NO: 59042 - DNA, 444 bp, Chicken  19866894316833_3
tctatgctgttcattacctgcattctcttggctcttatcttctaattgcaatcaagatctcttcatattatatctaagagcttattagtataatagatcaacaaaagggatttctacatgtggatttcacaaaggtaaccttttatgattctctwacaaaaattgaagtaattttgttatttaattatgaaatatgtaacctattttagccttctgtagcatgaaaccattgaagctaacaatgcagttgcatttacctatgggttgatgagctctgagagttaagcacaggcaactctygaagcataagcatcttctcaagttcttaattcctaattactacaagaaggaagatccctccagagagggactactttcattctgtacctgacaggtagaaattagttgcctaatagaatggaatagtactgcaaaatgaaagaa

SEQ ID NO: 59043 - DNA, 600 bp, Chicken  19866894316837_1
ctttttctgttgaaatgcgttgtgcaaatatagcgttgtgctcggcggttgctgaggttgttcctaaatagcgtcgaacgaatgatgtaaaaacgctgaaatagaaacggcagcgagttctgctgttcagcgtgcccactgctttctatttttggagctgctgggggattcagctctgtacagccaggcggttccgtaagggtgaaacgtgaacagcaaagtaatcaactgagcgctagcagtacaggagcggcacgagagagagagctggagagctgcccgaggctcttacctcacacrgcaggggctgctgagcggggcagggctcggggatacgggaaggctgagggtgctgccggtggcttaggaagcccattgcctgctgtagctgcggaggagtaagagaggtcccagttatttgcaagcttgtttttcctggcagacaaatgcaccggtggctttaaacttaaaaataggagagtagtccaaccgcgttctttttcctggcggtcttggcagtgctgtttcccagggtaatgtgaaagtctcttagatggccgttccaaactaaggaaggcttggtgagagactttccagagt

SEQ ID NO: 59044 - DNA, 599 bp, Chicken  19866894316838_1
  misc_feature (1)..(214): n is any nucleotide
nnnnnnnnnnnnnnnnnnnnnnnnnnnnnnnnnnnnnnnnnnnnnnnnnnnnnnnnnnnnnnnnnnnnnnnnnnnnnnnnnnnnnnnnnnnnnnnnnnnnnnnnnnnnnnnnnnnnnnnnnnnnnnnnnnnnnnnnnnnnnnnnnnnnnnnnnnnnnnnnnnnnnnnnnnnnnnnnnnnnnnnnnnnnnnnnnnnnnnnnnnnnnnnnnnnnnnaaaaaaaaaaaaataaaaataaaaaagcagtggcaacgatctgaggagaaacaaactaattaactaaatatagtatcggaatgcaygataacactataatacaatataattcaatataattgttaataaaatcaaatataattaagagaagggttgtccgagagctaaaggccttacactaatactgaagccttgcgtgcagtcrggagcagcagcgagacgatccgaaagcgagcacgacgagacgagaagaaagggaagaaagggagaacccaggtcaggtgacctacaggccttatatctgttcccctgagcaggaatgataacagtactcgaacagccttctgggggacgtagttcttctcttctggacaagtacccggaa

SEQ ID NO: 59045 - DNA, 599 bp, Chicken  19866894316838_2
  misc_feature (1)..(95): n is any nucleotide
nnnnnnnnnnnnnnnnnnnnnnnnnnnnnnnnnnnnnnnnnnnnnnnnnnnnnnnnnnnnnnnnnnnnnnnnnnnnnnnnnnnnnnnnnnnnnnnaaaaaaaaaaaaataaaaataaaaaagcagtggcaacgatctgaggagaaacaaactaattaactaaatatagtatcggaatgcaygataacactataatacaatataattcaatataattgttaataaaatcaaatataattaagagaagggttgtccgagagctaaaggccttacactaatactgaagccttgcgtgcagtcrggagcagcagcgagacgatccgaaagcgagcacgacgagacgagaagaaagggaagaaagggagaacccaggtcaggtgacctacaggccttatatctgttcccctgagcaggaatgataacagtactcgaacagccttctgggggacgtagttcttctcttctggacaagtacccggaactagagcatttgctctctaactcccagtacactgcatgatgttatgatgtggaataccaacaaccaaaaatcataaaaccatgacacaagacaaagtgtcaagactgtccacttatctc

SEQ ID NO: 59046 - DNA, 599 bp, Chicken  19866894316843_1
  misc_feature (1)..(154): n is any nucleotide
nnnnnnnnnnnnnnnnnnnnnnnnnnnnnnnnnnnnnnnnnnnnnnnnnnnnnnnnnnnnnnnnnnnnnnnnnnnnnnnnnnnnnnnnnnnnnnnnnnnnnnnnnnnnnnnnnnnnnnnnnnnnnnnnnnnnnnnnnnnnnnnnnnnnnnnnnnggctttctttctttcttcagttttttgtggttgtgttacctgagaaataccaaatggtgtcatttgggagacttgaattgcacagtgctctctgggctaggctaagacgtattgctctattaggaagggtttttttgtgtgccatytgtgtsccagcatagcatctccgccgactaattttccagtatgttgtttttgtttctggaaggtacaccacagccaatgctgagtctgattatgaccgagagtctgagaaggagagtgaagaaggggaagacgagctgagctgtgaaacagtgagaacagcaaggagggattccctggatctcgtcaacgaggatgaaacacatttaatcctcgattccttgctggatgaaggactgggccagctactgcagcaggcagaccacttgcacagtggagatgagcrggagaagagagaggg

SEQ ID NO: 59047 - DNA, 599 bp, Chicken  19866894316843_2
  misc_feature (1)..(148): n is any nucleotide
nnnnnnnnnnnnnnnnnnnnnnnnnnnnnnnnnnnnnnnnnnnnnnnnnnnnnnnnnnnnnnnnnnnnnnnnnnnnnnnnnnnnnnnnnnnnnnnnnnnnnnnnnnnnnnnnnnnnnnnnnnnnnnnnnnnnnnnnnnnnnnnnnnnnggctttctttctttcttcagttttttgtggttgtgttacctgagaaataccaaatggtgtcatttgggagacttgaattgcacagtgctctctgggctaggctaagacgtattgctctattaggaagggtttttttgtgtgccatytgtgtsccagcatagcatctccgccgactaattttccagtatgttgtttttgtttctggaaggtacaccacagccaatgctgagtctgattatgaccgagagtctgagaaggagagtgaagaaggggaagacgagctgagctgtgaaacagtgagaacagcaaggagggattccctggatctcgtcaacgaggatgaaacacatttaatcctcgattccttgctggatgaaggactgggccagctactgcagcaggcagaccacttgcacagtggagatgagcrggagaagagagagggattcca

SEQ ID NO: 59048 - DNA, 600 bp, Chicken  19866894316843_3
ttttttgtgtgccatytgtgtsccagcatagcatctccgccgactaattttccagtatgttgtttttgtttctggaaggtacaccacagccaatgctgagtctgattatgaccgagagtctgagaaggagagtgaagaaggggaagacgagctgagctgtgaaacagtgagaacagcaaggagggattccctggatctcgtcaacgaggatgaaacacatttaatcctcgattccttgctggatgaaggactgggccagctactgcagcaggcagaccacttgcacagtggagatgagcrggagaagagagagggattccagctgctgctgaataataaactggcggtaaaagttgcctttttctattttccagcaatgatttgtgacttagctaaayagctggggwagaggaaatcatgtttcttagtagggtctagtcctgtgcaatggctgggccagtttccagttgccccctttctgaggagcagcttggaacaggctgaaggtcaaaactgctcaggctgcagcagcagacagttccagttgctgcctgacctggagctccacagctcctcctgtcatctctttccatgagacaa

SEQ ID NO: 59049 - DNA, 600 bp, Chicken  19866894316843_4
agtctgattatgaccgagagtctgagaaggagagtgaagaaggggaagacgagctgagctgtgaaacagtgagaacagcaaggagggattccctggatctcgtcaacgaggatgaaacacatttaatcctcgattccttgctggatgaaggactgggccagctactgcagcaggcagaccacttgcacagtggagatgagcrggagaagagagagggattccagctgctgctgaataataaactggcggtaaaagttgcctttttctattttccagcaatgatttgtgacttagctaaayagctggggwagaggaaatcatgtttcttagtagggtctagtcctgtgcaatggctgggccagtttccagttgccccctttctgaggagcagcttggaacaggctgaaggtcaaaactgctcaggctgcagcagcagacagttccagttgctgcctgacctggagctccacagctcctcctgtcatctctttccatgagacaatacattgtgcatttgygaaacaacagcacgtcgtaagctcagtaaacttgtagagagctttgatagcactgggtttttgtcgccttaaaccttgcacc

SEQ ID NO: 59050 - DNA, 596 bp, Chicken  19866894316843_5
atgaccgagagtctgagaaggagagtgaagaaggggaagacgagctgagctgtgaaacagtgagaacagcaaggagggattccctggatctcgtcaacgaggatgaaacacatttaatcctcgattccttgctggatgaaggactgggccagctactgcagcaggcagaccacttgcacagtggagatgagcrggagaagagagagggattccagctgctgctgaataataaactggcggtaaaagttgcctttttctattttccagcaatgatttgtgacttagctaaayagctggggwagaggaaatcatgtttcttagtagggtctagtcctgtgcaatggctgggccagtttccagttgccccctttctgaggagcagcttggaacaggctgaaggtcaaaactgctcaggctgcagcagcagacagttccagttgctgcctgacctggagctccacagctcctcctgtcatctctttccatgagacaatacattgtgcatttgygaaacaacagcacgtcgtaagctcagtaaacttgtagagagctttgatagcactgggtttttgtcgccttaaaccttgcacccagca

SEQ ID NO: 59051 - DNA, 387 bp, Chicken  19866894316843_6
ttccagctgctgctgaataataaactggcggtaaaagttgcctttttctattttccagcaatgatttgtgacttagctaaayagctggggwagaggaaatcatgtttcttagtagggtctagtcctgtgcaatggctgggccagtttccagttgccccctttctgaggagcagcttggaacaggctgaaggtcaaaactgctcaggctgcagcagcagacagttccagttgctgcctgacctggagctccacagctcctcctgtcatctctttccatgagacaatacattgtgcatttgygaaacaacagcacgtcgtaagctcagtaaacttgtagagagctttgatagcactgggtttttgtcgccttaaaccttgcacccagca

SEQ ID NO: 59052 - DNA, 600 bp, Chicken  19866894316846_1
gcaattctagtgagaactccagtttcgtgattataactccaaaactatttaaagtcttctaattaatttcaaaagacaatgctgcttactattgttaaatttagcttttagcttacccactattgttgctaatggcatattaaaaacttgaacatacatatattattaactggtattatcaattatgcctttgtctggcaaataaggaattcataatgcatgcaaagtggtcctaatgtactgctttcattttgtgctggaaagggctgatcacttataatttttgctgactgccagtartttgctgtggatgtcagatgtactttattgagtaaagaacagtactcaggagaggcataccttgattttagcaaaggacttatggagatggaagatgcttttagttaagctctctgcgaaagttgatcataacaaaagatgtaattgcgaagaccaaaataatgactatgagactattagtctttcttgtaacaggatgcaagactagcctagaacaaaaaatatcttgtagtttataaagatggaaataaacaactgtggtagtgagggactttaaaacctcttagagaagaagtgttt

SEQ ID NO: 59053 - DNA, 600 bp, Chicken  19866894316850_1
gaaattgctcacacctgctccatcaggaagcagcagtctgttctgtagtaatgcttggtagatatctcatacagatattccctctttgaagtgctgccacaattacagcttttggacagctacttctgacgtaactgctctgtcttctttgatcctcttggaagaggagatctttagagacggattttaaatcaacttggagatgtgcccaaaaagatccagggaaaaaaaaaacagaatactcttggctgacaattttggcttgaatctgtgttgcaggcttagcctgcaatacttagktataagctgttgttttatttgtctttttctgtccccttcttttttttttttttcttttatttttatttttccccaaaacatatagaatcatcttctgatgtctgtgactgtggataatagacaaaatgagatgaaatcatcactgacttacaggactgttgaactgctggtagtttcagctgctgcccagcatgcactaagattaagaccagtccatcctaaaactggattttatttcaaatccacacattgcagttgaagtgccacactgtaaatgtttctcttcattagggtttttaa

SEQ ID NO: 59054 - DNA, 600 bp, Chicken  19866894316851_1
accggtgttaggaacacaccattttaagggctgaaatcatagatatttatttaaatacttaggcatgtcatatatacgcacatacatcagaggaacaagcacagagggctgttgtagaagtccagaatcactggaaatttctccctcccaaccaaatgtcacattgaaagctttcccccctctcccagatttccaacccccttttccagggctgcagttgtcagcacttcgccacctcacacaaaggtcagaaccaaacagttaacagttgtagggagggagaagttaaagcagaacaamcgcatcagaagcagccatgcatgctggttctcagccccattacgccatccgccaaactgctccctgtattccgagcttcatagaagtaaccactttcctctccagctcaaaaatcaaaaatatcattccaagctttcaaatgcattttcacttctttattgtcacctgtctgagcgttactgcctgagctgcaggccacgaagcacacgtggtttgccaggaccagcggcctcccagcaagagaatgagcagaacacagccgaggcatcacggtgccgttcccccacaggaggaagtgaa

SEQ ID NO: 59055 - DNA, 600 bp, Chicken  19866894316852_1
taagttttgggccatttctgcagggcaagggtgacagaagttgttcattttctgtgtcaaatgatgcaatgtggttgtttttcaaacactcccagcaccctcctctctgtaaagtaagattttcctgtccattagtggaaaatcccttctactaaaaacgtgtatttagcattttctgaaaatccactgtacttggccaaacctgactacactgcacgtgcaccatccctattggatgtgctctgccaggaattaacggaaagttaggggatttcccttgcagccgctgctctatgctgsctgttgttctgcagctagacaatttcttcactgaaggaaagartaatttaaaattgggttgggggtggggaacaaccacaaaaacccaccaaaagtacaaggccaaaaggtcattagagtagacattttgtagtaatgggagggaagaaaggagacaccaggtctrtctgtagacagatgacagcccaagaccgtggccacaggaggtatctagaaatgatgagggcaagcataaggcaaggagtgggacaaatcaccttttgtccaactcctggcaaaggagccccacacccctagcat

SEQ ID NO: 59056 - DNA, 600 bp, Chicken  19866894316852_2
ttcattttctgtgtcaaatgatgcaatgtggttgtttttcaaacactcccagcaccctcctctctgtaaagtaagattttcctgtccattagtggaaaatcccttctactaaaaacgtgtatttagcattttctgaaaatccactgtacttggccaaacctgactacactgcacgtgcaccatccctattggatgtgctctgccaggaattaacggaaagttaggggatttcccttgcagccgctgctctatgctgsctgttgttctgcagctagacaatttcttcactgaaggaaagartaatttaaaattgggttgggggtggggaacaaccacaaaaacccaccaaaagtacaaggccaaaaggtcattagagtagacattttgtagtaatgggagggaagaaaggagacaccaggtctrtctgtagacagatgacagcccaagaccgtggccacaggaggtatctagaaatgatgagggcaagcataaggcaaggagtgggacaaatcaccttttgtccaactcctggcaaaggagccccacacccctagcatcgatcaacccagagaaggtcaacctatcactgctgtcaacttg

SEQ ID NO: 59057 - DNA, 600 bp, Chicken  19866894316852_3
tagcattttctgaaaatccactgtacttggccaaacctgactacactgcacgtgcaccatccctattggatgtgctctgccaggaattaacggaaagttaggggatttcccttgcagccgctgctctatgctgsctgttgttctgcagctagacaatttcttcactgaaggaaagartaatttaaaattgggttgggggtggggaacaaccacaaaaacccaccaaaagtacaaggccaaaaggtcattagagtagacattttgtagtaatgggagggaagaaaggagacaccaggtctrtctgtagacagatgacagcccaagaccgtggccacaggaggtatctagaaatgatgagggcaagcataaggcaaggagtgggacaaatcaccttttgtccaactcctggcaaaggagccccacacccctagcatcgatcaacccagagaaggtcaacctatcactgctgtcaacttgtccatgttgggctgagtcatccaccagctggccaatcacacagacataaaatccgtagagctgatttcctgtttttgtttgcattgtttctttgtcttagttcaaagtacatgcttgtgggta

SEQ ID NO: 59058 - DNA, 600 bp, Chicken  19866894316852_4
gttctgccaatttctatttaaattttgagggtttaatgcatcaaaccagatcgcagatgggcacaggaatgggaatgaccaagagcagtggaacacctgtagcacctcaccagagctctatagctcaggctgggaaggaatccctttctttaggaccacgttcagctgctagagactgctttcctcttctaccaatgcctgcttcaatcaccacatgccttccaacttctgctgttagcaaagaacgggtagaacacagtttcagggctaaggggaatgaatggaagggacctggaagaytggcaattcccaaaaacattaacaagagtattgtctgaagttccgaaacccaacctttgatgcttcaagtacatactgcctgcaatatttttaaacaaacacccaattaaattttatcagccattgacgttcatgtgtttgatgttgattagcgactctgcattaaagtttctgtccgaagtgtgtggaatcaccacgtggttggtcaggaactgactgcccagaagcaattattctcttttaatcttacttcatttgttcagaacagagcagaggatggtgggaagctccctctgggga

SEQ ID NO: 59059 - DNA, 600 bp, Chicken  19866894316868_1
actgggattgtttagcttggagaagagaaggctcgagggagacctcatcgtggccttccagcactcaaagggagcgtataaacaggtaggagagcggctgtttacaagagtagatagtgataggaaaagggggaatggttttaaactgagacaggggaggtttaggttggatattaggaggaagtttttcacacagagggtggtgacacactggaactggttgcccaaggaggctgtggatgccccatccctggaggcattcaaggccaggctggatgtggctctgggcagcctggtctrgtggttggcaaccctgcacatagcaggggggttgaaactcgatgatcattgtggtccttttcaatctaggccattctatgattctttgaataaatctcaaactaattagaggaggagcagatagataagctcactggcttttctcctttgccatcacctatacgtatataatataaatattttgttttgattaagctttttcaatgaaacctttaatttcttttgacaaaaatatctcctagaattatggcaactctgtgcagctgaatataatcctcccaaaatacacagtaggctgta

SEQ ID NO: 59060 - DNA, 599 bp, Chicken  19866894316871_1
  misc_feature (1)..(44): n is any nucleotide
nnnnnnnnnnnnnnnnnnnnnnnnnnnnnnnnnnnnnnnnnnnnaagtaaaggcaggatttgtcctctcattttttttattactgttttcttcatcagaggacagaacgaggtgtctgcatcattgggagtgattgacggtttggtttgtagcatttgtttataacataagggaggagaactacgctttccacttagaggaaacagcagaaataagttccttagttttaagttacaattttgacctgtttctcactgctgcacgtaattctccatcacccatgtattaaatgtctctctrcctacctgcagagctgtatcactgggtcccattactctatagtgtctccaaagtgtcagtgatttggagtacaagtggctagcactggctttgcactgcttggggcagagctgcagtctcagtgggcaaacagataaaaatggcactttctaatacagctctgttccttttctacaaagcagggtagctgccttcctcaggcatggaaaatgagcagacgtggcagtacctcagtcatgccttgacctctgaaatatatatatagcaagaatatcaaggtcgagctgagttaaaccttg

SEQ ID NO: 59061 - DNA, 599 bp, Chicken  19866894316874_1
  misc_feature (1)..(34): n is any nucleotide
nnnnnnnnnnnnnnnnnnnnnnnnnnnnnnnnnngtatataaagaatacctgtttagggggaagtgtgtagaaaaagtactcaacatataggtaagaaagtctctgatgttcattagcataactttttcatctccagaaataattactataagaaaacagtgaccactgaaaaggatgcagtgggtactgaggagtcaaaaagagatcaatcactgcaaataaacatctggagaattctacgggaacatctaggctttttttttgtgaacacgtttgattaaatacaatgaaaatgtacrtaacagtgtgcagaatagcattttgcaccaacgtgaggctgacaattggttcacagrgctaaaactaaagtttcaagtgagcagagattaactatcaaatccacagcctagcgagcaaacttcatcctttgaagcatgttcaaacgctcctacttgacctgaaattctcttttgcagtgctatcagtaggctggcactgaagttctgagccaccagcttctgtttctaattgaacaatggtacatcatcacgaagcaactcacgaaacgagagctggtcaaaggctttatgtaaakcag

SEQ ID NO: 59062 - DNA, 600 bp, Chicken  19866894316874_2
ggggaagtgtgtagaaaaagtactcaacatataggtaagaaagtctctgatgttcattagcataactttttcatctccagaaataattactataagaaaacagtgaccactgaaaaggatgcagtgggtactgaggagtcaaaaagagatcaatcactgcaaataaacatctggagaattctacgggaacatctaggctttttttttgtgaacacgtttgattaaatacaatgaaaatgtacrtaacagtgtgcagaatagcattttgcaccaacgtgaggctgacaattggttcacagrgctaaaactaaagtttcaagtgagcagagattaactatcaaatccacagcctagcgagcaaacttcatcctttgaagcatgttcaaacgctcctacttgacctgaaattctcttttgcagtgctatcagtaggctggcactgaagttctgagccaccagcttctgtttctaattgaacaatggtacatcatcacgaagcaactcacgaaacgagagctggtcaaaggctttatgtaaakcagtacttctccatttaagtttgaggtaaattgtgtcaggactctggaaattgagatcttc

SEQ ID NO: 59063 - DNA, 600 bp, Chicken  19866894316874_3
tacrtaacagtgtgcagaatagcattttgcaccaacgtgaggctgacaattggttcacagrgctaaaactaaagtttcaagtgagcagagattaactatcaaatccacagcctagcgagcaaacttcatcctttgaagcatgttcaaacgctcctacttgacctgaaattctcttttgcagtgctatcagtaggctggcactgaagttctgagccaccagcttctgtttctaattgaacaatggtacatcatcacgaagcaactcacgaaacgagagctggtcaaaggctttatgtaaakcagtacttctccatttaagtttgaggtaaattgtgtcaggactctggaaattgagatcttccaggttttactcccttctaaagaaaccaaacactcccaggcatatttagcacttaagcctctccgtctctggaaacacagaatgcttctgaatgaaagaactgtgggagtactgtgtattttaaaacatctgtgacagagccagctacaagaaactactttcaaacccaaagcaatccggctcccaagaaatatgcctctgagatagcccttatcttctatttctcaatctgagtaaga

SEQ ID NO: 59064 - DNA, 583 bp, Chicken  19866894316876_1
taaagataaaagcaacagcaaaaaaactttatgatggtttcattctccgtcatgatataacaaattaaagagtaattaaatatctgatacctttctgtgccctagggccagatgaatagaatcactatggaaatattaaacattttaccagtatcatattttaattaacattgagtaaaacaaccctttaaaaaccaaaaccataatttccctcacaggatactataagaaatatttttcaaagaaattacctaattgcaacaactatgaaagaaatggcaatagttcaccatataaacrgggtagcttctagtatattgttagagtaaaatactatcctttatcggctcactggcagatcctcttttctctttattcaatgatccattgtttttttcctatgatcctaactaaggtatgactaagattatgttatattttgaccacaactttgattgtgaagtaatgcatcattttgaattggttcaaattaaattatcaaataattttaaaaagcagaagagaggagaggaaagagaaagggaaaataaaaaaattaatcactaatgcaaaataagttttt

SEQ ID NO: 59065 - DNA, 600 bp, Chicken  19866894316878_1
ttcaaaagtacttgcatttagagcaatctggtccattcccatcaaaactatttcaaaatggttatgattcaagagcagcatcctaacagtatgcaattagtcagctgaagcgctctctgaggaacttggtctcaattctgttgtgaagtgagtttacatagaagtaaaagaccccacttgtaaagacttgtagaagagttctctctcatagaagagaggcaatattttgaagcactgaggtacacagagtagttggagtggatttatagtgtctgttagagcaacttgggttacaccacrctgcgtgccaaaccagccctacttagttacatacccgtatcatttacaagtttgtttacaaatcccagttgacttaggtagactattggcttagtaaaagaaagaaatgaacaacaaaatgggcaagtaaaactcccaatctacggttttaaatgtttttacagttgttttaaacttggactaaaagttgttcgtttttgccctcaatgcaatcagacaaaaggaaacttcaaaagtcagtgttacatctactgaacaaagaaacagagggacaggaatatccttgaaaacatttcttcc

SEQ ID NO: 59066 - DNA, 599 bp, Chicken  19866894316881_1
  misc_feature (1)..(158): n is any nucleotide
nnnnnnnnnnnnnnnnnnnnnnnnnnnnnnnnnnnnnnnnnnnnnnnnnnnnnnnnnnnnnnnnnnnnnnnnnnnnnnnnnnnnnnnnnnnnnnnnnnnnnnnnnnnnnnnnnnnnnnnnnnnnnnnnnnnnnnnnnnnnnnnnnnnnnnnnnnnnnnttgctattaagtatcaacagggtgcaagttgctgcaaggttcctaatgctttgtctttccctcctgtattagaccacagtggcaatggctttaatattttgtgggtttagggtatatacagtgtagcattgaagtccccccwgtggaaatttaaagaaaaatgttcttgtcatacataaatacatggtattataggacggtatccttccaattcatgatcatgtgatccacttcataatttaagttccatccactaactggaagagagaggaaacctgtacaaaacccaacagttttatcttgtggtccacaaacaacaacagccttacagagattagaaacaaacaagcaaagaaacctctaaagtaaatcactgccattatactttggacagatgctctttttgagtgttgaatgtcgacttctattatattgcccatc

SEQ ID NO: 59067 - DNA, 600 bp, Chicken  19866894316885_1
cactggaaataactgaagagtaaaaaagacctgaacataccattaagtcaggttgattatgagttaccagcatgatgggaatgttaaaaggaaaatgtagttgtaggatgcattaggtattcatataccaagttcatgaaaaatcatatttgcaagtttatctaagtttctggccactcacattcaagatgaaagaaatcacatggaagcaagcatggataagcaaatgataagtgaatgggaaaaatccagaagaatattcttctcaaaatggagggataggttgtatcattgcctctrgttaaygtagaaggaaccagatctattaagcatcaatgctgatgtaagaacaggagacatatgtatatgtatctatatgactgcagcccaatcatgcccttcctgtcctgttttcttctgaaggatacaattctctctgattatggaatttctaaataaacagggtcatcaaattaagtatgcttatattttcaaagtttactattaaacttaagagtcataaataatattaacactgttggcttatttggaggaggtttgttacagaatgggatattctagagaaagattttagaggaa

SEQ ID NO: 59068 - DNA, 600 bp, Chicken  19866894316885_2
aaataactgaagagtaaaaaagacctgaacataccattaagtcaggttgattatgagttaccagcatgatgggaatgttaaaaggaaaatgtagttgtaggatgcattaggtattcatataccaagttcatgaaaaatcatatttgcaagtttatctaagtttctggccactcacattcaagatgaaagaaatcacatggaagcaagcatggataagcaaatgataagtgaatgggaaaaatccagaagaatattcttctcaaaatggagggataggttgtatcattgcctctrgttaaygtagaaggaaccagatctattaagcatcaatgctgatgtaagaacaggagacatatgtatatgtatctatatgactgcagcccaatcatgcccttcctgtcctgttttcttctgaaggatacaattctctctgattatggaatttctaaataaacagggtcatcaaattaagtatgcttatattttcaaagtttactattaaacttaagagtcataaataatattaacactgttggcttatttggaggaggtttgttacagaatgggatattctagagaaagattttagaggaaaaaaga

SEQ ID NO: 59069 - DNA, 600 bp, Chicken  19866894316892_1
agggaaacaattgaaaagtcactctcccaacagtaggggaaaaataggtggtgtgctttatatggcagatgaaccctctctacctggagtacacatagtgccccagtgctcagcactttgtctctgcaagtgctgagccaatggcactcatttttctcattacaaaacattgccaaaagatttggaggaaaatgccaatttagatttttaagatgtatttctgtcagagacagtgaagtgtgtttcagataataacaacatgaggggcctccaaaatttttgacactttccagtgagggraacagattttccagctgctgggaacagctgggagaatccagcacgtcatcctcctttgggatgcagcaacccccacagcacacacccaccagataaccacgcaagtccctgcatggaaggagcttccaggrctgatgcaagagtctccaggagcatcacagcaacaggtgacatctgtaggcaagcaccatgcatttgtcatctcctatcttactgaagtgaatgggcacaaaaaccacaggaatccatcagtctgtcctcatagagcccacttgcaaatcagctggatgagacttgcta

SEQ ID NO: 59070 - DNA, 600 bp, Chicken  19866894316892_2
gctgagccaatggcactcatttttctcattacaaaacattgccaaaagatttggaggaaaatgccaatttagatttttaagatgtatttctgtcagagacagtgaagtgtgtttcagataataacaacatgaggggcctccaaaatttttgacactttccagtgagggraacagattttccagctgctgggaacagctgggagaatccagcacgtcatcctcctttgggatgcagcaacccccacagcacacacccaccagataaccacgcaagtccctgcatggaaggagcttccaggrctgatgcaagagtctccaggagcatcacagcaacaggtgacatctgtaggcaagcaccatgcatttgtcatctcctatcttactgaagtgaatgggcacaaaaaccacaggaatccatcagtctgtcctcatagagcccacttgcaaatcagctggatgagacttgctaaagcatgcggtgagaaaacctcactggggggtcactgcgctctgacataagacataaggggccacagaggtttgcagcaagggtcatagattgctgggagatgtttttcaccttctggtctccagaataag

SEQ ID NO: 59071 - DNA, 599 bp, Chicken  19866894316899_1
  misc_feature (1)..(143): n is any nucleotide
nnnnnnnnnnnnnnnnnnnnnnnnnnnnnnnnnnnnnnnnnnnnnnnnnnnnnnnnnnnnnnnnnnnnnnnnnnnnnnnnnnnnnnnnnnnnnnnnnnnnnnnnnnnnnnnnnnnnnnnnnnnnnnnnnnnnnnnnnnnnnnnacatacaactgctgttatatcttataaaagtcctacatacagcctgatgtgcagcatcagtacaaattaacacgggtcttttctagtccttaagcaatttcctttaatttctttaaataaaaataattagcaaagataattaggcttgaaagatgtyattctgttattaatttaataaccttgcagctgggccatcagtacagtgaatatcttacagagcaaacatatttcaaattacagctatgctacgcatgtgaagatttggtaaatttaataaataccgtaaggctgatgcctgccattcttgatttcttcagatacagtcatataaaatgtattcacagtcagagttgctcgacagcaatggatctgtacctgcaagacagycgtgtgctctgagcatggaacaacttaccatgtaggtacagcactgtgctcagatgaattagccctgct

SEQ ID NO: 59072 - DNA, 600 bp, Chicken  19866894316899_2
ccttaagcaatttcctttaatttctttaaataaaaataattagcaaagataattaggcttgaaagatgtyattctgttattaatttaataaccttgcagctgggccatcagtacagtgaatatcttacagagcaaacatatttcaaattacagctatgctacgcatgtgaagatttggtaaatttaataaataccgtaaggctgatgcctgccattcttgatttcttcagatacagtcatataaaatgtattcacagtcagagttgctcgacagcaatggatctgtacctgcaagacagycgtgtgctctgagcatggaacaacttaccatgtaggtacagcactgtgctcagatgaattagccctgctgacatgcaggagatgaaagtccagatgggcagctgggctacggctgctttattgttcctgctgcctgtgagagcatgtttgcaagcagcacgggtgtctctcccagcattgcacaatgccattcagacataccttcagtttaacaatgaagctgattaaaacagtggaagatkgaagatattttatatatttgtttataagatgaacaacaaaaatctacacctacctcca

SEQ ID NO: 59073 - DNA, 600 bp, Chicken  19866894316899_3
aaaatgtattcacagtcagagttgctcgacagcaatggatctgtacctgcaagacagycgtgtgctctgagcatggaacaacttaccatgtaggtacagcactgtgctcagatgaattagccctgctgacatgcaggagatgaaagtccagatgggcagctgggctacggctgctttattgttcctgctgcctgtgagagcatgtttgcaagcagcacgggtgtctctcccagcattgcacaatgccattcagacataccttcagtttaacaatgaagctgattaaaacagtggaagatkgaagatattttatatatttgtttataagatgaacaacaaaaatctacacctacctccatgcacctttgtacagcagcacctttacaagaggcagtttcaccttaggtgatggagaaagctcccaccaacatcttcgctgcagatctccagtggcagggcagccacccacctaatgtcagtctgtccaacagwgcagacccagcactccctcagcacctggaaaagctgctccctgcttctcagcaaagatcctacagaggcagtttgagaaagggaggtgtagataggacctgtaccaag

SEQ ID NO: 59074 - DNA, 600 bp, Chicken  19866894316899_4
tgtgagagcatgtttgcaagcagcacgggtgtctctcccagcattgcacaatgccattcagacataccttcagtttaacaatgaagctgattaaaacagtggaagatkgaagatattttatatatttgtttataagatgaacaacaaaaatctacacctacctccatgcacctttgtacagcagcacctttacaagaggcagtttcaccttaggtgatggagaaagctcccaccaacatcttcgctgcagatctccagtggcagggcagccacccacctaatgtcagtctgtccaacagwgcagacccagcactccctcagcacctggaaaagctgctccctgcttctcagcaaagatcctacagaggcagtttgagaaagggaggtgtagataggacctgtaccaagtggatctacagtatacactgacacactcattttttactgtatggaatagcatttgaaatattaatcgggttagttattgcatgaacggaatccttctgttttagcatttaaaagtttcaactgtgtgtactgtactatgaagcaaaactgaaatacaagtcactatagatgctactgtaacactaacgtagt

SEQ ID NO: 59075 - DNA, 600 bp, Chicken  19866894316901_1
tgttgtctaaaataggtaagtaaaattactattataagtccaccgtcacttgattaaataccctgttgaaggctgcaaacagagaagtatttaaagaaaacactattttacaaggaattgttgccttgactgcatgtgaatctcactgggaaatctgtcatcttgtttctgacatttgttctgagaagggaaggaaaaaatctgttaagaactacaccaagataagcagcggtaaaattaccaactaaggagccttcagtagaatgctataataagaagggaacaacacagagaagaagrcaaacttcttatgtaagttatgaacctccatggtctaatagagggtgttatagccacagattaaacctctctgacaagaagtcctactggccaagagcaattcttttctattaaagggaaaagctactttacttctcaagcatagcagccagggggaagttttactagtacaaagctggagaagagaaagcaaaataaaactaataaactttaaaggaggtcttaggaaagatatgtcctccactaaatgctcacatctgccacaaagtcaatttaatgctagtttaaggctgtcccttg

SEQ ID NO: 59076 - DNA, 600 bp, Chicken  19866894316901_2
tagccacagattaaacctctctgacaagaagtcctactggccaagagcaattcttttctattaaagggaaaagctactttacttctcaagcatagcagccagggggaagttttactagtacaaagctggagaagagaaagcaaaataaaactaataaactttaaaggaggtcttaggaaagatatgtcctccactaaatgctcacatctgccacaaagtcaatttaatgctagtttaaggctgtcccttgagtcctagggcagcgctgcccattgtatcacagtgtgaaatatctgttaygttacagagcattatacctgcaaatgaaaaaggttttgagggtaaaaaactgcaggattctatgcaaagagcagctttcatcctgctctgcactcctttcaccccagcctctgagctggagggctcgcttttggggtacttctaaacaagtgatggtataagttagcaggaattacacgtggttgaaacttcaagcatgttcctgagatgccacrgcgagcaaacacattaaaaatacatttaattacccaagraagagccaggatgtgttgcagtttcacagcagctagttcrttcatt

SEQ ID NO: 59077 - DNA, 600 bp, Chicken  19866894316901_3
aagtcaatttaatgctagtttaaggctgtcccttgagtcctagggcagcgctgcccattgtatcacagtgtgaaatatctgttaygttacagagcattatacctgcaaatgaaaaaggttttgagggtaaaaaactgcaggattctatgcaaagagcagctttcatcctgctctgcactcctttcaccccagcctctgagctggagggctcgcttttggggtacttctaaacaagtgatggtataagttagcaggaattacacgtggttgaaacttcaagcatgttcctgagatgccacrgcgagcaaacacattaaaaatacatttaattacccaagraagagccaggatgtgttgcagtttcacagcagctagttcrttcattgtcagggaaataataagtgttatatttgcattcaggcagaggtgaaggctgagagctctctgcatgtatatctgtattaccacagcccaaataatttgctttaaggtcatggctcttcatgttttcattaaggctctcttcagtggaaatgattgtactaatcataatatttggcatgtatacagcatttccaacccatagaaatcaaagctttg

SEQ ID NO: 59078 - DNA, 600 bp, Chicken  19866894316901_4
ctagggcagcgctgcccattgtatcacagtgtgaaatatctgttaygttacagagcattatacctgcaaatgaaaaaggttttgagggtaaaaaactgcaggattctatgcaaagagcagctttcatcctgctctgcactcctttcaccccagcctctgagctggagggctcgcttttggggtacttctaaacaagtgatggtataagttagcaggaattacacgtggttgaaacttcaagcatgttcctgagatgccacrgcgagcaaacacattaaaaatacatttaattacccaagraagagccaggatgtgttgcagtttcacagcagctagttcrttcattgtcagggaaataataagtgttatatttgcattcaggcagaggtgaaggctgagagctctctgcatgtatatctgtattaccacagcccaaataatttgctttaaggtcatggctcttcatgttttcattaaggctctcttcagtggaaatgattgtactaatcataatatttggcatgtatacagcatttccaacccatagaaatcaaagctttgtaaggcttatatgacaaggtaaggcaggcagagaaccag

SEQ ID NO: 59079 - DNA, 600 bp, Chicken  19866894316901_5
tgttaygttacagagcattatacctgcaaatgaaaaaggttttgagggtaaaaaactgcaggattctatgcaaagagcagctttcatcctgctctgcactcctttcaccccagcctctgagctggagggctcgcttttggggtacttctaaacaagtgatggtataagttagcaggaattacacgtggttgaaacttcaagcatgttcctgagatgccacrgcgagcaaacacattaaaaatacatttaattacccaagraagagccaggatgtgttgcagtttcacagcagctagttcrttcattgtcagggaaataataagtgttatatttgcattcaggcagaggtgaaggctgagagctctctgcatgtatatctgtattaccacagcccaaataatttgctttaaggtcatggctcttcatgttttcattaaggctctcttcagtggaaatgattgtactaatcataatatttggcatgtatacagcatttccaacccatagaaatcaaagctttgtaaggcttatatgacaaggtaaggcaggcagagaaccaggtgcggactgtcataaaatgaaaggaggacagtgtgttca

SEQ ID NO: 59080 - DNA, 600 bp, Chicken  19866894316908_1
ctgtggctgttacgtcaccggcacgctgtcactgcgcgttaacattctctcttcacggccacttcagtgcaggtttttgtcctcgtgtttctgtcacaacgtccagcaaaacttctgaacccacacggacctgaggtgaaatggcaatcgaatgtgagaatcattgatttgaaattggctctgattatgcttttgagggtgctttttcccattcatgtttagcttggacgagggaatattttcctttgagtgtcccaagagctttatcttccagttcgtacttctgcacttgcagctgaygagcagtccyagctagcgtgcatccacacttgctgagttcagacagtctcctccctctcttttcctcactgctctgctcacaccgatgtttctgtagccctacgttgaactgttggcttggggaacggtcatgttaaaacaaactcagtttttcctttcttcattctcctttaaaaaaaaaaaaaaaggaagaggggaagagaaatgatggcgttatggctgcggatggagtttgctgtggatctcctcgaatgacttacgctgactcaaggaagggatgtgtgaaaactagctgtggga

SEQ ID NO: 59081 - DNA, 600 bp, Chicken  19866894316908_2
tacgtcaccggcacgctgtcactgcgcgttaacattctctcttcacggccacttcagtgcaggtttttgtcctcgtgtttctgtcacaacgtccagcaaaacttctgaacccacacggacctgaggtgaaatggcaatcgaatgtgagaatcattgatttgaaattggctctgattatgcttttgagggtgctttttcccattcatgtttagcttggacgagggaatattttcctttgagtgtcccaagagctttatcttccagttcgtacttctgcacttgcagctgaygagcagtccyagctagcgtgcatccacacttgctgagttcagacagtctcctccctctcttttcctcactgctctgctcacaccgatgtttctgtagccctacgttgaactgttggcttggggaacggtcatgttaaaacaaactcagtttttcctttcttcattctcctttaaaaaaaaaaaaaaaggaagaggggaagagaaatgatggcgttatggctgcggatggagtttgctgtggatctcctcgaatgacttacgctgactcaaggaagggatgtgtgaaaactagctgtgggaagggtgggcc

SEQ ID NO: 59082 - DNA, 600 bp, Chicken  19866894316908_3
attggctctgattatgcttttgagggtgctttttcccattcatgtttagcttggacgagggaatattttcctttgagtgtcccaagagctttatcttccagttcgtacttctgcacttgcagctgaygagcagtccyagctagcgtgcatccacacttgctgagttcagacagtctcctccctctcttttcctcactgctctgctcacaccgatgtttctgtagccctacgttgaactgttggcttggggaacggtcatgttaaaacaaactcagtttttcctttcttcattctcctttyaaaaaaaaaaaaaaggaagaggggaagagaaatgatggcgttatggctgcggatggagtttgctgtggatctcctcgaatgacttacgctgactcaaggaagggatgtgtgaaaactagctgtgggaagggtgggcccacgtctggctcagcgtgcccaggaagcagcttgtgatccccgggctgtgggatctgcggcctctgggacacggcggctgtggggctggtgctggagctcatccctgcagcactgagcaccttgtgctgaggactggaaagctggcttttggtgtacagtaca

SEQ ID NO: 59083 - DNA, 600 bp, Chicken  19866894316908_4; identical to SEQ ID NO: 59082

SEQ ID NO: 59084 - DNA, 600 bp, Chicken  19866894316908_5; identical to SEQ ID NO: 59082

SEQ ID NO: 59085 - DNA, 600 bp, Chicken  19866894316908_6; identical to SEQ ID NO: 59082

SEQ ID NO: 59086 - DNA, 600 bp, Chicken  19866894316908_7; identical to SEQ ID NO: 59082

SEQ ID NO: 59087 - DNA, 600 bp, Chicken  19866894316910_1
cacaaaatatgaagtaatacaagtatttcttaatatagctagaaagatgattcttgtggaaagacatgaagatactttagactcctcatattaatatattatgatttcttttcctcgaagcacgttgaggagcatgtttcctcaagcggtaatgaggtccgggtaagaagtaaagccatggtcatagattcctggaactgatctttctcaagtaactaactcgattacaattgattctgaggcaacatgaaaatagtcagtcttcattccctcgcacacagtaaaaagtacccaagcaaygtttttggtgataaattctttgttttccaaaccaattggaattgctttacataaacaagtatcaatctggcagaaatattttggaccttcygtgttcagggagaagcaaaaacagaagctgcggtacacagccaaccacarcatgagacagagtgagtgatctcattggtacatacaaataccatctcaggaatttaggaatcaaaagaactgtccaaatcttctccacgtgtatacacatatataagtatgtatgcatgtaatatatacaacacttctacttgttctgttcagggaatt

SEQ ID NO: 59088 - DNA, 600 bp, Chicken  19866894316910_2
taatatattatgatttcttttcctcgaagcacgttgaggagcatgtttcctcaagcggtaatgaggtccgggtaagaagtaaagccatggtcatagattcctggaactgatctttctcaagtaactaactcgattacaattgattctgaggcaacatgaaaatagtcagtcttcattccctcgcacacagtaaaaagtacccaagcaaygtttttggtgataaattctttgttttccaaaccaattggaattgctttacataaacaagtatcaatctggcagaaatattttggaccttcygtgttcagggagaagcaaaaacagaagctgcggtacacagccaaccacarcatgagacagagtgagtgatctcattggtacatacaaataccatctcaggaatttaggaatcaaaagaactgtccaaatcttctccacgtgtatacacatatataagtatgtatgcatgtaatatatacaacacttctacttgttctgttcagggaattaagaggatgacaaaatcagcccaaattcacctaaatacataattctacagcaagtaaaacttaaatacttcaaaagaaaaaacaaagccct

SEQ ID NO: 59089 - DNA, 600 bp, Chicken  19866894316910_3
tcaagcggtaatgaggtccgggtaagaagtaaagccatggtcatagattcctggaactgatctttctcaagtaactaactcgattacaattgattctgaggcaacatgaaaatagtcagtcttcattccctcgcacacagtaaaaagtacccaagcaaygtttttggtgataaattctttgttttccaaaccaattggaattgctttacataaacaagtatcaatctggcagaaatattttggaccttcygtgttcagggagaagcaaaaacagaagctgcggtacacagccaaccacarcatgagacagagtgagtgatctcattggtacatacaaataccatctcaggaatttaggaatcaaaagaactgtccaaatcttctccacgtgtatacacatatataagtatgtatgcatgtaatatatacaacacttctacttgttctgttcagggaattaagaggatgacaaaatcagcccaaattcacctaaatacataattctacagcaagtaaaacttaaatacttcaaaagaaaaaacaaagccctgcataaagccctctatacatttttttttcttccatttttatttaacaggg

SEQ ID NO: 59090 - DNA, 600 bp, Chicken  19866894316918_1
tatagttaaatttgcttaatattttctacccctcaatcttatttgcatttactgtttcctttcttttatttaactagattgaattttctgtgctggtcagctgttttgagccaagcgctttttgaaaacttcaggaaaaatctttttatcctttttgaagaatgagatcaaggaaaatattttatttttgttataaaattgttattgccgtctcactgagggattttactcccaggctctggaaaacagactttgactttggaaggagcctagttcttatattgagggtgtgccttcctyggcctttattaaagttcatcaaagtctggcattgttgcaggtctgaaaattatgttgttgtatttcagagaagtttcctatctgtgtatcctaagtctgtctgcatctaatgtgcttctgattctcccagtaaccactgtgttgcaaaaattttgcgtgtaagccatcttcactgaacaagtgagcatacactatttggagactgcaggaacctctctggagtttccaagggtctctggtgtattgagtggcagagagatggtaggaactatctattttcatatccttgttgcccccctt

SEQ ID NO: 59091 - DNA, 600 bp, Chicken  19866894316920_1
aggaaagcatgtagtgacacaactcttgctcaggtatgttcctgattccgtgtgtagcctgttccttcatctttaaacaaaccctgcactttattactgtgacatgcttctcttcagtaactgaaagaatagcaaaataagcatttggaagtgtaccgtgtgcttatataattactttggaattgtaggtgaatgaagtgaagcagttagaaagacaactgtttatcttaccttcatgcctaaccaaacaaacagccataccaaaacatcccaaccaaccaaaaataaataaataaatamccccccccaccatcttagtatgtcctgcttccagcttaccctctcaatagagtgtgtcaactgtactcactcaatgtagaaggatttgggtaagcgtcttttagctttgctttgggaacaaaaatacctggcatttaaattttgccatgcttgaaaaagtaacaacacagtatatattaaaggattttctttcctttgtggtaatagagaactttcagacttgataatctgaagtggtctcagtattgcatagtgataccttcagaagctttttacagctccagttacagtgactctgat

SEQ ID NO: 59092 - DNA, 600 bp, Chicken  19866894316924_1
ctgcatttcctctcttttctttcttcttcttcctctccttcctgtcttctctagtcatttctttagtggccatttcctgaatttgataaggaaataataccagtgccaaagtattctcaatccacatcattcattgtcatcagaaagttgcctaatcatgccgtgaaacagttaactgtttttagaaaggtgtgtaattttacctcaagtagttgattgcctgttgttagaaaattcagtaaagtcgtctcacactattcctctaagaaaatgtctcataaattgtcactgtctgactcygctgtgccagcaactcctgccaggcagggagtgccctgtttgggcaatgggataaattcaccttcctcacaacccacagagacagatgggagaagacaaacacctttctctttcaaacacaataacaccaggccccatagcagtttgaaagccacggaacacgttgccaatctcggttggactgtcctactgcacccgccacacacatagtctggatttggcaccttctgactgtcatctgttcaggccgatgaaagatggactgtgtgggcaacagtttcctagcaacagtgccgtcat

SEQ ID NO: 59093 - DNA, 596 bp, Chicken  19866894316926_1
gttggtgttttgggagcatttgtgatcatggccatgtgggaggtaacaccagcagtcattcattctgggctaggggcttttttcttccctttatccacccccaccggccagttcaaatacatattcattttagggcccatctccgaaattttatttcctttttgatctcatcctttagcatttatgcagtgaagagccacatgaaggcacttagcttgtgcttgacaatcaagagaaattaaaattagcaacagaatggtaaagaaactcatttgtattaggtgttatgaatatttaatyccaaatttactattcctgcagttaaccctgttgaaagtagctgttcacaccataycaacaaagcacaggaatgagacattttgggcttgaggaatttgtgagaaagaaaactcaatgtagtgttgaaaaagtgattatttgtaaaagtgaaataacatattgtaaggatcttgtctatataaacctttaaaatgctttatagttagccaggtattaattccctgaataaagtataacattacacaaagggagcactgtgctgtttaactttacagactattgggaagacactccct

SEQ ID NO: 59094 - DNA, 541 bp, Chicken  19866894316926_2
tcattcattctgggctaggggcttttttcttccctttatccacccccaccggccagttcaaatacatattcattttagggcccatctccgaaattttatttcctttttgatctcatcctttagcatttatgcagtgaagagccacatgaaggcacttagcttgtgcttgacaatcaagagaaattaaaattagcaacagaatggtaaagaaactcatttgtattaggtgttatgaatatttaatyccaaatttactattcctgcagttaaccctgttgaaagtagctgttcacaccataycaacaaagcacaggaatgagacattttgggcttgaggaatttgtgagaaagaaaactcaatgtagtgttgaaaaagtgattatttgtaaaagtgaaataacatattgtaaggatcttgtctatataaacctttaaaatgctttatagttagccaggtattaattccctgaataaagtataacattacacaaagggagcactgtgctgtttaactttacagactattgggaagacactccct

SEQ ID NO: 59095 - DNA, 600 bp, Chicken  19866894316927_1
gaggtatatggttgaaagcaactgcatgtcttatttacagattaatttccctatttaaatgctaagtatattaagtacttttgtttgaagaaggcactttgtccagcatgtgttgacttccttctctgtctaaagagaccttccaccgaggcaaggacagagtgtgcaacaccatgtacccccagcacaccacaaacacaggaagggaaagactcccatttcctctggaggactgagctttagttcccagaaggtagacctgtgcaacatctccttgttctcccacgtcttctggtgtarcacaccacgctgctgctttgctagcaaagacagtgcaactaaatatggaaaatttggtcaaatatttcatctaattgactacaggatattatccacatttttcttaaaaccacagttttcattcctagamcaagaaattgaccccagcacccctgaggagcctacagtaagaggtgtgtttggccggatctgcttccagatactatgaggtcaaaagaaaggaaaagtttccttggcttgtgcagacaaatgacagatcagagatgtccttctctaatctttctgtccatgtttcaaggg

SEQ ID NO: 59096 - DNA, 600 bp, Chicken  19866894316927_2
taaagagaccttccaccgaggcaaggacagagtgtgcaacaccatgtacccccagcacaccacaaacacaggaagggaaagactcccatttcctctggaggactgagctttagttcccagaaggtagacctgtgcaacatctccttgttctcccacgtcttctggtgtarcacaccacgctgctgctttgctagcaaagacagtgcaactaaatatggaaaatttggtcaaatatttcatctaattgactacaggatattatccacatttttcttaaaaccacagttttcattcctagamcaagaaattgaccccagcacccctgaggagcctacagtaagaggtgtgtttggccggatctgcttccagatactatgaggtcaaaagaaaggaaaagtttccttggcttgtgcagacaaatgacagatcagagatgtccttctctaatctttctgtccatgtttcaagggtcctggtcatataaaatgagtgaatagctgcccagaggaccacaacgtttaccacaaattacttctttatggaaaaatcaattttatagctttctgaatttcaaacacttgcctcttcaatcccatggaa

SEQ ID NO: 59097 - DNA, 600 bp, Chicken  19866894316927_3
aattttatagctttctgaatttcaaacacttgcctcttcaatcccatggaattactcttttgagagccaagcctgagatagatgactccaaggatctactcctggggcaatgaagtatctgttataaaaatctagagaggacttgtaagtctttggaaaagactcagagtaaagaaaacatgtatcaacagcttaacattatatagctagaaacgtccagattaatctgttgtgcatccagcaatcttctgtcctagcagactagaaagctaaattcaacttggtctgatgtaacagcaycagaaagcatttcaaaggacacgggaggacataccctcctgcaagctggcctggaagggtcaacatacctgctgttctgctcatgtgtcgggaattttacaaagctgcattcatgagaatacagctttaaaaactaaagctcctgagaacttttcacatgcatacaaccttcaaaataaatactgttaccaggtgtgtacagggagtaaaatgaaatgcactcagtaaaggtaactctgaagcacttgctgctctccttactcagacctacgaacaaatccataacattggttgtggttc

SEQ ID NO: 59098 - DNA, 599 bp, Chicken  19866894316930_1
  misc_feature (1)..(106): n is any nucleotide
nnnnnnnnnnnnnnnnnnnnnnnnnnnnnnnnnnnnnnnnnnnnnnnnnnnnnnnnnnnnnnnnnnnnnnnnnnnnnnnnnnnnnnnnnnnnnnnnnnnnnnnnnnctgtggacatccttttgccttcccttcattgcgttgtcttaccttagccttcatgaaggaaggctcaaaggcaccgcagtccccgcttagtcatggcatttcacacagccccaccagcttttgctctccttgaaagccatggagccacaacatggcacatttctcattcacagaaaatccactgaggattttcygggtgaatcattcagaaaagcagctcccagatgtttcccactaacaagtatgtgcacgttataggacagttctcacaggacatcaaacacagctatggtcccttgttcattctgggacacagcactaagcactgaagtgcagtcagcacagagcatctccagccacagatggttactgtccctcaggtatgcaggcaracttgtgaaaatctgttgtgtttctcacatacctacgcaggctggcattttggcattcaaaaaaataaaacattttattttggggctcccttacagccaga

SEQ ID NO: 59099 - DNA, 593 bp, Chicken  19866894316930_2
atggcatttcacacagccccaccagcttttgctctccttgaaagccatggagccacaacatggcacatttctcattcacagaaaatccactgaggattttcygggtgaatcattcagaaaagcagctcccagatgtttcccactaacaagtatgtgcacgttataggacagttctcacaggacatcaaacacagctatggtcccttgttcattctgggacacagcactaagcactgaagtgcagtcagcacagagcatctccagccacagatggttactgtccctcaggtatgcaggcaracttgtgaaaatctgttgtgtttctcacatacctacgcaggctggcattttggcattcaaaaaaataaaacattttattttggggctcccttacagccagattcccatctcggttgcactaagataaacttggagcagctccgctgctgctggatgtgagatggcacacgcgctcctagacagatacttgagtgctgtcatatatgagaagagaattactttaactccactttaagtcacctttacagcaactcccacaggcatgtttacaggagttaacccagcgcagagga

SEQ ID NO: 59100 - DNA, 599 bp, Chicken  19866894316936_1
  misc_feature (1)..(36): n is any nucleotide
nnnnnnnnnnnnnnnnnnnnnnnnnnnnnnnnnnnncgtaaaaatgaagctcagctatactaaggagacactatcacagctacacttctccaatagtcctataaacacctgcctaagaggagccagctctctgtgccaagtgagtccttcttcacacacctctgagtcagtggataccctccatgactcttacagcctgtagatttcctgctggtgggccaggctgtacagcatctggaagaacttggccctcctctgtgaagtcaggaaggagttaatacatgccaatggagagtgcaystgtttgctttgccagctgagctctcctgtggcagcagcactagcagagctgaggaagcatagttctttaaagaaacacttcaaatgtaccagatgattaagacaatgaacgggagctgtagggagggacttagaatcactttgtggtcttggtgctgtcacacaaaactgaattttaggaggggaatgatgaagtgagctgtttgtaggcaggtcaaaggataatgctgagaacatcgacaggataaaactgtaaaagggcastctgcgtccatctgtctgaacagatttctgtgctg

SEQ ID NO: 59101 - DNA, 599 bp, Chicken  19866894316936_2
  misc_feature (1)..(35): n is any nucleotide
nnnnnnnnnnnnnnnnnnnnnnnnnnnnnnnnnnncgtaaaaatgaagctcagctatactaaggagacactatcacagctacacttctccaatagtcctataaacacctgcctaagaggagccagctctctgtgccaagtgagtccttcttcacacacctctgagtcagtggataccctccatgactcttacagcctgtagatttcctgctggtgggccaggctgtacagcatctggaagaacttggccctcctctgtgaagtcaggaaggagttaatacatgccaatggagagtgcaystgtttgctttgccagctgagctctcctgtggcagcagcactagcagagctgaggaagcatagttctttaaagaaacacttcaaatgtaccagatgattaagacaatgaacgggagctgtagggagggacttagaatcactttgtggtcttggtgctgtcacacaaaactgaattttaggaggggaatgatgaagtgagctgtttgtaggcaggtcaaaggataatgctgagaacatcgacaggataaaactgtaaaagggcastctgcgtccatctgtctgaacagatttctgtgctga

SEQ ID NO: 59102 - DNA, 600 bp, Chicken  19866894316936_3
caggaaggagttaatacatgccaatggagagtgcaystgtttgctttgccagctgagctctcctgtggcagcagcactagcagagctgaggaagcatagttctttaaagaaacacttcaaatgtaccagatgattaagacaatgaacgggagctgtagggagggacttagaatcactttgtggtcttggtgctgtcacacaaaactgaattttaggaggggaatgatgaagtgagctgtttgtaggcaggtcaaaggataatgctgagaacatcgacaggataaaactgtaaaagggcastctgcgtccatctgtctgaacagatttctgtgctgagcgtggttttggcagctaatagatattagagagctcagaaggggactctggtatcaaaaacccttctctgagaccaaagctgcacttgaactctgctgatgagcagaagaggatgtcctttccttccagcacatcactgcactgctctttgaaatccaacatgctgcagctggcagtaccacgcttcctgcatacaaatctagctaaataacccagccgtgtgagttttctatgctggctaccatttcttctccatgctgacta

SEQ ID NO: 59103 - DNA, 600 bp, Chicken  19866894316938_1
atatcataacatgccacatggtgtctgatgtcctttagcgacggcagatttatagcattttccctcataaaaaccctctcccttgccaaaagaggtccagctggagttatgaaatcagtaaacagagaccctgctgcagtggggaagcttgccctttgcagctcccttcatctgcagcatgcagtgcacaccagaaccttgcactctggaaatcacacagtggtaatccatggggaaaccttggaagaactcctttactcctgcagatctgatagcacctgtgacccttgtgtgctgttyagcagttagtaggaaattcatcttaagttattataatgctacagatttattaatgtttatgtacaggatgtagttaaaaccccaccctacttgtgagatattgctccctcgaaatttggctgccttgaaatggacataatcccttcttgagtgtttgggaagtgattagtggagcttggatgttgccatgagcaaactcaagttcataattctttcaactggaaatgcattctgaatctgccatgactatctggccactaatcgctttcatgttgctcactgtgaaatttgtaggcaatt

SEQ ID NO: 59104 - DNA, 599 bp, Chicken  19866894316940_1
  misc_feature (1)..(41): n is any nucleotide
nnnnnnnnnnnnnnnnnnnnnnnnnnnnnnnnnnnnnnnnnaaatttttagtagaaataaacctatactaccgcatgtttcagtgcatagtgaattcttccagagatgtgtcagtgtagagtcaaaatccaccacctctggagccaggtaatcctcatacttgggatgagtacaagccaatttaacctgagactactattccacataccacatatgagcatacagtgttttgtactacacagttttgatttgatcacagatgaacctggcatagggaatattctacaaaatgactttccrcacagctggatatccctagtacttaaaactgacaaagcagcataaaccytaaacagcagctgtagttcagcatgacagaggtaactacttgaagccgttatgagtttctatgcagctgagacaagactaccacattttaacaatttgctcctctatgatgtcagctggcaagaagtctaggctctcagaaattttacaacctatttaaaacagatgttagtttagagctcgcagtgtctatgtgacccacagctgtagtgagaagtggatgtcgggcagcagygcatgcagttcacctg

SEQ ID NO: 59105 - DNA, 600 bp, Chicken  19866894316940_2
agtagaaataaacctatactaccgcatgtttcagtgcatagtgaattcttccagagatgtgtcagtgtagagtcaaaatccaccacctctggagccaggtaatcctcatacttgggatgagtacaagccaatttaacctgagactactattccacataccacatatgagcatacagtgttttgtactacacagttttgatttgatcacagatgaacctggcatagggaatattctacaaaatgactttccrcacagctggatatccctagtacttaaaactgacaaagcagcataaaccytaaacagcagctgtagttcagcatgacagaggtaactacttgaagccgttatgagtttctatgcagctgagacaagactaccacattttaacaatttgctcctctatgatgtcagctggcaagaagtctaggctctcagaaattttacaacctatttaaaacagatgttagtttagagctcgcagtgtctatgtgacccacagctgtagtgagaagtggatgtcgggcagcagygcatgcagttcacctgcagcaaagcctcattccaaggatctgcaaggagaacattctaaagactac

SEQ ID NO: 59106 - DNA, 600 bp, Chicken  19866894316940_3
tacaaaatgactttccrcacagctggatatccctagtacttaaaactgacaaagcagcataaaccytaaacagcagctgtagttcagcatgacagaggtaactacttgaagccgttatgagtttctatgcagctgagacaagactaccacattttaacaatttgctcctctatgatgtcagctggcaagaagtctaggctctcagaaattttacaacctatttaaaacagatgttagtttagagctcgcagtgtctatgtgacccacagctgtagtgagaagtggatgtcgggcagcagygcatgcagttcacctgcagcaaagcctcattccaaggatctgcaaggagaacattctaaagactaccactaacatcatgcctcaataaaaggtcattaaatccctcatttgttgcctgtacttgtgaagatagggaatcttctcactaaatccacagtcctatcctggttcctctgaggacacagagttactcaaaattgttgcaaatcttgcttttgccttgacaagtcaaactgatgtcttctgcaaccataaaggctgtaattgaaaggacttcacatttccttattcaactgaaga

SEQ ID NO: 59107 - DNA, 600 bp, Chicken  19866894316944_1
catggctggattcaaaatgtatgctgtcagtagtcctgctctcagtagcaatgaaccttatagggaaatcatctgagaaagaataggcccccagtcaagctacagggcaactctccaaaagggacagcttgcagcatatggagggagtaaaggaaactacagggggttggactcctacaaagtatggtataggtgctcattacttagaattaaagcaaatggagaaagtaagctcaagcagagggctctggggaatcgtgagggaacataattaaattttagaggaatgtttatgtgctsaagtaagagaaagaagaaaattaaagattgggaaaaaaataggtcaagggaggagggaaatcggtgagccggactgtgccaaagtgcttcctgccctctcggcagccttacacttggtaaggagacattggtagaaagcaggcagcacaaccagctgcagctcacacaccacttccagtgaaaaacttcaactggaaaatggcatcttctgaactacttttgtcggcatgcttcttcctttccctcttctttttcctcttccccttctttttcttttaccttttccttttcctcttttct

SEQ ID NO: 59108 - DNA, 600 bp, Chicken  19866894316950_1
tcgtcttccaaccttctcttggaaaaatcaccatgcagccttccacaaccgacactgactgcttccagcttgggaccctctaatcttatcgcagttacctcttatctgagctaccatgtttcgatctcatatctgggagcacagcggtcggggggaggaggaggagaggaaaagatagaaggcagagcagtgaaaatgttagctcagctgcccctcacacttcacacccagccctaaaccacctccagcttctgtcctgcctcagtcccccaggaaaaggacaatacaggacctggaacmaaggacaagcagatgggatgtccccagcccctctactggctctgctgtgctcttgtcccacagacttcaggaataccaggtctgagtggaggcaacactcttctctccaagcccagctccctaatacctgccttctccaaggccaaggggatgggaaagggcatcacaatgtgcatggggccgtctgtgccctcactgatgcagccccatccccacacaccgtgcttctcatgcaagagccatgcaggcgcatcaccaaagcaatcctccacttgttcattcattgtgagtgcctgggca

SEQ ID NO: 59109 - DNA, 599 bp, Chicken  19866894316952_1
  misc_feature (1)..(52): n is any nucleotide
nnnnnnnnnnnnnnnnnnnnnnnnnnnnnnnnnnnnnnnnnnnnnnnnnnnnttctgcaggttcaacttctgatccaattggatgttttgttttaataaaggggaaaaaaaacaagccaacgggctgctttttggcatcaacatctctttcagttgcaccagtcagtgttatttaagtggtaagatctgtggtggatttggcatttctcaggtgagttgcaaaaattaccaattatcaaaagtaatattttcagattattggtagtgttaggtgtagtcatgtttgtttgtaactggtgygtgtaactgttgtgaacatgggtatagtttctacagagtatctgtctttagcacaggaacagacttgcctcgttggttatctttactactacttagaaacagtgagaaatacggagcgcagaacagaatggaaagcacaggataactggtgcttccatgaccgccattggctttactgctggtgcagarcatcrcaacacttacacccaacccagaagcacagatcctgagctatggggaactttgctgcctgaccctcttgctggtgacgttcctggaaagtgaacacgcaggcagca

SEQ ID NO: 59110 - DNA, 600 bp, Chicken  19866894316952_2
tggtggatttggcatttctcaggtgagttgcaaaaattaccaattatcaaaagtaatattttcagattattggtagtgttaggtgtagtcatgtttgtttgtaactggtgygtgtaactgttgtgaacatgggtatagtttctacagagtatctgtctttagcacaggaacagacttgcctcgttggttatctttactactacttagaaacagtgagaaatacggagcgcagaacagaatggaaagcacaggataactggtgcttccatgaccgccattggctttactgctggtgcagarcatcrcaacacttacacccaacccagaagcacagatcctgagctatggggaactttgctgcctgaccctcttgctggtgacgttcctggaaagtgaacacgcaggcagcacagctcagtgagtgtgctgggtaagtgattcagggagctggtgatggacattttagtgtcagaatcttgagaggaaatcaaagtaagccacacagtgtacaagagcacggataagagaaatgcaagcagtattctaagataaaagtgtcttcctgaggctattctgcgaggaagtataacacaaggaaaa

SEQ ID NO: 59111 - DNA, 600 bp, Chicken  19866894316952_3
gatttggcatttctcaggtgagttgcaaaaattaccaattatcaaaagtaatattttcagattattggtagtgttaggtgtagtcatgtttgtttgtaactggtgygtgtaactgttgtgaacatgggtatagtttctacagagtatctgtctttagcacaggaacagacttgcctcgttggttatctttactactacttagaaacagtgagaaatacggagcgcagaacagaatggaaagcacaggataactggtgcttccatgaccgccattggctttactgctggtgcagarcatcrcaacacttacacccaacccagaagcacagatcctgagctatggggaactttgctgcctgaccctcttgctggtgacgttcctggaaagtgaacacgcaggcagcacagctcagtgagtgtgctgggtaagtgattcagggagctggtgatggacattttagtgtcagaatcttgagaggaaatcaaagtaagccacacagtgtacaagagcacggataagagaaatgcaagcagtattctaagataaaagtgtcttcctgaggctattctgcgaggaagtataacacaaggaaaaaaata

SEQ ID NO: 59112 - DNA, 600 bp, Chicken  19866894316955_1
atcctgtgtcccctcaccgagatgcacgcagccagggaattccacggggtcactgcggccgtgcttgttgacggcacagactcggaagcagtagtcagcctcacggggcacgctgtcacccagtacctgcacacggccgggtagctcagtgctcaggcactgcacccagctgccgcccgctgcctcgcgccgctccacaatgtaggcgctgggcgggcggtggtgcacgtcgggtgcggggcaccacgtcagcagggccgcgttgctctgctccgtgctcagctgggctgccatcggcaygccrggagggtcacgcttcacacctggaacacacrgcacagtggggattggaaggtgccatcccacccctccgccatttcagaccctggtgaatggggagaacggagggtgcggggaggccccgtgcaacccagcccagggctcacacttgacacggagctgggaggacgtcagtgactccccaacagagaagcagatgatgcccgcgtcctcacgagtgacgtgcaccagyaccaggaggtgcgtcctgccaaagctcttcagcacrgcacgtggtgattcgtgcagctgcagcccatt

SEQ ID NO: 59113 - DNA, 600 bp, Chicken  19866894316955_2
tgtgtcccctcaccgagatgcacgcagccagggaattccacggggtcactgcggccgtgcttgttgacggcacagactcggaagcagtagtcagcctcacggggcacgctgtcacccagtacctgcacacggccgggtagctcagtgctcaggcactgcacccagctgccgcccgctgcctcgcgccgctccacaatgtaggcgctgggcgggcggtggtgcacgtcgggtgcggggcaccacgtcagcagggccgcgttgctctgctccgtgctcagctgggctgccatcggcaygccrggagggtcacgcttcacacctggaacacacrgcacagtggggattggaaggtgccatcccacccctccgccatttcagaccctggtgaatggggagaacggagggtgcggggaggccccgtgcaacccagcccagggctcacacttgacacggagctgggaggacgtcagtgactccccaacagagaagcagatgatgcccgcgtcctcacgagtgacgtgcaccagyaccaggaggtgcgtcctgccaaagctcttcagcacrgcacgtggtgattcgtgcagctgcagcccattgcgg

SEQ ID NO: 59114 - DNA, 600 bp, Chicken  19866894316955_3
ggaattccacggggtcactgcggccgtgcttgttgacggcacagactcggaagcagtagtcagcctcacggggcacgctgtcacccagtacctgcacacggccgggtagctcagtgctcaggcactgcacccagctgccgcccgctgcctcgcgccgctccacaatgtaggcgctgggcgggcggtggtgcacgtcgggtgcggggcaccacgtcagcagggccgcgttgctctgctccgtgctcagctgggctgccatcggcaygccrggagggtcacgcttcacacctggaacacacrgcacagtggggattggaaggtgccatcccacccctccgccatttcagaccctggtgaatggggagaacggagggtgcggggaggccccgtgcaacccagcccagggctcacacttgacacggagctgggaggacgtcagtgactccccaacagagaagcagatgatgcccgcgtcctcacgagtgacgtgcaccagyaccaggaggtgcgtcctgccaaagctcttcagcacrgcacgtggtgattcgtgcagctgcagcccattgcgggtccagctgatcccctccacggcctccygcg

SEQ ID NO: 59115 - DNA, 600 bp, Chicken  19866894316955_4
ggtgcggggcaccacgtcagcagggccgcgttgctctgctccgtgctcagctgggctgccatcggcaygccrggagggtcacgcttcacacctggaacacacrgcacagtggggattggaaggtgccatcccacccctccgccatttcagaccctggtgaatggggagaacggagggtgcggggaggccccgtgcaacccagcccagggctcacacttgacacggagctgggaggacgtcagtgactccccaacagagaagcagatgatgcccgcgtcctcacgagtgacgtgcaccagyaccaggaggtgcgtcctgccaaagctcttcagcacrgcacgtggtgattcgtgcagctgcagcccattgcgggtccagctgatcccctccacggcctccygcgtctccacgcagaaagccgcgttctcgccctccatcacatccagcttccgcggcagcctcttcacgatcagccctaggagaggagacatgtgagggcggggggggatgccggggctgygttatgggaaggcagagctgggtccgcccccacctcggacggagacctcggcgatgctgcggcctcggtccttcatctgg

SEQ ID NO: 59116 - DNA, 585 bp, Chicken  19866894316955_5
tgctccgtgctcagctgggctgccatcggcaygccrggagggtcacgcttcacacctggaacacacrgcacagtggggattggaaggtgccatcccacccctccgccatttcagaccctggtgaatggggagaacggagggtgcggggaggccccgtgcaacccagcccagggctcacacttgacacggagctgggaggacgtcagtgactccccaacagagaagcagatgatgcccgcgtcctcacgagtgacgtgcaccagyaccaggaggtgcgtcctgccaaagctcttcagcacrgcacgtggtgattcgtgcagctgcagcccattgcgggtccagctgatcccctccacggcctccygcgtctccacgcagaaagccgcgttctcgccctccatcacatccagcttccgcggcagcctcttcacgatcagccctaggagaggagacatgtgagggcggggggggatgccggggctgygttatgggaaggcagagctgggtccgcccccacctcggacggagacctcggcgatgctgcggcctcggtccttcatctggcagagatagatgccgtcgtcg

SEQ ID NO: 59117 - DNA, 521 bp, Chicken  19866894316955_6
acrgcacagtggggattggaaggtgccatcccacccctccgccatttcagaccctggtgaatggggagaacggagggtgcggggaggccccgtgcaacccagcccagggctcacacttgacacggagctgggaggacgtcagtgactccccaacagagaagcagatgatgcccgcgtcctcacgagtgacgtgcaccagyaccaggaggtgcgtcctgccaaagctcttcagcacrgcacgtggtgattcgtgcagctgcagcccattgcgggtccagctgatcccctccacggcctccygcgtctccacgcagaaagccgcgttctcgccctccatcacatccagcttccgcggcagcctcttcacgatcagccctaggagaggagacatgtgagggcggggggggatgccggggctgygttatgggaaggcagagctgggtccgcccccacctcggacggagacctcggcgatgctgcggcctcggtccttcatctggcagagatagatgccgtcgtcg

SEQ ID NO: 59118 - DNA, 401 bp, Chicken  19866894316955_7
cacggagctgggaggacgtcagtgactccccaacagagaagcagatgatgcccgcgtcctcacgagtgacgtgcaccagyaccaggaggtgcgtcctgccaaagctcttcagcacrgcacgtggtgattcgtgcagctgcagcccattgcgggtccagctgatcccctccacggcctccygcgtctccacgcagaaagccgcgttctcgccctccatcacatccagcttccgcggcagcctcttcacgatcagccctaggagaggagacatgtgagggcggggggggatgccggggctgygttatgggaaggcagagctgggtccgcccccacctcggacggagacctcggcgatgctgcggcctcggtccttcatctggcagagatagatgccgtcgtcg

SEQ ID NO: 59119 - DNA, 600 bp, Chicken  19866894316970_1
agctaacaaatctgaagagagaaatcactagtgagcagcatctgcaaaaccctctttctgggcagcatcataaaccttctggttttctgccaagacatgttcttaataaactgctttcagggaaggagtgaaataatgacttcaggggaagggaggaaattattttgttatacagaaatttaaaagtgtggtggtgggaaaagtctggtcaggtttttctgcaaaactggcctgtaaaaggatcaaaggtagaagtattttctgcaggtgttgcctagcttacataaaattgagatctgytgtaatctaaccaggctaatccccagtgaagatgtactctctctcccgctgcctctttccggtacaattctggcatcacttcctactgaggaaaaagcagtatttagcacaggtgctaaatattccccttgctgaactaagcagaccttcccatctgcatgctgctcttcctagagggggctgatggtccaagcccaggaactctccaacagaaagggcccagtccccaagctattatacttctgtgccatgtacgaatatccaatcagactaatatgactagatacatcagtagtcaaa

SEQ ID NO: 59120 - DNA, 411 bp, Chicken  19866894316980_1
gaacaaaggcattttattttaagggagaatttccaaggacataacagacattacaggaggttggccaaattaagatctttgttctattttgagacacagataaaggattcacgctgagataatttctgtctgcagatgatgtaattcacatgaaacaatgacctgtgtaatctatgggtagaatcgctccactgctccagccagggatgttctaagggatccaagcttcagaggagccctgagcaaggcagcacagttctgacatgctgtgctgtccctcactctgagcacacaagacamaaaattctagccatcaactttttcagtttcaaaagaacataattcacgacaaaaaataataatgcaatgatgcaatgtcttgatgtgtgtgagacatgcatagtgttaatg

SEQ ID NO: 59121 - DNA, 600 bp, Chicken  19866894316987_1
catggaaaaaaaaaggaaattatactcagaagcaaaacatgccatttttaaaaatgcaaacatgccagctttaaaaccatatgcttaagcatttttcttcgcaaatttcactaccaggcactttcaatatgcttaatttgttaaagtacacaagcatgctttttaaaaagtagcactcatatgttattgtgcttacttgcactataaaaatagaactcccagcattcagataaagagagttttgaaaataagtattttaactggtgccatagacacctcaaaatctgccttgcacttggwgaagtctgtttgtggaaaggagagcgcttgctattgtgagaagctggttttatggaacttggctttttttcagtgcaattagagcctaatggcctaaaaaaaaaataaatcgtcgtctcacatattaattatatctcagtgggtgtagctcctgtattctacatttcttctttcacactcagggaagaaagaggacattttttgatcttgttatcttttcttattgattttttttcccckagtatgacctcagcagacctgcataggtgcaatggaaagcagccaatgagcccttagttt

SEQ ID NO: 59122 - DNA, 600 bp, Chicken  19866894316987_2
tttgaaaataagtattttaactggtgccatagacacctcaaaatctgccttgcacttggwgaagtctgtttgtggaaaggagagcgcttgctattgtgagaagctggttttatggaacttggctttttttcagtgcaattagagcctaatggcctaaaaaaaaaataaatcgtcgtctcacatattaattatatctcagtgggtgtagctcctgtattctacatttcttctttcacactcagggaagaaagaggacattttttgatcttgttatcttttcttattgattttttttcccckagtatgacctcagcagacctgcataggtgcaatggaaagcagccaatgagcccttagttttcttcttccaaggacatgagttagccaggtaggcgcaggcagacctgagctcactttacctctcctcagagctagttgactgagcagcagtgtggacatgaggaagtcagggctgtctgtacccacctgtgcaggcatgctatgtaaatcattagtcacaaccatgggattaacttccctaacaccatccrtgttaaagctggatgcagaaggcatgcaaggtgaagagattctctgtaa

SEQ ID NO: 59123 - DNA, 471 bp, Chicken  19866894316987_3
aggacattttttgatcttgttatcttttcttattgattttttttcccckagtatgacctcagcagacctgcataggtgcaatggaaagcagccaatgagcccttagttttcttcttccaaggacatgagttagccaggtaggcgcaggcagacctgagctcactttacctctcctcagagctagttgactgagcagcagtgtggacatgaggaagtcagggctgtctgtacccacctgtgcaggcatgctatgtaaatcattagtcacaaccatgggattaacttccctaacaccatccrtgttaaagctggatgcagaaggcatgcaaggtgaagagattctctgtaagtcatggagaggtgggcagctcaagcagcaatttgttgtaccagaagataggtcgaagaacctctctttggaagtacccattcttttcattctcgcagggactcagtgattaccttcaacct

SEQ ID NO: 59124 - DNA, 600 bp, Chicken  19866894316991_1
agtcatctccaggaaatcaagtgacacatcgctcctggcacgtcccccagtttcctccgctttgaaaaacaagatcagattacaaagaaagtgattttctacctcagatgtgtcctgctggttacatatattctttctggaatgaaaatcagaagtattctgttttgccctgtaattggcctaaataccatccggtggatgtagaattgtactacacgcctttctttaattgctgctgcaatcatcggctagcagctcgtacagaaccctgctggccagtatttttcaaaagaaagcctktaagtctcacgatttgcygtcatctcaaccctgggtgagatctctcttctgctgagcaaacacaattgcccatctgatatttgcagtatctaaaatgctcttccaaggtgggagcgcagggaggcctctggggctgggattcagctgattgcactccgcggagctcttggcctaatgaggtggtgaggaattcactgctttgtctgtagcccacagacatttagtgattttaaagttgggtaggattcgcagcatcatttattctgctctgaatagcttatctggtgtcttcctacaagg

SEQ ID NO: 59125 - DNA, 600 bp, Chicken  19866894316991_2
aagtgacacatcgctcctggcacgtcccccagtttcctccgctttgaaaaacaagatcagattacaaagaaagtgattttctacctcagatgtgtcctgctggttacatatattctttctggaatgaaaatcagaagtattctgttttgccctgtaattggcctaaataccatccggtggatgtagaattgtactacacgcctttctttaattgctgctgcaatcatcggctagcagctcgtacagaaccctgctggccagtatttttcaaaagaaagcctktaagtctcacgatttgcygtcatctcaaccctgggtgagatctctcttctgctgagcaaacacaattgcccatctgatatttgcagtatctaaaatgctcttccaaggtgggagcgcagggaggcctctggggctgggattcagctgattgcactccgcggagctcttggcctaatgaggtggtgaggaattcactgctttgtctgtagcccacagacatttagtgattttaaagttgggtaggattcgcagcatcatttattctgctctgaatagcttatctggtgtcttcctacaaggcatttttcttgttcttat

SEQ ID NO: 59126 - DNA, 600 bp, Chicken  19866894316996_1
tatgtccgtgaaatgcatttagaaggctaattaaacagcaggcgctgcttttacgtaacaaaacgagaggggtccattttggaggagctgcgtgcatatgtgatatgttcacgctgaacatggagcttgacagtgccagcccctaaaaatagatcctggatatccttgtactcatcaccagccacaagcccgtctcctgcacggctggaaagcagtcctgccccctgctccctcctcaggggaccggagcgctaccccaggtacctctttttagtagaagtagaggagataaaaaggatsttggatctgctgcaagcacacattctaaacaatatccttgccccttcgcaggcagttatcrtgttgttttggcagcaggaaggaatctgtggtttttcttgaatgttgctcttctttatttaaactaccagaaataaagcaaaaatgacagaatgctctgtctataaataatcattccggtgtacagttatattaggaggtaactcagatggcatgataacgcctaacaggctaatcttagacctgtaatgccataagatgaaaataactaggctaagaataactgacccagaggagtca

SEQ ID NO: 59127 - DNA, 600 bp, Chicken  19866894316996_2
aacgagaggggtccattttggaggagctgcgtgcatatgtgatatgttcacgctgaacatggagcttgacagtgccagcccctaaaaatagatcctggatatccttgtactcatcaccagccacaagcccgtctcctgcacggctggaaagcagtcctgccccctgctccctcctcaggggaccggagcgctaccccaggtacctctttttagtagaagtagaggagataaaaaggatsttggatctgctgcaagcacacattctaaacaatatccttgccccttcgcaggcagttatcrtgttgttttggcagcaggaaggaatctgtggtttttcttgaatgttgctcttctttatttaaactaccagaaataaagcaaaaatgacagaatgctctgtctataaataatcattccggtgtacagttatattaggaggtaactcagatggcatgataacgcctaacaggctaatcttagacctgtaatgccataagatgaaaataactaggctaagaataactgacccagaggagtcagcctgtgaaagagatccacagaacggggcatttcagattttcatgcattcaacaacagtat

SEQ ID NO: 59128 - DNA, 600 bp, Chicken  19866894316999_1
ttttgtacgcaaaattgatttgatactgacattgatacttaaacacataaaacacaaatctgttctagagtttgtacttcgtggcttattaaataaagctagaagaaaacagatagtgaagtagctacttgttgatgcaaaacgttacattttttagaatattttaaactgattgcaaagacttgcataaagatcttttggttctgagtaggaaataaaataataaatgattttcatgttaccaggacagagtaatctgtgcaaagaagaaactgtgctaggctctgaagtagcgaagtrgttattggtgaagagacgttgctttggacagctcttgaaaattcacttggtgctcatttgcagtcagaaagacaaatagaataaacaaatagcactttgatttacaaatgaatcagctataaattattatagaataaatcattaatatcctcactggttgaagacagtgcacagttacttttgagaaatggtgacagaatattgggctaggtgaattttatagcttgtcttataacctgtatatgtatgtatgctatattaagtatattttagaaaacctaattaggaatctctagagaa

SEQ ID NO: 59129 - DNA, 431 bp, Chicken  19866894316999_2
cacagttacttttgagaaatggtgacagaatattgggctaggtgaattttatagcttgtcttataacctgtatatgtatgtatgctatattaagtatattttagaaaacctaattaggaatctctagagaagcagttcaatgataaactcattactgctcaatgtgtcaggcagtaaagtcaataggctggaatgtactatagtaagaattaatgaactgaacattttactgagctataataagctgcagaaccatttggtaactttgatttggttttattatttgataacagcaagaakatatgattcattttcaaaagcagaatactttcactgtattcataatatactaaaaatgtgttttgtgtgaacattattatgacaatgattactatttgcagggttcatttatttttttatttagcataata

SEQ ID NO: 59130 - DNA, 600 bp, Chicken  19866894317003_1
tggctgtatatgatacagacatgatagagaaaggtgaacaaagaaatacaatcaaatactgctctacatacaaggaccactctccaaatctcgagagtctcagagtcaaaggaaagcacaaattttaaggattacaaaacagacaatgatgtggtttggaatagacgagaggaacttttcccaaaaccaagagtcagcaagaggtatcgaaaatttagcaaatggctaatgcaactataatcgtcatattatcaaaagaaaattaaatatgatagaacggggacagtgcatgaaagcacytcaggtgaaggcaaacagcttatatttgatgtgatagcaagaaagcaatctctggaagaacrcaaggagagaagtgacagggtcacaactaatccagcaaacaactccccatttaaaacatagggtagtataaattgcgctaacatcttccagcttcattcaatatccaaaaggacatccatctctctcactcagcctttcatgcctcaaaaatttggtgggccacagcgtggttttcttttctgcattagccattaaatgtgtcagtacaaataccctgtgggtacagaggggcaaagc

SEQ ID NO: 59131 - DNA, 600 bp, Chicken  19866894317003_2
tctacatacaaggaccactctccaaatctcgagagtctcagagtcaaaggaaagcacaaattttaaggattacaaaacagacaatgatgtggtttggaatagacgagaggaacttttcccaaaaccaagagtcagcaagaggtatcgaaaatttagcaaatggctaatgcaactataatcgtcatattatcaaaagaaaattaaatatgatagaacggggacagtgcatgaaagcacytcaggtgaaggcaaacagcttatatttgatgtgatagcaagaaagcaatctctggaagaacrcaaggagagaagtgacagggtcacaactaatccagcaaacaactccccatttaaaacatagggtagtataaattgcgctaacatcttccagcttcattcaatatccaaaaggacatccatctctctcactcagcctttcatgcctcaaaaatttggtgggccacagcgtggttttcttttctgcattagccattaaatgtgtcagtacaaataccctgtgggtacagaggggcaaagctgcctttgtacgctgccagtaagagatgcttcscagcacttcgggaagtcagaagaaaccaa

SEQ ID NO: 59132 - DNA, 600 bp, Chicken  19866894317003_3
atagcaagaaagcaatctctggaagaacrcaaggagagaagtgacagggtcacaactaatccagcaaacaactccccatttaaaacatagggtagtataaattgcgctaacatcttccagcttcattcaatatccaaaaggacatccatctctctcactcagcctttcatgcctcaaaaatttggtgggccacagcgtggttttcttttctgcattagccattaaatgtgtcagtacaaataccctgtgggtacagaggggcaaagctgcctttgtacgctgccagtaagagatgcttcscagcacttcgggaagtcagaagaaaccaacacccaacagctgttgcctctctcaagctgctgagtgcttgctgtgtattccaggtctgcctgtctgtggtcgccagctcagctcccagcaaacagaccaaccacttcagagttcaaaggaggtcctgcttcagccgaaggagaaaaaggacaaaacatgagctgatacagcaaacttctgcatctgagaatggctgaaaggggctaggctatctttgtaggtttttttttttctttctttctgttagaggcttccaatccattatgtgct

SEQ ID NO: 59133 - DNA, 600 bp, Chicken  19866894317006_1
gtttcacactccaatagtttgctagctgtgtggaacttgacgcattgagaagccattcaagttttcaacagagaaaacagtccagcacacctaacgcaatagagacaaacagcgctcataaccacagcaaacagcactgataactcaattaaaaaaaaaaaaaagtataccccaatggcaaaacgtgctgtttctacctgatgtatcttgcattgggcagaagaatccatgaccttttcctgaaaggcaagaactaccacttcccaaagttgattccatgttaataggaagggaaccaaygccaagctgtgacccagcagcactgagcagcctggcaccttaagatccagatgtcaggacaagcatcacactgcctgtctatgccacagggagcaccacaagagcagagctgttcagggagaccaaaccacagacctctgaactatcgattcccaatctctcctctaaacggtgcctccgaagttcaggcattggcattcagccctgcaccttcaatggttttcagtttccttcctttcttcccttacatctctgttaatgtaactgtcactcccactacgatagctttatattctttct

SEQ ID NO: 59134 - DNA, 600 bp, Chicken  19866894317012_1
aatggcaccagacgtgggtggccacgagctcttcctctctccggccctgcagcctgttcagcctgtggggaggccgtggcttcatctctgccactgccatagccccgactgcctctgtccgatctcaggattgcagcctggggagcgaggcagggggaggcagggagctgggcaaagagagccctgaaggacagcacggtgccttgtctgctaactcacagtcagccgaaggaggcccaactccgctgtggtgacgttaaaaatcccacacagctcttggtcctggagaacgctgcacastacatccaagatgcactctgaattttctgccagggaaagcattctcttccagatgtccagcgtggtgctacaagcaaagagcaatgctgtgtcagcagggctgcctcagtctagcagaagctaagtcatggcctgaaatggtgactgagcacctggtgggaggcagggccagtgcgtgggagctcaggtgcaagaaacgcagctgagtcactggaaggggtggagctaggatccatcctctcccagaccttgtttaagggttagcagtggaagcaagggtatctctctggagatcccagt

SEQ ID NO: 59135 - DNA, 600 bp, Chicken  19866894317013_1
cagtgatttcccttcccctattgtgcaactgcattccttctggccatggacaaaggtcagatgttcagagtaattttattagatccatcaacagcctttgatacctctcaaatgagagactgctgacccgcccgctgcttctgctttgtgctttctcttgtggatagtttagcttaatgtgttgcttacttcttttgtgtattgtgaactcagatgtgaagatgactgggtgtataaagctcattaaaggtaaaatatttttatctgggcagcatacaatttctgtgtacagaaacttgyctctgttgtgtaaagtatgaggaaatcagagttgcacaatgcaaaactgatggtagaatagactctttgaattttttttcctttgataatagaatgtctcatttgagttcctctgacaggaaagccaaatataaaggtcgctctgtagcaacttcacagatgctaaactccgaatacccgtactgcaatctagttaccttacggtgctatttcgtaccagggttagacttttccttgtttccattagagatttttgtagagcctttggagcagctgttatcctgccttttaattttattt

SEQ ID NO: 59136 - DNA, 600 bp, Chicken  19866894317016_1
ttctggttgttgttgattctgttttcaatatcttgaatgaaaagagagaaaagttgaggtgagtcattttcaacagatgcccaggactttgaaaacagcagctttacacaagttatttactagaaaagacagatggaaaaatgaggacagacaatgggggcatttctggagaaagaaatttatgggtttcattactttgcagctattccaccagtttatcagtatttccatcttcaattgataacctgctagctcttctggtttctgtgagtttgtgggttcatcccttctctgtgtgaygctttataatacttttaaccaatactgacagtctctagcttgctttcctaacttttgtggcttacaaaaggtgttgaaagggaataaacatgggagactgactgctttttgaacacctatgaatcatgagaacagcttttccatactgtgagaacagccttccacataacttgagtggatataagctgaaggacaggaggcttgcataaacgtaagctcaagaacaaaatgtggaggtcatggaacatgttgtgaagtgaagataaattcaaacaggtgttctgttcttgaagataagat

SEQ ID NO: 59137 - DNA, 599 bp, Chicken  19866894317029_1
  misc_feature (1)..(4): n is any nucleotide
nnnnactgctgagtgggaaacacagtcttcgtcaagaggatcaatatgtacctggggctcagtgtcaatcaggatttcagcaactgtatgccactactttgttattaagtgttttgcaggataaagttgatatggtaacaagagtatcatccttattttaaaaaatgattttaaaatttccacaactcaaaaatagatagcctgcatgaaaataatgctttgtagaaagacacagtatatttctatcctactctggggaggtttctgagcattattatcatattgtgatgctatgctacrattaatcaccccttttagtgatgcagcaataaacttaaaggtttagattttcatcttgtgtaaatcaatatgggtttattgacttcagtggaactctgccaggtgaatatctggccccagacatcaaactgagcttgtacagagatgtttaataaagcaagagatctgtgttttcacagtagataaatgactttacaggagatgctgaagtctcttgtggcacccctcttccaagaagttttattttaatcattctcataaagtctcttagttgcaacaataatgctaagtgcctgaca

SEQ ID NO: 59138 - DNA, 600 bp, Chicken  19866894317029_2
ggtttagattttcatcttgtgtaaatcaatatgggtttattgacttcagtggaactctgccaggtgaatatctggccccagacatcaaactgagcttgtacagagatgtttaataaagcaagagatctgtgttttcacagtagataaatgactttacaggagatgctgaagtctcttgtggcacccctcttccaagaagttttattttaatcattctcataaagtctcttagttgcaacaataatgctaagtgcctgacacaaagcgaaggaaatctgctttccagataactactagaaygaaatttcattctttagtcgttgttttaatttacttgttcccctaggatttttattctgttatttcctcccttttactagcactagggctaatgctcaaacccactttgttggtccttatccagataggcttctaggtgctgacagtgaataaggtcaataryacaaagtgttgattatttattcttttctagaactgtgctataaaacaggcatttaaagcacaaccacccagtttgtattgtcagtttgtcatgtcagtaatcctgcttcatgttcatcaagtaagaacagatgcaat

SEQ ID NO: 59139 - DNA, 563 bp, Chicken  19866894317029_3
atgctgaagtctcttgtggcacccctcttccaagaagttttattttaatcattctcataaagtctcttagttgcaacaataatgctaagtgcctgacacaaagcgaaggaaatctgctttccagataactactagaaygaaatttcattctttagtcgttgttttaatttacttgttcccctaggatttttattctgttatttcctcccttttactagcactagggctaatgctcaaacccactttgttggtccttatccagataggcttctaggtgctgacagtgaataaggtcaataryacaaagtgttgattatttattcttttctagaactgtgctataaaacaggcatttaaagcacaaccacccagtttgtattgtcagtttgtcatgtcagtaatcctgcttcatgttcatcaagtaagaacagatgcaatcctacattaaatatgaaggagctgaggaagtattcaaatacaaagttgtttaaacagtgatttttgggataatgcagcacactagtgcttatgggactacgtgtgaggaaatctcatttaagcca

SEQ ID NO: 59140 - DNA, 562 bp, Chicken  19866894317029_4
tgctgaagtctcttgtggcacccctcttccaagaagttttattttaatcattctcataaagtctcttagttgcaacaataatgctaagtgcctgacacaaagcgaaggaaatctgctttccagataactactagaaygaaatttcattctttagtcgttgttttaatttacttgttcccctaggatttttattctgttatttcctcccttttactagcactagggctaatgctcaaacccactttgttggtccttatccagataggcttctaggtgctgacagtgaataaggtcaataryacaaagtgttgattatttattcttttctagaactgtgctataaaacaggcatttaaagcacaaccacccagtttgtattgtcagtttgtcatgtcagtaatcctgcttcatgttcatcaagtaagaacagatgcaatcctacattaaatatgaaggagctgaggaagtattcaaatacaaagttgtttaaacagtgatttttgggataatgcagcacactagtgcttatgggactacgtgtgaggaaatctcatttaagcca

SEQ ID NO: 59141 - DNA, 470 bp, Chicken  19866894317040_1
taggcaataatgcattcgatgcctgcctgccctgctggaggaaggggctgatgcggaatgctgctgtgctccacaccgaagttctaagctttccatttgggatatttgctagaaaccttctgacaggtttctctgcagaaaccaagctcctgctgccctccccgggttgcccctacgtggtctcaaggagggcattgcttttcctaaagtggttatcaagacctgatctggcctgtgggctgcagggaccatgctgtgaatttagaagccttctagaggtcggcaaaataacctgctgcytagacccagccagtgaaatagatttatctagtgcagagagaaatacagcagaaatacaacctggggaaatcaaagctctatggacagaaaaagatgacaatgctggtgagcagtaaggagaaacagggagcttgtgctgtgctgtgtcctagagcacactgcactggggg

SEQ ID NO: 59142 - DNA, 600 bp, Chicken  19866894317050_1
ctgtctgtgggagtctcccatgtaactagtgataggactagaggagatggcctcaagctgcaccaggggagattcaggttggatgacaggaaatacttctctgagagagtggtcaggtgctggaacaggaggtgctgcccagaggggtgatagagtctccatccctggaggtgttcactaaacatttacatgctgtactgagggacatggtttagtgggaaatatcagtgatatgtggatggttggacttgattatcttacaggtcttttccaaccttggtcagtctatgattctgtgaktctaataycgactcctgggggacaccacttgtgactggttgccagctggatttaactccgttcaccactactctctgggcccagcccttcagccagttccttacccagcaaagagtgtacttgtctaagctgtcagcttccccaggagaatactgtgagagacggtgccaaaggatttgctaaagcctaggtaaactacrtcaacagcctttccctcattcaccaggmcagtcacccagtcatagaaggagatcaggttggwcaagcaggacctgcctttcatgaacccatgctggctga

SEQ ID NO: 59143 - DNA, 600 bp, Chicken  19866894317050_2
gggagtctcccatgtaactagtgataggactagaggagatggcctcaagctgcaccaggggagattcaggttggatgacaggaaatacttctctgagagagtggtcaggtgctggaacaggaggtgctgcccagaggggtgatagagtctccatccctggaggtgttcactaaacatttacatgctgtactgagggacatggtttagtgggaaatatcagtgatatgtggatggttggacttgattatcttacaggtcttttccaaccttggtcagtctatgattctgtgaktctaataycgactcctgggggacaccacttgtgactggttgccagctggatttaactccgttcaccactactctctgggcccagcccttcagccagttccttacccagcaaagagtgtacttgtctaagctgtcagcttccccaggagaatactgtgagagacggtgccaaaggatttgctaaagcctaggtaaactacrtcaacagcctttccctcattcaccaggmcagtcacccagtcatagaaggagatcaggttggwcaagcaggacctgcctttcatgaacccatgctggctgagcctgatc

SEQ ID NO: 59144 - DNA, 600 bp, Chicken  19866894317050_3
agggacatggtttagtgggaaatatcagtgatatgtggatggttggacttgattatcttacaggtcttttccaaccttggtcagtctatgattctgtgaktctaataycgactcctgggggacaccacttgtgactggttgccagctggatttaactccgttcaccactactctctgggcccagcccttcagccagttccttacccagcaaagagtgtacttgtctaagctgtcagcttccccaggagaatactgtgagagacggtgccaaaggatttgctaaagcctaggtaaactacrtcaacagcctttccctcattcaccaggmcagtcacccagtcatagaaggagatcaggttggwcaagcaggacctgcctttcatgaacccatgctggctgagcctgatcccctggttgtcctgcasatgctgtatgatctccctcaagatggcctgttccataactttttctagcaccaaggtcaggctaacagacctgtagtctcctggatcctccttatgacccttcttgtagatgagaatcacattggcaagcctccaatcctctgggacgtccccagttgaccaggaatgctgayag

SEQ ID NO: 59145 - DNA, 600 bp, Chicken  19866894317050_4
tgatatgtggatggttggacttgattatcttacaggtcttttccaaccttggtcagtctatgattctgtgaktctaataycgactcctgggggacaccacttgtgactggttgccagctggatttaactccgttcaccactactctctgggcccagcccttcagccagttccttacccagcaaagagtgtacttgtctaagctgtcagcttccccaggagaatactgtgagagacggtgccaaaggatttgctaaagcctaggtaaactacrtcaacagcctttccctcattcaccaggmcagtcacccagtcatagaaggagatcaggttggwcaagcaggacctgcctttcatgaacccatgctggctgagcctgatcccctggttgtcctgcasatgctgtatgatctccctcaagatggcctgttccataactttttctagcaccaaggtcaggctaacagacctgtagtctcctggatcctccttatgacccttcttgtagatgagaatcacattggcaagcctccaatcctctgggacgtccccagttgaccaggaatgctgayagagggtggagagaggccaggtaatcacct

SEQ ID NO: 59146 - DNA, 600 bp, Chicken  19866894317050_5
ggtcttttccaaccttggtcagtctatgattctgtgaktctaataycgactcctgggggacaccacttgtgactggttgccagctggatttaactccgttcaccactactctctgggcccagcccttcagccagttccttacccagcaaagagtgtacttgtctaagctgtcagcttccccaggagaatactgtgagagacggtgccaaaggatttgctaaagcctaggtaaactacrtcaacagcctttccctcattcaccaggmcagtcacccagtcatagaaggagatcaggttggwcaagcaggacctgcctttcatgaacccatgctggctgagcctgatcccctggttgtcctgcasatgctgtatgatctccctcaagatggcctgttccataactttttctagcaccaaggtcaggctaacagacctgtagtctcctggatcctccttatgacccttcttgtagatgagaatcacattggcaagcctccaatcctctgggacgtccccagttgaccaggaatgctgayagagggtggagagaggccaggtaatcacctctgccatatccctcatcatccttgcatagatccc

SEQ ID NO: 59147 - DNA, 600 bp, Chicken  19866894317050_6
cacttgtgactggttgccagctggatttaactccgttcaccactactctctgggcccagcccttcagccagttccttacccagcaaagagtgtacttgtctaagctgtcagcttccccaggagaatactgtgagagacggtgccaaaggatttgctaaagcctaggtaaactacrtcaacagcctttccctcattcaccaggmcagtcacccagtcatagaaggagatcaggttggwcaagcaggacctgcctttcatgaacccatgctggctgagcctgatcccctggttgtcctgcasatgctgtatgatctccctcaagatggcctgttccataactttttctagcaccaaggtcaggctaacagacctgtagtctcctggatcctccttatgacccttcttgtagatgagaatcacattggcaagcctccaatcctctgggacgtccccagttgaccaggaatgctgayagagggtggagagaggccaggtaatcacctctgccatatccctcatcatccttgcatagatcccttatggccccatggactagtggcagtccagggggagtagaaggtctccaatcgtctccatctg

SEQ ID NO: 59148 - DNA, 600 bp, Chicken  19866894317050_7
crtcaacagcctttccctcattcaccaggmcagtcacccagtcatagaaggagatcaggttggwcaagcaggacctgcctttcatgaacccatgctggctgagcctgatcccctggttgtcctgcasatgctgtatgatctccctcaagatggcctgttccataactttttctagcaccaaggtcaggctaacagacctgtagtctcctggatcctccttatgacccttcttgtagatgagaatcacattggcaagcctccaatcctctgggacgtccccagttgaccaggaatgctgayagagggtggagagaggccaggtaatcacctctgccatatccctcatcatccttgcatagatcccttatggccccatggactagtggcagtccagggggagtagaaggtctccaatcgtctccatctgaatcatgggcggtgtttgttctgctccccatcctagacttccaggtcagggggtagagcacccccaggataactggtctattaaagacagatataaagaagacattgggaaccccagccttgtacttatcctcagtggtcatattccctgatgcatccagtaaagggtgggag

SEQ ID NO: 59149 - DNA, 600 bp, Chicken  19866894317058_1
tgtaattttgcctcctgctcagtgaagcaagtccaatccactttattcattaactgaattaatagagttttatattaaggacatcaactcctaaatatagttttagcattttagttacatatattcactatttaatctccctatattcatttgtattgcttcattgcttcccttgcatttttatccttgtatatttatatatatattcatctatctatatgtatctaatatatgaaaatactaacctgtgaataaaaccatcattttaaggtgaaagcgaaatgctgaatcagaagtttkcattaacagaaaatatctttaaaagtcagatcacagaaagaatattcacagaaaactaccttgtgctgctgattgatatgtgggcacggatgggaggcaaatgacagtcagatatagtgctgactatatattttgcctaaatgtagcatgcaattcatagaatcacagaatggcttgtgttggaagagatattaaagcccatccaatttcaactccctgccatgggtagggatgcctcccactaggatcagttggttcagggccccaataaaacctggctttgaatgcctctagggcatc

SEQ ID NO: 59150 - DNA, 599 bp, Chicken  19866894317063_1
  misc_feature (1)..(143): n is any nucleotide
nnnnnnnnnnnnnnnnnnnnnnnnnnnnnnnnnnnnnnnnnnnnnnnnnnnnnnnnnnnnnnnnnnnnnnnnnnnnnnnnnnnnnnnnnnnnnnnnnnnnnnnnnnnnnnnnnnnnnnnnnnnnnnnnnnnnnnnnnnnnnnnaatgattggtatgcatctggtccagtgtttatgtattatataaaagagagaatttattttggttgcttgctagaaagaatcctaaaaagatattgaaatagaagaaaatatttctctgtacttgattgtcctgcatgaacttaaaacatgtctctgrgttaatatcctatcagtatatatcacacatggttaattgatcctgctaggtctagaatgcataggccttcatttgttggcttggacaamgatgcagaatttgacagcacgttctaaaaatgactggagatgtagaagaaatcttgcagctgaactaatggtttgatcttttggacattctgttaacagaaacttttccagatctgactctttgttcatctgctttaagaatcctttcttgcatgtacaagatacttgcactgttttttagggttttttttgtttgctatagcacatggt

SEQ ID NO: 59151 - DNA, 599 bp, Chicken  19866894317063_2
  misc_feature (1)..(54): n is any nucleotide
nnnnnnnnnnnnnnnnnnnnnnnnnnnnnnnnnnnnnnnnnnnnnnnnnnnnnnaatgattggtatgcatctggtccagtgtttatgtattatataaaagagagaatttattttggttgcttgctagaaagaatcctaaaaagatattgaaatagaagaaaatatttctctgtacttgattgtcctgcatgaacttaaaacatgtctctgrgttaatatcctatcagtatatatcacacatggttaattgatcctgctaggtctagaatgcataggccttcatttgttggcttggacaamgatgcagaatttgacagcacgttctaaaaatgactggagatgtagaagaaatcttgcagctgaactaatggtttgatcttttggacattctgttaacagaaacttttccagatctgactctttgttcatctgctttaagaatcctttcttgcatgtacaagatacttgcactgttttttagggttttttttgtttgctatagcacatggtaaatggaattatttctttcagtatgaatctcttctaccagtgtctgccaccattgaactgatattagtggaagatgtaaaagtcagccc

SEQ ID NO: 59152 - DNA, 600 bp, Chicken  19866894317064_1
gtaaaaaacacaagcagttgttgcagaaaagttatcaccactcttcttgtgcattgttgcttataagacctccatcacccagcagcatgccttgctatttagagacttcccttttcctttaggatgttttggcaatttgagaaggcttgtatttccttaaggctgatcctcggtgttgtgctgaagcccagcttagtaacacagcactgcacgtagttctgtggttctgcaaaattcacactggaactaggaagggaattgaggctcctttgttggcacttaaaccccagcagtctggcrgtgtgcccttgtggttttttctgtttagtgtgggtttttctttcaaaatgaagttatcatttttgcaggtgaaagaacagctgctcagaagcagtgcttgaagacttcaccttgtctgctacgcagcagtcagtgcacaggggaagggtcagagacaattgttaggaaggagacctgttggtcaattgcaagtgccatagtaatgagcactgacaagaaatgaagggtgtctgaagcacctggcaattgaggtgaggtttgcgtagacgaggtaggagttgggtgtttgtgtcccagttt

SEQ ID NO: 59153 - DNA, 600 bp, Chicken  19866894317082_1
agtgaagaaggatgctggaaataagaagtcaacaccagttagcattctttttggctatcctctgtcagagcgcaaacagatggcacttcttatgcagatgacagcaagagacaacagtccaggtgatcctacaaagctaacacttctttttaatccttgtttaattctgtccccattagaatactgtgaacccagcagtttttctacaatccttgttttttattggaagacttttgaattattattaattctggtaaaactctcttctgtagaagagtaacttgctaaaaaattcttgaycttctgtatttgttgtgtgtaaatgtttgcattacggtagctgtagaagctgaaaatcagttttcttcctttgattatttacccggatactgtaccatacaggtatttaaactgaaatgatatctatttttatttttatttggaaggaagytgaataatctctttaggatttaaygggggagggagatgccttgttttttgacttggaatttcaaactatccatggttcagttgtatatattaaaaaaaaatctttatgcatgatgttctacaggcttttttttttttttttttacacaa

SEQ ID NO: 59154 - DNA, 600 bp, Chicken  19866894317082_2
aatccttgtttaattctgtccccattagaatactgtgaacccagcagtttttctacaatccttgttttttattggaagacttttgaattattattaattctggtaaaactctcttctgtagaagagtaacttgctaaaaaattcttgaycttctgtatttgttgtgtgtaaatgtttgcattacggtagctgtagaagctgaaaatcagttttcttcctttgattatttacccggatactgtaccatacaggtatttaaactgaaatgatatctatttttatttttatttggaaggaagytgaataatctctttaggatttaaygggggagggagatgccttgttttttgacttggaatttcaaactatccatggttcagttgtatatattaaaaaaaaatctttatgcatgatgttctacaggcttttttttttttttttttacacaatctgcatttaaaagtgagaggctgcgtttttttttaagaaaggaagagccaggtagctgtatttaaaactgtttatatagagaggagagcaagacagtttcatggcaagaggaggtatctttataaggctcctctggaatactgtaggaga

SEQ ID NO: 59155 - DNA, 600 bp, Chicken  19866894317082_3
ttagaatactgtgaacccagcagtttttctacaatccttgttttttattggaagacttttgaattattattaattctggtaaaactctcttctgtagaagagtaacttgctaaaaaattcttgaycttctgtatttgttgtgtgtaaatgtttgcattacggtagctgtagaagctgaaaatcagttttcttcctttgattatttacccggatactgtaccatacaggtatttaaactgaaatgatatctatttttatttttatttggaaggaagytgaataatctctttaggatttaaygggggagggagatgccttgttttttgacttggaatttcaaactatccatggttcagttgtatatattaaaaaaaaatctttatgcatgatgttctacaggcttttttttttttttttttacacaatctgcatttaaaagtgagaggctgcgtttttttttaagaaaggaagagccaggtagctgtatttaaaactgtttatatagagaggagagcaagacagtttcatggcaagaggaggtatctttataaggctcctctggaatactgtaggagacaaaagcatattctttattctctc

SEQ ID NO: 59156 - DNA, 600 bp, Chicken  19866894317083_1
actgcctgtgttattcgttgaagatcttagtcccattattaaggataattggtgagggtgaggactcatcattggtgtcttttatgtgatagcctgaatttatacttggtgttttcgtgcctcagattacattacactctagcaatcctttaattgccttcatgaggtttgtcatcagtactggaactattttaattccagtaccatttattctaaatgcttttgtaccgtatccagacctcttgttgatttgatcctttaaacgtttgcacgttaagtagtcacacatttcagcttccrttctcttgtagactttgttatttcatggtgtgtgtgtgtgtgtgtgtgtgtgtgtgcgtgcttgaaaatgcacctgaacgctgtttggtttgtgggtgtccctgagtgagcaggtgcagaggaggtaaaattacacctaaagcattgccttctcataatgcagcaggaatactcgtctgttttgtgatttgttgctgttccaaataacacccaaggtcacgatgtgtgttgttgctgcttactgatttgaagagtcgtatctaatttgataatttgtatatcattccaaatctatcacta

SEQ ID NO: 59157 - DNA, 599 bp, Chicken  19866894317085_1
  misc_feature (1)..(18): n is any nucleotide
nnnnnnnnnnnnnnnnnntatcctataaaatggatatacaccatccttaagttgttgatgttcatatgtgcagtgaatccaggagagtgacccatatatagtctgatataccccatctgtttacagagttattaaaagaaggaataggactgatgagacagcacagagaggaaggcagtgacctgctggagccatcagtctacatgtcctgttacggctggctctacctcaaaccaaatgatttggtgaacatggaattacctgtctgtatattttccttctgtgttgtgtaatgaagayaagtatgttttatgcgtacttacatagcatttcaatcaaggaaccctttggtttagaagcagctctggaggccactgcctgatgttgtgtgcagagcagggcccactttgaagtcagacccagcttaaggggtcaattgtgtaccccagggtttctgcagccactggaagggaaggatgttttgaccaccagagccctgctgtgcctaaaggcctaaggatatccctgctgctgcctggtaagcaagacctcatgcttcggcgttgggataggggaggaggatagggatgtcctgtgag

SEQ ID NO: 59158 - DNA, 600 bp, Chicken  19866894317088_1
acagccaaaactaattatccatttgctggcactcaaaatgctgctgccagttcttatgaagttagtgtaagtatcatcatattcggtgttttcgtggcaatgcagattagcggagtcatgtgagagattgtttgcgttactccattacagaaggataaagctaaagcttcatctattatttttcaatgctaattgtttctgtgctaataagcagtcttacaggaactcatgtgagctggcagacactgcatgtaacttaacagtatattcgctatctgcagttgcgtgcagctgagattytgccttgttttctrtgtgtcagtaacctgaggtgcctcatgtcatcaccaccagagtagctctgaacatctgtaagcctgttttgccatrcagtaggcggagtttcacttacggggcgagtaagaacagcagtgatgttgctcagtattgtctactgtaaaatcattgtttttccctttcagtctagacaggagcaaaaggaaaaagaggtattggctttgagtcataaaataggaccacacgggtagaaatatcagactgttaaacccaaataaggcctgggagaccaatactgaaaaa

SEQ ID NO: 59159 - DNA, 600 bp, Chicken  19866894317088_2
ttatccatttgctggcactcaaaatgctgctgccagttcttatgaagttagtgtaagtatcatcatattcggtgttttcgtggcaatgcagattagcggagtcatgtgagagattgtttgcgttactccattacagaaggataaagctaaagcttcatctattatttttcaatgctaattgtttctgtgctaataagcagtcttacaggaactcatgtgagctggcagacactgcatgtaacttaacagtatattcgctatctgcagttgcgtgcagctgagattytgccttgttttctrtgtgtcagtaacctgaggtgcctcatgtcatcaccaccagagtagctctgaacatctgtaagcctgttttgccatrcagtaggcggagtttcacttacggggcgagtaagaacagcagtgatgttgctcagtattgtctactgtaaaatcattgtttttccctttcagtctagacaggagcaaaaggaaaaagaggtattggctttgagtcataaaataggaccacacgggtagaaatatcagactgttaaacccaaataaggcctgggagaccaatactgaaaaagcagtgggcagtca

SEQ ID NO: 59160 - DNA, 600 bp, Chicken  19866894317088_3
ttcgtggcaatgcagattagcggagtcatgtgagagattgtttgcgttactccattacagaaggataaagctaaagcttcatctattatttttcaatgctaattgtttctgtgctaataagcagtcttacaggaactcatgtgagctggcagacactgcatgtaacttaacagtatattcgctatctgcagttgcgtgcagctgagattytgccttgttttctrtgtgtcagtaacctgaggtgcctcatgtcatcaccaccagagtagctctgaacatctgtaagcctgttttgccatrcagtaggcggagtttcacttacggggcgagtaagaacagcagtgatgttgctcagtattgtctactgtaaaatcattgtttttccctttcagtctagacaggagcaaaaggaaaaagaggtattggctttgagtcataaaataggaccacacgggtagaaatatcagactgttaaacccaaataaggcctgggagaccaatactgaaaaagcagtgggcagtcactttgaagccccctggaggcatggagctttcctccctactgaaggaaagctgctgatgcagtgcaggaggtgttag

SEQ ID NO: 59161 - DNA, 599 bp, Chicken  19866894317097_1
  misc_feature (1)..(207): n is any nucleotide
nnnnnnnnnnnnnnnnnnnnnnnnnnnnnnnnnnnnnnnnnnnnnnnnnnnnnnnnnnnnnnnnnnnnnnnnnnnnnnnnnnnnnnnnnnnnnnnnnnnnnnnnnnnnnnnnnnnnnnnnnnnnnnnnnnnnnnnnnnnnnnnnnnnnnnnnnnnnnnnnnnnnnnnnnnnnnnnnnnnnnnnnnnnnnnnnnnnnnnnnnnnnnnncctgaaggaattacaatcacttgtgcaaataaggaagcctaacatacttcaggatacaagttcactaattacaaacctagcaaatatgcttckatagctttacctctgtgctggcaggaagtaggaaaacagatcatcaagaaaccaagctgttattcttctggacttcctagtgtatcgcctgttaaagctttggtattgtggtcatgctgttctggaagagctgtttggctcatgtcttayagaccagaagtaatgtgaagttttcttagttcatcattcatccgtctgcagtgccttgtgctacactgtgatgcttcttactgcgaggtacaagactgacatatctaggagactagaggattttttrattaaaaagaaaaaacactaaa

SEQ ID NO: 59162 - DNA, 599 bp, Chicken  19866894317097_2
  misc_feature (1)..(57): n is any nucleotide
nnnnnnnnnnnnnnnnnnnnnnnnnnnnnnnnnnnnnnnnnnnnnnnnnnnnnnnnncctgaaggaattacaatcacttgtgcaaataaggaagcctaacatacttcaggatacaagttcactaattacaaacctagcaaatatgcttckatagctttacctctgtgctggcaggaagtaggaaaacagatcatcaagaaaccaagctgttattcttctggacttcctagtgtatcgcctgttaaagctttggtattgtggtcatgctgttctggaagagctgtttggctcatgtcttayagaccagaagtaatgtgaagttttcttagttcatcattcatccgtctgcagtgccttgtgctacactgtgatgcttcttactgcgaggtacaagactgacatatctaggagactagaggattttttrattaaaaagaaaaaacactaaaaaccagaatcagcctaaaatccccrtgagagcatgttttccttgagctaacacaaagtttaggtgtgctaatgaagttactgaagtatcagccttaatagctcaacaataatcacacctcagcatatcaatctgtaatctctcctgcagt

SEQ ID NO: 59163 - DNA, 600 bp, Chicken  19866894317097_3
acaaacctagcaaatatgcttckatagctttacctctgtgctggcaggaagtaggaaaacagatcatcaagaaaccaagctgttattcttctggacttcctagtgtatcgcctgttaaagctttggtattgtggtcatgctgttctggaagagctgtttggctcatgtcttayagaccagaagtaatgtgaagttttcttagttcatcattcatccgtctgcagtgccttgtgctacactgtgatgcttcttactgcgaggtacaagactgacatatctaggagactagaggattttttrattaaaaagaaaaaacactaaaaaccagaatcagcctaaaatccccrtgagagcatgttttccttgagctaacacaaagtttaggtgtgctaatgaagttactgaagtatcagccttaatagctcaacaataatcacacctcagcatatcaatctgtaatctctcctgcagtttctttgtgtgggtatctgcactgagcaagaacaacagagctcttcatatgatttagatatacttctagtgcaaagcaatttgattattgttagcctgtgtgttggtttgaaaaggggaatgctggac

SEQ ID NO: 59164 - DNA, 600 bp, Chicken  19866894317097_4
gaagtaggaaaacagatcatcaagaaaccaagctgttattcttctggacttcctagtgtatcgcctgttaaagctttggtattgtggtcatgctgttctggaagagctgtttggctcatgtcttayagaccagaagtaatgtgaagttttcttagttcatcattcatccgtctgcagtgccttgtgctacactgtgatgcttcttactgcgaggtacaagactgacatatctaggagactagaggattttttrattaaaaagaaaaaacactaaaaaccagaatcagcctaaaatccccrtgagagcatgttttccttgagctaacacaaagtttaggtgtgctaatgaagttactgaagtatcagccttaatagctcaacaataatcacacctcagcatatcaatctgtaatctctcctgcagtttctttgtgtgggtatctgcactgagcaagaacaacagagctcttcatatgatttagatatacttctagtgcaaagcaatttgattattgttagcctgtgtgttggtttgaaaaggggaatgctggactagagcgtgcagctgctaaatgattaggatggtttgacctaaaggaa

SEQ ID NO: 59165 - DNA, 599 bp, Chicken  19866894317098_1
  misc_feature (1)..(11): n is any nucleotide
nnnnnnnnnnnattagtggtagctggcaaccacagggctgaaaagggttttatttggactgcagagcgctcagcatagcagtggtttctaatctccagcaaccccgcttaaattgctctgcttcctttgcagcacaattttgtttagacaaagattacattgtcaactgaaacaatagctcaaggaggtcctttgacagtaatatctgccactgaggctcactaattcacttttgctcctctccctcccaaacaattaagcaggcacaaaccacttaagagaactggctatgaaccaagygggctcttcccaagttattccattctgcctgaacttcacaggtttggaaggagagcaagcatgccagcagtggactttgctttctttctgactgcaacacaaagttgagcrgttgggttttcatcctcagtcacagaggggacaggacacagcccagaggcacatccccacaccagtacagtaactggggtaagtggagctgacctcaatgcgtggtctagcagctgttggattaaagttgtagatgcttctctaatgagtattttctaggacccataacaagccttttgaggagcttc

SEQ ID NO: 59166 - DNA, 600 bp, Chicken  19866894317098_2
attgctctgcttcctttgcagcacaattttgtttagacaaagattacattgtcaactgaaacaatagctcaaggaggtcctttgacagtaatatctgccactgaggctcactaattcacttttgctcctctccctcccaaacaattaagcaggcacaaaccacttaagagaactggctatgaaccaagygggctcttcccaagttattccattctgcctgaacttcacaggtttggaaggagagcaagcatgccagcagtggactttgctttctttctgactgcaacacaaagttgagcrgttgggttttcatcctcagtcacagaggggacaggacacagcccagaggcacatccccacaccagtacagtaactggggtaagtggagctgacctcaatgcgtggtctagcagctgttggattaaagttgtagatgcttctctaatgagtattttctaggacccataacaagccttttgaggagcttcacctcaaaatatttgaagtctcagatgtggtacacagacttactatggctctgttatccagcaatgaagttgttacttttagaatcactgaactctgtagcaaatactaaac

SEQ ID NO: 59167 - DNA, 599 bp, Chicken  19866894317099_1
  misc_feature (1)..(78): n is any nucleotide
nnnnnnnnnnnnnnnnnnnnnnnnnnnnnnnnnnnnnnnnnnnnnnnnnnnnnnnnnnnnnnnnnnnnnnnnnnnnnncaacctgtagcagtgcttcattacctgcacagcacataaggtgcttcctggtgttcatttctctctactgcatcacatatcctctctaaatgcacttggagatgaattctcctcaagccagtcattgctgtttccagttcattactttccttctatcgtttaatatctctgtagccttgttttgttttgttttgtaatgctttatttcttcaaaactacttygactaacttataggggattttttcctccatgcattcatagagcttaaggccagaaatggtgagtgtgattacctgctgaaatgccagagagtttcactctgtgatgctggaacagatctcattctttctggtagaacaaggacatgactgaagattcctcctcatccttcagctcaattcatggtggggggatcctgtttttttcctggcagtttgattaatgtcaaaaccttccctttattctccatctgaatgtaaacacctacatttcctagcagctggttccattatgtctttgt

SEQ ID NO: 59168 - DNA, 488 bp, Chicken  19866894317103_1
tgtgaccaggcaagtccaaggactgatggagagaggaagagagatcctatcagaaagctttgcacagcacacagcgtgcagttggtgtgtcatcaggcctgtgctcatttatacactggatagaaatatctaacaatgttttgcccagggcttctttccttaatagtctcccaagggagacttactagatgcaaaaaaagtccagatacgttatgactactgattacactctttgtgcccccttactcagagattcaaagaactaagaaggtcaaaaaggcagcatttcccttacagaarccacactgaccagactctycatagcaatactgcagtgcttcagggcttggctgctacagaactaaatctcgcaatcycttcatacagttggtattaaaacaacccataggtaggatctgtaagactcaccaaaattagagcactgtggggtgctgtaagttgctctggttttattccaggggacttat

SEQ ID NO: 59169 - DNA, 469 bp, Chicken  19866894317103_2
ggactgatggagagaggaagagagatcctatcagaaagctttgcacagcacacagcgtgcagttggtgtgtcatcaggcctgtgctcatttatacactggatagaaatatctaacaatgttttgcccagggcttctttccttaatagtctcccaagggagacttactagatgcaaaaaaagtccagatacgttatgactactgattacactctttgtgcccccttactcagagattcaaagaactaagaaggtcaaaaaggcagcatttcccttacagaarccacactgaccagactctycatagcaatactgcagtgcttcagggcttggctgctacagaactaaatctcgcaatcycttcatacagttggtattaaaacaacccataggtaggatctgtaagactcaccaaaattagagcactgtggggtgctgtaagttgctctggttttattccaggggacttat

SEQ ID NO: 59170 - DNA, 411 bp, Chicken  19866894317103_3
gcagttggtgtgtcatcaggcctgtgctcatttatacactggatagaaatatctaacaatgttttgcccagggcttctttccttaatagtctcccaagggagacttactagatgcaaaaaaagtccagatacgttatgactactgattacactctttgtgcccccttactcagagattcaaagaactaagaaggtcaaaaaggcagcatttcccttacagaarccacactgaccagactctycatagcaatactgcagtgcttcagggcttggctgctacagaactaaatctcgcaatcycttcatacagttggtattaaaacaacccataggtaggatctgtaagactcaccaaaattagagcactgtggggtgctgtaagttgctctggttttattccaggggacttat

SEQ ID NO: 59171 - DNA, 600 bp, Chicken  19866894317106_1
ccctcccataaattataaatcagacagatgtagtactgggcattacaaaaaaaagaaaaagaaaaaacactttgccaccttagctataaagaactttagaaagagcaaatatgtcaccttctgaacatcagtaaattgaggatttgaaactgtacatgataggccaaataatgtacaaacagctgaagagaataaaccaggagatcctaccttctcttggtagaatcctgttcaacatacagatgcataaaattagagaacacaggatgctacaaattcaagttgttggtttcttgtatscatactatcagacagcacagtgattctgccgttgagttttacttggattctttcctacatatgcaggaaaaaaaggcagagaaawggaactgtagtcttttgtgtgtctcaatattgtattagaaagttacttaatacccataaaagcttggaattgtaaagtgccaaatattatcagatgtgggcttgaagagaaacatcagtkctaaactatgtacccagggagtttgactgctttctccagcaaagtatgcacagcacgattttaaaattgaattagagttcagatctgacctggtt

SEQ ID NO: 59172 - DNA, 600 bp, Chicken  19866894317106_2
ataaagaactttagaaagagcaaatatgtcaccttctgaacatcagtaaattgaggatttgaaactgtacatgataggccaaataatgtacaaacagctgaagagaataaaccaggagatcctaccttctcttggtagaatcctgttcaacatacagatgcataaaattagagaacacaggatgctacaaattcaagttgttggtttcttgtatscatactatcagacagcacagtgattctgccgttgagttttacttggattctttcctacatatgcaggaaaaaaaggcagagaaawggaactgtagtcttttgtgtgtctcaatattgtattagaaagttacttaatacccataaaagcttggaattgtaaagtgccaaatattatcagatgtgggcttgaagagaaacatcagtkctaaactatgtacccagggagtttgactgctttctccagcaaagtatgcacagcacgattttaaaattgaattagagttcagatctgacctggttgctggacaggccattcactagtctaaggaattaaactacctaaacaagttgtcactctgctttgccttcctgaatcaaaaaatta

SEQ ID NO: 59173 - DNA, 600 bp, Chicken  19866894317106_3
cctaccttctcttggtagaatcctgttcaacatacagatgcataaaattagagaacacaggatgctacaaattcaagttgttggtttcttgtatscatactatcagacagcacagtgattctgccgttgagttttacttggattctttcctacatatgcaggaaaaaaaggcagagaaawggaactgtagtcttttgtgtgtctcaatattgtattagaaagttacttaatacccataaaagcttggaattgtaaagtgccaaatattatcagatgtgggcttgaagagaaacatcagtkctaaactatgtacccagggagtttgactgctttctccagcaaagtatgcacagcacgattttaaaattgaattagagttcagatctgacctggttgctggacaggccattcactagtctaaggaattaaactacctaaacaagttgtcactctgctttgccttcctgaatcaaaaaattatccagcccaaactctagtcacaaagagcaaacactgtttgttcatcatactgcctgcttctctgagtccaaagtaaaacagagatgagtatacttgccccccttccttcccactagttgt

SEQ ID NO: 59174 - DNA, 600 bp, Chicken  19866894317106_4
gcccaaactctagtcacaaagagcaaacactgtttgttcatcatactgcctgcttctctgagtccaaagtaaaacagagatgagtatacttgccccccttccttcccactagttgttcataagatagtactagactgaaacagagacctgagatttttacttttcacactacaaatgatggggataagccctttcatgtctcctttctctagttctgtcttcaaaacagagatgacaataccaggttctgcagctctgtgatccacagacattctccatgcaagttgctattactgcatyttctgttcttggcacattggctcytttttgcactggcactatctccagctatttgatgacttcagtgttgggttacatgcttaacagactgcacaaagtgcactagccagaccctccttacttccggatacactgtgtgtatgcaaagattcatagcaacctcttctttccctggggttcacatsataatgcagggttatagcagtgtcctgtgcaggcccccattcacycttacagggggaagagagatttaaaaccccaagccatgtttagtaccattgccctagagtgcttgttttt

SEQ ID NO: 59175 - DNA, 600 bp, Chicken  19866894317106_5
aaacactgtttgttcatcatactgcctgcttctctgagtccaaagtaaaacagagatgagtatacttgccccccttccttcccactagttgttcataagatagtactagactgaaacagagacctgagatttttacttttcacactacaaatgatggggataagccctttcatgtctcctttctctagttctgtcttcaaaacagagatgacaataccaggttctgcagctctgtgatccacagacattctccatgcaagttgctattactgcatyttctgttcttggcacattggctcytttttgcactggcactatctccagctatttgatgacttcagtgttgggttacatgcttaacagactgcacaaagtgcactagccagaccctccttacttccggatacactgtgtgtatgcaaagattcatagcaacctcttctttccctggggttcacatsataatgcagggttatagcagtgtcctgtgcaggcccccattcacycttacagggggaagagagatttaaaaccccaagccatgtttagtaccattgccctagagtgcttgtttttctttaaatgaattcatccttttga

SEQ ID NO: 59176 - DNA, 600 bp, Chicken  19866894317106_6
aagccctttcatgtctcctttctctagttctgtcttcaaaacagagatgacaataccaggttctgcagctctgtgatccacagacattctccatgcaagttgctattactgcatyttctgttcttggcacattggctcytttttgcactggcactatctccagctatttgatgacttcagtgttgggttacatgcttaacagactgcacaaagtgcactagccagaccctccttacttccggatacactgtgtgtatgcaaagattcatagcaacctcttctttccctggggttcacatsataatgcagggttatagcagtgtcctgtgcaggcccccattcacycttacagggggaagagagatttaaaaccccaagccatgtttagtaccattgccctagagtgcttgtttttctttaaatgaattcatccttttgagctattttggggtggaaaaagcctttcttcttcatgcttgtgtttgttttacttttgaggtgtgatcaaagtaagtcctggccgtgtaatcatataatgcattttggctgcagtctcagcctcctttgaaatttatcccttttctcttgcctgtgacagcc

SEQ ID NO: 59177 - DNA, 600 bp, Chicken  19866894317106_7
gatgacaataccaggttctgcagctctgtgatccacagacattctccatgcaagttgctattactgcatyttctgttcttggcacattggctcytttttgcactggcactatctccagctatttgatgacttcagtgttgggttacatgcttaacagactgcacaaagtgcactagccagaccctccttacttccggatacactgtgtgtatgcaaagattcatagcaacctcttctttccctggggttcacatsataatgcagggttatagcagtgtcctgtgcaggcccccattcacycttacagggggaagagagatttaaaaccccaagccatgtttagtaccattgccctagagtgcttgtttttctttaaatgaattcatccttttgagctattttggggtggaaaaagcctttcttcttcatgcttgtgtttgttttacttttgaggtgtgatcaaagtaagtcctggccgtgtaatcatataatgcattttggctgcagtctcagcctcctttgaaatttatcccttttctcttgcctgtgacagccaaactttaccttcaggtagtagagaaggcttacaaactctttcat

SEQ ID NO: 59178 - DNA, 600 bp, Chicken  19866894317107_1
aacatttctgcttggtcatattttggtcttttcagaacatgcagaagcactgctaaaattaaattagttgtagagctgggctgggcagtgttcagtgctagggctctgcagattagagatatcttacaaatctgaggaatttaaatggaaatatactcttaggcaagagtccttgatttccattggcacatagttttagctcacagcagacttttagatcataacagtttttatatgctggaaatctgctttgcataatttgagaggttttagaaaaaattatactattcctctccctcrgggccctctacagttggaatcttagtactaggggagcttgcctttacaagcagatggatgtgaaaaataatcctaataaaatctgtaaaactctttttaacatttttatagaaatatatttgtaatatatatatagaatacaggatgaattacgggattttattacttaatattcttcaatttaggatgaattttgtagattccgcacagttttgctgctgtttattttatccattaatatcctgttactcattttatgtaaacataaatatttatatgtgactactcatatgcatatac

SEQ ID NO: 59179 - DNA, 600 bp, Chicken  19866894317109_1
aaaatcagcacatgatgttacagatggggtaattagcggagtgcccagaaaagtgcatcatcccaagagctgacctgatagagttctggcactttcagttctgggcctaactaaaactgctagtgaaataatgccagtaaatggccagtgaagcttggtcattcccagacaagtatttattaataaacccaaaatgaagaaataaaacaacatgtaaaaccacagggcaactctttcactacagatgaaacacattttcacacatttataactcaaactaatttcagtctcatctctctytttttcttcttattttttttttcaaattgattgactgcatttgtaatttctacaaagaaaactgctactgtttctcattttaaaacagctgtgaatttcacagctgtctggctacaaaaaaggtcacatccgaagatccttgaagtggctcatgcacaagacgggaaattagaaatagttctgaagtgtatgcagtataaagcagggaacactagatcataagaaacagtgcaacttgagaatacaccagaggaatcctgctttgcctcctcttcatgctgtaagttgaagatttattca

SEQ ID NO: 59180 - DNA, 599 bp, Chicken  19866894317110_1
  misc_feature (1)..(16): n is any nucleotide
nnnnnnnnnnnnnnnntctctgtgggtttgagccctatggtgggtgtaaatttgggaacggtggctgcacagtggggatatcgcaaccctggggctgtgtgcagtgttgggggctgtggtgctggtgaaattgcagccagaagagtgtggagggaggaggaagagcatggtggggaggaaggctgaggtcccagtgctgagaatgagtcgagctctccttgctcagccatgggtctgcatcctgctgtgggtctgagccccttgctcttctctgcatgttccagtcctgctttgtacccmcagtttgagtcctgatgtggttcagagcactgctgtaggtctgagcccagcttgtgcccgtgggcttccacccctttgtgtgtctttgtccccggtccctatgggttcacgtgagcacatcacgaccctagggctgtgcatagcatttggggatggtgctgctgcagtaagagcatggagggaggaaaaagagcatggtggggaggaaggctggggaccccggtgttgagagtgagccaaggtgttctggcacattgccccaggcacaggagctgtgagtgacctacacagtgaggaca

SEQ ID NO: 59181 - DNA, 600 bp, Chicken  19866894317112_1
cctgctctggctcagcagttattcgatctttaaacgttcgaaagatcttgtcttctttagtctcatgttttgccattgcttccaacgtctcttcatctaatgcttcacctaaccaagaaaacaaacacacaaagattacaagttaacaccagaaagcaaaaattacaaacaatattgcatccctaagagcatttggctctcagtcagtcccagtgtactcttaagacttattttttctttttgtggcatactaagattctggcatgcatccatttattagagttagtagcattttagctrtagatgtaagtagwggaacaaaagaaagggaaggagataatctaccaatatctacagcttccaggagggatcattgaatgtgttcgacctgctgagtgtgacactggaaaaaggccacccacactgcacggggaccagacttcagttccaatcagtaagagttacacctctgccacagcmctcccatgttcacaccagcatgtaggacagagaatccctaggaagctttacaccataaaggacagctgggaacccacttgttttcccctgtaacgctataaactctccactctgagtgtg

SEQ ID NO: 59182 - DNA, 600 bp, Chicken  19866894317112_2
gcagttattcgatctttaaacgttcgaaagatcttgtcttctttagtctcatgttttgccattgcttccaacgtctcttcatctaatgcttcacctaaccaagaaaacaaacacacaaagattacaagttaacaccagaaagcaaaaattacaaacaatattgcatccctaagagcatttggctctcagtcagtcccagtgtactcttaagacttattttttctttttgtggcatactaagattctggcatgcatccatttattagagttagtagcattttagctrtagatgtaagtagwggaacaaaagaaagggaaggagataatctaccaatatctacagcttccaggagggatcattgaatgtgttcgacctgctgagtgtgacactggaaaaaggccacccacactgcacggggaccagacttcagttccaatcagtaagagttacacctctgccacagcmctcccatgttcacaccagcatgtaggacagagaatccctaggaagctttacaccataaaggacagctgggaacccacttgttttcccctgtaacgctataaactctccactctgagtgtgtacaaagcctgtga

SEQ ID NO: 59183 - DNA, 600 bp, Chicken  19866894317112_3
ccctaagagcatttggctctcagtcagtcccagtgtactcttaagacttattttttctttttgtggcatactaagattctggcatgcatccatttattagagttagtagcattttagctrtagatgtaagtagwggaacaaaagaaagggaaggagataatctaccaatatctacagcttccaggagggatcattgaatgtgttcgacctgctgagtgtgacactggaaaaaggccacccacactgcacggggaccagacttcagttccaatcagtaagagttacacctctgccacagcmctcccatgttcacaccagcatgtaggacagagaatccctaggaagctttacaccataaaggacagctgggaacccacttgttttcccctgtaacgctataaactctccactctgagtgtgtacaaagcctgtgaggtgactacaatgactctggggagaaggggcctgtgcttcaattttctttaattcaactcaaattacttcagaacaattttattatggcacgaagagatttgttgagtattttctgttaagtaacacaagctaaaccaaccaaataaagctcggcacatctaactc

SEQ ID NO: 59184 - DNA, 600 bp, Chicken  19866894317118_1
tgtattatccccaaatcaaagtcagagcacagccttttagagtgcttaatttgtgctgcaatgatataatgctcagagagtcttgtcgaaggccagtatggggtttattggagttgttttaattaacaagtgtttaatagaacagaaaattcctccaattgctgggtttctttagataaggctacatctcaaatagtttcctttgttattctctattttcgctttctattttctttctcttctattactcctataaagtgttattagaattggcttctcttggcaattctgcttacacasaaatgtggaggcaaaaatgaccttacactttgtctgaatagaagaggatcttgagatttatgctgctttcctgttcccagtttgtggaaacagcattagagtctcacttttaaactcacagtttataaaaaactacatgtattactgaagagyattgtaaaatatcttgcatagcataaagaaagaatcaagatgtcttggttttttttttcatatagatgctggatttagttatgttttgagaagtatgctatttgctttctcagataatatagtgagtgttgggccagactttgaaaa

SEQ ID NO: 59185 - DNA, 561 bp, Chicken  19866894317118_2
tccaattgctgggtttctttagataaggctacatctcaaatagtttcctttgttattctctattttcgctttctattttctttctcttctattactcctataaagtgttattagaattggcttctcttggcaattctgcttacacasaaatgtggaggcaaaaatgaccttacactttgtctgaatagaagaggatcttgagatttatgctgctttcctgttcccagtttgtggaaacagcattagagtctcacttttaaactcacagtttataaaaaactacatgtattactgaagagyattgtaaaatatcttgcatagcataaagaaagaatcaagatgtcttggttttttttttcatatagatgctggatttagttatgttttgagaagtatgctatttgctttctcagataatatagtgagtgttgggccagactttgaaaaagaaaatttatcccagtgtgagataagaaaaagtaaggataagatgcaggcttgaacatccatttagtacagcaatgcaagttggctttgctctggtttcatacctgatttatg

SEQ ID NO: 59186 - DNA, 600 bp, Chicken  19866894317119_1
gtcagacatatctcaagtttctcaaaatacttatcactcaaagtaaacgcacagttagtaagtcagttcattaaatgttatcaatacttattttctctaaaaataacctgcaaacccccctaagtggctttctaaacataaaatgcaaaccatttagaagagaacacatttgaagttactaaaagtaatattaaaaggatgcaatcttaaaaaaaaaaaaaaaacacattagcttttagctcttgtttcagctaacattcttcactcttgcaagtttaaaagtaccctcagtgtatttgrtctgggaagtaaaagccagtaattcttatgcagcaatacagcatctgggacagaaagttggctacaaaactcgaaatcctgggaactaaagctgcagagtgtgaaagctgacaggaatcagctcgctctggtaattttctactccaaaacaattatgcagtagctttccacatatggacaaaccagcaggatgacaagacctacctgctgcactgtgcccacaaacacaagttctgtttgaaattcagcaggagttaggcagctcaggagcattgctcttgaagtgcctggtatagagct

SEQ ID NO: 59187 - DNA, 600 bp, Chicken  19866894317121_1
ttagatcgttgccactgttctgtctttgggcccagctcccatctccctacacactccctttccctttctgagctggtgggcctgtgggcctgctgtttccctgtcacagacacagatggatctagataactccgtgacacggaggaattccccgagaggaagaaacctctttggaagaaccccccggggcctgcttgctgcaaagcttcctggctttctcccatcccccacagtgattggacgagatcctgagatcagtggacatacttttatccactgttctggataccctctccaagsaattggaagagaagaaggctatcgggcgcagtcaacatggatctaccaaggggaagtcatgcttaaccaacctgacagccttctctgatgtcatcactggctgggtaggtggggggagagcaatggatgttgtgtgccttgacttcagcaaggcatttgacaccatatttcacaccgttctcattatgaaacttagaaagtgtggggatagatgagtggatgatgagggaattgacaactggttgactggcagagctcagaaggttgccgtcagtggtgtggagtctggttggaggcctg

SEQ ID NO: 59188 - DNA, 600 bp, Chicken  19866894317131_1
tgctgagccagctgtgctcagctcttgctggtctcagtgccatgccaacaaacacgtgtgcccaacgctgcgctgtcattgcttttcttattattttttggagacttgttttcagtcgagtggttgcaagccttcccagctgtgatgaagcataggggcttcttggtgtctgtttcctcttcctgcttgctctgtgggtattctgtgagctggtgtcatgtgagacgttgctgcccatctgtggtcccaggcttgttcgggtcatcagtgctggtgggaaatggtttggatgagaaagcygagcaggttgggaactgaggaaggggaggtggttccttcctaacagccatccctgagtgttgcctcatcgtgatagcaggcatcagctcctgctctcgggctgagaaaaccctctgttgctttgctcagccccagcaaccgtcccagcagctggagtgagacacacaaatcttgcatctygctgcaagagctaatgggatgtgtgcttctctgcagccctggctgcagctggcaccacgtggagctgctccygtggagtaaccatggtgggagcgggaggcccagcatccatctgacttc

SEQ ID NO: 59189 - DNA, 600 bp, Chicken  19866894317131_2
tcctgcttgctctgtgggtattctgtgagctggtgtcatgtgagacgttgctgcccatctgtggtcccaggcttgttcgggtcatcagtgctggtgggaaatggtttggatgagaaagcygagcaggttgggaactgaggaaggggaggtggttccttcctaacagccatccctgagtgttgcctcatcgtgatagcaggcatcagctcctgctctcgggctgagaaaaccctctgttgctttgctcagccccagcaaccgtcccagcagctggagtgagacacacaaatcttgcatctygctgcaagagctaatgggatgtgtgcttctctgcagccctggctgcagctggcaccacgtggagctgctccygtggagtaaccatggtgggagcgggaggcccagcatccatctgacttctgttccttcatcacctcctgagaaagggaagtgaaacagacgcagagagtgtcactccccgaggagccccggtcacctgatgctatcgtgcttgcaaaggaagctgttaattattttgctggaaacagttgtaaacttctgtaaatgcatacgatgtggctttcagatgggttttccagc

SEQ ID NO: 59190 - DNA, 600 bp, Chicken  19866894317131_3
ttgttcgggtcatcagtgctggtgggaaatggtttggatgagaaagcygagcaggttgggaactgaggaaggggaggtggttccttcctaacagccatccctgagtgttgcctcatcgtgatagcaggcatcagctcctgctctcgggctgagaaaaccctctgttgctttgctcagccccagcaaccgtcccagcagctggagtgagacacacaaatcttgcatctygctgcaagagctaatgggatgtgtgcttctctgcagccctggctgcagctggcaccacgtggagctgctccygtggagtaaccatggtgggagcgggaggcccagcatccatctgacttctgttccttcatcacctcctgagaaagggaagtgaaacagacgcagagagtgtcactccccgaggagccccggtcacctgatgctatcgtgcttgcaaaggaagctgttaattattttgctggaaacagttgtaaacttctgtaaatgcatacgatgtggctttcagatgggttttccagcattgtggttcattttatggaaaatattgcagctggcttgctcaattgtgctgtgcagtggggatatctgatg

SEQ ID NO: 59191 - DNA, 599 bp, Chicken  19866894317137_1
  misc_feature (1)..(48): n is any nucleotide
nnnnnnnnnnnnnnnnnnnnnnnnnnnnnnnnnnnnnnnnnnnnnnnntgccaaggcccaactctgccatcgcttcagccaacaggaggtaaggaagcacaggcaaatggatggtaaagcaatggtgtgatgtggattttaatgctggaaccaggggaaaagtacgaatgaggcccttaagatgtgcagctacagcaaggggagaagcacgtacagctcgggataaataaggtgtctaaataaactgtcactaaaacatttcccagtcagcttgctgtaaaactgaagtacaatacttcygaaaatagtcttcaggcaatgactgggaggatttgttcaaaggaaatgggctcagacatttgatttacagctgaacattggaacctcagytacctgtcagctccacagatgccagatgcccagaagggctgtgattccttgcattcctatcttggccagacctgataaagcygtctgtggggcacgatgagaaaggactatactgcactgaaggygttctggagacccacgtgcccaaatgcccatgtcttgcagctaagctgagtctccttagaggccctggtatctcaacaggcgtc

SEQ ID NO: 59192 - DNA, 600 bp, Chicken  19866894317137_2
aaggaagcacaggcaaatggatggtaaagcaatggtgtgatgtggattttaatgctggaaccaggggaaaagtacgaatgaggcccttaagatgtgcagctacagcaaggggagaagcacgtacagctcgggataaataaggtgtctaaataaactgtcactaaaacatttcccagtcagcttgctgtaaaactgaagtacaatacttcygaaaatagtcttcaggcaatgactgggaggatttgttcaaaggaaatgggctcagacatttgatttacagctgaacattggaacctcagytacctgtcagctccacagatgccagatgcccagaagggctgtgattccttgcattcctatcttggccagacctgataaagcygtctgtggggcacgatgagaaaggactatactgcactgaaggygttctggagacccacgtgcccaaatgcccatgtcttgcagctaagctgagtctccttagaggccctggtatctcaacaggcgtccagtaccatgatkgaaatacacagcaactccagaacataaggaaggaaaaaarcatctgcacagacgtcaraagtatggctttagggagag

SEQ ID NO: 59193 - DNA, 600 bp, Chicken  19866894317137_3
gcccttaagatgtgcagctacagcaaggggagaagcacgtacagctcgggataaataaggtgtctaaataaactgtcactaaaacatttcccagtcagcttgctgtaaaactgaagtacaatacttcygaaaatagtcttcaggcaatgactgggaggatttgttcaaaggaaatgggctcagacatttgatttacagctgaacattggaacctcagytacctgtcagctccacagatgccagatgcccagaagggctgtgattccttgcattcctatcttggccagacctgataaagcygtctgtggggcacgatgagaaaggactatactgcactgaaggygttctggagacccacgtgcccaaatgcccatgtcttgcagctaagctgagtctccttagaggccctggtatctcaacaggcgtccagtaccatgatkgaaatacacagcaactccagaacataaggaaggaaaaaarcatctgcacagacgtcaraagtatggctttagggagaggggaaaagagcagaactggaaagcattcagtgttctgcacctaacagcacagacagaaggcaagtgagaaactatgggagga

SEQ ID NO: 59194 - DNA, 600 bp, Chicken  19866894317137_4
gctcgggataaataaggtgtctaaataaactgtcactaaaacatttcccagtcagcttgctgtaaaactgaagtacaatacttcygaaaatagtcttcaggcaatgactgggaggatttgttcaaaggaaatgggctcagacatttgatttacagctgaacattggaacctcagytacctgtcagctccacagatgccagatgcccagaagggctgtgattccttgcattcctatcttggccagacctgataaagcygtctgtggggcacgatgagaaaggactatactgcactgaaggygttctggagacccacgtgcccaaatgcccatgtcttgcagctaagctgagtctccttagaggccctggtatctcaacaggcgtccagtaccatgatkgaaatacacagcaactccagaacataaggaaggaaaaaarcatctgcacagacgtcaraagtatggctttagggagaggggaaaagagcagaactggaaagcattcagtgttctgcacctaacagcacagacagaaggcaagtgagaaactatgggaggagcttccacaaaagcagggtttttatctacagatgactgctaag

SEQ ID NO: 59195 - DNA, 539 bp, Chicken  19866894317137_5
caggcaatgactgggaggatttgttcaaaggaaatgggctcagacatttgatttacagctgaacattggaacctcagytacctgtcagctccacagatgccagatgcccagaagggctgtgattccttgcattcctatcttggccagacctgataaagcygtctgtggggcacgatgagaaaggactatactgcactgaaggygttctggagacccacgtgcccaaatgcccatgtcttgcagctaagctgagtctccttagaggccctggtatctcaacaggcgtccagtaccatgatkgaaatacacagcaactccagaacataaggaaggaaaaaarcatctgcacagacgtcaraagtatggctttagggagaggggaaaagagcagaactggaaagcattcagtgttctgcacctaacagcacagacagaaggcaagtgagaaactatgggaggagcttccacaaaagcagggtttttatctacagatgactgctaagtgcttcagccttcaaagcagcactaaacagagaaag

SEQ ID NO: 59196 - DNA, 499 bp, Chicken  19866894317137_6
cagacatttgatttacagctgaacattggaacctcagytacctgtcagctccacagatgccagatgcccagaagggctgtgattccttgcattcctatcttggccagacctgataaagcygtctgtggggcacgatgagaaaggactatactgcactgaaggygttctggagacccacgtgcccaaatgcccatgtcttgcagctaagctgagtctccttagaggccctggtatctcaacaggcgtccagtaccatgatkgaaatacacagcaactccagaacataaggaaggaaaaaarcatctgcacagacgtcaraagtatggctttagggagaggggaaaagagcagaactggaaagcattcagtgttctgcacctaacagcacagacagaaggcaagtgagaaactatgggaggagcttccacaaaagcagggtttttatctacagatgactgctaagtgcttcagccttcaaagcagcactaaacagagaaag

SEQ ID NO: 59197 - DNA, 481 bp, Chicken  19866894317137_7
ctgaacattggaacctcagytacctgtcagctccacagatgccagatgcccagaagggctgtgattccttgcattcctatcttggccagacctgataaagcygtctgtggggcacgatgagaaaggactatactgcactgaaggygttctggagacccacgtgcccaaatgcccatgtcttgcagctaagctgagtctccttagaggccctggtatctcaacaggcgtccagtaccatgatkgaaatacacagcaactccagaacataaggaaggaaaaaarcatctgcacagacgtcaraagtatggctttagggagaggggaaaagagcagaactggaaagcattcagtgttctgcacctaacagcacagacagaaggcaagtgagaaactatgggaggagcttccacaaaagcagggtttttatctacagatgactgctaagtgcttcagccttcaaagcagcactaaacagagaaag

SEQ ID NO: 59198 - DNA, 599 bp, Chicken  19866894317142_1
  misc_feature (1)..(37): n is any nucleotide
nnnnnnnnnnnnnnnnnnnnnnnnnnnnnnnnnnnnnataaagagtccctcccccatcttacttgtagaactccccagttaaatactggatgggtgctataaggtctcccgggcaccttctgttctctggaccaaacaatcccaactctttcagcttgtcttcataaaagaggtactcctaccctatcaacatcttttgtatctctccactgggcctgctctagcaggtcagtgtcttccttgtgctgcaggtgccagagctaaatgctatactgcaggtggcatctcagatgagtggamtaaatagaagggaaggatcaccccccttcgaccagctggtcacacttcttttgaagcaacccaggatacagctggttttctgggctgtaagtacgcattaccagctcacgctgagtttttcatcaaccaaccatctccgaagggctgctcttggttcactcaatgcccaagctgtatttgaacttgagatttttctgcagttccaatattcagttacatattcaaaataaggatataaatcccatttgtccatataatctataaggaatggtaccaaaattctgcattaccttggatca

SEQ ID NO: 59199 - DNA, 600 bp, Chicken  19866894317146_1
agcaatttccttcatggtgaatttaagccttgtgttaagcaaagaatgatgtctttttgttcagcacagaattcacactggaacactgtacacatccttttttcccttctgagatggctattatgtaaagtatgtaagatattccttcagaagtactgtttgttttgagcctttcagcaaaactattggctatttttggaaggcactttctcagttcagcaggaaatatggggcagaatggttgactgtgctgtttgcaaatgggctgcgcacccttttaatccctcttctctattcaasagtagcctcaartataatgcttagcaatagtcttcctgtcrtcccatgaaatgtatgaaggaaattgatggtcttgagaggaggagcccatctaatagaaaggacccatgcaactattgcaaacgtatcatccttttcagcagttgggagatttaggctgtaagctgcactttgtcatcccacagttgatcagcagagctgatctttgagctcagaacctttcgtaggttctcaacatctttaaatgaggtaaaattgtaatgcctccaatgccgcggtgtttggggggaggctcatgtt

SEQ ID NO: 59200 - DNA, 600 bp, Chicken  19866894317146_2
catggtgaatttaagccttgtgttaagcaaagaatgatgtctttttgttcagcacagaattcacactggaacactgtacacatccttttttcccttctgagatggctattatgtaaagtatgtaagatattccttcagaagtactgtttgttttgagcctttcagcaaaactattggctatttttggaaggcactttctcagttcagcaggaaatatggggcagaatggttgactgtgctgtttgcaaatgggctgcgcacccttttaatccctcttctctattcaasagtagcctcaartataatgcttagcaatagtcttcctgtcrtcccatgaaatgtatgaaggaaattgatggtcttgagaggaggagcccatctaatagaaaggacccatgcaactattgcaaacgtatcatccttttcagcagttgggagatttaggctgtaagctgcactttgtcatcccacagttgatcagcagagctgatctttgagctcagaacctttcgtaggttctcaacatctttaaatgaggtaaaattgtaatgcctccaatgccgcggtgtttggggggaggctcatgtttgcatgctcttt

SEQ ID NO: 59201 - DNA, 600 bp, Chicken  19866894317146_3
aagaatgatgtctttttgttcagcacagaattcacactggaacactgtacacatccttttttcccttctgagatggctattatgtaaagtatgtaagatattccttcagaagtactgtttgttttgagcctttcagcaaaactattggctatttttggaaggcactttctcagttcagcaggaaatatggggcagaatggttgactgtgctgtttgcaaatgggctgcgcacccttttaatccctcttctctattcaasagtagcctcaartataatgcttagcaatagtcttcctgtcrtcccatgaaatgtatgaaggaaattgatggtcttgagaggaggagcccatctaatagaaaggacccatgcaactattgcaaacgtatcatccttttcagcagttgggagatttaggctgtaagctgcactttgtcatcccacagttgatcagcagagctgatctttgagctcagaacctttcgtaggttctcaacatctttaaatgaggtaaaattgtaatgcctccaatgccgcggtgtttggggggaggctcatgtttgcatgctctttgaactctgccattgggtgtttgacaataa

SEQ ID NO: 59202 - DNA, 600 bp, Chicken  19866894317153_1
tctgctttcacgtggacactgttctgagcactgcgtgggattctgacatcagaggagaaattggttgcgacagaatgaagcatgatgcacacagaaagaggaaaaggagcagcaggtggatgagcttgtcacgtattcagcactgccattcgtctcttgtgacagcaggctgcaccagtgtttgatgtgattgctaagaagaactgtatcacttcattcttgctttggttggagctgtagttttgaaggttcagaaatgctcagcacacgttttaaattacagctaattcattttgataygcctttttcttggatccatagacagtatgactgcagcgaggtttcaataaatcaaaggcaggtttccctgggagatacgcatcaggctatgcctgggtctccggggtgttgcaatacagctcatagcaaccaggcagaaatcagttctcttttccttggtaagggctggacaaacaaagcaatttctagtatcctaagaagaacagcttcagagaaracttcctctgtatttttgtggactgaacagcaccagaactgcagttacaccaaggtcaagatcgaatttgttgcctgaagaga

SEQ ID NO: 59203 - DNA, 600 bp, Chicken  19866894317153_2
tcttgctttggttggagctgtagttttgaaggttcagaaatgctcagcacacgttttaaattacagctaattcattttgataygcctttttcttggatccatagacagtatgactgcagcgaggtttcaataaatcaaaggcaggtttccctgggagatacgcatcaggctatgcctgggtctccggggtgttgcaatacagctcatagcaaccaggcagaaatcagttctcttttccttggtaagggctggacaaacaaagcaatttctagtatcctaagaagaacagcttcagagaaracttcctctgtatttttgtggactgaacagcaccagaactgcagttacaccaaggtcaagatcgaatttgttgcctgaagagattgttattgtatttcagtttctattaacgttccaaggtagcatagcagtaatttgccagtgagaggcaggggtcggggggaaagtaatgaagttacagtccttgattgtacgaatgcaacttgagccttattttaggatgttatctatcagcccgtctggcaaatgtctgtctggtaataatgtatctgtctgctgaaacaagcctaaataatgcaa

SEQ ID NO: 59204 - DNA, 600 bp, Chicken  19866894317169_1
aattttaaaattttattgtactatgtgctgaaatagtacaaatgtatacaagactccacctttgttaaaaaagcatgtacaatagggactatagaaagtagaactgaagggccaagcgggctttatttgggctcaactgataggtcataaatctatggctttgcttcgtggatgtatttgaaattgaataagtgttagaaatgcagggaagaaacagaaaaaagatattttaatcgatagaagctatgataggtatgatagatagattttaaaggaactttaacaagcaaactaagtgakctctgacatgtgcctctcaccctgggaaaaccacctgcctggtcgtggtatctcccctgccagcttgctgaatagcaaaggtgcagtttgcaggacagagtgtgagatttaaagcatgagggattgtctgaaaaacaacaaaagacagctgtggagcaaaacctttcaggtgatttgctgcaaggtgttagttcacacgaggcttcggtttcaaaagaattactgatttgcaagaaatgagagggcaacagcaggtctgcgtgggccagaataaaatcttgtatcactgaaaacacaggg

SEQ ID NO: 59205 - DNA, 600 bp, Chicken  19866894317169_2
attgtttctagcatgcacagctaatgcttgaaggcctatcacagcagtaggagctactgctatttctagttctttacgttgctgcgttgtttctgctggctatagtctggtcatggtcagtgagcgctgagtggtgttaggaggttaacccacgatctctgcaggttcagtgaccaacttagatccatcccatgctgtcttgaactgttcaggaaccggaaattctttctggtaagaaacaaaagcaacaatgatgattagataaacagcggatacctcatgaaaactggtgaaatactrttagtgctacatgactgggaaagctttgagagctcagacacgccaggattatagagaggccttcctcattaccctaggaagctattttcaatgccacacaggaaaaagccttactgctacctagcttcaaatagcttagctgtggtactcctgtgtaataatccttctcacaccattattggggacagctaagtaaataaacctcaggtcagaaatgactttagactccatcagcgactggcctggaagacagtaaaagggatttgatgtggagatttagtgaggagactaattttaagg

SEQ ID NO: 59206 - DNA, 600 bp, Chicken  19866894317170_1
tcagcctctgcaactcaaattggcagttcttctatcgtttcattcatgcagaattgcactgctcacgcattttccatagaactaccacgctcagccaaaaacacattaaacatttctaaaagtatctttcaagcaaactgtaaaaggaccatcactgaggttatttctgcattttcatctccatctgtgctactttcaaaacttggggctgtgcttgccaccaaattcacaggcaaattcaaagtacaattactgcacatcctgctgttccagagaaagaatgtcagtccctcagctatkatggcacttgaagtatacttacacttcagtatactttcagaagtatactgaacaaaayaccttacagtagcactaaggcaaggctccaarctctactgaatatctacttgacaagcatcaagacaaatcacacagatactgaattgccaccaaaagctggaagtcctgttttggtaaagaaatacagtatatactcataaaaggaaacaaaaatctcaaggttgcaatctaaaaattattcagcacattatcaagtagataatygttcaagtgaagatacaagctgttacttaattaacc

SEQ ID NO: 59207 - DNA, 600 bp, Chicken  19866894317170_2
ctgctcacgcattttccatagaactaccacgctcagccaaaaacacattaaacatttctaaaagtatctttcaagcaaactgtaaaaggaccatcactgaggttatttctgcattttcatctccatctgtgctactttcaaaacttggggctgtgcttgccaccaaattcacaggcaaattcaaagtacaattactgcacatcctgctgttccagagaaagaatgtcagtccctcagctatkatggcacttgaagtatacttacacttcagtatactttcagaagtatactgaacaaaayaccttacagtagcactaaggcaaggctccaarctctactgaatatctacttgacaagcatcaagacaaatcacacagatactgaattgccaccaaaagctggaagtcctgttttggtaaagaaatacagtatatactcataaaaggaaacaaaaatctcaaggttgcaatctaaaaattattcagcacattatcaagtagataatygttcaagtgaagatacaagctgttacttaattaacctgtcctgggaactaaatcaactgctggaaatgtctttcaccaaaattcagctaaaggg

SEQ ID NO: 59208 - DNA, 600 bp, Chicken  19866894317170_3
tcagccaaaaacacattaaacatttctaaaagtatctttcaagcaaactgtaaaaggaccatcactgaggttatttctgcattttcatctccatctgtgctactttcaaaacttggggctgtgcttgccaccaaattcacaggcaaattcaaagtacaattactgcacatcctgctgttccagagaaagaatgtcagtccctcagctatkatggcacttgaagtatacttacacttcagtatactttcagaagtatactgaacaaaayaccttacagtagcactaaggcaaggctccaarctctactgaatatctacttgacaagcatcaagacaaatcacacagatactgaattgccaccaaaagctggaagtcctgttttggtaaagaaatacagtatatactcataaaaggaaacaaaaatctcaaggttgcaatctaaaaattattcagcacattatcaagtagataatygttcaagtgaagatacaagctgttacttaattaacctgtcctgggaactaaatcaactgctggaaatgtctttcaccaaaattcagctaaagggaaggaaccatttcacatagcaagataccactg

SEQ ID NO: 59209 - DNA, 600 bp, Chicken  19866894317170_4
ctgttccagagaaagaatgtcagtccctcagctatkatggcacttgaagtatacttacacttcagtatactttcagaagtatactgaacaaaayaccttacagtagcactaaggcaaggctccaarctctactgaatatctacttgacaagcatcaagacaaatcacacagatactgaattgccaccaaaagctggaagtcctgttttggtaaagaaatacagtatatactcataaaaggaaacaaaaatctcaaggttgcaatctaaaaattattcagcacattatcaagtagataatygttcaagtgaagatacaagctgttacttaattaacctgtcctgggaactaaatcaactgctggaaatgtctttcaccaaaattcagctaaagggaaggaaccatttcacatagcaagataccactgtcctgttcaaaatgggtgagatgctctcaatcgatgagaacctccagtgcactagcagacacatagaaaggatatgcacaactaaagcctccaaatcctacagttaatgacactggttgtattaagtaatggcacctttcccttcacacctgaacagtatctagacgtttttcc

SEQ ID NO: 59210 - DNA, 600 bp, Chicken  19866894317175_1
tctgtgaaagtagagcaggaaagcagatcagttccggtttgttttaccagctggggagaacagggcacctacctcactcagtgcccatcacccagaagagcccacctctacactcatcccaggtcagttggtcagtctgctgaggtcgatgaagcggagcccgacgaacacacgcataccgacacactgtgtatggcagcatgggtaaatatttgggacgtgctggtcatgtcacaccatgccacacatcgctgccaggccagcacaaatggctgggcctcagtcaggaggcacagcagyctgcctcgtgcaccacaagctttaccagggtctacacaggaccccacggagtgctctcagtctcctcctaagtaaattttgtcgctcaagacggagggctaccaagatgaaaaactttttctcttggtttattacagcacattcagatgtgcagagaccttcttgtgagatacagcacactgcagcagcacaactgcttttgtaaggaatatactgagcatagttaactttggccagcttagggggaacaggaggagccatttgccgacgattttacatgtgacctgccatctctctaaa

SEQ ID NO: 59211 - DNA, 600 bp, Chicken  19866894317176_1
tgagagcactccgtggggtcctgtgtagaccctggtaaagcttgtggtgcacgaggcagactgctgtgcctcctgactgaggcccagccatttgtgctggcctggcagcgatgtgtggcatggtgtgacatgaccagcacgtcccaaatatttacccatgctgccatacacagtgtgtcggtatgcgtgtgttcgtcgggctccgcttcatcgacctcagcagactgaccaactgacctgggatgagtgtagaggtgggctcttctgggtgatgggcactgagtgaggtaggtgccctgytctccccagctggtaaaacaaaycggaactgatctgctttcctgctctactttcacagaagcaaactgcatgcaggcaggtagctgtaagagtgagctggcttcccattgctcctgctgccaatagccagtggggagggaaggaagcaaaattaaaaaggaaggaaggaataactgattaaaggaggtgggaaggcaaggctttggtgtgttacatactttcagttcttgctttggagctagttttcagtagtgtgtttgctagaaggatgccaggtctgcggagagagagacctgttat

SEQ ID NO: 59212 - DNA, 600 bp, Chicken  19866894317176_2
tgtagaccctggtaaagcttgtggtgcacgaggcagactgctgtgcctcctgactgaggcccagccatttgtgctggcctggcagcgatgtgtggcatggtgtgacatgaccagcacgtcccaaatatttacccatgctgccatacacagtgtgtcggtatgcgtgtgttcgtcgggctccgcttcatcgacctcagcagactgaccaactgacctgggatgagtgtagaggtgggctcttctgggtgatgggcactgagtgaggtaggtgccctgytctccccagctggtaaaacaaaycggaactgatctgctttcctgctctactttcacagaagcaaactgcatgcaggcaggtagctgtaagagtgagctggcttcccattgctcctgctgccaatagccagtggggagggaaggaagcaaaattaaaaaggaaggaaggaataactgattaaaggaggtgggaaggcaaggctttggtgtgttacatactttcagttcttgctttggagctagttttcagtagtgtgtttgctagaaggatgccaggtctgcggagagagagacctgttatcatggcttcctgtaattactgct

SEQ ID NO: 59213 - DNA, 599 bp, Chicken  19866894317190_1
  misc_feature (1)..(190): n is any nucleotide
nnnnnnnnnnnnnnnnnnnnnnnnnnnnnnnnnnnnnnnnnnnnnnnnnnnnnnnnnnnnnnnnnnnnnnnnnnnnnnnnnnnnnnnnnnnnnnnnnnnnnnnnnnnnnnnnnnnnnnnnnnnnnnnnnnnnnnnnnnnnnnnnnnnnnnnnnnnnnnnnnnnnnnnnnnnnnnnnnnnnnnnnnnnnnnaatcctgccctattttaacacattttaaccctttaccagatagctctttttgaaatataatgatagaaaagataccctacaaagaagaaaatataaatccttatctactrtgtgtttctcctgtgatggaatacaaccatgtataacatggagaataataaaaatgtagaaatcatatgcataattacagcagggaaagtgaagaagaatcccttgtgacttgcttgaagattttctgaagtctttttgcctccatcctaagctctgtgggtttatgccatgctaaatgtctcctagattcttttctccaataaagctaagtcaggtcctggcagtacttgagaagagcaggagattttgagctaagggtctagaagagaccaaggtagaatttagcaggagaaaaaca

SEQ ID NO: 59214 - DNA, 600 bp, Chicken  19866894317194_1
tctttgtttatgtctgctcactgctcagcagggatgatttttttttttcctttgaaaacaactgcaataattaaagacagggaaaacataaacaaagcatcctccctgcagaagacctgactgcagggaccacagcctgggctggcacatccttcatgccaaagaccagcactgaagagttttaattcctgtgttctttataggaaatgagcccttagaaattcaaacaatataaatagctcaaataaaaactgtattaaaccaatattattaaggaagtatattgaaatgctgaaaagyctggagatgtcgggctgaaggcttcctcaatgtcttaaatcctgtccttgggacagaccagcagcgctgggctgctgggttcacacatgacagcaaagagcaggcatccaggatccagtgcacgctcccacgtgggacatccagctttcatctctttgcctttcaattaaaggccccctgtgaaatatcctggcccagaaaatagataagagttttaaaatggggagtggatttactagaagacatcagtgattgacgttggttattaatataggacaggatttaaatgcctcttattat

SEQ ID NO: 59215 - DNA, 600 bp, Chicken  19866894317195_1
gaggtattcactaatcctgatcactggagaaaatggctatattataatgattcttaattatatgcagatgcaacagattgatttattatgtccatgtgctgctgtcagtatttcacagtgtttgaagttctattaagctaccatgctaaattactgcgtgagttgtctctgtcatctaagacagtatctctggccaaaagcatcactttttgcctaagcatttgtgcttctgattccttctgtatgccttatctgtggcatttctccttgctagtattgttttatataggaggacaattrttcaccttcagaccctgagtttgtcctcagtgaaaaaaaatctttttaaggaaggaaaacttcagggtaatctaaaatgcattttaatcactgcaactaattatgaagagcagtaaatcagtaagggtcagagctctaacaccttacagcaaatgacaaagagcagtgtagctgattccaatgggattactcctgtaagtgtctacccactactttcactgcaagattcatagtctctttgaaaaactgcctgaaagaccattaataaaggtataattaactagaaaactgaaaacttta

SEQ ID NO: 59216 - DNA, 600 bp, Chicken  19866894317196_1
cgatgaaacaggaattaggtgaaataactgtagcgtattaatatttgtgttgtattatgtaggttatggaagttgggttaatctgaaacagcacttcatagaattgcgagtgctgtctgactccttcctacagccgatggggatcgacaaaggcctcgtctggaaactcaggaaatctgcattacaatgtaatgcttcctgctgagaggggtcctctaaagcaggggaaaaaatactctgtgcttcaatgccactccccgttatttgcatgggaatgccattccctttctgtgctgtcgsgagtggagaataaggggcatttttacttctgtcagtgaatgcagcacttgtagaatatttgggccattttaggggagctgaccgggttcctcatcagtraaggcagcaggatgctgggtttagctgcagcaggattggtgcagtgatgacaagggaccatctcagtgcatggtgctggttaaaataattctggatgaggcgtggtctgttggcactgtggtcctgggctaaggtgctgcatgaatggcccatctcagaaaacaaaccagcaaggcatttaatacacgtgtttttaatttc

SEQ ID NO: 59217 - DNA, 600 bp, Chicken  19866894317196_2
agaattgcgagtgctgtctgactccttcctacagccgatggggatcgacaaaggcctcgtctggaaactcaggaaatctgcattacaatgtaatgcttcctgctgagaggggtcctctaaagcaggggaaaaaatactctgtgcttcaatgccactccccgttatttgcatgggaatgccattccctttctgtgctgtcgsgagtggagaataaggggcatttttacttctgtcagtgaatgcagcacttgtagaatatttgggccattttaggggagctgaccgggttcctcatcagtraaggcagcaggatgctgggtttagctgcagcaggattggtgcagtgatgacaagggaccatctcagtgcatggtgctggttaaaataattctggatgaggcgtggtctgttggcactgtggtcctgggctaaggtgctgcatgaatggcccatctcagaaaacaaaccagcaaggcatttaatacacgtgtttttaatttcaccgcccctctgtctgtagcaatacctgcccttccatgtcacagcccatatggaaagcttggattgacctttgtgcctgagccactttcaccttgtagc

SEQ ID NO: 59218 - DNA, 600 bp, Chicken  19866894317201_1
ttctgcccattgcctcttgtcctgccactgggcaccagtgaaaagagcctgattctgtcctctttgccccctcccttcagatatttatggacactgatgagattcctttgagcctcctccaaaggctacgcagtcctagctagcttcctcagccttttctcacaggagaggttctgtagtggtgctacactggactctttccagtatgctcatgtctctcttgtactggaaagcctagaactggacacagcaccagtgctgaatagaggggaagcatcaccagcctcgacttgctgccartactctgcctaatgaagtctaggatacggttagccttcttagcagcaagggtgcactgctggctcatgtccaatttggtgtccaccagtacctccaggtctttttctgtggagctgctttccatctcatgtccctggcacatcctggtgcccgaagttgtttctccccagatgcaggactttacacttcttgtttgtgaactttgcgaggttcatatcaacacatttattcagcatgtcaaggtccttctggatgatagtacaatcctctgtcctatcagccactcctcttgttttttgc

SEQ ID NO: 59219 - DNA, 599 bp, Chicken  19866894317209_1
  misc_feature (1)..(14): n is any nucleotide
nnnnnnnnnnnnnntgaccagcaatgattatccactgccctgaacaaaatgagctagtggcttcaggctgttttccagggaacaggtgccctcataatttcaccagcagcaatgacatccttcttcacagctggaaaactgcaccagccttcctgtgcttcagtgctgtgagtcccttcaggcaacactctgctctaagctgtatgacagcttcaaacaacagctatgctggaattaaaatgtgtggcagatgcatgcttagacactgacagtgacagagcttctggtgcaacctctccstcagtggggctgtctggactttgtacmcggaccagcagaaaaaaagattagcttctccaaaaatgcagcacaaactgttcttatgcagtctcccatctcctcagctattttcattgcagtaaaacttagcgcactgactttatcctgacactggcaccactggaaagcacctttgcaaatgttctgtgaataatgtgtactctaataagaaaagcacaagttatctggcatcagcaaagcgtactggttatgtcatagttttccattttcttttattttttagtgttgtccattaaccc

SEQ ID NO: 59220 - DNA, 600 bp, Chicken  19866894317209_2
ttatccactgccctgaacaaaatgagctagtggcttcaggctgttttccagggaacaggtgccctcataatttcaccagcagcaatgacatccttcttcacagctggaaaactgcaccagccttcctgtgcttcagtgctgtgagtcccttcaggcaacactctgctctaagctgtatgacagcttcaaacaacagctatgctggaattaaaatgtgtggcagatgcatgcttagacactgacagtgacagagcttctggtgcaacctctccstcagtggggctgtctggactttgtacmcggaccagcagaaaaaaagattagcttctccaaaaatgcagcacaaactgttcttatgcagtctcccatctcctcagctattttcattgcagtaaaacttagcgcactgactttatcctgacactggcaccactggaaagcacctttgcaaatgttctgtgaataatgtgtactctaataagaaaagcacaagttatctggcatcagcaaagcgtactggttatgtcatagttttccattttcttttattttttagtgttgtccattaacccataggaccaggtgggatagagcagcagc

SEQ ID NO: 59221 - DNA, 599 bp, Chicken  19866894317210_1
  misc_feature (1)..(115): n is any nucleotide
nnnnnnnnnnnnnnnnnnnnnnnnnnnnnnnnnnnnnnnnnnnnnnnnnnnnnnnnnnnnnnnnnnnnnnnnnnnnnnnnnnnnnnnnnnnnnnnnnnnnnnnnnnnnnnnnnnncctcctcttgtgcaggctaaacagcgccaggtctctcagccttccctcatacaggagatgctccaggcccctcatcatctctgtggccctctgctaggctctctccagaagttctgtatttcatgaattgaggagcccagaactggacacagcactgcagatgtggcctcaccacggcagaatakaaggggaggatcacctcccttgacctgttggccatgctctttttaatgcaccccaggatatcattggccttcttggccataagggcacactgctggctcatgatsaccctgttgtcctccagaacacccaagtccttcactgtggagctcctctccagcaggtcagaccctaacttggattaatgcataaggytttttctccccatttataggactccacacttgccctgtggaacttcataaggttactctccacccagctctccagccttgtaaagcacagtttagatgaaacactt

SEQ ID NO: 59222 - DNA, 599 bp, Chicken  19866894317210_2
  misc_feature (1)..(10): n is any nucleotide
nnnnnnnnnncctcctcttgtgcaggctaaacagcgccaggtctctcagccttccctcatacaggagatgctccaggcccctcatcatctctgtggccctctgctaggctctctccagaagttctgtatttcatgaattgaggagcccagaactggacacagcactgcagatgtggcctcaccacggcagaatakaaggggaggatcacctcccttgacctgttggccatgctctttttaatgcaccccaggatatcattggccttcttggccataagggcacactgctggctcatgatsaccctgttgtcctccagaacacccaagtccttcactgtggagctcctctccagcaggtcagaccctaacttggattaatgcataaggytttttctccccatttataggactccacacttgccctgtggaacttcataaggttactctccacccagctctccagccttgtaaagcacagtttagatgaaacacttcaggtaaaagatttttttttgcttatttatttatctattttattctcttagaaaaagagtgcatttgggaactagtacaagttgtgtaagatggatattcaacaa

SEQ ID NO: 59223 - DNA, 600 bp, Chicken  19866894317210_3
ctctgtggccctctgctaggctctctccagaagttctgtatttcatgaattgaggagcccagaactggacacagcactgcagatgtggcctcaccacggcagaatakaaggggaggatcacctcccttgacctgttggccatgctctttttaatgcaccccaggatatcattggccttcttggccataagggcacactgctggctcatgatsaccctgttgtcctccagaacacccaagtccttcactgtggagctcctctccagcaggtcagaccctaacttggattaatgcataaggytttttctccccatttataggactccacacttgccctgtggaacttcataaggttactctccacccagctctccagccttgtaaagcacagtttagatgaaacacttcaggtaaaagatttttttttgcttatttatttatctattttattctcttagaaaaagagtgcatttgggaactagtacaagttgtgtaagatggatattcaacaaaagataagccattacctttctactaaatccaaattcagtaatattccttgcaaagcatcatttccttaagagatttcttcatttttaag

SEQ ID NO: 59224 - DNA, 600 bp, Chicken  19866894317212_1
tccagggaaggttaggcaaggccaggctaagctagaatatgtctggccaagccaggcaaaaagaaggccaggcaaggcctggccagacaaagtaaggccatgcccggacaggccaggcaggacaaagccaggcaaggcagtggcaggccaggagaggtggcaaggcaaggccatgcaagcacatgcagggataggcaaggttaggcgaggccaggcctggccagacaaggcgaggtaaggcaaggcatggccaggccagcaaggcaaagcaaggcctggccagacaaagtaaggccatgmmcggacaggccaggcaaagcaaggccaggcaaggcagtggcaggccaggagaggtggcaaggcaaggctatgcaagcacatgcagggataggcaatgttaggcgaggccaggcctggccagacaaggcgaggtaaggcaaggcatggccaggccagcaaggcaaagcaaggcctggccagacaaagtaaggccatgcccggacaggccaggcaaagcaaggccagtccacgccagaacaggcaaggcaaggcaagtccaaacaaagataggccgggctaggaaaggccagaccaggccag

SEQ ID NO: 59225 - DNA, 600 bp, Chicken  19866894317212_2
ccagggaaggttaggcaaggccaggctaagctagaatatgtctggccaagccaggcaaaaagaaggccaggcaaggcctggccagacaaagtaaggccatgcccggacaggccaggcaggacaaagccaggcaaggcagtggcaggccaggagaggtggcaaggcaaggccatgcaagcacatgcagggataggcaaggttaggcgaggccaggcctggccagacaaggcgaggtaaggcaaggcatggccaggccagcaaggcaaagcaaggcctggccagacaaagtaaggccatgmmcggacaggccaggcaaagcaaggccaggcaaggcagtggcaggccaggagaggtggcaaggcaaggctatgcaagcacatgcagggataggcaatgttaggcgaggccaggcctggccagacaaggcgaggtaaggcaaggcatggccaggccagcaaggcaaagcaaggcctggccagacaaagtaaggccatgcccggacaggccaggcaaagcaaggccagtccacgccagaacaggcaaggcaaggcaagtccaaacaaagataggccgggctaggaaaggccagaccaggccagg

SEQ ID NO: 59226 - DNA, 600 bp, Chicken  19866894317212_3
ctacaggccaggcaaggcaaggccaggtcatacatgggcaggccagtacacacacagccaggagaggccaggtggcgcaaggacaggagaggccagaccaggccaggcaaggcaaggccaagcaaggtccggccaggctttagcagaccacgccaggccagtccaggtcaggccaggcaatgccaggcaatgcaatgccaggacaggctaggccaggccggtctcaaacaggccaggcaatgcaatgcaatgcaatgcaaggcaatgctaggccaggccaggccaggccaggccaggccwggcaaggcaaggcaaggcaaggtacggcaagtccaggcaaaacaaggcaaggcaaggcaaggcaaggcaaggtccggccaggaaaaacaaggcaaagcaagtcaaggccaggtcaggcaaggcaaggaaagtcaatgccaggcaaggccaggcaaggaatggcttggcaaatgcaggccaggcaaggccaagcaaggaaaaagaaggcaagaccaggcatggtcaggcctgtgcaggcaatgcaaggcgaggccaggccagcccagggcaagacaggccaggccaggcaagggaagggaa

SEQ ID NO: 59227 - DNA, 600 bp, Chicken  19866894317221_1
actactggaagctacatacgggacacattttggaaccagaactgaaagcggcaaaagcaaagacaatgcagaactgaagaacggcaaacaaagcagagaacaacaaggaaggggcacagaaagacacgtattcctccttgaagatgctacccctgccccgtggcaggaacagcccaggcccatgcggtcactcaaagtgcttacaagtttttgatattttctgccactccggctgtgtactgggtgtccgtctgaaaacagaagttacacagcgttagatcactcggccccagcctgtgytgccccgtgttttagaaatcaccttgcatacaccctgggcacgctgtcagcacctccacgtcatcctcctttaacacacgtctccccatctcgcacccagcgcaatccccaccgtgacaaagcccccctctgaggcgaaccatcacacccagcccacagcaggcagtgcaggatgccgagctctgtgccctcccagctctcccagcaatgcctgcactctgcccaccccgtgcctttgcacaaagcgttaagcgccaggctgtctgcttcttgtttcagacgtgccggctttcatccaaa

SEQ ID NO: 59228 - DNA, 600 bp, Chicken  19866894317230_1
taagtgagagtgaattaagtcccttgtgcaccaaaaggtaagcatatgcctgagctaagcaggggcttaaacagctttctgaacttggtccttctcaaaagtaacatttttattttagcaggtttgagcaatacctcttcatctatatttaactaacaagagaatggcaataagagacgtgatctgactgaactgctttttatgaaagcattttaaaatatggcactttacccatagtattttcagaggatttgcagaacacagcagaaattcggaggaattgaaaactgccatctccartagaaaccagtaggtctgcaaaggcttattggtgtccttgagctgaaagcaaagaaacaaacaaacaaataaataaatgaaaatagagattgctgcactactgggttgacttccttggaaattgatgacagtgtatagttataattgttcattaatgaagatagtatcggcgtgtgttctgcttaagaggtctgatttagattcttccaaacaaactgttgtttagctaggtgacaaatgtatgtgaaatattgaactgttgtttgtttgtttgtttgtttgttttaagatgcaagttgc

SEQ ID NO: 59229 - DNA, 600 bp, Chicken  19866894317231_1
cagtgactgaaatcacttgacactgcacaagtgtacaaactacagcaaatttcctcagctttcagggcagcccgctccatttgattggcaggtcagcatagcaactgtctacctgggtggtgaagaggagcttctttctgtaccttttggaagtaccggtaccggtatgaggtaggattgtcccagacctttatgtaaaggcaaaatgtgaggaaaatgcatcaagctgagaggtctgttctgcagcacttacagaagataactttgtagttgaacgtacagatctaaagaatagaaaawtaagagtccttcaaaaatccagcttttattgctctaattgctaatatttgctctgaaaatgtttgattagtcatttgttttctgatcttgacaataggagtcaccattcactctgaaatcacaactatgactgtgtttctgcgatatttagaaacaacaatcagacaaaaaaagacaacccacaactaatagtacttgctgtaaaaccaccatcagtttcagtttctctacctttatttctttattctatccacttcaggtattttttttttttacaaggatctaagagaatttcctctc

SEQ ID NO: 59230 - DNA, 599 bp, Chicken  19866894317246_1
  misc_feature (1)..(98): n is any nucleotide
nnnnnnnnnnnnnnnnnnnnnnnnnnnnnnnnnnnnnnnnnnnnnnnnnnnnnnnnnnnnnnnnnnnnnnnnnnnnnnnnnnnnnnnnnnnnnnnnnntgatgcacatttctgacttgtttctgaattccgtgctcaggagtctgctcagtgtcctcctctgaacccctcctgttttagcgctctctgaatgctgggttttagtcatgcttcccttatcagaggagatggacttttccctgctgaatccaccgaaacaccagaatcgcaggcaattttagaacaaatcttggcgagaagmgatgggccatattcatccctgacgtcaacagccttaccccagggatccactcattttcatgagctgtgcatgaagagatgctagcagcttctcaacgtgcaaagggtgcagatgtcacagccgccacacgagcagcgctgcagctgatgatctgagccygacaccggagaaggaaacgtttggatctcatgggttaaacaggagttgcgcatcgaactccctgcctgttccttggaaaaatttaaactctagataggagagagccaagactttaacatgatctgcctgtgaagaatagc

SEQ ID NO: 59231 - DNA, 600 bp, Chicken  19866894317246_2
ctgaacccctcctgttttagcgctctctgaatgctgggttttagtcatgcttcccttatcagaggagatggacttttccctgctgaatccaccgaaacaccagaatcgcaggcaattttagaacaaatcttggcgagaagmgatgggccatattcatccctgacgtcaacagccttaccccagggatccactcattttcatgagctgtgcatgaagagatgctagcagcttctcaacgtgcaaagggtgcagatgtcacagccgccacacgagcagcgctgcagctgatgatctgagccygacaccggagaaggaaacgtttggatctcatgggttaaacaggagttgcgcatcgaactccctgcctgttccttggaaaaatttaaactctagataggagagagccaagactttaacatgatctgcctgtgaagaatagctgtccacgcttctgccaaatattaatggctgataaatccacaatgcggcaaatctgggggtatatggggtggagaccaaaagacagatccctggaaagagctctggaagaatgctccagtgcagtcatcagcttatcctggaaagacacagctgaccttg

SEQ ID NO: 59232 - DNA, 600 bp, Chicken  19866894317246_3
ccctgctgaatccaccgaaacaccagaatcgcaggcaattttagaacaaatcttggcgagaagmgatgggccatattcatccctgacgtcaacagccttaccccagggatccactcattttcatgagctgtgcatgaagagatgctagcagcttctcaacgtgcaaagggtgcagatgtcacagccgccacacgagcagcgctgcagctgatgatctgagccygacaccggagaaggaaacgtttggatctcatgggttaaacaggagttgcgcatcgaactccctgcctgttccttggyaaaatttaaactctagataggagagagccaagactttaacatgatctgcctgtgaagaatagctgtccacgcttctgccaaatattaatggctgataaatccacaatgcggcaaatctgggggtatatggggtggagaccaaaagacagatccctggaaagagctctggaagaatgctccagtgcagtcatcagcttatcctggaaagacacagctgaccttgagctaacctgctcctgcactgctcttctcagctcagctctccccctcgacacggactgccctccacctgtccagagc

SEQ ID NO: 59233 - DNA, 600 bp, Chicken  19866894317248_1
atactaaaaaaaataatttgtcaagcagaacaaaaaataaaacaaacagaaaacaaacaaacaaacaaaaaagtaacaacaaacctaaccaaaacagaaacagaaaacaacaacatagtgatctgggataggatccttagatacttctaagtacttaaatgtcacaattgtctcgtttttggcaccttttatttcacattgaaaatctatctgcctcaagacttttaggcacctttatctgctgaaaattcttaagttctaagcactcctgtgtatgctactaccatgtcattcttgttractttagtaactggtcataaggtccttccagagatttcctgatactttctgatactgctttttatggaatcctaaacatgagctatgctcattttcccaatgccttcttttgtatttttttttttgaaggaaataatcgtctctcatcgaaatactatgtataacttactgccatgagctttctttgttttcaagaagctagtctatgctgaggggaacatgcctatgacggtcagtgtgaaaactgacttctggcttctgtaatttgagggcatcactaaaagttctaaatgattgaaa

SEQ ID NO: 59234 - DNA, 600 bp, Chicken  19866894317254_1
ctgaagctctataaggtaagaatgacagaatcagcttttttattctttaatacttatgcacagagttaatgatataacactgacatctctcacacaagaagacagctctcattcctgaagagcctcctggctgattgatctgatttaccatagatcagatgtgaaccagccctaggctgaatgagaccactgttataagaatgaaaaggacttcaatgcagaaagtgaaaatatatatctatatctatatctatgtatctatctctctctctatacataatacttatatatataaaactwtggtgagaggaagagacttactaaataatacaggaatggtgggcaaatgacccacttgttgaaaaatatatttcataaacctgttggaaaagagaaaatgagcgcctctcaggggtgaattctaggtacagtaaagtatgaacacaaattagaaagaaaccaaaaactgtattagcaaaatacattcttcagccattataaacagttatttcttattgtagaaaatgaattagctctttgccaaaagtaatacaaaacatttttattttatgtcattttaaggataaaaaaaaatgataa

SEQ ID NO: 59235 - DNA, 600 bp, Chicken  19866894317256_1
acctggacttccaaatttggggaattataaaaggaacagagcatttagttgtctctgtatcatgcaatgaagagaaactgttattgttttctctcgggtattgtcaacggacattgtgagtctcacctttaaatccccttccaggtgagcaggtagaaaaaactttttcactagcaccttccttgttgtattactgaatgtagatattcgagagctggagaaaccgctagagtaagttgggaccacttaccttacgatagccttgactgcaaaacgaaccacagtggaaagcagaaacartggtgtgaccaggatgtggaacaacgacagtgatgcaaaggcctgagcaggctgcaggggctcatcattactgtatgcataagtcacgaaggtctgtcacgtcagaagaaacagcatattatgtataaactctcttgaataagatgggtaatgaaagcaaggaaatgatttgtttagataaggccattaactgtatatctctgatgtaattccagaaaattgaagggaataaaataaaatctgttaaaataaaaaagatccaaaaagtttgccagtgatttcaagtgactcaggcatttg

SEQ ID NO: 59236 - DNA, 600 bp, Chicken  19866894317259_1
gaaaggagcaaaagcagcatgcctgtgtgtgggggtgatgctctactgaggaggaagcgatttcttaagtgcactttcccttaagatgctcaaatttaattcaattttggtttcataatttaacaccttaacactacactcttttcttcagtcacatcacagtatattaattcctaaaaaggcaaaagcgcaacccacattaacactatggcttaggcaataaaatatcaacagatgccatgccatgtcacacagcgagccttctcctatttgaatgtgcaaaattcaggtgagtgaatktttaataaaaaatgaacaaagatgattacatgtaacatctatttggtttcacatgcctatagcatcttgcagcttactatggactacggcaagacagctcatagaactgaattagatgtgaggggggcaaattgcagcagaaaaagattcttgtgtaaagtcaaatggttaggaaatgacagatcataagcatattgtgcacataatctgcacatctgtcctgagagaggtcagtcacattaccattcttctccagagatttccaatgaattgctacagggaagaaaatgaaaagtgatt

SEQ ID NO: 59237 - DNA, 372 bp, Chicken  19866894317260_1
tttaagtactcctgacaagaattccaatgatacaaaagtgtccatagagagatttcccattcacagttaaaggccaaattttagctgagaaagtatccttcaacttattataatatcactaaataccattgtgctcccagggcaagtttttgttttccccaggaaaccaagaattgaacctatacatttcaaaagcttcggatcaaaattataaacttccttttgtcatctagaattgggatcatcttggttgagatctatgtgatctttaatatataaatatgtatagtatacaacaartcttgaatatctccagagaaggagaatccacaacctccttgggcagcctttttcagtgctccgtcaccctca

SEQ ID NO: 59238 - DNA, 600 bp, Chicken  19866894317270_1
agaaacgttcaaaactttttttttcctatacagatgttgatgaagcttccaaaaaagagatcaaggatatcctaatccagtacgacaggactctgctggttgcagatcctcgccgttgtgaatccaagaaatttggaggacctggtgctcgtgcacgctaccagaagtcttaccgttaaaattgttcaccagtcatgtgacagtcaataaacataaagagaatttgataaactccatgttttcaaattgcattttttttggtaggtaaatagattttcacttcagattgattcacaaatycatcaatactacagtaaaaccagatgactcttgctcttctatctctttgaagaaaatcttgatggccttttrgagycttggtaatgaagaagaaccttgtactatggatgtacatgcggttatcagaacatgaaaagtgtacatgctcttttatttgggaggggtggggatgtctggtggggtgggtacatgcaacagtttgttgaagcagacagactttttttgtatgtccaagcaaatggacctttacagggagctgagtgattctggtgttactgacagagatgatccatgttttct

SEQ ID NO: 59239 - DNA, 600 bp, Chicken  19866894317270_2
taatccagtacgacaggactctgctggttgcagatcctcgccgttgtgaatccaagaaatttggaggacctggtgctcgtgcacgctaccagaagtcttaccgttaaaattgttcaccagtcatgtgacagtcaataaacataaagagaatttgataaactccatgttttcaaattgcattttttttggtaggtaaatagattttcacttcagattgattcacaaatycatcaatactacagtaaaaccagatgactcttgctcttctatctctttgaagaaaatcttgatggccttttrgagycttggtaatgaagaagaaccttgtactatggatgtacatgcggttatcagaacatgaaaagtgtacatgctcttttatttgggaggggtggggatgtctggtggggtgggtacatgcaacagtttgttgaagcagacagactttttttgtatgtccaagcaaatggacctttacagggagctgagtgattctggtgttactgacagagatgatccatgttttctctgcatgaaaatgtcaaagccttgatgctgacttggtctgtgatgtgtaggagaggatctggctcctagctg

SEQ ID NO: 59240 - DNA, 600 bp, Chicken  19866894317270_3
ccagtacgacaggactctgctggttgcagatcctcgccgttgtgaatccaagaaatttggaggacctggtgctcgtgcacgctaccagaagtcttaccgttaaaattgttcaccagtcatgtgacagtcaataaacataaagagaatttgataaactccatgttttcaaattgcattttttttggtaggtaaatagattttcacttcagattgattcacaaatycatcaatactacagtaaaaccagatgactcttgctcttctatctctttgaagaaaatcttgatggccttttrgagycttggtaatgaagaagaaccttgtactatggatgtacatgcggttatcagaacatgaaaagtgtacatgctcttttatttgggaggggtggggatgtctggtggggtgggtacatgcaacagtttgttgaagcagacagactttttttgtatgtccaagcaaatggacctttacagggagctgagtgattctggtgttactgacagagatgatccatgttttctctgcatgaaaatgtcaaagccttgatgctgacttggtctgtgatgtgtaggagaggatctggctcctagctggtaa

SEQ ID NO: 59241 - DNA, 600 bp, Chicken  19866894317271_1
tacagatgtatgaatgttcctatgtcaataacttataaagagaaagaacgtggtagatggggcagacagaacttaggcacagttacagtttgaagacatgcaaagaagtcactgacatgccttgattatgtgcccagaacaggtcctgataagtgaaaactgaatttaaaaaaggatctcataattgaacatatgtttttgcaactgattctaaattttcactcagaaagtgaggtgttctaaaattaaatggcataattgtgttaaaagcaaagtatcacttttggcacagttcttaawggggaacaaaagaaatcgaatctgtagctccaagcctccttgtgtcagtaattgttccctgactgtaaactcagtctcagttgaagggactgtaatttgcatgtcagccctgtattttgtcagaattgctgtgtatttgttctcagaagtggaatcctttttggagtgtagccggtgtgtcctcactgcagcctgagcataccttgtcaatctgaataaatggtacggtgtaccaaaagtataggctgtcgttaatgtatggcagcttgaaatatctaccatttaaatttcagttagata

SEQ ID NO: 59242 - DNA, 599 bp, Chicken  19866894317285_1
  misc_feature (1)..(38): n is any nucleotide
nnnnnnnnnnnnnnnnnnnnnnnnnnnnnnnnnnnnnnaattaatgaaaatgtgaagaatgtggaggtgaagataaatagttcaagtcacactaataaggatcacgtcatgatattcacatacaaagcaaaaaaagcaaataaaaatggcaaacatgaaaactgagagcaaatgtgacctggtgctaaaggagaggtttcgctcaaaggttacttcattttaatctttattctgtcagttaactgccatggatcaaaccacagattttaactttttctgcatcagttttccaaagtgatwataaatagaaaaagaaaatgcttattcacctatcctcttgctcagtgctctacctaaaggctgaaacaggttgcatgtacttataagatcagatgttaaattttgtctccatttgagttcattgccaaagctctgactaatttttctatcagtttaagtctcctacattccaaaagcaaaacgacagctagcaccaccacctgcatcttattcttcttattttctttgtttgttttacatcattggacacattatgtgattgcaagctatacatttaggtgaagctgtaagttaaagcc

SEQ ID NO: 59243 - DNA, 600 bp, Chicken  19866894317287_1
atgatcttagtggtacttacagacgggtgggatccaaatgcgttctgaagtctggtgctgaatgcctttaatctgtagcaaaggggaaattcagcacgatgtgaaagaatgtaaatgttagtaacaagaatgagtgctgtttctgtaacttagactgaaaattacttctttagaaataagtgttttattcctagtccaaaatgctgaaatcagtgccactaaaaataataacaaaaaagacactttctgaagtcattggcccgtgtggtggcagtgcttcctctgacttcagtgctcctkaagacctggggggggggcgagtcaagcttgactgcttgttcagtgtctgtgctggcacccagggcagcaccagctctgcagaggtctgccacccactggcatcctttgctttttgaggatgatgggcacaggctgcttttggcaaagtcaggactggcatactatggatgcgtgctacttgagtgcggtcatacctgtctgtaagctggctttttccctcccaragaacctagattagatgctaacttgctgcaatgtggatgacccacagtcttgattcaacaagaatgtgcagcaatg

SEQ ID NO: 59244 - DNA, 600 bp, Chicken  19866894317287_2
ataataacaaaaaagacactttctgaagtcattggcccgtgtggtggcagtgcttcctctgacttcagtgctcctkaagacctggggggggggcgagtcaagcttgactgcttgttcagtgtctgtgctggcacccagggcagcaccagctctgcagaggtctgccacccactggcatcctttgctttttgaggatgatgggcacaggctgcttttggcaaagtcaggactggcatactatggatgcgtgctacttgagtgcggtcatacctgtctgtaagctggctttttccctcccaragaacctagattagatgctaacttgctgcaatgtggatgacccacagtcttgattcaacaagaatgtgcagcaatgagatacatgtttgttttataagagtatgccaggagtcagctattgccaatagctattgctgccataaggatttaactttcagtttgcttgtcctttcctaggtgggaaagctgctgctctgatttgcccttgtctccgttccaggcaataaagatgcttgctttttgttaagctgacttagcagttccaattttcttttgttttttgaggcaaatctctactag

SEQ ID NO: 59245 - DNA, 600 bp, Chicken  19866894317298_1
tatgtcaggatgaatacatataatcttcctcagggacgctcaggcaaatggaacaacaccaggcaagggtttggaacacataacatccagatttgcagccgtgttgcactggtctggtgcaaagggagagcagagcaaagagaggccacaaggaatgaagccttgggacaaagcagagcccagggactgctgcacagctctgaggaacagcatccagagctccctcaaacagggagcagcctggcagctgccaagaaaagcaattattttgcacagacatggggtcctcatggaggagarcctgggagcagcacgggtgcaggcacaggaagcagccatgtcctggtgctgcagctgggagaagacgtgatgggagccctccctgaaggattggtcttaattctgagcacctctgctgctttatttggggagargaaacagggagaaagggaacttaaactcctgaacgaaaaccaacaccctagcagcttgccaatggtccaggcagacattcagactcgttgctctgcctcacgtcggtgggcaatgttttatttctagggagctgaacgtagctgcacaagagacatctgagagatg

SEQ ID NO: 59246 - DNA, 600 bp, Chicken  19866894317298_2
gcaaagagaggccacaaggaatgaagccttgggacaaagcagagcccagggactgctgcacagctctgaggaacagcatccagagctccctcaaacagggagcagcctggcagctgccaagaaaagcaattattttgcacagacatggggtcctcatggaggagarcctgggagcagcacgggtgcaggcacaggaagcagccatgtcctggtgctgcagctgggagaagacgtgatgggagccctccctgaaggattggtcttaattctgagcacctctgctgctttatttggggagargaaacagggagaaagggaacttaaactcctgaacgaaaaccaacaccctagcagcttgccaatggtccaggcagacattcagactcgttgctctgcctcacgtcggtgggcaatgttttatttctagggagctgaacgtagctgcacaagagacatctgagagatgtggcctgatgcagcaaagcacttcaaactgcactgaagtgttttcttacagcaatgacttccatagctattctgcttccacttatgtcaaaaagcattttgcaatcaagctcgatgggggaagaactgagccca

SEQ ID NO: 59247 - DNA, 600 bp, Chicken  19866894317320_1
agactacatgatcattggggtccttttcaacccaggccattctatgattctatgatttctaccctagagtcaaaaagctgtatcaacaccacagtgttcagagagaacgagacaacagcgtgtgagtagatgatgcatcttctttgcctgattggactgtagcaggggagttatgaagataattacaggtgctgcaaagtgcaagtgtggtacaaacttagtgttggtttgcatatctgtgttaatcaggagtgtcttacaaaaagtgcagtagcaagtacacaagtttgtgtggccctsagcttgtaatgcttttgctaagcacatgacacctgctgtgcttatgttcagttgctgcctgatagtcatcgcattgctatccaaaaataattaattactaaacatggcaaagttgtgtccgagctgagatcaaacacaggggtagtttatatctcagtttataatctagcattttaatgctccacagaagcattccgctgctgaactgccctgagttagaaaacaaagacctgagtcttccaatccattgaggatttgcagcagtgagagagaaacgaaaagcatttgagtatactgttt

SEQ ID NO: 59248 - DNA, 599 bp, Chicken  19866894317323_1
  misc_feature (1)..(103): n is any nucleotide
nnnnnnnnnnnnnnnnnnnnnnnnnnnnnnnnnnnnnnnnnnnnnnnnnnnnnnnnnnnnnnnnnnnnnnnnnnnnnnnnnnnnnnnnnnnnnnnnnnnnnnngagtacacaatgatacaaaagctattaaaatgtattaaaaagtcaaattccaaattaatagtctcagattatgtttcacagtgcaagcaagggccggccatgtttttccaccatcagaaatatgctcaacagtaccttgggaattaccatttccttacagaaattttacttgtttgaaaaagaaaaaaacagtacayccttttaataaaaataagataattcctaagccaacatcactgtcagaaaagtgtgcagtacttacacaaagtgagaaagtgccttgcgtgaatttatacagcagtgaaagctgaatagcttaaggattttgatgcatgtatgtcaaactctgaaattctgtcaaatgcataccaagtctacactgacttcagaggacataatttgtgtttgttgtaaagtgctttgaaattatgcatgagtgagaaaaacagctctggttatattrcagaaaggaaaggatttactgaacttgtggatt

SEQ ID NO: 59249 - DNA, 600 bp, Chicken  19866894317323_2
ttttacttgtttgaaaaagaaaaaaacagtacayccttttaataaaaataagataattcctaagccaacatcactgtcagaaaagtgtgcagtacttacacaaagtgagaaagtgccttgcgtgaatttatacagcagtgaaagctgaatagcttaaggattttgatgcatgtatgtcaaactctgaaattctgtcaaatgcataccaagtctacactgacttcagaggacataatttgtgtttgttgtaaagtgctttgaaattatgcatgagtgagaaaaacagctctggttatattrcagaaaggaaaggatttactgaacttgtggattgttaatgcttttaaaatgctgaaggcttcttcttagtgactgttaaaataaacacaactttttgaggtgtaccaaataacaaagtacttgataggaagaatacaaatcacggatttggttatttattatctaattaacaactttttgccttatcacttccattcagtagtttgcagccccctgcagatgtatgttactggtgtcctttccattcatttttcttctccgaggtataagacttcccacaaagaaacagcaacaagtata

SEQ ID NO: 59250 - DNA, 600 bp, Chicken  19866894317328_1
agtagtttaattccgtaaccacaggtatacaagagatgagcactgaattcttacatgaaatttcatagttatgaagctataatatatacctaattatacatagaggaacatgaaaagcattctaaaatgtaagcaagagtctgttttcatgtacatatatgacatgaatacaaatcaaaagaacaactcagctcaattttaagtaaaatcatcttttgaagtctactgatgttgaaaaattatttttgcatgacttaaaacagtagaccacaattctttttttcctttctgatgtaccastgtacattactcttcctctttaggaagagggatggcaatcagtgaactcctaatgctttctaaatcttgctatcatcatttcaagaaaaaatgcaatacacaaaacttrtaaggttagcatgggaatatgcctcaagacatacgctctgttgagatcacagtataacattttctcacacagaattacacttcaaaaatattttttccagagcagacattctatcagtagaccttagcactccgcaaaaagccagatacagagtcctaatgtcacttaaatgcagcagttaacaggtgrag

SEQ ID NO: 59251 - DNA, 600 bp, Chicken  19866894317328_2
atgaaaagcattctaaaatgtaagcaagagtctgttttcatgtacatatatgacatgaatacaaatcaaaagaacaactcagctcaattttaagtaaaatcatcttttgaagtctactgatgttgaaaaattatttttgcatgacttaaaacagtagaccacaattctttttttcctttctgatgtaccastgtacattactcttcctctttaggaagagggatggcaatcagtgaactcctaatgctttctaaatcttgctatcatcatttcaagaaaaaatgcaatacacaaaacttrtaaggttagcatgggaatatgcctcaagacatacgctctgttgagatcacagtataacattttctcacacagaattacacttcaaaaatattttttccagagcagacattctatcagtagaccttagcactccgcaaaaagccagatacagagtcctaatgtcacttaaatgcagcagttaacaggtgragagtgcacatctagatatytgcaattcagacaaaatacttacgaatagacatcattgtcaacaattataccttctgttaggtgaggccatgtggtggctagatggagctc

SEQ ID NO: 59252 - DNA, 600 bp, Chicken  19866894317328_3
astgtacattactcttcctctttaggaagagggatggcaatcagtgaactcctaatgctttctaaatcttgctatcatcatttcaagaaaaaatgcaatacacaaaacttrtaaggttagcatgggaatatgcctcaagacatacgctctgttgagatcacagtataacattttctcacacagaattacacttcaaaaatattttttccagagcagacattctatcagtagaccttagcactccgcaaaaagccagatacagagtcctaatgtcacttaaatgcagcagttaacaggtgragagtgcacatctagatatytgcaattcagacaaaatacttacgaatagacatcattgtcaacaattataccttctgttaggtgaggccatgtggtggctagatggagctcactgaaacagaacaggatacaggtgtctatcaaacttaagatcttgacttacatgactgtttatatttaaatcaaattatatatttataatatatttataacttgtatttaaataaataaaaaaataaaacaaaacaaaaaacaccaaaaagcagggtttttgagcttctatcttacctaataggatct

SEQ ID NO: 59253 - DNA, 600 bp, Chicken  19866894317328_4
tttaggaagagggatggcaatcagtgaactcctaatgctttctaaatcttgctatcatcatttcaagaaaaaatgcaatacacaaaacttrtaaggttagcatgggaatatgcctcaagacatacgctctgttgagatcacagtataacattttctcacacagaattacacttcaaaaatattttttccagagcagacattctatcagtagaccttagcactccgcaaaaagccagatacagagtcctaatgtcacttaaatgcagcagttaacaggtgragagtgcacatctagatatytgcaattcagacaaaatacttacgaatagacatcattgtcaacaattataccttctgttaggtgaggccatgtggtggctagatggagctcactgaaacagaacaggatacaggtgtctatcaaacttaagatcttgacttacatgactgtttatatttaaatcaaattatatatttataatatatttataacttgtatttaaataaataaaaaaataaaacaaaacaaaaaacaccaaaaagcagggtttttgagcttctatcttacctaataggatcttcacaggcaccaaatgggaa

SEQ ID NO: 59254 - DNA, 600 bp, Chicken  19866894317330_1
acgttgccaaaatggagtcctggcgatcaagccatacagccattcaggttccaattaaaagcaaaccgagcccagtatctggtactgaccagtaatgagttttaagagaacaaactaaagaagtatcaatgtatgcatatcttgtgacttgaattttagaactgtgttctgtactatggggaaaagacatcttactgattgttttttatcttgctatatacatttttcattggatgtcccttatattttttttgtgaggctcaatgagaagccattctctgttcgctttctcctttgacrctgccactgtttttggtcataaaccatcttcctttatcctctcacrttccttttctatattcctgcaggcaaaagagtatctataagacagtgaccttatcagtgtatttggctttttaaggccttctctgtagaacagctcatccctcttcaggccagcatcgttttgccaagcagcactgatagattatttcagactcaatctttttcctacgaaatctatattgaaacatctcaaacttttcatatttattcttttattctgtatttattttatctgagttcctttttacttctagc

SEQ ID NO: 59255 - DNA, 600 bp, Chicken  19866894317330_2
ggttccaattaaaagcaaaccgagcccagtatctggtactgaccagtaatgagttttaagagaacaaactaaagaagtatcaatgtatgcatatcttgtgacttgaattttagaactgtgttctgtactatggggaaaagacatcttactgattgttttttatcttgctatatacatttttcattggatgtcccttatattttttttgtgaggctcaatgagaagccattctctgttcgctttctcctttgacrctgccactgtttttggtcataaaccatcttcctttatcctctcacrttccttttctatattcctgcaggcaaaagagtatctataagacagtgaccttatcagtgtatttggctttttaaggccttctctgtagaacagctcatccctcttcaggccagcatcgttttgccaagcagcactgatagattatttcagactcaatctttttcctacgaaatctatattgaaacatctcaaacttttcatatttattcttttattctgtatttattttatctgagttcctttttacttctagcaaaagatgtttccaatttgtatcttcaaggattttccaaaagatga

SEQ ID NO: 59256 - DNA, 600 bp, Chicken  19866894317336_1
cacaaaaatgtgactgcttttaaaactgaaaatcttcaaagcaggcatctccttgtgaggaaatcctcagagaggcattcttctggagtgagaatcaccaacatgaaatctcttaacctatatgaaagctttgaaaactataacccattcctaaaattaaaggcagtatttccttgatagaatatagaatgttattaaagggggaaatgacttcatcgttgctaactacagaggtagttaacccttacttctttaacgaaaaggaattaagatcattaaaccttttaacataatgacaawgttacgaaactacattatttgaatatttcaaacaaaagtattggcagttgtgtactctttcatcactggacaggtagtgtcaaagacatcrcagacttgaaaatagcttcttcatttttaaaaatggcagcaagggwgtccatggattagagcccacaggcaatgtttgtgtgagttgtattcctaagcagtaacacagaattcttaaaaataatacttttcccagtaaaaaaaatatgcaggtactcagtacctttcccagttgagaatagagtggttttccatgaaggaaatacattt

SEQ ID NO: 59257 - DNA, 600 bp, Chicken  19866894317336_2
gaatcaccaacatgaaatctcttaacctatatgaaagctttgaaaactataacccattcctaaaattaaaggcagtatttccttgatagaatatagaatgttattaaagggggaaatgacttcatcgttgctaactacagaggtagttaacccttacttctttaacgaaaaggaattaagatcattaaaccttttaacataatgacaawgttacgaaactacattatttgaatatttcaaacaaaagtattggcagttgtgtactctttcatcactggacaggtagtgtcaaagacatcrcagacttgaaaatagcttcttcatttttaaaaatggcagcaagggwgtccatggattagagcccacaggcaatgtttgtgtgagttgtattcctaagcagtaacacagaattcttaaaaataatacttttcccagtaaaaaaaatatgcaggtactcagtacctttcccagttgagaatagagtggttttccatgaaggaaatacatttccattttctttttttttttggctacaggagcccattaaatcatttctgcttaaaagctttacattgaaattatgtagaagcacagatgtca

SEQ ID NO: 59258 - DNA, 600 bp, Chicken  19866894317336_3
ctataacccattcctaaaattaaaggcagtatttccttgatagaatatagaatgttattaaagggggaaatgacttcatcgttgctaactacagaggtagttaacccttacttctttaacgaaaaggaattaagatcattaaaccttttaacataatgacaawgttacgaaactacattatttgaatatttcaaacaaaagtattggcagttgtgtactctttcatcactggacaggtagtgtcaaagacatcrcagacttgaaaatagcttcttcatttttaaaaatggcagcaagggwgtccatggattagagcccacaggcaatgtttgtgtgagttgtattcctaagcagtaacacagaattcttaaaaataatacttttcccagtaaaaaaaatatgcaggtactcagtacctttcccagttgagaatagagtggttttccatgaaggaaatacatttccattttctttttttttttggctacaggagcccattaaatcatttctgcttaaaagctttacattgaaattatgtagaagcacagatgtcacaacagatcaagttaagtatctaatcctgatataggttataaaggc

SEQ ID NO: 59259 - DNA, 599 bp, Chicken  19866894317340_1
  misc_feature (1)..(202): n is any nucleotide
nnnnnnnnnnnnnnnnnnnnnnnnnnnnnnnnnnnnnnnnnnnnnnnnnnnnnnnnnnnnnnnnnnnnnnnnnnnnnnnnnnnnnnnnnnnnnnnnnnnnnnnnnnnnnnnnnnnnnnnnnnnnnnnnnnnnnnnnnnnnnnnnnnnnnnnnnnnnnnnnnnnnnnnnnnnnnnnnnnnnnnnnnnnnnnnnnnnnnnnnnnttaaatatccttatctgaggaagtacagagaactaatcctctctttgatctctgacagatgccaataccagcagaaaatctgaagtgggatgcacatkaaagaaaatccctcttgagaaaagtgttataactagcccaggcaagcgtgccaggtgcagawgcccattgtaaagacttgaagaactaaatggatgttaagaaatggatgcaaggaaagtaatgttagccatcttaatacggatgatcccctcaagaaattaaagaaaacaacttttttttctcccctaacagaaaagagamgactttcaatgaataacgatccagatgttcagacttgctgtcaaaaatgagtgcatcaaaatgtgatctcactcctcagagcagtaacagaaagtta

SEQ ID NO: 59260 - DNA, 599 bp, Chicken  19866894317340_2
  misc_feature (1)..(140): n is any nucleotide
nnnnnnnnnnnnnnnnnnnnnnnnnnnnnnnnnnnnnnnnnnnnnnnnnnnnnnnnnnnnnnnnnnnnnnnnnnnnnnnnnnnnnnnnnnnnnnnnnnnnnnnnnnnnnnnnnnnnnnnnnnnnnnnnnnnnnnnnnnnnttaaatatccttatctgaggaagtacagagaactaatcctctctttgatctctgacagatgccaataccagcagaaaatctgaagtgggatgcacatkaaagaaaatccctcttgagaaaagtgttataactagcccaggcaagcgtgccaggtgcagawgcccattgtaaagacttgaagaactaaatggatgttaagaaatggatgcaaggaaagtaatgttagccatcttaatacggatgatcccctcaagaaattaaagaaaacaacttttttttctcccctaacagaaaagagamgactttcaatgaataacgatccagatgttcagacttgctgtcaaaaatgagtgcatcaaaatgtgatctcactcctcagagcagtaacagaaagttactctcattatttctaacaaatagcttcaataacttgatatctcgaagaaagatatcctaaga

SEQ ID NO: 59261 - DNA, 600 bp, Chicken  19866894317340_3
ttaaatatccttatctgaggaagtacagagaactaatcctctctttgatctctgacagatgccaataccagcagaaaatctgaagtgggatgcacatkaaagaaaatccctcttgagaaaagtgttataactagcccaggcaagcgtgccaggtgcagawgcccattgtaaagacttgaagaactaaatggatgttaagaaatggatgcaaggaaagtaatgttagccatcttaatacggatgatcccctcaagaaattaaagaaaacaacttttttttctcccctaacagaaaagagamgactttcaatgaataacgatccagatgttcagacttgctgtcaaaaatgagtgcatcaaaatgtgatctcactcctcagagcagtaacagaaagttactctcattatttctaacaaatagcttcaataacttgatatctcgaagaaagatatcctaagatgcaggaatgttgattacaggaataaataaatatatgaagaatacatttgggcaagaactcctattcctatgttattcttccctgctgaaaatgctgtctgtttttaccaagatcttgaaataagccaccactgaacttga

SEQ ID NO: 59262 - DNA, 600 bp, Chicken  19866894317340_4
ttcagacttgctgtcaaaaatgagtgcatcaaaatgtgatctcactcctcagagcagtaacagaaagttactctcattatttctaacaaatagcttcaataacttgatatctcgaagaaagatatcctaagatgcaggaatgttgattacaggaataaataaatatatgaagaatacatttgggcaagaactcctattcctatgttattcttccctgctgaaaatgctgtctgtttttaccaagatcttgaaataagccaccactgaacttgaatttgaatattctcattgaaaacattrtgmtgagaatacttgtgcctaaatagacacactgaaatggaatattaagtatgtacaaacagaagtccacattagttaaaatttttttatgacaawttttttgccattaaattgttagatctgatatgaattaatgtgattatgagcaccatgacagctgaaaagtttwaaaaaagtcctaagactggccaacctatatttgctgtgattatgagttatgaagtaacttgggctttatgtcatgttagaatgcagtatttctgagctacaaatcttggctgactcctaatggaagatgct

SEQ ID NO: 59263 - DNA, 600 bp, Chicken  19866894317340_5
agacttgctgtcaaaaatgagtgcatcaaaatgtgatctcactcctcagagcagtaacagaaagttactctcattatttctaacaaatagcttcaataacttgatatctcgaagaaagatatcctaagatgcaggaatgttgattacaggaataaataaatatatgaagaatacatttgggcaagaactcctattcctatgttattcttccctgctgaaaatgctgtctgtttttaccaagatcttgaaataagccaccactgaacttgaatttgaatattctcattgaaaacattrtgmtgagaatacttgtgcctaaatagacacactgaaatggaatattaagtatgtacaaacagaagtccacattagttaaaatttttttatgacaawttttttgccattaaattgttagatctgatatgaattaatgtgattatgagcaccatgacagctgaaaagtttwaaaaaagtcctaagactggccaacctatatttgctgtgattatgagttatgaagtaacttgggctttatgtcatgttagaatgcagtatttctgagctacaaatcttggctgactcctaatggaagatgctaca

SEQ ID NO: 59264 - DNA, 600 bp, Chicken  19866894317340_6
caataacttgatatctcgaagaaagatatcctaagatgcaggaatgttgattacaggaataaataaatatatgaagaatacatttgggcaagaactcctattcctatgttattcttccctgctgaaaatgctgtctgtttttaccaagatcttgaaataagccaccactgaacttgaatttgaatattctcattgaaaacattrtgmtgagaatacttgtgcctaaatagacacactgaaatggaatattaagtatgtacaaacagaagtccacattagttaaaatttttttatgacaawttttttgccattaaattgttagatctgatatgaattaatgtgattatgagcaccatgacagctgaaaagtttwaaaaaagtcctaagactggccaacctatatttgctgtgattatgagttatgaagtaacttgggctttatgtcatgttagaatgcagtatttctgagctacaaatcttggctgactcctaatggaagatgctacagaaagcttaacaaacattaagaggaagatcaacattgtcagacaacacactgcagttgtttagtgaatttcatccatgaagcatctttatgta

SEQ ID NO: 59265 - DNA, 570 bp, Chicken  19866894317340_7
aagaatacatttgggcaagaactcctattcctatgttattcttccctgctgaaaatgctgtctgtttttaccaagatcttgaaataagccaccactgaacttgaatttgaatattctcattgaaaacattrtgmtgagaatacttgtgcctaaatagacacactgaaatggaatattaagtatgtacaaacagaagtccacattagttaaaatttttttatgacaawttttttgccattaaattgttagatctgatatgaattaatgtgattatgagcaccatgacagctgaaaagtttwaaaaaagtcctaagactggccaacctatatttgctgtgattatgagttatgaagtaacttgggctttatgtcatgttagaatgcagtatttctgagctacaaatcttggctgactcctaatggaagatgctacagaaagcttaacaaacattaagaggaagatcaacattgtcagacaacacactgcagttgtttagtgaatttcatccatgaagcatctttatgtacagcagctaagccattcaagatgaggatagagattcaagggaa

SEQ ID NO: 59266 - DNA, 589 bp, Chicken  19866894317345_1
tcagttttgcaatgggagctactggcaccaactttaatgcattgccaaatcctccccgacttccagtaggacaaggctttttccattgagccaaacgagtgcaattataaacacccatacgtgagagctttctaatttgttttcttttccacttctcatccttcattactgccctcaaaatgtcagaacagaaagtaagaacttaaaagaaatcaccacctgcaaccaccacagcaacactgaactattttgggagccaggcttctcccaaaatatgtttatgaggagcatgctccacaygctgggaagatgcaaatattcccaggctttgggctgcatcatttcaagctcttacataaaactgggcagtactctgagatttcctagagattacagccatcaccctggcattggaacactacccagtagcacaccgacctttatgtttccaacacaaaattccaggttacattccttccccaagccctgctggcacactctgcagcacacaccgtacctcccawacagcactgagctccacaaacagctttttcactggcgctaggcctccgctccagtttggtcacag

SEQ ID NO: 59267 - DNA, 365 bp, Chicken  19866894317345_2
accaccacagcaacactgaactattttgggagccaggcttctcccaaaatatgtttatgaggagcatgctccacaygctgggaagatgcaaatattcccaggctttgggctgcatcatttcaagctcttacataaaactgggcagtactctgagatttcctagagattacagccatcaccctggcattggaacactacccagtagcacaccgacctttatgtttccaacacaaaattccaggttacattccttccccaagccctgctggcacactctgcagcacacaccgtacctcccawacagcactgagctccacaaacagctttttcactggcgctaggcctccgctccagtttggtcacag

SEQ ID NO: 59268 - DNA, 600 bp, Chicken  19866894317355_1
gtaaacaaactcattttccctaatgtatccttcatggcaaatggaagtatgcctaatattgcccaggaaaaggtgcaagacagaaggtaattctgcatcatttgttatagtaaatggtttatacaaaataaatgcttaagactttattcatctcccctttatgacatttacccaacctttagctcgctctgagatttaacagaagttacatcattctgtgtattaccatgtcttaacagaataattttattcaggaataaaatccagaatatttctctaccatgtatacaaaaactacaragtagaactaggatgcacccaataatattttaaggtatttatttggcctatcaaaatcattcaagtgttacaagctttgtcgtcctttacacaaggctgctataagatatatgccaatacaaaagttatkttcctaattaatcagacacttccagccatacacttcagttttatttttccctactgtgctgcatttaaaactgtactcaatagactataaaatagtatattgtaacatcctctataacttatgctagtcycaaaacttctacaggataagtgataaaagaaaatatgatt

SEQ ID NO: 59269 - DNA, 600 bp, Chicken  19866894317355_2
aatgcttaagactttattcatctcccctttatgacatttacccaacctttagctcgctctgagatttaacagaagttacatcattctgtgtattaccatgtcttaacagaataattttattcaggaataaaatccagaatatttctctaccatgtatacaaaaactacaragtagaactaggatgcacccaataatattttaaggtatttatttggcctatcaaaatcattcaagtgttacaagctttgtcgtcctttacacaaggctgctataagatatatgccaatacaaaagttatkttcctaattaatcagacacttccagccatacacttcagttttatttttccctactgtgctgcatttaaaactgtactcaatagactataaaatagtatattgtaacatcctctataacttatgctagtcycaaaacttctacaggataagtgataaaagaaaatatgatttagaaacacaaaaaatattgcagaaacttatattccattgcaatagtactgcaatgaagtatttaaattctcagtcatccaaatctgtttctttagtatacagcagcccgatgtatgaacttcacttcaa

SEQ ID NO: 59270 - DNA, 600 bp, Chicken  19866894317355_3
aatccagaatatttctctaccatgtatacaaaaactacaragtagaactaggatgcacccaataatattttaaggtatttatttggcctatcaaaatcattcaagtgttacaagctttgtcgtcctttacacaaggctgctataagatatatgccaatacaaaagttatkttcctaattaatcagacacttccagccatacacttcagttttatttttccctactgtgctgcatttaaaactgtactcaatagactataaaatagtatattgtaacatcctctataacttatgctagtcycaaaacttctacaggataagtgataaaagaaaatatgatttagaaacacaaaaaatattgcagaaacttatattccattgcaatagtactgcaatgaagtatttaaattctcagtcatccaaatctgtttctttagtatacagcagcccgatgtatgaacttcacttcaatgcaaatgctttgaaaaaagaaaacaacttcacaaaatgttttttagagtcaccaagtttggaaaactggaaaagaccttcaagatcatccagttaaatcatccacctatccccaatatttccccactaa

SEQ ID NO: 59271 - DNA, 600 bp, Chicken  19866894317356_1
agttcatgcggtaagacagttaaattggaatttaatgagaacttttcctcctgaacacagtaaaggatctttcagcttggtatacagcgtgacaaaatagctatgttaacaggttaaaggtagcagtgcatttctaggaacaccccccaacttcaaactctaggatgcattttcttaataggactcccagctagtcaaggcctcgtttagctttggaggaagaacagattgctctgctcagttgaaatcactgaacacctgaagtctaagactgaacagcatgccaccaggcctgcattytgtggtgggttttgtttttaaacattttaaacattcaaagcccagtgtgtgctcctgggccgaacacgagttcaagcaagcctaacaaacacttcaagccctgcactgcaattcatttagttatctcaaaggcaaaaacagccagctaagttcaaccttccaaaaacacaccaacgcacgtgaggaagtaaataccgggcacagaaatgggcctgaaaagttaactttttaaatattcaatgcattaaaatagataagcaaccttctctcactcgctgctattcctccgttagactctag

SEQ ID NO: 59272 - DNA, 600 bp, Chicken  19866894317356_2
caattcatttagttatctcaaaggcaaaaacagccagctaagttcaaccttccaaaaacacaccaacgcacgtgaggaagtaaataccgggcacagaaatgggcctgaaaagttaactttttaaatattcaatgcattaaaatagataagcaaccttctctcactcgctgctattcctccgttagactctaggtaacgctttgcgtttctcttctctttcttctcctgaaatgagaagtaacattaagggcagaattaaagcaaacagttgtggcagttttacaaatgcttctatccacygatttttctgcaggtggaataatttagggatggagctcttagaaatataaacttagtgggttttgttacctattttccatctctttccatacttgatctaaaaccacccacgtcctttcttccatgccttaactattcccctttttgtttaattcctgagctgaaaccagtttcttcgaacagttttgcacactctgtgccttacaccaccctcacataacttgcatcctgtaacrtgttggggtaatgtgaccccatgcactccactgaggttggctgagaagggagcagtgtgcgagc

SEQ ID NO: 59273 - DNA, 600 bp, Chicken  19866894317356_3
agtaacattaagggcagaattaaagcaaacagttgtggcagttttacaaatgcttctatccacygatttttctgcaggtggaataatttagggatggagctcttagaaatataaacttagtgggttttgttacctattttccatctctttccatacttgatctaaaaccacccacgtcctttcttccatgccttaactattcccctttttgtttaattcctgagctgaaaccagtttcttcgaacagttttgcacactctgtgccttacaccaccctcacataacttgcatcctgtaacrtgttggggtaatgtgaccccatgcactccactgaggttggctgagaagggagcagtgtgcgagctctggctcagccagccctgagcatatacatttataaaggaaacggtggcagagatggagtgtttcttcctttatataaagcagtcacaatttgaaacagattcctagtatagcagcaaagaactgcttataaaaaacaaaggcagtcctcctgggcctctgaggatccctaagattgccttcctaaagcacagaaagagttcctgtcattaaaataaaacaatgtacccaatcatg

SEQ ID NO: 59274 - DNA, 600 bp, Chicken  19866894317358_1
taaaggacaggtacaactgcttaaaagccaaaatgtttgaggatctcttcagaaccagcattctgaatagctgtgttgagccaaacagttaaatacagcagtgtcagtcgctctacttttaaaaatgttttcactgtttttggtagatgagcaggaaggagatttggattccgtgttagggatcatgaaagatttcccatataaccatagaaagacccttaaggcacattttaaggctctaatttttttttcagttgcctccactgtggcaacctaatccaataaactgaatctggaaasaaaggacaaaaactgtttaatgattttgaatgccttgactttaatttccttgtgctatagtttytccagctatgatctctgttcttcctagagttggcctacaactaatgtaaccaamttttagaaagaagctgggccatcactaaaactataaatctgtgtttggaaccatgaagactggagtacatctcattgttttgctgttgctgcagtatttttggtgtcgctactaatgcatttctgtctactgagttctaaaattatttcaccaacatcctgtgttatctattatggggtggg

SEQ ID NO: 59275 - DNA, 600 bp, Chicken  19866894317358_2
gaatagctgtgttgagccaaacagttaaatacagcagtgtcagtcgctctacttttaaaaatgttttcactgtttttggtagatgagcaggaaggagatttggattccgtgttagggatcatgaaagatttcccatataaccatagaaagacccttaaggcacattttaaggctctaatttttttttcagttgcctccactgtggcaacctaatccaataaactgaatctggaaasaaaggacaaaaactgtttaatgattttgaatgccttgactttaatttccttgtgctatagtttytccagctatgatctctgttcttcctagagttggcctacaactaatgtaaccaamttttagaaagaagctgggccatcactaaaactataaatctgtgtttggaaccatgaagactggagtacatctcattgttttgctgttgctgcagtatttttggtgtcgctactaatgcatttctgtctactgagttctaaaattatttcaccaacatcctgtgttatctattatggggtgggtgaaacttttcatgcacattgatgaaataatattcatctaaaactgaatctgagccaactctga

SEQ ID NO: 59276 - DNA, 600 bp, Chicken  19866894317358_3
ttaaaaatgttttcactgtttttggtagatgagcaggaaggagatttggattccgtgttagggatcatgaaagatttcccatataaccatagaaagacccttaaggcacattttaaggctctaatttttttttcagttgcctccactgtggcaacctaatccaataaactgaatctggaaasaaaggacaaaaactgtttaatgattttgaatgccttgactttaatttccttgtgctatagtttytccagctatgatctctgttcttcctagagttggcctacaactaatgtaaccaamttttagaaagaagctgggccatcactaaaactataaatctgtgtttggaaccatgaagactggagtacatctcattgttttgctgttgctgcagtatttttggtgtcgctactaatgcatttctgtctactgagttctaaaattatttcaccaacatcctgtgttatctattatggggtgggtgaaacttttcatgcacattgatgaaataatattcatctaaaactgaatctgagccaactctgagagataatcagcaggactcttttatcctgagattttgccagggttatggggtta

SEQ ID NO: 59277 - DNA, 600 bp, Chicken  19866894317367_1
agcttagttagtcactattatttgtaaaattcagggtggcagcaagtattttccgctttccagacttttctgaacgaaggggaatgctgttctgtctctgggagtacgtttgttgttgatcatttcttctttttttttttttttccaattacacatacacacatatataacacgcacatacacgtgtgtatatatcttatgcagaaattatttttttctgtcttcagtagaaatgtgtagacagatctttttatcacttctatgttttatcattttcatttaagaaatgcttgggtttcrttagagcttcaaactattttttactgagcaaatgtcttgtagaactgctttgttcagttctgaaactttcacataccttttctttgctctgagtgcatatgagcacatttaacagctgtcttcttcagagcaagagatatgagctgctgaaataatttcttccacggagctatccttgcaattggagctactagtgagatttttagagccatacagggcatcctgaatgtgctcttttctgcattatagtactcggataagcaacaaggaaaacttttcctttctgatgcagagtcaggg

SEQ ID NO: 59278 - DNA, 600 bp, Chicken  19866894317367_2
gatttaactttgtatggaacagctgtcctgtgtgtaatgagtgagaaactaaggcaacttttcaacaggtaaataataagatttaccatttatatagaaaaggtcagaagcaacttgcttgagatgttcacgtttttctagatctccggcaagaatatagcatgtttttaggaaggttcataaaactgacagcaacaaaaatttttaaatatctgttcagattcctaaactctgttttagcaaaactggagaagaaagcacacacaagcaaatttagttgtgttaaaatatctgaaatayggtagatggctcttctgacaattaatgtttctggcaatttcttgaataaggggcaaacacattgtatttgtgtttaactacctttagagataattcgatcatttccatatgccgtgttgtagaagatattcagcatttgctgtgagggtcacaaatgtatctgcagggagacacctcattgtctttggcagactggtatgggagagtgataggctctgacagaagcagaagcttaatacagtccatgaagttagatgaatacagtagcatcacatgtgacaggttttgaaaagagcttct

SEQ ID NO: 59279 - DNA, 600 bp, Chicken  19866894317370_1
atcctacagagaaatcaaacgtctctgagaactcttttcaataacttccaacatatttctttctgaatggcaaataccaaacaccattcttgacaaagactttcttttagccttttaatttcatgccaaattgcagttattccatctctgtgtctctctcaaatactttatactaggctttagtctaaaaaatgtattagtcattggagcgacctgatgacctaacttaaatctcaactgcaattacaaaatacttttcttagattgtatcagaaactcctgaatgacagttttattttwaaaaaaatcctctctttctgaatctaaagaccacaaaaagtattttctgctcaaaagctctatttttgcccaagaacttctcaaaacaatttgacattttgacattttttcatgttattgtgaacagcttacataaactgagaagacgacattcttccagtatcctttaaaatttgacaggtactgtggaaaagttaaagactgtgtttggagtcctacctcacaataggcaatttggtgaatggaacaggaggtaacttcaaaccatctggaagagtgatgaattccattgtgccagga

SEQ ID NO: 59280 - DNA, 600 bp, Chicken  19866894317374_1
ctgccttgccttgtattgcctggacctgccctggcctggacttgcattgccttgccttgccttgcctggcctggccttgcctggacttgccttttcttgcctggccttccctggacatgccttgccttgaatggcctctcctggcctttcttgatctggcctgcctggcctggcctggccttcccttgccttgccttgcctcgcctggcctagcctagcctggcctcgtattgccttgctttgccttgccttgcctggacttgccctgcctggcctggacttgccttgtcatgccttgcmtggcctggacttgccttgccttgccaggaattgccctgcctggmctgcatggcctggcctggccttgctttgccttgcctagcctggcatagccctgccttgagttgccttgctctgccaggcctggacttgtcttgtgttgcctggccttgccttgccttgcctagtcttgccctgcctggcctggacttgacttgacttgcatggccttgccttgccttgcctagttttgctctgcctggcctggacttgacttgacttgcctggacttgccatgccttgcctagacttgccctgcct

SEQ ID NO: 59281 - DNA, 600 bp, Chicken  19866894317374_2
cattgccttgccttgccttgcctggcctggccttgcctggacttgccttttcttgcctggccttccctggacatgccttgccttgaatggcctctcctggcctttcttgatctggcctgcctggcctggcctggccttcccttgccttgccttgcctcgcctggcctagcctagcctggcctcgtattgccttgctttgccttgccttgcctggacttgccctgcctggcctggacttgccttgtcatgccttgcmtggcctggacttgccttgccttgccaggaattgccctgcctggmctgcatggcctggcctggccttgctttgccttgcctagcctggcatagccctgccttgagttgccttgctctgccaggcctggacttgtcttgtgttgcctggccttgccttgccttgcctagtcttgccctgcctggcctggacttgacttgacttgcatggccttgccttgccttgcctagttttgctctgcctggcctggacttgacttgacttgcctggacttgccatgccttgcctagacttgccctgcctggcctggacttgccttgtctttgcgtggacttgcctggccttgc

SEQ ID NO: 59282 - DNA, 600 bp, Chicken  19866894317378_1
aaggcttgccttctgagctcaaactgaactacatggtgtattcataggggttgaaggacgagatcagattgcttctgttatctgggtttaattttctaccatagattttttttagtcaggtcacaactacatttattcatataatgggaacgtgtataatggaattttcagccccaatttactctggaaatacaaaatctgttcttcatgactacaaataaaactctaatcttaaaagagactgcaagaattattattctgtgaaccatctagctccatattccaccttcaacagtgacyaacatcaaaatcctgaaatcattaaataagtctattttgcttcccaccacagtaccgtctttaggctctaatacttcctggactgggtttctatccttctgcagaataacaataacctggagtgctaagtatacagaaaaaaactcctcatatggcaaaacagcactgttctcaaagagttctcttagcatctattatacacatacaacactccacacttacagttaaaactgcaaagctaagggtctgcttaccttaaatctgtcaacagaaacagatgcctcagatagagacttcact

SEQ ID NO: 59283 - DNA, 600 bp, Chicken  19866894317378_2
ttctatccttctgcagaataacaataacctggagtgctaagtatacagaaaaaaactcctcatatggcaaaacagcactgttctcaaagagttctcttagcatctattatacacatacaacactccacacttacagttaaaactgcaaagctaagggtctgcttaccttaaatctgtcaacagaaacagatgcctcagatagagacttcactgagaaaggtgtcacttttagagcaaaagtcatagaattaaagacagtgaccactgtgaatgcctaaaaacaaaacaagaatcacattkggatgtaatacactgaacaaacaattgcaaccttctaaaggttgaagtgccatagcagaaagttaatgccataggaaagacccacagaccaagaataaccctttaaagattcagcatactctggaatggtagaaaacagagctttgtaacaaatcaagacatcttcagtatttgtaggctcacagaacatagcagatggcaaattctgcactagcctattacttgtggagacctgtgttcaaagtctgttttaagtcacaaggggggacagatctgtgctggctgcatacaagtacactg

SEQ ID NO: 59284 - DNA, 599 bp, Chicken  19866894317380_1
  misc_feature (1)..(16): n is any nucleotide
nnnnnnnnnnnnnnnnggataaggattaggtgggctgttcatgacttttactgtgggacattaaactccaccttctgctagagccaaacaaccacagcagttttgccacttctcttctctgagctggcatggatttgtgcttcggaaggtgctgcacacagcagcactccattaacacacggaggctcagtaatgcagtgaacacagagctcttaggaccatggcatgtctggacacttgcaaagtgctaattgaaaaaacacgatattttttccaattgtgcttggaaatccttctgargaccagctttgctccatgcccacctgtatcttgttcaggaagcagcagtggttctactaataagttgtactgagctcctgagaaacccaaatgtttctttgtccctttttgctgtttgcagccccatgagagacactaatggcctctgcagggaactcacttcagagtcttaggaagaggtcacacatatgagagaaggcagcgtcataaaagccatggtgacacatgaaagaacatatagagacaaaaatcactcctgtgccatggtttgtgggagctcccctcgtgaggtcacaacc

SEQ ID NO: 59285 - DNA, 600 bp, Chicken  19866894317380_2
cacacatatgagagaaggcagcgtcataaaagccatggtgacacatgaaagaacatatagagacaaaaatcactcctgtgccatggtttgtgggagctcccctcgtgaggtcacaacctgcattctggaccacataaagtcaagggtcaagtctctgtgaaatcctgaccttgctgacaacaataagagctatttcattgacttctctgggtttctgatatgagggatttattcacagacctttggttctacgattctatgtgaagcccactccaggtagtgccctctgcccatcctaayggttttcctgccagcctgctccattccaccaatctttgaggttaacagctgctcactgtgagaacaacagcttcttctggatggcatttctcagtcccaggcttcttcagagccaggagttttaatgtcactggcctgttcacatgcagtttacagcttgtttttccttggaaaagtcaaggacaaagctgggtactgaatacatccttttaggcctagttgtcttctctgatttttggatctatgtctttccctgtctaattatcagcctcccagacacagtgtgaawggaagctatct

SEQ ID NO: 59286 - DNA, 600 bp, Chicken  19866894317380_3
cccatcctaayggttttcctgccagcctgctccattccaccaatctttgaggttaacagctgctcactgtgagaacaacagcttcttctggatggcatttctcagtcccaggcttcttcagagccaggagttttaatgtcactggcctgttcacatgcagtttacagcttgtttttccttggaaaagtcaaggacaaagctgggtactgaatacatccttttaggcctagttgtcttctctgatttttggatctatgtctttccctgtctaattatcagcctcccagacacagtgtgaawggaagctatctctattcacsggagctgtagatggtaggctccagctgaygataggagaaggtcattagaagctcgaagggcwgcaagaagccatccyttgccttaaagaacagcagaagcctgcagaaatggcttatcaatgatcaccatctctggttcccaggagagttttggaggtattagatgcactcatcagtcacaagacttcctgctggaattaccacatcgattagccatgtgaaaaatagctttctgctctctccacttcaagcagattcttcctctcagtgcatagtgccc

SEQ ID NO: 59287 - DNA, 600 bp, Chicken  19866894317380_4
gccagcctgctccattccaccaatctttgaggttaacagctgctcactgtgagaacaacagcttcttctggatggcatttctcagtcccaggcttcttcagagccaggagttttaatgtcactggcctgttcacatgcagtttacagcttgtttttccttggaaaagtcaaggacaaagctgggtactgaatacatccttttaggcctagttgtcttctctgatttttggatctatgtctttccctgtctaattatcagcctcccagacacagtgtgaawggaagctatctctattcacsggagctgtagatggtaggctccagctgaygataggagaaggtcattagaagctcgaagggcwgcaagaagccatccyttgccttaaagaacagcagaagcctgcagaaatggcttatcaatgatcaccatctctggttcccaggagagttttggaggtattagatgcactcatcagtcacaagacttcctgctggaattaccacatcgattagccatgtgaaaaatagctttctgctctctccacttcaagcagattcttcctctcagtgcatagtgccctcctcaactttattccagag

SEQ ID NO: 59288 - DNA, 600 bp, Chicken  19866894317380_5
aggttaacagctgctcactgtgagaacaacagcttcttctggatggcatttctcagtcccaggcttcttcagagccaggagttttaatgtcactggcctgttcacatgcagtttacagcttgtttttccttggaaaagtcaaggacaaagctgggtactgaatacatccttttaggcctagttgtcttctctgatttttggatctatgtctttccctgtctaattatcagcctcccagacacagtgtgaawggaagctatctctattcacsggagctgtagatggtaggctccagctgaygataggagaaggtcattagaagctcgaagggcwgcaagaagccatccyttgccttaaagaacagcagaagcctgcagaaatggcttatcaatgatcaccatctctggttcccaggagagttttggaggtattagatgcactcatcagtcacaagacttcctgctggaattaccacatcgattagccatgtgaaaaatagctttctgctctctccacttcaagcagattcttcctctcagtgcatagtgccctcctcaactttattccagagtgatttattttatctggtggcacactgca

SEQ ID NO: 59289 - DNA, 600 bp, Chicken  19866894317380_6
ttcttctggatggcatttctcagtcccaggcttcttcagagccaggagttttaatgtcactggcctgttcacatgcagtttacagcttgtttttccttggaaaagtcaaggacaaagctgggtactgaatacatccttttaggcctagttgtcttctctgatttttggatctatgtctttccctgtctaattatcagcctcccagacacagtgtgaawggaagctatctctattcacsggagctgtagatggtaggctccagctgaygataggagaaggtcattagaagctcgaagggcwgcaagaagccatccyttgccttaaagaacagcagaagcctgcagaaatggcttatcaatgatcaccatctctggttcccaggagagttttggaggtattagatgcactcatcagtcacaagacttcctgctggaattaccacatcgattagccatgtgaaaaatagctttctgctctctccacttcaagcagattcttcctctcagtgcatagtgccctcctcaactttattccagagtgatttattttatctggtggcacactgcaaattttcctggcctagcrttgatcccaatgact

SEQ ID NO: 59290 - DNA, 600 bp, Chicken  19866894317380_7
tttctcagtcccaggcttcttcagagccaggagttttaatgtcactggcctgttcacatgcagtttacagcttgtttttccttggaaaagtcaaggacaaagctgggtactgaatacatccttttaggcctagttgtcttctctgatttttggatctatgtctttccctgtctaattatcagcctcccagacacagtgtgaawggaagctatctctattcacsggagctgtagatggtaggctccagctgaygataggagaaggtcattagaagctcgaagggcwgcaagaagccatccyttgccttaaagaacagcagaagcctgcagaaatggcttatcaatgatcaccatctctggttcccaggagagttttggaggtattagatgcactcatcagtcacaagacttcctgctggaattaccacatcgattagccatgtgaaaaatagctttctgctctctccacttcaagcagattcttcctctcagtgcatagtgccctcctcaactttattccagagtgatttattttatctggtggcacactgcaaattttcctggcctagcrttgatcccaatgacttattttcctccaaag

SEQ ID NO: 59291 - DNA, 545 bp, Chicken  19866894317380_8
gaagctcgaagggcwgcaagaagccatccyttgccttaaagaacagcagaagcctgcagaaatggcttatcaatgatcaccatctctggttcccaggagagttttggaggtattagatgcactcatcagtcacaagacttcctgctggaattaccacatcgattagccatgtgaaaaatagctttctgctctctccacttcaagcagattcttcctctcagtgcatagtgccctcctcaactttattccagagtgatttattttatctggtggcacactgcaaattttcctggcctagcrttgatcccaatgacttattttcctccaaagtgtgaatttgattacatcagtgtcccagccagcctaaatctcagccacttagcaacaaacttaaagtaggtcacaatgagttcagaaacaaatagcttacaaagctaaatcttcaacacgtcaatggcagtactgtataagtaaactgtaaatcctcacaacaccactacaagatgccatttgtaatactccagagaccaaggaagaacagagca

SEQ ID NO: 59292 - DNA, 600 bp, Chicken  19866894317381_1
ttctcccttgtctccttcggtgcaggccgtgagttccgggtcatcatcatcagcacagtccacaccagtgagagcctgcgcgtctcggcctcccacaaccatgagttcttcaacgaggccagagtgctcaacaccatcatgacgagggctcagtcacaggtcattgtggtgggggatgcggtggccttgtgctcccatggtcagtgcagcaaggtgtggaagcgcttcatccaggagtgcattgagaaggggagcatctccccagcaaacctgaccatggcccagatcaaacaggcagcrtgcgacaaggagagctggtgcaggaggagcccagagggcaatgatgaggacagtgacacggattcctggagctctgagactgaaagcatgaatcccgatgatcccatcctccaggagctcttagatgagagcaagaacgtgctggtaacagtgtctgaagaagggctgctcaatgtgaagtctgacacttcaaaccaatgggaagacaggcaggaatacgtcagcttctcatctcagatgatgcagaaatatctgcacatgcacccccaaatgtacaagaggtgtgagctggtcaaagaa

SEQ ID NO: 59293 - DNA, 600 bp, Chicken  19866894317381_2
agcttctcatctcagatgatgcagaaatatctgcacatgcacccccaaatgtacaagaggtgtgagctggtcaaagaagggtttgacaaggcttcagccttcccccttgacgactctcccgccgttaccattcagatcaaaggcagagtgcactgcgggacagccttcaccggcgatgaagtgcttgtggaaatcctgcagaacggcacagctgacagcagcagcctgcggccccaggggaaggtggtgggcatcctgaagcgtgccgagagagagcgcaacttcatctgcacaatggaygagtttgatccccgggtgatgatacccattgatcccactgtcaccaaaatatttgtcccggggctgaaagagaaacctaatgtcatccccatccgcaagcttgtcaatgggaagtacaragtggtcagctgcaagaagatcaaccaggacacgaggagatgccagatcttctctgtccagatcatcgcctggcgggagggtttctactaccctytggggatagtaactgagattttgcatgtggctttgacttcagaagaaggcttaaggattctcaacttagagtatggcttggagagg

SEQ ID NO: 59294 - DNA, 600 bp, Chicken  19866894317381_3
cgccgttaccattcagatcaaaggcagagtgcactgcgggacagccttcaccggcgatgaagtgcttgtggaaatcctgcagaacggcacagctgacagcagcagcctgcggccccaggggaaggtggtgggcatcctgaagcgtgccgagagagagcgcaacttcatctgcacaatggaygagtttgatccccgggtgatgatacccattgatcccactgtcaccaaaatatttgtcccggggctgaaagagaaacctaatgtcatccccatccgcaagcttgtcaatgggaagtacaragtggtcagctgcaagaagatcaaccaggacacgaggagatgccagatcttctctgtccagatcatcgcctggcgggagggtttctactaccctytggggatagtaactgagattttgcatgtggctttgacttcagaagaaggcttaaggattctcaacttagagtatggcttggagaggaaacacccagctgtcgttaccaaggagttagccaaatacagcacctccagtaaaccaaaccccagcaaggaaaacctgagggactgtcggagttacctgactttcactgtcgatcctca

SEQ ID NO: 59295 - DNA, 560 bp, Chicken  19866894317381_4
acagcagcagcctgcggccccaggggaaggtggtgggcatcctgaagcgtgccgagagagagcgcaacttcatctgcacaatggaygagtttgatccccgggtgatgatacccattgatcccactgtcaccaaaatatttgtcccggggctgaaagagaaacctaatgtcatccccatccgcaagcttgtcaatgggaagtacaragtggtcagctgcaagaagatcaaccaggacacgaggagatgccagatcttctctgtccagatcatcgcctggcgggagggtttctactaccctytggggatagtaactgagattttgcatgtggctttgacttcagaagaaggcttaaggattctcaacttagagtatggcttggagaggaaacacccagctgtcgttaccaaggagttagccaaatacagcacctccagtaaaccaaaccccagcaaggaaaacctgagggactgtcggagttacctgactttcactgtcgatcctcaaggtgcgagggatctggacgacgctgtcagtgtcagggaccttggacatcaatat

SEQ ID NO: 59296 - DNA, 600 bp, Chicken  19866894317382_1
tgggaaaaatgtgtatcacgtctgagtgcatacaaaatactcatctctgtcacccactgacaaagtagcaatgcatcagccaattaaactaattaatacattggtcaaatttacttctctgtgaaatggtttattaagtaataggaaaggcttagagaggtaatgcatgagttattcagtatttttaattatcagggcctggtgagactaagccctgatgctttcctatcttcctgaaagctatgtgacttgattgtttctgtctcagcataaattcatgctgtcactaaaaaaagcagyaccagcataatcatgtgagctgagaaaggaaactgatacaaatgaaactgaaaaacatgaggtttaattttcagctgcatcattcttctctcagtaaaaatatctaaatgtatattacagcatatgattttattgtattttatgtgtgcagtttcttctagataaaacaaacaaacaaacaaaaaaaaaaaaccctaagatcattagaagttctcatcagtttgccactggcaggtaagacaacatttgtggtagcacacccaacagataatattatcgtagaatcagagaatcatagaa

SEQ ID NO: 59297 - DNA, 600 bp, Chicken  19866894317384_1
gaatatttattaggaaagtctgttcacttgctaatctctgttttttccaaatgctgtagaaatatttattttataatgtaaaagtgagggatgtaatgaatttctgttgaattctagtactgaaacaaatgatagctacaaaaacctcttatctttttcctcaatatgtttgaaatttaaggttaatgtaaagaatcagattgctattggagacaaggtatacatgtttcagttgatctacacttgcacgtaagaagaaagatgagccaatgatagggaagggaatgaagctattactgsattgtcaacggaaaggaagtgctggagatcaggctttggaatcaggagaccgagaaacataagttctggtcagaaaatttggaaaaggaatttcccacagaaaaactgtcatctttaatcagaggaatggtgattccaaarctgtgatctataaatgtgactgcagtatctcattaaaggtcagaatcaccacctgcctgagcaagtgtgccctgtcagaccattcctcccatgttgctggatggctgtcgcgcaatgagcaaagcacagtgggagctgaagcctggatggaaaacttgt

SEQ ID NO: 59298 - DNA, 580 bp, Chicken  19866894317384_2
aaacctcttatctttttcctcaatatgtttgaaatttaaggttaatgtaaagaatcagattgctattggagacaaggtatacatgtttcagttgatctacacttgcacgtaagaagaaagatgagccaatgatagggaagggaatgaagctattactgsattgtcaacggaaaggaagtgctggagatcaggctttggaatcaggagaccgagaaacataagttctggtcagaaaatttggaaaaggaatttcccacagaaaaactgtcatctttaatcagaggaatggtgattccaaarctgtgatctataaatgtgactgcagtatctcattaaaggtcagaatcaccacctgcctgagcaagtgtgccctgtcagaccattcctcccatgttgctggatggctgtcgcgcaatgagcaaagcacagtgggagctgaagcctggatggaaaacttgttcatgaaagagaactggaaaactcaaattttccactgaaaacagacttgaaaaatatctaccaccaatcaagtctaaaaattatattggttttatgaagcacttctctctttcaaataatg

SEQ ID NO: 59299 - DNA, 600 bp, Chicken  19866894317387_1
agttggctttaaagataagcagctgatactcagaccatccatgtcagtgagattcacagctacactatgaaagtaagaacgggtatcctttgtaacctacaatggttacaaataactatttaattcagtgccacagaatagaatttgggagaattgaaaacagaaaggagaaaggtgtgtactgttcactacagtgtaaaatcttatgaagataatgtatgcaacatctgggtaagattttatattctggtattcttcagctttttcagttttgatacattccatacatcatgcacttayaggaagtcactatttcgcaatatctttagaagaggaatgaaacaatacttatcttctttttctgctgattgaagttatcaatgatgacaccaatgaacagattcagggtgaaaaaagacccaaaaatgataaagatgacaaaatacaaatacatgtacaggttgtcttcatacttgggttgctgtaacacctgaggaaaaaatatgaaatatcattcttaagatttcatatgaaaatttcaattgaacaagcagcaatcttggacaaaatatcttttatttccttgtcacttatatcagt

SEQ ID NO: 59300 - DNA, 600 bp, Chicken  19866894317387_2
tttaattttgtttcatcttcctgtatgcatattattcacttttggaagaaatataaatatacacttgttgatagacatgtgtcaaggataaaatgtacttcaaaatattctcagtacttacgtctcttgagtcaatagctgcatacataatatccatccagcctttaaatgtagcctgtaaacagtacacacctatttaagaatataactttaagacaattcataaaactatttccagcaactgaatatggcacccggcattattagtgcaacatacataagatttatccacaattttgyattttggctttctttagagctgcttataaggtacactgctgtgtatcccatttgtctttatattagtaagttaagcagaatatgtaattaacttatttctaattatttatcacaaatgctagaatgcagtgtcattttagtagattaaatgtttatcaaagtcataccagtggctttgtaactcagttgccaccagtgactactgatgtcatcagtagggtggcaattcaagggaaccgaagatttgattaggtcagaaaagataaacactgtagtatcaaggagaattttgatttgtat

SEQ ID NO: 59301 - DNA, 600 bp, Chicken  19866894317387_3
atttgtctttatattagtaagttaagcagaatatgtaattaacttatttctaattatttatcacaaatgctagaatgcagtgtcattttagtagattaaatgtttatcaaagtcataccagtggctttgtaactcagttgccaccagtgactactgatgtcatcagtagggtggcaattcaagggaaccgaagatttgattaggtcagaaaagataaacactgtagtatcaaggagaattttgatttgtatctactataaaagattttacctgatgtagtgattctatattcattctaawtgcattatgttttacagaggctataatcctcaactatgttttaaggtgatcttgtaaaaacagaatttgctgtatgtgcttcaaatatttaatatgccttaaaagtgacagcatttagtgagcttttacagctattgactctaattcatatgtgtaaatttttgtttgacaatgcrgtgtagatttcctcctcaacgcatttgaaagacaaactcattttctctattgcagcaattagttactcttttgaaacagtcatggactaggcagcatttccaagtagcaatcattcagtcatgg

SEQ ID NO: 59302 - DNA, 600 bp, Chicken  19866894317387_4
attcaagggaaccgaagatttgattaggtcagaaaagataaacactgtagtatcaaggagaattttgatttgtatctactataaaagattttacctgatgtagtgattctatattcattctaawtgcattatgttttacagaggctataatcctcaactatgttttaaggtgatcttgtaaaaacagaatttgctgtatgtgcttcaaatatttaatatgccttaaaagtgacagcatttagtgagcttttacagctattgactctaattcatatgtgtaaatttttgtttgacaatgcrgtgtagatttcctcctcaacgcatttgaaagacaaactcattttctctattgcagcaattagttactcttttgaaacagtcatggactaggcagcatttccaagtagcaatcattcagtcatggccagaataaaaccaagaactgagagtgttcttggtcatttaatccttattacaattttactaaacaaggttgtagatctttggttctttcatattccttgtcatagagattagtcatagaaacaagtcaggatgggaacattcctcatccatgggtattactatatctccaacacc

SEQ ID NO: 59303 - DNA, 600 bp, Chicken  19866894317408_1
tggaacctagtgtgcagcctaagaggctgagatagaggcacagatcttatccaagtctgcttaaaaagagttcttatatgtgttatagtggtgtagtagctttgtgttttctagaaatgattttattttgcacccaactttttctaaatgttctgtgttgtgctctttaccatttcagagggactggaataagattatcattttgctataacgtgcaacactggcttatgatgagtctctcaggagactcagctgatgtttacactccacattgtcatcatctttgtacttagggagccrtcgctctggtactgttaagagttactcttttttccattgtctcctcagaaagcaaactgtgggaaccggaaaaagccatgttttcctctatttcttctatctccctttctccttcacctaccacttctcttctgggctagttactatagctcttgagaatgttatatgtgtttgagctgttcaaaccagcatgatcctactgctgtgtctcctgagtacatttctggttttgtctatatttaaacagcacttcaggaatgcaacccagagatskgccmtgacacaataatttatgagtgt

SEQ ID NO: 59304 - DNA, 600 bp, Chicken  19866894317408_2
gtcatcatctttgtacttagggagccrtcgctctggtactgttaagagttactcttttttccattgtctcctcagaaagcaaactgtgggaaccggaaaaagccatgttttcctctatttcttctatctccctttctccttcacctaccacttctcttctgggctagttactatagctcttgagaatgttatatgtgtttgagctgttcaaaccagcatgatcctactgctgtgtctcctgagtacatttctggttttgtctatatttaaacagcacttcaggaatgcaacccagagatskgccmtgacacaataatttatgagtgtcaggatgtgtgggaggatactagcaggctcctagaagagcgggtaccgtcagtgctttggaactctaccccagaacaagtgcaggttccagaaaaactggcaaactgtttgcagcagatgtgccatcactctggcgactgtagagagacaccaatcactgcaacatgccggggcttggcctatgcctactgctgccagatcaatgctattcagcacactgaagagaagggaagagaaggtctctaactctgatgacagtgtgacaggcccttt

SEQ ID NO: 59305 - DNA, 600 bp, Chicken  19866894317408_3
tcatcatctttgtacttagggagccrtcgctctggtactgttaagagttactcttttttccattgtctcctcagaaagcaaactgtgggaaccggaaaaagccatgttttcctctatttcttctatctccctttctccttcacctaccacttctcttctgggctagttactatagctcttgagaatgttatatgtgtttgagctgttcaaaccagcatgatcctactgctgtgtctcctgagtacatttctggttttgtctatatttaaacagcacttcaggaatgcaacccagagatskgccmtgacacaataatttatgagtgtcaggatgtgtgggaggatactagcaggctcctagaagagcgggtaccgtcagtgctttggaactctaccccagaacaagtgcaggttccagaaaaactggcaaactgtttgcagcagatgtgccatcactctggcgactgtagagagacaccaatcactgcaacatgccggggcttggcctatgcctactgctgccagatcaatgctattcagcacactgaagagaagggaagagaaggtctctaactctgatgacagtgtgacaggccctttg

SEQ ID NO: 59306 - DNA, 600 bp, Chicken  19866894317408_4
catctttgtacttagggagccrtcgctctggtactgttaagagttactcttttttccattgtctcctcagaaagcaaactgtgggaaccggaaaaagccatgttttcctctatttcttctatctccctttctccttcacctaccacttctcttctgggctagttactatagctcttgagaatgttatatgtgtttgagctgttcaaaccagcatgatcctactgctgtgtctcctgagtacatttctggttttgtctatatttaaacagcacttcaggaatgcaacccagagatskgccmtgacacaataatttatgagtgtcaggatgtgtgggaggatactagcaggctcctagaagagcgggtaccgtcagtgctttggaactctaccccagaacaagtgcaggttccagaaaaactggcaaactgtttgcagcagatgtgccatcactctggcgactgtagagagacaccaatcactgcaacatgccggggcttggcctatgcctactgctgccagatcaatgctattcagcacactgaagagaagggaagagaaggtctctaactctgatgacagtgtgacaggccctttggctg

SEQ ID NO: 59307 - DNA, 600 bp, Chicken  19866894317414_1
tgttttatgtgttgtccaggctttccaatatatgctatcaagctctgagcacagctaaatggatcaggcccctcagggacttaggagcagtatgcctgctttgaatatccctgctaggtttggacaaaagctataagccaaaatgacagcaattctaacacatgtagaggcagaaatctatttgccttcatgctgctggcaagtaagatgtgaaaggaaagcctagcttttcacggagggtgcatcattcattcgcatatagaatactgtgtcaaaggacaaaacctctataggggctgrctgggcagattatttccccttaccattctactgtgttgtttcatgctcagccaccctatttcactcaggagcttactgcatggataacaagacaaaccagaccttctttttttcagtttacgtgacagctcagtcttactttgtttatgtgcaggcaatatttgtcccagagtcttcttgcacatatagaattacaaaagcaatttttaattcagttaattgtcttcaattagattatttacttgatggaaatctctttgtattttaaaatcttaaatgatctttcaaaatttatctcag

SEQ ID NO: 59308 - DNA, 600 bp, Chicken  19866894317421_1
aagaacccagacttgggctggctgaagctgacaaatactggctctgggcagcccggtcttgtagtattacatgttggaagttggtggccctgcctgcggaggggggttggagctttgagatacttgaggtcccttccaacctaagccattctgtgattctcttgggaaagtgaagattcagcctgatcctgcctggtctgttccactcctttgggttttgctttaaaattgtgcagcttggtcaaagggtgtctgaattgcaaactcgtaattgtattccagtgcaggtgcaaaccctgkgtgctgaaatggtaccttactaatagcaagtttgcttttctagttggattttgtagagaggtaggtaacagatctaaaggtactacactgaaaaccacctcccaatattaagttgatagctcgactgttgtttttatatttaattattattattattattattattttctcaatctcctccctttgaaatagtgaaaaagcacatacagctttttttagaaggacttttttttggagtccaagtatatttcagtatagagtatttttccccgctgctgtatcttgcattcttgttatgtg

SEQ ID NO: 59309 - DNA, 600 bp, Chicken  19866894317423_1
attttctttcattaattaggccaatggggaatccagttagttcagttcctaggtaatatgctgcgacactccagtcagtagttcactttgtcccctacctcatcacttctgtctatttctgcactgccaaaatgaaaccataccaggttcagcatcacaagaagtcaaagagctcagcaacatcaggaagaagtttcagacatcccagaagaaatgatgcagtgttgtggggtaatgacaatatctgaattactgccaaaactgatcagtgctgaaggccagctgttgtcctctaagtgktcatcatttagtttcagagttaacagcttattcacatgaacagagttgtttcaacttcttgttttggctgtttgtggatttggcacaacaccayracacagctttaccagcaattcatgttggcagtgtttctgtcatagccccaaggaggaggaggaggagggaaggctctacctgggaggaaaccagcaggcagggaaattcagagctcctacatcccaagacctcctggacacaaaagaatgtaaccccatggtgctgcttgctagcaaaattgagagcagccgggtgggacacagg

SEQ ID NO: 59310 - DNA, 600 bp, Chicken  19866894317423_2
ctacctcatcacttctgtctatttctgcactgccaaaatgaaaccataccaggttcagcatcacaagaagtcaaagagctcagcaacatcaggaagaagtttcagacatcccagaagaaatgatgcagtgttgtggggtaatgacaatatctgaattactgccaaaactgatcagtgctgaaggccagctgttgtcctctaagtgktcatcatttagtttcagagttaacagcttattcacatgaacagagttgtttcaacttcttgttttggctgtttgtggatttggcacaacaccayracacagctttaccagcaattcatgttggcagtgtttctgtcatagccccaaggaggaggaggaggagggaaggctctacctgggaggaaaccagcaggcagggaaattcagagctcctacatcccaagacctcctggacacaaaagaatgtaaccccatggtgctgcttgctagcaaaattgagagcagccgggtgggacacaggcaacaagagagagatactagagaccagttacaagggcgaaaacctctttgtgtgctttgcaataaatatgtaaaagtctccaagtggctttgcc

SEQ ID NO: 59311 - DNA, 600 bp, Chicken  19866894317423_3
tacctcatcacttctgtctatttctgcactgccaaaatgaaaccataccaggttcagcatcacaagaagtcaaagagctcagcaacatcaggaagaagtttcagacatcccagaagaaatgatgcagtgttgtggggtaatgacaatatctgaattactgccaaaactgatcagtgctgaaggccagctgttgtcctctaagtgktcatcatttagtttcagagttaacagcttattcacatgaacagagttgtttcaacttcttgttttggctgtttgtggatttggcacaacaccayracacagctttaccagcaattcatgttggcagtgtttctgtcatagccccaaggaggaggaggaggagggaaggctctacctgggaggaaaccagcaggcagggaaattcagagctcctacatcccaagacctcctggacacaaaagaatgtaaccccatggtgctgcttgctagcaaaattgagagcagccgggtgggacacaggcaacaagagagagatactagagaccagttacaagggcgaaaacctctttgtgtgctttgcaataaatatgtaaaagtctccaagtggctttgcct

SEQ ID NO: 59312 - DNA, 600 bp, Chicken  19866894317429_1
gctcaggagcagaagggatgagaaaatctgacctaaagctgtgcccaaaccaaacaaggctcagagcaggggacgcggctcttggccacttctccaggactgaggctgcacaggagctaaagctttatcccctcttttccttccgcacaggcaaaaagaaagcgacgttgtttgacagccaggctcccatctgtcccatctgccaggtccttctgcgccccggagagctgcaggagcacatggaacaggagctagagaagctcacccagctgaacatcaggtaagcagcatagaatcatrgaatggcttaggttggaagagaccttaaagatcatcttgttccaaactccctgccacrggcaggattgccaaccactagatcaggctgcccagggccccatccaaccatggcaaaggagacggtgacatgcaagcaaagcaaaacagcaagagctggtacctgcagcatggccccatactggctgcatgggttgctgtgacatccgggatgcatcctgcaatagagcagggtgggagctgccttctgctcctgatgctttccccagcacggccaagtcctctttttattaaaaataataa

SEQ ID NO: 59313 - DNA, 600 bp, Chicken  19866894317429_2
gctcagagcaggggacgcggctcttggccacttctccaggactgaggctgcacaggagctaaagctttatcccctcttttccttccgcacaggcaaaaagaaagcgacgttgtttgacagccaggctcccatctgtcccatctgccaggtccttctgcgccccggagagctgcaggagcacatggaacaggagctagagaagctcacccagctgaacatcaggtaagcagcatagaatcatrgaatggcttaggttggaagagaccttaaagatcatcttgttccaaactccctgccacrggcaggattgccaaccactagatcaggctgcccagggccccatccaaccatggcaaaggagacggtgacatgcaagcaaagcaaaacagcaagagctggtacctgcagcatggccccatactggctgcatgggttgctgtgacatccgggatgcatcctgcaatagagcagggtgggagctgccttctgctcctgatgctttccccagcacggccaagtcctctttttattaaaaataataataataataataattgcattttaactgctagcagttatttaggaaaagactgcagccaa

SEQ ID NO: 59314 - DNA, 600 bp, Chicken  19866894317431_1
ggtatttacatatatgcctaaggacttacattgatatatagctgaatcatacctgaattctaaaactagggattcagatttggcctcaaattttcaaagtgaatcagattcaatacagatgataattgctatttgatacttgctatttttatttttatgcaatatatgattgctcacaagatttttatctgaatgtaatttctgatttacttaccttgtggatatttagtactattgaaaacactcacattgttgtttggtgcctaaataggaattaaggttgttatccagagacctatmggtatcagaacagcatcctatgatatttccacattgttaatgtacttgttttctctggttgtgtaataaattgtgtagtttgcacagaagaagtatttttccaaatttttcaatttggcctcaggagacgatcaagtccaagcctgaaaaattcaaagaatgggaaaaagcaatgaagaaagaatagaggatgaatatgagtgggtcagtacttatcagtggatataaattcaaagagaaatcactgtattaattgaaaagctagcaggaagaatctagacagaaatgtcagcaatttag

SEQ ID NO: 59315 - DNA, 429 bp, Chicken  19866894317431_2
gaagtatttttccaaatttttcaatttggcctcaggagacgatcaagtccaagcctgaaaaattcaaagaatgggaaaaagcaatgaagaaagaatagaggatgaatatgagtgggtcagtacttatcagtggatataaattcaaagagaaatcactgtattaattgaaaagctagcaggaagaatctagacagaaatgtcagcaatttagtaatttgtaaaaaactacaccttaaccaggcacaaagaaaatcaggctctgaggagcaagagttaaatggaagataaaatatgacactwaagaagaaagctgatgttatggaagaaaagactaaattagctgttcctcttttagagcctctgtttgtactattaccctgagaatgatgtaatattaacacttttcatttgccaggtaaagaagttgta

SEQ ID NO: 59316 - DNA, 599 bp, Chicken  19866894317446_1
  misc_feature (1)..(33): n is any nucleotide
nnnnnnnnnnnnnnnnnnnnnnnnnnnnnnnnnaaattctattaaagatgaaatactttcaagaaatccataaagagttagacatactcaaagttaggtaaaagttcactgatacttctggtgacttaaattttgcatttttgaccaacgctgccaggtaactcctccatgaatgaaatgttttatgtgctgattatgcaccagagattacagaggataagtaccataaactgaaatggcatttaggaggctaattctcatcagcatttttgaaaatcagtccactagtttcaaaaaccraactgagcttttcaactggagtatttctttttactagctaatgctggactacagttcatccatcaaatcaagaataccagtacatatgcacccctctgcatttctgcttctacatacttgcacacaagcaatgaccttaattagttaaattaaaacagcaagacacacatgatcattcctttttagaccaaaccagttcctaagatgacaactgatgcaaaattaattaaaccaaggcagatgtaggggagaaaaggagaaataatatatttagaatttgaagagaagtaattagtttt

SEQ ID NO: 59317 - DNA, 600 bp, Chicken  19866894317474_1
ctgagcatctcgttccaaccccctgctatgtgcagggtcgccaaccagcagaccaggctgcccagagccacatccagcctggccttgaatgcctgcagggatggggcatccacagcctccttgggcaacctgttccagtgcctcaccaccctctgggaaaaaaacttcctcctcatatccaacctaaacctcccctgtctcagtttaaaaccattccccttgtcctatcactatccaccctcgtaaacagccgttccccctcctgtttatacactcccttcaagtattggaaggccacartgaggtctccctggagccttctcttctccaagctaaacaagcccagttccctcaacctttcctcatggccaggcaccggcagcccagccatgcggttccacaaacatgcaacaaaatccccttttcttccaaaaatagtttcttccagctccccaagagtttttggctttattctgttcatttctttttaacctccataatccattcttaggttttccttccaccattcgcttgtcagagtttccaataggaggaaatcacgtatccgggtctccaagagctgtcggtggtcctgaaaac

SEQ ID NO: 59318 - DNA, 574 bp, Chicken  19866894317474_2
atcacgtatccgggtctccaagagctgtcggtggtcctgaaaactcttctctcttccaaccatgaccaccagcccagtgctgcgaacacacagcccagatggacccacacagtgggaccagcactggtgggaccgatgggtgccgggagccccccagatctcacccaaccccagtgttgggccaatggcccttttctatacagctcggttcccaggagccatagggatatggggaactgagagtgaagccgtgcagccctgggggctcatggggacacacagccccaaatggtgacacasagatgcggctcaggggggtaacagagggacctcaaggacaggggacactatagcacaggatgggtgctgctctccagccccactgatggaacacgcagccctatggggccacactgatcctgggtgagcaccagtcagcactgagtgctggtttgtgagcacaggactacccttcagccatgatgcagcactttgaaggcagctcctggtgctgttgtggccaggcaacgcaacgagcggccatgcagttgggagcacagctgtttcagtcaga

SEQ ID NO: 59319 - DNA, 600 bp, Chicken  19866894317487_1
agactacttttgtcctttttatttggtcagggctgttgcgttaactgatttgggcattatttggaagaggtggtttgttaaatggccaataagtcatgtacatacaacaactgccactcacgtagaccttggtaataatgagctgaaagtggaaatctctgcagctgtgtgtaagcagagcagtgggactgatgttgaaggctctctatttgacgttttgtttgttgctgtgcagttgttctgggtgtaacctctgttagatacagtacaattagttgtaatgaaaaacaaaacaaaacrtctcatgttactaacagaaacagcagaactaaaattactcaagaatatttctctggtgactcattacaccaatcatgagcagcagtgtggaacaatcaccaaccattctgagggattctctctgccccataaaagtcacccacctcagcctctatcctgggttcccatgcatggtctcctgggatacctgggactgcgtttacttggccagaaacagggcctacaacactctgctcatcctgacttgtgatggcattcagtcctcccagaaaggggaggggaagtgagataaccatcttt

SEQ ID NO: 59320 - DNA, 600 bp, Chicken  19866894317494_1
gtgctgtgcttggagccacgctgtgggccacggggctgtgggtgcagacatatggcgaggggtgccagcgtgccctgcacatgtcctcggcagacatacactgtggaccgggcggtccctgacagcgcgggcacagccactgcctacctgtgtggggtgaagggcaactacaagacagtggggctgagcgcagccgcacgctacggccaatgcaacaccacgaagggcaacgaggtgatctcggtgctggagcgagcccgtaatgctggtactgtgcggggcatgggggtgggtggggayatggggcttcacaccactggggctgcccaccatggtggggtgtgatggggcagggaaggcagtgggcatcgtgacgacctcgcgggtgcagcacgcatcgccctcggggacctacgcgcacgtggtggatcgcaactggtacgcggactccagcatgccagctgaggccatagcacagggctgcaaggacatcgcctggcagctggtgcacaacgtggacatcaacgtgagtgcctgcctatggggggcagcccctgctgacccagacatccacacagtctgtgcccatctcatcccctc

SEQ ID NO: 59321 - DNA, 600 bp, Chicken  19866894317494_2
tatctgatgggtaacaaatgccccacacaccaggatgtggtggtactgctgggatgcctgcaggcactgaggctgtgctcactgtgtccccctgccaggtctcttcgagcccatggacatgaagtacgaaatggtgcacaatgccaccctggatccctctctcactgagatgacagaggcagcaatcaccatcctgagcaggaaccccaaaggcttctacctctttgtggaaggtaattcagggctgaggtcccaagggtgggcgagaggggggcggtgggctctgcattacaggtcagrgcggtggttcccaacccaccgtggccaccacctgcaggtgggaggatcgaccacggccaccacgagggcatggcacagcgggcactgacggaggcggtggagttygacacggccattgagcgggcaggagagctgctggacgaggcggacacgctgaccgtggtcactgctgaccattctcacgtcttctcctttggcggctacatcctgcgcggcacctccatcttgggtacggctcagagcagggaatggccccatgctgggtgctgcccctctctcgggttgtggtgtgggtcttcc

SEQ ID NO: 59322 - DNA, 600 bp, Chicken  19866894317494_3
cgagcccatggacatgaagtacgaaatggtgcacaatgccaccctggatccctctctcactgagatgacagaggcagcaatcaccatcctgagcaggaaccccaaaggcttctacctctttgtggaaggtaattcagggctgaggtcccaagggtgggcgagaggggggcggtgggctctgcattacaggtcagrgcggtggttcccaacccaccgtggccaccacctgcaggtgggaggatcgaccacggccaccacgagggcatggcacagcgggcactgacggaggcggtggagttygacacggccattgagcgggcaggagagctgctggacgaggcggacacgctgaccgtggtcactgctgaccattctcacgtcttctcctttggcggctacatcctgcgcggcacctccatcttgggtacggctcagagcagggaatggccccatgctgggtgctgcccctctctcgggttgtggtgtgggtcttcctggctgatctccccccattatctcctccccaggcctggcccctcaaaaagccgtcgacaacaagacctacacctccatcctctatgggaaatgggccgggctacc

SEQ ID NO: 59323 - DNA, 600 bp, Chicken  19866894317504_1
ctcatcacaaacctgaaagtgaagcaagatgtgtcagctgtgcatctgatcttgcatctgtaaattctcctgacttcactggagtctcttttacatcagtgatgtgcctgataatgttagctaggtagattaacaaaaccaagactgtgagcaagagtgggagaagagtagcctacaggaggctttgcttgtgatctgtgaacaacagtacagtgttatggatgcagtcacccattatagcaggcaggaagcactgtgttccgtgctcgtctgtcttgactgggcttttctttaggcacrgaagagtcttttggaagagttcatgtctgtctctggcagccggtcgctgcccagcagctgtactgaaggggtagyggcctgctgctgagtagggtcacaactcatttggttttgcaagtggctcttgactgtaacgagggaggaattatgccactgtggacaaacaagtgatagcagacactgaggttaagtgctttttgtcttcagtatcaacaaagaacagcaaatcttaagggaatctttacaataagttatctctgtgagatacttgggccataattcatgctgtttctaaagtcc

SEQ ID NO: 59324 - DNA, 600 bp, Chicken  19866894317504_2
tcactggagtctcttttacatcagtgatgtgcctgataatgttagctaggtagattaacaaaaccaagactgtgagcaagagtgggagaagagtagcctacaggaggctttgcttgtgatctgtgaacaacagtacagtgttatggatgcagtcacccattatagcaggcaggaagcactgtgttccgtgctcgtctgtcttgactgggcttttctttaggcacrgaagagtcttttggaagagttcatgtctgtctctggcagccggtcgctgcccagcagctgtactgaaggggtagyggcctgctgctgagtagggtcacaactcatttggttttgcaagtggctcttgactgtaacgagggaggaattatgccactgtggacaaacaagtgatagcagacactgaggttaagtgctttttgtcttcagtatcaacaaagaacagcaaatcttaagggaatctttacaataagttatctctgtgagatacttgggccataattcatgctgtttctaaagtccagagaaggttgatttgttgtttttttttaatcctttttacttgaaatcccaaagctgtagtatgggagcttcaaa

SEQ ID NO: 59325 - DNA, 600 bp, Chicken  19866894317511_1
tgtctttggaataaattaactattccagagctgaacaactgttccaaagagatttgaaatatgtttatggaacgttggaaaaccttgcacaggcatttgggtttcagtctgtttttgcagcaggaatttgcagctgagctgttctccaacacacagctattgtagttcctctcttgttctgcaattacttcattgaagtaagggagctgagaggtacactgtgagtcacttgtataccggagttcaccgtggctttatccataacaacgtctcttgtgcagctcttgttctccatctctrctacttaaaaagatgcacaggaagctggtttcaatagcagaaagttcaactggagaatctcaacaagtgactctccattctgttagaaggaactgcttgtgaagctgatgttggctgtactagatgaccttgtttagatactccttaatgcatgaattaacgcttactttgacttcyaactctgtaaacattatcctcagaaacggacgatagatcagtatggattgagaatcaagtctatttccttctgagcagttaccctttgtttttrcttacaggtggttgatatattctctgaaa

SEQ ID NO: 59326 - DNA, 600 bp, Chicken  19866894317511_2
tctgcaattacttcattgaagtaagggagctgagaggtacactgtgagtcacttgtataccggagttcaccgtggctttatccataacaacgtctcttgtgcagctcttgttctccatctctrctacttaaaaagatgcacaggaagctggtttcaatagcagaaagttcaactggagaatctcaacaagtgactctccattctgttagaaggaactgcttgtgaagctgatgttggctgtactagatgaccttgtttagatactccttaatgcatgaattaacgcttactttgacttcyaactctgtaaacattatcctcagaaacggacgatagatcagtatggattgagaatcaagtctatttccttctgagcagttaccctttgtttttrcttacaggtggttgatatattctctgaaatagtttgtgcatctcttcacaaagggctatcaaatctttataaggactgggatttatctgtctagagagtctcttatcttagcattaatagtgtgctttatctaattatcacagctcacaagttcaaaaaacttggatattcactgcatggtgaatggtgctgagttgtttgacaga

SEQ ID NO: 59327 - DNA, 600 bp, Chicken  19866894317511_3
tcttgtgcagctcttgttctccatctctrctacttaaaaagatgcacaggaagctggtttcaatagcagaaagttcaactggagaatctcaacaagtgactctccattctgttagaaggaactgcttgtgaagctgatgttggctgtactagatgaccttgtttagatactccttaatgcatgaattaacgcttactttgacttcyaactctgtaaacattatcctcagaaacggacgatagatcagtatggattgagaatcaagtctatttccttctgagcagttaccctttgtttttrcttacaggtggttgatatattctctgaaatagtttgtgcatctcttcacaaagggctatcaaatctttataaggactgggatttatctgtctagagagtctcttatcttagcattaatagtgtgctttatctaattatcacagctcacaagttcaaaaaacttggatattcactgcatggtgaatggtgctgagttgtttgacagatacgacagcaatggtgtttaatctaaatacagatgaattcagccttaattttgaagggagaactcttagacacatagcttgaaaggtttgtgtg

SEQ ID NO: 59328 - DNA, 600 bp, Chicken  19866894317511_4
acaaagggctatcaaatctttataaggactgggatttatctgtctagagagtctcttatcttagcattaatagtgtgctttatctaattatcacagctcacaagttcaaaaaacttggatattcactgcatggtgaatggtgctgagttgtttgacagatacgacagcaatggtgtttaatctaaatacagatgaattcagccttaattttgaagggagaactcttagacacatagcttgaaaggtttgtgtgcctgttttctttagctaaaaagttgacttatatccaggcattacacrtttttgttgtcttacagtgtacatccttgcatctrtgggactatgtcrggaaatgctcgaggactggtgctcagagacttctgtgattagacaaaactcaattttaaatgtgctgcatgaccaagtacagaaatgtccctctaatctggcttttctrtttatgagttacggtaacctatgtatcccatctgagggagtgcagwggaataagtcctgctgaaagctacctaatatcctgctgcagtgatttgcttcaatttgtagctctgtttctaagtaataaggcagcattactgcaaa

SEQ ID NO: 59329 - DNA, 600 bp, Chicken  19866894317511_5
ttatctgtctagagagtctcttatcttagcattaatagtgtgctttatctaattatcacagctcacaagttcaaaaaacttggatattcactgcatggtgaatggtgctgagttgtttgacagatacgacagcaatggtgtttaatctaaatacagatgaattcagccttaattttgaagggagaactcttagacacatagcttgaaaggtttgtgtgcctgttttctttagctaaaaagttgacttatatccaggcattacacrtttttgttgtcttacagtgtacatccttgcatctrtgggactatgtcrggaaatgctcgaggactggtgctcagagacttctgtgattagacaaaactcaattttaaatgtgctgcatgaccaagtacagaaatgtccctctaatctggcttttctrtttatgagttacggtaacctatgtatcccatctgagggagtgcagwggaataagtcctgctgaaagctacctaatatcctgctgcagtgatttgcttcaatttgtagctctgtttctaagtaataaggcagcattactgcaaatgtggaatattagcttctaacatattatgaattac

SEQ ID NO: 59330 - DNA, 600 bp, Chicken  19866894317511_6
gagtctcttatcttagcattaatagtgtgctttatctaattatcacagctcacaagttcaaaaaacttggatattcactgcatggtgaatggtgctgagttgtttgacagatacgacagcaatggtgtttaatctaaatacagatgaattcagccttaattttgaagggagaactcttagacacatagcttgaaaggtttgtgtgcctgttttctttagctaaaaagttgacttatatccaggcattacacrtttttgttgtcttacagtgtacatccttgcatctrtgggactatgtcrggaaatgctcgaggactggtgctcagagacttctgtgattagacaaaactcaattttaaatgtgctgcatgaccaagtacagaaatgtccctctaatctggcttttctrtttatgagttacggtaacctatgtatcccatctgagggagtgcagwggaataagtcctgctgaaagctacctaatatcctgctgcagtgatttgcttcaatttgtagctctgtttctaagtaataaggcagcattactgcaaatgtggaatattagcttctaacatattatgaattaccatagaatttgca

SEQ ID NO: 59331 - DNA, 600 bp, Chicken  19866894317511_7
gatacgacagcaatggtgtttaatctaaatacagatgaattcagccttaattttgaagggagaactcttagacacatagcttgaaaggtttgtgtgcctgttttctttagctaaaaagttgacttatatccaggcattacacrtttttgttgtcttacagtgtacatccttgcatctrtgggactatgtcrggaaatgctcgaggactggtgctcagagacttctgtgattagacaaaactcaattttaaatgtgctgcatgaccaagtacagaaatgtccctctaatctggcttttctrtttatgagttacggtaacctatgtatcccatctgagggagtgcagwggaataagtcctgctgaaagctacctaatatcctgctgcagtgatttgcttcaatttgtagctctgtttctaagtaataaggcagcattactgcaaatgtggaatattagcttctaacatattatgaattaccatagaatttgcagtggtaatattgcaccaaaaaagccttcagtttgatggaagctctgaagtaacgtctgaattggtggttgtttgttgcatggatttctgcgtggtcttatgtaaagctt

SEQ ID NO: 59332 - DNA, 600 bp, Chicken  19866894317511_8
ttaattttgaagggagaactcttagacacatagcttgaaaggtttgtgtgcctgttttctttagctaaaaagttgacttatatccaggcattacacrtttttgttgtcttacagtgtacatccttgcatctrtgggactatgtcrggaaatgctcgaggactggtgctcagagacttctgtgattagacaaaactcaattttaaatgtgctgcatgaccaagtacagaaatgtccctctaatctggcttttctrtttatgagttacggtaacctatgtatcccatctgagggagtgcagwggaataagtcctgctgaaagctacctaatatcctgctgcagtgatttgcttcaatttgtagctctgtttctaagtaataaggcagcattactgcaaatgtggaatattagcttctaacatattatgaattaccatagaatttgcagtggtaatattgcaccaaaaaagccttcagtttgatggaagctctgaagtaacgtctgaattggtggttgtttgttgcatggatttctgcgtggtcttatgtaaagcttagatgtcaatttttatctgatactgtctgctgtgaacttcaaatag

SEQ ID NO: 59333 - DNA, 600 bp, Chicken  19866894317513_1
agtctttttgtttcatgaagtgcgggctaaaacctagtccagtataaatgcatcataacatatgtggttgaattttgccagcatgttacaattcacacatggctcttctggaagctctcgtgacatgtcacttcttagcatggcctgagttaataactataacagcgcacacatggagggcatagaaacttttatccaccagcagatatcaagtatttctcttctttcatggaatgacctctgattcatggcatgaagaggagaaaagtgcatttcagaaaactttagcagctaagagaygggtgtatcaaaatgtggagtgaacaatgagtgctgaatttcttgttactccagtgtgtaatgaaaagtcaattttttccagaagacacgaatcatttcaagttttcagcggctccacacctcactctcagatgacagaatacggtcaccttggggttatattgatcagaagaagctattgattagaaaaagtgtttgcagattaggaatcttgcaaaggagttactcagcaatctctcttaattgggatatgttcaccacttgaaacctaatttctatccccatttaagtgagtcaata

SEQ ID NO: 59334 - DNA, 600 bp, Chicken  19866894317517_1
gagaaacgttggccttgctctgtgggacagagatattttctgataggttgttttgttgtgttctgagcatatttgtattgtttggatttgcattctattacccactaacagtatttgacagcatactccctttgtagtgtacttgctcaaaatcgcctccagctgtgcttgagaaatggatttggtttgaatgcttggttaaaataattcagaataagctaaaaggccttacattgatgttaattcacaaaatgaaatttcaaacatactatgaattaagatcgtggacctactgtgttrtagtagatacagaagcactgacaaatgctcctgttggcctgggccggccgtgctggggaggagatagggaggaaggagactttctgctcgactctcagggcatcttggggaaatctgaggaaattcagtggtgctaaaaggatgcataggctttctgcactgtgtctgcagttccctttggagcacacagtggggtcatgcacactttcccattcagagctgtcagaacatttctatcggtctcagtgtcgatcgctccctgactctctcccacccgtcccccctccagggtcaggcctg

SEQ ID NO: 59335 - DNA, 600 bp, Chicken  19866894317537_1
cttatctagcaaatctgcccaagtcaatcatgaaatccaacccaaactattagttgacaggtagaaatcttttcctactggatgcatgaagtacagactgatctttcattttatctgtaggattattcaacacatttgagaatattcagtataatttgtttctacacaggtaaaatgagaaatacaatgaaacattcaaaatatagttaaggtagagaatacatccaaaacagacttaggaaaatgatatgcaaatagattacccataattcaaataggtcagaaatcactcaagaaaaraaggcactggacaaccttttctgctcgtggcttatgagccatttttgtggagttcctccccagtaataaaacttccacttctttgctttaactacccattcaaaattaatgccgaaagatagcatgaagttagggtcaagaagcagaagggagcagtcttaccaggaaacagaagtaataattgctacaggatgaacagtgaacataattgctttaccagatttgaatactagaactactgaggtcagtcttaagctgaacaggtcattttgtctaaccctactcaaatcatcatgagga

SEQ ID NO: 59336 - DNA, 600 bp, Chicken  19866894317538_1
attatttttttgctagaggaatctttttttttttttttttttaaagagtgtacattattatctcaactctttcagtccctctgaaataggttctctaccgtctgtaactgagagaatatactcctgtgtattctcttatggaggctgtgaatgctgcaaatgtggattacccaattataaaagttgggtaattatcattaggactaattataaaaaattctgtctcatttataaccagtaagaatgccatttgtgctgcactattttgaaggaattaacttttctcttcttattatctawttgaaaaatctgctagttagaacataatagtacccttaccaattttcaggttttgctggtactcaaagtttgtttagactctgttatctggctctgacacttgctttaccttgctttcacatgagtgttgcatactgccgtcttatcagaatacattaattgcaggaaatataattgactttctcttaatagacaccttcattgtataaattacttttgaatccctcaaacctggcaaattaaatcttctatttctgccctcgctcatacaaaatcaggaggaaagagagagtgcaagac

SEQ ID NO: 59337 - DNA, 600 bp, Chicken  19866894317542_1
cctctcccccccaaaattggaaacaaattatatatttcctggcagccagtaagattctttattgccagtacgtaagaaataatgaaaagccttcctatttctgtaattcaaattcatgataatagttttagagtagaacatggtgtaatttattgtgaatattaaatggaatggaagtttcatgggatgtaaataaaactgagatactggtaatttgcctagagaaatgaatgctattatcagtgggtgacatttcttatgtatgtattcttatacttcaccatgttgacaagaatcaayaattggcttcctccctttctgaatagatatctgaaattctataaatttacagagcaagatattgtaaaattgtgcaatgaactgtgtaaaagttgccatataaatttgtttctgagattttgtctttaaaaactgtttgaaaacaagcgaacataatcttctcttgaaaagacttcctggctaatcacagcacaaatgaagtaagtgctcaaagggagcccttttgttttaacttttaacatattagttggaggaaagaaggccacagcagaaaaaaataaagaacagtcccagtgagcc

SEQ ID NO: 59338 - DNA, 600 bp, Chicken  19866894317546_1
tttattttttgaaaaaccccagcaaaacaaaactatagaaaaagaactttgaggacacagatgccttctaggggaaaggatgctctttttttagtggcaaaggaagcacgttggcaaataatcacaggtgttcctgcatcagattttaggaattaaagtctcaaaggttgtatgcaagaaggctaaactactctgtattatcccataaaggacctcaacgaaggaaaaagttaacactctactttctttaccttgtaggctttttttatttctatcaacaatgagagattatatatcgcrttttgttacaagaaagctgtacatttagtgtctctaaatgagtttgcaaccaggttggttaaaacagatcatctgatttctgttgcactttttctgcaatttgtattcccaaagctcagctcactgacattgttttcctcaacgaatatgttaatcacaattgcacatacttctgggcttaagcaatgcttatgtgataaaggggaaaaagaacaaaatgtaaactaggagtggccttcattttctctattcataaataataaggcaataaatagaaataaatgatggctgcccttttga

SEQ ID NO: 59339 - DNA, 397 bp, Chicken  19866894317550_1
aaaggagagagacattgtcttttcttgcatattttgagagcaagattaatctaattcaacatgagctatctatccattaaaagcatcttcatttttttctgcattctatgaaaaaaaggcaggtagctccagagggtaattaagacatcagtgtatgtgcaagtttcctcaccctgtttttgatttccctctgctaacaatggaaggaggcccaataggcagctcatactagttttctgactttcagatgggcaaaggacatccatacaaaagataatagtaataataataatatttttwaaaagaactatttttattcatctgcttatttattcaagtttgtactgatatgaactcctgttactagagtaaatagcagtgctagtatcatctattt

SEQ ID NO: 59340 - DNA, 600 bp, Chicken  19866894317551_1
actggtggatgggaaactggacatatgtcagcaatgtgcccttgcaacccagaaaaccaactgtatccttggatgcatccaaagatgtgtggccagcaggtcgagggacatgatcctgcttctctatcctttgttggcgaggcctcacctgaagtgctgtctccagttgcggagttctcagtacaggagagacatggacctgttggagcacgtccagaggagggccacaaaaatgaaccacgggatgaaacacctctcctatgaggacagactgagagagctggggctgttcagcctcgrgatgagaaggytgcaaggtkatctgatagcagcctttcagaatctaaaggggagctacaggaaagaaggtgtctgattctttagcagggtctgtgrtgacagaacaggggaaatggtttcaagctcagggagggtagatttaggttagatctaaggaatctttcacagtgagggtggtgaggcactggagcaggttgcttagcgatgtggttgatgcctcatatctggagactttcaaggcaaggctggaccaggccctgggcaacctgatctagctgtgttgtacctgttcactgcagg

SEQ ID NO: 59341 - DNA, 600 bp, Chicken  19866894317551_2
ggaaactggacatatgtcagcaatgtgcccttgcaacccagaaaaccaactgtatccttggatgcatccaaagatgtgtggccagcaggtcgagggacatgatcctgcttctctatcctttgttggcgaggcctcacctgaagtgctgtctccagttgcggagttctcagtacaggagagacatggacctgttggagcacgtccagaggagggccacaaaaatgaaccacgggatgaaacacctctcctatgaggacagactgagagagctggggctgttcagcctcgrgatgagaaggytgcaaggtkatctgatagcagcctttcagaatctaaaggggagctacaggaaagaaggtgtctgattctttagcagggtctgtgrtgacagaacaggggaaatggtttcaagctcagggagggtagatttaggttagatctaaggaatctttcacagtgagggtggtgaggcactggagcaggttgcttagcgatgtggttgatgcctcatatctggagactttcaaggcaaggctggaccaggccctgggcaacctgatctagctgtgttgtacctgttcactgcaggggagttggact

SEQ ID NO: 59342 - DNA, 600 bp, Chicken  19866894317551_3
acatatgtcagcaatgtgcccttgcaacccagaaaaccaactgtatccttggatgcatccaaagatgtgtggccagcaggtcgagggacatgatcctgcttctctatcctttgttggcgaggcctcacctgaagtgctgtctccagttgcggagttctcagtacaggagagacatggacctgttggagcacgtccagaggagggccacaaaaatgaaccacgggatgaaacacctctcctatgaggacagactgagagagctggggctgttcagcctcgrgatgagaaggytgcaaggtkatctgatagcagcctttcagaatctaaaggggagctacaggaaagaaggtgtctgattctttagcagggtctgtgrtgacagaacaggggaaatggtttcaagctcagggagggtagatttaggttagatctaaggaatctttcacagtgagggtggtgaggcactggagcaggttgcttagcgatgtggttgatgcctcatatctggagactttcaaggcaaggctggaccaggccctgggcaacctgatctagctgtgttgtacctgttcactgcaggggagttggactagatggcct

SEQ ID NO: 59343 - DNA, 600 bp, Chicken  19866894317551_4
caggtcgagggacatgatcctgcttctctatcctttgttggcgaggcctcacctgaagtgctgtctccagttgcggagttctcagtacaggagagacatggacctgttggagcacgtccagaggagggccacaaaaatgaaccacgggatgaaacacctctcctatgaggacagactgagagagctggggctgttcagcctcgrgatgagaaggytgcaaggtkatctgatagcagcctttcagaatctaaaggggagctacaggaaagaaggtgtctgattctttagcagggtctgtgrtgacagaacaggggaaatggtttcaagctcagggagggtagatttaggttagatctaaggaatctttcacagtgagggtggtgaggcactggagcaggttgcttagcgatgtggttgatgcctcatatctggagactttcaaggcaaggctggaccaggccctgggcaacctgatctagctgtgttgtacctgttcactgcaggggagttggactagatggccttcagaggtcccttccaactctaaggattctatgattctatgatatgctaccagtatctgacaattagaggctcaag

SEQ ID NO: 59344 - DNA, 599 bp, Chicken  19866894317565_1
  misc_feature (1)..(15): n is any nucleotide
nnnnnnnnnnnnnnncttcacccccaaaacaaggggctgatgaagaaccaccacaactccacctgacagccagcagctccacttcacacccagccccattcccaactcaggggggatgtggtgcagcagtgccagcggccttacctgtgcgactcggcgctgtcggcgctgagctgcttggacagctgcctgtggccataggtgagggaggccatcaggttggcgcggtgctgcatctggatctggttggcactggggctgatggacataccccgcgtgtgggaggacatgccctgcccrgccaccgaggccccttgcaggaggttgttgctgaccatgtcgccgggttcctgcacttggatggtgacctgctgggcctgggactgctgctgcagggccaggcacgtcagccccatggttgggggaggggaacagttaccagactgcgggaagattgtgttgtgggatggcatcccttggaactgggactgggaggctgcacctacgaggaacaaagactctcagtacccatattagcccagggcaaggctcaggagggagcagcacgcagagccccaggacacatggcaaggagagcg

SEQ ID NO: 59345 - DNA, 600 bp, Chicken  19866894317565_2
agctggtgagtgagcagagctggttggttttcacattgagcttgcaagggtggagatggctgaggtggccggatacagtcctgaaccaggcattggaaaacaagaagtgtttatgatcaatactgtatcaagtaatacatttaggatgtggtgattagtgaggtgggacatatccacattctccaaacacttggtccctgactgcagctctcactatcacagcggcaaacatcactgctgaagttcttcaggctcactcctcatcaagtaagctgagctatctaccctcctcaatcccaygtggacctgctctgtagttctatctgcagctattcagaaaacacagctaagacatcagaaagtctgcctcaggctctaataccctggatctgctgatgaagaatctgatggtgctgctcttgctggtacagcatgtgctgctgctgtgtcttctccagtgtcctctcatccatgtgcccaccatacatcttctgaagctgttcacattcctgtaacgagtccaacacaccctaaaagtgaccattttgttcgtggcacacttactgggcaaaaaggcactctgctatctgaaaaatccag

SEQ ID NO: 59346 - DNA, 600 bp, Chicken  19866894317566_1
gctggggacatccaggggctgtggggtggtgctccccccagagcctggcacaccccaacgcctcacccgcagccccggcttgccgtccttgccatccagtccttccaaaccagcagggccctgcagggacaaggaggggactcggggggtgacgagcccagagcagctccccagggaccagcacagggacagaagcactgtgataggcagggggagctcttacctggatgcctggaggtccagggggtccggggggccctggcatccctgtgggcccccgtacaccctcgctgccctgtragaacaccaccrgggtcagggtgtcccctggtgccaccacccacccctgtccccatggcactcaccttctctgctgcaggtcctggcggcccagcggggccaaccttccctgggaagccgggggggccctgaggaggagagaaacattccccagaggtgaacgagatgcccccatagcgcatcccttcatccccaaattcactgcaatgggtttgctacagggatgctctccttgcattgtcccataggatgtgcccagagagaagatcccaacccctgccccacaggatgtactcacag

SEQ ID NO: 59347 - DNA, 588 bp, Chicken  19866894317566_2
caggggctgtggggtggtgctccccccagagcctggcacaccccaacgcctcacccgcagccccggcttgccgtccttgccatccagtccttccaaaccagcagggccctgcagggacaaggaggggactcggggggtgacgagcccagagcagctccccagggaccagcacagggacagaagcactgtgataggcagggggagctcttacctggatgcctggaggtccagggggtccggggggccctggcatccctgtgggcccccgtacaccctcgctgccctgtragaacaccaccrgggtcagggtgtcccctggtgccaccacccacccctgtccccatggcactcaccttctctgctgcaggtcctggcggcccagcggggccaaccttccctgggaagccgggggggccctgaggaggagagaaacattccccagaggtgaacgagatgcccccatagcgcatcccttcatccccaaattcactgcaatgggtttgctacagggatgctctccttgcattgtcccataggatgtgcccagagagaagatcccaacccctgccccacaggatgtactcacag

SEQ ID NO: 59348 - DNA, 593 bp, Chicken  19866894317575_1
tgtagaaaaatcaaagtattgacagaaaatgttaatggttccaattagacacaagcttaaaatagcagattacattctgcacacataaccaaacccctttttttatgtcagctagcgtccataccagatcaagggagtactcagcattgagtgagcttgccctgcccagggttgatcttggttctcagtcaagtttctacagtttgcttggaagctgcgtgcagagtcctggtctattttgaaagaaacaccatgaccatcctttagctggtgaaatctgaaagccaatgtatccccatyacagccttcacagaccgtatatgttcatgtgcacatatttacttagctacaaaatttggtatgctgcataaggcaacatgagagcactaaagagaattagtaaaaagatatagagtcctccatattcttgaagtaattcccttggaggtaatggaaagtaagtggaagcaaaagataacattctccatttccattgtatacacttgaggaaagaaaactacagcactgatcaaactgatgctgagtcatcatcagagaatagctacagattctcggatgagcatccccgtatc

SEQ ID NO: 59349 - DNA, 599 bp, Chicken  19866894317576_1
  misc_feature (1)..(40): n is any nucleotide
nnnnnnnnnnnnnnnnnnnnnnnnnnnnnnnnnnnnnnnncgccgtgccgtgctgtgccggaacaaagcgccctctggcggccgctccgcagctacccacaggcggccctctgaggcggggcgtggccacagggcagtggggggcgctgtggtccctcgtggtgcccaaccgccgttccctcgggcacgcggcagggccagcttcgctcttcccgccgtttttccgcctcgcgctgcgcagcagcgtctcctgaaaagagccgggggcaaagggcctgtgagtaagcaggctggctccgygtcactgcattccggtgttgctcaccgcaggaaagctttctgatgcgtaatgttcctcgagtatttgtactgaatcgggaactttgcaacccttgatctctactgtgtccgcaggcagctaatgacacagcacagttacgagcttcagatgctaaaactggaagagaagtccacgctgactgcagagtatagctgagtacaaactgcttctgtgcccccgaggcttgggtgttactccagccctctgtttgatggggtacagcttctcaggacgtacctgagaaataaagctggtggga

SEQ ID NO: 59350 - DNA, 599 bp, Chicken  19866894317578_1
  misc_feature (1)..(37): n is any nucleotide
nnnnnnnnnnnnnnnnnnnnnnnnnnnnnnnnnnnnnatgcctgcggggttccgccgcggcaccgccgccatctgctgggcaccgcctgcccgcggccccgagccctgccctgcgtcctgctgcagcccccggcatccccgggatgccctcaccgccgtgctgccatccctctaacttggggctgcggcggtgcaggatgcaaggagatgctgtcccaggatataggcgtggggagggggtattctgacagcgagcttccccccagcagccatccacgctgccccatgcaggaaaccccrgtgtccatcccgctcagggcgcagtgtgtctggctgcaggatggagagggggctcatttctcgctaacagcaaagagtgttctccactggcagcacgtcagagttcctggaagggtttcaaagccattagctccttggtttgtatgtgagacaccctgtcagaatcaagcatcacctggtggagctgctcctggggtgaaaacagggatggggctgagcacaacctgcctatggagccctgagaagctgtgctgccattcagagagacaagccacggccatgcctctaatgagaagggt

SEQ ID NO: 59351 - DNA, 600 bp, Chicken  19866894317585_1
tttttctgattctaaatccttgaataccttgtaaatactggaaacctcttgccatttctctaaaatgtcctcacatcttcctcgcagcatgcacccgttcttcagttctttccctttcccacccagttgattattctggcagagcaatgcatgatcccgtaggtgctcattttcttggtgcaggagtggcttgttagcacatgagggatgataaaaggaatccttacgcgtttttgattccccagaaaagaggaagaaatgtcttgaaaatgctggaaacccagcatgctgtctcatctraaaatactgagttgaatacttctgtatatcttgtgagtcgttctgtggttcgtgtggtactcccagttgtgccagctggttgattgaaatgcttctccgtctctttctgttgcttcttggactgagctgacctttgatcctgctgagttgctgtcttccagtgatgctttccttcctcagggtttatacattccatgttggtatttttctccccaatcctttgctgtgaccgacttgatgtcacttctttgttctccttattttgcatggctgtagcttccctttggtctcgcaactctc

SEQ ID NO: 59352 - DNA, 600 bp, Chicken  19866894317585_2
atcttgtgagtcgttctgtggttcgtgtggtactcccagttgtgccagctggttgattgaaatgcttctccgtctctttctgttgcttcttggactgagctgacctttgatcctgctgagttgctgtcttccagtgatgctttccttcctcagggtttatacattccatgttggtatttttctccccaatcctttgctgtgaccgacttgatgtcacttctttgttctccttattttgcatggctgtagcttccctttggtctcgcaactctccatttgtttgctcttcagaaatttctrtttttctaattattctgtgaggccatggacacagccatgcttcacagagctgggccctggttacactgcagctgctggctttggggagaaaacctgcataggcagagcagttcccttaatgcagtcggtcgttccagtgcctgggattgcaccaggtgcagttttgcacagtagcgatctgttaattccaccttactgttccaatgccttgaataaaaagccagaaataacaatggaaaacttcattcttcctggctatgatgcattcttctgcactactgaaaactatttctaaattca

SEQ ID NO: 59353 - DNA, 600 bp, Chicken  19866894317585_3
cttctgcactactgaaaactatttctaaattcaggcttttcatgaaaaaacaaacaaacaaacaaacccaaagctgtaagagaatgccacgagtttaaaaaataacaaaataataaaatctgttattatcaagagacttatgatgcaccttctactttgatcttagcatccaagacacgcagcttgttctgaagatgcttttctgccttaaatctgcaaatgcaaaaatgctgaatattcagaattttggcttgaagccctctgaactgctgatagcagccacctgtgagctgaaaaccyggggaagggcttgaagtcaggccttctcccccctcggctttaacctcaatagcacgtgagaaacctttgactatcaaatcttcctgtattcctagcagtgtttagaactcacagatattctatctcatagtttggacatcttagatgcaagtttatagactgaagaatttttgatgtgttctgtgtttttaaaaagttttgctggttttggtacgtgtttacgtttgcaggctctttgaataggcatgccacaaacgtggagggaacaaacccgtcggttttgggcaggccggtcgacac

SEQ ID NO: 59354 - DNA, 600 bp, Chicken  19866894317588_1
aaagtttcttgacaaagagttacaatagttcttggtaaggggagaaatggaaagaaaatgttctgtgtggttatgataattataatccaaccagacagctctgtgcagaaagcagtcctttgtgttgttttgctggggagaggaggaccatttgaactcatctcatgattttgggcttcggttttattttaacaaagtacagtattgtttaaggactgttgcagttcctgtgaaaacgaggtgggctgagttatcacagcagtgtgtgcagtacaattctgctgactttgtgtgtgcacrcagagaggtccccatctctgctgcaagggcagtcatggtaattctcttaacttgtctctctatcaatgggagagcccccttcttagctaatctactaacactttgttactgaacgttatttcacccactgggcttgcattaagggcaaattactaaagattcaatctttatgatgagttccttcctttcagagtccwgtgcacactgtatgttttcctatgttaaattcatctctctagctctgggagtcactgtgcagttctggcagcactcacataccatttgcacgtaatagcagtg

SEQ ID NO: 59355 - DNA, 600 bp, Chicken  19866894317588_2
tacagtattgtttaaggactgttgcagttcctgtgaaaacgaggtgggctgagttatcacagcagtgtgtgcagtacaattctgctgactttgtgtgtgcacrcagagaggtccccatctctgctgcaagggcagtcatggtaattctcttaacttgtctctctatcaatgggagagcccccttcttagctaatctactaacactttgttactgaacgttatttcacccactgggcttgcattaagggcaaattactaaagattcaatctttatgatgagttccttcctttcagagtccwgtgcacactgtatgttttcctatgttaaattcatctctctagctctgggagtcactgtgcagttctggcagcactcacataccatttgcacgtaatagcagtgggagaggaaaatgacccatttaaagaaactgtgagatattcaaagccatcaattagaaatgtctgtgatgtaaaattgtcctctgatacatcataagtcattcagtgtttactagaaaagacatcttaaggaggcattttctgtactgcttgtacaggcaaacttcaatgcaaattaattctaatcattttttatgg

SEQ ID NO: 59356 - DNA, 600 bp, Chicken  19866894317592_1
ctgatgacaacgatgccgaagtcaccatgacggatggaggtgccgatgaagaggaggacaggaaatcgaggtacatcaaggggctcttcatctccaagcattccagcgaggagagcggctacgccagcacggctgggcagagcgggccgggcgctgtggtggagcagagcccctcagtttccacgtcctttggcctctccgccatgagccccaccaaggcggcggtggacagcctgatgagcatcggtcagtcactgctgcagggtgctctgcagcacaacgtccccgaggagccgcacrctgccggccgccaccccggccccagcgaagtcaaaaccgaagtgatgcaggtggaagatgcctccagccatgagagcccacagccggcagagtcgggcgcttccagcggggagaaatccgatgacaagagcaaggaagaccccggcaccccgacccgcagtagcgttatcacaagtgcccgcgaactgcactatgtccgcgatgagagcacggagcagcctcccgaggccacacaggggatgctggtggggccggagcagtctgcggctgcgagtgagaagcctttgggtgtctactctg

SEQ ID NO: 59357 - DNA, 600 bp, Chicken  19866894317593_1
gctgaggctaagattcctaccatgtccaagggtgtacactgttccctcccacttctgagaataatatgctgtagcagtaatcacatctgagttgtttctttccagatgtcattcaagacagtattactaataatggtctgctagggaatgtttctgccaagttccaaacctgcatcttgaatgtagcaaaggcaaaaaatgattccaatgaaccaagctgaagactattcttattgcaatctattctgggagaggattccaggaatttaataactgctgcatgaatactcatacatacakacatgatcaataaacttcatattttatgtttctcatttgtgtagcttggtagatttgatttatgattttttttctagcagcttgggatgtgatattacagacttatgatagacagccaatttatagtatttaatttaaacactgctgggacattgtacaaaagtttgagacaactaaaacaaatcttaatcaagtgtcaaaaataaatctgcctaaaaaaagctgatagaagaagagaacaagaaatagaaatattaagggaaaaatgattaattattacatttttgcacacttaatttt

SEQ ID NO: 59358 - DNA, 600 bp, Chicken  19866894317596_1
tatgtatcatccaggaaaaatctaagtaaatgaatttaatttaaaaaaaatgcaatactagctcaagacttttgcattcagctaacattcttaaataacggcttgctgatttaatcactgacaatgagcattttccagctatggctcctaccttcctatctttcaccacaaatgaatgttgttgaatttctattaatattataaacatcctcttctctgccagctgttctttgggaagaacattagtaccaaggagtcttcatattcattaagaaggtttcacgctggctggctttactytggagtttcactgctcaactttttattttttttaatcttaccctgctgctgaagttgcagaaaactatttatcaatgtagactgaaaaagtacaaagctcttttagccccacgtcttttaacttagtgatcactatgctgttttcggtagttagcatctattcatttattaccaatatttaaaaccttcttgcttacatcatgatgcatatgtcatttctgagcagatatcagttaaaaaaaaaattcacgttatctttcaatattgtagtccctccttgttatcgtagtcgatcctgaa

SEQ ID NO: 59359 - DNA, 600 bp, Chicken  19866894317598_1
cgttgaggccgatgacgcccgtgatgaacaaatccaggtagtggctggtgcacatctggtggatcaggaagcggaagcgggagtaatccgaatagtagggcttgcactgtgcttctgcagcgggaggagagcggagaggcgcgtcaggtcacttctctgtgcctcgctgcagccaatgcaccctcacctcccacactgacagattctagactggttacagcgacctgctgtcgccttcttcccctccctccctccctctgccggcacgttaccaccttgaacgcacagcagggctccctycatctcacatccattaaacaccttcagcgggacatgcgctatactcagccttatggcatcagggatgaggtgagctgggatcgttgtgctgaggagtgttttcaccactgggaaatttcaattaagtttaaattaagccaacaatttctgttgctgctgagcttagaaagtccccaaagcatccaaaagcccaattagcagtcagatgttggggacagattttagtaccaatggcttagaaataaagggcatccagttagcggcgggctttgaaagagaagcaattcggtcctattatgt

SEQ ID NO: 59360 - DNA, 600 bp, Chicken  19866894317608_1
ttttccaacttctgtatcatcactcagggaaaaaatgtggaagatgaacaacactctaagaacaggagtattttggcttttgttgtaaccagactgactaagcccatgcagatatatttgaagctctctctccccatttgattgagagtgccttttggctgatcatttttctctagcagttagcataatttcttctgtctgtcccttaaactcaagatctagcaggtaggacattcgccaatgaaatatcagatctttccctgggtcaactggacccagggattgggtacaatctcttaygtgctaccatccagaatagcaccctatgcacaatccagaagtttgctttattgtgataaaatagctcagatggctgctgaatcaggcaaagcaggcataaaccaggatctcctaacttttcagagcactgccacactagtaaataaagaaacactgcttaatgtataagtaatttacgtgaaatcgactgaatataatatgaatgactcaaaacatatggaattatcctaaaatgtagaagatttgaaaataaagtcctgcagagtagatgccagtggtggagtttgaggtcttgagcag

SEQ ID NO: 59361 - DNA, 600 bp, Chicken  19866894317609_1
aagtgcctcaggtcttctagctcactgtgcattatttcaggctggttacagaatttgtctcctctggcttttgtttaaaacacctccaccacatactgcagagaccacagctgtgacggtaacgtgatctgctgaaaaacattaatggtagactactaggttcagtatagagactggagacaggcacttttaaaaacaacgctgatattttcattataacctaaagatttgcaaagaagtgtagacaaatctactcctactcacctgtacttgagcatgtaaatactaattagctggtcytgatttcccaaaggtatgtgtttgcctacctgtggctgtgagtgtctgatgcagctggtggagaggggcaggccatggccacaggcattctaatctgccggtgtgtggagcagcatcactgggaactggctcagatgaggcttaatgttttttcttaaaactgtaatgctgatgcaackgrgaaatttcagagctttcagtgagcttatttattcagaaaactgtttctaaggggcctttgtgagaagaacatcttgcccagctcagtaacctgcctccagcagcaagtaacattcagtg

SEQ ID NO: 59362 - DNA, 600 bp, Chicken  19866894317609_2
acaggcacttttaaaaacaacgctgatattttcattataacctaaagatttgcaaagaagtgtagacaaatctactcctactcacctgtacttgagcatgtaaatactaattagctggtcytgatttcccaaaggtatgtgtttgcctacctgtggctgtgagtgtctgatgcagctggtggagaggggcaggccatggccacaggcattctaatctgccggtgtgtggagcagcatcactgggaactggctcagatgaggcttaatgttttttcttaaaactgtaatgctgatgcaackgrgaaatttcagagctttcagtgagcttatttattcagaaaactgtttctaaggggcctttgtgagaagaacatcttgcccagctcagtaacctgcctccagcagcaagtaacattcagtgcgaagagttttccttcacaagaactggctgctccagtgggcatgagggacatgcagtgcaggtctgactgaccacccagtattcaggtacagagagagaattacatttattaggtgtactcactatttgatacccggggttcacggctgtggatctctgcaagatccttatttgcttgt

SEQ ID NO: 59363 - DNA, 600 bp, Chicken  19866894317609_3
aggcacttttaaaaacaacgctgatattttcattataacctaaagatttgcaaagaagtgtagacaaatctactcctactcacctgtacttgagcatgtaaatactaattagctggtcytgatttcccaaaggtatgtgtttgcctacctgtggctgtgagtgtctgatgcagctggtggagaggggcaggccatggccacaggcattctaatctgccggtgtgtggagcagcatcactgggaactggctcagatgaggcttaatgttttttcttaaaactgtaatgctgatgcaackgrgaaatttcagagctttcagtgagcttatttattcagaaaactgtttctaaggggcctttgtgagaagaacatcttgcccagctcagtaacctgcctccagcagcaagtaacattcagtgcgaagagttttccttcacaagaactggctgctccagtgggcatgagggacatgcagtgcaggtctgactgaccacccagtattcaggtacagagagagaattacatttattaggtgtactcactatttgatacccggggttcacggctgtggatctctgcaagatccttatttgcttgtgg

SEQ ID NO: 59364 - DNA, 600 bp, Chicken  19866894317614_1
tttctgacaaaatatttgaatgaattcatggaattttggtgtctagtttgtatttattgcagtgatatttggatgcatgggtcatgagacttcttttgaaaacctaacctttagaaagaattttcaaagtcatttcagctcaaaacagtacttatgttgctaactgtcaagggaggaaatactagaaaaatatgtgttttgaggcatgttaagggactttaaaaattctcttttatttaggacattagactaatagttctacctttgggtttcgtctcctgtctttgagatgttttaaaytgttcatgcaaatcttgggaatctmtaatggtttttgttatttgtgaacataaagtacttaggagagaacggaatggttcattatttatgcastgcataatattttagataacactattttttwtttgtgttgcaaaatatcttgttgcaaaataatctgaataaggtcagcggaaataagcctgagaaataagctctgccataactacactaatgatttctgattttaatctgaatgaaatagaattataatggtattaagcactgwgaaagcattaaaaaaatgttcaatctcagaaa

SEQ ID NO: 59365 - DNA, 600 bp, Chicken  19866894317614_2
tcatggaattttggtgtctagtttgtatttattgcagtgatatttggatgcatgggtcatgagacttcttttgaaaacctaacctttagaaagaattttcaaagtcatttcagctcaaaacagtacttatgttgctaactgtcaagggaggaaatactagaaaaatatgtgttttgaggcatgttaagggactttaaaaattctcttttatttaggacattagactaatagttctacctttgggtttcgtctcctgtctttgagatgttttaaaytgttcatgcaaatcttgggaatctmtaatggtttttgttatttgtgaacataaagtacttaggagagaacggaatggttcattatttatgcastgcataatattttagataacactattttttwtttgtgttgcaaaatatcttgttgcaaaataatctgaataaggtcagcggaaataagcctgagaaataagctctgccataactacactaatgatttctgattttaatctgaatgaaatagaattataatggtattaagcactgwgaaagcattaaaaaaatgttcaatctcagaaatcaagactttggaattttgttgcaa

SEQ ID NO: 59366 - DNA, 600 bp, Chicken  19866894317614_3
ttttgaaaacctaacctttagaaagaattttcaaagtcatttcagctcaaaacagtacttatgttgctaactgtcaagggaggaaatactagaaaaatatgtgttttgaggcatgttaagggactttaaaaattctcttttatttaggacattagactaatagttctacctttgggtttcgtctcctgtctttgagatgttttaaaytgttcatgcaaatcttgggaatctmtaatggtttttgttatttgtgaacataaagtacttaggagagaacggaatggttcattatttatgcastgcataatattttagataacactattttttwtttgtgttgcaaaatatcttgttgcaaaataatctgaataaggtcagcggaaataagcctgagaaataagctctgccataactacactaatgatttctgattttaatctgaatgaaatagaattataatggtattaagcactgwgaaagcattaaaaaaatgttcaatctcagaaatcaagactttggaattttgttgcaagttctccctaacttcctagattgggctgttaggattggaatctacagcacatgtagtatttgttttta

SEQ ID NO: 59367 - DNA, 600 bp, Chicken  19866894317614_4
caaagtcatttcagctcaaaacagtacttatgttgctaactgtcaagggaggaaatactagaaaaatatgtgttttgaggcatgttaagggactttaaaaattctcttttatttaggacattagactaatagttctacctttgggtttcgtctcctgtctttgagatgttttaaaytgttcatgcaaatcttgggaatctmtaatggtttttgttatttgtgaacataaagtacttaggagagaacggaatggttcattatttatgcastgcataatattttagataacactattttttwtttgtgttgcaaaatatcttgttgcaaaataatctgaataaggtcagcggaaataagcctgagaaataagctctgccataactacactaatgatttctgattttaatctgaatgaaatagaattataatggtattaagcactgwgaaagcattaaaaaaatgttcaatctcagaaatcaagactttggaattttgttgcaagttctccctaacttcctagattgggctgttaggattggaatctacagcacatgtagtatttgtttttatctctcttgtgttcttaacatttctttgact

SEQ ID NO: 59368 - DNA, 600 bp, Chicken  19866894317614_5
gtttcgtctcctgtctttgagatgttttaaaytgttcatgcaaatcttgggaatctmtaatggtttttgttatttgtgaacataaagtacttaggagagaacggaatggttcattatttatgcastgcataatattttagataacactattttttwtttgtgttgcaaaatatcttgttgcaaaataatctgaataaggtcagcggaaataagcctgagaaataagctctgccataactacactaatgatttctgattttaatctgaatgaaatagaattataatggtattaagcactgwgaaagcattaaaaaaatgttcaatctcagaaatcaagactttggaattttgttgcaagttctccctaacttcctagattgggctgttaggattggaatctacagcacatgtagtatttgtttttatctctcttgtgttcttaacatttctttgactctgttggatttcaaaaatgcatgttgagcctggcactctgctgttagtttcaccaggctttttcttcacctgttayatttgctgtgctcttttactcctggattctttctaaagtagagtgtttcctttcatgccttgaaatag

SEQ ID NO: 59369 - DNA, 600 bp, Chicken  19866894317614_6
cataactacactaatgatttctgattttaatctgaatgaaatagaattataatggtattaagcactgwgaaagcattaaaaaaatgttcaatctcagaaatcaagactttggaattttgttgcaagttctccctaacttcctagattgggctgttaggattggaatctacagcacatgtagtatttgtttttatctctcttgtgttcttaacatttctttgactctgttggatttcaaaaatgcatgttgagcctggcactctgctgttagtttcaccaggctttttcttcacctgttayatttgctgtgctcttttactcctggattctttctaaagtagagtgtttcctttcatgccttgaaatagatgaaaacataggattggtcagtatttraaagataagatatttgggtgtcaaatctgcttgtgcatcttactgcagcatctcaaattcaagtcttgcaaatacagagctgaagatggcatctgaaactgcaaatcaaaacgcagatgggagaaaatatctcctttttgaatacacagcagaaaaattgtgccattaggaaaaaaatatatactttttttaaaattatttttt

SEQ ID NO: 59370 - DNA, 600 bp, Chicken  19866894317614_7
gaaatcaagactttggaattttgttgcaagttctccctaacttcctagattgggctgttaggattggaatctacagcacatgtagtatttgtttttatctctcttgtgttcttaacatttctttgactctgttggatttcaaaaatgcatgttgagcctggcactctgctgttagtttcaccaggctttttcttcacctgttayatttgctgtgctcttttactcctggattctttctaaagtagagtgtttcctttcatgccttgaaatagatgaaaacataggattggtcagtatttraaagataagatatttgggtgtcaaatctgcttgtgcatcttactgcagcatctcaaattcaagtcttgcaaatacagagctgaagatggcatctgaaactgcaaatcaaaacgcagatgggagaaaatatctcctttttgaatacacagcagaaaaattgtgccattaggaaaaaaatatatactttttttaaaattattttttaagatgaaagtcaaaggcagataatgttttcagaagaaacttcttgttttctgtttttcaaaaaaaaaaacacataggaagcttttttttttttaa

SEQ ID NO: 59371 - DNA, 599 bp, Chicken  19866894317627_1
  misc_feature (1)..(168): n is any nucleotide
nnnnnnnnnnnnnnnnnnnnnnnnnnnnnnnnnnnnnnnnnnnnnnnnnnnnnnnnnnnnnnnnnnnnnnnnnnnnnnnnnnnnnnnnnnnnnnnnnnnnnnnnnnnnnnnnnnnnnnnnnnnnnnnnnnnnnnnnnnnnnnnnnnnnnnnnnnnnnnnnnnnnnnnntttggttgtatttgtttttatgtagttctgaaattatgaacctgatcccagtctttggtgccatccaaaacactcctaaactgcctacttacacattgaaaatatgtgaaaactgtaaacgccacctcctaygtatgttggatgctcwcaatagactcgtgcttgctcaagaatggacctggttttgacccaaatgtaacctgtgttgtcgtgacatcttttcaaatttaaccaccatatttcacttcaaaattgacttcttctagctgaaaactcattcacgtttctctgggaaattgctgtcttattctatgaaaattgtgtctgttagcagccattactctggaaattgtctcatttccaaattcacaatgaaatggcttttcatacacttaacacccacaatttttttattttgttttgagctgatt

SEQ ID NO: 59372 - DNA, 599 bp, Chicken  19866894317627_2
  misc_feature (1)..(152): n is any nucleotide
nnnnnnnnnnnnnnnnnnnnnnnnnnnnnnnnnnnnnnnnnnnnnnnnnnnnnnnnnnnnnnnnnnnnnnnnnnnnnnnnnnnnnnnnnnnnnnnnnnnnnnnnnnnnnnnnnnnnnnnnnnnnnnnnnnnnnnnnnnnnnnnnnnnnnnnntttggttgtatttgtttttatgtagttctgaaattatgaacctgatcccagtctttggtgccatccaaaacactcctaaactgcctacttacacattgaaaatatgtgaaaactgtaaacgccacctcctaygtatgttggatgctcwcaatagactcgtgcttgctcaagaatggacctggttttgacccaaatgtaacctgtgttgtcgtgacatcttttcaaatttaaccaccatatttcacttcaaaattgacttcttctagctgaaaactcattcacgtttctctgggaaattgctgtcttattctatgaaaattgtgtctgttagcagccattactctggaaattgtctcatttccaaattcacaatgaaatggcttttcatacacttaacacccacaatttttttattttgttttgagctgattgcacacctctttgtgt

SEQ ID NO: 59373 - DNA, 600 bp, Chicken  19866894317627_3
atacacttaacacccacaatttttttattttgttttgagctgattgcacacctctttgtgtcactaagtgctcgtttgtttcttctgaaagctacaataacgaaaaatatccaattagagaggggaataagtgctaattgcctcagcctggactcggtgactgcagtttgatgatagcacgtgtggaactgtgattaggttacttttgatcttcactgctgtatgtgagtttataactttgctcattggttttcctggctgttctagtagatgatgtggagtttctttttagctttatgktgctatttcaagagcactgagatatggcaatgatttttagagtatggagagaggttatttctcactgtgcatgagtttgtaacagggagaaaggttactcagtaccatagtytcccacatcccttcacaggtttctggacagagcaataatcccagctctcagaaaatccatgtaaaaatccaatatataagagactttggtacatctttcagtaagactgtgtgctaacagtgctgaaaagtttaaaggaaagattttaagaacaaatcctactgaaacctattcgaggttgtcagctt

SEQ ID NO: 59374 - DNA, 600 bp, Chicken  19866894317627_4
aattagagaggggaataagtgctaattgcctcagcctggactcggtgactgcagtttgatgatagcacgtgtggaactgtgattaggttacttttgatcttcactgctgtatgtgagtttataactttgctcattggttttcctggctgttctagtagatgatgtggagtttctttttagctttatgktgctatttcaagagcactgagatatggcaatgatttttagagtatggagagaggttatttctcactgtgcatgagtttgtaacagggagaaaggttactcagtaccatagtytcccacatcccttcacaggtttctggacagagcaataatcccagctctcagaaaatccatgtaaaaatccaatatataagagactttggtacatctttcagtaagactgtgtgctaacagtgctgaaaagtttaaaggaaagattttaagaacaaatcctactgaaacctattcgaggttgtcagctttcacatagtgactgagacagggtatgaccatctcactgaatctaatcttagtcacgtgcttattcccaaaaatgcaacagaaatctgccctgcatactccaatgagctataa

SEQ ID NO: 59375 - DNA, 600 bp, Chicken  19866894317630_1
acacattgcaagctacaatagctactaagacttctgtatgactgtacacgttaaatgtttgtacttatttcaaaactaggaaatgaaaactcagttattcaggtactgggatcacactattgattaacaccagttttatggttttcagacagttacacaggcactaataaaaacaattacagtaatggactaaccctgacccaagcaaaagcatattccgaggttggacagcactgttctccccagccccatccacttatattgtatggtcagaacctacgaaatagattttcacatctrgtttctacatatagcaacggatgaagaagtagtcacccacccagtcttcctcattctgaatgctacaacacgtagacccacaacagtgtacagaacctgaaattattccatgtggcttaagcagaaaaatgcaatgagcataaaaaccgtttttgacacagagatttctgggcagcagggggagtatgtggctcagaactatgcgcaaagtgaagaaaaccgtgattttgaaacactgctcatagcattcccaagatatcagcgagcagacctttgaaccaggaaagaaaaacaatgcag

SEQ ID NO: 59376 - DNA, 600 bp, Chicken  19866894317637_1
ttcgtagcatgggaacaaggtcataggtagggaccaggctgtagttactggttgcaattacttaacatttgttgggaatcaacatgctatattttaatcccaaccaattctcattctcacacactaatatgtttttggagaaaaggggaaaggaagcagaacagacaaaccaacaggatttcttcataaaattaatagtttgaagaacagtgacttatgatctttatcactgaaggcctaatgacatacaccaaataaattatgtaaaatgaaggagatggaaagaaagactttgctcaraattttttaggatttttgtctaatttgaatggcttactcctgaaggagagaataatcagcatttgttttccttcatgtttgtgtcttgttgattwaaaaaaaaaagaaagaaaaacaaacaaacaaaaaaagtaattgtatatcaccagatatacagttccactgtatttaaggttgtaacatttaaggatgtcatgctaacgtgaaatttaggaaacaaagctcgtatagggcaccttttcagcattcctatttactttcttatggcctacatgtattcaatcatctcctcagtaatgt

SEQ ID NO: 59377 - DNA, 600 bp, Chicken  19866894317637_2
aatcccaaccaattctcattctcacacactaatatgtttttggagaaaaggggaaaggaagcagaacagacaaaccaacaggatttcttcataaaattaatagtttgaagaacagtgacttatgatctttatcactgaaggcctaatgacatacaccaaataaattatgtaaaatgaaggagatggaaagaaagactttgctcaraattttttaggatttttgtctaatttgaatggcttactcctgaaggagagaataatcagcatttgttttccttcatgtttgtgtcttgttgattwaaaaaaaaaagaaagaaaaacaaacaaacaaaaaaagtaattgtatatcaccagatatacagttccactgtatttaaggttgtaacatttaaggatgtcatgctaacgtgaaatttaggaaacaaagctcgtatagggcaccttttcagcattcctatttactttcttatggcctacatgtattcaatcatctcctcagtaatgtattgtgatgctttgatttccatctgcagtagagaacagaagtcagtatgcatgccagctttaatttaagaaaatatattttggtttttggtatac

SEQ ID NO: 59378 - DNA, 599 bp, Chicken  19866894317642_1
  misc_feature (1)..(129): n is any nucleotide
nnnnnnnnnnnnnnnnnnnnnnnnnnnnnnnnnnnnnnnnnnnnnnnnnnnnnnnnnnnnnnnnnnnnnnnnnnnnnnnnnnnnnnnnnnnnnnnnnnnnnnnnnnnnnnnnnnnnnnnnnnnnnnnnnccagcatccaattctagccttgctgaattccttgattttattgcctgtctggcaatgctgtttgtaatgaagctagaataatgccatcttctgagaatcttgtctgctatgttggttggtttctttgcttttagtcctgtatttttattggtgaaaatactggatttggasgggaaaaaaaaaatggaaagtgtgccctggccacaccttaggaagtcagagagaacagagtatctctgaatgaactgtttcatttaagtatgatcattgagctcccaaatcagatacaccctctgctttttacagtctcaattttgcacaagaaagagcatcttcttatcttctgtgttgttatggaaaagaactatgcagcragcagagagagtgttgattctttcagtgcacaggagaagcaatgaaagaggcaatggacaaacaggaaaaaaamcaacacagtataaactttrcag

SEQ ID NO: 59379 - DNA, 599 bp, Chicken  19866894317642_2
  misc_feature (1)..(125): n is any nucleotide
nnnnnnnnnnnnnnnnnnnnnnnnnnnnnnnnnnnnnnnnnnnnnnnnnnnnnnnnnnnnnnnnnnnnnnnnnnnnnnnnnnnnnnnnnnnnnnnnnnnnnnnnnnnnnnnnnnnnnnnnnnnnnccagcatccaattctagccttgctgaattccttgattttattgcctgtctggcaatgctgtttgtaatgaagctagaataatgccatcttctgagaatcttgtctgctatgttggttggtttctttgcttttagtcctgtatttttattggtgaaaatactggatttggasgggsaaaaaaaaatggaaagtgtgccctggccacaccttaggaagtcagagagaacagagtatctctgaatgaactgtttcatttaagtatgatcattgagctcccaaatcagatacaccctctgctttttacagtctcaattttgcacaagaaagagcatcttcttatcttctgtgttgttatggaaaagaactatgcagcragcagagagagtgttgattctttcagtgcacaggagaagcaatgaaagaggcaatggacaaacaggaaaaaaamcaacacagtataaactttrcagagta

SEQ ID NO: 59380 - DNA, 599 bp, Chicken  19866894317642_3
  misc_feature (1)..(124): n is any nucleotide
nnnnnnnnnnnnnnnnnnnnnnnnnnnnnnnnnnnnnnnnnnnnnnnnnnnnnnnnnnnnnnnnnnnnnnnnnnnnnnnnnnnnnnnnnnnnnnnnnnnnnnnnnnnnnnnnnnnnnnnnnnnnccagcatccaattctagccttgctgaattccttgattttattgcctgtctggcaatgctgtttgtaatgaagctagaataatgccatcttctgagaatcttgtctgctatgttggttggtttctttgcttttagtcctgtatttttattggtgaaaatactggatttggasgggasaaaaaaaatggaaagtgtgccctggccacaccttaggaagtcagagagaacagagtatctctgaatgaactgtttcatttaagtatgatcattgagctcccaaatcagatacaccctctgctttttacagtctcaattttgcacaagaaagagcatcttcttatcttctgtgttgttatggaaaagaactatgcagcragcagagagagtgttgattctttcagtgcacaggagaagcaatgaaagaggcaatggacaaacaggaaaaaaamcaacacagtataaactttrcagagtaa

SEQ ID NO: 59381 - DNA, 600 bp, Chicken  19866894317642_4
agaataatgccatcttctgagaatcttgtctgctatgttggttggtttctttgcttttagtcctgtatttttattggtgaaaatactggatttggasgggaaaaaaaaaatggaaagtgtgccctggccacaccttaggaagtcagagagaacagagtatctctgaatgaactgtttcatttaagtatgatcattgagctcccaaatcagatacaccctctgctttttacagtctcaattttgcacaagaaagagcatcttcttatcttctgtgttgttatggaaaagaactatgcagcragcagagagagtgttgattctttcagtgcacaggagaagcaatgaaagaggcaatggacaaacaggaaaaaaamcaacacagtataaactttrcagagtaagcagatgcttatccctgctccttttctcttatcataagctaatgagctaaatcagttagaataagcaattcattttcaggaaggcttttkcttgttaggacagtagcctttaaatataatattttatttttaatgccttaacatggaattttgatgactgcaggtgttcggaaatgatgagtccagtatctatccagtg

SEQ ID NO: 59382 - DNA, 600 bp, Chicken  19866894317642_5
tggtgaaaatactggatttggasgggaaaaaaaaaatggaaagtgtgccctggccacaccttaggaagtcagagagaacagagtatctctgaatgaactgtttcatttaagtatgatcattgagctcccaaatcagatacaccctctgctttttacagtctcaattttgcacaagaaagagcatcttcttatcttctgtgttgttatggaaaagaactatgcagcragcagagagagtgttgattctttcagtgcacaggagaagcaatgaaagaggcaatggacaaacaggaaaaaaamcaacacagtataaactttrcagagtaagcagatgcttatccctgctccttttctcttatcataagctaatgagctaaatcagttagaataagcaattcattttcaggaaggcttttkcttgttaggacagtagcctttaaatataatattttatttttaatgccttaacatggaattttgatgactgcaggtgttcggaaatgatgagtccagtatctatccagtgggtgagtggggaataggcagttgtctgtgcttgggttttctctccctgttttgactagatgtttgttatgcaac

SEQ ID NO: 59383 - DNA, 600 bp, Chicken  19866894317642_6
ggasgggaaaaaaaaaatggaaagtgtgccctggccacaccttaggaagtcagagagaacagagtatctctgaatgaactgtttcatttaagtatgatcattgagctcccaaatcagatacaccctctgctttttacagtctcaattttgcacaagaaagagcatcttcttatcttctgtgttgttatggaaaagaactatgcagcragcagagagagtgttgattctttcagtgcacaggagaagcaatgaaagaggcaatggacaaacaggaaaaaaamcaacacagtataaactttrcagagtaagcagatgcttatccctgctccttttctcttatcataagctaatgagctaaatcagttagaataagcaattcattttcaggaaggcttttkcttgttaggacagtagcctttaaatataatattttatttttaatgccttaacatggaattttgatgactgcaggtgttcggaaatgatgagtccagtatctatccagtgggtgagtggggaataggcagttgtctgtgcttgggttttctctccctgttttgactagatgtttgttatgcaacaactttcttccattttaag

SEQ ID NO: 59384 - DNA, 600 bp, Chicken  19866894317642_7
cattgagctcccaaatcagatacaccctctgctttttacagtctcaattttgcacaagaaagagcatcttcttatcttctgtgttgttatggaaaagaactatgcagcragcagagagagtgttgattctttcagtgcacaggagaagcaatgaaagaggcaatggacaaacaggaaaaaaamcaacacagtataaactttrcagagtaagcagatgcttatccctgctccttttctcttatcataagctaatgagctaaatcagttagaataagcaattcattttcaggaaggcttttkcttgttaggacagtagcctttaaatataatattttatttttaatgccttaacatggaattttgatgactgcaggtgttcggaaatgatgagtccagtatctatccagtgggtgagtggggaataggcagttgtctgtgcttgggttttctctccctgttttgactagatgtttgttatgcaacaactttcttccattttaagcagtaagatctttgtgcatattattagttgagttgttagagcactctaccaatttagtgatatattggccttatcacagcacacttaaatgtagatac

SEQ ID NO: 59385 - DNA, 600 bp, Chicken  19866894317651_1
taacagctatttgcaagtaataaaatttcaatatacactcccgcagacagtcctttttctgtcatgtgctttctaactggggagttctctccaacatggcaggcaggtctccatgtgattaggatatctgactgctgctcccttttaacttgcttgagatctatagctgaaaatggcttgcataaaccggtccccaaggccagacaatccttcacagcataactttccatcatttccattcttttcttatttttgtgttttgttttgttttaacccatagtgtcttttctcccatccttkctttcccataggtctaagtaatctcacgactcataagcatttatttcaagagaccagttggtattcaacttaatgggagcagagcccttgggatgtataacaactgggaaggagattatgcataaaamcccctctatgcttattagagccaggcagatgggatcacatggtgcaaccatccagtggcaccagcgtcctggctacccaacacccggagcagggtgtccctgaatgagtaggactgagactgatggcccccagaggcgccttctgtgattctttttctcacttttcttgttg

SEQ ID NO: 59386 - DNA, 600 bp, Chicken  19866894317651_2
tgactgctgctcccttttaacttgcttgagatctatagctgaaaatggcttgcataaaccggtccccaaggccagacaatccttcacagcataactttccatcatttccattcttttcttatttttgtgttttgttttgttttaacccatagtgtcttttctcccatccttkctttcccataggtctaagtaatctcacgactcataagcatttatttcaagagaccagttggtattcaacttaatgggagcagagcccttgggatgtataacaactgggaaggagattatgcataaaamcccctctatgcttattagagccaggcagatgggatcacatggtgcaaccatccagtggcaccagcgtcctggctacccaacacccggagcagggtgtccctgaatgagtaggactgagactgatggcccccagaggcgccttctgtgattctttttctcacttttcttgttgctgatactttaggaccattaattggcagggaagaattaaaatgaaaggacacgaggaaagcaaggaaaaggcaaaggaccaaaggcaaagcaaggaaggaggaaaagaagagagtgargactgaagcc

SEQ ID NO: 59387 - DNA, 600 bp, Chicken  19866894317651_3
tgcataaaamcccctctatgcttattagagccaggcagatgggatcacatggtgcaaccatccagtggcaccagcgtcctggctacccaacacccggagcagggtgtccctgaatgagtaggactgagactgatggcccccagaggcgccttctgtgattctttttctcacttttcttgttgctgatactttaggaccattaattggcagggaagaattaaaatgaaaggacacgaggaaagcaaggaaaaggcaaaggaccaaaggcaaagcaaggaaggaggaaaagaagagagtgargactgaagcccacccwttggctacccctttggtgaagttaagcttccaggcacccccagatcctttatttcctttcctagtgcaggtggctttttaagacagattacttggcactcactgattttttttccccaaactcttaatttggcagcacatgctgaagcaattaatgtgtgttacccaggaaaagcaattcagctgcagayaagtagcttataacacttttatattgtagaaagacctgaactttgggaaagaacttgtgctgcccagcatacrcaagcagtagaggctggacag

SEQ ID NO: 59388 - DNA, 600 bp, Chicken  19866894317651_4
tatgcttattagagccaggcagatgggatcacatggtgcaaccatccagtggcaccagcgtcctggctacccaacacccggagcagggtgtccctgaatgagtaggactgagactgatggcccccagaggcgccttctgtgattctttttctcacttttcttgttgctgatactttaggaccattaattggcagggaagaattaaaatgaaaggacacgaggaaagcaaggaaaaggcaaaggaccaaaggcaaagcaaggaaggaggaaaagaagagagtgargactgaagcccacccwttggctacccctttggtgaagttaagcttccaggcacccccagatcctttatttcctttcctagtgcaggtggctttttaagacagattacttggcactcactgattttttttccccaaactcttaatttggcagcacatgctgaagcaattaatgtgtgttacccaggaaaagcaattcagctgcagayaagtagcttataacacttttatattgtagaaagacctgaactttgggaaagaacttgtgctgcccagcatacrcaagcagtagaggctggacagaaggctgatcagggag

SEQ ID NO: 59389 - DNA, 600 bp, Chicken  19866894317651_5
gcagggaagaattaaaatgaaaggacacgaggaaagcaaggaaaaggcaaaggaccaaaggcaaagcaaggaaggaggaaaagaagagagtgargactgaagcccacccwttggctacccctttggtgaagttaagcttccaggcacccccagatcctttatttcctttcctagtgcaggtggctttttaagacagattacttggcactcactgattttttttccccaaactcttaatttggcagcacatgctgaagcaattaatgtgtgttacccaggaaaagcaattcagctgcagayaagtagcttataacacttttatattgtagaaagacctgaactttgggaaagaacttgtgctgcccagcatacrcaagcagtagaggctggacagaaggctgatcagggagtcccagggatgtaacgttttccctccaaaaacagcagcttcttttcctcttccctgctgcaaccactatgctttgctgggagaaagcctagagctggccagcaaagccctgcaccccttctcatctctctctcagtgaagctggggtggtagatgagggacatcagtatgggatacaaggtggctgacag

SEQ ID NO: 59390 - DNA, 600 bp, Chicken  19866894317651_6
ggaggaaaagaagagagtgargactgaagcccacccwttggctacccctttggtgaagttaagcttccaggcacccccagatcctttatttcctttcctagtgcaggtggctttttaagacagattacttggcactcactgattttttttccccaaactcttaatttggcagcacatgctgaagcaattaatgtgtgttacccaggaaaagcaattcagctgcagayaagtagcttataacacttttatattgtagaaagacctgaactttgggaaagaacttgtgctgcccagcatacrcaagcagtagaggctggacagaaggctgatcagggagtcccagggatgtaacgttttccctccaaaaacagcagcttcttttcctcttccctgctgcaaccactatgctttgctgggagaaagcctagagctggccagcaaagccctgcaccccttctcatctctctctcagtgaagctggggtggtagatgagggacatcagtatgggatacaaggtggctgacagcaaggcaccaaccagaccatgcactcatcaagcaggatgcatcccatcctggaaataagccagtgtgtgtctc

SEQ ID NO: 59391 - DNA, 600 bp, Chicken  19866894317651_7
tctctctcagtgaagctggggtggtagatgagggacatcagtatgggatacaaggtggctgacagcaaggcaccaaccagaccatgcactcatcaagcaggatgcatcccatcctggaaataagccagtgtgtgtctcctgtaagaagtatgcatgcttgtacatgttctgctgtgggtgaggttaattcagcattgcctttattatgtatgtgtgaagcactggttgctgaaaacacaaaaagctagtggtgccttttgctgaattactggatgaagctgagctttgataaaagagagraaccacctatccaaggaaagaagacacctgtttggccctgggagataaattcagcctttaatgtgggtctgccctgaattattcatgcccatgtggacagtacaaggtttccatagtcactgaggggctgtgatttccaaaatgctgcttgctgctgggatacttgtccaccatctcctttctagtttattggcttccccatgtgaggggtttcactgctcgctggtgttgaacaaaattctgctgagcagcatgactactgactggtgacctcgctctcgtcctccacattcctggcct

SEQ ID NO: 59392 - DNA, 599 bp, Chicken  19866894317660_1
  misc_feature (1)..(189): n is any nucleotide
nnnnnnnnnnnnnnnnnnnnnnnnnnnnnnnnnnnnnnnnnnnnnnnnnnnnnnnnnnnnnnnnnnnnnnnnnnnnnnnnnnnnnnnnnnnnnnnnnnnnnnnnnnnnnnnnnnnnnnnnnnnnnnnnnnnnnnnnnnnnnnnnnnnnnnnnnnnnnnnnnnnnnnnnnnnnnnnnnnnnnnnnnnnnnctccttttatgctgagaacctggaaaacctctatagcagtagagcactgcatagagaggacaaggtggaacatgaacttcaacctttccttcagagactgagactgcacaytgatatccaaacatctccgaagtgttccttttttttattcagcgttaagaatagccttctgttttcggtctcacagattaatcaacacaaggccagctcacagcgctgtgaatcatccccaggctgcacaaaagagggctggctgactgactggtacgcactcccccggagagtttgaaaataacagcatcaactgttaccacatctcaactgtaggggtagggggggggaaaatgcagcttgcttcttatattgaaagttgcagataatttcacctttcttttctcattctgttgctt

SEQ ID NO: 59393 - DNA, 600 bp, Chicken  19866894317660_2
tcttttctcattctgttgcttcattagcctcatatcctcaccattcaagtacagaaatataccaaagttaaatagaaatataaagcaaatgacaactagatcttctaaaataacgtgaacctatgtgaagactgggaggcaccacatcattagatggaacagcgcttatctttaatgaatcatacactgtcagcaaagagacactgcagctcaatagctcctgaaggcttaagtacagggttgggaacaagaaactccaagtcattcaaacacaaactccttctgcagcacctgacgtgycgcttccagctcctttgactccatctcacttaatttttattcagctcgattattaagcattattgttgaagaaacaggagttattttgtratgcaactcgctgcattaccagaaaacagcaattggggctgccacccaccctaagccggtatgaagaggagggacagaatctggaatcgttaacactttttgttccttttgatgtgcaaaaacacctgaaatacttcaagagaaattcaaccagttatttttaaaatatcaagagaaaataaaagaggaaaatatttttctcaacctgaa

SEQ ID NO: 59394 - DNA, 600 bp, Chicken  19866894317660_3
gacaactagatcttctaaaataacgtgaacctatgtgaagactgggaggcaccacatcattagatggaacagcgcttatctttaatgaatcatacactgtcagcaaagagacactgcagctcaatagctcctgaaggcttaagtacagggttgggaacaagaaactccaagtcattcaaacacaaactccttctgcagcacctgacgtgycgcttccagctcctttgactccatctcacttaatttttattcagctcgattattaagcattattgttgaagaaacaggagttattttgtratgcaactcgctgcattaccagaaaacagcaattggggctgccacccaccctaagccggtatgaagaggagggacagaatctggaatcgttaacactttttgttccttttgatgtgcaaaaacacctgaaatacttcaagagaaattcaaccagttatttttaaaatatcaagagaaaataaaagaggaaaatatttttctcaacctgaaattaatacacatacggggcttaagacagctgtcaattccaacaacaacaaaaaaatcagaatccttactcaaaggaatatgaaaattatt

SEQ ID NO: 59395 - DNA, 600 bp, Chicken  19866894317663_1
ccataacataacataaacataaaggtaaagccactgagactacagataagagttgctgtaaatgatactcaactgtaaactttgggattccagaaaagtctattttatttttttttttcgttccaaaaaggcgaggaagtaggtaatgtgtccgagtaatatataaaatgaaaatatataccacagacatgtcaagacatatgcattgctaaaatacttttgagtattgttccattgtgtacagttgaggagagaaaaaatatgcttcctattactggaaacatttgcactttaacagcwaccaaaggaccactgacagggtaaattacttgatcagataactaaacctcagattttctaccacaaatgcttggaatatgctatgatttgttataattcaacacctggttaaaatgatccattcaaggttccccgtagtgctgtgtgttctttacatttatttctttgtgagctttattctaatgaaagcagattatggtattaacgatgtataaaaacaatgacaacaaaataaaaacattaaaaccctttaatatttccaggcctaacttactgccatattagcgggttctgtctgct

SEQ ID NO: 59396 - DNA, 600 bp, Chicken  19866894317665_1
tatgtggccattgatatctgcaaaataggaatggaatgggaatgtttcccatgcttcctgtacatccaaatgaattgtggctctgacatgaatggtggcctttcctttcttatcacaagagggcccacaaaaccacaagagaaaacaagggtgggaagtcacggcagtgagcccagtgggcattcggcacctgggcatcaagcccagggctgttgaatccagcaggagttgcttctggctatactgagctccaatataaaataagacaatctcattcaggaaactgttaacttcaggtarattcagacatttttgttattctcttactgtctaactctcccaggggaaaaagagacmtcccacatcagcagcatataraagaatgctaggcagcaacttgaccactggcacaatttttcttcaaatttaatggtgggtccagcaggcatagtaaatatattgtctaaagctgcagagttttactggtcctcttgaatgcagacacagaaaaatgaaagtttgaggggagaggaataaagctgaggttatagcaaatgagatgagagttacatgccctacaaaagaaaggaccttttttta

SEQ ID NO: 59397 - DNA, 600 bp, Chicken  19866894317665_2
ctgtacatccaaatgaattgtggctctgacatgaatggtggcctttcctttcttatcacaagagggcccacaaaaccacaagagaaaacaagggtgggaagtcacggcagtgagcccagtgggcattcggcacctgggcatcaagcccagggctgttgaatccagcaggagttgcttctggctatactgagctccaatataaaataagacaatctcattcaggaaactgttaacttcaggtarattcagacatttttgttattctcttactgtctaactctcccaggggaaaaagagacmtcccacatcagcagcatataraagaatgctaggcagcaacttgaccactggcacaatttttcttcaaatttaatggtgggtccagcaggcatagtaaatatattgtctaaagctgcagagttttactggtcctcttgaatgcagacacagaaaaatgaaagtttgaggggagaggaataaagctgaggttatagcaaatgagatgagagttacatgccctacaaaagaaaggacctttttttacctgttgtctgggagcagaggaggtacagggactgcactgtaagtacaaaggaagca

SEQ ID NO: 59398 - DNA, 600 bp, Chicken  19866894317665_3
ggctctgacatgaatggtggcctttcctttcttatcacaagagggcccacaaaaccacaagagaaaacaagggtgggaagtcacggcagtgagcccagtgggcattcggcacctgggcatcaagcccagggctgttgaatccagcaggagttgcttctggctatactgagctccaatataaaataagacaatctcattcaggaaactgttaacttcaggtarattcagacatttttgttattctcttactgtctaactctcccaggggaaaaagagacmtcccacatcagcagcatataraagaatgctaggcagcaacttgaccactggcacaatttttcttcaaatttaatggtgggtccagcaggcatagtaaatatattgtctaaagctgcagagttttactggtcctcttgaatgcagacacagaaaaatgaaagtttgaggggagaggaataaagctgaggttatagcaaatgagatgagagttacatgccctacaaaagaaaggacctttttttacctgttgtctgggagcagaggaggtacagggactgcactgtaagtacaaaggaagcagaaactgtatggccatatgat

SEQ ID NO: 59399 - DNA, 600 bp, Chicken  19866894317665_4
atagcaaatgagatgagagttacatgccctacaaaagaaaggacctttttttacctgttgtctgggagcagaggaggtacagggactgcactgtaagtacaaaggaagcagaaactgtatggccatatgataataccaggaacagtgatagtcgtcatcttcctgatgcatccaacaaccagatcaaacaaatgcatcgcccaattacttaagcaattttaaaacatttgcaaaaatgtggcacaagtttgtgtgtggagtgctgtgttctgctatgctgtctctgaaactataggaccygttttcttgtttgctctgtcacgtaagaaaccttgaagtcacacctgctggccgtccctttttgaaggaagttcagtttggccctgcatagactcagatcgctattggtgtaatcgtgaaagccagatctgggtagcctccacagccttgctgtctctgtttggtgctccaaattgctctggagagagacttcagccttcataaaacattcacaaaagggttttggtaccagttcattccaggctgctcaargccagtcatggctgtgacaaaaaaacttaaaatgcatacacatatatt

SEQ ID NO: 59400 - DNA, 512 bp, Chicken  19866894317665_5
gtgtggagtgctgtgttctgctatgctgtctctgaaactataggaccygttttcttgtttgctctgtcacgtaagaaaccttgaagtcacacctgctggccgtccctttttgaaggaagttcagtttggccctgcatagactcagatcgctattggtgtaatcgtgaaagccagatctgggtagcctccacagccttgctgtctctgtttggtgctccaaattgctctggagagagacttcagccttcataaaacattcacaaaagggttttggtaccagttcattccaggctgctcaargccagtcatggctgtgacaaaaaaacttaaaatgcatacacatatattaactatatatatgtatatatgtgtgtacgtgtgtgaaatatatctagtttttatatatgtgatatataaaaatgtatgtatatatatgtgtgattttttttcacatatactatatattaatacataaaaacacagcgcagcacacagcagcacttttcctattg

SEQ ID NO: 59401 - DNA, 600 bp, Chicken  19866894317666_1
atttattcagtgatacagtggttctgcatagtattttccttcttacatccatcccatgcacacaagcactaaaatagttttattatataatttacatcaattcgaggtacctttttgtgaggaaaaaagggctttaatataaatgaaaactagatcttatttacaaggcctggcctgctgtcctgtgcattgtgctgcttgcacagtcctggaatcatagaatcgttaaggttggaaaagatgcctgagatcatctaatccaaccatctgcccatccccaccgtgctcactaaccacgtmcctcagtgcaacatcctcactgttcctgaacacctccggggacagagactccatcwcctccctgggcagcctgttccaatgcatcactactccttctaaaaagaaatctttcctaatacccaatctgaaccttccctggcacatcttgaggccattccttcttgtctcatcaccgttatctgggagatgaggctggcacccacttcgctacagtctcctttgagggagttgtagagagtgataaaatgtcagttgagctgtgacccaagttgcacggagatgaatggagcatgtttcatg

SEQ ID NO: 59402 - DNA, 600 bp, Chicken  19866894317666_2
tgcacacaagcactaaaatagttttattatataatttacatcaattcgaggtacctttttgtgaggaaaaaagggctttaatataaatgaaaactagatcttatttacaaggcctggcctgctgtcctgtgcattgtgctgcttgcacagtcctggaatcatagaatcgttaaggttggaaaagatgcctgagatcatctaatccaaccatctgcccatccccaccgtgctcactaaccacgtmcctcagtgcaacatcctcactgttcctgaacacctccggggacagagactccatcwcctccctgggcagcctgttccaatgcatcactactccttctaaaaagaaatctttcctaatacccaatctgaaccttccctggcacatcttgaggccattccttcttgtctcatcaccgttatctgggagatgaggctggcacccacttcgctacagtctcctttgagggagttgtagagagtgataaaatgtcagttgagctgtgacccaagttgcacggagatgaatggagcatgtttcatggtaattttttgagaagataggcatttctgtagggatggtggtaggtggaaaactca

SEQ ID NO: 59403 - DNA, 600 bp, Chicken  19866894317671_1
tgcaatagtttgggttggtggtgaggcaacggagaaactggatcgaaccacatcagggtgagagtgatctgctgatttattgacacataaccaacaggctagccctgacccatgcattccaggtcagactacaaagcagcagagctgagtactcttgtgtcccgagtttctttccatatctctggttactatttaatccattctgtggttgtctttctcatcagatcggagcaaaccctctcagactgcgctgggtgtttccctcccaccctgtttgctctcccattcctgccttatcarcacagctgtcactctaccaagggagacaccaccggagtttcctatgtggcaaattcactgtgggaaatctcatcctgagatccatatccagctacagcgtggagcccacgagtggttatccatcctttyccatattccctgtccctgaaatgggtcccaggcccacatgcagccatggctattatgcataccacctactgcatgagcataagctgcctgctcctggtcaccttygtgtcttccacatgcttagagatgacattctgaataagctgttccatctcctttccagaggtggat

SEQ ID NO: 59404 - DNA, 600 bp, Chicken  19866894317671_2
tacaaagcagcagagctgagtactcttgtgtcccgagtttctttccatatctctggttactatttaatccattctgtggttgtctttctcatcagatcggagcaaaccctctcagactgcgctgggtgtttccctcccaccctgtttgctctcccattcctgccttatcarcacagctgtcactctaccaagggagacaccaccggagtttcctatgtggcaaattcactgtgggaaatctcatcctgagatccatatccagctacagcgtggagcccacgagtggttatccatcctttyccatattccctgtccctgaaatgggtcccaggcccacatgcagccatggctattatgcataccacctactgcatgagcataagctgcctgctcctggtcaccttygtgtcttccacatgcttagagatgacattctgaataagctgttccatctcctttccagaggtggatgtgaggctggctggcctgcagttccctgcattctccttcttgccctttttgaatagtggtgatcttgactttcttctggtcctcaggctcctctcctgattgccacagcctttcaaagatgatcaagag

SEQ ID NO: 59405 - DNA, 600 bp, Chicken  19866894317671_3
accctctcagactgcgctgggtgtttccctcccaccctgtttgctctcccattcctgccttatcarcacagctgtcactctaccaagggagacaccaccggagtttcctatgtggcaaattcactgtgggaaatctcatcctgagatccatatccagctacagcgtggagcccacgagtggttatccatcctttyccatattccctgtccctgaaatgggtcccaggcccacatgcagccatggctattatgcataccacctactgcatgagcataagctgcctgctcctggtcaccttygtgtcttccacatgcttagagatgacattctgaataagctgttccatctcctttccagaggtggatgtgaggctggctggcctgcagttccctgcattctccttcttgccctttttgaatagtggtgatcttgactttcttctggtcctcaggctcctctcctgattgccacagcctttcaaagatgatcaagagtggsctatcagtcatgtccaccggctccctcagcactygtggccacatcccatcaggacccatggactgggtgtcaagtttccctaaatgctccagactttctcc

SEQ ID NO: 59406 - DNA, 600 bp, Chicken  19866894317671_4
attccctgtccctgaaatgggtcccaggcccacatgcagccatggctattatgcataccacctactgcatgagcataagctgcctgctcctggtcaccttygtgtcttccacatgcttagagatgacattctgaataagctgttccatctcctttccagaggtggatgtgaggctggctggcctgcagttccctgcattctccttcttgccctttttgaatagtggtgatcttgactttcttctggtcctcaggctcctctcctgattgccacagcctttcaaagatgatcaagagtggsctatcagtcatgtccaccggctccctcagcactygtggccacatcccatcaggacccatggactgggtgtcaagtttccctaaatgctccagactttctccctgatcctctgggccagggatctcttgagggctggccttggcagtgaagactgaagcatataaatttgagttacaagggacctttaaaggccatctaatccaatgtggtgaagcttactgttaggtggagctaccttcattttggttaactttgatttaaacacaagtatgagtggtgctactttcttaggggtaggat

SEQ ID NO: 59407 - DNA, 600 bp, Chicken  19866894317671_5
tgcagccatggctattatgcataccacctactgcatgagcataagctgcctgctcctggtcaccttygtgtcttccacatgcttagagatgacattctgaataagctgttccatctcctttccagaggtggatgtgaggctggctggcctgcagttccctgcattctccttcttgccctttttgaatagtggtgatcttgactttcttctggtcctcaggctcctctcctgattgccacagcctttcaaagatgatcaagagtggsctatcagtcatgtccaccggctccctcagcactygtggccacatcccatcaggacccatggactgggtgtcaagtttccctaaatgctccagactttctccctgatcctctgggccagggatctcttgagggctggccttggcagtgaagactgaagcatataaatttgagttacaagggacctttaaaggccatctaatccaatgtggtgaagcttactgttaggtggagctaccttcattttggttaactttgatttaaacacaagtatgagtggtgctactttcttaggggtaggattcacctctccttctgtagatacttagtgattaga

SEQ ID NO: 59408 - DNA, 600 bp, Chicken  19866894317676_1
ttttaagtctgttttatacattggtaaactatatatatatacataaacaatgtcactgaaataaataaaaaaaaaacaactttcagcaaatagttgttaaggtgtctggggcagttggttgcagtgtgcatatacagtacccagcacaacctttacaagcattctccagtttttactgcaagtctgtgaaaaataatcatcctctcaatgacacccactttccctaggtttaacaaaatatatctaaaagatgaatggacttccccttccaaatcattctcttaattacagggattcacmagtacagaagagcagtcactttgaaagcaacataaagcagtcataaacttagtttaatctcctgatttgatctttataaccttcacatcaaaacagtaggtaaataccagtgaatataactccttgctgccagttctgtrctcctaactcaattcatgctcattctcagtcatatttaaatccaactcacagcattgagcacagaatttaagtctacactcacagcagcacagtggaaatttgggattagtatcaatgttaagtgttggaccacagaaaactatacgagaaaaaggatag

SEQ ID NO: 59409 - DNA, 488 bp, Chicken  19866894317676_2
ccagcacaacctttacaagcattctccagtttttactgcaagtctgtgaaaaataatcatcctctcaatgacacccactttccctaggtttaacaaaatatatctaaaagatgaatggacttccccttccaaatcattctcttaattacagggattcacmagtacagaagagcagtcactttgaaagcaacataaagcagtcataaacttagtttaatctcctgatttgatctttataaccttcacatcaaaacagtaggtaaataccagtgaatataactccttgctgccagttctgtrctcctaactcaattcatgctcattctcagtcatatttaaatccaactcacagcattgagcacagaatttaagtctacactcacagcagcacagtggaaatttgggattagtatcaatgttaagtgttggaccacagaaaactatacgagaaaaaggatagaattgcagacagccagaatacgactgca

SEQ ID NO: 59410 - DNA, 600 bp, Chicken  19866894317682_1
atgcatcatcatgctccattaccaaaagagatgggtcacagtggatttcacatccatctggtcagaactaacacacagaggttcgatctgctttcagtgaatccaatgtgcttttcttcaacagcgttttgtttgttttgcctttatctctggtgttttttgttatcctgtgaagtatttatatgagcatttctgattctgaaaatccaaggttgttttgattcattcttcaagttggaatgttattagttttgtttcctggttgtctgaatgtaactggtgggttcagactcactgctraggtgagaggaggaaattcctctgaggagagcagtcaggagtctgttcaaacaatcacaggatttgacctgcagaatcaggttaatcagagtctactggatttccaaacggattttgttagaaaattggctgcatattatgcagagatgggtaaagagagattttgctatgcttactgaagtgtttcagctaatcttatgctaggctagtgcttcacacttgacttttctcactctcagcttttccacaagtatatttgatttgagaaagtgactgactcctagataaaaagttgtttga

SEQ ID NO: 59411 - DNA, 600 bp, Chicken  19866894317683_1
ccaaactgcataaattaaaaatttttaagtgtgtatagacaaggttgttttcaatttactgtatagtattttcgaactatatttctcagcacatctggggaggctgggagccagggcaccagtacctagaaaggttagcgaggagttattaacaagtggctatttttggttcaggtgtttccagcacaggttttgtaaggtcagcattagcacagagctattgtttatttgataatagtatctccatgagagtgtcattcagttctcctgagtgacttatcacagatccagagggatatkttaaaatttttgcctcactgcctttagttctgcttcatgctaaattgatcccactctgtgtcattcttgcccatagcgctttttcttacaacaaacatccctaaacttaagacataaagtctccagtttctgctgcagtgctccccgagtttctacctcagataaggaacttctgaatcagcaaggcattttctatgtaactattggcatcaaatttcagggaaatatctgtatcccctttcacagagttatttttgttgctttaattcttgcagtttgtagttcaagataaggtttgcc

SEQ ID NO: 59412 - DNA, 599 bp, Chicken  19866894317689_1
  misc_feature (1)..(207): n is any nucleotide
nnnnnnnnnnnnnnnnnnnnnnnnnnnnnnnnnnnnnnnnnnnnnnnnnnnnnnnnnnnnnnnnnnnnnnnnnnnnnnnnnnnnnnnnnnnnnnnnnnnnnnnnnnnnnnnnnnnnnnnnnnnnnnnnnnnnnnnnnnnnnnnnnnnnnnnnnnnnnnnnnnnnnnnnnnnnnnnnnnnnnnnnnnnnnnnnnnnnnnnnnnnnnnnactcatccccaagccgatagaactgcatggagttattatggccaaagtgcaggacccggcacttggccttgctgaacctcatcccattcaccycagcccagcgatccagcttatctagatccctctgcagggcctccttaccctcaggcagatcgacaccacctccaacttggtatcatctgcaaacttagtgagggtacactcaatcccttcatctaggtcatcaataaagatattaaaaaagatgggccccagtactgacccctgggggacaccacttgtaacgggtcaccagctggacttaaygccattaacactacccgytgggcatggccctcagccagttccttacccaaagaagcgtatacctgtccaagacacgggcagccagt

SEQ ID NO: 59413 - DNA, 600 bp, Chicken  19866894317689_2
ccccaagccgatagaactgcatggagttattatggccaaagtgcaggacccggcacttggccttgctgaacctcatcccattcaccycagcccagcgatccagcttatctagatccctctgcagggcctccttaccctcaggcagatcgacaccacctccaacttggtatcatctgcaaacttagtgagggtacactcaatcccttcatctaggtcatcaataaagatattaaaaaagatgggccccagtactgacccctgggggacaccacttgtaacgggtcaccagctggacttaaygccattaacactacccgytgggcatggccctcagccagttccttacccaaagaagcgtatacctgtccaagacacgggcagccagtttccccaggagaataytgtgagagrcygtgtcaaaggctttgctgaagtctaggtagactacatcaacagcctttccctcatctaccagtctggtcacccagtcgtagaaggagatgaggttggtcaagcacaacctgcctttcatgaacccgtgctggctgggcctgatcccctggacgcaacacaggtgctgtgtgatctcactcaagatga

SEQ ID NO: 59414 - DNA, 600 bp, Chicken  19866894317689_3
gcatggagttattatggccaaagtgcaggacccggcacttggccttgctgaacctcatcccattcaccycagcccagcgatccagcttatctagatccctctgcagggcctccttaccctcaggcagatcgacaccacctccaacttggtatcatctgcaaacttagtgagggtacactcaatcccttcatctaggtcatcaataaagatattaaaaaagatgggccccagtactgacccctgggggacaccacttgtaacgggtcaccagctggacttaaygccattaacactacccgytgggcatggccctcagccagttccttacccaaagaagcgtatacctgtccaagacacgggcagccagtttccccaggagaataytgtgagagrcygtgtcaaaggctttgctgaagtctaggtagactacatcaacagcctttccctcatctaccagtctggtcacccagtcgtagaaggagatgaggttggtcaagcacaacctgcctttcatgaacccgtgctggctgggcctgatcccctggacgcaacacaggtgctgtgtgatctcactcaagatgatttgctccataactttcc

SEQ ID NO: 59415 - DNA, 600 bp, Chicken  19866894317689_4
gcttatctagatccctctgcagggcctccttaccctcaggcagatcgacaccacctccaacttggtatcatctgcaaacttagtgagggtacactcaatcccttcatctaggtcatcaataaagatattaaaaaagatgggccccagtactgacccctgggggacaccacttgtaacgggtcaccagctggacttaaygccattaacactacccgytgggcatggccctcagccagttccttacccaaagaagcgtatacctgtccaagacacgggcagccagtttccccaggagaataytgtgagagrcygtgtcaaaggctttgctgaagtctaggtagactacatcaacagcctttccctcatctaccagtctggtcacccagtcgtagaaggagatgaggttggtcaagcacaacctgcctttcatgaacccgtgctggctgggcctgatcccctggacgcaacacaggtgctgtgtgatctcactcaagatgatttgctccataactttccctggtactgaggtcaggctgacaggcctgtagttccccggatcctccatacggcccttcttgtagatgggagtcacatcagcaa

SEQ ID NO: 59416 - DNA, 600 bp, Chicken  19866894317689_5
gatccctctgcagggcctccttaccctcaggcagatcgacaccacctccaacttggtatcatctgcaaacttagtgagggtacactcaatcccttcatctaggtcatcaataaagatattaaaaaagatgggccccagtactgacccctgggggacaccacttgtaacgggtcaccagctggacttaaygccattaacactacccgytgggcatggccctcagccagttccttacccaaagaagcgtatacctgtccaagacacgggcagccagtttccccaggagaataytgtgagagrcygtgtcaaaggctttgctgaagtctaggtagactacatcaacagcctttccctcatctaccagtctggtcacccagtcgtagaaggagatgaggttggtcaagcacaacctgcctttcatgaacccgtgctggctgggcctgatcccctggacgcaacacaggtgctgtgtgatctcactcaagatgatttgctccataactttccctggtactgaggtcaggctgacaggcctgtagttccccggatcctccatacggcccttcttgtagatgggagtcacatcagcaagcctccaat

SEQ ID NO: 59417 - DNA, 600 bp, Chicken  19866894317689_6
tccctctgcagggcctccttaccctcaggcagatcgacaccacctccaacttggtatcatctgcaaacttagtgagggtacactcaatcccttcatctaggtcatcaataaagatattaaaaaagatgggccccagtactgacccctgggggacaccacttgtaacgggtcaccagctggacttaaygccattaacactacccgytgggcatggccctcagccagttccttacccaaagaagcgtatacctgtccaagacacgggcagccagtttccccaggagaataytgtgagagrcygtgtcaaaggctttgctgaagtctaggtagactacatcaacagcctttccctcatctaccagtctggtcacccagtcgtagaaggagatgaggttggtcaagcacaacctgcctttcatgaacccgtgctggctgggcctgatcccctggacgcaacacaggtgctgtgtgatctcactcaagatgatttgctccataactttccctggtactgaggtcaggctgacaggcctgtagttccccggatcctccatacggcccttcttgtagatgggagtcacatcagcaagcctccaatct

SEQ ID NO: 59418 - DNA, 600 bp, Chicken  19866894317690_1
agcactacagtgatcctaaaataaatgtagtataaagcaaaaggttccccaaatagactaattcttccatgacacgctacctcttactgaacaaagactgcagacaaattcagggacctctgcctgcacacaggcctgaactgtttgatcagttaacaaaagttaactttttctgcctttgatgtcttttctgtgacccactgtaatgaaaaggttttctgacatgtatgaagtcaagttcaatcactatggtattccagtctctgtgaaatgcctgtcttttccattttcagacacagscagcaactacacagacagataagagactattctcaaaatatagatgcttgtacaggaaaacaaaaggatacagaatgggagacaggtcagagcattcaaagcaaaaatgcactgtattgcggggatttcacaggataccagaattagagaatatgctatagtaaaatctgcacctagttacctctctgcagtcatatattttgcctcatgaagcagaagagcaactcactgagaggctgaaatgtgtgtttttctgagagatcctatgagcttctgtattacttgcagtatattgctgaa

SEQ ID NO: 59419 - DNA, 599 bp, Chicken  19866894317697_1
  misc_feature (1)..(65): n is any nucleotide
nnnnnnnnnnnnnnnnnnnnnnnnnnnnnnnnnnnnnnnnnnnnnnnnnnnnnnnnnnnnnnnnngaaggggaaaaggaggaggaaaaccagggcagctaagaagaagcagacatgccagtcggggggggattttcttgaccagatcctaacacaggcactccctgtgatgcctttgggaagtcactatgggaaaatgcacacagacctcactaacaagcagctaaggaaaattcaggatggctctgcctgcagaagctgcccgtggacacacaccaagcactgagcagcccaagggggytgttttcccttggggtgagggctctctctccctccagctggtagtcacataactattttgagacctataaacgtatttttatctggggcttaattacacaaagggatgccaatcgactcgacaagtcaatctgcctcctaaatgaaagtctccagcaattcagtgcttaccrctaagaaagcaaacacacacacagccatgggataaacatcagctattttaatacaaggcaraaagcaaccgtccccatttcatggagtcataaatggcccgggttaaaaagcaccataaagatggtt

SEQ ID NO: 59420 - DNA, 600 bp, Chicken  19866894317697_2
ctttgggaagtcactatgggaaaatgcacacagacctcactaacaagcagctaaggaaaattcaggatggctctgcctgcagaagctgcccgtggacacacaccaagcactgagcagcccaagggggytgttttcccttggggtgagggctctctctccctccagctggtagtcacataactattttgagacctataaacgtatttttatctggggcttaattacacaaagggatgccaatcgactcgacaagtcaatctgcctcctaaatgaaagtctccagcaattcagtgcttaccrctaagaaagcaaacacacacacagccatgggataaacatcagctattttaatacaaggcaraaagcaaccgtccccatttcatggagtcataaatggcccgggttaaaaagcaccataaagatggtttaattccarccccctgctatgtgcagggtcaccaaccaccagagcaggctgcccagagccacatccagcctggcctcgaatgcctccagagatggggcatccacaagagtggattctcataagcaagcttctgaaacagaatctcctgactgaaatctaaggcactgcaaacg

SEQ ID NO: 59421 - DNA, 600 bp, Chicken  19866894317697_3
tcaggatggctctgcctgcagaagctgcccgtggacacacaccaagcactgagcagcccaagggggytgttttcccttggggtgagggctctctctccctccagctggtagtcacataactattttgagacctataaacgtatttttatctggggcttaattacacaaagggatgccaatcgactcgacaagtcaatctgcctcctaaatgaaagtctccagcaattcagtgcttaccrctaagaaagcaaacacacacacagccatgggataaacatcagctattttaatacaaggcaraaagcaaccgtccccatttcatggagtcataaatggcccgggttaaaaagcaccataaagatggtttaattccarccccctgctatgtgcagggtcaccaaccaccagagcaggctgcccagagccacatccagcctggcctcgaatgcctccagagatggggcatccacaagagtggattctcataagcaagcttctgaaacagaatctcctgactgaaatctaaggcactgcaaacgtagctctcaattcttcaaaccaacgtgcatttcagaagcaaactgcagagagctgtttatt

SEQ ID NO: 59422 - DNA, 600 bp, Chicken  19866894317697_4
cttggggtgagggctctctctccctccagctggtagtcacataactattttgagacctataaacgtatttttatctggggcttaattacacaaagggatgccaatcgactcgacaagtcaatctgcctcctaaatgaaagtctccagcaattcagtgcttaccrctaagaaagcaaacacacacacagccatgggataaacatcagctattttaatacaaggcaraaagcaaccgtccccatttcatggagtcataaatggcccgggttaaaaagcaccataaagatggtttaattccarccccctgctatgtgcagggtcaccaaccaccagagcaggctgcccagagccacatccagcctggcctcgaatgcctccagagatggggcatccacaagagtggattctcataagcaagcttctgaaacagaatctcctgactgaaatctaaggcactgcaaacgtagctctcaattcttcaaaccaacgtgcatttcagaagcaaactgcagagagctgtttattacaaatgacttccacctccacagccctcagaggcaaagcataaagctgtgtgcaaagctagacaatctgggcacc

SEQ ID NO: 59423 - DNA, 600 bp, Chicken  19866894317697_5
ctccacagccctcagaggcaaagcataaagctgtgtgcaaagctagacaatctgggcacccagccataaaccagcactgctgcagcacagataactgttctcactctcgagccatccttggctgtaaacccatggggaagacatccagaacgcagccctcaccgccgccaaagcttctcatgttttatgagcttgcattgcaactgcagttggggctacagcactgagagcttacggggctggttcacatccagagctaagagcaaaaccaactcccatgtcgatgcctgctgctctgawgrgaagacttaaagcacgtcgagccgttccgcagatgtctgcagtgaaactgagtgcccctccacaaagaaagtgatgtcacatttcagaacaagacaaaagaatcggcagcacgttttgaactgccgctgcgccctcagcaaacgatcccatctttgatatcaccttcagcagctctgtgagcactcggtgcaggcgatgcagtttgttgctgtgaccgaactgagacgtctttacctcgtgcaggggacattaaaatgcattagtgccaaagcaggaacggcacaccaatgaggcttc

SEQ ID NO: 59424 - DNA, 600 bp, Chicken  19866894317697_6
ccacagccctcagaggcaaagcataaagctgtgtgcaaagctagacaatctgggcacccagccataaaccagcactgctgcagcacagataactgttctcactctcgagccatccttggctgtaaacccatggggaagacatccagaacgcagccctcaccgccgccaaagcttctcatgttttatgagcttgcattgcaactgcagttggggctacagcactgagagcttacggggctggttcacatccagagctaagagcaaaaccaactcccatgtcgatgcctgctgctctgawgrgaagacttaaagcacgtcgagccgttccgcagatgtctgcagtgaaactgagtgcccctccacaaagaaagtgatgtcacatttcagaacaagacaaaagaatcggcagcacgttttgaactgccgctgcgccctcagcaaacgatcccatctttgatatcaccttcagcagctctgtgagcactcggtgcaggcgatgcagtttgttgctgtgaccgaactgagacgtctttacctcgtgcaggggacattaaaatgcattagtgccaaagcaggaacggcacaccaatgaggcttcac

SEQ ID NO: 59425 - DNA, 552 bp, Chicken  19866894317702_1
cctggctccttaacgggtataaatgggtgtcctctgctgctctgcgccaggggaggttctggcctcccaggagcaacggctggaaaagccacagcgaagagggaaagtccaagcagagataaatgttgagggaatagatgggaaacagcgatggcgagatagcaaagcctgctgctcactctggcattttcagcatagcagagatgaaggacggtgacgaacacgctcagaaggatcttgcagggctgggatttggggataaaatggcagttgaccctacagggaaaatccaacatgagyttgtacataaaggatcggctcctggttggccattgccaacgtggaggtgacagtttggggttacagaagaygtgaaaaaacgtagaaagcagaggggagggatgagctgaccgctctggggcagcaaatatctcacaccagtggtgtcctggtggctggagatcaatgctttgtgctgccaaacggctcagcttgaggcagcccaaagcaatggggggggggtggggaacagagctgggaactccgtgctgg

SEQ ID NO: 59426 - DNA, 481 bp, Chicken  19866894317702_2
agcaacggctggaaaagccacagcgaagagggaaagtccaagcagagataaatgttgagggaatagatgggaaacagcgatggcgagatagcaaagcctgctgctcactctggcattttcagcatagcagagatgaaggacggtgacgaacacgctcagaaggatcttgcagggctgggatttggggataaaatggcagttgaccctacagggaaaatccaacatgagyttgtacataaaggatcggctcctggttggccattgccaacgtggaggtgacagtttggggttacagaagaygtgaaaaaacgtagaaagcagaggggagggatgagctgaccgctctggggcagcaaatatctcacaccagtggtgtcctggtggctggagatcaatgctttgtgctgccaaacggctcagcttgaggcagcccaaagcaatggggggggggtggggaacagagctgggaactccgtgctgg

SEQ ID NO: 59427 - DNA, 599 bp, Chicken  19866894317704_1
  misc_feature (1)..(97): n is any nucleotide
nnnnnnnnnnnnnnnnnnnnnnnnnnnnnnnnnnnnnnnnnnnnnnnnnnnnnnnnnnnnnnnnnnnnnnnnnnnnnnnnnnnnnnnnnnnnnnnnnatctttgtagaaattaaatgttctagaaatcaatggcaaagcttaaataaacaaacaaacaagcactcctgtagctgttgttgaaacataattgagaaatagaaaaaaatcccactgttcaggtttgctaatatcccaggttgctctacatgcatgcatctttaaacagtagagaccaagatcaggttcacaaacatttatgyaaatcatgttttgtcatgcactaaacccactcagagaagaactatttttctattctcaactcctttgtacccctttgtatctgttctgtcttcagagtacatagctgataagtcattcattatactgtgacttagaataaaaacattttaaaatatcaagccttcactaaaaataaaattggtgacacagactgctgtgcaasggtggtattcacaactgctctctcactaagagaacatgggagaagamamwagcaagacatagacggggcaattagttggctgtttaattcactgct

SEQ ID NO: 59428 - DNA, 600 bp, Chicken  19866894317704_2
aaatcccactgttcaggtttgctaatatcccaggttgctctacatgcatgcatctttaaacagtagagaccaagatcaggttcacaaacatttatgyaaatcatgttttgtcatgcactaaacccactcagagaagaactatttttctattctcaactcctttgtacccctttgtatctgttctgtcttcagagtacatagctgataagtcattcattatactgtgacttagaataaaaacattttaaaatatcaagccttcactaaaaataaaattggtgacacagactgctgtgcaasggtggtattcacaactgctctctcactaagagaacatgggagaagamamwagcaagacatagacggggcaattagttggctgtttaattcactgctgtatgaagatggcagcgttgccagtctgagtcttaaacaagcacaacaggacacaaaggacacttcacacaagctttgaaagtgtgcatgacctggtaggttgacattctctgttgcgtttgaaatagatacagcctggaagttgcaatgccacattccccttatgtgtcacacaaagacatctcagtcctcttctggaatgac

SEQ ID NO: 59429 - DNA, 600 bp, Chicken  19866894317704_3
atgcatctttaaacagtagagaccaagatcaggttcacaaacatttatgyaaatcatgttttgtcatgcactaaacccactcagagaagaactatttttctattctcaactcctttgtacccctttgtatctgttctgtcttcagagtacatagctgataagtcattcattatactgtgacttagaataaaaacattttaaaatatcaagccttcactaaaaataaaattggtgacacagactgctgtgcaasggtggtattcacaactgctctctcactaagagaacatgggagaagamamwagcaagacatagacggggcaattagttggctgtttaattcactgctgtatgaagatggcagcgttgccagtctgagtcttaaacaagcacaacaggacacaaaggacacttcacacaagctttgaaagtgtgcatgacctggtaggttgacattctctgttgcgtttgaaatagatacagcctggaagttgcaatgccacattccccttatgtgtcacacaaagacatctcagtcctcttctggaatgacaatttctggagataaaggatcaggttagcctctgtctctgttacact

SEQ ID NO: 59430 - DNA, 600 bp, Chicken  19866894317704_4
gcatctttaaacagtagagaccaagatcaggttcacaaacatttatgyaaatcatgttttgtcatgcactaaacccactcagagaagaactatttttctattctcaactcctttgtacccctttgtatctgttctgtcttcagagtacatagctgataagtcattcattatactgtgacttagaataaaaacattttaaaatatcaagccttcactaaaaataaaattggtgacacagactgctgtgcaasggtggtattcacaactgctctctcactaagagaacatgggagaagamamwagcaagacatagacggggcaattagttggctgtttaattcactgctgtatgaagatggcagcgttgccagtctgagtcttaaacaagcacaacaggacacaaaggacacttcacacaagctttgaaagtgtgcatgacctggtaggttgacattctctgttgcgtttgaaatagatacagcctggaagttgcaatgccacattccccttatgtgtcacacaaagacatctcagtcctcttctggaatgacaatttctggagataaaggatcaggttagcctctgtctctgttacactgc

SEQ ID NO: 59431 - DNA, 600 bp, Chicken  19866894317704_5
catctttaaacagtagagaccaagatcaggttcacaaacatttatgyaaatcatgttttgtcatgcactaaacccactcagagaagaactatttttctattctcaactcctttgtacccctttgtatctgttctgtcttcagagtacatagctgataagtcattcattatactgtgacttagaataaaaacattttaaaatatcaagccttcactaaaaataaaattggtgacacagactgctgtgcaasggtggtattcacaactgctctctcactaagagaacatgggagaagamamwagcaagacatagacggggcaattagttggctgtttaattcactgctgtatgaagatggcagcgttgccagtctgagtcttaaacaagcacaacaggacacaaaggacacttcacacaagctttgaaagtgtgcatgacctggtaggttgacattctctgttgcgtttgaaatagatacagcctggaagttgcaatgccacattccccttatgtgtcacacaaagacatctcagtcctcttctggaatgacaatttctggagataaaggatcaggttagcctctgtctctgttacactgca

SEQ ID NO: 59432 - DNA, 600 bp, Chicken  19866894317705_1
gaaccgcgggcgaaggggatgcggagggtcagaataaaaggacgcccaaaaggaagatcgtgttgttgatggcgtactcggggaaaggctaccacggcatgcaagtacggggccgggccggcgctgctgcgggggaggagggggagagcgggaggacgggaggacgggaggacgggtgtgctttggtagagctgtgcgggaagaagttggctctgtagggacagcagcagctgtcggtgccaggagggggggtgtgaaggatttcacagcgctgtccaatgaacaaaacttcagtgctgyctttcggagtggttacccaatagtcactgtttgttttctctcgtgttctctcgtagagaaatctgggctcttcgcagttcaagacgatcgaagacgatttggtgtccgccctcgttcggtccggctgcatcccggagaaccacggcgaggacatgaagaagatgtcgttccagcgctgtgctcggacagataaggtacagtgcacggggctgtgcccacagaacgcggtctgcccctcctctgctgtcggtaccgactggcagtgcgtygttcagcatgaggtccggtggcaaataccac

SEQ ID NO: 59433 - DNA, 600 bp, Chicken  19866894317705_2
cgctgtccaatgaacaaaacttcagtgctgyctttcggagtggttacccaatagtcactgtttgttttctctcgtgttctctcgtagagaaatctgggctcttcgcagttcaagacgatcgaagacgatttggtgtccgccctcgttcggtccggctgcatcccggagaaccacggcgaggacatgaagaagatgtcgttccagcgctgtgctcggacagataaggtacagtgcacggggctgtgcccacagaacgcggtctgcccctcctctgctgtcggtaccgactggcagtgcgtygttcagcatgaggtccggtggcaaataccacctgcagtgaacagtacttgaaagtcctcccttcgtcccctgctaaacctgagtacaaagcaagcgttcagaagtggtggggtgttggttagatggcgtgtgtaaagctggtgctttgtactcaggctgtgtgtttgcctttccctcccattcccctgtcccagcaccccaacctgatgctgctcctctctgctgcccgcttgatgtggagctcagaaactgagctgcatctccctgtaatttttaacccgccacgtcagggtgctaagt

SEQ ID NO: 59434 - DNA, 600 bp, Chicken  19866894317715_1
tcacagtgtttctaaaccaagtgtcttgaccaaacaatccccttcatgttatctatgccacatccattcaaccactgtcctaggggaggctcattttgcaggttctttgaactgattaagagcagctttacatgaagaacagtttcctctcaatagctcttaacactgattcacaacaatgcagcagcagcagcagtcagcaccttactcagcagctttaagcagttgagctgcaaattcccactgctgaccaagaaacatcccactgcttggtgccctagctgatcccaccatccctgycagaaggcaggtctcttctattcctttgtggttgttaaaaatgtcacatccaggcttatgcagctcagacagccctgcataaatcatagaatcatttaaattggaagggatccttgaaagtcatttagtccaactcacctgcaattaacagtgacacatacagctagatcaagttgctcagtgccatgtacatcctcgccttgaatgtctccaaggatggggtatccaccacctctcccggcgacctgttatagtgcttcatctctggaacatgtggagaatgctgtccttagagggaat

SEQ ID NO: 59435 - DNA, 600 bp, Chicken  19866894317715_2
ctcttctattcctttgtggttgttaaaaatgtcacatccaggcttatgcagctcagacagccctgcataaatcatagaatcatttaaattggaagggatccttgaaagtcatttagtccaactcacctgcaattaacagtgacacatacagctagatcaagttgctcagtgccatgtacatcctcgccttgaatgtctccaaggatggggtatccaccacctctcccggcgacctgttatagtgcttcatctctggaacatgtggagaatgctgtccttagagggaatgtgtcattaagytatagactccttaagacctcgtttggcattctatgcacttgccatcacaattctatgtaatccttttgaagattagtcttaatagttcctaatagtttattttaatttgcaaacattctacgtcttttttgacttggtggaaggaggtgatgagratgtagggcttctgagatcaaattatgtctctttttggacattttgctccctctgtgaaggcaaggagctttctatctgatgcaactgcttatttttctgctgcaaatgccttagcagactctctcagaaacttattgggattgt

SEQ ID NO: 59436 - DNA, 600 bp, Chicken  19866894317715_3
atcaagttgctcagtgccatgtacatcctcgccttgaatgtctccaaggatggggtatccaccacctctcccggcgacctgttatagtgcttcatctctggaacatgtggagaatgctgtccttagagggaatgtgtcattaagytatagactccttaagacctcgtttggcattctatgcacttgccatcacaattctatgtaatccttttgaagattagtcttaatagttcctaatagtttattttaatttgcaaacattctacgtcttttttgacttggtggaaggaggtgatgagratgtagggcttctgagatcaaattatgtctctttttggacattttgctccctctgtgaaggcaaggagctttctatctgatgcaactgcttatttttctgctgcaaatgccttagcagactctctcagaaacttattgggattgttcagtctggaggaggctgagaggaaacttaccactctctacaactccctgaaaggatgttgtagtgaggtaggagtcaactcttctccctggttacataggatgagaggtgatggctttaagttgtgccaggggaggttcagattggatattatg

SEQ ID NO: 59437 - DNA, 599 bp, Chicken  19866894317723_1
  misc_feature (1)..(127): n is any nucleotide
nnnnnnnnnnnnnnnnnnnnnnnnnnnnnnnnnnnnnnnnnnnnnnnnnnnnnnnnnnnnnnnnnnnnnnnnnnnnnnnnnnnnnnnnnnnnnnnnnnnnnnnnnnnnnnnnnnnnnnnnnnnnnnnttaattcctgacctctttcccaactgttaacaggtaattagagcccatgaatatctacacagattactagggttgatttttccaaccctttttcccctcctactgtttttcctcatatatctatgattccatacagattaacaattttctctaatgaaaactgaattgacttygaatcacccatattgaaaaaaaaaaaaaaaagcagctgattctgctgaaaaggactacagaaatttccttaaaacatactctgtgaaaaaaaatattcttattaaaatataattgcataaagagatgcatttaaccttgcagttttataacagtatgaattctttaataggttagaatgactcttckctscttttgttccacaacagttttgtgtcaaagtagactgcatcgtccctatcaaattgactttagtattattgctccacaggtaatggtgtaagcaagtgtaagagcagta

SEQ ID NO: 59438 - DNA, 599 bp, Chicken  19866894317723_2
  misc_feature (1)..(111): n is any nucleotide
nnnnnnnnnnnnnnnnnnnnnnnnnnnnnnnnnnnnnnnnnnnnnnnnnnnnnnnnnnnnnnnnnnnnnnnnnnnnnnnnnnnnnnnnnnnnnnnnnnnnnnnnnnnnnnnttaattcctgacctctttcccaactgttaacaggtaattagagcccatgaatatctacacagattactagggttgatttttccaaccctttttcccctcctactgtttttcctcatatatctatgattccatacagattaacaattttctctaatgaaaactgaattgacttygaatcacccatattgyaaaaaaaaaaaaaaagcagctgattctgctgaaaaggactacagaaatttccttaaaacatactctgtgaaaaaaaatattcttattaaaatataattgcataaagagatgcatttaaccttgcagttttataacagtatgaattctttaataggttagaatgactcttckctscttttgttccacaacagttttgtgtcaaagtagactgcatcgtccctatcaaattgactttagtattattgctccacaggtaatggtgtaagcaagtgtaagagcagtaagatgatacaatttct

SEQ ID NO: 59439 - DNA, 600 bp, Chicken  19866894317723_3
agattactagggttgatttttccaaccctttttcccctcctactgtttttcctcatatatctatgattccatacagattaacaattttctctaatgaaaactgaattgacttygaatcacccatattgaaaaaaaaaaaaaaaagcagctgattctgctgaaaaggactacagaaatttccttaaaacatactctgtgaaaaaaaatattcttattaaaatataattgcataaagagatgcatttaaccttgcagttttataacagtatgaattctttaataggttagaatgactcttckctscttttgttccacaacagttttgtgtcaaagtagactgcatcgtccctatcaaattgactttagtattattgctccacaggtaatggtgtaagcaagtgtaagagcagtaagatgatacaatttctctttccatttacttgatccctttaggtcatagatgaggggacaatgtgaatgatgaaatctattattcattctgtaaatgattctgtagccttgaataaaatattctttaccctggaagagatccatctttggtgtctaatttcctcagattatctcacacttgaatgacat

SEQ ID NO: 59440 - DNA, 600 bp, Chicken  19866894317723_4
ttactagggttgatttttccaaccctttttcccctcctactgtttttcctcatatatctatgattccatacagattaacaattttctctaatgaaaactgaattgacttygaatcacccatattgaaaaaaaaaaaaaaaagcagctgattctgctgaaaaggactacagaaatttccttaaaacatactctgtgaaaaaaaatattcttattaaaatataattgcataaagagatgcatttaaccttgcagttttataacagtatgaattctttaataggttagaatgactcttckctscttttgttccacaacagttttgtgtcaaagtagactgcatcgtccctatcaaattgactttagtattattgctccacaggtaatggtgtaagcaagtgtaagagcagtaagatgatacaatttctctttccatttacttgatccctttaggtcatagatgaggggacaatgtgaatgatgaaatctattattcattctgtaaatgattctgtagccttgaataaaatattctttaccctggaagagatccatctttggtgtctaatttcctcagattatctcacacttgaatgacataca

SEQ ID NO: 59441 - DNA, 599 bp, Chicken  19866894317724_1
  misc_feature (1)..(24): n is any nucleotide
nnnnnnnnnnnnnnnnnnnnnnnntgggaactgcagattcaattgtaaaacaaacatgttaagagggtaagcctattttaaaaagagtatttttgatgaaaggagatgtacattgtcacaacaaattacataaatgggaatgtgtacttcacgggtgaggaaaggacctgctatgctgtaagtggcctgttcctagaatacctactcctacaatgcagaggaaaaaccttatggcaaaagtactacatagatcagcagttaaatgagcaattgaattgagggggaaatatatgtaatgcmtcacaacttgcagcagttctkttaaaggacaaagacaaggggcttgctgagggctaagcctactgaccctttcctgtcctattcttctgcccccatcctgatgcctcccctcctccccagcccacccttcccagtctctcccttcctttcagtgagtcagttccacctcttttcttgtgaataaatcccttgcctctcgttaagccccctcacactgcacwgggctgatttagtcacactctgtccatcagctctcctccgctggcagcggcagccgctgctgctctgccctccttgga

SEQ ID NO: 59442 - DNA, 599 bp, Chicken  19866894317724_2
  misc_feature (1)..(3): n is any nucleotide
nnntgggaactgcagattcaattgtaaaacaaacatgttaagagggtaagcctattttaaaaagagtatttttgatgaaaggagatgtacattgtcacaacaaattacataaatgggaatgtgtacttcacgggtgaggaaaggacctgctatgctgtaagtggcctgttcctagaatacctactcctacaatgcagaggaaaaaccttatggcaaaagtactacatagatcagcagttaaatgagcaattgaattgagggggaaatatatgtaatgcmtcacaacttgcagcagttctkttaaaggacaaagacaaggggcttgctgagggctaagcctactgaccctttcctgtcctattcttctgcccccatcctgatgcctcccctcctccccagcccacccttcccagtctctcccttcctttcagtgagtcagttccacctcttttcttgtgaataaatcccttgcctctcgttaagccccctcacactgcacwgggctgatttagtcacactctgtccatcagctctcctccgctggcagcggcagccgctgctgctctgccctccttggagctgttgggagaactccgctc

SEQ ID NO: 59443 - DNA, 600 bp, Chicken  19866894317724_3
aaaaaccttatggcaaaagtactacatagatcagcagttaaatgagcaattgaattgagggggaaatatatgtaatgcmtcacaacttgcagcagttctkttaaaggacaaagacaaggggcttgctgagggctaagcctactgaccctttcctgtcctattcttctgcccccatcctgatgcctcccctcctccccagcccacccttcccagtctctcccttcctttcagtgagtcagttccacctcttttcttgtgaataaatcccttgcctctcgttaagccccctcacactgcacwgggctgatttagtcacactctgtccatcagctctcctccgctggcagcggcagccgctgctgctctgccctccttggagctgttgggagaactccgctccaggctgtgctgcatcaatggctcttatytgagtgtctttgtgggggaaattcagtgccatttctatgcagacttcagtgggatgaattcactgctcagtctagaatttgtttaaatcctaaggtgctttttggggactcccaaactctgatgtaaatacaaccatgcaggcttacttcagtcatttttaaagtgacctaa

SEQ ID NO: 59444 - DNA, 600 bp, Chicken  19866894317724_4
agggctaagcctactgaccctttcctgtcctattcttctgcccccatcctgatgcctcccctcctccccagcccacccttcccagtctctcccttcctttcagtgagtcagttccacctcttttcttgtgaataaatcccttgcctctcgttaagccccctcacactgcacwgggctgatttagtcacactctgtccatcagctctcctccgctggcagcggcagccgctgctgctctgccctccttggagctgttgggagaactccgctccaggctgtgctgcatcaatggctcttatytgagtgtctttgtgggggaaattcagtgccatttctatgcagacttcagtgggatgaattcactgctcagtctagaatttgtttaaatcctaaggtgctttttggggactcccaaactctgatgtaaatacaaccatgcaggcttacttcagtcatttttaaagtgacctaattaagwgatttggctaaatagctgaagcattagagatgtcctgaggagagaaatctttacaaattgttgtcttcatattccatgactaaatcctcctaccctgttaggcaagcgagagctgaaagagg

SEQ ID NO: 59445 - DNA, 600 bp, Chicken  19866894317724_5
atttagtcacactctgtccatcagctctcctccgctggcagcggcagccgctgctgctctgccctccttggagctgttgggagaactccgctccaggctgtgctgcatcaatggctcttatytgagtgtctttgtgggggaaattcagtgccatttctatgcagacttcagtgggatgaattcactgctcagtctagaatttgtttaaatcctaaggtgctttttggggactcccaaactctgatgtaaatacaaccatgcaggcttacttcagtcatttttaaagtgacctaattaagwgatttggctaaatagctgaagcattagagatgtcctgaggagagaaatctttacaaattgttgtcttcatattccatgactaaatcctcctaccctgttaggcaagcgagagctgaaagagggttgtctgtcaagaaagagctacaaggagcggtagttctcccagtgcacagttgggatgagtaacaatccagctgagtcctctttccgctgattccgctatctatgcagaactgtaaaggcagctgtctgctttgctgtgcccctttgtcatttcctgttctcatggtttggctttcc

SEQ ID NO: 59446 - DNA, 600 bp, Chicken  19866894317724_6
tcctgaggagagaaatctttacaaattgttgtcttcatattccatgactaaatcctcctaccctgttaggcaagcgagagctgaaagagggttgtctgtcaagaaagagctacaaggagcggtagttctcccagtgcacagttgggatgagtaacaatccagctgagtcctctttccgctgattccgctatctatgcagaactgtaaaggcagctgtctgctttgctgtgcccctttgtcatttcctgttctcatggtttggctttcctgggtaagcaagagcaggtaacctgcatatcragttcataaagcatttgggaaatgagaaattgacaaatgtggtaaaacttgttaatttttaaaatgaaacctgcaggtatacaatagcctcctaagtgggcagttccactgaaaagcagacttgaggtattttattatccactctgtgagtggtctgagaaacattcttacagtggtttatgtaatacgaagcattgtgtgacattaaacatagcacaaagttatataaatagcgctaatttgtgcactggctgcaagaaaaaacatatggttggaagctcctaaagtacagcaaagatt

SEQ ID NO: 59447 - DNA, 600 bp, Chicken  19866894317728_1
cttaattttttctgagcaattatcagctcaggtaccagccaggaatcgaaacgttctttgctccgatgatggctgggtacaagtagctgcagactcctctgcgatgctgcaatttaccaggaagtctcctgcggtatctgtctcgagatgccttcacctgacgagcgtgcccagatagcaatcacaacctctcccatgtatttaaacgggcagttttgatgagtgctgcgagttttgctccctctcagctcgccgttcgggaagtagtgcaaagggcttgggctgcagccctcctcctcrccaggcacagctggccaaagcagcgtgaaagtggcaaagatctacagcagagctcgtttctctgtgctgacagtcctggcagtgttctgtgcctcagtttccccacccatacatgcataaactatcgttcgttgcagcactgttcccttaacccccagggtgctcctaccactcagtgttagagagttgaagtgttgaccaatctaggttccttgtctgaagtagcgtagtgagatatttgctcttcacagagtgatttctgatggccagtaagtgagcagtaaagagccctgtattatc

SEQ ID NO: 59448 - DNA, 600 bp, Chicken  19866894317730_1
atgacataaaggaaaatcaaagtgctttgaagaaaactcccctcctatgccatgaaatctcatatcagcagtgtacatgtcagcttcaaaattataaatatgcttaaaaggaaagattggtttcagttaatttcctctttcacttatttaccaagactcaaaatgtatcacaaatattttgtatttctgtaaatcctcccctaagagcagctcaaataaatattaacgaaaaacataatcatttccattttatagaacaggaaaatgagaggtcctaagaggcatgtaaattctactgcrcttcttgagctaaagagaactcagaagctttattttctgaccttctactcagatatcagatatgtcttcctctyttatgagtccataattctgagagttcactcatacaagtctgctgttgagaaagagtaatggctaccagaaatttaagttttccaaagaaagaagagactgtctttatgcatgtaaaacaggttcacacaataacagctatttgtgaatatttaccaaaaacaagaactgtataattacatgcaggcttagaattgggctccctagaatggacccagtgggaaagct

SEQ ID NO: 59449 - DNA, 600 bp, Chicken  19866894317730_2
acatgtcagcttcaaaattataaatatgcttaaaaggaaagattggtttcagttaatttcctctttcacttatttaccaagactcaaaatgtatcacaaatattttgtatttctgtaaatcctcccctaagagcagctcaaataaatattaacgaaaaacataatcatttccattttatagaacaggaaaatgagaggtcctaagaggcatgtaaattctactgcrcttcttgagctaaagagaactcagaagctttattttctgaccttctactcagatatcagatatgtcttcctctyttatgagtccataattctgagagttcactcatacaagtctgctgttgagaaagagtaatggctaccagaaatttaagttttccaaagaaagaagagactgtctttatgcatgtaaaacaggttcacacaataacagctatttgtgaatatttaccaaaaacaagaactgtataattacatgcaggcttagaattgggctccctagaatggacccagtgggaaagctgtgcttagcatttagaaaccactcacaagtgcatgtagaagggacagtgcccgtcagcactgagcaaaattccc

SEQ ID NO: 59450 - DNA, 600 bp, Chicken  19866894317736_1
acacaggacagcgttgatggagtcacagtttcataaaagtacctctgtggatgagtttggtcccatgaggccatctcagtgcaaaggtattttcagctgaatgtgtgcacagttggaaattttttgctttgtgtccacaagtttggctgctgactgttctaggagagatgtataagtcccgatgatggtgaagcactgtcagatttcaagatgagtgaaacagcttcaaacaactccatcacgctggaagaagctactttcttctgtcctctcagatgataattttgcaattttatgtgycgttaggtatcttgaaggtttttttcttcatctagctcctctgatggggccaatgtgcaatgaggcatcttcattatttcagagcgtaactattacccaatgacttttaaaggtagagttattgactgctgcaattcagcatgaagactgaccatcacccctttagctccatagaaatcctttgctttccttcaacactgaggttcacataccagagcttacatctgccagtgatccaggactgaccctgactttacagattggaagactcatactctgcaagtatacacagactcatac

SEQ ID NO: 59451 - DNA, 599 bp, Chicken  19866894317737_1
  misc_feature (1)..(21): n is any nucleotide
nnnnnnnnnnnnnnnnnnnnntccttttttattatataagccccaacattggaggtggatatgggtcatatggcagtaaaggctgaaccttcccaccaatattccattacattttgttgctgtgtgacagatggcagaagagggacattctgacaaaatggcatctgacaaggaagtgcgtatgaagcaaaggtgtgtcactgaactccaccatgtggaaaaaatagcatccattgacattcactgacactggctgaatattcacggagaccaaacagcggaggtgaacacagtgaggcmgtgggtggtatgtttcatcagtggtgacagcaggtcacctccgctggtgcaaattattatgagtacaccatgcaggctcttgtttatcactggcaaaaaatgcctagctaatggtggtgactctgttgaaaaatagcgttttgtagctgagaatttgctctatcaaatggtattattgtgctctttgtgcctgttctagtttccatggaaatatacagaaggccttacttttggagtracctacatagaaactttgtaaagccctaagatttgaaggatctgttaaagtagaaatgagc

SEQ ID NO: 59452 - DNA, 600 bp, Chicken  19866894317737_2
attcactgacactggctgaatattcacggagaccaaacagcggaggtgaacacagtgaggcmgtgggtggtatgtttcatcagtggtgacagcaggtcacctccgctggtgcaaattattatgagtacaccatgcaggctcttgtttatcactggcaaaaaatgcctagctaatggtggtgactctgttgaaaaatagcgttttgtagctgagaatttgctctatcaaatggtattattgtgctctttgtgcctgttctagtttccatggaaatatacagaaggccttacttttggagtracctacatagaaactttgtaaagccctaagatttgaaggatctgttaaagtagaaatgagcattctttaatttattgtttcctcagacacatggaagttccttaccactatcccacaagtgattgagtaacaaatagttcaacagagaaacctcaaaaagcttccagatgtcacatttcatagtggggtcccttgttggatattacagtacatctgggttgacacagtggttgttaggcagtaacatcattgtagtctacacatgcttgatgagtcaaatgctggttttgtttgcattac

SEQ ID NO: 59453 - DNA, 600 bp, Chicken  19866894317737_3
catcattgtagtctacacatgcttgatgagtcaaatgctggttttgtttgcattactgaaactatgaaactacccaactcccccgcagtatggatctgtactgccccactccagtcataattccaagacaacgtgccttgtgctcctgcattactctataggtgggttgtgtttgctctgctcaccaaaacaccttccagcctttgctgggtggccagtcaatgaatgctcctcagcacattttcctctccatcatttctacagtgtcttactttgcaggaaggatgaacaagtcccttrgggctttcagagaaggtcatgtaacagccatagtgggaaagagattgtccccacacctcacgggtttgtgaaaggactgctcactgtttggcccactgatggtcacttcggattttcaagctctgattgaacataccacttttgccccactttcatctatcacagatcagaatatgtatgtctcctaatattatatcagaagcatgggaaaggagaatcttccacaaacttgtgtcaaggccggagccagcgacctgtcctttacagaaataatcactcatgaaagcacaattaagtgga

SEQ ID NO: 59454 - DNA, 600 bp, Chicken  19866894317742_1
acagacacatgctcccttgggtgatgtgatttaatcaggttgttttttaaaaggcttttttcaaactgatcagaattactgagatatgtcagagaacgtttgttgccatgaataagcccttaataatatttcacagctgattattttctgaattaatttgtccttgaatgaaaggagagggtcagtgggacccttgtatgtgtctgggcacagcaaaggagcagtaatcacctggtgacagctctggaaaaacagagaagaaagagtaaaggggaaaaagagacaggaattacccagcakagacaactggcatactccagactatctgctggtttaagagacaaccttctcttctctttgaaatatgggctacctctgctcaagttccttggtttagagtgaaggtagttatctcacatttatgcagctcttgcagtcatagcccctgagcaggtcctcacccagcaattctctttaaacctggaaaaggtcaggccccagctccttcagtctttattattaaaagcttcctgcatggtttactggagagaaagaggcagtgaccttacatttaatctcatcaaagtctctgtgctgtaa

SEQ ID NO: 59455 - DNA, 599 bp, Chicken  19866894317743_1
  misc_feature (1)..(43): n is any nucleotide
nnnnnnnnnnnnnnnnnnnnnnnnnnnnnnnnnnnnnnnnnnntctttgaagaaagagtttgcccagtatagtatgaagtagattcttccttaatttttgtggaaatgttagaaaacaatgccaatgtttaaattctggaataaatcaaccttttcattcttaaaggcttaagagcagaagattagaaccaatttttttttttaactgtctatcatgttgactaccaaggttctagtttcaagccatattaaagaatgcaaaaaagtatgtattatagaaaaatgaatattattcaaagrgaagagtacagtatactgctagagtgtggttttggttaaatttaggtgtatgttagaaataaattactccacaactgctaaaaacaaaagacatccagtcaaacagtacttattatttactgcacctccataaaaatgactgttctgaagtgaagtttgataatggcatcaacctcttttaccggcatactgtaattatatttttgtaacaattcatttaccagacagctggtgatgaaagctgttatttccagccaaatgaaaagtgctctgattgaacggaatggtttggaatgaaa

SEQ ID NO: 59456 - DNA, 600 bp, Chicken  19866894317743_2
ataaattactccacaactgctaaaaacaaaagacatccagtcaaacagtacttattatttactgcacctccataaaaatgactgttctgaagtgaagtttgataatggcatcaacctcttttaccggcatactgtaattatatttttgtaacaattcatttaccagacagctggtgatgaaagctgttatttccagccaaatgaaaagtgctctgattgaacggaatggtttggaatgaaatgtttctccctcatcagtttctgaacctacctaagggtcaaggtccaaatgcaacagtyagttgcttagatacccaaaggaataaaccataatcaaggtacccagtatcccactgtgaaagatcctcactctctactgcatcctaaggaggggaaaaaataggtatataccgcctgcgtttgccccgcagatgtcatgatattaacagcaggccatttacagcccccgagtgaatgtcaaggcttttgtttgcatgtagggagcacacgattcccatggagctgccaaaagcaatctgtaagaggcttggggcattgctggcatccaggtgctggcacagggatgagaactgataggat

SEQ ID NO: 59457 - DNA, 600 bp, Chicken  19866894317745_1
tctgtgcaaatgcaccaaagttttatattgtgtataagacattcatatagagaatgtgaaatatttttacattatctcttgacagctgtctgtctttgtatgtactgcaaagcagtacttttaatggacctaccctttgccacatagttactaaaatcttaaattaaaaaagcaaacgtgctgccctggagcagctagaggatatctatgacactggcagcatctcagctacacaaccattctgtgatgcagtgttgaataacccacagtagaaattgcaactcaccttctgcatcttcyggccttgtaagatcaatgacaccagggcccagttttccatcytcattgggtttccctgttaactgtgggcctaaattctcaaatcttgttctttcctggaagagaacagaaatagtcttaatgctctatgcatgttagttctctttgtgtgcctgtgcatgtatgcatgcagtgacatgtgccttgttttttaaataccaacaatgagtgcatttaattagaaatttaactcagagactattttttacagattctgaacgtttgcatttatgaaaatcagttttaaatgtgaaacatata

SEQ ID NO: 59458 - DNA, 600 bp, Chicken  19866894317745_2
tcatatagagaatgtgaaatatttttacattatctcttgacagctgtctgtctttgtatgtactgcaaagcagtacttttaatggacctaccctttgccacatagttactaaaatcttaaattaaaaaagcaaacgtgctgccctggagcagctagaggatatctatgacactggcagcatctcagctacacaaccattctgtgatgcagtgttgaataacccacagtagaaattgcaactcaccttctgcatcttcyggccttgtaagatcaatgacaccagggcccagttttccatcytcattgggtttccctgttaactgtgggcctaaattctcaaatcttgttctttcctggaagagaacagaaatagtcttaatgctctatgcatgttagttctctttgtgtgcctgtgcatgtatgcatgcagtgacatgtgccttgttttttaaataccaacaatgagtgcatttaattagaaatttaactcagagactattttttacagattctgaacgtttgcatttatgaaaatcagttttaaatgtgaaacatatacagaagctttgaaattattttgatctgcactgccataatgca

SEQ ID NO: 59459 - DNA, 600 bp, Chicken  19866894317745_3
ttgatctgcactgccataatgcatagatgattgtacatgcaaatacaaaacacacttggcaggaaacagtactgatcgatgctgctcactttgccttaccacatatttctaacttaaactggaaaagacagtcaacatttgggagatgtaaaaattcagaaattgaaagaatttgtattaaaaaataatcccactttaataggggaaaacaacaacaacaacacaacaacacttctctccactatgagaatcagtttagccatcatacctcaaagaaaacacaagtctaaattttatgcragtttttcaaaggcaagtattttaaagaagttataatagatgacagaaattatagtattatttcatctgggaatttaaattgaacctcagtggaagagaaacctaaggggttaagaggagaaacggagagggaagtggaaggggaagggaaaaggatagtgaaaggaaaggaaaaaagaaagaagtgcaagctcgtaggaaaaataaagtacgaaaagcttttgaaagctgaagaccttcataggaaagttgaaactggaaactggaaggtattttacgtgttaatccagttagttcttc

SEQ ID NO: 59460 - DNA, 600 bp, Chicken  19866894317746_1
gcccatgggccatccaaatggagacagagccttagaatttcacaggcaaccaggtgaggaagcccagcttggcagacgtgaagaactggaataatcaggcccacggcttgccctgttgctatcctgtcacctccttgcagcgggatgaaaagaacactcacatgtcagttcgacggctctccggcagtaggacttcttggctgtgtagtttaccaccagctctgaatcatttctgctgaaggcattcctggtgggatagaaagtgtgcgaggccacttcagctgttttccctctgctcakagaaccacagctgcacgggtgaccacagagctacccacgagatcagcagcaaaggargaaatgcacatttgctctgatccttttcatttccctctcactggatcattgccattgcctacaatatccgatcaaaacatctacttgataaacagggctgatctacaaaggagtgagtcacggacgtattctggggaggaaatgggatactcatttcctagtcttacagcagtctgggctggtagcagtactacccagatctaccccttcctacagtgacctcctctgcacgatgtgcagctt

SEQ ID NO: 59461 - DNA, 600 bp, Chicken  19866894317746_2
ggaagcccagcttggcagacgtgaagaactggaataatcaggcccacggcttgccctgttgctatcctgtcacctccttgcagcgggatgaaaagaacactcacatgtcagttcgacggctctccggcagtaggacttcttggctgtgtagtttaccaccagctctgaatcatttctgctgaaggcattcctggtgggatagaaagtgtgcgaggccacttcagctgttttccctctgctcakagaaccacagctgcacgggtgaccacagagctacccacgagatcagcagcaaaggargaaatgcacatttgctctgatccttttcatttccctctcactggatcattgccattgcctacaatatccgatcaaaacatctacttgataaacagggctgatctacaaaggagtgagtcacggacgtattctggggaggaaatgggatactcatttcctagtcttacagcagtctgggctggtagcagtactacccagatctaccccttcctacagtgacctcctctgcacgatgtgcagcttgagcatgtcaatactccacattagcacgtagctcctttagtcaccacaatcctttag

SEQ ID NO: 59462 - DNA, 598 bp, Chicken  19866894317750_1
tgagctgtgctgtgcaaagtctgttgatggtctgcattggtttttgtttaattcctgtaaggtttaagggaagcttttctatttgtcattatgaatgaaaatgatctatcgaaggctgtgtttaaactggtgttacatacacatttctctaggtgtggagatccagaataagaattttgcctcttcttaaatcttaatttaatataagcctcaatcaaaggagataattcaccgtcttgatgggtgaatgttcttaaaaaaataaaaataagaagggccatgtgatattactcatctttytatggagatgttgagaaaatggagaaatccaccaaatccttctaatttatctaatgctcagtacctatagaagtatggctcatacttgttggcttctttttatatctgttacagggagatgctcagtttctctttaaaaaggcagtgccattattttatatatgctgcttctgtttaggttatgttgtgcaaatgatgcgtaattaagtttcattgtagtttcaaaactagacggccatttcatacatgtaaaatagtgcatatttttattaatcttggttttatttcagggggttgt

SEQ ID NO: 59463 - DNA, 600 bp, Chicken  19866894317752_1
aacaagttcgttctaggtctgtcatttatgggtcactgagccaaggcacgtacagcaggaggagaatgtacctggtccaaacgtgtgtcttgataacaataactgccttggcaacaactgagtcactggaggaagaatggcagaagtgcagcagtatcagcagctttgctaagaggaatagccaaagggatggacttgaacagtcagtgctatttttgttttatctttcttgtatgttggaagggtggaggttgaagcagacagaagcctccatgcaggatacagaaattcagaatacayggtatcagaaacagccatgtgcatcaaaaagtgcccaattggagcctaccawagtcaacaaatatttgatgtcagcagtgatgggwgctggattggycccaggttgccttgcagctactgctgcttttcatgaaaaaggtcttgtgtggccatgactgaagtcagccaaagctccraattaggatttgtttctctcccattttcagaacctctgaggtatgaaggagcaacagrgctgggatttgggctctgtcagggrctgtggcacccagcactgccagaacaggagggaagcacctg

SEQ ID NO: 59464 - DNA, 559 bp, Chicken  19866894317752_10
raattaggatttgtttctctcccattttcagaacctctgaggtatgaaggagcaacagrgctgggatttgggctctgtcagggrctgtggcacccagcactgccagaacaggagggaagcacctggacagtcccagccttccacactgactgagatatctcctcatcatcatggagctaccttgtgcatgcgagtgtcaccatcagggcttggaagctgtcrtgtttaatgggataacagcacatggayggctccttcggacaccatcatgtgtggtggggctcataggtgcagaaaaamcactgtcctggcacttcagctcctcgycactgggaccagtgggcagcagctgactctgcaagctgccaagggagcgagaggatatagttaatgggagagctaaagctcatttttctcacccctagcaaatccactcctcagttaaaagctgaaacagcttgaaccaaagaacgcaggctctgcagctgctgactgtgacaactcgtgacctctgtgggttggcaaagctggaaggctcttgtaacacccccccaggagg

SEQ ID NO: 59465 - DNA, 532 bp, Chicken  19866894317752_11
tcagaacctctgaggtatgaaggagcaacagrgctgggatttgggctctgtcagggrctgtggcacccagcactgccagaacaggagggaagcacctggacagtcccagccttccacactgactgagatatctcctcatcatcatggagctaccttgtgcatgcgagtgtcaccatcagggcttggaagctgtcrtgtttaatgggataacagcacatggayggctccttcggacaccatcatgtgtggtggggctcataggtgcagaaaaamcactgtcctggcacttcagctcctcgycactgggaccagtgggcagcagctgactctgcaagctgccaagggagcgagaggatatagttaatgggagagctaaagctcatttttctcacccctagcaaatccactcctcagttaaaagctgaaacagcttgaaccaaagaacgcaggctctgcagctgctgactgtgacaactcgtgacctctgtgggttggcaaagctggaaggctcttgtaacacccccccaggagg

SEQ ID NO: 59466 - DNA, 600 bp, Chicken  19866894317752_2
cagcaggaggagaatgtacctggtccaaacgtgtgtcttgataacaataactgccttggcaacaactgagtcactggaggaagaatggcagaagtgcagcagtatcagcagctttgctaagaggaatagccaaagggatggacttgaacagtcagtgctatttttgttttatctttcttgtatgttggaagggtggaggttgaagcagacagaagcctccatgcaggatacagaaattcagaatacayggtatcagaaacagccatgtgcatcaaaaagtgcccaattggagcctaccawagtcaacaaatatttgatgtcagcagtgatgggwgctggattggycccaggttgccttgcagctactgctgcttttcatgaaaaaggtcttgtgtggccatgactgaagtcagccaaagctccraattaggatttgtttctctcccattttcagaacctctgaggtatgaaggagcaacagrgctgggatttgggctctgtcagggrctgtggcacccagcactgccagaacaggagggaagcacctggacagtcccagccttccacactgactgagatatctcctcatcatcatggagc

SEQ ID NO: 59467 - DNA, 600 bp, Chicken  19866894317752_3
gtcttgataacaataactgccttggcaacaactgagtcactggaggaagaatggcagaagtgcagcagtatcagcagctttgctaagaggaatagccaaagggatggacttgaacagtcagtgctatttttgttttatctttcttgtatgttggaagggtggaggttgaagcagacagaagcctccatgcaggatacagaaattcagaatacayggtatcagaaacagccatgtgcatcaaaaagtgcccaattggagcctaccawagtcaacaaatatttgatgtcagcagtgatgggwgctggattggycccaggttgccttgcagctactgctgcttttcatgaaaaaggtcttgtgtggccatgactgaagtcagccaaagctccraattaggatttgtttctctcccattttcagaacctctgaggtatgaaggagcaacagrgctgggatttgggctctgtcagggrctgtggcacccagcactgccagaacaggagggaagcacctggacagtcccagccttccacactgactgagatatctcctcatcatcatggagctaccttgtgcatgcgagtgtcaccatcagggctt

SEQ ID NO: 59468 - DNA, 600 bp, Chicken  19866894317752_4
aataactgccttggcaacaactgagtcactggaggaagaatggcagaagtgcagcagtatcagcagctttgctaagaggaatagccaaagggatggacttgaacagtcagtgctatttttgttttatctttcttgtatgttggaagggtggaggttgaagcagacagaagcctccatgcaggatacagaaattcagaatacayggtatcagaaacagccatgtgcatcaaaaagtgcccaattggagcctaccawagtcaacaaatatttgatgtcagcagtgatgggwgctggattggycccaggttgccttgcagctactgctgcttttcatgaaaaaggtcttgtgtggccatgactgaagtcagccaaagctccraattaggatttgtttctctcccattttcagaacctctgaggtatgaaggagcaacagrgctgggatttgggctctgtcagggrctgtggcacccagcactgccagaacaggagggaagcacctggacagtcccagccttccacactgactgagatatctcctcatcatcatggagctaccttgtgcatgcgagtgtcaccatcagggcttggaagctgtcr

SEQ ID NO: 59469 - DNA, 600 bp, Chicken  19866894317752_5
aatagccaaagggatggacttgaacagtcagtgctatttttgttttatctttcttgtatgttggaagggtggaggttgaagcagacagaagcctccatgcaggatacagaaattcagaatacayggtatcagaaacagccatgtgcatcaaaaagtgcccaattggagcctaccawagtcaacaaatatttgatgtcagcagtgatgggwgctggattggycccaggttgccttgcagctactgctgcttttcatgaaaaaggtcttgtgtggccatgactgaagtcagccaaagctccraattaggatttgtttctctcccattttcagaacctctgaggtatgaaggagcaacagrgctgggatttgggctctgtcagggrctgtggcacccagcactgccagaacaggagggaagcacctggacagtcccagccttccacactgactgagatatctcctcatcatcatggagctaccttgtgcatgcgagtgtcaccatcagggcttggaagctgtcrtgtttaatgggataacagcacatggayggctccttcggacaccatcatgtgtggtggggctcataggtgcagaaaaamc

SEQ ID NO: 59470 - DNA, 600 bp, Chicken  19866894317752_6
tgttggaagggtggaggttgaagcagacagaagcctccatgcaggatacagaaattcagaatacayggtatcagaaacagccatgtgcatcaaaaagtgcccaattggagcctaccawagtcaacaaatatttgatgtcagcagtgatgggwgctggattggycccaggttgccttgcagctactgctgcttttcatgaaaaaggtcttgtgtggccatgactgaagtcagccaaagctccraattaggatttgtttctctcccattttcagaacctctgaggtatgaaggagcaacagrgctgggatttgggctctgtcagggrctgtggcacccagcactgccagaacaggagggaagcacctggacagtcccagccttccacactgactgagatatctcctcatcatcatggagctaccttgtgcatgcgagtgtcaccatcagggcttggaagctgtcrtgtttaatgggataacagcacatggayggctccttcggacaccatcatgtgtggtggggctcataggtgcagaaaaamcactgtcctggcacttcagctcctcgycactgggaccagtgggcagcagctgactctgc

SEQ ID NO: 59471 - DNA, 600 bp, Chicken  19866894317752_7
gacagaagcctccatgcaggatacagaaattcagaatacayggtatcagaaacagccatgtgcatcaaaaagtgcccaattggagcctaccawagtcaacaaatatttgatgtcagcagtgatgggwgctggattggycccaggttgccttgcagctactgctgcttttcatgaaaaaggtcttgtgtggccatgactgaagtcagccaaagctccraattaggatttgtttctctcccattttcagaacctctgaggtatgaaggagcaacagrgctgggatttgggctctgtcagggrctgtggcacccagcactgccagaacaggagggaagcacctggacagtcccagccttccacactgactgagatatctcctcatcatcatggagctaccttgtgcatgcgagtgtcaccatcagggcttggaagctgtcrtgtttaatgggataacagcacatggayggctccttcggacaccatcatgtgtggtggggctcataggtgcagaaaaamcactgtcctggcacttcagctcctcgycactgggaccagtgggcagcagctgactctgcaagctgccaagggagcgagaggata

SEQ ID NO: 59472 - DNA, 600 bp, Chicken  19866894317752_8
cccaggttgccttgcagctactgctgcttttcatgaaaaaggtcttgtgtggccatgactgaagtcagccaaagctccraattaggatttgtttctctcccattttcagaacctctgaggtatgaaggagcaacagrgctgggatttgggctctgtcagggrctgtggcacccagcactgccagaacaggagggaagcacctggacagtcccagccttccacactgactgagatatctcctcatcatcatggagctaccttgtgcatgcgagtgtcaccatcagggcttggaagctgtcrtgtttaatgggataacagcacatggayggctccttcggacaccatcatgtgtggtggggctcataggtgcagaaaaamcactgtcctggcacttcagctcctcgycactgggaccagtgggcagcagctgactctgcaagctgccaagggagcgagaggatatagttaatgggagagctaaagctcatttttctcacccctagcaaatccactcctcagttaaaagctgaaacagcttgaaccaaagaacgcaggctctgcagctgctgactgtgacaactcgtgacctctgtgggttgg

SEQ ID NO: 59473 - DNA, 600 bp, Chicken  19866894317752_9
ttttcatgaaaaaggtcttgtgtggccatgactgaagtcagccaaagctccraattaggatttgtttctctcccattttcagaacctctgaggtatgaaggagcaacagrgctgggatttgggctctgtcagggrctgtggcacccagcactgccagaacaggagggaagcacctggacagtcccagccttccacactgactgagatatctcctcatcatcatggagctaccttgtgcatgcgagtgtcaccatcagggcttggaagctgtcrtgtttaatgggataacagcacatggayggctccttcggacaccatcatgtgtggtggggctcataggtgcagaaaaamcactgtcctggcacttcagctcctcgycactgggaccagtgggcagcagctgactctgcaagctgccaagggagcgagaggatatagttaatgggagagctaaagctcatttttctcacccctagcaaatccactcctcagttaaaagctgaaacagcttgaaccaaagaacgcaggctctgcagctgctgactgtgacaactcgtgacctctgtgggttggcaaagctggaaggctcttgtaacaccc

SEQ ID NO: 59474 - DNA, 600 bp, Chicken  19866894317756_1
ttctaaaacagtgtaagagaattacatatgagtgactttttttaagcacacacttatttatattctgctgctgaagaaaaaaaaaaggaataaactttgaagtttatgattaataataactctctttgcgtccttacaaagatcagtaaataaagttgaccacagaaggaacaaaactatccagacaacaggaaactacgaaaatgtctattttcagtatctgcccatagctgcttaattccaacaatgtcagatattttgtaaagattaaatttccattatgacacagagatcctgggycatctcttcagttgctgaaaagtgacatcatttaacagtttcaaaatgaatgaatagtaaataaagaaataaaacacaaaagagccccacaataaatatcaatatacgtagatcaattttgaagttttgctcaaaaaaatatctacttcaaataggtactctgtctctcataagctcctgactgaaaatcagaggacacaccatcagcaaacataaaatattattcactttaaggcaatatcggagctaattattgaccagataactttcctctatttctccctcacataagaaagagaa

SEQ ID NO: 59475 - DNA, 600 bp, Chicken  19866894317760_1
ttcattcaaacacaacccaacacttccaggtgtttctgtgacccacagtgaggaccaccatcacatcccagcacccaacagccacacataacattgccacatggaattcccaacacagccaaaggtctgttatgctcagtaacacagcagtgtttattctgtgggataatgcagtgtctctgacaatagatccttacttctggttgtcacttagtatccaaggtaaaggtcactgccttccagcattcccagagctcccctgaaagccccatgccaacaacagagcagcatgttcacatsagctcttccttcccagacagctcctcagccacaagctttctagaaaggatagggacaagaactcaaaagctggtgatgtttctagctcatgcccctgcattgacaggctggacatccctaccctctcctaaagtggataaaatcagccacctcaagcatcaattacgggaagagtcagggggagggaggaaaatcgagtccaaagttttctctgacttccgcataagaaatgatgctgcactgttaatggtcttctctttgagaaaggttgcttctccctttctgttaaaaacacaggta

SEQ ID NO: 59476 - DNA, 599 bp, Chicken  19866894317763_1
  misc_feature (1)..(124): n is any nucleotide
nnnnnnnnnnnnnnnnnnnnnnnnnnnnnnnnnnnnnnnnnnnnnnnnnnnnnnnnnnnnnnnnnnnnnnnnnnnnnnnnnnnnnnnnnnnnnnnnnnnnnnnnnnnnnnnnnnnnnnnnnnnngcctgaagtcagcaagacctttccccttgcaaggaattcattttttcagagcagccaccaccactcagcagccttaagcatccagcctttgtgccaggccctctctgtcctaggcacagccacccgttgtgggatggggagctcatgcatgaatatgaatgaagcatatttatagmtccggtgtcctgtttttcatttcaggagtattccaagcattgagtgtgaaaaacaaggatttcattaacttgaatattggcgaggtatgagcacagcttcataaacaccagtaaaatgatggggcttctctagcgcttggtcttcacaaaagaactggaggtgaaattggtgtccatgagagcacaggactgtctgccacagatttcagcagggctctgattttacagcacacaccctggttacatctccttggtgctatttccttccttgccctattgcacacagacagcttcccatc

SEQ ID NO: 59477 - DNA, 600 bp, Chicken  19866894317764_1
ctttccctgctaaaaagttcccagcacatccacagcgttatattcattatgagtaacatgcatgttcttgtgtcacatcagaaaagttcaagacaacccttcatcagctgtagaaaccacagtgaaactgtaggtaggactgctgcacgtcaaggactttccagtctctgaaagcagaacatataactgcagtggtaaccagattgcaatcttcccctgttactcagctcagcaccatctttgtagtctctcttagtgagggaaaaaaaaaaaaagagttcttaaaatgtaataccttawacagatcatttggcaagaaaagactattttctaggctgatatctacgctgcaaagratgtttcctacatgtttgctttacagacagaccttcctatgtgattttgtgacatccagataatctgtagccagaaagacagccccagtggttacatggttacaatccttatgtaacctaaaataagtctgaaatcattttgggggtatcctcaaatcactgatgccatcacagttgctgaataacctaaaatttattctggtattaatatatacaaataactgccaccttttacttcacatag

SEQ ID NO: 59478 - DNA, 557 bp, Chicken  19866894317764_2
catgcatgttcttgtgtcacatcagaaaagttcaagacaacccttcatcagctgtagaaaccacagtgaaactgtaggtaggactgctgcacgtcaaggactttccagtctctgaaagcagaacatataactgcagtggtaaccagattgcaatcttcccctgttactcagctcagcaccatctttgtagtctctcttagtgagggaaaaaaaaaaaaagagttcttaaaatgtaataccttawacagatcatttggcaagaaaagactattttctaggctgatatctacgctgcaaagratgtttcctacatgtttgctttacagacagaccttcctatgtgattttgtgacatccagataatctgtagccagaaagacagccccagtggttacatggttacaatccttatgtaacctaaaataagtctgaaatcattttgggggtatcctcaaatcactgatgccatcacagttgctgaataacctaaaatttattctggtattaatatatacaaataactgccaccttttacttcacatagaaaatgcagtcaa

SEQ ID NO: 59479 - DNA, 600 bp, Chicken  19866894317767_1
tcctcgtagcgttagggctgaaaggacaggacgtgatggggcgggatggattttcagtggtgaggcatttagtattgaaaccattggagacagcattgaaatacaggcttaaggctaatgaagatgaccagtgtccttgggctgaggatatgccaccgtaggcttcagaggtaatagataaacctgagcaaccttgagcaaaatactggtgatcaaagggttggccttggtttggagcctctgtgacagcccacccgctgcacacctacatgtcacaagaattacaaccaaaacatgggwgtgaggagctccgagtcacacctcgtgtagtgtcgctccctgactcacattgaaaaaggcttctaggctgtcaagggcaagtgaccaaacaagaagggaaatgggaactccctragctgcattcttgcagcctggagatcacctctgctgtcaacaagtagccacgtgcccttagatagctcagttcatctgccattgccccatgctggaatgagttaatatgtccttaccttgtccctagctgtctgacacaagctaatcttgatgttggctttgtcctactgagaaccttttcttgtt

SEQ ID NO: 59480 - DNA, 600 bp, Chicken  19866894317767_2
ctaatgaagatgaccagtgtccttgggctgaggatatgccaccgtaggcttcagaggtaatagataaacctgagcaaccttgagcaaaatactggtgatcaaagggttggccttggtttggagcctctgtgacagcccacccgctgcacacctacatgtcacaagaattacaaccaaaacatgggwgtgaggagctccgagtcacacctcgtgtagtgtcgctccctgactcacattgaaaaaggcttctaggctgtcaagggcaagtgaccaaacaagaagggaaatgggaactccctragctgcattcttgcagcctggagatcacctctgctgtcaacaagtagccacgtgcccttagatagctcagttcatctgccattgccccatgctggaatgagttaatatgtccttaccttgtccctagctgtctgacacaagctaatcttgatgttggctttgtcctactgagaaccttttcttgttctatatgcatctcatggaaacctgtgtaattaaagcacgtagctccagggtgcctaaaccagttcataggggtttttatctttgctgtgcccactggggctgcacaggcttttt

SEQ ID NO: 59481 - DNA, 600 bp, Chicken  19866894317768_1
tactttggatctcaaattctgcctgtcttttattttaggcctagacccatttatttcatcagcttcttggagcagccacaaacagccaaacatggaacaagtactaaatgcatcaaccttccacattcatcctatgattgtcacagtcaatgttttcaattaaatacatatataatcaatattatagctgttgaacattagtaaaaacattatagctgttattctgatcctagaacatttgagaaactccccaagcacatcatgcacgtctttacatctattacaattttaactgaaagraaaaaaactgcctacgaaacacattctaatatgaatatttggcaaatcgggccaaaaacaacaaaacaaagtaatctgtgcctttagtatcaaatgatcaaagaggatgaagttagttcccctttactcatataaaacatggcctactaacaattcacatgatgctttgactatagagaatttagtcacccttgttatgaaaaacacaggtcatccattcacattattatacaggcagaattraacttctcattaaaactaagaaagaaaaaattaagcattcctacaaaatgcataagg

SEQ ID NO: 59482 - DNA, 600 bp, Chicken  19866894317768_2
aaactccccaagcacatcatgcacgtctttacatctattacaattttaactgaaagraaaaaaactgcctacgaaacacattctaatatgaatatttggcaaatcgggccaaaaacaacaaaacaaagtaatctgtgcctttagtatcaaatgatcaaagaggatgaagttagttcccctttactcatataaaacatggcctactaacaattcacatgatgctttgactatagagaatttagtcacccttgttatgaaaaacacaggtcatccattcacattattatacaggcagaattraacttctcattaaaactaagaaagaaaaaattaagcattcctacaaaatgcataaggctggattatgattatttaggaagctagctgggtttacagagctttatctccaggacatactacaataagcctgctgctttgttttggaaaatatgtgttcaggcaatagtcaagcaggagtgacgcttaggaagtattaaactcatctccttaagactgattacttaaatcacgctgactgccctgcattctatggagcactgagatttatggtaacttaaaactcccaaggtcctttaaggt

SEQ ID NO: 59483 - DNA, 600 bp, Chicken  19866894317768_3
caggcccaagaagccccagcacacttttcctttcattttcttgcaagttagacatacagagatgagagctaaagctatctatgttacttcaaaataaaggtaattgaaaaaacaacctcttccacattcattacttccaaatagagataatagaaaataccacttcttccacatccacgtgatcaagagaagtaccactcagcacccaaaggctgagtgcagcccatcctccagatagctcaacacaccgtaggcacaattgtttgtggaagcattagcttaatgcaaacctcccgaaayagagaatccaggcatggaggaagcctctggcaattattgatatatggcctctctcttccatacggtagctgacaaaaagctaggtcttgattgatctgtaaagattttcatcgtccacacatcaacatcaatgccaggggcagtctcagtcagtctgagcacactatggttaaaggggaaagactcaagtccagtgacgcaatctcccatgaagggcaccagacagtacaacagacaaggtggcttcaaacctatctgtcatggttcaacctggtttggcctagttctttgacaggggat

SEQ ID NO: 59484 - DNA, 600 bp, Chicken  19866894317773_1
tggggtaagatgattaactcatagtcaaagtatttagcaatactgtgttaatcggtcctaaacaaagccttgggcataacagcagagggtgggagcagaggggagcacactgtcccaacttgatccagaagtaccaccagcatttgcttcctccaggatctagcggctaataaaggccgagaaggtgctatagaagaaagcaggagctgttccagaagattaagacacagattgtagggaaatgagatgcttccaagttgtgtcttcctcaagctcttcagccaaggtttgcatttggcmaggggactccagttctcatagagccagtaaaggtttgggcctagcaggacacagaarcaataggtaaatattcatgtctagctttactcttttttataaaaattcagtctccaactctagttctaactttcttcacacttcttataatttctgtcactatgtagtatgaactgtgtgctattgatgcatgcacacagtgtaaagattaatagaagaactacaaatcaggaggagttaatttgatttctttccaccggtgctctgtagtattttatgctgtctgtcgccaagaatatttta

SEQ ID NO: 59485 - DNA, 600 bp, Chicken  19866894317773_2
ctaaacaaagccttgggcataacagcagagggtgggagcagaggggagcacactgtcccaacttgatccagaagtaccaccagcatttgcttcctccaggatctagcggctaataaaggccgagaaggtgctatagaagaaagcaggagctgttccagaagattaagacacagattgtagggaaatgagatgcttccaagttgtgtcttcctcaagctcttcagccaaggtttgcatttggcmaggggactccagttctcatagagccagtaaaggtttgggcctagcaggacacagaarcaataggtaaatattcatgtctagctttactcttttttataaaaattcagtctccaactctagttctaactttcttcacacttcttataatttctgtcactatgtagtatgaactgtgtgctattgatgcatgcacacagtgtaaagattaatagaagaactacaaatcaggaggagttaatttgatttctttccaccggtgctctgtagtattttatgctgtctgtcgccaagaatattttattagctccacacaagggaactcatgactagtgctactgcccaactttagctgaagct

SEQ ID NO: 59486 - DNA, 600 bp, Chicken  19866894317775_1
tgctgcccctcttcggggctgtccgtcgttttgtggctctctttacgaaaaaaaaaaaaaagagtgtgtgctttgagcagtagccaaaaatggctctccttaggctatcaaggatctcagcaatgacatcacccaagtagataatttaccaagtgtgcagcaggcagaagcggctgctttgtgctgtcgttttcacgtaacttactttatctgagggtaatcacacgttgacttaggcccctgttctgataagcctggccacgtcctttccccaccacaggaaaagctctgtgggcttcrctgctgcgctcattcacagtaataaagctgacagtgggcaccggtaactccaggagccccatttgtaaacaaagggtgtggcagtgccctccgtagggtacattgcactgctttgccatgttgttgatgtgttttattcctcctattgagtagatctgggaacctgatggcattatggtcttcctttaagcgatgtcatgcctctgactgattgatagaatcattaaggtttaggaaggccgccaaggtcatctagtccaaccatcaacccattaccgccatgcccactcaaccatgtca

SEQ ID NO: 59487 - DNA, 600 bp, Chicken  19866894317777_1
gcactggaaaattgtttagtagctacagacatttgcattgaaggctatgtatggagttatttcaccttaaaggtcaaatgtagatagagaaaccactcacttcaatgtaacatattcagccaattggtaaagcccgatgccagaaagataatactgaagtaattgtgatttcctaaattctgctggtcaataaaaggggacctgtaggacatggacaatgcagaagattgcattttcttcatcacagtgtcaggccagagactaacaccttttgccttcttagatgctgcagttattttrctgaatagtttattatactgcgctcacaagtagattaagcatcaaggtttcctacttctctcttaccatcaggcagctggccacaaaattcataattgagatgtttagaaaagtttttaaaacttccatgctgattggaataggcttcaaatgacagcacacgttttctaacagcatatcagttctccaycttaaaccattattgtgggccaagtcttcagcagaaataagtgagtaattcacagtgaataattcaagtgttcaaattagtttctatttcagctcccaaaatacatctgc

SEQ ID NO: 59488 - DNA, 600 bp, Chicken  19866894317777_2
taaaaggggacctgtaggacatggacaatgcagaagattgcattttcttcatcacagtgtcaggccagagactaacaccttttgccttcttagatgctgcagttattttrctgaatagtttattatactgcgctcacaagtagattaagcatcaaggtttcctacttctctcttaccatcaggcagctggccacaaaattcataattgagatgtttagaaaagtttttaaaacttccatgctgattggaataggcttcaaatgacagcacacgttttctaacagcatatcagttctccaycttaaaccattattgtgggccaagtcttcagcagaaataagtgagtaattcacagtgaataattcaagtgttcaaattagtttctatttcagctcccaaaatacatctgcaagcagactccaatttcctttcttctatttatttcactactatttctttttactccatattgtacaagtagttactgcagaacatttgagctgagtttaatcacaatagctcttctgttgccactatctcagtagatatatatttgcacaattcttgcaaatgctgttatgaataataaatatatatgta

SEQ ID NO: 59489 - DNA, 476 bp, Chicken  19866894317777_3
tcaagtgttcaaattagtttctatttcagctcccaaaatacatctgcaagcagactccaatttcctttcttctatttatttcactactatttctttttactccatattgtacaagtagttactgcagaacatttgagctgagtttaatcacaatagctcttctgttgccactatctcagtagatatatatttgcacaattcttgcaaatgctgttatgaataataaatatatatgtatttcttttaacttgttcctggctgtaaagttcatttttccaaagtctgtgcaaggaaaacttycastaagaacaaccactgtacagggaggaaaatatgatgaaaaactttaaacttttaagcacttaagaagagattttttttgatattgtgatttattttttaatttatgattagcagtgttcattcacctcttctcttcagagctgattggaagctttaactcattttcctccttc

SEQ ID NO: 59490 - DNA, 473 bp, Chicken  19866894317777_4
agtgttcaaattagtttctatttcagctcccaaaatacatctgcaagcagactccaatttcctttcttctatttatttcactactatttctttttactccatattgtacaagtagttactgcagaacatttgagctgagtttaatcacaatagctcttctgttgccactatctcagtagatatatatttgcacaattcttgcaaatgctgttatgaataataaatatatatgtatttcttttaacttgttcctggctgtaaagttcatttttccaaagtctgtgcaaggaaaacttycastaagaacaaccactgtacagggaggaaaatatgatgaaaaactttaaacttttaagcacttaagaagagattttttttgatattgtgatttattttttaatttatgattagcagtgttcattcacctcttctcttcagagctgattggaagctttaactcattttcctccttc

SEQ ID NO: 59491 - DNA, 600 bp, Chicken  19866894317790_1
ttcatagacttggcagcagtccattagttcagaagaaaagagataatgctgctagcattaagatgagaattttgtatttacatttacctgtgtacctttggagtgattcaccttacggtttgctgctacagctgttcaaggagacacaagcatgacatgccttgatggttgactgtaagagattaaaatggcatagatataaataacgcagtcaacagaaagagaaatgacagaaaacaggttggaataaaaaagaggcaaggaaaatgagacgagcttattgtttctagcagctgaccmgaaaggctggagcaccaraatgcatgcgtggcttcctcaacaattccagagtgaccaagctagtcagcatctccagtggggggaccatatcatcttttctaagagcagtacgggagggagatatgtcgaacagtgattcaagcacatttgtcaagctagctacagtgcaatgctggtatagctaagactgtaaagagagtagaagggattttttaataatttttttaacccatacaccagacaaaggaagagagtctcaatgcccagacatctgagcatgaattaacaatggctttggga

SEQ ID NO: 59492 - DNA, 600 bp, Chicken  19866894317790_2
gtccattagttcagaagaaaagagataatgctgctagcattaagatgagaattttgtatttacatttacctgtgtacctttggagtgattcaccttacggtttgctgctacagctgttcaaggagacacaagcatgacatgccttgatggttgactgtaagagattaaaatggcatagatataaataacgcagtcaacagaaagagaaatgacagaaaacaggttggaataaaaaagaggcaaggaaaatgagacgagcttattgtttctagcagctgaccmgaaaggctggagcaccaraatgcatgcgtggcttcctcaacaattccagagtgaccaagctagtcagcatctccagtggggggaccatatcatcttttctaagagcagtacgggagggagatatgtcgaacagtgattcaagcacatttgtcaagctagctacagtgcaatgctggtatagctaagactgtaaagagagtagaagggattttttaataatttttttaacccatacaccagacaaaggaagagagtctcaatgcccagacatctgagcatgaattaacaatggctttgggagtcagatttgtgctgtag

SEQ ID NO: 59493 - DNA, 444 bp, Chicken  19866894317791_1
gaatctcgtgtgttactttatccaagctttgaaatcaaaatgtggcgattattagcattcctttgtgatttaacacagacgtattcctgtcttcttacagcagtattcctttgaaattactacaagggaggacattttacaaaataattttcaagccttttttgtaggctttggcaactgtactgttatctatggaactgtattccgcagatatggactataaacaaatatgcagcaattcaagcagcaatttggaattggtgtggaagcatagcaaccagctgttttgatgattttttwaaatctttttagcttacggcattttgtaggacacctgttcgctccgctaatgaaagcgaaagtccgaatggaatacagcagtttgatatttcaaaataggaaggaggtgaaagctggaaaaaaacacaacagtaaattccagac

SEQ ID NO: 59494 - DNA, 600 bp, Chicken  19866894317792_1
ctgggagtcaccccgagcgcctcatggatcatgttattttaataataaataaagagacggcagcagcatacaaggaaggattctgaaagattgttcatccaaaagcatcactcagaacctgccaatactaatttctccgagtttgattacctcatttacttctttttatttctattcattaattgagttttatcccccattacttcagctccccaaatgtgcccttcctataaaggaaccagacacgcactttgccgttccaaagttttattgctgcagctcatcaaaagtatagttagmaggaatggaatagtcattaagcatttaataatctaatagtgctgggaaaatatatatataataggggaagggggacggggagggacgaggcaaccctgcctagcgccatgaagtgtgcactgggagctcttcctacagatggttaattggctggtggacaaagctgagcatcctcaagaaggtaacatctaacactggagaaaatgcatctatcaattagggtattttctgacagcacaagaatgcctttggaacgagactaaaacgggttgaatatcaaagaaatttgattggcaaggg

SEQ ID NO: 59495 - DNA, 600 bp, Chicken  19866894317801_1
gtgagcattaaaatcctgtactgccacgtgtgtacttggaatccaggggatgacagaacagataaaatgcagatgtcgctgtgagagccacagtgactcctgtataaagaagaaggaatatggaatgcagttggttttccattgccttttagctaactggaataaagctacagagatgtaaaatgggcagatacaaagggcagcctggtctagcggttggcgaccctgcacatagcagcggggttgaaactagatgatcattgtggtccttttcaacccaggctattctatgattctatkactcctattgtcaaaaatactgatgatacactgaaacttgtcttccgaaggggytgcaatcaaaaagtttttcatctgacaaaaagtgtttccacctgggcagctctcaaagccgtccactccacagatgcgtattctcatggattcatcaggggatgctgtcgtggctgctggaccaacaaacactgcacgatccctgcgtgtgtattctgctgctgggggacagcaccagctgctgctgctccttgctgcttagctcaaaaactgtgtgacagtgaggtttcatagcagcagtaataa

SEQ ID NO: 59496 - DNA, 600 bp, Chicken  19866894317801_2
agaacagataaaatgcagatgtcgctgtgagagccacagtgactcctgtataaagaagaaggaatatggaatgcagttggttttccattgccttttagctaactggaataaagctacagagatgtaaaatgggcagatacaaagggcagcctggtctagcggttggcgaccctgcacatagcagcggggttgaaactagatgatcattgtggtccttttcaacccaggctattctatgattctatkactcctattgtcaaaaatactgatgatacactgaaacttgtcttccgaaggggytgcaatcaaaaagtttttcatctgacaaaaagtgtttccacctgggcagctctcaaagccgtccactccacagatgcgtattctcatggattcatcaggggatgctgtcgtggctgctggaccaacaaacactgcacgatccctgcgtgtgtattctgctgctgggggacagcaccagctgctgctgctccttgctgcttagctcaaaaactgtgtgacagtgaggtttcatagcagcagtaataatccttgtcttgcaaatgacacaaaaattagaagaggttgtgttaataagggcac

SEQ ID NO: 59497 - DNA, 600 bp, Chicken  19866894317805_1
ttattaattaaatcattgtactgtatattttacttagggtcaggaggctatgaatagaaagcccttaggcctgtgacttagaggcctgggtttgtgtgttgcaagttgggtgaaagcaagccttggaaagggtttcccccaggcattgagtgctatacatataaatatgtatagctttcatatgtttcatagattcagtggctggaaagccaagatgcctgtatttgaagccttgaattcctgtgacaacctaatggcagtggctgtctgcttgtcctgagtgaatgtcctgcctgatgytgtttgtgttgtgctgcaggatgctgaagtgaggttgtctgcgtctgactgctttccccttgggaagctcaggaagagatgtactgaatctcccataaggttattctaataaactgttttctacttaaataaatgctgtctcctgggaacttttagaatagtaaccactgtatgactgccattctgttttcttacagtgaaaaatctgaaagccttaactatagcacctttaatataagggcactgttaagatgcatccccttttgatgctttataatttactgactgaacagtattggc

SEQ ID NO: 59498 - DNA, 600 bp, Chicken  19866894317809_1
ttatcaaatcttactgatttctcattgaaatttactatagaagcaataattctttgaagagacaaaccatgtaagccagcaaaagtcatgatccaattttgtgtgtgaaagcttgcttaatgggttttcctatagaagctatctccagaaactgtcacaacaaacattgttctgttattaacagcatattaacagcagctttagtaagcagcagttatatttaagaacagtggaatcttctgcataaaactgccttgacaacacaaacttcagtgctcctgtcagatgtgacttactaayactgaggtgcctttgaagagacacaaagctgatgaacgcacacagaatgacatgaaaccaaataaagacaccgtacatctgaaccagggagcaacagacctctcaggtattgttgaaatttgtactacaacaacacttcgaaccatccagattttactctcacttatattccctccagatggatttgtatttwaaaaaaatattatttttcaagaaaatataaacaaaaatacaaaacaaaaaagggataatttgatacatgcagaaaaaaatgccaaaagtagaaaaaaagtcatgcta

SEQ ID NO: 59499 - DNA, 600 bp, Chicken  19866894317809_2
agcagctttagtaagcagcagttatatttaagaacagtggaatcttctgcataaaactgccttgacaacacaaacttcagtgctcctgtcagatgtgacttactaayactgaggtgcctttgaagagacacaaagctgatgaacgcacacagaatgacatgaaaccaaataaagacaccgtacatctgaaccagggagcaacagacctctcaggtattgttgaaatttgtactacaacaacacttcgaaccatccagattttactctcacttatattccctccagatggatttgtatttwaaaaaaatattatttttcaagaaaatataaacaaaaatacaaaacaaaaaagggataatttgatacatgcagaaaaaaatgccaaaagtagaaaaaaagtcatgctagcaaagccaaaaaacatttttaataaagctagaagaaaaaaaaaacaaaacagcagaatgcagaaatgggaagcattccccttcctggcagcctcataccattctgcacacttgatgagagaagcagcaccaccatcccacgtgtctttcagaatagccacgtcagtcaaggtctacagtagatttgattgtg

SEQ ID NO: 59500 - DNA, 600 bp, Chicken  19866894317811_1
gcccacctcaccaggggcactgtgttcagcaagagcttcccctgagctgttgccgactttgctgccccattatgaaaccatgcagatggaaaagtgaatcacacaagaatttatcatgctccattaaggaaagtcatttcccttccattataaaaaataattgcctgccacacaagccacagtgcagctccagctacatggtgcacagagagggctcgagaggcaagctcatgtgtgacacccagcagcagtcacttctgaaggacgagcttttctgatcctcatgttcacaggatcccrtgcaaatgcatgctsaagtttctgtgtgcagctcttcacatctcccccgcaccmagctcagcaccgaaaacacttggcagtgggtgtgtccaactgtttggcttgcatgggctgtgctgagtgaagagcaattgttttgggccatgtattcataaggtgcaccataaataatgcctcccatttatttgcatggaaactacaaccaacacaaagagcacagtaacactatttgatagtgcaaattcacagctacaaaatgctattttcctatagcagcagtgaacaagagacatcaaaacc

SEQ ID NO: 59501 - DNA, 600 bp, Chicken  19866894317811_2
ggcactgtgttcagcaagagcttcccctgagctgttgccgactttgctgccccattatgaaaccatgcagatggaaaagtgaatcacacaagaatttatcatgctccattaaggaaagtcatttcccttccattataaaaaataattgcctgccacacaagccacagtgcagctccagctacatggtgcacagagagggctcgagaggcaagctcatgtgtgacacccagcagcagtcacttctgaaggacgagcttttctgatcctcatgttcacaggatcccrtgcaaatgcatgctsaagtttctgtgtgcagctcttcacatctcccccgcaccmagctcagcaccgaaaacacttggcagtgggtgtgtccaactgtttggcttgcatgggctgtgctgagtgaagagcaattgttttgggccatgtattcataaggtgcaccataaataatgcctcccatttatttgcatggaaactacaaccaacacaaagagcacagtaacactatttgatagtgcaaattcacagctacaaaatgctattttcctatagcagcagtgaacaagagacatcaaaacctgccgctgctgctga

SEQ ID NO: 59502 - DNA, 600 bp, Chicken  19866894317811_3
gactttgctgccccattatgaaaccatgcagatggaaaagtgaatcacacaagaatttatcatgctccattaaggaaagtcatttcccttccattataaaaaataattgcctgccacacaagccacagtgcagctccagctacatggtgcacagagagggctcgagaggcaagctcatgtgtgacacccagcagcagtcacttctgaaggacgagcttttctgatcctcatgttcacaggatcccrtgcaaatgcatgctsaagtttctgtgtgcagctcttcacatctcccccgcaccmagctcagcaccgaaaacacttggcagtgggtgtgtccaactgtttggcttgcatgggctgtgctgagtgaagagcaattgttttgggccatgtattcataaggtgcaccataaataatgcctcccatttatttgcatggaaactacaaccaacacaaagagcacagtaacactatttgatagtgcaaattcacagctacaaaatgctattttcctatagcagcagtgaacaagagacatcaaaacctgccgctgctgctgaaatgcaccacccacccctctctgtgctcacatccactct

SEQ ID NO: 59503 - DNA, 600 bp, Chicken  19866894317811_4
tatttgatagtgcaaattcacagctacaaaatgctattttcctatagcagcagtgaacaagagacatcaaaacctgccgctgctgctgaaatgcaccacccacccctctctgtgctcacatccactctttggtctccagaaacactcagcaagtgtggatttatgaggaattcaatcccacacctttgctttgtctgcacttccgtgtcagacaccgctgtgtcagactgcccctctgctgccatctgtcacacggcaacaacatggaacgggatattggtggggaaggttccacctctrctgccgtaccaccaccatccgcctctgatgtggtgggtggacgtcatgaaacaggaggcattacttttggggctgccctcattaaatatacaaggtagttaatgtacttaattaaaacaatttaaccattaatatttttaattaaaacaaaaaagagagcaacaaacacatcaaactgttgggatgcatgactttgttgttgtcaaaataacgcaccagtctggttggatggacttcatccttggaaaaaataagctttcttacttatgtaccccccgtgtcctggtgcccagcttgccc

SEQ ID NO: 59504 - DNA, 600 bp, Chicken  19866894317817_1
ggtggtctgtattttcggtcttaccatagaggaagagcattgggtattttcagctggctttaaagaaaggcagacagaaataagctgtaataagtcttcaatcaagagccctagtaaactaggtcttggctaacacaggagcaacaaaatggcagaagagggcaaaaaggagtgtgaaagtaatgcacgagaggctgggctcgttccttaggatgtccaggatcaaagctgtccatggcagaagtaggtacagctcccatcggattcaacgatgtgagctgtatccactaacaccacatrtaaatttgacttgttgttttctcagtgctagacatcctggaatccaggcaggcaaggtatagatattgttaaaatgtttcttgcatcaccacagcaaagttgggtacaagtctagattcagttcctcagcccagatccagcaatgactgcgtagggagcagccagcttctagtgcatcagtctaactgtaaatccacaacatcccagtgctaaaacaaagttctctatttatataccccaattcccctacacatagttccgtatgattacattgttcttactaagaaaatgggctgggac

SEQ ID NO: 59505 - DNA, 600 bp, Chicken  19866894317824_1
aagttttgggattctaatggtaccttttcaattaaacttacagttaggagtggtgtgttttacctgaatattgggtgaacgttgttacagcagtgtctgtacacatgcctcctggtattgtcagggggccataagaaatgcagcttgaaacaaatgataatcaggcccagtctcttttgaggcacttttgcaacctctcattgtagatgtgaatgaccggggtgctttatcttcacctgcaggcaacctgtacatattcttcaaaggaaccagctgaatttagctcttaagatggaaccrggcctggactcatccaaacagtcgagctcgtgtgactgtgacatggtagcttccagcagctgttcaacaaatgaaaaaagtgaaccagatgaaaatgagccagacgtaccgtgcagtgcagatctatcgaacacagacataatgaaaattaaagagctaagcataggcgataacaaaagccatgaagactgtactgctgtgaatgagagcaaagaaccctctagagagcttggcaataaagactcaactgcagaactgaacggtaatggtaaaattcccaacagagacagtggcattgac

SEQ ID NO: 59506 - DNA, 599 bp, Chicken  19866894317831_1
  misc_feature (1)..(126): n is any nucleotide
nnnnnnnnnnnnnnnnnnnnnnnnnnnnnnnnnnnnnnnnnnnnnnnnnnnnnnnnnnnnnnnnnnnnnnnnnnnnnnnnnnnnnnnnnnnnnnnnnnnnnnnnnnnnnnnnnnnnnnnnnnnnnnacaggataagcacgtattgccccatgctgcggagggcatccttcctaaaaggcaacttccaggcatgatctactctgcttttaaatgtagagagacaagtaaaatgaaaaaagtacgctggagaaaggtaggtgagattgcaaagggtaccagtgtgtagccacgaggaggggyttctcctcagcaaaaggcaggagctggacagggctgagcatccagccctttgtgctgaaaagctgatgttagcgacgttgctgcaagcggccagatgccaagaaaaggacactatctgttggatctgagagcaccatcagctaaaaggctaatttatggggcccgaaaatggaagatgagactctaatcaaagacaaggagcatcttaagtaccatgctgccataagcttgcatgtgaggagagcgggagagaatcagcgtttgcagagattaaggccctttaccgcacatccctgaac

SEQ ID NO: 59507 - DNA, 535 bp, Chicken  19866894317832_1
gattcatgacatccccatctttaggagttggtgatctgagatgaggaaaggagcccaagtagtcttggctaaatttacacatctggaatcttttattttattgtgacctttaaataaatacatgtattatagacaaataagaaagagaagtacaatttcagtgattgtagtttctaatgagattccagagcatttactcccctcagttttaatcacttgcaatttttctcactcagcaataatgacattaaatttaataacaaacaactgtcttttatttaaataatactgtttgattartagagaaataaaggaaaaatggggtgcaatcaagcagtgagcaattgattccaaatggaaatatcatcacattgcatcttttaactgtggatagaattgtgagacgtacgcagattttgtaaatgcaaagtatattattctgtatatgagtataataatgtaatatatttgtgcttatagtacatcctatggacaagatgacttccagagatcccttctgagttacaccattctg

SEQ ID NO: 59508 - DNA, 600 bp, Chicken  19866894317841_1
agcattcatgttactaattttacctgtggtttagcaaactgatacacagaatgttttctttgcgttgcaatgcagtgccagaagtctgccttggttgcatgtagtttgtgtcatcgcagggagatctcagctgtgatttttatcttcattttcccccggactgtaaagtacaatatggtacagtttgtctttataacagagtactgcagcatctgcaaagagcagttttccagctgtttccttggagatgttatcacttgaatttcagttctcctctaagttttatctgaaatacgaatscagccagaagttctttctccattggaggatgaagttgcttttgctacttctgctttcagaattcattttttatctgggaacccattgcaacgtttccagcatattgcaaaattttcactgccgttaggagagaaacacataagagaaatctacttcgaagatatctctcacagggccctctctctcatttctgtactgtgtattttattaatgctttgttgcagtggtttctttaatggtgtcctttcttcagcagtgttttccagtgtggcgtttaatggttacatcaatgctagttaa

SEQ ID NO: 59509 - DNA, 600 bp, Chicken  19866894317841_2
attgcaaaattttcactgccgttaggagagaaacacataagagaaatctacttcgaagatatctctcacagggccctctctctcatttctgtactgtgtattttattaatgctttgttgcagtggtttctttaatggtgtcctttcttcagcagtgttttccagtgtggcgtttaatggttacatcaatgctagttaattaaatagtgccagaacacccagtgtggggaatatgggaaatgggtaagtcaaggggctccaggagtcatagagccatagagtggtttgagttggaaggggsccttaaacgccatttggtcccactctcctgcaatgaacagggacacccacatctccatcagtgctcacagccccatccagcctgaccttggctgtctgcagtgatggggcacccactccatcactgggcaacctgtgccagcgcctcaccgcccttattgtaagcaacttcttccttatatccaatctaaatctcccctctttgagtttgaaaccatttcagcttggaaatgcacttaattccaacagatcaagataacttcaaaagaaaacattttcatacaccatccaaaagaagtca

SEQ ID NO: 59510 - DNA, 600 bp, Chicken  19866894317846_1
gctgcagactgcaaatctccaacgctatctgcacggctgcttgccatagcaacagctgctcagagaagaagcgttcattaatgccactgttttctcctctgggaggaagcactcagtagaaaacagaccaataagattttttgcatttgtgattaaagtggttttgtcacaagctgtttctgcaccaagagctttatttttgcttgttcagacagccagtgaaaatcaacactattttaatagtgatttctgatggttaatcactgcctgctgcacatggttactgtctgtgcatccgcrtaagccttcagcacattggtactgaagtcttctcaaagtccttccattccagatggagacagaacagaggaaggtagcacaagggcattagcagcagccaagggatgcagagtgaccagagcgtgcaccccacaggaaggaagatccaaccagagctccccacactgcagcatatcctgcagtaaatcccacactggcaccaagcacagaagaaagggctgcactcctggcgaacagggggactaggcctccagctggaaccggcacattggctcccaccagggctccattccaccccac

SEQ ID NO: 59511 - DNA, 513 bp, Chicken  19866894317846_2
tcccacactggcaccaagcacagaagaaagggctgcactcctggcgaacagggggactaggcctccagctggaaccggcacattggctcccaccagggctccattccaccccacacctccttccatgcccacgaggcactcctaggcagagctggggcacatatgaggtgttcagcagctccctaggcacagagcacctttcagagacctgtcacacagaataataaataaatcagctttgccctccacccccagttcaaaggtacaacaaatctgggcttcagaccctgccattttctkccagactctgatagatactgacatagagatatttcccacacctacagaaattgagaactccctctaatgtttattttcattgagaaatcctaatgtagtcaaagccaggatgaattttccagcacaccaaccgcgggggtaagaatagcacgttcctgcttgggctagcaccagaggaaaccatcctcggtcccaggtttaaccaaattctgg

SEQ ID NO: 59512 - DNA, 600 bp, Chicken  19866894317849_1
ctccatttgccagggtctgagggttaatccatgcttccaaaaccagttggacagttcttggtgcctgcatatcattggcataagcaatagttggaagtttgctgtattgtgagactgcttttctttttacttccttcaggaagagtttgcaggagcacttgctgggtgtgatggtagtttctgaaagcttcagtcagagagggttgtgccttgtcaccttcacttaatggaaatacacctaagttttgcagatcaggtagagggagctgacctctccaagacactgcctgttatttttgycttagagaagttttggcagcaaaacagggcagggattccctcttgctctacccaggcagggcccaacaggatggagatccaggcttcccagagctttcatcaaaccagaacatgcagccaggttgccagacccagactttygaaagttaaaatatcacaggatttgcttaaaaccaaaagatgtgtttctcagatgtttcctgtggggactgaatttttattccattttcaagtggaaaccatatacattctaaagagaaaagaagaaaactcacatcagccctagattccaagaayggc

SEQ ID NO: 59513 - DNA, 600 bp, Chicken  19866894317849_2
agagtttgcaggagcacttgctgggtgtgatggtagtttctgaaagcttcagtcagagagggttgtgccttgtcaccttcacttaatggaaatacacctaagttttgcagatcaggtagagggagctgacctctccaagacactgcctgttatttttgycttagagaagttttggcagcaaaacagggcagggattccctcttgctctacccaggcagggcccaacaggatggagatccaggcttcccagagctttcatcaaaccagaacatgcagccaggttgccagacccagactttygaaagttaaaatatcacaggatttgcttaaaaccaaaagatgtgtttctcagatgtttcctgtggggactgaatttttattccattttcaagtggaaaccatatacattctaaagagaaaagaagaaaactcacatcagccctagattccaagaayggcagataaatggtagaattataaaaattctggaaataatttattttaatttgaaagtcctcttagatataaaaacaactttttttttttttttttgatagagtgactctgactcattctaacacattttgtcttcattcatgc

SEQ ID NO: 59514 - DNA, 600 bp, Chicken  19866894317849_3
tgycttagagaagttttggcagcaaaacagggcagggattccctcttgctctacccaggcagggcccaacaggatggagatccaggcttcccagagctttcatcaaaccagaacatgcagccaggttgccagacccagactttygaaagttaaaatatcacaggatttgcttaaaaccaaaagatgtgtttctcagatgtttcctgtggggactgaatttttattccattttcaagtggaaaccatatacattctaaagagaaaagaagaaaactcacatcagccctagattccaagaayggcagataaatggtagaattataaaaattctggaaataatttattttaatttgaaagtcctcttagatataaaaacaactttttttttttttttttgatagagtgactctgactcattctaacacattttgtcttcattcatgcatgcttttgactcagactaaaagactcggatcacaaagcctcatgtgtttgtgtgtgttctttttttcttttcttttttttaccttcacagctttttttgggaaatacctcaatgaatacaatggcagctacatccctcctgggtggagagagtgg

SEQ ID NO: 59515 - DNA, 600 bp, Chicken  19866894317849_4
agttgattcctccctccctctctcactgctagaaaccgttgattctctggtagaattgtcattgtcagttattacccacatcagaaaccttagttaatgctgtttcccattatacagtgtaaaaaaatatacattgtatgtctgtggtgtccgactccagatatgactaggagaatagataagagcaagagcacagccattggaaaactttggagcttgtttgtgctcttgacaaagattggaaagtatgccaaggtgacctgcctgctgccatgaagcgtctcgaaaaggctgaggagygcggggcacagactttccaccctgcagaaagcaatctggaatttcctcagactgtaggctcacggaagatgatacagatgttgcagctgtggtttctgacccatgtaatgagattttattggaagcttgcgatgcctgtttctgatttccccacccgtagaaattacatgatgctgattacatatttatatagagttaaaagaaaaaaaaaaaggaaaagaaagagtattggttagttaggcattccttacacaccctgcgtatgtagctagaataaacaggggaagtaggaggggagaa

SEQ ID NO: 59516 - DNA, 600 bp, Chicken  19866894317859_1
ggagtgcggtgaatactacctgtgacccacccattggcccagagggtattttagctgtgacattgcagcttttttcctccagtctaataaacaatctcataataaggccaaagctcatctgtgcaggtgacagaatttccctgagacaggctgtagtctgggataaaatcctgtggaaaaaaagtactgtaataaaagtaagggaagaaaacattttgttacaattgttttcttcagcatgtaattaaggaagttgtgcactatgcttgtcattatactgaaatccaaaagtttttttgkgcagaggcattagtgaacaaatgcatgagaaatgtaagccacagctcctgcactgtagaagccccttggacataacagagatgagtgcaatccataggtcttttgccccttttttgctttgctgaaacatgatggctcactataactacacctgtgttggctctttgcatcccaactgggaagctgtctgttgaaaagtaaaatcataaattccagatttgatttgatgcctattaatgcaaatgattgataatttaaagccattagaaataggaaaggcctgaatagtaagaaatactt

SEQ ID NO: 59517 - DNA, 600 bp, Chicken  19866894317859_2
agtcataaggcccaaacctgagaggttgtttacaatgtctgtttttcagtatcaggagtatttcactaaatggtgctcaacgagcactgaatgttaatgttaagcagaaagggaggcaaagctagcctgattgcctagctgacagattgcttgattaggtcaacactaaaaaccctttaagaatactgtgattcatatgggacactgatcatcagttctattgttgtgatgctgagatgagggaaaacctgttcctttgcaattctgggcgtaactaaaaagtaaatcattttaaaacartcttagtttttatgcacttcctaatgctatttttacacaaaaatattttttcatttcattttaaatcttcaaaggtctacaattattccttgtaataagagagagatcctgaatgatgggagaatacttgaagagagaagggatgatggacacacgtgcacgtcattcatggtggagacacagaaacacaaaatggaaaattaccatccaagtctatttctggcctttgactcggtaataaatgctgactctgtaaggccctgaacagcacaaagtcctgctcctcccagtcctccaact

SEQ ID NO: 59518 - DNA, 600 bp, Chicken  19866894317862_1
ccgttcttagcagaaacctgtagctctctcaagcgttttgttcctcgaaccaccgtgattttatacaaaagcaggtgggagctggaatgaatctgcttgattggaaacagggttacctctgcaaattatctaatcctgagatgttatttaattacgttatttagcagcatgctctcctttggtcatccttggagctgcaccagctgattgctcactatggcagcctggttataactcagtctgcccgcagcatcagctgccttggggctcttctatctcactgaaccgggcaagcgggcrtgaggtgcttctgagctgctccctgcgtgaaactgagggaatccaggaatatagcagaaaggcttctctgtttctctctctctctctttctctctctcttttttttttttccattggaacctgtccagatggagcacaaacaaggagaggataaatgcaaagtgctgtgccgccctgaaagcatgcgctgacgtcagcgctcgtggactggcactttaatcatagcatggggaatgtttctctctccctgtagcctcactttgagtttctctgtgcacgaacattagcatttatggcaag

SEQ ID NO: 59519 - DNA, 599 bp, Chicken  19866894317868_1
  misc_feature (1)..(83): n is any nucleotide
nnnnnnnnnnnnnnnnnnnnnnnnnnnnnnnnnnnnnnnnnnnnnnnnnnnnnnnnnnnnnnnnnnnnnnnnnnnnnnnnnnnttctcctccccactgtatttactgaaagcagtcatgtacccttgcagctgtattctgccagtgtaaacaagagccattatgaaacaggacatgataaaataggctctccattcccatggtccttcaagaggccttccacctagcccacactgagttcatcttctcttgacctcgcttggtcagatttggtcacagttcttcagagagaggccagatrgggagcagcagttccttgggaccacagctgtactcagtaggccttgtaagattttagaatagaacggatagttcggttagaaagggccaacaaaaatcatctagcccagctgcctgacctcttcagggctaaacagaagttaaagcatactgatgagggcattatcctaatgcctcttgacaatggcaggcatcaaccatctttctagggagcctattccagtgtttgacttcccttacagtacagaaacttttctggttttcagacacaaccattccttcccacagaggccagaccct

SEQ ID NO: 59520 - DNA, 600 bp, Chicken  19866894317870_1
tgacatactgctgttaggacaaagcaatttcatttattctgcatgagatcagaaagtactgtggggattttagaaactgagtctcctgattttcatttggtgtgagctcccctgttaagtcacattgatgccttacagaatgaacagaggtgttctgaaaggcaaaagcagtttactttaggtaaataaaattgtggacacagtggatagactgcaaatggaaactcatctctgaaggatttagttaggtgtttcaagcagacactgtgttctgattttagaaagttatagaatgaaacrtggagatccwaacactatcgcactcatcagtgaaagtgcaattaaagctggtcaaagagtcatcatgaatatgcagcactgctcatcagattttgtcatggaatatggtctagcctcccttgaatccaatgacacagtctaatagtgatatgacaagggggagtggttttaaactaaaaaaggagaggcttaagattagatgttagaaggaactactttactcagagggtggtgagacccaggcccaggatgcttagagaagttgtggtcyagatatgcctggggatagcagcagtcayg

SEQ ID NO: 59521 - DNA, 600 bp, Chicken  19866894317870_2
ctgttaggacaaagcaatttcatttattctgcatgagatcagaaagtactgtggggattttagaaactgagtctcctgattttcatttggtgtgagctcccctgttaagtcacattgatgccttacagaatgaacagaggtgttctgaaaggcaaaagcagtttactttaggtaaataaaattgtggacacagtggatagactgcaaatggaaactcatctctgaaggatttagttaggtgtttcaagcagacactgtgttctgattttagaaagttatagaatgaaacrtggagatccwaacactatcgcactcatcagtgaaagtgcaattaaagctggtcaaagagtcatcatgaatatgcagcactgctcatcagattttgtcatggaatatggtctagcctcccttgaatccaatgacacagtctaatagtgatatgacaagggggagtggttttaaactaaaaaaggagaggcttaagattagatgttagaaggaactactttactcagagggtggtgagacccaggcccaggatgcttagagaagttgtggtcyagatatgcctggggatagcagcagtcaygtgaagacaaa

SEQ ID NO: 59522 - DNA, 600 bp, Chicken  19866894317870_3
ctgattttagaaagttatagaatgaaacrtggagatccwaacactatcgcactcatcagtgaaagtgcaattaaagctggtcaaagagtcatcatgaatatgcagcactgctcatcagattttgtcatggaatatggtctagcctcccttgaatccaatgacacagtctaatagtgatatgacaagggggagtggttttaaactaaaaaaggagaggcttaagattagatgttagaaggaactactttactcagagggtggtgagacccaggcccaggatgcttagagaagttgtggtcyagatatgcctggggatagcagcagtcaygtgaagacaaatttataactgttactggctacacagtcttggttttatatatgaatgttgttctgcttcttttgaacagctcagtactgcaaattcttattcattcaagcagatttctccaaaatccaattgcataaaggattgcaagaagagatgagagcctttagaaatgaattaaagttttgacagaagccactggtttagggcttaatcctgcaaggttcagagcactctggcctccaaccagcaaagcattcaagcatgtgactgct

SEQ ID NO: 59523 - DNA, 600 bp, Chicken  19866894317870_4
rtggagatccwaacactatcgcactcatcagtgaaagtgcaattaaagctggtcaaagagtcatcatgaatatgcagcactgctcatcagattttgtcatggaatatggtctagcctcccttgaatccaatgacacagtctaatagtgatatgacaagggggagtggttttaaactaaaaaaggagaggcttaagattagatgttagaaggaactactttactcagagggtggtgagacccaggcccaggatgcttagagaagttgtggtcyagatatgcctggggatagcagcagtcaygtgaagacaaatttataactgttactggctacacagtcttggttttatatatgaatgttgttctgcttcttttgaacagctcagtactgcaaattcttattcattcaagcagatttctccaaaatccaattgcataaaggattgcaagaagagatgagagcctttagaaatgaattaaagttttgacagaagccactggtttagggcttaatcctgcaaggttcagagcactctggcctccaaccagcaaagcattcaagcatgtgactgcttaaacttgatgggactagtaacatactt

SEQ ID NO: 59524 - DNA, 600 bp, Chicken  19866894317870_5
taaagtcctcttagctgatactctaatgtctgcccaaggctccattaacaaaaagccaaatacaaactaactaaacagttaaaattgtgtctacctagtattaacccctcttctcattctttcagctctatcatattttctcatctagtatacttttccccctgaaagtcactcaaagacatgacattcatagctaaagagcctgtaatccaaattagcataatatgtggtttgctctgaaaacaaggtcttctattaatttccatgcactctacaatagatacaaagagcacaataacrctatttggtagagtaarttctcagctacagagcactatgtttcaacatggtatccaccattagctacatattttcactggtgatgaatgagaatacgcataccacctccttaaaaatctgcaccagtggagaaaacccattctcgcttctgaagtgcaccatccaccaccttgcatccactgtttggtctccacaaacattcagcaagtgttgatgaatgtcagtgggttccaatttttccacttagagaaattcaattccacaccttttcttcctgcgcacttccaggtcagacacaat

SEQ ID NO: 59525 - DNA, 600 bp, Chicken  19866894317870_6
atactctaatgtctgcccaaggctccattaacaaaaagccaaatacaaactaactaaacagttaaaattgtgtctacctagtattaacccctcttctcattctttcagctctatcatattttctcatctagtatacttttccccctgaaagtcactcaaagacatgacattcatagctaaagagcctgtaatccaaattagcataatatgtggtttgctctgaaaacaaggtcttctattaatttccatgcactctacaatagatacaaagagcacaataacrctatttggtagagtaarttctcagctacagagcactatgtttcaacatggtatccaccattagctacatattttcactggtgatgaatgagaatacgcataccacctccttaaaaatctgcaccagtggagaaaacccattctcgcttctgaagtgcaccatccaccaccttgcatccactgtttggtctccacaaacattcagcaagtgttgatgaatgtcagtgggttccaatttttccacttagagaaattcaattccacaccttttcttcctgcgcacttccaggtcagacacaattctgtcaggctgcccct

SEQ ID NO: 59526 - DNA, 599 bp, Chicken  19866894317876_1
  misc_feature (1)..(95): n is any nucleotide
nnnnnnnnnnnnnnnnnnnnnnnnnnnnnnnnnnnnnnnnnnnnnnnnnnnnnnnnnnnnnnnnnnnnnnnnnnnnnnnnnnnnnnnnnnnnnnnctacttaaacggggatgaagatctggggagcaatcttttcattcttaagttgactatgggtgatattccatcgttatactgatactacccatttccttctgcctcccaagaaaagctctcagctttttccatgcataacttcccttacagtgggacatataggaagagaaaatctgaacatcctctttagagattagttcctaamtgcttagaaacaaggctatttcatgaatcgctttgtggtaaatcaaatatccaacctggacttcccctggcacaacttcaggccattccctctcatccaattgcccgttacgtgggagcagaggccractcccacctcactacaacctccgttcagctgtagagagcaataaggcctcccctgagcctcctcttctccagactgacccatcccggctccctcagccgctccccatcasacctgtgctccacacccctcacagctccgctgcccttctcaggacacactccatggcctcc

SEQ ID NO: 59527 - DNA, 600 bp, Chicken  19866894317876_2
atcttttcattcttaagttgactatgggtgatattccatcgttatactgatactacccatttccttctgcctcccaagaaaagctctcagctttttccatgcataacttcccttacagtgggacatataggaagagaaaatctgaacatcctctttagagattagttcctaamtgcttagaaacaaggctatttcatgaatcgctttgtggtaaatcaaatatccaacctggacttcccctggcacaacttcaggccattccctctcatccaattgcccgttacgtgggagcagaggccractcccacctcactacaacctccgttcagctgtagagagcaataaggcctcccctgagcctcctcttctccagactgacccatcccggctccctcagccgctccccatcasacctgtgctccacacccctcacagctccgctgcccttctcaggacacactccatggcctccacgtcttccttgtagtgaggggcccacarctgaacacagcactcgaggtgcggcctcaccagcacagagtgcaggggaaggaaggaatgtgacagcgtgatatggtatcacagtacgatccgtayrat

SEQ ID NO: 59528 - DNA, 600 bp, Chicken  19866894317876_3
cttacagtgggacatataggaagagaaaatctgaacatcctctttagagattagttcctaamtgcttagaaacaaggctatttcatgaatcgctttgtggtaaatcaaatatccaacctggacttcccctggcacaacttcaggccattccctctcatccaattgcccgttacgtgggagcagaggccractcccacctcactacaacctccgttcagctgtagagagcaataaggcctcccctgagcctcctcttctccagactgacccatcccggctccctcagccgctccccatcasacctgtgctccacacccctcacagctccgctgcccttctcaggacacactccatggcctccacgtcttccttgtagtgaggggcccacarctgaacacagcactcgaggtgcggcctcaccagcacagagtgcaggggaaggaaggaatgtgacagcgtgatatggtatcacagtacgatccgtayratacacaggcacatatcatacartgctctgcacaaactacacaaagaagcaaagagaagccatgtcccattaaatacttcttctcaggctgcagtaagtggggggaggagggg

SEQ ID NO: 59529 - DNA, 567 bp, Chicken  19866894317876_4
cgctttgtggtaaatcaaatatccaacctggacttcccctggcacaacttcaggccattccctctcatccaattgcccgttacgtgggagcagaggccractcccacctcactacaacctccgttcagctgtagagagcaataaggcctcccctgagcctcctcttctccagactgacccatcccggctccctcagccgctccccatcasacctgtgctccacacccctcacagctccgctgcccttctcaggacacactccatggcctccacgtcttccttgtagtgaggggcccacarctgaacacagcactcgaggtgcggcctcaccagcacagagtgcaggggaaggaaggaatgtgacagcgtgatatggtatcacagtacgatccgtayratacacaggcacatatcatacartgctctgcacaaactacacaaagaagcaaagagaagccatgtcccattaaatacttcttctcaggctgcagtaagtggggggaggagggggaccagcgtgtgggaaacagaaatgaactgcaacagaggaactgcaacacattcaca

SEQ ID NO: 59530 - DNA, 471 bp, Chicken  19866894317876_5
ccractcccacctcactacaacctccgttcagctgtagagagcaataaggcctcccctgagcctcctcttctccagactgacccatcccggctccctcagccgctccccatcasacctgtgctccacacccctcacagctccgctgcccttctcaggacacactccatggcctccacgtcttccttgtagtgaggggcccacarctgaacacagcactcgaggtgcggcctcaccagcacagagtgcaggggaaggaaggaatgtgacagcgtgatatggtatcacagtacgatccgtayratacacaggcacatatcatacartgctctgcacaaactacacaaagaagcaaagagaagccatgtcccattaaatacttcttctcaggctgcagtaagtggggggaggagggggaccagcgtgtgggaaacagaaatgaactgcaacagaggaactgcaacacattcaca

SEQ ID NO: 59531 - DNA, 470 bp, Chicken  19866894317876_6
cractcccacctcactacaacctccgttcagctgtagagagcaataaggcctcccctgagcctcctcttctccagactgacccatcccggctccctcagccgctccccatcasacctgtgctccacacccctcacagctccgctgcccttctcaggacacactccatggcctccacgtcttccttgtagtgaggggcccacarctgaacacagcactcgaggtgcggcctcaccagcacagagtgcaggggaaggaaggaatgtgacagcgtgatatggtatcacagtacgatccgtayratacacaggcacatatcatacartgctctgcacaaactacacaaagaagcaaagagaagccatgtcccattaaatacttcttctcaggctgcagtaagtggggggaggagggggaccagcgtgtgggaaacagaaatgaactgcaacagaggaactgcaacacattcaca

SEQ ID NO: 59532 - DNA, 447 bp, Chicken  19866894317876_7
ccgttcagctgtagagagcaataaggcctcccctgagcctcctcttctccagactgacccatcccggctccctcagccgctccccatcasacctgtgctccacacccctcacagctccgctgcccttctcaggacacactccatggcctccacgtcttccttgtagtgaggggcccacarctgaacacagcactcgaggtgcggcctcaccagcacagagtgcaggggaaggaaggaatgtgacagcgtgatatggtatcacagtacgatccgtayratacacaggcacatatcatacartgctctgcacaaactacacaaagaagcaaagagaagccatgtcccattaaatacttcttctcaggctgcagtaagtggggggaggagggggaccagcgtgtgggaaacagaaatgaactgcaacagaggaactgcaacacattcaca

SEQ ID NO: 59533 - DNA, 599 bp, Chicken  19866894317880_1
  misc_feature (1)..(62): n is any nucleotide
nnnnnnnnnnnnnnnnnnnnnnnnnnnnnnnnnnnnnnnnnnnnnnnnnnnnnnnnnnnnnnaattgtttgttgattttgttttattcacttagttattcattttgctcttggcggatgcaagagccaagggagggaggaatggctcacagggttaggagagggctagggaggagcaggggcttgcagaaaacaggagattgctcatcatacactgtaatgcgctttaattccactatgggacagggcaggcaggaggaacaaattatccttggaggcacagcatagcaggtaaaggtcrrtacccacagcagatcccactcttacttgccttagactgctcattccactgagcactgagttctgtgagttctctggstcacacctttactgtcccccgtggtggctctggtgctgcaagggtgcagcagaggttgggtctccatagggagggccaatggagaaccttctccaggggattgcccaggcatcctgctccacagcatgcctgcgagcagctgaattcccctctcctgtctcctcctgctcctccctccccccagtttactcttccttcccccccagctgcgttttggtgct

SEQ ID NO: 59534 - DNA, 599 bp, Chicken  19866894317880_2
  misc_feature (1)..(61): n is any nucleotide
nnnnnnnnnnnnnnnnnnnnnnnnnnnnnnnnnnnnnnnnnnnnnnnnnnnnnnnnnnnnnaattgtttgttgattttgttttattcacttagttattcattttgctcttggcggatgcaagagccaagggagggaggaatggctcacagggttaggagagggctagggaggagcaggggcttgcagaaaacaggagattgctcatcatacactgtaatgcgctttaattccactatgggacagggcaggcaggaggaacaaattatccttggaggcacagcatagcaggtaaaggtcrrtacccacagcagatcccactcttacttgccttagactgctcattccactgagcactgagttctgtgagttctctggstcacacctttactgtcccccgtggtggctctggtgctgcaagggtgcagcagaggttgggtctccatagggagggccaatggagaaccttctccaggggattgcccaggcatcctgctccacagcatgcctgcgagcagctgaattcccctctcctgtctcctcctgctcctccctccccccagtttactcttccttcccccccagctgcgttttggtgctc

SEQ ID NO: 59535 - DNA, 600 bp, Chicken  19866894317880_3
tgttttattcacttagttattcattttgctcttggcggatgcaagagccaagggagggaggaatggctcacagggttaggagagggctagggaggagcaggggcttgcagaaaacaggagattgctcatcatacactgtaatgcgctttaattccactatgggacagggcaggcaggaggaacaaattatccttggaggcacagcatagcaggtaaaggtcrrtacccacagcagatcccactcttacttgccttagactgctcattccactgagcactgagttctgtgagttctctggstcacacctttactgtcccccgtggtggctctggtgctgcaagggtgcagcagaggttgggtctccatagggagggccaatggagaaccttctccaggggattgcccaggcatcctgctccacagcatgcctgcgagcagctgaattcccctctcctgtctcctcctgctcctccctccccccagtttactcttccttcccccccagctgcgttttggtgctcccaggcacagctgggccacccctcccctccatctgcccctttgatgtgtaataacgacttgcagatttaggagatttc

SEQ ID NO: 59536 - DNA, 600 bp, Chicken  19866894317883_1
gttatggccaaatatgtttaatattaatacttgatatttaacacatgaagcacattcattcaagagtgtgtttcctaatcttactggcatttgttgctcaaaaggggtagaattcccagattttgctgtaaccagatgaaacacccgtacgtttgcctttctgccaccagcattcttctgcctacatggatttatcaaacaatgcaagctggtagcaatattccacatatgttcactttgtgtaatcctcaaaaaacaaaggagctcagatgtgtgaacaaagtgaatgtaattcctacrtaaaccatttgcagtattttttctttgtgggtagtaagcagaaatgctggctttgcttccagaattctggttatcttcagtaamatcataatcaatcttattctttgtgtaaatctaaagcatggtttggaatagaaaaaaaagacacataggaaaaaaaaaacataagaaatagcaaaagcagtaatctctgcactagaatatagatgtacaatgatatatattgtcccaggttttctccgagacaacaaaatcattttcaaagattacagggcatagagtgaacctaaatctctatac

SEQ ID NO: 59537 - DNA, 600 bp, Chicken  19866894317883_2
tggcatttgttgctcaaaaggggtagaattcccagattttgctgtaaccagatgaaacacccgtacgtttgcctttctgccaccagcattcttctgcctacatggatttatcaaacaatgcaagctggtagcaatattccacatatgttcactttgtgtaatcctcaaaaaacaaaggagctcagatgtgtgaacaaagtgaatgtaattcctacrtaaaccatttgcagtattttttctttgtgggtagtaagcagaaatgctggctttgcttccagaattctggttatcttcagtaamatcataatcaatcttattctttgtgtaaatctaaagcatggtttggaatagaaaaaaaagacacataggaaaaaaaaaacataagaaatagcaaaagcagtaatctctgcactagaatatagatgtacaatgatatatattgtcccaggttttctccgagacaacaaaatcattttcaaagattacagggcatagagtgaacctaaatctctatactgtgtatgtctctaagagtaagaggaactacacattgctctgttttaaaacatatgaaacaccctacgcataactaagagaaaa

SEQ ID NO: 59538 - DNA, 600 bp, Chicken  19866894317888_1
tgctgggccataaaagtggtgctgtgctaatgccatccacctcctactggggctgcagagccagaggcccaaaggcagaccctgggggacattccctgagaggctccagaagctgtcagtggggatggcagctctgcaaagagccaggcaaagagcttggcaaacagcactgcctcgaagggctcagctcctgctccagctgctttccccagggtgtattccccagttgcactctcaccagcccctctgagatgctgaggacatgcagattcctcatgctctgcgtatgagtgaaaatgrgacaaagcacaggaaagcaacagaggccaaaggcaaacgcctgggctcagaaggaggtgaacaaacaatcagatcgccaggcataagctcagggatgytgggctaatctgaaatgcctgaaaccaggaggtggaggggaggagacgttgctctgtgcagccctttttcgagaatcaccagacagatttgaaaggcccaacctgaagtattgggctacagcttcacaaggaggcaattgaaaacaccaattgatcaaagctgccgttttttactgataacttgtttgttcagggacacaca

SEQ ID NO: 59539 - DNA, 600 bp, Chicken  19866894317888_2
agaggctccagaagctgtcagtggggatggcagctctgcaaagagccaggcaaagagcttggcaaacagcactgcctcgaagggctcagctcctgctccagctgctttccccagggtgtattccccagttgcactctcaccagcccctctgagatgctgaggacatgcagattcctcatgctctgcgtatgagtgaaaatgrgacaaagcacaggaaagcaacagaggccaaaggcaaacgcctgggctcagaaggaggtgaacaaacaatcagatcgccaggcataagctcagggatgytgggctaatctgaaatgcctgaaaccaggaggtggaggggaggagacgttgctctgtgcagccctttttcgagaatcaccagacagatttgaaaggcccaacctgaagtattgggctacagcttcacaaggaggcaattgaaaacaccaattgatcaaagctgccgttttttactgataacttgtttgttcagggacacacactgctgctcactcccattggctcgctgtgtaaccaccatcggcagcttccctcgccgaaagatctgctgcatggatttttcctttccgattgcatttc

SEQ ID NO: 59540 - DNA, 600 bp, Chicken  19866894317904_1
acttctctacgcctgctcttggcattttttcctaatgcaattgttttcttccttttttttcctttttttcttttccccctaccaaatcccttcattggggtagcatgttggcttgggagattagtttgtaagacagtcagcaatagccaagtttgtaactcaaacttagaggcattgcaaatatagcagtccttaagggttttgcctattgctttttatctgagatggcaatataagtagcatatactgctttcagctgttttctcataacactcaatagtttaataaatcttaggtaaragcataacagtagcagttctgaatcagcaaactgatgtcttttctgtgtggaacatgaaagatagaaacaacatatatgtgcatcttacacttctgtggtgtattttcctagtctgtacaagtctgagtgaagaacttcaactgcttcttgaactatttatacaagaatttctttaataggagaaaaactggaagaaaatacagatattttcattgtaaacttgtttatatgtacttgtatgatcctagaaatctatgctcgctcgacagttttgaaactgttattattttgagccatct

SEQ ID NO: 59541 - DNA, 599 bp, Chicken  19866894317905_1
  misc_feature (1)..(48): n is any nucleotide
nnnnnnnnnnnnnnnnnnnnnnnnnnnnnnnnnnnnnnnnnnnnnnnnttgagtggagagctgcgctcagtggataatgcagaaagcgcatgtgtgtgctcatcttccccttatctcctgtcggattttgtggaagaagcaagacatctaatcccagcatagcagctgcaatatctggagggaaaggatgcctggaaggtcctttatcctgtgtgcacagcaggggggagctgccccacagcttcgaggtgcatcggcgggctgtgctgccacctagcccgcattctgctgcagagagasataccagtttggcttggaggatattaacgatcggacgcgctattctcaacctgtggtcgaaaaatccccacrgagtaagagcagcttctaaagggtccgtgaaaggtcatgtggagaagaaagctttctgtcaatactgttccatctgcaggctaacaggctgcagcgctgctggaaaatatttagtggactgcaattggaatagattgaaaacttcctggtttacgcagaacaaaaaatacctctgtttccacatcaaaactaaagccatcagagtgttgtggtacagacactgagaa

SEQ ID NO: 59542 - DNA, 600 bp, Chicken  19866894317905_2
gataatgcagaaagcgcatgtgtgtgctcatcttccccttatctcctgtcggattttgtggaagaagcaagacatctaatcccagcatagcagctgcaatatctggagggaaaggatgcctggaaggtcctttatcctgtgtgcacagcaggggggagctgccccacagcttcgaggtgcatcggcgggctgtgctgccacctagcccgcattctgctgcagagagasataccagtttggcttggaggatattaacgatcggacgcgctattctcaacctgtggtcgaaaaatccccacrgagtaagagcagcttctaaagggtccgtgaaaggtcatgtggagaagaaagctttctgtcaatactgttccatctgcaggctaacaggctgcagcgctgctggaaaatatttagtggactgcaattggaatagattgaaaacttcctggtttacgcagaacaaaaaatacctctgtttccacatcaaaactaaagccatcagagtgttgtggtacagacactgagaacaaaattatctgcaggacaaactgaaaggagcccgtgctgggccagaacctaacagcctgtttttctagcacc

SEQ ID NO: 59543 - DNA, 600 bp, Chicken  19866894317909_1
ctagaaattactcagctttaaacattttaattcaaacactgtgatacttaatatatgtgagatgctatgtctagatgctattttactgtgcaacacagagtttgcccaatattttccaatttaaagaagcacggtaatgtgcattaaaaaaaaaaaggtggaaaagcactatgcaatatttcagatttctggaaagtatggtgattcttatgctatcctctctgttggtaataacacaaacaattaaatatccatgaaattcctgggctaacatgacagagctactaaaacttgtttaartgcaacttcacatactgtaaatacatgtagcagaggttctgtggcatctggatgtactagcaggcttttatacytatattaactactacaggtttctctgactattgcttaagaatgtttatttccattttcacagaacagggttattggttctctgtgaaattgccatgacactcggagttgtaggaggaatcaaagacctcagctttgtcactctyctgarcactggcacccaccgaggcactcagtcacactgcaacaggttttgcgagcagasaccacagtcaccacatcagagac

SEQ ID NO: 59544 - DNA, 600 bp, Chicken  19866894317909_2
atgctattttactgtgcaacacagagtttgcccaatattttccaatttaaagaagcacggtaatgtgcattaaaaaaaaaaaggtggaaaagcactatgcaatatttcagatttctggaaagtatggtgattcttatgctatcctctctgttggtaataacacaaacaattaaatatccatgaaattcctgggctaacatgacagagctactaaaacttgtttaartgcaacttcacatactgtaaatacatgtagcagaggttctgtggcatctggatgtactagcaggcttttatacytatattaactactacaggtttctctgactattgcttaagaatgtttatttccattttcacagaacagggttattggttctctgtgaaattgccatgacactcggagttgtaggaggaatcaaagacctcagctttgtcactctyctgarcactggcacccaccgaggcactcagtcacactgcaacaggttttgcgagcagasaccacagtcaccacatcagagacaagcacttacttaattctaagattgttgtgagctgccctctgcattctgctacaaaccttaagttaagatacaa

SEQ ID NO: 59545 - DNA, 600 bp, Chicken  19866894317909_3
tctctgttggtaataacacaaacaattaaatatccatgaaattcctgggctaacatgacagagctactaaaacttgtttaartgcaacttcacatactgtaaatacatgtagcagaggttctgtggcatctggatgtactagcaggcttttatacytatattaactactacaggtttctctgactattgcttaagaatgtttatttccattttcacagaacagggttattggttctctgtgaaattgccatgacactcggagttgtaggaggaatcaaagacctcagctttgtcactctyctgarcactggcacccaccgaggcactcagtcacactgcaacaggttttgcgagcagasaccacagtcaccacatcagagacaagcacttacttaattctaagattgttgtgagctgccctctgcattctgctacaaaccttaagttaagatacaacatgtttacattggattttgacagtaatcctaaaactgccaagcctcttgaatatttaaataattaccattaggaatatagtctgtcaatatagctgtatcctcttcattttattaccaaaataaactcgcttgtcgttggcat

SEQ ID NO: 59546 - DNA, 600 bp, Chicken  19866894317909_4
gttggtaataacacaaacaattaaatatccatgaaattcctgggctaacatgacagagctactaaaacttgtttaartgcaacttcacatactgtaaatacatgtagcagaggttctgtggcatctggatgtactagcaggcttttatacytatattaactactacaggtttctctgactattgcttaagaatgtttatttccattttcacagaacagggttattggttctctgtgaaattgccatgacactcggagttgtaggaggaatcaaagacctcagctttgtcactctyctgarcactggcacccaccgaggcactcagtcacactgcaacaggttttgcgagcagasaccacagtcaccacatcagagacaagcacttacttaattctaagattgttgtgagctgccctctgcattctgctacaaaccttaagttaagatacaacatgtttacattggattttgacagtaatcctaaaactgccaagcctcttgaatatttaaataattaccattaggaatatagtctgtcaatatagctgtatcctcttcattttattaccaaaataaactcgcttgtcgttggcatatcat

SEQ ID NO: 59547 - DNA, 600 bp, Chicken  19866894317909_5
agagctactaaaacttgtttaartgcaacttcacatactgtaaatacatgtagcagaggttctgtggcatctggatgtactagcaggcttttatacytatattaactactacaggtttctctgactattgcttaagaatgtttatttccattttcacagaacagggttattggttctctgtgaaattgccatgacactcggagttgtaggaggaatcaaagacctcagctttgtcactctyctgarcactggcacccaccgaggcactcagtcacactgcaacaggttttgcgagcagasaccacagtcaccacatcagagacaagcacttacttaattctaagattgttgtgagctgccctctgcattctgctacaaaccttaagttaagatacaacatgtttacattggattttgacagtaatcctaaaactgccaagcctcttgaatatttaaataattaccattaggaatatagtctgtcaatatagctgtatcctcttcattttattaccaaaataaactcgcttgtcgttggcatatcatcaattaataaaaaattaaaatactcatcaaaacagcttaattagagacttaaga

SEQ ID NO: 59548 - DNA, 600 bp, Chicken  19866894317911_1
ctcctattttattatgttggcccacaatatcagaggtgggtgttggtggtgtggcagtagaggttgcacctttgcaccaacattctgtaatgttttgttgccacgcaacagatggcagcagagggacagattgacagtggtatctaacatgaaagtgcatgtgaagcaaaagtgcatcactgaattccttcatgcagaaactgcaatgtaccacaaaaatactgcatgtattacaaaaatttttggtctttaaacttatttcatgtccaaatacaaagttttttttgtgtcaagctgtcygtctctcttacaagaagcatttaaatggccatgaagtaatgtcatgattatgaaagtaatgaaggtcaaactgcaaatcgttgcacagagcagtgtacccaactcttgtacttatttatttttttaatgaactgctagtcttaatgcttgaaaaatctccctttttgtctgtcagtttagctataataacagtaatgaaacaggttctcttatttatttttcttagtatattgtccaaaattgatattttagcttagtttatgaggtctggaaattcagagagacaagtattagtatgtt

SEQ ID NO: 59549 - DNA, 599 bp, Chicken  19866894317914_1
  misc_feature (1)..(203): n is any nucleotide
nnnnnnnnnnnnnnnnnnnnnnnnnnnnnnnnnnnnnnnnnnnnnnnnnnnnnnnnnnnnnnnnnnnnnnnnnnnnnnnnnnnnnnnnnnnnnnnnnnnnnnnnnnnnnnnnnnnnnnnnnnnnnnnnnnnnnnnnnnnnnnnnnnnnnnnnnnnnnnnnnnnnnnnnnnnnnnnnnnnnnnnnnnnnnnnnnnnnnnnnnnnttagagccccatggaaccctggaccccttcccgtggtggccccgatgcacaggcacggggggacagtggggtgcagagcagcggtgtgtggccctgmaaggatgcacgggaagaggaactgctctgggaggcagcagggctgccaatcccactctaaaggatctctgagctctcaggctgacaccaaaacaacrcaacgtaactgttttcagaaacacagagaaacaggcagagcctttccacactcactgcccacactgagctcagcatcctctcacccttccctgccccttctccttccctgccgataaacgcatggcagctgctgctgacaccaccaaaacccagacgcttacgcctcagctctctgcacagctgaaataacaacagcctccc

SEQ ID NO: 59550 - DNA, 599 bp, Chicken  19866894317914_2
  misc_feature (1)..(106): n is any nucleotide
nnnnnnnnnnnnnnnnnnnnnnnnnnnnnnnnnnnnnnnnnnnnnnnnnnnnnnnnnnnnnnnnnnnnnnnnnnnnnnnnnnnnnnnnnnnnnnnnnnnnnnnnnnttagagccccatggaaccctggaccccttcccgtggtggccccgatgcacaggcacggggggacagtggggtgcagagcagcggtgtgtggccctgmaaggatgcacgggaagaggaactgctctgggaggcagcagggctgccaatcccactctaaaggatctctgagctctcaggctgacaccaaaacaacrcaacgtaactgttttcagaaacacagagaaacaggcagagcctttccacactcactgcccacactgagctcagcatcctctcacccttccctgccccttctccttccctgccgataaacgcatggcagctgctgctgacaccaccaaaacccagacgcttacgcctcagctctctgcacagctgaaataacaacagcctcccagccgtgcagccccgcggctttatttccaatgagagcatgaatataggggctgcacatscagctctgcccagggcacctcctgcacgggcaggaaag

SEQ ID NO: 59551 - DNA, 600 bp, Chicken  19866894317914_3
aaaggatctctgagctctcaggctgacaccaaaacaacrcaacgtaactgttttcagaaacacagagaaacaggcagagcctttccacactcactgcccacactgagctcagcatcctctcacccttccctgccccttctccttccctgccgataaacgcatggcagctgctgctgacaccaccaaaacccagacgcttacgcctcagctctctgcacagctgaaataacaacagcctcccagccgtgcagccccgcggctttatttccaatgagagcatgaatataggggctgcacatscagctctgcccagggcacctcctgcacgggcaggaaaggattaacaaagctgaaatactcctcaacttgaaaaygtagcaggcaggaggatgagggaggacaatgcgagctattgtcctgcttatctggagctgcagagggtcaacgggacctccagggttacactatgggaaagggaacggagccctgcacaggggctgcacgcagccccacacctttgggatgctctatgcgggtgatgccaatcctgaccctgcgtgctgtgcagcatcgtgtgatgcagcgagatgtgctctgcag

SEQ ID NO: 59552 - DNA, 600 bp, Chicken  19866894317914_4
cagagcctttccacactcactgcccacactgagctcagcatcctctcacccttccctgccccttctccttccctgccgataaacgcatggcagctgctgctgacaccaccaaaacccagacgcttacgcctcagctctctgcacagctgaaataacaacagcctcccagccgtgcagccccgcggctttatttccaatgagagcatgaatataggggctgcacatscagctctgcccagggcacctcctgcacgggcaggaaaggattaacaaagctgaaatactcctcaacttgaaaaygtagcaggcaggaggatgagggaggacaatgcgagctattgtcctgcttatctggagctgcagagggtcaacgggacctccagggttacactatgggaaagggaacggagccctgcacaggggctgcacgcagccccacacctttgggatgctctatgcgggtgatgccaatcctgaccctgcgtgctgtgcagcatcgtgtgatgcagcgagatgtgctctgcagtgcaaygggtcacgtgcagagctgagctcggtgcatgcagagatcaggctcctccagagcaatcagtgctgccc

SEQ ID NO: 59553 - DNA, 447 bp, Chicken  19866894317914_5
tgcccagggcacctcctgcacgggcaggaaaggattaacaaagctgaaatactcctcaacttgaaaaygtagcaggcaggaggatgagggaggacaatgcgagctattgtcctgcttatctggagctgcagagggtcaacgggacctccagggttacactatgggaaagggaacggagccctgcacaggggctgcacgcagccccacacctttgggatgctctatgcgggtgatgccaatcctgaccctgcgtgctgtgcagcatcgtgtgatgcagcgagatgtgctctgcagtgcaaygggtcacgtgcagagctgagctcggtgcatgcagagatcaggctcctccagagcaatcagtgctgccctcagggctgtggggtcgtggggagagaagccagggttcagcccttggggcagcgacatcgcggccctacagctgggatg

SEQ ID NO: 59554 - DNA, 600 bp, Chicken  19866894317916_1
gaagcttactttttttatcctccttagcagatatatatagaaaaatgcaaattaacccattttaagtttagagtttacttcattagtcggtttaacatctagaaacaaggattttaaatgatctttggaaatgcagttcactgtaatttatcaaatcaggaagactgagtaaaatccagacaggacagggtttgagaggtagggactgcatttactcaaagcttaacagattaggaacaggataatgaattatatttcgtatttttataactatgtggaaataaatgcaatatatgtacyagcatggagttagttatgaagtttcacaatggaacaacaatatttctctgtttaaaaaaaaaaagaaaagaaataaaaaagaaagaaaagaaagaaagaaaaaaaaacccaacaactttcactgacaatgctatcaatagaaaagactttaagttactgtctgtcagcttttctaaaagcctccattaggtgcatgacttttcagatggaaagtaagagaaaaataggaagaagagatgcagcctctaaaatggtgagcaaatggacactttagggctacagctgcttccctcagccaga

SEQ ID NO: 59555 - DNA, 600 bp, Chicken  19866894317916_2
agaaataaaaaagaaagaaaagaaagaaagaaaaaaaaacccaacaactttcactgacaatgctatcaatagaaaagactttaagttactgtctgtcagcttttctaaaagcctccattaggtgcatgacttttcagatggaaagtaagagaaaaataggaagaagagatgcagcctctaaaatggtgagcaaatggacactttagggctacagctgcttccctcagccagaggcatggccatgcagccacaaaagtatttggcagagatgttcaatgtcgagacaattacataatgtgmgctgtatggtgttatgtttccccttcaacaaattctattcccagatggcctgtaagatattaaactattgcttatgtcaccattccagctggatactgtatataaacaaaaccacttcagtaaacctctttacagttcagtggaatattttctcttacattaaaataaatcccttgaaaaagagattgatactagataaatataaaatacatagaatttcaagattaacttatctctacactggggagttattaaaaagcaagaatttctcttgatggagaagaatttctcttcatccag

SEQ ID NO: 59556 - DNA, 600 bp, Chicken  19866894317916_3
gcaaagatccaatgaactcaggaaacttgtcaagttggagcaatttatgaaatactttgttgttgttattgcttaatgtctattcaaacagttgcacctttaaaaaaaaaaaaatccaaataaatcctgtaaacggaatttcctgcatattatatatgtatttgtaattgctgggctcccaaataagcttccatttaagtatataaggagtaaagtgatgtggaaaaacaaaactgagagaatagacagaggattgactagatgttgagtagatggacggagagccaaatgcttttaagraattaaagacaaaagaatgctaaaaacaactctaggttttggcatcccaagtataagagaaataaaatttaaaaaataaaaacaaaaacaaaacawaaataattagctcttgctgttgacgtagctttcctgttagcagtatctgatagctgtccgctttgtagggagcatatgagtgcaaaagcagcacagtctgtggaattaaagatccttgcaagaatcatcaaatgtacatcagctcatttttgaagtaatatttaaaatgagttaacataagggttgagctggtttacttaaaat

SEQ ID NO: 59557 - DNA, 600 bp, Chicken  19866894317916_4
cctttaaaaaaaaaaaaatccaaataaatcctgtaaacggaatttcctgcatattatatatgtatttgtaattgctgggctcccaaataagcttccatttaagtatataaggagtaaagtgatgtggaaaaacaaaactgagagaatagacagaggattgactagatgttgagtagatggacggagagccaaatgcttttaagraattaaagacaaaagaatgctaaaaacaactctaggttttggcatcccaagtataagagaaataaaatttaaaaaataaaaacaaaaacaaaacawaaataattagctcttgctgttgacgtagctttcctgttagcagtatctgatagctgtccgctttgtagggagcatatgagtgcaaaagcagcacagtctgtggaattaaagatccttgcaagaatcatcaaatgtacatcagctcatttttgaagtaatatttaaaatgagttaacataagggttgagctggtttacttaaaattttgcttcttgtttctatgaagtttactgtgtgtaaaaattgcacacaattggtgtggatttctaaactggtacactcatccacggacacttttgc

SEQ ID NO: 59558 - DNA, 599 bp, Chicken  19866894317918_1
  misc_feature (1)..(69): n is any nucleotide
nnnnnnnnnnnnnnnnnnnnnnnnnnnnnnnnnnnnnnnnnnnnnnnnnnnnnnnnnnnnnnnnnnnnntggagagcagcagaatgaatccctcacctctctcactcacagcctcctattacctccatctgttaccacttccacccatctaccttctccactgcaaccactcagggtcatcagtacagcgtgaacccaatgcagtttctgggagacatctgaagcaacagagtgggccaaaaagtacatcacatcctacagcgatggtaacttaggtgtctgccttccacctacagatgrtggatctgcatcaccaaatcatgtgttcatgatgtaatcacagcaaaacacaaagcagatcagtaatgacctgtgctggaggagtgaactgtgccaagaagcaaaagttttccaggtatgtccagagagctgcagattccccattcctggagatgtccaaggtcgggctggatggggcactgggcaaccccatctggtgtatgattttagcagttggcagctgtgcctgcagcagggggttgaactggatgatcttttgaggtcccttccagcccaagccgttctacaactctgtgatt

SEQ ID NO: 59559 - DNA, 484 bp, Chicken  19866894317920_1
atacttgtaagaaattattttgtttagaaaataagtctgtaatttaattgaaacattgttcccaaaatgaaataaaaataaaaataaaaaaaggaaaagaaaagcagaggaagaggataaagaaaagagagtttttgctaaagaggtatttctaactttcaatccaataatctgacatttcaaataacttggaagtaatttttcttgggtgagctgaaagaaacaattcccagtagcatctccaaggatgatttgttttatttgaagccttatttaatttgcagggtatttttttttccycttagtaaactgtgtgaatgactccttggtgaaatgtgtttttcagaatggtatggttaaatacagaccagcaagttcccttctcagagcttcacatcttttcctgctagtaacaagcagtacttccttgggtgtacagaacagaaataagtcttttgcaatccttctgagcaacagaagccaa

SEQ ID NO: 59560 - DNA, 600 bp, Chicken  19866894317938_1
ttctatacttcttcaagttcactatttaaaatacatctctaatgtttaaagaatgatctgaatctgcctccaaactcaacttcccaagctatgctgctgtaaaaccattggtagcaacaaggcttattaaagtatgttttctgtgcatcacagattttgtaaagttgagattttagggattctccatgcattgtttatttttagaagacctacctggacagttcttcaatttatttagtagcactttatgtaggttttgtcgccacagaatccttaatagtcagttacataattatacaygtaattagggaagtatttcttttgggttgctttttaatctattgctcaaatgtttttgatgaagcttaattatcaaattgaagggattagtatctcattctccctttccatgacatttatgtcttacgtgtctattacaatccctccagcagccatatgtacatcattgtcaaaaccaaaaaagaatagtaaaacaaatctgttcacatgcaaatatggggctttcttcctatcttcattttctattattatccttagctacttataagtagtgccctgtcaatgcccttgcagtgctct

SEQ ID NO: 59561 - DNA, 600 bp, Chicken  19866894317944_1
aaactaattacagtgacattcccaaaactggctgaatgtaattatcactaaaacagctatctcctccactggaccttccatatttcttgaaatataaacaaataaatatgcagtactatacaagtatttacttacctttttttttaactagctaaataattataactacataactgtaacaggggcagaagccagaaggaaccgcaggggcagaagccagaaggaaggttttctctcacaggatttgagatctgtatgtaatttctttggccctgcacttttttcctgcaagcagtgcartttacacatcacacaaatatgtagcctatctgtatgttttaataagtacatatrtggacatatctttctggtatwaaacgtatttcttctgatgccactttgactctaacttatcaaacaattagatatggctgcagctaaccgctctgcagactggcggatatttgagactatcacatcaatctttgggagagttttgactaacagaaagcacggaagatgactccacacatcagcagtgccaactaaaattaaccactgctgtaaacctacaaaagtttagactggaatgttgtgcat

SEQ ID NO: 59562 - DNA, 600 bp, Chicken  19866894317944_2
agctatctcctccactggaccttccatatttcttgaaatataaacaaataaatatgcagtactatacaagtatttacttacctttttttttaactagctaaataattataactacataactgtaacaggggcagaagccagaaggaaccgcaggggcagaagccagaaggaaggttttctctcacaggatttgagatctgtatgtaatttctttggccctgcacttttttcctgcaagcagtgcartttacacatcacacaaatatgtagcctatctgtatgttttaataagtacatatrtggacatatctttctggtatwaaacgtatttcttctgatgccactttgactctaacttatcaaacaattagatatggctgcagctaaccgctctgcagactggcggatatttgagactatcacatcaatctttgggagagttttgactaacagaaagcacggaagatgactccacacatcagcagtgccaactaaaattaaccactgctgtaaacctacaaaagtttagactggaatgttgtgcatctgcacaagtagcagcttgattttacggtactttttgaccccaaaggggtcctg

SEQ ID NO: 59563 - DNA, 600 bp, Chicken  19866894317944_3
ttccatatttcttgaaatataaacaaataaatatgcagtactatacaagtatttacttacctttttttttaactagctaaataattataactacataactgtaacaggggcagaagccagaaggaaccgcaggggcagaagccagaaggaaggttttctctcacaggatttgagatctgtatgtaatttctttggccctgcacttttttcctgcaagcagtgcartttacacatcacacaaatatgtagcctatctgtatgttttaataagtacatatrtggacatatctttctggtatwaaacgtatttcttctgatgccactttgactctaacttatcaaacaattagatatggctgcagctaaccgctctgcagactggcggatatttgagactatcacatcaatctttgggagagttttgactaacagaaagcacggaagatgactccacacatcagcagtgccaactaaaattaaccactgctgtaaacctacaaaagtttagactggaatgttgtgcatctgcacaagtagcagcttgattttacggtactttttgaccccaaaggggtcctggaacagatacttcaaattaaa

SEQ ID NO: 59564 - DNA, 600 bp, Chicken  19866894317946_1
gtggtgaagcatgtcagaggtgagctgcgggctgtcctgctgcctggctctctgaagtcctcacctatgggtgtcccagagctgtgcagtaagttgcactgtgtacacctgagccaagtccacatcagtccacaccacggctgatgttttattgtgcactgtgttaactttgatgcttgcagagagggcgatttggctttactgctgcagtttgtggctctgaaagctttccaagtgaaagtaacagcagtgatccgtagtaagactgctgttccaaaggcacagaaatataacagtatyggatgctttttctttcctcagttttctttgaacaaagtgtggtggactgttagttaagagttttcrtaagtggagatctaagggcatgcctgcactgtgccagtgacctattgagcacatgctgcatggagcctctgcacctctcacaggcaggctgggagtcagccctgcctttttctcttcatgctttaacctcagagggttttcacgtctcccatgtaatgattgcctcctttcctatataccttttttatattatttrttttcagttaagatcttctgagattcatctgctgcaag

SEQ ID NO: 59565 - DNA, 600 bp, Chicken  19866894317946_2
atgggtgtcccagagctgtgcagtaagttgcactgtgtacacctgagccaagtccacatcagtccacaccacggctgatgttttattgtgcactgtgttaactttgatgcttgcagagagggcgatttggctttactgctgcagtttgtggctctgaaagctttccaagtgaaagtaacagcagtgatccgtagtaagactgctgttccaaaggcacagaaatataacagtatyggatgctttttctttcctcagttttctttgaacaaagtgtggtggactgttagttaagagttttcrtaagtggagatctaagggcatgcctgcactgtgccagtgacctattgagcacatgctgcatggagcctctgcacctctcacaggcaggctgggagtcagccctgcctttttctcttcatgctttaacctcagagggttttcacgtctcccatgtaatgattgcctcctttcctatataccttttttatattatttrttttcagttaagatcttctgagattcatctgctgcaagtgcctcagtaactctgtggattaacacatcccctttcacggygttgcccagctgacacagatggta

SEQ ID NO: 59566 - DNA, 600 bp, Chicken  19866894317946_3
agactgctgttccaaaggcacagaaatataacagtatyggatgctttttctttcctcagttttctttgaacaaagtgtggtggactgttagttaagagttttcrtaagtggagatctaagggcatgcctgcactgtgccagtgacctattgagcacatgctgcatggagcctctgcacctctcacaggcaggctgggagtcagccctgcctttttctcttcatgctttaacctcagagggttttcacgtctcccatgtaatgattgcctcctttcctatataccttttttatattatttrttttcagttaagatcttctgagattcatctgctgcaagtgcctcagtaactctgtggattaacacatcccctttcacggygttgcccagctgacacagatggtayttctcctttatttgagcagtgatacttaataaagacaataaggagcaaaagaagaatcactggtttcaccagtcacctcagaggtgacgatacattttgattctgttgtactgagaagccaaatgcactaagagaacttctgtacagtagtcttcattctggaggagttgtatgggaactgcagcttaaacactg

SEQ ID NO: 59567 - DNA, 600 bp, Chicken  19866894317946_4
tggactgttagttaagagttttcrtaagtggagatctaagggcatgcctgcactgtgccagtgacctattgagcacatgctgcatggagcctctgcacctctcacaggcaggctgggagtcagccctgcctttttctcttcatgctttaacctcagagggttttcacgtctcccatgtaatgattgcctcctttcctatataccttttttatattatttrttttcagttaagatcttctgagattcatctgctgcaagtgcctcagtaactctgtggattaacacatcccctttcacggygttgcccagctgacacagatggtayttctcctttatttgagcagtgatacttaataaagacaataaggagcaaaagaagaatcactggtttcaccagtcacctcagaggtgacgatacattttgattctgttgtactgagaagccaaatgcactaagagaacttctgtacagtagtcttcattctggaggagttgtatgggaactgcagcttaaacactgcagcgtcttccaacgaggtggacgttttgggtttaagtcactatgagcaaagtacaggcaggaaagtagttcttgctctg

SEQ ID NO: 59568 - DNA, 600 bp, Chicken  19866894317946_5
aagtggagatctaagggcatgcctgcactgtgccagtgacctattgagcacatgctgcatggagcctctgcacctctcacaggcaggctgggagtcagccctgcctttttctcttcatgctttaacctcagagggttttcacgtctcccatgtaatgattgcctcctttcctatataccttttttatattatttrttttcagttaagatcttctgagattcatctgctgcaagtgcctcagtaactctgtggattaacacatcccctttcacggygttgcccagctgacacagatggtayttctcctttatttgagcagtgatacttaataaagacaataaggagcaaaagaagaatcactggtttcaccagtcacctcagaggtgacgatacattttgattctgttgtactgagaagccaaatgcactaagagaacttctgtacagtagtcttcattctggaggagttgtatgggaactgcagcttaaacactgcagcgtcttccaacgaggtggacgttttgggtttaagtcactatgagcaaagtacaggcaggaaagtagttcttgctctgtagtgacttcctttgttctctaaga

SEQ ID NO: 59569 - DNA, 599 bp, Chicken  19866894317950_1
  misc_feature (1)..(22): n is any nucleotide
nnnnnnnnnnnnnnnnnnnnnnttgcttggatggcacacatccagccaggaacagaagcactgttaaaaccccttatgatattaactatgtattttgaagaaaattctgatcgacaaactgtggattagcaagaataataagtatcacatgcaatttcttcatctgaaatatgccagcagcactgaatgactttgaatgaaatacatttaggaacataagtcaacataaagataactcacaaaagtggaaaagaactagagtgattctaatggattctttgctgtaaagaaatcatccarttcttccaagggactaataaacctttgctggtcattggtatcagataagacattattagataaggtagtgaaagcaatgtaccacatagccttgaaaaatgcctaggtgtagatcagctgacctaagcaatctgttctggccttacaatctgtgacactgtgccagcattctgaacctttatcttagcttaaaaagagaaacacattgctaggatgatggcaagagaatttggaagaagaaaagaatataggttctrtctagctctatttatttttttgtttgtttgctccaagggtag

SEQ ID NO: 59570 - DNA, 600 bp, Chicken  19866894317950_2
agagtgattctaatggattctttgctgtaaagaaatcatccarttcttccaagggactaataaacctttgctggtcattggtatcagataagacattattagataaggtagtgaaagcaatgtaccacatagccttgaaaaatgcctaggtgtagatcagctgacctaagcaatctgttctggccttacaatctgtgacactgtgccagcattctgaacctttatcttagcttaaaaagagaaacacattgctaggatgatggcaagagaatttggaagaagaaaagaatataggttctrtctagctctatttatttttttgtttgtttgctccaagggtagcatgagactatattcaatccctacgtgggcacatgtcctagtttctgtagcaagaggcatttggcatggtaattgtctctgttgaaactggtctatctgaatgaaatcattcagtacttcttgcggaaaaacaagaacacctataactaaaggactgaaagggttgtaggccaggaagagtttcaagcaacagaatccagtttcagacattatcatgtaatcaattatacaatgcatatcaagcatcatcttaaaact

SEQ ID NO: 59571 - DNA, 599 bp, Chicken  19866894317951_1
  misc_feature (1)..(224): n is any nucleotide
nnnnnnnnnnnnnnnnnnnnnnnnnnnnnnnnnnnnnnnnnnnnnnnnnnnnnnnnnnnnnnnnnnnnnnnnnnnnnnnnnnnnnnnnnnnnnnnnnnnnnnnnnnnnnnnnnnnnnnnnnnnnnnnnnnnnnnnnnnnnnnnnnnnnnnnnnnnnnnnnnnnnnnnnnnnnnnnnnnnnnnnnnnnnnnnnnnnnnnnnnnnnnnnnnnnnnnnnnnnnnnnntatttgatttttaagaaaatatgaatgaaattttacattatcattcagtaattgtggattcatagattcacagaayggcctaggttgaaaaggaccacaatgatcacctagttccaacccctgttatgtgcagtgtcaccaaccaccagaccaggctgcccagagccacatccagcctggccttgaatgcctccagggatggggcatccacagcctccttgggcaacctgttccagtgcatcaccatcctttgagtgaaaaacttcctcctaatatctaacctaaaacctcccctctctttcctttccttccaggagaggttctccagccctctgatcgtcttagtggccctcctctggacccactccaagagct

SEQ ID NO: 59572 - DNA, 600 bp, Chicken  19866894317951_2
ccctctctttcctttccttccaggagaggttctccagccctctgatcgtcttagtggccctcctctggacccactccaagagctctgcatcattcctgtactggcggccccaggcctggatgcagtactccagatggggcctcacaagagctgagcggagggacataatcacatctaatttagaataatttagaaatagctgcctttttgtttgtttgtttgtttttgtattgcaggcatagataatcaattagaactcaaattgcttagttagaaatgctaccaggagttctgcttagwagtgataaacattctgaataaaattcttaaattgtttatcagtagatctaataaaaagcagtcttcaattacaaatgtcagaaagtaacttctgctttaaatattaaattctaattgctacaatgaattaaggaaagtgagaatattttattaaatacaagctggatagttatctcagcatagccatcataggtatacaggagacgtatttcttggcttatttgtgtctctggtttccaaaggcgctgtctttcttcagatccttctgatttaacttagggctacaagcgctcaggactt

SEQ ID NO: 59573 - DNA, 599 bp, Chicken  19866894317958_1
  misc_feature (1)..(119): n is any nucleotide
nnnnnnnnnnnnnnnnnnnnnnnnnnnnnnnnnnnnnnnnnnnnnnnnnnnnnnnnnnnnnnnnnnnnnnnnnnnnnnnnnnnnnnnnnnnnnnnnnnnnnnnnnnnnnnnnnnnnnnntctatacaaacattacagatatttttttttttttattttttatctttccaatctactgttttactatattcacatggcactcctgaacctggagacgaatgcctcctttcccaccactttttactgcattggaaatcttgatgttttacaagaatacagatgaacacaaaaccaaatgtaygaattccagtgaaccactcactacatattttctgttagttatagttctcaagtgtgaggatgtagcaaatttcatgctgaataatattttaacctggctttatagttgaagttctgtgcatctttttttccccacagtgttgcctgaagtacattgtgaagtttcatytctgtaacaaatttatttctaccagctccttcatcatcataacattgtatttcctgaaattgttttattttgctamtcttctacataatataayactacaaatactgaaaggtgaagggtacatttttttt

SEQ ID NO: 59574 - DNA, 600 bp, Chicken  19866894317958_2
aatctactgttttactatattcacatggcactcctgaacctggagacgaatgcctcctttcccaccactttttactgcattggaaatcttgatgttttacaagaatacagatgaacacaaaaccaaatgtaygaattccagtgaaccactcactacatattttctgttagttatagttctcaagtgtgaggatgtagcaaatttcatgctgaataatattttaacctggctttatagttgaagttctgtgcatctttttttccccacagtgttgcctgaagtacattgtgaagtttcatytctgtaacaaatttatttctaccagctccttcatcatcataacattgtatttcctgaaattgttttattttgctamtcttctacataatataayactacaaatactgaaaggtgaagggtacatttttttttgctatgtgactttttgctatgtgaccactataacaatgccaaaagttgaagttccattttagcagtatttttgtggttctttaccttgtagtaaaaaaaacatcacaatttwtttttttctctgagatcatcttggctttgaaaataaaagtgtaattgcaacaattg

SEQ ID NO: 59575 - DNA, 600 bp, Chicken  19866894317958_3
gcattggaaatcttgatgttttacaagaatacagatgaacacaaaaccaaatgtaygaattccagtgaaccactcactacatattttctgttagttatagttctcaagtgtgaggatgtagcaaatttcatgctgaataatattttaacctggctttatagttgaagttctgtgcatctttttttccccacagtgttgcctgaagtacattgtgaagtttcatytctgtaacaaatttatttctaccagctccttcatcatcataacattgtatttcctgaaattgttttattttgctamtcttctacataatataayactacaaatactgaaaggtgaagggtacatttttttttgctatgtgactttttgctatgtgaccactataacaatgccaaaagttgaagttccattttagcagtatttttgtggttctttaccttgtagtaaaaaaaacatcacaatttwtttttttctctgagatcatcttggctttgaaaataaaagtgtaattgcaacaattgttttcttcaataattatcacagttagaagcaagggagaggtgtgagacatcattttccaggcttttcttctgctta

SEQ ID NO: 59576 - DNA, 599 bp, Chicken  19866894317958_4
ttttacaagaatacagatgaacacaaaaccaaatgtaygaattccagtgaaccactcactacatattttctgttagttatagttctcaagtgtgaggatgtagcaaatttcatgctgaataatattttaacctggctttatagttgaagttctgtgcatctttttttccccacagtgttgcctgaagtacattgtgaagtttcatytctgtaacaaatttatttctaccagctccttcatcatcataacattgtatttcctgaaattgttttattttgctamtcttctacataatataayactacaaatactgaaaggtgaagggtacatttttttttgctatgtgactttttgctatgtgaccactataacaatgccaaaagttgaagttccattttagcagtatttttgtggttctttaccttgtagtaaaaaaaacatcacaatttwtttttttctctgagatcatcttggctttgaaaataaaagtgtaattgcaacaattgttttcttcaataattatcacagttagaagcaagggagaggtgtgagacatcattttccaggcttttcttctgcttaaatcttaaaacctatga

SEQ ID NO: 59577 - DNA, 452 bp, Chicken  19866894317958_5
agttctgtgcatctttttttccccacagtgttgcctgaagtacattgtgaagtttcatytctgtaacaaatttatttctaccagctccttcatcatcataacattgtatttcctgaaattgttttattttgctamtcttctacataatataayactacaaatactgaaaggtgaagggtacatttttttttgctatgtgactttttgctatgtgaccactataacaatgccaaaagttgaagttccattttagcagtatttttgtggttctttaccttgtagtaaaaaaaacatcacaayttwtttttttctctgagatcatcttggctttgaaaataaaagtgtaattgcaacaattgttttcttcaataattatcacagttagaagcaagggagaggtgtgagacatcattttccaggcttttcttctgcttaaatcttaaaacctatga

SEQ ID NO: 59578 - DNA, 449 bp, Chicken  19866894317958_6
tctgtgcatctttttttccccacagtgttgcctgaagtacattgtgaagtttcatytctgtaacaaatttatttctaccagctccttcatcatcataacattgtatttcctgaaattgttttattttgctamtcttctacataatataayactacaaatactgaaaggtgaagggtacatttttttttgctatgtgactttttgctatgtgaccactataacaatgccaaaagttgaagttccattttagcagtatttttgtggttctttaccttgtagtaaaaaaaacatcacaatttwtttttttctctgagatcatcttggctttgaaaataaaagtgtaattgcaacaattgttttcttcaataattatcacagttagaagcaagggagaggtgtgagacatcattttccaggcttttcttctgcttaaatcttaaaacctatga

SEQ ID NO: 59579 - DNA, 600 bp, Chicken  19866894317966_1
atgtttttcatttcctagaaatctttttgtgtcattttacagatgcatgagacaagcaatgttctgacatcaagtaattataagatccatatcatcgtctgtttaagctttagcttactagctatttctagcattcatcataaatatgctgataggaaattgcatgcttcttatcctttaagaacaacacatgaaactggatgggttctcatttatctgcctgtaattatactccatgcacaagaggccaccctttcctggagtaagacatctgcctgtatagcacagctgcaccccaamccgttgtttaattctgctggcaatgctgctgcctccagcagcctcaatatcattacttgatgctgtcagtaccacacacaatcyagatgcactccatagcaaagaggaagaatggattttctaccacaagaaacaaccattggtgcaagggatcaacagcactgccgtggctgtagaacctggagtgctgaagagtgtaaagatggaatatgcagaatgggattccgactgccattaccttatcaatggagatctatgggatcactcaatcagaagggcagatctcggacagctcactca

SEQ ID NO: 59580 - DNA, 600 bp, Chicken  19866894317966_2
atccatatcatcgtctgtttaagctttagcttactagctatttctagcattcatcataaatatgctgataggaaattgcatgcttcttatcctttaagaacaacacatgaaactggatgggttctcatttatctgcctgtaattatactccatgcacaagaggccaccctttcctggagtaagacatctgcctgtatagcacagctgcaccccaamccgttgtttaattctgctggcaatgctgctgcctccagcagcctcaatatcattacttgatgctgtcagtaccacacacaatcyagatgcactccatagcaaagaggaagaatggattttctaccacaagaaacaaccattggtgcaagggatcaacagcactgccgtggctgtagaacctggagtgctgaagagtgtaaagatggaatatgcagaatgggattccgactgccattaccttatcaatggagatctatgggatcactcaatcagaagggcagatctcggacagctcactcaaaggaagatgagggaatactacgccatactgaaaaggcatctggaaatgaggcaccttgctcttgtccttactccactggagag

SEQ ID NO: 59581 - DNA, 600 bp, Chicken  19866894317966_3
tgctacattccagggaaaaagccacttgagttcctcccaaagacaacagtactgacttgatgaatttttccaaatctacggcttgcacaaagcttcttccagctggttagtcacattcaatcaagacagtcggtaatcaaggacaactccacctgatgaaggatgggtcccacttggtgggtcccctctctcaacagccattcattgctgatgaaattaaattttctcctgaaataatcctggagtcccaagatagtgaaactcccaaagggagaaatgactgttcaccttgtaagagaycttggtgctcacatcaatagccagaatgaacagaaagacaaaacaaaatatttgaaaatgaaaatacaactttcaagttgatgtaaccccacaaagcccctagaatggaagacccaggtcatcagtgaaatttcgatacagtttcacatacagaactcattttcttttaccactgctcttcacctttactttcctaaatagctcttctccttccttctgtggaggaaagcaatctaccatgcccaggtggatttaataaggaaggtctaatactgggagtcaaagaatatgaatggatta

SEQ ID NO: 59582 - DNA, 505 bp, Chicken  19866894317966_4
cctttactttcctaaatagctcttctccttccttctgtggaggaaagcaatctaccatgcccaggtggatttaataaggaaggtctaatactgggagtcaaagaatatgaatggattaaaagattagggagaagagcatgaaggctttcacctttaaggttcctgttctgcgttcatctgatgtcagcactgagtgagctgtgtaaccgtcaaagggctgtggctgtatggaaatctttccttcagcttcaaggagttacagtaagggatcatttaaaaaaaaaaaacatctgaatattytgaaaacatttactgagactgactgtcattaccaagtcccatatctgacttctccatttcttcatattccacctctgtaaaccatgaagtaagatggctttacagctaaaaaaaaagaaatctcataattttcactattaaattcaactgtatcaactacggcatgttattttcccactacttaaaatctcttaaagacaaacag

SEQ ID NO: 59583 - DNA, 462 bp, Chicken  19866894317973_1
cagcccacgggtatggtgctcacagcacacagccctgctgggcagcgcacgtccacacaccagccttaatgctcgctcctcagttatgcagtatgcatctggaatacacatatatatcatataatatatcatatatgtccacacacctcaagattgcactatctactgcatacagagaagtaaaggtttggatttcttccatgcctgaataactttattcatgtttagagtattttcatctcattttctgtcattttggacagtacatacaataggcagtaattaagctcattccagatwaatttttcaggggaaaaaaaaacctcaagtcagaatttgccaagaaacaaatagaaaaagaaactgataagtatgttatatttttgctgaaggaaattacacttgatcagaatacctactgctaaggcatttgtttgcactgatagttccatattaaatttc

SEQ ID NO: 59584 - DNA, 599 bp, Chicken  19866894317983_1
  misc_feature (1)..(86): n is any nucleotide
nnnnnnnnnnnnnnnnnnnnnnnnnnnnnnnnnnnnnnnnnnnnnnnnnnnnnnnnnnnnnnnnnnnnnnnnnnnnnnnnnnnnnnactttactatgtacacatcgtcttcactatccacagccaaaaacaaaagctggtagtgtgctgcatcctgcagcatgcctcccactatcagttctcccttccccactgcttcctgaggcactggagtgcttgttttcatgtgtaactacagctgattatctcattaacaaacaatatgcattattcggtacttctagcatcattttagacaggrgaaaaagaggacattttatattgcccactttaatggaagatgtatatgaaactaaaaaaaaaaaacccaaccattctttcagagacagatttgcttgtaattcacagtaataaaaaaataactgcattttggaatgtatctggcaaacatagctagagcgatagtaaaactgacatgctgaagtagaagtgatatcctaaatttgacgtcttactctccctgatgcatcaggacactagaatcaatcattcataaagtctcctttgagatttatggagcccagggtgaagtgacagtcc

SEQ ID NO: 59585 - DNA, 600 bp, Chicken  19866894317985_1
ttcttctggttgcttctctgcctcccatgtagtgagatgtattcttcatatgcttgtgcatgaggtgtcacagtgctaagttgtaacccatttactttatggaaggaagtaggtaggggctggggcagttgttgagtctacctcgtgtgcctgtagacaattagatggtgttgtgcaacttcctgtgcagaaatcctgctgtcagtggtgcttccatgactcatggaaacatgctgctttgtctttcaacaagtgtgcacttgcaaactgcacacctcatccagctccctctataatagrttaaaggactgatttgtatcttaggcttygtgtgtgctgtgcatgtgtctttccccagctctggcagctttcttgactccagaggaggcagccgtgagtaaaacaagaaatgtctgaggtgatgctctgctgtctctcgatggaccttttcatacatgtttgtttattcattccctgttatactgtgcacttgctgttccatgcacacgctaagcgatggtaaaccaactttctcttactgtgctctgtaaaagcacatagtgatactccagggcacttgcaaaagacaattcaagtcag

SEQ ID NO: 59586 - DNA, 600 bp, Chicken  19866894317985_2
tagtgagatgtattcttcatatgcttgtgcatgaggtgtcacagtgctaagttgtaacccatttactttatggaaggaagtaggtaggggctggggcagttgttgagtctacctcgtgtgcctgtagacaattagatggtgttgtgcaacttcctgtgcagaaatcctgctgtcagtggtgcttccatgactcatggaaacatgctgctttgtctttcaacaagtgtgcacttgcaaactgcacacctcatccagctccctctataatagrttaaaggactgatttgtatcttaggcttygtgtgtgctgtgcatgtgtctttccccagctctggcagctttcttgactccagaggaggcagccgtgagtaaaacaagaaatgtctgaggtgatgctctgctgtctctcgatggaccttttcatacatgtttgtttattcattccctgttatactgtgcacttgctgttccatgcacacgctaagcgatggtaaaccaactttctcttactgtgctctgtaaaagcacatagtgatactccagggcacttgcaaaagacaattcaagtcagcttgcctgtgccttagtagtaagttactt

SEQ ID NO: 59587 - DNA, 600 bp, Chicken  19866894317993_1
ttttagaaaaagttatccagaagaacacattattatcagcacgtaaggctacatttttcctagtaatgagtgacaccattgtcggttagaagaaaatttgacacccatgaagcctgatggcattctaaaaggggtgctattccacactcccttgtgactaaaaactgtcccccatattcatctgtaacaaatccctcttgctactagtttctaataaagactactagataaggaaacaaagaaagaatactacatggttttcaacaacatattaattgactttatgatgactcaaaaggkaatctgagtaaccaagctgaaattgtgccacatcagaagtcattagaacaatctctgcaatgcagtttgattgcaaatcattttcaagtgcctattgttggtatcttctgatcaggtgggctgtgatagtcccagcttcctactcaggaatcagtactaaagcacagcatcttgagggaactaacagacaacatacaaagaaaatgaatatatatatatatatatatatatatttacttcattaatatcatgtttgtattagtcaataataatgatgtgaatattcctataagatcaacc

SEQ ID NO: 59588 - DNA, 600 bp, Chicken  19866894317996_1
cctctgtttgacagtctgttcccatgagatttatagactctgactgtccctgagacctctgcctctctgtcagatcaggctgaaatctgttctcagtgtcagaagctgctgccaagcaggcaggggatggactgatgcgtgtgttttgcagcccataagaactcaagcacagacctggggggcgatgggagctctgattgccaacttgtgggttcaggaaggtgagcctccaggagaagggccgtgcccgcagccatcctgcatgagatgccgtgctgcgggatgctcacgggctgcacktcgtgttcccatcgcctgcggtgaccatcacaagcggcgcagcccctgtgggaacggcccctgaggacaataaacgagccagccccgagctccaggctgctgtgaagaattgcctggctaaaggataatgaataccgcagcaggagacggagcgtttctccgaggccatccatcccctttatcaccccgctaacaagcccctgagcgacttcagagaggcttctgcagagcagctcaatccctcaccgtgctggcggctgggtgctgggggctctgcgggaagccacagccccatcccac

SEQ ID NO: 59589 - DNA, 599 bp, Chicken  19866894318000_1
  misc_feature (1)..(173): n is any nucleotide
nnnnnnnnnnnnnnnnnnnnnnnnnnnnnnnnnnnnnnnnnnnnnnnnnnnnnnnnnnnnnnnnnnnnnnnnnnnnnnnnnnnnnnnnnnnnnnnnnnnnnnnnnnnnnnnnnnnnnnnnnnnnnnnnnnnnnnnnnnnnnnnnnnnnnnnnnnnnnnnnnnnnnnnnnnnnnataagtctttttttcagctttctctgcaagtccttatatgctcatggatgaacttcccaatcttgcaagtcttatcagagcattttctatctctaaaaattaatgcatatacacaagatattctcaratttgcttgcactattattacggttttgcaatgaatttctggcatttatggtgtgatcttgttttgtaatttctgctttttagtgtgctgttcatatattataattctgtggcatatagtacttgtaaaaacatatgtaggacatactaatgtatttacctgatctctcagtctgtgcaatttcaagagatattgtatcacatttggaaactgtgctatgccttttctgcttctctacacatttgcttaattccatgcataggtctgtgagagtttcctatattttaaaattgatgagc

SEQ ID NO: 59590 - DNA, 600 bp, Chicken  19866894318001_1
caccaagtaaaccagttgttgaactgggctaacttcttgtctttgctgagatccactttttcatccgacttggatcctcctgcgcagaagcaaacccatcacaacagacaaatgaaacataatggcttatatttcagtctcactaacgctattagaatgaatttggaattagaaacttcaggtgaagtagtagcctcattttaaaagagacatcaacacaattattgaagatgtaagaactggtggagaatcaagaatgtattgcttggctgatgtttcacaccttatgggcatgctaakcttgcctattarattttgcagacagaatctcttccagtggtgatttatgtttcagtgattgatttgtgctccagcgaattatgcacctgttctactgtacatggaatgctctgctttaaaatatgtaagatcagcaaaatctcagttatgaattctaataattcagtaacaagtcatarcactgaccagtgaaagaatgagagatatataaatagatgacaactgtacagagctgctcatagctctttaacaagactgacctaaaaatatggaaaaaattcattttaaatagaccttgta

SEQ ID NO: 59591 - DNA, 600 bp, Chicken  19866894318001_2
cagttgttgaactgggctaacttcttgtctttgctgagatccactttttcatccgacttggatcctcctgcgcagaagcaaacccatcacaacagacaaatgaaacataatggcttatatttcagtctcactaacgctattagaatgaatttggaattagaaacttcaggtgaagtagtagcctcattttaaaagagacatcaacacaattattgaagatgtaagaactggtggagaatcaagaatgtattgcttggctgatgtttcacaccttatgggcatgctaakcttgcctattarattttgcagacagaatctcttccagtggtgatttatgtttcagtgattgatttgtgctccagcgaattatgcacctgttctactgtacatggaatgctctgctttaaaatatgtaagatcagcaaaatctcagttatgaattctaataattcagtaacaagtcatarcactgaccagtgaaagaatgagagatatataaatagatgacaactgtacagagctgctcatagctctttaacaagactgacctaaaaatatggaaaaaattcattttaaatagaccttgtatactactgagtc

SEQ ID NO: 59592 - DNA, 600 bp, Chicken  19866894318001_3
aggtgaagtagtagcctcattttaaaagagacatcaacacaattattgaagatgtaagaactggtggagaatcaagaatgtattgcttggctgatgtttcacaccttatgggcatgctaakcttgcctattarattttgcagacagaatctcttccagtggtgatttatgtttcagtgattgatttgtgctccagcgaattatgcacctgttctactgtacatggaatgctctgctttaaaatatgtaagatcagcaaaatctcagttatgaattctaataattcagtaacaagtcatarcactgaccagtgaaagaatgagagatatataaatagatgacaactgtacagagctgctcatagctctttaacaagactgacctaaaaatatggaaaaaattcattttaaatagaccttgtatactactgagtccaagacattcagaaccaagagattctagggacagtatctctttagctgtgccascaggacccatatattctttcatattcagtcacagattatatatactacgttacatttatttcctcttccagttaaggagcaattgatttacattacaagatttctgcagcctc

SEQ ID NO: 59593 - DNA, 600 bp, Chicken  19866894318001_4
tgctccagcgaattatgcacctgttctactgtacatggaatgctctgctttaaaatatgtaagatcagcaaaatctcagttatgaattctaataattcagtaacaagtcatarcactgaccagtgaaagaatgagagatatataaatagatgacaactgtacagagctgctcatagctctttaacaagactgacctaaaaatatggaaaaaattcattttaaatagaccttgtatactactgagtccaagacattcagaaccaagagattctagggacagtatctctttagctgtgccascaggacccatatattctttcatattcagtcacagattatatatactacgttacatttatttcctcttccagttaaggagcaattgatttacattacaagatttctgcagcctcccaacagttcatcccaagaaaacacatctccagttcttagaatgtcaaagctcataatcccaaacaccacaatatccaaatctttttttctgtttaacctctggaattctactaacaatctcactggaaaaatggccagaaggaggtaactgtgcatacagtctgacacagaaaaaagacataggtt

SEQ ID NO: 59594 - DNA, 600 bp, Chicken  19866894318006_1
acatattgcaaataacaattcaagtaaacaagaagcttatcaactgaattcactgaaaagttatccaaaattccctgtataagcaaaattcaatttttgaataattttaattgttggaggcaatcagggttcctacacatggagtcacagagttagttctttatttttaagagctgaagaattcaaagaaagaagcttggctctgcacattacatgcccaaaaatgcctctctgttgtttaacattagtctttttcacctacttttactatttcccgaagttgagttaaggaaaggagawatttgtggtaaaggcgtatactttacaaaagtggcactcatagaagaacttccttgtctttcaaggatctactaatacaatgaaattgaaaatttaagtgttgctgaggtgatactatggcagtctgcacagctggggaggaggaatgcttgatttagttcttttctccactttcaggtcctattgatttacaaagaaaaggcaggtttcacctaattcattttttttcttcatttcctatttcctattacctattatggacctataatgttctttagaaaaaaacacttgcttttttcc

SEQ ID NO: 59595 - DNA, 600 bp, Chicken  19866894318006_2
tgaggtgatactatggcagtctgcacagctggggaggaggaatgcttgatttagttcttttctccactttcaggtcctattgatttacaaagaaaaggcaggtttcacctaattcattttttttcttcatttcctatttcctattacctattatggacctataatgttctttagaaaaaaacacttgcttttttcctctttttttcccaccccttcccttgctcacccatcaaaaactttttggatctccactgtctaactccaaaatctgagactgaactctactcagctaaagacctygatgctactaatcagactgctataaactgggaaygtgcactacttgctggtaaaggaacagacaagatcagaaccctgaaaaatattatttcaaatctttaaatataatacagtaggtattggcatgtatacaaagacacatctcttctgattttaaatattgcttttaaaactagatactaataaaaaatatatttaacatgtacagctgaaagagctgaaaggggacacagccagaacagcggacagagactgcccaaaaggataatccatatcatacgttatcatactcagcaataa

SEQ ID NO: 59596 - DNA, 600 bp, Chicken  19866894318006_3
aggaggaatgcttgatttagttcttttctccactttcaggtcctattgatttacaaagaaaaggcaggtttcacctaattcattttttttcttcatttcctatttcctattacctattatggacctataatgttctttagaaaaaaacacttgcttttttcctctttttttcccaccccttcccttgctcacccatcaaaaactttttggatctccactgtctaactccaaaatctgagactgaactctactcagctaaagacctygatgctactaatcagactgctataaactgggaaygtgcactacttgctggtaaaggaacagacaagatcagaaccctgaaaaatattatttcaaatctttaaatataatacagtaggtattggcatgtatacaaagacacatctcttctgattttaaatattgcttttaaaactagatactaataaaaaatatatttaacatgtacagctgaaagagctgaaaggggacacagccagaacagcggacagagactgcccaaaaggataatccatatcatacgttatcatactcagcaataaaagctggcggaaagaaggaggaagaatgggattt

SEQ ID NO: 59597 - DNA, 600 bp, Chicken  19866894318016_1
tgccttaagttattcaagttcctagattcaaatgatcacatttactttcataacaatactcctttcatgcaacaacctcaaagcattctaataactttaatgaagcacataagagcagagctgtcttgaaaagagttgagttggtctcaggcaatattattggcatcctgcacactatcttgttgcttgagggaaagagtaacactagcaatcaagccaatgtaaccacactgaggtagaaattgtagatacatgcaatatatgacacaaatagtttataacctagactaataaatacartaaagtataaagaacttttgcacttgagtctttcatggcaaaccaaaaatattaagagcaattaaaaggcaatatctgattttacttaaagacaggagaagttttagctgtgagtggtttgggggcagagggttcagtttccaaaattttcaggttcttcaaaatcatagaatcagagaatggttgggttggaagggacattaaagacaggtccatatccaatcctcaactgtgggcagtgctgccacccacccgatctggctacctaacaccccatccagcgtagcttccacagcatct

SEQ ID NO: 59598 - DNA, 599 bp, Chicken  19866894318017_1
  misc_feature (1)..(100): n is any nucleotide
nnnnnnnnnnnnnnnnnnnnnnnnnnnnnnnnnnnnnnnnnnnnnnnnnnnnnnnnnnnnnnnnnnnnnnnnnnnnnnnnnnnnnnnnnnnnnnnnnnnntttgcctcccacctccctttagacgtttataaacactaattagatctcccctcagtcttcttttcctcaggctgaacagacccagattactcagcctttcctaatacaggagatgctccaggccctttaccatctctgtggcccactgccagactccttctaggggatctctgtcttttgtgtcctgggaagcccagaamtgkgcactgtattctaaatgtggccccaccagggaagagtagakgggtaggatcacctcctttgagctgctggccatgctcttttataattcaacatagcaatatcaggtcatgaaatccttgcatctaaatgttcactggcagtgctggaacactcagggtttcactggcagaaatataacttcttcctgaacctatcatcagtacttttccattgcaaaccgactttctgatgtgaggacagataggacaatatgggctgcacacacctcagagtgtgtctcatgttcctacacaga

SEQ ID NO: 59599 - DNA, 599 bp, Chicken  19866894318017_2
  misc_feature (1)..(97): n is any nucleotide
nnnnnnnnnnnnnnnnnnnnnnnnnnnnnnnnnnnnnnnnnnnnnnnnnnnnnnnnnnnnnnnnnnnnnnnnnnnnnnnnnnnnnnnnnnnnnnnnntttgcctcccacctccctttagacgtttataaacactaattagatctcccctcagtcttcttttcctcaggctgaacagacccagattactcagcctttcctaatacaggagatgctccaggccctttaccatctctgtggcccactgccagactccttctaggggatctctgtcttttgtgtcctgggaagcccagaamtgkgcactgtattctaaatgtggccccaccagggaagagtagakgggtaggatcacctcctttgagctgctggccatgctcttttataattcaacatagcaatatcaggtcatgaaatccttgcatctaaatgttcactggcagtgctggaacactcagggtttcactggcagaaatataacttcttcctgaacctatcatcagtacttttccattgcaaaccgactttctgatgtgaggacagataggacaatatgggctgcacacacctcagagtgtgtctcatgttcctacacagatgg

SEQ ID NO: 59600 - DNA, 599 bp, Chicken  19866894318017_3
  misc_feature (1)..(56): n is any nucleotide
nnnnnnnnnnnnnnnnnnnnnnnnnnnnnnnnnnnnnnnnnnnnnnnnnnnnnnnntttgcctcccacctccctttagacgtttataaacactaattagatctcccctcagtcttcttttcctcaggctgaacagacccagattactcagcctttcctaatacaggagatgctccaggccctttaccatctctgtggcccactgccagactccttctaggggatctctgtcttttgtgtcctgggaagcccagaamtgkgcactgtattctaaatgtggccccaccagggaagagtagakgggtaggatcacctcctttgagctgctggccatgctcttttataattcaacatagcaatatcaggtcatgaaatccttgcatctaaatgttcactggcagtgctggaacactcagggtttcactggcagaaatataacttcttcctgaacctatcatcagtacttttccattgcaaaccgactttctgatgtgaggacagataggacaatatgggctgcacacacctcagagtgtgtctcatgttcctacacagatggtcaggagtgcactcagaacagaatatgcctcagacacattg

SEQ ID NO: 59601 - DNA, 600 bp, Chicken  19866894318024_1
gacatactgagagagccaaggctgttcaacccagagaagagaaggctccaggcagatctgaggtcagcctgtcagtatctaaagggaggctgtaagaaagaagaggacggactcttttgcaggctctcttgtgacaggacaagaagaaatggtttcaaactaaaagaggggagatttagtttggatataagaaaaaaagtttttttatgataagggtagtaaggcactgatataagttgcccagagaggtggtagatgtctcatccctggagacatttgaggttgggctagatggggctytgagcaacctgatctagctgtatatgtccytgttcattgcaaggaagttgkgccaggtgaccattaaatgactcttycaactcraacgattctatgacttaaaaattctcagcattytggttggtgtatcatcacacttaaattgtcaaaattatttgcatgtctaaacacatttattttgccaggcagttggaaggagtgtgctaagtgcttgaaaaatgacactgtgagattcagctgggtcttcagatcgtacaccacatgatagtccttgtcaacgcaggatagccccatgagtct

SEQ ID NO: 59602 - DNA, 600 bp, Chicken  19866894318024_2
ccagagaagagaaggctccaggcagatctgaggtcagcctgtcagtatctaaagggaggctgtaagaaagaagaggacggactcttttgcaggctctcttgtgacaggacaagaagaaatggtttcaaactaaaagaggggagatttagtttggatataagaaaaaaagtttttttatgataagggtagtaaggcactgatataagttgcccagagaggtggtagatgtctcatccctggagacatttgaggttgggctagatggggctytgagcaacctgatctagctgtatatgtccytgttcattgcaaggaagttgkgccaggtgaccattaaatgactcttycaactcraacgattctatgacttaaaaattctcagcattytggttggtgtatcatcacacttaaattgtcaaaattatttgcatgtctaaacacatttattttgccaggcagttggaaggagtgtgctaagtgcttgaaaaatgacactgtgagattcagctgggtcttcagatcgtacaccacatgatagtccttgtcaacgcaggatagccccatgagtctggagtgccacctggagtcacaccagccacg

SEQ ID NO: 59603 - DNA, 600 bp, Chicken  19866894318024_3
gcagatctgaggtcagcctgtcagtatctaaagggaggctgtaagaaagaagaggacggactcttttgcaggctctcttgtgacaggacaagaagaaatggtttcaaactaaaagaggggagatttagtttggatataagaaaaaaagtttttttatgataagggtagtaaggcactgatataagttgcccagagaggtggtagatgtctcatccctggagacatttgaggttgggctagatggggctytgagcaacctgatctagctgtatatgtccytgttcattgcaaggaagttgkgccaggtgaccattaaatgactcttycaactcraacgattctatgacttaaaaattctcagcattytggttggtgtatcatcacacttaaattgtcaaaattatttgcatgtctaaacacatttattttgccaggcagttggaaggagtgtgctaagtgcttgaaaaatgacactgtgagattcagctgggtcttcagatcgtacaccacatgatagtccttgtcaacgcaggatagccccatgagtctggagtgccacctggagtcacaccagccacgacagacttttcttcccccctg

SEQ ID NO: 59604 - DNA, 600 bp, Chicken  19866894318024_4
tctaaagggaggctgtaagaaagaagaggacggactcttttgcaggctctcttgtgacaggacaagaagaaatggtttcaaactaaaagaggggagatttagtttggatataagaaaaaaagtttttttatgataagggtagtaaggcactgatataagttgcccagagaggtggtagatgtctcatccctggagacatttgaggttgggctagatggggctytgagcaacctgatctagctgtatatgtccytgttcattgcaaggaagttgkgccaggtgaccattaaatgactcttycaactcraacgattctatgacttaaaaattctcagcattytggttggtgtatcatcacacttaaattgtcaaaattatttgcatgtctaaacacatttattttgccaggcagttggaaggagtgtgctaagtgcttgaaaaatgacactgtgagattcagctgggtcttcagatcgtacaccacatgatagtccttgtcaacgcaggatagccccatgagtctggagtgccacctggagtcacaccagccacgacagacttttcttcccccctgacctagaatataaccccctgctcgct

SEQ ID NO: 59605 - DNA, 600 bp, Chicken  19866894318024_5
ggaggctgtaagaaagaagaggacggactcttttgcaggctctcttgtgacaggacaagaagaaatggtttcaaactaaaagaggggagatttagtttggatataagaaaaaaagtttttttatgataagggtagtaaggcactgatataagttgcccagagaggtggtagatgtctcatccctggagacatttgaggttgggctagatggggctytgagcaacctgatctagctgtatatgtccytgttcattgcaaggaagttgkgccaggtgaccattaaatgactcttycaactcraacgattctatgacttaaaaattctcagcattytggttggtgtatcatcacacttaaattgtcaaaattatttgcatgtctaaacacatttattttgccaggcagttggaaggagtgtgctaagtgcttgaaaaatgacactgtgagattcagctgggtcttcagatcgtacaccacatgatagtccttgtcaacgcaggatagccccatgagtctggagtgccacctggagtcacaccagccacgacagacttttcttcccccctgacctagaatataaccccctgctcgctttcagag

SEQ ID NO: 59606 - DNA, 600 bp, Chicken  19866894318024_6
tgcaggctctcttgtgacaggacaagaagaaatggtttcaaactaaaagaggggagatttagtttggatataagaaaaaaagtttttttatgataagggtagtaaggcactgatataagttgcccagagaggtggtagatgtctcatccctggagacatttgaggttgggctagatggggctytgagcaacctgatctagctgtatatgtccytgttcattgcaaggaagttgkgccaggtgaccattaaatgactcttycaactcraacgattctatgacttaaaaattctcagcattytggttggtgtatcatcacacttaaattgtcaaaattatttgcatgtctaaacacatttattttgccaggcagttggaaggagtgtgctaagtgcttgaaaaatgacactgtgagattcagctgggtcttcagatcgtacaccacatgatagtccttgtcaacgcaggatagccccatgagtctggagtgccacctggagtcacaccagccacgacagacttttcttcccccctgacctagaatataaccccctgctcgctttcagaggtgccacctatccgagtgtctccaagaggaggg

SEQ ID NO: 59607 - DNA, 600 bp, Chicken  19866894318027_1
ttgttacctagaattgactaagaaaatgtaatccatctgttcctttttgcaggttcagcatgggataagttttgccagtgtgttgtgtattacagtgagcgtgttggaaaggtcggtgggtaactgagcgcagtgatgttcagattctcctgacgttgctcggtgattagaaatattcagcatgtaaatagcttgtccaacaccagcaagtacatcatctccctcctgccagcttgcttagggtgagctaatggacttttaacattatgcagctgagagagttgctgtctctaatagctyctgattaaactctccagaagggaagataaccactgtggggcaaaggctaaaaaatggggtgtggggatgggggaggtagagtgcacaaaatagcagatattagaaagctgctggccaaggggctcttgctgacgtgttgtatttagggaaattcagctttatatttagcacattttggcttttgagaaccgtctgtctaatggagcccaatttatttcctctgcttttagaatagtgacaaaatagccctccatcccttcttctcctccatttcccatttgaaatctattattttagggc

SEQ ID NO: 59608 - DNA, 517 bp, Chicken  19866894318027_2
tgatttgctaagcagagatgtgggtgctgcacatacatcaggctcccttcagattcacttggccttgcctctccccctcagatttttgcagtgaagatgttgctgaggccttgctgggcacaaggaagacatttgaagatatgatatgcgattctcaggtcttaagcaggccctaatgaaaggcggaagctgaggccaaacagcagattcttttgtcctcagttctcatcccctccaatccccttgtttcagttttccttttgggaggtgatgaggagggaggtgatctgcttctgtctrcctcaatggtccaaatcttagatgtagcgtgcgacrttagacacggtaattaatggatctgcttatctccagggctcctttatttacaacctaycatgacactgataggactgggagaggattttatgatctgttcaaccagttcacagcagaactgtataaagaaaagaatggacgtttttcctgaagaatgaatgaccttgtatccttctgcctc

SEQ ID NO: 59609 - DNA, 481 bp, Chicken  19866894318027_3
atcaggctcccttcagattcacttggccttgcctctccccctcagatttttgcagtgaagatgttgctgaggccttgctgggcacaaggaagacatttgaagatatgatatgcgattctcaggtcttaagcaggccctaatgaaaggcggaagctgaggccaaacagcagattcttttgtcctcagttctcatcccctccaatccccttgtttcagttttccttttgggaggtgatgaggagggaggtgatctgcttctgtctrcctcaatggtccaaatcttagatgtagcgtgcgacrttagacacggtaattaatggatctgcttatctccagggctcctttatttacaacctaycatgacactgataggactgggagaggattttatgatctgttcaaccagttcacagcagaactgtataaagaaaagaatggacgtttttcctgaagaatgaatgaccttgtatccttctgcctc

SEQ ID NO: 59610 - DNA, 423 bp, Chicken  19866894318027_4
agatgttgctgaggccttgctgggcacaaggaagacatttgaagatatgatatgcgattctcaggtcttaagcaggccctaatgaaaggcggaagctgaggccaaacagcagattcttttgtcctcagttctcatcccctccaatccccttgtttcagttttccttttgggaggtgatgaggagggaggtgatctgcttctgtctrcctcaatggtccaaatcttagatgtagcgtgcgacrttagacacggtaattaatggatctgcttatctccagggctcctttatttacaacctaycatgacactgataggactgggagaggattttatgatctgttcaaccagttcacagcagaactgtataaagaaaagaatggacgtttttcctgaagaatgaatgaccttgtatccttctgcctc

SEQ ID NO: 59611 - DNA, 600 bp, Chicken  19866894318031_1
gtatttcaactggttttattccctctgtttcagaaccaaaagagctgaaatgagtaaatgtttaaagactttgacgttgggaaagtagtgttcttgggaggagaatcagaattagtaaatgtttaaaagagaatgactctgtgaaccttaactgctgcaataatattccactaacagtgcagcagctaataatttagagatttaacagcaattgcattttagtggcattctacgtaatattctcaattacaggtgctattttgagtaagactatgccccttcagaattattcttacatamtttccatctgcagtaacactaagatacagaatcactgagtttttgcagtaaatagcgttagctgggtatgactctaacaaaacctaattgaactgtggaataactgataaaaggtcttgaaaccattccttttgtgttctaacctattcatgcaaaggtgaagtcattgtgcatctaataggttctccaaaaattaaaatactgggtaactgtaatgctctcattcccacagaggactagtagttctggttctagtggactgcctgatttctagtaactgcatagctaggggttggtgaa

SEQ ID NO: 59612 - DNA, 600 bp, Chicken  19866894318032_1
ttataaaaattcagctgcatcaggatagctactttaacaaagcctcctcagagggcagacaggtatgcctgtactagagtctttatatggaggctaagtgattataatgatgtagctgtagctatagtaaggctttccattagaaaatataaccttcttcacagtgatttggcaggcaccacagatttttgagcaacgtgcttgtaagtaaatgctggcagcctctctcagcagcaggtgataggacttcaggtgagaattggtagtgtagccagagagacctgtcaggaagatgtgttrccttccytttccaaagagtgaaaagtgggaaaagtgaagtgtcartttctcaaagtttactgccatttcatcatctatttcctaatgttgattgaattcatcctggaaaaggtacagttttgaccttgagcacacatacttctttttggaagcaatccaaatgatagacaaatgtagaatctgtcatcagcaaaatgaaacctgattcttaacttcaattagacaactcttcatcgcgatatatttttttcctcgtgcacagactttgtactacccttggtagatttcctacctgtaata

SEQ ID NO: 59613 - DNA, 600 bp, Chicken  19866894318032_2
aattcagctgcatcaggatagctactttaacaaagcctcctcagagggcagacaggtatgcctgtactagagtctttatatggaggctaagtgattataatgatgtagctgtagctatagtaaggctttccattagaaaatataaccttcttcacagtgatttggcaggcaccacagatttttgagcaacgtgcttgtaagtaaatgctggcagcctctctcagcagcaggtgataggacttcaggtgagaattggtagtgtagccagagagacctgtcaggaagatgtgttrccttccytttccaaagagtgaaaagtgggaaaagtgaagtgtcartttctcaaagtttactgccatttcatcatctatttcctaatgttgattgaattcatcctggaaaaggtacagttttgaccttgagcacacatacttctttttggaagcaatccaaatgatagacaaatgtagaatctgtcatcagcaaaatgaaacctgattcttaacttcaattagacaactcttcatcgcgatatatttttttcctcgtgcacagactttgtactacccttggtagatttcctacctgtaatatcattcc

SEQ ID NO: 59614 - DNA, 600 bp, Chicken  19866894318032_3
cctcagagggcagacaggtatgcctgtactagagtctttatatggaggctaagtgattataatgatgtagctgtagctatagtaaggctttccattagaaaatataaccttcttcacagtgatttggcaggcaccacagatttttgagcaacgtgcttgtaagtaaatgctggcagcctctctcagcagcaggtgataggacttcaggtgagaattggtagtgtagccagagagacctgtcaggaagatgtgttrccttccytttccaaagagtgaaaagtgggaaaagtgaagtgtcartttctcaaagtttactgccatttcatcatctatttcctaatgttgattgaattcatcctggaaaaggtacagttttgaccttgagcacacatacttctttttggaagcaatccaaatgatagacaaatgtagaatctgtcatcagcaaaatgaaacctgattcttaacttcaattagacaactcttcatcgcgatatatttttttcctcgtgcacagactttgtactacccttggtagatttcctacctgtaatatcattcctgcctcccccaggaggacccatagctgacagaagcagc

SEQ ID NO: 59615 - DNA, 599 bp, Chicken  19866894318038_1
  misc_feature (1)..(133): n is any nucleotide
nnnnnnnnnnnnnnnnnnnnnnnnnnnnnnnnnnnnnnnnnnnnnnnnnnnnnnnnnnnnnnnnnnnnnnnnnnnnnnnnnnnnnnnnnnnnnnnnnnnnnnnnnnnnnnnnnnnnnnnnnnnnnnnnnnnnnataaaactctctgcaagtgttaccattgcatatctgccgcaaggcaaccatcaatttgaaggttttacactgccatatttttttcaaaggagcttctacaggacgtgctatttaccatggtgtttatgaacacaaactatgtaacaaacataaagcacttgggtttmgaagcacttatggaagaatccttgacatctttacagtgcattgtgcacacactagtaggtttctcctgcttattatgacatggcaccttgctgttcatagcgcttctacgtactaagaagaaagcttccttcccargaaatctgtttgtctgatttgggcagccacaatgcctctatcttgctttgctacagtaaggcatgtacaatgaaggtgacaacgttgtatctccacrgatggacaaaaagacccagttcttccctttgttttttgctctgcttctctgctctgtgacaactgc

SEQ ID NO: 59616 - DNA, 600 bp, Chicken  19866894318038_2
aaactctctgcaagtgttaccattgcatatctgccgcaaggcaaccatcaatttgaaggttttacactgccatatttttttcaaaggagcttctacaggacgtgctatttaccatggtgtttatgaacacaaactatgtaacaaacataaagcacttgggtttmgaagcacttatggaagaatccttgacatctttacagtgcattgtgcacacactagtaggtttctcctgcttattatgacatggcaccttgctgttcatagcgcttctacgtactaagaagaaagcttccttcccargaaatctgtttgtctgatttgggcagccacaatgcctctatcttgctttgctacagtaaggcatgtacaatgaaggtgacaacgttgtatctccacrgatggacaaaaagacccagttcttccctttgttttttgctctgcttctctgctctgtgacaactgcatatcagtcagcatccaggtgctcttgtctagtaagcagaggcttctcgtttgtatcaccaatctttcttcgcatctcttccactgccttctgcaaagctgttcgttcctgctcaagagtgagaattgactccttca

SEQ ID NO: 59617 - DNA, 600 bp, Chicken  19866894318038_3
ggacgtgctatttaccatggtgtttatgaacacaaactatgtaacaaacataaagcacttgggtttmgaagcacttatggaagaatccttgacatctttacagtgcattgtgcacacactagtaggtttctcctgcttattatgacatggcaccttgctgttcatagcgcttctacgtactaagaagaaagcttccttcccargaaatctgtttgtctgatttgggcagccacaatgcctctatcttgctttgctacagtaaggcatgtacaatgaaggtgacaacgttgtatctccacrgatggacaaaaagacccagttcttccctttgttttttgctctgcttctctgctctgtgacaactgcatatcagtcagcatccaggtgctcttgtctagtaagcagaggcttctcgtttgtatcaccaatctttcttcgcatctcttccactgccttctgcaaagctgttcgttcctgctcaagagtgagaattgactccttcaatttgccttcattagtcaataaaagctcgactgtggcttcaagggttttggatctttccattagccacctttcacagaaagaggggaggaaaaaaag

SEQ ID NO: 59618 - DNA, 599 bp, Chicken  19866894318040_1
  misc_feature (1)..(132): n is any nucleotide
nnnnnnnnnnnnnnnnnnnnnnnnnnnnnnnnnnnnnnnnnnnnnnnnnnnnnnnnnnnnnnnnnnnnnnnnnnnnnnnnnnnnnnnnnnnnnnnnnnnnnnnnnnnnnnnnnnnnnnnnnnnnnnnnnnnnctgctgagccctccgttcccttccagagggcgcagccactgtcccatcccgggggcaccagatgagagaaggcagagaaacacaagtcaaagatgagatgaaccaaaataaactgaaaatgccaagaggtgacctgcctcgggcccaaatccaggccaacacagagcyctgtaaaacataaacacttgctgcaaccgcacagttacaagtggctttagctttgctgygcagaaagacrgtattttgattttaagcccatttaaataaaagggagtcrttccattcatcacactcagcttcagaccaggctctttagtgggaattaagagccttaatctcagtgtcagacsctcgtgttgtaaattttgcactgcacagatggcatataacaaagcaaacaagccagccaaatgctatctgcagaagagaactgttagtatcagctgaacttagattcactttgcagt

SEQ ID NO: 59619 - DNA, 599 bp, Chicken  19866894318040_2
  misc_feature (1)..(73): n is any nucleotide
nnnnnnnnnnnnnnnnnnnnnnnnnnnnnnnnnnnnnnnnnnnnnnnnnnnnnnnnnnnnnnnnnnnnnnnnnctgctgagccctccgttcccttccagagggcgcagccactgtcccatcccgggggcaccagatgagagaaggcagagaaacacaagtcaaagatgagatgaaccaaaataaactgaaaatgccaagaggtgacctgcctcgggcccaaatccaggccaacacagagcyctgtaaaacataaacacttgctgcaaccgcacagttacaagtggctttagctttgctgygcagaaagacrgtattttgattttaagcccatttaaataaaagggagtcrttccattcatcacactcagcttcagaccaggctctttagtgggaattaagagccttaatctcagtgtcagacsctcgtgttgtaaattttgcactgcacagatggcatataacaaagcaaacaagccagccaaatgctatctgcagaagagaactgttagtatcagctgaacttagattcactttgcagtctgctgcttggtcagaaagaaaaccctaattgtttgtaaacagaagaggacgctgctga

SEQ ID NO: 59620 - DNA, 599 bp, Chicken  19866894318040_3
  misc_feature (1)..(62): n is any nucleotide
nnnnnnnnnnnnnnnnnnnnnnnnnnnnnnnnnnnnnnnnnnnnnnnnnnnnnnnnnnnnnnctgctgagccctccgttcccttccagagggcgcagccactgtcccatcccgggggcaccagatgagagaaggcagagaaacacaagtcaaagatgagatgaaccaaaataaactgaaaatgccaagaggtgacctgcctcgggcccaaatccaggccaacacagagcyctgtaaaacataaacacttgctgcaaccgcacagttacaagtggctttagctttgctgygcagaaagacrgtattttgattttaagcccatttaaataaaagggagtcrttccattcatcacactcagcttcagaccaggctctttagtgggaattaagagccttaatctcagtgtcagacsctcgtgttgtaaattttgcactgcacagatggcatataacaaagcaaacaagccagccaaatgctatctgcagaagagaactgttagtatcagctgaacttagattcactttgcagtctgctgcttggtcagaaagaaaaccctaattgtttgtaaacagaagaggacgctgctgaagaatacctta

SEQ ID NO: 59621 - DNA, 599 bp, Chicken  19866894318040_4
  misc_feature (1)..(23): n is any nucleotide
nnnnnnnnnnnnnnnnnnnnnnnctgctgagccctccgttcccttccagagggcgcagccactgtcccatcccgggggcaccagatgagagaaggcagagaaacacaagtcaaagatgagatgaaccaaaataaactgaaaatgccaagaggtgacctgcctcgggcccaaatccaggccaacacagagcyctgtaaaacataaacacttgctgcaaccgcacagttacaagtggctttagctttgctgygcagaaagacrgtattttgattttaagcccatttaaataaaagggagtcrttccattcatcacactcagcttcagaccaggctctttagtgggaattaagagccttaatctcagtgtcagacsctcgtgttgtaaattttgcactgcacagatggcatataacaaagcaaacaagccagccaaatgctatctgcagaagagaactgttagtatcagctgaacttagattcactttgcagtctgctgcttggtcagaaagaaaaccctaattgtttgtaaacagaagaggacgctgctgaagaataccttatttttggactgccacactctcacctaagaggttgccaaa

SEQ ID NO: 59622 - DNA, 600 bp, Chicken  19866894318040_5
gggggcaccagatgagagaaggcagagaaacacaagtcaaagatgagatgaaccaaaataaactgaaaatgccaagaggtgacctgcctcgggcccaaatccaggccaacacagagcyctgtaaaacataaacacttgctgcaaccgcacagttacaagtggctttagctttgctgygcagaaagacrgtattttgattttaagcccatttaaataaaagggagtcrttccattcatcacactcagcttcagaccaggctctttagtgggaattaagagccttaatctcagtgtcagacsctcgtgttgtaaattttgcactgcacagatggcatataacaaagcaaacaagccagccaaatgctatctgcagaagagaactgttagtatcagctgaacttagattcactttgcagtctgctgcttggtcagaaagaaaaccctaattgtttgtaaacagaagaggacgctgctgaagaataccttatttttggactgccacactctcacctaagaggttgccaaagaaatacttgccgtgcacaaataaagcagcgtgctcaatccaaaaacttgtggaaacagagatgatgcattcar

SEQ ID NO: 59623 - DNA, 600 bp, Chicken  19866894318040_6
ctcgtgttgtaaattttgcactgcacagatggcatataacaaagcaaacaagccagccaaatgctatctgcagaagagaactgttagtatcagctgaacttagattcactttgcagtctgctgcttggtcagaaagaaaaccctaattgtttgtaaacagaagaggacgctgctgaagaataccttatttttggactgccacactctcacctaagaggttgccaaagaaatacttgccgtgcacaaataaagcagcgtgctcaatccaaaaacttgtggaaacagagatgatgcattcaraaaggttttagagccacaaggaaagatatggagcacgaggagaatgaggatgctgctggttaggtgtacaccaaccagcagtgatcttgttgtgagttactgctacccaactttgttttcagaaacaattctgtctgaccacacccaaaccaagggttaattaacgcatccttacctgtaagccactgtaaatatcattaggatgttgagggttttttctaatcaaagaccaacactaatccaataggctaatcaccccaagggacacagcagcagagcggctgtgctaaggggtttatt

SEQ ID NO: 59624 - DNA, 600 bp, Chicken  19866894318051_1
agcactatttcagagacacctcaggtcagggtttggttcctatttgtgtttatggtagatttcaagaagttgtgtgatagtgtttcatttgcttttatcttacacaagcttgttcagctctcttcaaactagatggatgtttttatggttcatagtggctacaactttcttttttaagtaggtcatatgaaacacgaatgcactgtattagcacttcaaggcttggtctttcccagttcaggtggcatttgataccactactccacatgctatccagagattacatccactgggtaatcycacacaaytggtgttccttcagagggagacaagggctgaaaatggcagtttctcagaataatggccaatttacaggaagagtcaaaaagaaaaaccaagaaccaggaactgtaggtctactcatccacaagcatatgtttggcacagaccaaaggcatctcagaatgctggagctactgacaatatatctattttcttcccctctatcagaaaagagcagcctatttagttctgatgcatatcttaaagccaagcctccaaagttgattgatgacccacatgagaaaggaaagtatgtga

SEQ ID NO: 59625 - DNA, 600 bp, Chicken  19866894318051_2
ttcagagacacctcaggtcagggtttggttcctatttgtgtttatggtagatttcaagaagttgtgtgatagtgtttcatttgcttttatcttacacaagcttgttcagctctcttcaaactagatggatgtttttatggttcatagtggctacaactttcttttttaagtaggtcatatgaaacacgaatgcactgtattagcacttcaaggcttggtctttcccagttcaggtggcatttgataccactactccacatgctatccagagattacatccactgggtaatcycacacaaytggtgttccttcagagggagacaagggctgaaaatggcagtttctcagaataatggccaatttacaggaagagtcaaaaagaaaaaccaagaaccaggaactgtaggtctactcatccacaagcatatgtttggcacagaccaaaggcatctcagaatgctggagctactgacaatatatctattttcttcccctctatcagaaaagagcagcctatttagttctgatgcatatcttaaagccaagcctccaaagttgattgatgacccacatgagaaaggaaagtatgtgattaattct

SEQ ID NO: 59626 - DNA, 600 bp, Chicken  19866894318053_1
aattattccttaataacaagtttgctttgccctaattgtaacggtttgcccagactgttaactactaagcctcaatgagattgacatggcgtcatgaaacatgactacaagaaaaggatttaccagtttgaaattttttcctcgataaatcataaacatagcaaggtataactagaaagaatctaatgaaagaagcttctgaacaactgtgtaatacccataaggcatttttcaatggtaactgtaatttctgaagagtcataggtatgcataaaagctcccctgcacctcttcactcakagagtaagcaaaccacctgcaaactaacaccagttgcacaaaacgcacagctaaggaagaacacgcactgaaatgaagtgactgttcaaaagacagtactgaaactctgatgccatcagaatctgggggtcaagctggagccactgaccaggttctggatacccygcattgcaattgttttctgaaatactcaaatttttaacaattgaatgtgacaaaataaattctataaacaaaacaaacaaacaaacttacagatgttttcaggttgccatttctcacagagctgttgttctgcac

SEQ ID NO: 59627 - DNA, 600 bp, Chicken  19866894318053_2
gtataactagaaagaatctaatgaaagaagcttctgaacaactgtgtaatacccataaggcatttttcaatggtaactgtaatttctgaagagtcataggtatgcataaaagctcccctgcacctcttcactcakagagtaagcaaaccacctgcaaactaacaccagttgcacaaaacgcacagctaaggaagaacacgcactgaaatgaagtgactgttcaaaagacagtactgaaactctgatgccatcagaatctgggggtcaagctggagccactgaccaggttctggatacccygcattgcaattgttttctgaaatactcaaatttttaacaattgaatgtgacaaaataaattctataaacaaaacaaacaaacaaacttacagatgttttcaggttgccatttctcacagagctgttgttctgcacagtacactcaggcacagtctcatcatggacagtgttctctctaaagcataacaaggacattgaggcagttagcagtgagaagaaccaaaacacatagatacaaaccacagaagaaaacaagagcatacatacgtattttaatatccctaccaatacagaatggct

SEQ ID NO: 59628 - DNA, 600 bp, Chicken  19866894318057_1
agttcatggtgctggaactgttagtattgagctgggataggttttttgttccatctctgtgggctttggctcagtgcacgtgcaaatcagggacatgatttagtggagggctgttagagttagggtagtatggtcaggttgtggttggacttgatgatctttaaggtcttttccaagcaattctacgattctatgtttccttccatgaaggcagaaggatcaggaggaccaactatggaaaccataggttataattgaggtggtatggtaggtgggagcaggaggtactgtattgtgtgyttggggttggttttattttaggacaacaagaattacgctttttattctcacaattgagtattatttcattaaaaactttggacattttgaatgctaaaaccaaaaacattgggaaatgtatcgtctcaatcccaacactagaaaggaacagggatggcgatctcatttctacgtgatgttcttcagggtgctcactgagtggctttaaactggtgccatctgacggtgctgtgagtcctttatgcaaccctaataggaaattcacgattgacatcttgaaaagcttcagcagaagaaatc

SEQ ID NO: 59629 - DNA, 600 bp, Chicken  19866894318062_1
ccttacctagaaaggcagtgtctgctttgcagagcctctcctggatgagtctcatctgctgagggaatgagctaccttgacttagctctgatcatctccctcttgtgttgtcacagcgcatctgccatagacactttctgggctgtgtgattggaaggtagaagggcaccttctcttttattataatgaagtgtctcacctttgaattctaacatcaattagcagtctctgctcattagctgctgcctatatctcccaaagttcatggataatagttgcaggtagaatgtgtgtgtttaytttaataggcctgttggggcccttcatgttaaatgatgcatgtcctcaaggaggcatatgacgaagcaataaataatacataagcaggttacctttaaccagcctaaaattaatttcaagcatccagaagagaagcaaccagcagtgttttgctcaccactattgctgctgtcatcttccctttaacctccttgaactgttctacccagaattactccttgcttgtcaaattaccttttttttttttacccctaaacaatccctgctggctcaccgacagccaaaacaaaggagagaatc

SEQ ID NO: 59630 - DNA, 600 bp, Chicken  19866894318066_1
gagcagagggaggcatgctaagagtagaactgacccactgacaacacaggcagaggagaactgggcataccttttcaagtatgtagatacgtaggtaggaggtgcaccagaatggggagcttcgtttccctttgattcatccctccatggctgccgggtgtaagagccgctccgcacaatgttagcagctgattctctaatgcaggagagagcacaaggtttgtttaggaaagcccccagagtctgcttctggctcctgtacagcgccccagcacaaacccttccctcacacccacccaygtgcatcattgcttacaggtggcaactctctgaagcayttctactggtcagtttctgtgattgtcagctgtattgtttaagaatcagaagatgatgagatattttgcatcaacaccctttcctagtccaaagacttgcaaatgaggtttagattggccataacatattaaacaacatcacctgatatccaacagcatggcacaaatggaacaggtattgcaaatacaaggaaaatgtctgccatatttagcastatgaaacagacagaatatttggcaatatctaaaatcamtygtcaat

SEQ ID NO: 59631 - DNA, 600 bp, Chicken  19866894318066_2
tgacaacacaggcagaggagaactgggcataccttttcaagtatgtagatacgtaggtaggaggtgcaccagaatggggagcttcgtttccctttgattcatccctccatggctgccgggtgtaagagccgctccgcacaatgttagcagctgattctctaatgcaggagagagcacaaggtttgtttaggaaagcccccagagtctgcttctggctcctgtacagcgccccagcacaaacccttccctcacacccacccaygtgcatcattgcttacaggtggcaactctctgaagcayttctactggtcagtttctgtgattgtcagctgtattgtttaagaatcagaagatgatgagatattttgcatcaacaccctttcctagtccaaagacttgcaaatgaggtttagattggccataacatattaaacaacatcacctgatatccaacagcatggcacaaatggaacaggtattgcaaatacaaggaaaatgtctgccatatttagcastatgaaacagacagaatatttggcaatatctaaaatcamtygtcaatttattaattatgttatcagcagccacacttacccactt

SEQ ID NO: 59632 - DNA, 600 bp, Chicken  19866894318066_3
ctcctgtacagcgccccagcacaaacccttccctcacacccacccaygtgcatcattgcttacaggtggcaactctctgaagcayttctactggtcagtttctgtgattgtcagctgtattgtttaagaatcagaagatgatgagatattttgcatcaacaccctttcctagtccaaagacttgcaaatgaggtttagattggccataacatattaaacaacatcacctgatatccaacagcatggcacaaatggaacaggtattgcaaatacaaggaaaatgtctgccatatttagcastatgaaacagacagaatatttggcaatatctaaaatcamtygtcaatttattaattatgttatcagcagccacacttacccacttatctgaaactggggctgcttttcctaaaccacaccctggcagtatgacctatcctgctctagttttrgacaggacctttaagacaacactcatcagcccacaattaataatcatttttcaattgcagtgtctttccaaatgccctttcagacatctgtggttctaagcagtgatattcagctgttttgaaatgaaggaatatcagaaataaagct

SEQ ID NO: 59633 - DNA, 600 bp, Chicken  19866894318066_4
ccacccaygtgcatcattgcttacaggtggcaactctctgaagcayttctactggtcagtttctgtgattgtcagctgtattgtttaagaatcagaagatgatgagatattttgcatcaacaccctttcctagtccaaagacttgcaaatgaggtttagattggccataacatattaaacaacatcacctgatatccaacagcatggcacaaatggaacaggtattgcaaatacaaggaaaatgtctgccatatttagcastatgaaacagacagaatatttggcaatatctaaaatcamtygtcaatttattaattatgttatcagcagccacacttacccacttatctgaaactggggctgcttttcctaaaccacaccctggcagtatgacctatcctgctctagttttrgacaggacctttaagacaacactcatcagcccacaattaataatcatttttcaattgcagtgtctttccaaatgccctttcagacatctgtggttctaagcagtgatattcagctgttttgaaatgaaggaatatcagaaataaagctgtactgcacagtacatctgggcaccatctgttcatgcag

SEQ ID NO: 59634 - DNA, 600 bp, Chicken  19866894318066_5
acccaygtgcatcattgcttacaggtggcaactctctgaagcayttctactggtcagtttctgtgattgtcagctgtattgtttaagaatcagaagatgatgagatattttgcatcaacaccctttcctagtccaaagacttgcaaatgaggtttagattggccataacatattaaacaacatcacctgatatccaacagcatggcacaaatggaacaggtattgcaaatacaaggaaaatgtctgccatatttagcastatgaaacagacagaatatttggcaatatctaaaatcamtygtcaatttattaattatgttatcagcagccacacttacccacttatctgaaactggggctgcttttcctaaaccacaccctggcagtatgacctatcctgctctagttttrgacaggacctttaagacaacactcatcagcccacaattaataatcatttttcaattgcagtgtctttccaaatgccctttcagacatctgtggttctaagcagtgatattcagctgttttgaaatgaaggaatatcagaaataaagctgtactgcacagtacatctgggcaccatctgttcatgcagcc

SEQ ID NO: 59635 - DNA, 600 bp, Chicken  19866894318066_6
gcatcaacaccctttcctagtccaaagacttgcaaatgaggtttagattggccataacatattaaacaacatcacctgatatccaacagcatggcacaaatggaacaggtattgcaaatacaaggaaaatgtctgccatatttagcastatgaaacagacagaatatttggcaatatctaaaatcamtygtcaatttattaattatgttatcagcagccacacttacccacttatctgaaactggggctgcttttcctaaaccacaccctggcagtatgacctatcctgctctagttttrgacaggacctttaagacaacactcatcagcccacaattaataatcatttttcaattgcagtgtctttccaaatgccctttcagacatctgtggttctaagcagtgatattcagctgttttgaaatgaaggaatatcagaaataaagctgtactgcacagtacatctgggcaccatctgttcatgcagcccagtcctccttgctctctgcttcacagagtgaaggacacttaccagcactcagctggagatgccactcaatccaaggcactgccaaaaccactcaagcttatcagtcattt

SEQ ID NO: 59636 - DNA, 600 bp, Chicken  19866894318086_1
tacctgtgcaccacctgcacaaatcaatgtggcatgccaggctggcttaggtctactggctagagaacctaaaggctgatggtcacatcctcaattaaatccttactgtgctgacttctggtggctggtttctgctttcctctttctcttcctaatggctgcagaacacgaagggttttttgtttgtttctattataatttaaggattggacaagaaatttagaagaaaactgtttcaagactgtcaggatcagctgaaaagatatgtgcagcatatgaatagaggataggatagtagastgcttgagaaagagatgaaaagaataggaagtgaaaaagtagaacctaattctgtaagttcttaatctcttgtagctgatgtactggcgtcagtactgggcatcctggtgtttacatgttgatcggtaggtgaaagcatcttgagaaagacaactggaacgattagggagatggaaggattgcttcataaggaaacatttaacctaagtacggaaacacagaagttttgtgcaagtgtctgaggaagcccataaacgttggaatgtggctgaagaagaggaacgtttataccaaccctga

SEQ ID NO: 59637 - DNA, 600 bp, Chicken  19866894318087_1
tcagcaggtattacattttctgtgtgtctaggaaagggaagaaattaacacaaagaaaaaattaccagttttttgtgaatttatattatagtaactgtgtttaaggcatataaaattcattatttaaaactcattatttagcagacaagatgcttaacataaaaattaaattcagtaccttttcttttcaacagtaacttccttgatgcaaataaaagatttaggaaatattccctgttgagagaggaaaaaaattacaacgcactctgttatcattctcaatatctgatgcgtcctggstctactacagatgaaacattttaattcatcctaaataaatgtttgattgtcaatatatccatgacaactcttatgtgaactagcatatatagtcttaataaatgaactaagcttttgttaaatttttctttatggaggaactgaaattcgtatgtggtacaaagcctgggattgaaggtagccttgaagacccttaggaaaaaaagtgcagaaactttttgcagtaaattaaaagttatttcaagtgatattttgatcagtctgctagcctgaaggcacagtgattattttttcatcact

SEQ ID NO: 59638 - DNA, 599 bp, Chicken  19866894318089_1
  misc_feature (1)..(15): n is any nucleotide
nnnnnnnnnnnnnnnaatgagcctggatgcctggctcccgcagcctgccctgtgcctctctgccctcagcctgctgctctcgctgggtaagtgccaccccaaccccttgcatgggacagcacccaggcggggagaagccccctccccacatctgggccccgagaagcccctctgggcgaggagcagcggtgagatgctgtgctgcagggatggggtggagatgccctgatgccgaaatccgcagccagggtgacctgcttgtgggcagggtgggggtacgctgcagcatcgcctctcccracagccgtgtgtcctgcttgctggggtttgctgtgcgcagggcyggttgcatgccctgcagggctgcggcagggatgccggctgctttgcttggctggggtcagcctggtgggctgtgggtgctctgtgctgtgctttggggtcagggtagcagcggggcgtgtgcgaggggagggggggctgcgctctgcttgctgcgtccctgccctgccctgcagccaggagcgtgtgtcagcaggtttggggctgtatcgattgggaagcagggatgcatccatcacctctccaaggtgctgctc

SEQ ID NO: 59639 - DNA, 600 bp, Chicken  19866894318089_2
ctgccctgtgcctctctgccctcagcctgctgctctcgctgggtaagtgccaccccaaccccttgcatgggacagcacccaggcggggagaagccccctccccacatctgggccccgagaagcccctctgggcgaggagcagcggtgagatgctgtgctgcagggatggggtggagatgccctgatgccgaaatccgcagccagggtgacctgcttgtgggcagggtgggggtacgctgcagcatcgcctctcccracagccgtgtgtcctgcttgctggggtttgctgtgcgcagggcyggttgcatgccctgcagggctgcggcagggatgccggctgctttgcttggctggggtcagcctggtgggctgtgggtgctctgtgctgtgctttggggtcagggtagcagcggggcgtgtgcgaggggagggggggctgcgctctgcttgctgcgtccctgccctgccctgcagccaggagcgtgtgtcagcaggtttggggctgtatcgattgggaagcagggatgcatccatcacctctccaaggtgctgctcgccctggcctggagctgctgggggggctgctttggctttaggaga

SEQ ID NO: 59640 - DNA, 600 bp, Chicken  19866894318089_3
ccctgcagggctgcggcagggatgccggctgctttgcttggctggggtcagcctggtgggctgtgggtgctctgtgctgtgctttggggtcagggtagcagcggggcgtgtgcgaggggagggggggctgcgctctgcttgctgcgtccctgccctgccctgcagccaggagcgtgtgtcagcaggtttggggctgtatcgattgggaagcagggatgcatccatcacctctccaaggtgctgctcgccctggcctggagctgctgggggggctgctttggctttaggagagagaccatyagatggaggagaaaagctcagtgagatcttcttcagagcctacrtgtcatttcacctcccgagccctggggagcagggtgttgtgtgacagcatttgggctcacggagcaccaaagggcatagcctggatggttggtcccaggggtttcttttgccactgatcttgtctgtagctgctggggtgtgctggatagggccatatctgggacasatgcatgtcagcactctcagggcatgcgtgagcttcccatgaggaccctctggctgcaccgtggtcctgcaatgcctagtgtctgtaca

SEQ ID NO: 59641 - DNA, 600 bp, Chicken  19866894318089_4
gggtcagcctggtgggctgtgggtgctctgtgctgtgctttggggtcagggtagcagcggggcgtgtgcgaggggagggggggctgcgctctgcttgctgcgtccctgccctgccctgcagccaggagcgtgtgtcagcaggtttggggctgtatcgattgggaagcagggatgcatccatcacctctccaaggtgctgctcgccctggcctggagctgctgggggggctgctttggctttaggagagagaccatyagatggaggagaaaagctcagtgagatcttcttcagagcctacrtgtcatttcacctcccgagccctggggagcagggtgttgtgtgacagcatttgggctcacggagcaccaaagggcatagcctggatggttggtcccaggggtttcttttgccactgatcttgtctgtagctgctggggtgtgctggatagggccatatctgggacasatgcatgtcagcactctcagggcatgcgtgagcttcccatgaggaccctctggctgcaccgtggtcctgcaatgcctagtgtctgtacagagctcctgctggcacccagccctctgcagagcactggaggtgc

SEQ ID NO: 59642 - DNA, 600 bp, Chicken  19866894318089_5
agggatgcatccatcacctctccaaggtgctgctcgccctggcctggagctgctgggggggctgctttggctttaggagagagaccatyagatggaggagaaaagctcagtgagatcttcttcagagcctacrtgtcatttcacctcccgagccctggggagcagggtgttgtgtgacagcatttgggctcacggagcaccaaagggcatagcctggatggttggtcccaggggtttcttttgccactgatcttgtctgtagctgctggggtgtgctggatagggccatatctgggacasatgcatgtcagcactctcagggcatgcgtgagcttcccatgaggaccctctggctgcaccgtggtcctgcaatgcctagtgtctgtacagagctcctgctggcacccagccctctgcagagcactggaggtgcagcacaaagcaaagtgcaggctgagagcccgggacacagcacggggctgggtgcattcagactgtgtgggggttcctgggacaagcagacacccagatctcctctctgccaggattgcttggagttgaccatgctgtggctggggcagaaaggctgggacagcccca

SEQ ID NO: 59643 - DNA, 600 bp, Chicken  19866894318091_1
aaatgcatagctaatagtggtgactgttgaaaaatagtgttctgttgctgagaatttgctctgccaagtagtgctgttgtactctttgtatctgttgtagtttccatggataggaggcattgctttcagagtgacctacatagattttggtaagaccaaaagaagcttaacacgcatttttaactggacttcatgtataaaatgtacatagttaagtgaaataaacactatcaccatagtctctagacactttttatttttcaactggagctctgactgctcttaaaaaaaaaaagtcasatttttaagttaataatgtagaaagtgacagaaaattagtggttactacttaagttttgtgtgactcatctgaaagttcatttgaatattgagcttctatttggctgaatagagttctattgcttctaagcctggaccctacccaaaagagtatatgtttttcttcttgagaccagctcattctgaacagctcatcccaatactaactttaatagaaattaatgaraaaaatgtattatacattatcagaaatatttgattatcccccacacacttaaatcatagaaacttactgccgcc

SEQ ID NO: 59644 - DNA, 441 bp, Chicken  19866894318091_2
actatcaccatagtctctagacactttttatttttcaactggagctctgactgctcttaaaaaaaaaaagtcasatttttaagttaataatgtagaaagtgacagaaaattagtggttactacttaagttttgtgtgactcatctgaaagttcatttgaatattgagcttctatttggctgaatagagttctattgcttctaagcctggaccctacccaaaagagtatatgtttttcttcttgagaccagctcattctgaacagctcatcccaatactaactttaatagaaattaatgaraaaaatgtattatacattatcagaaatatttgattatcccccacacacttaaatcatagaaacttactgccgccatgtctttaatcagtttaataatgatctctgaaatctgtgtaggtgtgaacccttcatccaccaagg

SEQ ID NO: 59645 - DNA, 600 bp, Chicken  19866894318098_1
catcctgcaaagagagctgaatactgaacatctaacagtcttcagagcaaattgaggatggtcagcgtgagggcagtttagggaaatgcttatctttttttcctatgcctcagtttcccactagagtttggtgatgaatctccttttccttttaaatacttacattttgagatgttgctgtgatgttctaaagaggttgcagctgtcagtattgaccacttcaggagatatttcaagacgcattagattgccctggtgcacgacttcccttggtggtgtgcagaagctgtgttctgtgtyagcttcatagcccctgcctggccagggcaygtgggrgaatggacagagacaccataacaaccttaaagtttattcaattttcacctcatgtttcatttttaaaatcaaatattttttcttttcttggaaaagtaggttgggaaagacttgtaacttgatggaaaatattcatccatttctatttaaaacaagatggaatcaggttcttarttatctccagagttatctttgcaatgccttctgagtaaccagttttaataaattgatgtatttttagatgcatgattgcaggttatcttt

SEQ ID NO: 59646 - DNA, 600 bp, Chicken  19866894318098_2
tctaacagtcttcagagcaaattgaggatggtcagcgtgagggcagtttagggaaatgcttatctttttttcctatgcctcagtttcccactagagtttggtgatgaatctccttttccttttaaatacttacattttgagatgttgctgtgatgttctaaagaggttgcagctgtcagtattgaccacttcaggagatatttcaagacgcattagattgccctggtgcacgacttcccttggtggtgtgcagaagctgtgttctgtgtyagcttcatagcccctgcctggccagggcaygtgggrgaatggacagagacaccataacaaccttaaagtttattcaattttcacctcatgtttcatttttaaaatcaaatattttttcttttcttggaaaagtaggttgggaaagacttgtaacttgatggaaaatattcatccatttctatttaaaacaagatggaatcaggttcttarttatctccagagttatctttgcaatgccttctgagtaaccagttttaataaattgatgtatttttagatgcatgattgcaggttatctttgattcaccatctctgtgaattatgaaacga

SEQ ID NO: 59647 - DNA, 600 bp, Chicken  19866894318098_3
agtcttcagagcaaattgaggatggtcagcgtgagggcagtttagggaaatgcttatctttttttcctatgcctcagtttcccactagagtttggtgatgaatctccttttccttttaaatacttacattttgagatgttgctgtgatgttctaaagaggttgcagctgtcagtattgaccacttcaggagatatttcaagacgcattagattgccctggtgcacgacttcccttggtggtgtgcagaagctgtgttctgtgtyagcttcatagcccctgcctggccagggcaygtgggrgaatggacagagacaccataacaaccttaaagtttattcaattttcacctcatgtttcatttttaaaatcaaatattttttcttttcttggaaaagtaggttgggaaagacttgtaacttgatggaaaatattcatccatttctatttaaaacaagatggaatcaggttcttarttatctccagagttatctttgcaatgccttctgagtaaccagttttaataaattgatgtatttttagatgcatgattgcaggttatctttgattcaccatctctgtgaattatgaaacgataatgc

SEQ ID NO: 59648 - DNA, 600 bp, Chicken  19866894318098_4
attgaccacttcaggagatatttcaagacgcattagattgccctggtgcacgacttcccttggtggtgtgcagaagctgtgttctgtgtyagcttcatagcccctgcctggccagggcaygtgggrgaatggacagagacaccataacaaccttaaagtttattcaattttcacctcatgtttcatttttaaaatcaaatattttttcttttcttggaaaagtaggttgggaaagacttgtaacttgatggaaaatattcatccatttctatttaaaacaagatggaatcaggttcttarttatctccagagttatctttgcaatgccttctgagtaaccagttttaataaattgatgtatttttagatgcatgattgcaggttatctttgattcaccatctctgtgaattatgaaacgataatgcaagctaaccccagaactccatctcataaatctcctatttctgctagttttccctaaaaattccctgtccttattctttgagagcactctccgctcagtcaaatctgtctctaattctggccctgtctcagctgctgagtttatgctgattatccaaggctatgaacaagatggg

SEQ ID NO: 59649 - DNA, 600 bp, Chicken  19866894318101_1
tccagtagtacttcaaaatggtgttttagctttacaattgcttttcctaggtagccatataaagtagtatacacactatgcactatctttaaaaacattacactgctagttactttgcagaaagatgtaaaagctagcatctaaagtaaaatgatgtgaagtgtccatctcaagtctttagtattttatgcttctttcccttccttctttcctactcctgttagtaaatgacttaaaatttattcagaaatatgtagaacatatttgacaactcttaatatgcaattcattatatgaacwttaacaatactttcaggtcatctgagataagaactatagcagaaattccattacttattcgttaccattttttttcccagcatacttccraatagatttaagacttcattaccgtcagtctgttccaactgaaaactccctacaaatactacaacacaggaaaaattaaagctgcgtgtaatttggacttcagttgttggaatacagtcaaaaagatgttcttctgcccgtctcaatccccacccttaaagaaaagtgtcagaagggagcatttattcaaaaggcacatacatactctgt

SEQ ID NO: 59650 - DNA, 526 bp, Chicken  19866894318101_2
aaaaacattacactgctagttactttgcagaaagatgtaaaagctagcatctaaagtaaaatgatgtgaagtgtccatctcaagtctttagtattttatgcttctttcccttccttctttcctactcctgttagtaaatgacttaaaatttattcagaaatatgtagaacatatttgacaactcttaatatgcaattcattatatgaacwttaacaatactttcaggtcatctgagataagaactatagcagaaattccattacttattcgttaccattttttttcccagcatacttccraatagatttaagacttcattaccgtcagtctgttccaactgaaaactccctacaaatactacaacacaggaaaaattaaagctgcgtgtaatttggacttcagttgttggaatacagtcaaaaagatgttcttctgcccgtctcaatccccacccttaaagaaaagtgtcagaagggagcatttattcaaaaggcacatacatactctgtagagatcttcaacatt

SEQ ID NO: 59651 - DNA, 600 bp, Chicken  19866894318110_1
gctgctccagtttactttggagcctttcctagaacaaggttgaaattttgcagacaaaacacgaaacgcagaagtctcttgcatgggcaaaagtaaatgaaacaatgcctcaatgcaaaatgctaatcccacctctaaaaaagtccaggtgttttggctgagagcttaaagcctcacttaaacaaggccaggtgagaaccccatctctgtgtgtcgtgctacattccctttcctctgggtttgacagaatccaccctgactagacaattccaaaaaacagaccagccctctgatgtaagrataaaaaatgggtgaatgtgaggtgtaaaagagagaggtgagcacttagctttgagagcactcattaaaattcatcttccagatgtctgaattgtttatagaggatcaccacagccactcagcccctataaactacaagtgccagatgagaaatttatagtactgcagccttcaagaatgcctaatccttgtgtcaagcagtttgaggctgacataaaataagcatacattaatgtatttcatgcttgcttccgctccacccatcctgataaacccagcaggttactgttaaggttttta

SEQ ID NO: 59652 - DNA, 600 bp, Chicken  19866894318118_1
agaacaatttcacaaccctccttttctgaggaaagggcacacacagaaaaagagctaaaatcaagcttaaaaaattcaatttacctttgatactcttctacgttttctcatatgactttgtacagaaaacacaagcaatgatgtgcaaggaattctaagcatcttttatttaaagcccttgcatttcagcatagtgtgttggctcacaaagtcatactgggttacctacatgattctgaattagtacaaaagtagaagaccaacaaatgcagaagaagaataagcttctgaatcaatacktccaatgtgaagttagatcatattgcccagataagtattcagggatgaccctttatgtatagctgcaaggctgtaatacaataggctctccatttccacagtaatgaagtccttggattttgagtgcggggtgtcagcastgagcatttcagttgtgaagtttattctacattgcctctgtcaatccaattataattatgtttattcatgaaaatctgtagcggtttctacagctctctcaaccttctaacattagtgcagaaataccttaagattcattattttgccaactttataaca

SEQ ID NO: 59653 - DNA, 600 bp, Chicken  19866894318118_2
atgtgcaaggaattctaagcatcttttatttaaagcccttgcatttcagcatagtgtgttggctcacaaagtcatactgggttacctacatgattctgaattagtacaaaagtagaagaccaacaaatgcagaagaagaataagcttctgaatcaatacktccaatgtgaagttagatcatattgcccagataagtattcagggatgaccctttatgtatagctgcaaggctgtaatacaataggctctccatttccacagtaatgaagtccttggattttgagtgcggggtgtcagcastgagcatttcagttgtgaagtttattctacattgcctctgtcaatccaattataattatgtttattcatgaaaatctgtagcggtttctacagctctctcaaccttctaacattagtgcagaaataccttaagattcattattttgccaactttataacaatccatctgaattcccttccttaatcacattatcttctttcacttccccatataagcctagtagacctaactgatactttatatcttccacagaggtggctctaacttcatgcttagcttaaaaattgactacaaatcac

SEQ ID NO: 59654 - DNA, 600 bp, Chicken  19866894318127_1
aacctcactgaatcaactcactgacacccaacctgacatatgggtagagatgcttcctgtgaaaaatttgaaaaacactttcaccttctatatgctgaaaattcgaaatggtggcattttataatgcttttggagctgcttaagatttaccagaaacaattttaaaatgtatgcattttaaatacagagaaatcctattttatgagcttcagtggagagccaagaatcatgtagttccactttgcagggtaacaggtttaggcaaagtgaataccttctgaaacattttcgaacgtgcaytgatagctacagcttctctgtttctttcacttataatataatgagtgttacactgaatatattccttaatgcttcataaaggtgagaaatgcttgcaaatgcaattcagccacgcttaaaggttcagcattctagaaatgtaattagtttttacttttctttttaaaaatgtttacagatttttttttattaattctacacattcagagctgatagaacaaagtttagatgtcttcctctcatttgcgggagctcaggcgtggagctattgactgcgtgtcacaacctatttggtcaagt

SEQ ID NO: 59655 - DNA, 600 bp, Chicken  19866894318127_2
atttggtcaagtttttctacttagtcagttttacagaccttactgctgatctgttgtgtaattaatgcagttaggactgcagataaaactctgcttaaataaagtttatcaaaagatgttcattctgccaaattcagagctacctttggctgtgttttatggaaaaataaactgagaacacacctcaataacttttctcctttagctttcataactctttactcttttgtgtgtttggaaatttctttatattcagtttgcaataaaatactttcagaactacatttcatgtgcttaaawgatctctggagtaaaagaagtaaaaaaatactgtgtggtatactacttcaagttatgtgctgactgatgttttgaaatacagttgacctgtgctcactgctaaagwttttttgccaaacagtacataacaatgaaaaatactcaagtgctaaaaatacaggattactacatgctctgacctgtggtcactgagttggcaggagtagccttgtattgttcgttcaaggtttgtttgaagagaacaattataggatgatcattaaaagtattgacattatttttcaggagtagaagattaaa

SEQ ID NO: 59656 - DNA, 600 bp, Chicken  19866894318127_3
tatcaaaagatgttcattctgccaaattcagagctacctttggctgtgttttatggaaaaataaactgagaacacacctcaataacttttctcctttagctttcataactctttactcttttgtgtgtttggaaatttctttatattcagtttgcaataaaatactttcagaactacatttcatgtgcttaaawgatctctggagtaaaagaagtaaaaaaatactgtgtggtatactacttcaagttatgtgctgactgatgttttgaaatacagttgacctgtgctcactgctaaagwttttttgccaaacagtacataacaatgaaaaatactcaagtgctaaaaatacaggattactacatgctctgacctgtggtcactgagttggcaggagtagccttgtattgttcgttcaaggtttgtttgaagagaacaattataggatgatcattaaaagtattgacattatttttcaggagtagaagattaaaaaaacaccttgaagaaacagggttttaaaaaactctgtaggattgcactacacaaaatagcaacaaaagacaaaacattgtaaacaccttcatttgaaaaatactc

SEQ ID NO: 59657 - DNA, 600 bp, Chicken  19866894318130_1
catttaaaatggcctagtcttctctctagtggctatatccatttaagtagcatcctgttcaggaacatctgttgaacttctgagcttactcatccttggagacttatttttctatccacagctgctagaacagattggagatgatgaaatctgtggttaggttttcacacagccaaatgctgtcctgaggaaaggagtacgaggagggtgtggaaatcacgggtgtcagatcttggtgtgccacctgcccctggtgttcatttctgaggatctgtagcaactgctacaagcactgtagaygtgaatggtcctccatgactgtgtaaggagaatgtactctctgtgataagaatgtgttttctctcttttgcatcactgagtgcagtattaactaccttgccccaaaccacaggggtggttacatccaaaaataaacataaatgcagaagattgcacccaaggagctctagtcaggcacaccctgatgggtcaatggcttctccaccctcttgtagcgttaatattttaaacagggtgggagcaaagttattgtatttgaacagtgttattgttgcaaaagttctctgtagttcatcctta

SEQ ID NO: 59658 - DNA, 600 bp, Chicken  19866894318134_1
cctccagcctttccccaccccaggctgtgtgttgtgcgaacgttccaggtagcaactcctttttatcagcagaaaaacgtaatgcggtgctgtagcccagcacaactggttcttggcctgcaccaatgcatatttgtatcaagggccattagggaacagaaagattgaccaataagccttgcagctgcccccaggatggagaaagggttgaaaattagaagatggcattgggacagagcaaaactgtttgcaaaattgtgtttgggtgagtgatacacattttattatggccaaagttasaaactctgcttgtaggaaaaacaaagcgtacttacaagacrgggggctctgtgtggaggggaagggtcagagatattgaaagggtatgtgagycacagtaacgtgagtatgcacagttcaattactgtatctgaaagggctaaatggattcttcggctgtggcatcagcaaaataagtcatatcatgtctgtatttgggctttgcgttattccagctggaataccacgttcgtgtctggtatccgtggcagmaacagactgataaggtgacaacgagaaaacgcgcatgctaacccttag

SEQ ID NO: 59659 - DNA, 600 bp, Chicken  19866894318134_2
gttccaggtagcaactcctttttatcagcagaaaaacgtaatgcggtgctgtagcccagcacaactggttcttggcctgcaccaatgcatatttgtatcaagggccattagggaacagaaagattgaccaataagccttgcagctgcccccaggatggagaaagggttgaaaattagaagatggcattgggacagagcaaaactgtttgcaaaattgtgtttgggtgagtgatacacattttattatggccaaagttasaaactctgcttgtaggaaaaacaaagcgtacttacaagacrgggggctctgtgtggaggggaagggtcagagatattgaaagggtatgtgagycacagtaacgtgagtatgcacagttcaattactgtatctgaaagggctaaatggattcttcggctgtggcatcagcaaaataagtcatatcatgtctgtatttgggctttgcgttattccagctggaataccacgttcgtgtctggtatccgtggcagmaacagactgataaggtgacaacgagaaaacgcgcatgctaacccttagagaatcraataggattcrttttagtgacagcctccagaact

SEQ ID NO: 59660 - DNA, 600 bp, Chicken  19866894318134_3
agcccagcacaactggttcttggcctgcaccaatgcatatttgtatcaagggccattagggaacagaaagattgaccaataagccttgcagctgcccccaggatggagaaagggttgaaaattagaagatggcattgggacagagcaaaactgtttgcaaaattgtgtttgggtgagtgatacacattttattatggccaaagttasaaactctgcttgtaggaaaaacaaagcgtacttacaagacrgggggctctgtgtggaggggaagggtcagagatattgaaagggtatgtgagycacagtaacgtgagtatgcacagttcaattactgtatctgaaagggctaaatggattcttcggctgtggcatcagcaaaataagtcatatcatgtctgtatttgggctttgcgttattccagctggaataccacgttcgtgtctggtatccgtggcagmaacagactgataaggtgacaacgagaaaacgcgcatgctaacccttagagaatcraataggattcrttttagtgacagcctccagaacttaaatccctctggcaaaacacagccctgggggcttactgtgggccctgggaa

SEQ ID NO: 59661 - DNA, 600 bp, Chicken  19866894318134_4
aaattgtgtttgggtgagtgatacacattttattatggccaaagttasaaactctgcttgtaggaaaaacaaagcgtacttacaagacrgggggctctgtgtggaggggaagggtcagagatattgaaagggtatgtgagycacagtaacgtgagtatgcacagttcaattactgtatctgaaagggctaaatggattcttcggctgtggcatcagcaaaataagtcatatcatgtctgtatttgggctttgcgttattccagctggaataccacgttcgtgtctggtatccgtggcagmaacagactgataaggtgacaacgagaaaacgcgcatgctaacccttagagaatcraataggattcrttttagtgacagcctccagaacttaaatccctctggcaaaacacagccctgggggcttactgtgggccctgggaacttcagctgagctgcgtaccttcctgtagcctgtcaacaattttagatgttcctttttgaacaagcgtgggctcgttcatttttagataacctgtgcccaaaaagcctgggatttatctccccgctacccaacaattgcttctcgctgacactcaggca

SEQ ID NO: 59662 - DNA, 600 bp, Chicken  19866894318134_5
gcttgtaggaaaaacaaagcgtacttacaagacrgggggctctgtgtggaggggaagggtcagagatattgaaagggtatgtgagycacagtaacgtgagtatgcacagttcaattactgtatctgaaagggctaaatggattcttcggctgtggcatcagcaaaataagtcatatcatgtctgtatttgggctttgcgttattccagctggaataccacgttcgtgtctggtatccgtggcagmaacagactgataaggtgacaacgagaaaacgcgcatgctaacccttagagaatcraataggattcrttttagtgacagcctccagaacttaaatccctctggcaaaacacagccctgggggcttactgtgggccctgggaacttcagctgagctgcgtaccttcctgtagcctgtcaacaattttagatgttcctttttgaacaagcgtgggctcgttcatttttagataacctgtgcccaaaaagcctgggatttatctccccgctacccaacaattgcttctcgctgacactcaggcacaccgattattcatttgcacttgaagatattacgtgtgctggagtcatctattct

SEQ ID NO: 59663 - DNA, 600 bp, Chicken  19866894318134_6
aaacaaagcgtacttacaagacrgggggctctgtgtggaggggaagggtcagagatattgaaagggtatgtgagycacagtaacgtgagtatgcacagttcaattactgtatctgaaagggctaaatggattcttcggctgtggcatcagcaaaataagtcatatcatgtctgtatttgggctttgcgttattccagctggaataccacgttcgtgtctggtatccgtggcagmaacagactgataaggtgacaacgagaaaacgcgcatgctaacccttagagaatcraataggattcrttttagtgacagcctccagaacttaaatccctctggcaaaacacagccctgggggcttactgtgggccctgggaacttcagctgagctgcgtaccttcctgtagcctgtcaacaattttagatgttcctttttgaacaagcgtgggctcgttcatttttagataacctgtgcccaaaaagcctgggatttatctccccgctacccaacaattgcttctcgctgacactcaggcacaccgattattcatttgcacttgaagatattacgtgtgctggagtcatctattctttccccatcac

SEQ ID NO: 59664 - DNA, 600 bp, Chicken  19866894318146_1
tacccccagaagttttgtggaattattctatctcatttcactatgaaggatatttgaacagaaatgatgggaaaaaaaaatagtcaccaatgtaccattgctttaggtcacacagaagtcagcgctcaggtatttgctactgtacactgatgcacaaaagcactctcaactcctctgcctctatttaacatgaaaccccaggcatatggagcttcatgctattactattttcatcacatatacaattcatttccttttcaggcacttgtttagagtgttaaagtatctttttttcaatcyagttttgattccaagttccagcttctgaattaatataaatacataggaatctttagcctgagatatattgttctacaataagactaatctgtctacacaacaaggacagttgctatcagcctatgctgtctatatgcttctaggtgagcatcaccttatctgaaacgtgggaactcggggtgaaccaatctgtatgaaatgtctgcactgtggcatgtaaaggtcaagatctttaaaatacttttctcccgaccaagataacatgtcaaagatgcagaaaagcaaagactatatggaata

SEQ ID NO: 59665 - DNA, 599 bp, Chicken  19866894318147_1
  misc_feature (1)..(12): n is any nucleotide
nnnnnnnnnnnncctccaatagttgcaggctggtccccaccaaactctgcagtgtaccccattgcagagggtgaaaagcagtaactgaatgcttgcatctgcctgtgtgcttgcagccacgtccctttccatccaccaggatgggtgtgaggaggaatagccttatttaaagcatggagggtgctggggtttttccttcctgttggaggaggggatgcctcaaaaagcatctctgtgctgcagagccagattgctgctgttcccacgagcctgcactgaccctgcactttggtgctgttwttttttttcctgttgttgcttgtaatgctcttatcagctggggccagctgaagtcaagagggctggggatgacagagggtttgcagttctgccttctgagtcaccaggagtttcatgacagtggccatgaggagcaagagttgcttgccagctccttctctttgaaggctggccattatgttccagtgtcacagcttgaggcagtgtgtggatgtgacttcctgcctgactctggatgagctgggatgtgcagtacgtacaaggtgcttatcttcagatgccttaaagtaagtccctga

SEQ ID NO: 59666 - DNA, 600 bp, Chicken  19866894318164_1
acacagctaaattctcttggcaaaaaactgtctttctctgtcatatattcagcatggactcctaaagaatgagtctagaaggagattacacagcccatgtttacagcagtaccgatttttacatgtactgagtagtctctaaacttcatctgactacttaaggatgtgagggagatactggaagtgatagaatgaggcgttttcgctatgttttcttgtgagcactatgaaaaagaagtggatttttgagataaaagaacagagatccataaaatgagctgaagaaggttaacgtgtagyggttaataaaacatacttttagaaaataatctccttagggaaatgagacaaaaaaaggaaggataaatgatgacaatttataaatgaaaaagggagaaaaataaatggatgttataaccttggatgacaaaaagatcctccatgctttttcattgatcactccatcctttcttacatgcttgagacctttcttatcctctgtaaccaatatttgaaccaatggctcatattcagagcaatgaaataaatgtggtttttgaggaaggctgagtatgcattgcccatggatggtaagctcag

SEQ ID NO: 59667 - DNA, 600 bp, Chicken  19866894318164_2
tcacagctacggtattatcatggaaaatagacaaaaagaagctatttaaaagattttgcaaatacggagtactgtctgtaatgcatatccaaataatacaatgcagatctataaaacaccgtgcagtaataggccacagaaaatagtcctataaatgccaaagtgcacacatatatgtgagagtataaaagatgtatgcattcaaaattagatttaacattttccttattagtgccatttggtgagcagatagacaataaggaagagggtcgttaatcttaacagtgtgttttcagacartgaaggttactgtttcattgatttcatgcatttctattttgcccagaatccatgtctaaaccatttcatgaaagtcacacaccatttcattgagcataaacaacattcctccctcgccgacaagaatatgatgaccagctttcccatgaacaactagataaagagatgacaactttattccccactctctgtggactggcttttttttttacatgctgacatgctgtgacaagcactttatgatgcatggctgactacctctaataccacttgatccttcataaattaagaggcaagagg

SEQ ID NO: 59668 - DNA, 600 bp, Chicken  19866894318164_3
cagtctaatgagggtggggaaaggaagtctgcaaacccagcaagacacagccagcggacactggatctcctgcagcatcagccagtgcaaaagagactttaacgtttctctctgcatccataaatctacttctgtttgtagatgtcagaagtggaaacagacacaaatatcttctaggaaaaaatacttaaattttatttctgtgatctactttgtgatgtttactgtagcttagattatgaattaagcaggcactcctgatgtttacttgatagaccagttagcaaatcccataaataytgaatgaagagttttaattaaaaaattaaacccaataagcccatctgattatcaatcttaggattataaattcaagtcacaggtaattcaaaactggattttttaaaatgtggtaaagcaattcagaaataaaatctcccttggagatccagcagtgttttaaacataactgccttccagaataaaatgttttactgtcaggaccagatgcaatagaagaaaaaaaaacaaacccaacratcatttttcccttcagaagtgtctacacataaaagctgctataatatttattactgctac

SEQ ID NO: 59669 - DNA, 600 bp, Chicken  19866894318164_4
tttactgtagcttagattatgaattaagcaggcactcctgatgtttacttgatagaccagttagcaaatcccataaataytgaatgaagagttttaattaaaaaattaaacccaataagcccatctgattatcaatcttaggattataaattcaagtcacaggtaattcaaaactggattttttaaaatgtggtaaagcaattcagaaataaaatctcccttggagatccagcagtgttttaaacataactgccttccagaataaaatgttttactgtcaggaccagatgcaatagaagyaaaaaaaacaaacccaacratcatttttcccttcagaagtgtctacacataaaagctgctataatatttattactgctaccacaggggctcagtccttgctctttgaacaccagtgggtacaaaagtggtacttcaaagtaaatgtttcctctgccttgtaaaacatgctatttcatgaaaaacttttkttcaatggaagttgtcatggttaccagcataggagtgcttttgtcaatattatgatctttcctagtagggtagtgacactgaatatatgtgaaaagctctagatactccct

SEQ ID NO: 59670 - DNA, 600 bp, Chicken  19866894318164_5
tgaattaagcaggcactcctgatgtttacttgatagaccagttagcaaatcccataaataytgaatgaagagttttaattaaaaaattaaacccaataagcccatctgattatcaatcttaggattataaattcaagtcacaggtaattcaaaactggattttttaaaatgtggtaaagcaattcagaaataaaatctcccttggagatccagcagtgttttaaacataactgccttccagaataaaatgttttactgtcaggaccagatgcaatagaagaaaaaaaaacaaacccaacratcatttttcccttcagaagtgtctacacataaaagctgctataatatttattactgctaccacaggggctcagtccttgctctttgaacaccagtgggtacaaaagtggtacttcaaagtaaatgtttcctctgccttgtaaaacatgctatttcatgaaaaacttttkttcaatggaagttgtcatggttaccagcataggagtgcttttgtcaatattatgatctttcctagtagggtagtgacactgaatatatgtgaaaagctctagatactccctagaagccacagctatctca

SEQ ID NO: 59671 - DNA, 600 bp, Chicken  19866894318164_6
gtggtaaagcaattcagaaataaaatctcccttggagatccagcagtgttttaaacataactgccttccagaataaaatgttttactgtcaggaccagatgcaatagaagaaaaaaaaacaaacccaacratcatttttcccttcagaagtgtctacacataaaagctgctataatatttattactgctaccacaggggctcagtccttgctctttgaacaccagtgggtacaaaagtggtacttcaaagtaaatgtttcctctgccttgtaaaacatgctatttcatgaaaaacttttkttcaatggaagttgtcatggttaccagcataggagtgcttttgtcaatattatgatctttcctagtagggtagtgacactgaatatatgtgaaaagctctagatactccctagaagccacagctatctcactgacctcagaaaactgacacaaggtctgatgtctgctggactgtgctgatgcactctctcttgtggggcaccaaaggagaggtgtagtgtagcacatatggtctctgacagctcctgtccctgctttgagcttgatgcttctttgcaggatctggtgaccagaaaaagg

SEQ ID NO: 59672 - DNA, 600 bp, Chicken  19866894318164_7
agcaataggaatatcttcaggtccaaaactccagctggttgcttgcacagtgatgggtgcatttctgctccccttgtattctactctcattgagccccaggctttgggatgatacagaaaaggacttcaaatactcaagttcttatagcagttgttactgagtgctagaagttctcaataaaaaagtaatgcactagagttcaagttaaaaaaaaaaaaacaatttgctaataaaatacgtattttctgtgcttactgtgaactttggtaggagtttgaatactagggtttttcaaatgmaaattgaagtagtgggacctgggaaccaaactcccttaaactgcactgaaaacccttgctggtgctttgaagaaacaactttttattgcatagttgtattttaccttaaaactgtagaattttaggaggttgggtgtctggcttgagacctaccacaaatgaacccgacctcaccataacccttaaaaaaccccaagaacgcaatagcctatgtgagaaactgccacaaatattttggcaccatttaccagtctgaaagtcagccttttcgggctgacctagcatgagccacatgccaag

SEQ ID NO: 59673 - DNA, 600 bp, Chicken  19866894318164_8
ctgaaggaggaaaccttttctacaaaggcgagattttgtagactgaaaagttccttgctgcagcacctagaatgggatggaaagtgccaggagtggagctcagaaccctgtatgaggatcaggattctgcctacagactgagacaagtgactggggcaagcatgggtacagtccattttgtagtcaggaatgaaaaatcccatccttttgtattttgcctttatcagcagtccagaatcctctaagcaatgtgtcttttctttctttcaaaaactacaaggactctgtaatttatggtawaatgccagaaggaactgcagtgctgtctgacccttttcttctggaacatcacacaaaaaaagggagaaagccaaaatgttgtatgaaaagaaccaaactgaggacatctcttcccagcagagtgcccctgtatcagaatttaaactacatgagatgggacttattttttccctctctctctaccctacagcaaagttctgtcactgtatagaaggaaataaaaggtagaggctagagatataccatacatgataccctgatcagtaggccatccatatacaagtggacacagtgcagtca

SEQ ID NO: 59674 - DNA, 600 bp, Chicken  19866894318180_1
atgggacttcccagccctgactataactccaaagatcttcctgaatataaattactatgagaaaacccagtaaaaataatgctagtaattacttactcttccctggggcagctgctgtcaaggccaagccaaagagaactatttgcatatggcatgcaaacatgtagcggtacctacttgcaaaatgacagcactaaaggaggtggatctccaccctctgctataataacggatgactccacctaaacgctcttagtagctgtgaaaaacaaaagcaaaaataaataaccactagcattwaaaaaaaaaaaaaacctttaataaaatgaagataattaacctaaaagtgaattctttggttgaaggcttagtttaaccaaacacagcacagacacactgaaaaaataagttcgctatccctaattgcttgcagtttcaatttgtgataatatatayyggggaggaagaggatgggaggggctaagataaaaagatgaagaagaagaaaacaggagaaattgacaacagagaaakaatttggtaacaaaaakactaatattcccaaaatgtgtaagcatcacccaaatatttgacaagtgt

SEQ ID NO: 59675 - DNA, 600 bp, Chicken  19866894318180_2
caaacatgtagcggtacctacttgcaaaatgacagcactaaaggaggtggatctccaccctctgctataataacggatgactccacctaaacgctcttagtagctgtgaaaaacaaaagcaaaaataaataaccactagcattwaaaaaaaaaaaaaacctttaataaaatgaagataattaacctaaaagtgaattctttggttgaaggcttagtttaaccaaacacagcacagacacactgaaaaaataagttcgctatccctaattgcttgcagtttcaatttgtgataatatatayyggggaggaagaggatgggaggggctaagataaaaagatgaagaagaagaaaacaggagaaattgacaacagagaaakaatttggtaacaaaaakactaatattcccaaaatgtgtaagcatcacccaaatatttgacaagtgtaggtcacaactactgtatcagtgacagcagtttcaaggcttttgggctacagtgggaacacacaggcatttctggcttttcttttttgtctttgtcctcagtcatgcaaagtgtcgagctgcagagactcacrgcagctatctttatccctattac

SEQ ID NO: 59676 - DNA, 600 bp, Chicken  19866894318180_3
aaacatgtagcggtacctacttgcaaaatgacagcactaaaggaggtggatctccaccctctgctataataacggatgactccacctaaacgctcttagtagctgtgaaaaacaaaagcaaaaataaataaccactagcattwaaaaaaaaaaaaaacctttaataaaatgaagataattaacctaaaagtgaattctttggttgaaggcttagtttaaccaaacacagcacagacacactgaaaaaataagttcgctatccctaattgcttgcagtttcaatttgtgataatatatayyggggaggaagaggatgggaggggctaagataaaaagatgaagaagaagaaaacaggagaaattgacaacagagaaakaatttggtaacaaaaakactaatattcccaaaatgtgtaagcatcacccaaatatttgacaagtgtaggtcacaactactgtatcagtgacagcagtttcaaggcttttgggctacagtgggaacacacaggcatttctggcttttcttttttgtctttgtcctcagtcatgcaaagtgtcgagctgcagagactcacrgcagctatctttatccctattact

SEQ ID NO: 59677 - DNA, 600 bp, Chicken  19866894318180_4
gactccacctaaacgctcttagtagctgtgaaaaacaaaagcaaaaataaataaccactagcattwaaaaaaaaaaaaaacctttaataaaatgaagataattaacctaaaagtgaattctttggttgaaggcttagtttaaccaaacacagcacagacacactgaaaaaataagttcgctatccctaattgcttgcagtttcaatttgtgataatatatayyggggaggaagaggatgggaggggctaagataaaaagatgaagaagaagaaaacaggagaaattgacaacagagaaakaatttggtaacaaaaakactaatattcccaaaatgtgtaagcatcacccaaatatttgacaagtgtaggtcacaactactgtatcagtgacagcagtttcaaggcttttgggctacagtgggaacacacaggcatttctggcttttcttttttgtctttgtcctcagtcatgcaaagtgtcgagctgcagagactcacrgcagctatctttatccctattactccaatttttcatttgttctgtctccattctatgagcagaaaatctgactcttcccctattacatgtctccccatcct

SEQ ID NO: 59678 - DNA, 600 bp, Chicken  19866894318180_5
cttagtagctgtgaaaaacaaaagcaaaaataaataaccactagcattwaaaaaaaaaaaaaacctttaataaaatgaagataattaacctaaaagtgaattctttggttgaaggcttagtttaaccaaacacagcacagacacactgaaaaaataagttcgctatccctaattgcttgcagtttcaatttgtgataatatatayyggggaggaagaggatgggaggggctaagataaaaagatgaagaagaagaaaacaggagaaattgacaacagagaaakaatttggtaacaaaaakactaatattcccaaaatgtgtaagcatcacccaaatatttgacaagtgtaggtcacaactactgtatcagtgacagcagtttcaaggcttttgggctacagtgggaacacacaggcatttctggcttttcttttttgtctttgtcctcagtcatgcaaagtgtcgagctgcagagactcacrgcagctatctttatccctattactccaatttttcatttgttctgtctccattctatgagcagaaaatctgactcttcccctattacatgtctccccatcctctgtggtggacactatg

SEQ ID NO: 59679 - DNA, 563 bp, Chicken  19866894318180_6
tttcaatttgtgataatatatayyggggaggaagaggatgggaggggctaagataaaaagatgaagaagaagaaaacaggagaaattgacaacagagaaakaatttggtaacaaaaakactaatattcccaaaatgtgtaagcatcacccaaatatttgacaagtgtaggtcacaactactgtatcagtgacagcagtttcaaggcttttgggctacagtgggaacacacaggcatttctggcttttcttttttgtctttgtcctcagtcatgcaaagtgtcgagctgcagagactcacrgcagctatctttatccctattactccaatttttcatttgttctgtctccattctatgagcagaaaatctgactcttcccctattacatgtctccccatcctctgtggtggacactatgtgacaaataatcagtccaagtactggggataatagccatcaacaatactaataattttagacaatgtaatcattactgcttaaaatcagtactgcaagcttttttcttttctttcctttcctttcctttccttttcttctctttt

SEQ ID NO: 59680 - DNA, 600 bp, Chicken  19866894318182_1
aattttaaattttatgtgtatctttatcattaaggtaatattttttccctatttttgttctagtagtttagctgtggggttcagaatcacagcatggctctgggtcgatctgtttctacccctgctcaggcagagccacttggggctgcttgctcagggccctttggaagctctcccaggaggagaccccacagcctctggtcagcccatgcctgttctcaatcacctgcacagaagcggtgcctgatgttcagagggagcctcctgtgcttccctttgtgcctgttgtctctggtcctsgcaccgggcaccactgaacagagtctggctctgtcttccctgtgccctcyctttgggtatttatgggcattgatgagatcctcctgaaactctacttctccgggctgagcaggccaagcaatcgacacctgtcctcctagtaaatgtgctctagtctctttgtctttctggtcctacattggactctctgctctgaccatgtctctcttgtatgggggacctgaaactgagtgcagcactccaggtgcagcctcaccaacactgagtacagtggaaagatctcttccttcagcttgctag

SEQ ID NO: 59681 - DNA, 600 bp, Chicken  19866894318182_2
atttttgttctagtagtttagctgtggggttcagaatcacagcatggctctgggtcgatctgtttctacccctgctcaggcagagccacttggggctgcttgctcagggccctttggaagctctcccaggaggagaccccacagcctctggtcagcccatgcctgttctcaatcacctgcacagaagcggtgcctgatgttcagagggagcctcctgtgcttccctttgtgcctgttgtctctggtcctsgcaccgggcaccactgaacagagtctggctctgtcttccctgtgccctcyctttgggtatttatgggcattgatgagatcctcctgaaactctacttctccgggctgagcaggccaagcaatcgacacctgtcctcctagtaaatgtgctctagtctctttgtctttctggtcctacattggactctctgctctgaccatgtctctcttgtatgggggacctgaaactgagtgcagcactccaggtgcagcctcaccaacactgagtacagtggaaagatctcttccttcagcttgctagcaacacttcgcctcatgcagctgagtacactgtcagtcttcctcgttgct

SEQ ID NO: 59682 - DNA, 600 bp, Chicken  19866894318187_1
gatgccttagttatggcttcatccaattgatggctcaatggaaatcacatagaactttgcctggggaattcctgtatgctatcaactgaatagaacaaaatggtcaattacatctcatatcatactatgtaaccagatagctcaattattctactagcaaatatgatgttgagttttgctatgactgtattaaaagggtgtggagttgagattggaaggttgctttactacactattcaagatcaatccttgctttatatgggcagtaacaattaagcaatttctaacagaaatatctcyctatttatattgaggcaaaaacatacattctaccaaatgagatgacatcttttaaacaccaaaatctaacaaaaatctaacagaagactttccagaatgcctaatgtatggcagggaaatcaagtgaacttctggaggcttgcttcccttcctgctcaaatcaatcttctgcttgtgacacaggacttattctcaccttatttcaccatcaagttcaatggacctgttaaagatggaattttcatgtctccaagggtaattaattcccgagtctgattaccctcatgctgaacaccattt

SEQ ID NO: 59683 - DNA, 600 bp, Chicken  19866894318188_1
aagatttgtgtggttgtgtggtattgagaagaagcctcgcacgtttgtttttttcccactgagacacatctttctagggtagatgaatcttgttggaggtatgtgctgaaacatgttgagatgttatgctgatactgatattataaacaagtgctagaatgttttttgttgtgaatccactgtaagttaaattgcaggtatgtgtggcatatatatacaaaggagaacagcatacagagtcttgaatgatgttttaatgattgttaagcaacagcttaacaaactgaggttagatgatgmagtggtggatgtttgcaaaactaaaaagcgagcacggtggtttgtgccatggccatgcctctgaaggagacaatttgtgtccagtatgtgaatgctaccagagcgtgtctgtggaagacagacaaaatgagtgtttcgtctaattaggcagtgtgcaaaataagtcatgcagcaattatgcttcaaatgacatggtgttaatccaggagcagaaagcttggtgcttctttctgttatgcttttcctctaaacttgctaatcttaattagtgataatggtggtagttcaaactacaaaatc

SEQ ID NO: 59684 - DNA, 599 bp, Chicken  19866894318190_1
  misc_feature (1)..(154): n is any nucleotide
nnnnnnnnnnnnnnnnnnnnnnnnnnnnnnnnnnnnnnnnnnnnnnnnnnnnnnnnnnnnnnnnnnnnnnnnnnnnnnnnnnnnnnnnnnnnnnnnnnnnnnnnnnnnnnnnnnnnnnnnnnnnnnnnnnnnnnnnnnnnnnnnnnnnnnnnnnctaaagcatcctttcttgaaagaatggtaatgctaatacaaggaaacttccaatttagtatcaaagagaaatagatgctttttaaaagcgatgactctcccacaatttatatatgtgtatatgtctgtttggtacagaaaagaaartaaattaaacagaatgagatgaaacagatctgctcaggtttggcattcatgaacactttttagaaaattatgcttatttgacctggaaatgtaactggtctgtctaaccttaaaccatacacatttagtatgactttattcartgttttgtacaactgagtttatctgttctgtttctgatccattacctttgcaaagtttagtattttccaaaaagaataaaatggtgtagtttgatttccttatttagcataatttaaagaaatcatgatatctggtgtctcttgtctgataagaat

SEQ ID NO: 59685 - DNA, 599 bp, Chicken  19866894318190_2
  misc_feature (1)..(11): n is any nucleotide
nnnnnnnnnnnctaaagcatcctttcttgaaagaatggtaatgctaatacaaggaaacttccaatttagtatcaaagagaaatagatgctttttaaaagcgatgactctcccacaatttatatatgtgtatatgtctgtttggtacagaaaagaaartaaattaaacagaatgagatgaaacagatctgctcaggtttggcattcatgaacactttttagaaaattatgcttatttgacctggaaatgtaactggtctgtctaaccttaaaccatacacatttagtatgactttattcartgttttgtacaactgagtttatctgttctgtttctgatccattacctttgcaaagtttagtattttccaaaaagaataaaatggtgtagtttgatttccttatttagcataatttaaagaaatcatgatatctggtgtctcttgtctgataagaataaaactatagctgtgcttcagaggaattaaaatatttacttccatgtcttcctgagattgtatagtaaataagaaacacttaacattaatcttccttatgcttatagcacayttttacactgctaaataacccaaggcattac

SEQ ID NO: 59686 - DNA, 584 bp, Chicken  19866894318190_3
aaaccatacacatttagtatgactttattcartgttttgtacaactgagtttatctgttctgtttctgatccattacctttgcaaagtttagtattttccaaaaagaataaaatggtgtagtttgatttccttatttagcataatttaaagaaatcatgatatctggtgtctcttgtctgataagaataaaactatagctgtgcttcagaggaattaaaatatttacttccatgtcttcctgagattgtatagtaaataagaaacacttaacattaatcttccttatgcttatagcacayttttacactgctaaataacccaaggcattacatttccttttgttattattttatcttctccccacaaataaaaatgtttgtacaacgccattaaacaccaaagtcaacaggacatatcaaaaagagggctggaaactcactaatgatacacagcatacataatttgcacatgaaaatgaattcaaacgagctttgtgacatgaaagtatcttatataatgatatcctcctctcctaagaatctcatacatgaaaattctataacttacaatttctttggtaggg

SEQ ID NO: 59687 - DNA, 600 bp, Chicken  19866894318195_1
ctgagggaaagccatccttctgagggacacactaattctttatttgtatataaaatgtttttattttatttacttaatatacatatttatttatttaacgtgaattaaatattcctattggagccttgcatgttcattatgcccactttctgctttcgtaactggcttagacctcaaaacttgaaagactccttaaattgcagttcttctcagaaatatgactttgtttaaaaagaaaaaagatgtgataggttgtcatgtttctctctatatagcttcagatcaaatatatttagattrcagatatttttgctgtcagctttgcagactaagtgaagaaagacaagcctgattctttcctacttgcacatcatcaccagtaatattctacagtacaaatttgactctcaatgaaacttgtacaagcccattgtttcagtgtagttttacaggtgccagaaactgccagatctggcacttcaattgaaacttctgaattgatatacaagccaaaatagaacctgtctgacattgatagacatatttcttcctcattgataggatgaagaaaagaaatttaaagcaacgtctaatcaatta

SEQ ID NO: 59688 - DNA, 600 bp, Chicken  19866894318197_1
attcctgcactggagattcccaacctgagtagatgctgcaggactcaagtcaaaatctcttaagctgaattaggtgctcagacacgttgatggtaggcgctgccactggagtcttatgggtttttaatctgggctatttgctcacctccatccaatagacagatacatttattaataaagctacacaaatagcaaaatgaagaactgccttgatgctaaaacaaacaatataaaatcacctttttcgagccctccaagtagaattgcatttgtgagaatttatagtagtacaggtttgtstcattacaacctgcattagtacaagagcctgcacactgtacctttgtgaaatgacatcttcaagggtataccactatactccaagcactagtattactttcaagaaactatgttgcttttagcatttcattaygtacagaagtcataataagaaacaatgctatgtttactaatatgtctctttcacacagcagagttttaaacattcacagcaataagcattcaggaattttgatgtgacagtgaaacttctataagacgaggttgaaagacactttgattcagaacctaggaataaaa

SEQ ID NO: 59689 - DNA, 594 bp, Chicken  19866894318197_2
ctatttgctcacctccatccaatagacagatacatttattaataaagctacacaaatagcaaaatgaagaactgccttgatgctaaaacaaacaatataaaatcacctttttcgagccctccaagtagaattgcatttgtgagaatttatagtagtacaggtttgtstcattacaacctgcattagtacaagagcctgcacactgtacctttgtgaaatgacatcttcaagggtataccactatactccaagcactagtattactttcaagaaactatgttgcttttagcatttcattaygtacagaagtcataataagaaacaatgctatgtttactaatatgtctctttcacacagcagagttttaaacattcacagcaataagcattcaggaattttgatgtgacagtgaaacttctataagacgaggttgaaagacactttgattcagaacctaggaataaaacgggattgtcttcctgccttagcatttattgtatcttccatgaatgtaccaaatgatgtctgttttcaccttcctgcgctcatttctccgatccccatttgaagaatgacaaaccattaacaaagtg

SEQ ID NO: 59690 - DNA, 600 bp, Chicken  19866894318198_1
tgcttgttggtttgacttgtggtaacttaatttctattacctgccgttttcaaatggaatttattttactgagtaaagttaaggtaagcaacaacagcagtagcacaaaggtaatgttacagctctgcttcttgtccaatggaagtgcccggtgggtgtgctgtggtcctggctgcccggttactgggcaggtgtgagtgccaggagtcattaaagccttttggaataccttaaggcaatctggggaggaaaaaacttgtggtaaatggctgtatctgtgttactggactaggagtcccyggggatagtcagtgtctgaagcagagacttcggcagtcggagatgagggctctgcaggagaactgagccccagtcccctcccccctgctgccctacatgcagccctgcccggggggctgctctgccctggggcatgaaatgctcacctgtgtcttctccaaggtctctgctccatctgccctcctttgtagagatgttggattgagctgaaggatgggtgggtgggtttcctctttgatggagaggtgtcaattttgaatacctcagctctcgaagatgcaactaaaattgaagtctggc

SEQ ID NO: 59691 - DNA, 422 bp, Chicken  19866894318201_1
tctctccacaccatttcattcaccgccttttggaatgccccctgttcaaaggaacttggaataaaggttcagctgcctcagtttcctctctggcattcacagcctcctgttgtcaaaagacatcttgataggctatttcccatcatcaataggtaactctaaggtataatacagataaggcttatgtggttctcactatttagagatcttcaaatacttcaggacctgccatggactacatacagaagaatcattttacctcctcttgctctaaggtgtgagaagcagctggcccaaggyacagcaatgccacacaataatttgaaactggaggcatttctagacaagcttaagttgccatgttctaattattccatgctagaactaggtgctcaccttgtctggcacaccgatgagaaaaa

SEQ ID NO: 59692 - DNA, 599 bp, Chicken  19866894318202_1
  misc_feature (1)..(61): n is any nucleotide
nnnnnnnnnnnnnnnnnnnnnnnnnnnnnnnnnnnnnnnnnnnnnnnnnnnnnnnnnnnnnatttgagaatatacctctccaggaaattctgaatgaatgtgatctgttgctctatagaaggtgttaagaaactgcatgctgacttgggagacaggaatctgcccgaattaatcagctcatgccatggaatttcagcacagcttcttatttaccactattattccacaccaaaagaggccaaggttattacagcctgccaaaacaaaccctaccactactagccatgctgggactctggkgtttatagctgaaagcccagcaccaggagacattgcctgttgcccactgacagaacatgttgaggagcatttcattactgaggctgctgaacaaagcagaaaaaatatcattacactacaacacaggttggtgtggttttacaaacaatgacaattcacagccaattctcccagtattcgactttgaagtgcagcgtactgccaacaccagctctcaccatctgtcacaraatttaacagctaccttggggcacagccctgccagctgccccagggaaccaaaccacaaagaaagcaag

SEQ ID NO: 59693 - DNA, 553 bp, Chicken  19866894318202_2
aaaagaggccaaggttattacagcctgccaaaacaaaccctaccactactagccatgctgggactctggkgtttatagctgaaagcccagcaccaggagacattgcctgttgcccactgacagaacatgttgaggagcatttcattactgaggctgctgaacaaagcagaaaaaatatcattacactacaacacaggttggtgtggttttacaaacaatgacaattcacagccaattctcccagtattcgactttgaagtgcagcgtactgccaacaccagctctcaccatctgtcacaraatttaacagctaccttggggcacagccctgccagctgccccagggaaccaaaccacaaagaaagcaagccggatgtcagccggagacccaaagaagagaagattcccaaacggctgttctcatacccccgttctgctttactgtcccctcctaagcaaacatcttcagtggaaaggctttgctgcattttctgactctggtttgctagcaccactcactgagcagcagaggcagctgcctgttcatgtgggg

SEQ ID NO: 59694 - DNA, 600 bp, Chicken  19866894318203_1
aaataatactaaatcacaacgagtatatgggaaaattaattagggctaatgaaaaagatttaccagaacaaatgtctgggtgttaagagcattatcttgtgcatactggagctttcagaggtagaaattgggtgtctgtctcttcctgatcttcacccagaccctagagtcccacattaattgaggctggatgtccctggtcccaacctggctcagctctgaggtcagagctggtttctcatggctttaggacaggggctgcgcaacctctgtgggtaattggagcccattgctcaactrtcctcatggaacacgatttttttctaacatccagataccgatacgcagggtatatcatacagagaaacagatacacacagaagattagttcatttttgtagcaaaattcagaaattgattcttaagtcaagactgctccttaacatctgaccgtacccatactatactacttacaaaaagttgttatctaccacttgaagataactaagataaccttattytgttagtctttgcatgccagatctgagattgagcasagttggtgtaataaaaagagctaaactagcaataaattgggcc

SEQ ID NO: 59695 - DNA, 600 bp, Chicken  19866894318203_2
aggtcagagctggtttctcatggctttaggacaggggctgcgcaacctctgtgggtaattggagcccattgctcaactrtcctcatggaacacgatttttttctaacatccagataccgatacgcagggtatatcatacagagaaacagatacacacagaagattagttcatttttgtagcaaaattcagaaattgattcttaagtcaagactgctccttaacatctgaccgtacccatactatactacttacaaaaagttgttatctaccacttgaagataactaagataaccttattytgttagtctttgcatgccagatctgagattgagcasagttggtgtaataaaaagagctaaactagcaataaattgggcctatttaacctctttacatggcttcatgcaggataaaaatcccacatctgttacatctgtctatccctaagtgcatgaacaagaagtatccagcacatacccaagggattttaatgccacttagaatagagaatagtgttccctaatgacaatcatccctattggtgattcagccaaagaaccacaattctgcaccagcacagaggagaaggataggaaaga

SEQ ID NO: 59696 - DNA, 600 bp, Chicken  19866894318203_3
gctgcgcaacctctgtgggtaattggagcccattgctcaactrtcctcatggaacacgatttttttctaacatccagataccgatacgcagggtatatcatacagagaaacagatacacacagaagattagttcatttttgtagcaaaattcagaaattgattcttaagtcaagactgctccttaacatctgaccgtacccatactatactacttacaaaaagttgttatctaccacttgaagataactaagataaccttattytgttagtctttgcatgccagatctgagattgagcasagttggtgtaataaaaagagctaaactagcaataaattgggcctatttaacctctttacatggcttcatgcaggataaaaatcccacatctgttacatctgtctatccctaagtgcatgaacaagaagtatccagcacatacccaagggattttaatgccacttagaatagagaatagtgttccctaatgacaatcatccctattggtgattcagccaaagaaccacaattctgcaccagcacagaggagaaggataggaaagaaaattcagagataagtgattattgccatcctactaa

SEQ ID NO: 59697 - DNA, 600 bp, Chicken  19866894318211_1
ttagactgcctgctgccatatgagatccatcccgtgccctgctggcctcgccgtgggcagcaacacaatgcaaatatttttatatatagcatcctccatatgcggcggtgcgagaggagagggctgggggacagcaggggtatggcactttgggggctggaggtgctgatgttgcaaggaagcagcaaggctttgtctgcaagatgggacaagccttgactgtgcagaaataaggaagaatcgttgtccggacagtgagggatcagtggagtctgaatgatgggagtggggaacgtgtgygagtgaggagctgagattggaggagcccccatcctgacgaactgttggggtaaagattactgagtggggaatgctccaaggagatggggacaactcagtgtgggaatgtatgaaggagagtcgttgrgattcaagtgtarggttgaaaagcaaaatcctaaatctctccaacatgtcctgcagttgaagcattgctttagatgtgagatctacgcttacctgcttttctccctctcttcaagcaggaatttgggggctttttttttattatttttctgcccctttctcacctctgaaaaa

SEQ ID NO: 59698 - DNA, 600 bp, Chicken  19866894318211_2
gggacagcaggggtatggcactttgggggctggaggtgctgatgttgcaaggaagcagcaaggctttgtctgcaagatgggacaagccttgactgtgcagaaataaggaagaatcgttgtccggacagtgagggatcagtggagtctgaatgatgggagtggggaacgtgtgygagtgaggagctgagattggaggagcccccatcctgacgaactgttggggtaaagattactgagtggggaatgctccaaggagatggggacaactcagtgtgggaatgtatgaaggagagtcgttgrgattcaagtgtarggttgaaaagcaaaatcctaaatctctccaacatgtcctgcagttgaagcattgctttagatgtgagatctacgcttacctgcttttctccctctcttcaagcaggaatttgggggctttttttttattatttttctgcccctttctcacctctgaaaaagtcatgttgactttgggtccttcctggccaacactcacacaaatgcatgagcaagagaagcatttccctggctgatgtaccttaaatacttcgttgatctggttattttttccccactcgggctgat

SEQ ID NO: 59699 - DNA, 600 bp, Chicken  19866894318211_3
tatggcactttgggggctggaggtgctgatgttgcaaggaagcagcaaggctttgtctgcaagatgggacaagccttgactgtgcagaaataaggaagaatcgttgtccggacagtgagggatcagtggagtctgaatgatgggagtggggaacgtgtgygagtgaggagctgagattggaggagcccccatcctgacgaactgttggggtaaagattactgagtggggaatgctccaaggagatggggacaactcagtgtgggaatgtatgaaggagagtcgttgrgattcaagtgtarggttgaaaagcaaaatcctaaatctctccaacatgtcctgcagttgaagcattgctttagatgtgagatctacgcttacctgcttttctccctctcttcaagcaggaatttgggggctttttttttattatttttctgcccctttctcacctctgaaaaagtcatgttgactttgggtccttcctggccaacactcacacaaatgcatgagcaagagaagcatttccctggctgatgtaccttaaatacttcgttgatctggttattttttccccactcgggctgatagagtagctcttt

SEQ ID NO: 59700 - DNA, 599 bp, Chicken  19866894318212_1
aaagagaagcaggtcagcaaacagaacagaaggataaaataaattctgctacagtaaagcaattggaagaagtaggtatttgctgctatggattctgagataattctgccagtaaaacaatggtttaagatacttggagtctctaggcaccagagaaaaagtcatctgcaaaataatttccttctaaaaaatggataagggaaaatgcacaaatgtcaaacttaacaatgctactgatttctgactgtcccacttcaccctgcttttccagaaagatttgatgctgtgaagtcagaaacmaaaactctgacaaccttaaagaggtttactttgytacaaggggaggaatgaagtacccatggagaaccagatatgaattctttacaacaaacttcttcgaattctgtggttctcagtatagtgtagaagcacaagcagtaggtttcttgagtgtgaacatacaaaatccttcttttttacaaccagagagcaacacatatcctagagataccttgcatttaaaaaccagtaaaacaaaataaatwaaaaaaaattataaaagtaatgaccaacagaaacaccacttcaattattttata

SEQ ID NO: 59701 - DNA, 565 bp, Chicken  19866894318212_2
taaaataaattctgctacagtaaagcaattggaagaagtaggtatttgctgctatggattctgagataattctgccagtaaaacaatggtttaagatacttggagtctctaggcaccagagaaaaagtcatctgcaaaataatttccttctaaaaaatggataagggaaaatgcacaaatgtcaaacttaacaatgctactgatttctgactgtcccacttcaccctgcttttccagaaagatttgatgctgtgaagtcagaaacmaaaactctgacaaccttaaagaggtttactttgytacaaggggaggaatgaagtacccatggagaaccagatatgaattctttacaacaaacttcttcgaattctgtggttctcagtatagtgtagaagcacaagcagtaggtttcttgagtgtgaacatacaaaatccttcttttttacaaccagagagcaacacatatcctagagataccttgcatttaaaaaccagtaaaacaaaataaatwaaaaaaaattataaaagtaatgaccaacagaaacaccacttcaattattttata

SEQ ID NO: 59702 - DNA, 354 bp, Chicken  19866894318212_3
tgtcccacttcaccctgcttttccagaaagatttgatgctgtgaagtcagaaacmaaaactctgacaaccttaaagaggtttactttgytacaaggggaggaatgaagtacccatggagaaccagatatgaattctttacaacaaacttcttcgaattctgtggttctcagtatagtgtagaagcacaagcagtaggtttcttgagtgtgaacatacaaaatccttcttttttacaaccagagagcaacacatatcctagagataccttgcatttaaaaaccagtaaaacaaaataaatwaaaaaaaattataaaagtaatgaccaacagaaacaccacttcaattattttata

SEQ ID NO: 59703 - DNA, 600 bp, Chicken  19866894318217_1
agtcagtcctgagaaagtaacatctgttcccagcaatggctttgagatcagctctgcttcccatcaggtgagaagcactcagctctggtcgagacattcgcatcagccagctccagtcggctgagtggccttctgtgctcctctcctgcacagggctacagatgaggagctgcaggaagaaagcagcactgctggaaaaatgagaggctcggttctttcctggtcaggaaaaaggaccccaagtcactttttggatcctgttttcctcgtggaggtccaccagaatttctgagagccgaytggaagtttaatcctgtgcccaaacatgcagtaaaggacctgagtayatacatctcataggctcctcgtgcacctcccttgctattacctacttcttgtccacaagagtacctctcttaaaaccaaagcttgccaacttaatattcccaggcagtaaacacaccaaaagcacttcctaatgcagacagaggacttgcttggcaaattaagttgtatgttaaaggaaaatcgaattgtttgaagttattttatgaaaatattaaatacatttgactaaaaatgccaaacttgtaactaaaa

SEQ ID NO: 59704 - DNA, 600 bp, Chicken  19866894318217_2
tcagctctgcttcccatcaggtgagaagcactcagctctggtcgagacattcgcatcagccagctccagtcggctgagtggccttctgtgctcctctcctgcacagggctacagatgaggagctgcaggaagaaagcagcactgctggaaaaatgagaggctcggttctttcctggtcaggaaaaaggaccccaagtcactttttggatcctgttttcctcgtggaggtccaccagaatttctgagagccgaytggaagtttaatcctgtgcccaaacatgcagtaaaggacctgagtayatacatctcataggctcctcgtgcacctcccttgctattacctacttcttgtccacaagagtacctctcttaaaaccaaagcttgccaacttaatattcccaggcagtaaacacaccaaaagcacttcctaatgcagacagaggacttgcttggcaaattaagttgtatgttaaaggaaaatcgaattgtttgaagttattttatgaaaatattaaatacatttgactaaaaatgccaaacttgtaactaaaacacttggcaggatggggtggtggagagggaggtctttaagtgttttt

SEQ ID NO: 59705 - DNA, 600 bp, Chicken  19866894318221_1
ataatgactgtggaattctgctgcctagggaaggaaattctggagtctcttaagttttcttaccttgtaactgggagtgctggggttgttattccatgtgaggacagttccagcaaggaaacagagaggtgtctgctcttctcacaaatggcaatcatgttgtcttgcctgcacaggagcatcctattttctgatctcaaagagctatgaaaatatgaattcatcacgcaagtaaagttatactttcatatatgcacataccttttcctctatatgatgctgctaattattgctaaacartaactacttattgttcaaatactcattgaaaagtattagcgataaatgttagaaagcaagcgttacctgctcagtggatgatgaatgcataagggaggtacaaatgccagatcttgtaagtagtttaacacttttgcttgtttttttccttctaatattactcatggagaatgatgataattaaaatttaagcttaaacattaagaaaatatgtttttttttctgaactttaatctaaaacctcatgtcagaaatgtgttcttgttggtgtggcatggaatgaaatgtggataagataca

SEQ ID NO: 59706 - DNA, 599 bp, Chicken  19866894318236_1
  misc_feature (1)..(55): n is any nucleotide
nnnnnnnnnnnnnnnnnnnnnnnnnnnnnnnnnnnnnnnnnnnnnnnnnnnnnnntcaaattaagaaaaattttgaaatctggaagatatacatatgtatattcaattatgaaggagtgtatctccttgccctaagtttcaaagaacaaatacatatgaattcatgcattcatctcccatttcccctcttcttcaactgagagcattaagcaaggcattcaaccaaaaactagtgggctcagtattttctaatataatgagcagtcatcttctttatcactttctttcagttaccaaaawctcccagagagtatgttgtcttccacttcatagctgacctggtacagattagacaatcacaagttgattcttgctgaatacattcagtaatgaagctagttccaatgtgacatattcgactcataccttttgcaagttggataaagagcaagtgaattttactccagttaagtttgctctgatagtctctatgaactgagactgaagggtatagaagttcagttcacaatgagtgactgttggaacaatcattttttcatatatttttgtgcatgcacccaccctgataaaacttcagt

SEQ ID NO: 59707 - DNA, 600 bp, Chicken  19866894318240_1
tctgccttgaccctgtgctctttttgcttctgatgcccatgtcttggtttccctaggccagacctccttctgctggacggtaagtcgataccacaggtccctctaaccctgctgccgggtctgcccgtgcccttgctgggttgggaaggcagcgtggcctttagctgcctgcccaaaatagcttgggtgacagggctgtcagcgctccctggcagtggcgtggagccatcctcacccgggaaacctgcctgggcagccacgtgggctggtcaccggtctttcccgtgtaaaaaagcatcrtccagccatcccagtccctcctgacccgacctcggggcctttttttctcttccctcagagccgacgaacatgctggacgtgagggccatcctgtggctcgagaactacctgcaggtaggggtgggaacagggcagagctgtgctggacgtgcaccaggggacggggatggggacatcctcccagggcggtgtcctgccctgctgggcggtggcactcgggctccctcaggtctccctctcgctgtctcctccagacctggcagtcgaccatcctcgtggtgtcccacgacaggaacttcc

SEQ ID NO: 59708 - DNA, 600 bp, Chicken  19866894318243_1
gttaggaatgtatcaatttttagattttctatggaaaatgggagttttgtattctgccttgacttgattccattaaaatataatgaatattaaccacacaatgacagtcttggaatgcacagatcagtctttctgagggattaggaagtcctgcaaaatcctgagagcagacaaatgtctaagaacatacttcatttcagttttcagtctgtgcttcaagatgacaaaggaaacttgctgcatttgttctcatatttagaggcaaaataaataatggataaaagccagaaagttgaaccytatatttagaggggctggatcagttccctgtgaaggatatgtacccaagagatttagctcatgtcctgaatcaaaaccaaaatgggcatattttctgatgacagttccagttttgatattacttcattgtgtcctgttaatgattgctagcttttggcacaagatggataagatactaataagtgagggccttactgatgatcatgcagaaaaagggaattaagttacagaccatgagatgaaagaaaggaagtgttcaaaacaactttttaaacactactttgtccttagaaaaactgt

SEQ ID NO: 59709 - DNA, 599 bp, Chicken  19866894318258_1
  misc_feature (1)..(143): n is any nucleotide
nnnnnnnnnnnnnnnnnnnnnnnnnnnnnnnnnnnnnnnnnnnnnnnnnnnnnnnnnnnnnnnnnnnnnnnnnnnnnnnnnnnnnnnnnnnnnnnnnnnnnnnnnnnnnnnnnnnnnnnnnnnnnnnnnnnnnnnnnnnnnnncagacacagcatgtaaagatcccttacagacaatgaggtacacaggccattaggtgtgcccaatgaagtttactttacttgtcctggaccgacacagcttttaacacttactgattttggcaagtaaccgtgtcattaaacaaagcaaatggacacrtatgctggagtaaatawatatactgcaatccaaagtttgttcttatgaaaagaacaacaacaggaggataactcccaagaagatttgagtacatttgtccaaaacaaatccaataacaygcaccttcaattctctaccttcctttatccttcttttcaaaattactactggttctctttaacaagaggcacctttggcagctcccgagattgtcatacatctggcactttgyactcctttcactttctggcagctggcacatcatttcccatttgcttgctaggaagtcaaaagaagcg

SEQ ID NO: 59710 - DNA, 599 bp, Chicken  19866894318258_2
  misc_feature (1)..(126): n is any nucleotide
nnnnnnnnnnnnnnnnnnnnnnnnnnnnnnnnnnnnnnnnnnnnnnnnnnnnnnnnnnnnnnnnnnnnnnnnnnnnnnnnnnnnnnnnnnnnnnnnnnnnnnnnnnnnnnnnnnnnnnnnnnnnnncagacacagcatgtaaagatcccttacagacaatgaggtacacaggccattaggtgtgcccaatgaagtttactttacttgtcctggaccgacacagcttttaacacttactgattttggcaagtaaccgtgtcattaaacaaagcaaatggacacrtatgctggagtaaatawatatactgcaatccaaagtttgttcttatgaaaagaacaacaacaggaggataactcccaagaagatttgagtacatttgtccaaaacaaatccaataacaygcaccttcaattctctaccttcctttatccttcttttcaaaattactactggttctctttaacaagaggcacctttggcagctcccgagattgtcatacatctggcactttgyactcctttcactttctggcagctggcacatcatttcccatttgcttgctaggaagtcaaaagaagcgactctactttgcctggc

SEQ ID NO: 59711 - DNA, 599 bp, Chicken  19866894318258_3
  misc_feature (1)..(24): n is any nucleotide
nnnnnnnnnnnnnnnnnnnnnnnncagacacagcatgtaaagatcccttacagacaatgaggtacacaggccattaggtgtgcccaatgaagtttactttacttgtcctggaccgacacagcttttaacacttactgattttggcaagtaaccgtgtcattaaacaaagcaaatggacacrtatgctggagtaaatawatatactgcaatccaaagtttgttcttatgaaaagaacaacaacaggaggataactcccaagaagatttgagtacatttgtccaaaacaaatccaataacaygcaccttcaattctctaccttcctttatccttcttttcaaaattactactggttctctttaacaagaggcacctttggcagctcccgagattgtcatacatctggcactttgyactcctttcactttctggcagctggcacatcatttcccatttgcttgctaggaagtcaaaagaagcgactctactttgcctggcactgctgcagcagctggctactgaatgtgctggtttttattaaaggcaaaagggatgtttgctcacagttgacagaaacatgcacttagtgtgctttcaatg

SEQ ID NO: 59712 - DNA, 600 bp, Chicken  19866894318258_4
cgacacagcttttaacacttactgattttggcaagtaaccgtgtcattaaacaaagcaaatggacacrtatgctggagtaaatawatatactgcaatccaaagtttgttcttatgaaaagaacaacaacaggaggataactcccaagaagatttgagtacatttgtccaaaacaaatccaataacaygcaccttcaattctctaccttcctttatccttcttttcaaaattactactggttctctttaacaagaggcacctttggcagctcccgagattgtcatacatctggcactttgyactcctttcactttctggcagctggcacatcatttcccatttgcttgctaggaagtcaaaagaagcgactctactttgcctggcactgctgcagcagctggctactgaatgtgctggtttttattaaaggcaaaagggatgtttgctcacagttgacagaaacatgcacttagtgtgctttcaatggaaattaaggcatgggatttacaaactaagtttaaagcacttttggctttacaacaatatcgggccgcgtgtttctctcctcaggcaacagaactgtaacacttccagctcacc

SEQ ID NO: 59713 - DNA, 600 bp, Chicken  19866894318265_1
tagaaatctctcttgcacctttctgtgtccatgtgtaaggatcattttgcatcacaaattctgtatgtggcctaaagccatgtttttgtgtgtttctgatatgctttggtactgttaaaacaagttgtgttgaagtattttattttttctgcttgtatactctttatcttaagggagataatggattcaaggaatatttgtttttataagtatatttgagtaataacacgcaaccttgaggttattgttttgggaacaataaatacttttcttttactcatttaaagactgttgcaatamacatagaagtcaatggaaggttatcaagacttacaggaataatttgacacagctaaacatctgctttgtcttcaaagatacgtaagtaatcaatcatgtttgaattttattatgtgcttcatacttgtaagtgtacattaataagaattccataaatctagatgagctaattttttaaatatcagattttttaaattgtaataatactttcacctgaaatttatgaagagaaagtattctgtgttattttcaaaatattacattagtttaattacagaaaatattttgatgaggaacata

SEQ ID NO: 59714 - DNA, 573 bp, Chicken  19866894318270_1
gttgttttctctgaaaatgtatgtttatttaactaagtctctttttgcttcacaatctggattccattcagtcagttaccactccaattaactaacaattatttaacattaacagtaattacagacgccagttaagcgcctacagatgtcaactgttagctttgtacctaatcactcaatgaaatggagaaagttcaacaaacatcaattagccaagcaattagtatgaggtaggaaagagcatgttatcgtgtgtgagctgattcaatttattttattttgtcagtaaaacacacacaygcagacaagcagcagtaagtcgctgagattagataaagctgtattgttttgctgtttatacaaggcttttcccctcctcttctttcctgtacgaagctttcgatgtgctttgccaggcatctgttatcttatcgaatgcattgcgtttcaattggaaaagggcagcagcgtggctttgtgcagaggcagacatcaggttcagatgcagctgccccagcagtgctgtctctgcagcccggctgctcccagcctcgctgccccctgccacccagc

SEQ ID NO: 59715 - DNA, 600 bp, Chicken  19866894318273_1
aagtttttaggtcttagacagacttgcctaaaaataagagacaaagataaaaaatgtatcaggtatgtggtattttatgaaagaaaacagccttcagacattctattttcctaaactgcagaagaaagaaatcccctggtcattgtgtctaaacagctttattttctgactttctttactctgccaatacactttgcttttgtttaggatgaccgtaaatgtaagtgatgttttctaccttggtgctgctaggttactcacttgaaggccaccatggtaggcacactgtaaaagtaagcraaatgcatggattatatcaaaaagctgcttcagaattatcaaacttgtctgaagggcagaaggcttttcataatctttttaatggtattgtgggattaaaaacctgaatattgctgttcctatctataactaatatttctaaccttgtatatgttggatgccaattattcagaggagtagaaaatgtgtccaaagctcatctttcaatattatgacttattgacaccatcaatttactgtgagctcccagcagcaaaatcaataacagatatcatccctagagatctggggaaaaccttc

SEQ ID NO: 59716 - DNA, 600 bp, Chicken  19866894318274_1
tatgcactagctgtttctcaagacctcctcaagtcacctcggccttatggaggcagtttaagacatgaggagacaaatcctgtcacttctattagctgtaagtattagctcagtgctaagtccagatcagaacaagaaaaaacaaagacctcaaatcagaaatttcctttttgagattggttttgggtgttaccactttcatgccaaagtctctttctcctaagagatttacaggaaaagatgctcaaaggaaaggcgagatcagcttatctgtggtttgctatttcactgccacttttrgtgcagcacacggatgtgaatggctttgggacagcaaacagactttctttgttcctaacacttgtgcatgcttatccccattgactatagctgaggcagttctccccatacagacatcatactctccccaagataatttgtctctgtcaactttggagctccacatcagaaactaacacagaattctggccttcctgacaatttgagggagttcagtgccagcagggagaaggaaactgactgcactcagatgccaggatcttctccttatcctggagaatggtaaggtacagacagcag

SEQ ID NO: 59717 - DNA, 417 bp, Chicken  19866894318274_2
cacacggatgtgaatggctttgggacagcaaacagactttctttgttcctaacacttgtgcatgcttatccccattgactatagctgaggcagttctccccatacagacatcatactctccccaagataatttgtctctgtcaactttggagctccacatcagaaactaacacagaattctggccttcctgacaatttgagggagttcagtgccagcagggagaaggaaactgactgcactcagatgccaggatcttctccttatcctggagaatggtaaggtacagacagcagcagaayacrtactttctcccccagcatgaagaggcaattaaaagtctgagatcagcaaatgattcctacctgtcctaagcatttctattagatactgttgtaggggggcacgtctttcttggt

SEQ ID NO: 59718 - DNA, 414 bp, Chicken  19866894318274_3
acggatgtgaatggctttgggacagcaaacagactttctttgttcctaacacttgtgcatgcttatccccattgactatagctgaggcagttctccccatacagacatcatactctccccaagataatttgtctctgtcaactttggagctccacatcagaaactaacacagaattctggccttcctgacaatttgagggagttcagtgccagcagggagaaggaaactgactgcactcagatgccaggatcttctccttatcctggagaatggtaaggtacagacagcagcagaayacrtactttctcccccagcatgaagaggcaattaaaagtctgagatcagcaaatgattcctacctgtcctaagcatttctattagatactgttgtaggggggcacgtctttcttggt

SEQ ID NO: 59719 - DNA, 600 bp, Chicken  19866894318279_1
tttggctcttggtggcttcaggaacgagcacttgctgcccaagcagctccacagctgctgcagcacccgagaggggaaaaaggagtgagaggagatcactccctccctgctaatggcttcaagatgtggctgccagagcctcttgctggaagttccgtgctgcttcatggccagcttggctgctgctcaagggacagagggagagccccagggtgaacctgggagccgctgccagatgagtccaagcgtggcaccttctgtgccctgatatcgtcccgggaaggcgggaggtgcaagagrtcgccccactagcttcactcccacatcccatggacagcagcaggatggaacgcgagggcagcagcggagtgctatggggccgagcctcccatcccttccaagggatgtctcacgaagaagtgaaatttcacttttagggatgaaagggtgctgctgagggcatgaggaggcagagcagggsagcacgtggggatgggctgagggctgggcaatgctcagcctgcccccaagagcctcccaccccaaacgtcacaacaaaaagtgaagcaaaaagccttgctttcaccacaggctgcacgg

SEQ ID NO: 59720 - DNA, 600 bp, Chicken  19866894318279_2
gctgctcaagggacagagggagagccccagggtgaacctgggagccgctgccagatgagtccaagcgtggcaccttctgtgccctgatatcgtcccgggaaggcgggaggtgcaagagrtcgccccactagcttcactcccacatcccatggacagcagcaggatggaacgcgagggcagcagcggagtgctatggggccgagcctcccatcccttccaagggatgtctcacgaagaagtgaaatttcacttttagggatgaaagggtgctgctgagggcatgaggaggcagagcagggsagcacgtggggatgggctgagggctgggcaatgctcagcctgcccccaagagcctcccaccccaaacgtcacaacaaaaagtgaagcaaaaagccttgctttcaccacaggctgcacggaaaaagctgcttttctggcagagcttcaggagcccttcaggcttaaagccccgagcacctctgctgcgcagcggtgtgctttgctgggagcctaatgaagaggtggaggtttcagctaagagaagctggttggggtttgggggtgtgtgtattttttttttttttcatttttcttcgactt

SEQ ID NO: 59721 - DNA, 600 bp, Chicken  19866894318287_1
tcatcaaatctatcagtattaagtattagcaccccgctaacccttcatggagcagtcagctttcttctgtgactgagtgaagaaaataagtgcagaaaatgatggaaagaagacttctccatctctctctttctgttactgggattagtagcattcagttgctctgtcattatttggttacaaagctaaaggaatgcaatattttattgcccatgtctattgcccatgggttccagccgtacatcagggaaagatgcagaacctaaataaataaataaataaataaataaataaataaayaaacaacatacaaaaaccaaccaaccaaccaaacaacaaacaccataaaaagtatgccactgtgtctcagtgaggttgtgtctcaaatcagatctccttagagggttattttcagctggtccttggtatttcccatagatatatttttacataagtgctatgtaagctacctgtgctggtgcttctgttcagatacatacaaagaggaataggcccacttctttccaagtggcttggtttgttctctaaagcttttggtattcatcacagctagctaaagtggtccacagaaaagtgctg

SEQ ID NO: 59722 - DNA, 600 bp, Chicken  19866894318288_1
ttgttttgtgtgtgtgtgtgtgttacttaaaatgtagaatgctgcagaataaccaactacgccaggttcctactgaagcactccagaacttgcgcagcctgcagtctctgtaagtatacttggtaaatcaacatgtgagcttgcattaacaataacatataagattacctattaattacctgctatatcgctcagtaatgtcttgaacctatttcttcttttaaatttctttgaaatgcttttcaagagaattgtactctcagttaaaaatcaaaagtgactggtttcattctagtaatktggcaacactrgcagcttctttgcagtgttatgaactggttcaccacctgagaagacattccttgctctgcaatacgttctgtctgtcaagacgaatatggaccctggagcgtcagtcyttcccatgatttcttgttaaggctctttacaagggaaaagaaagaatcccaaataacacccttgattcttttttcatttaattttttctttttaagcaacatggaaaatactattagctcatgaaacaaagtgtactggaagacaattatattctgtgctacaggcaggtctctatactta

SEQ ID NO: 59723 - DNA, 600 bp, Chicken  19866894318288_2
gtgtgtgtgtgttacttaaaatgtagaatgctgcagaataaccaactacgccaggttcctactgaagcactccagaacttgcgcagcctgcagtctctgtaagtatacttggtaaatcaacatgtgagcttgcattaacaataacatataagattacctattaattacctgctatatcgctcagtaatgtcttgaacctatttcttcttttaaatttctttgaaatgcttttcaagagaattgtactctcagttaaaaatcaaaagtgactggtttcattctagtaatktggcaacactrgcagcttctttgcagtgttatgaactggttcaccacctgagaagacattccttgctctgcaatacgttctgtctgtcaagacgaatatggaccctggagcgtcagtcyttcccatgatttcttgttaaggctctttacaagggaaaagaaagaatcccaaataacacccttgattcttttttcatttaattttttctttttaagcaacatggaaaatactattagctcatgaaacaaagtgtactggaagacaattatattctgtgctacaggcaggtctctatacttacagttcttgac

SEQ ID NO: 59724 - DNA, 600 bp, Chicken  19866894318288_3
ttggtaaatcaacatgtgagcttgcattaacaataacatataagattacctattaattacctgctatatcgctcagtaatgtcttgaacctatttcttcttttaaatttctttgaaatgcttttcaagagaattgtactctcagttaaaaatcaaaagtgactggtttcattctagtaatktggcaacactrgcagcttctttgcagtgttatgaactggttcaccacctgagaagacattccttgctctgcaatacgttctgtctgtcaagacgaatatggaccctggagcgtcagtcyttcccatgatttcttgttaaggctctttacaagggaaaagaaagaatcccaaataacacccttgattcttttttcatttaattttttctttttaagcaacatggaaaatactattagctcatgaaacaaagtgtactggaagacaattatattctgtgctacaggcaggtctctatacttacagttcttgactgggttgtgctgactcagtccacaagcttcagttttaacagaactcctgccagatttcctagactaggagtgaggattggctgtttcatggtatgaatgaaattattt

SEQ ID NO: 59725 - DNA, 599 bp, Chicken  19866894318292_1
  misc_feature (1)..(130): n is any nucleotide
nnnnnnnnnnnnnnnnnnnnnnnnnnnnnnnnnnnnnnnnnnnnnnnnnnnnnnnnnnnnnnnnnnnnnnnnnnnnnnnnnnnnnnnnnnnnnnnnnnnnnnnnnnnnnnnnnnnnnnnnnnnnnnnnnncattacctacttgtgatgggggacgtgggtatagtttgtgctttaggatagagagacaaacattaactctgttatcatttcataaaagctgttgcaaatcattttctgtaaaaaatatgcatgcatagagctcatgccagggtgtgtgcagtgggctggtggagagcctrgtgtccccagcacctccagtgatgtgccaggagctgtactgaacctggtcaacaaaactagtgctttacccacatcagattatgtggagagttcatcaggggaatgaaaccttaacctttctgtctgctttatatgtgggggtgtttggaggattttaaataacgggatctgccgaaaatgattcttgtgtataaacagcatataaatgctacaatcttgaggctgctctgatcttgaggctgctttactatgtctgagtgggaagtgtgttcagccagaccctctgcagtgtgtctca

SEQ ID NO: 59726 - DNA, 600 bp, Chicken  19866894318292_2
tgctccacgcttaatagattgcagcgaaatgtagactgggatatcaaaggaaacagaagctctaattttgcttatttgaatttttgtcctttaaacaaattgtatttgttccgtttgatatctagaaggaaatcataatcccacacacgtttatctaaagtgtacaagcctcttgtttctgctactcactcttcctttgtgggggggggggaaagtattaattgtgcttggatttttgcagttgcttacagtttagcggtcctttgtacagcaagtgttggattagctcagagctttcgkcttcattgtttggcactttgggacattgagacacggtttgaatagttgtaaacagcagtttatatgcacagcaagtggaaaagtggaaagtgaaaagtggaaagcctggatttctgggaaacgacttctgaaatttgcagttgattcaggcttcatggtagggctgatatgttgactgggcatcccayatgtccatggtagtgcctctttctcttggccatgggtagggatgggagcagttggctgcccttcaagggccaggcagattgctggctgttgggagtgcaggaaggcatcaaa

SEQ ID NO: 59727 - DNA, 592 bp, Chicken  19866894318292_3
ctcttcctttgtgggggggggggaaagtattaattgtgcttggatttttgcagttgcttacagtttagcggtcctttgtacagcaagtgttggattagctcagagctttcgkcttcattgtttggcactttgggacattgagacacggtttgaatagttgtaaacagcagtttatatgcacagcaagtggaaaagtggaaagtgaaaagtggaaagcctggatttctgggaaacgacttctgaaatttgcagttgattcaggcttcatggtagggctgatatgttgactgggcatcccayatgtccatggtagtgcctctttctcttggccatgggtagggatgggagcagttggctgcccttcaagggccaggcagattgctggctgttgggagtgcaggaaggcatcaaacacaagttcaattttgaaagtgctagaaaatgcctcctcttctcctaataatcttgctgtgcgtttctgaatataattagcgcaacattcatagctgaagaagcaaggacctgatgagagattgctttcttttcctgttttgaagaaagctaatatttattttcctttcactgttcccat

SEQ ID NO: 59728 - DNA, 599 bp, Chicken  19866894318297_1
  misc_feature (1)..(126): n is any nucleotide
nnnnnnnnnnnnnnnnnnnnnnnnnnnnnnnnnnnnnnnnnnnnnnnnnnnnnnnnnnnnnnnnnnnnnnnnnnnnnnnnnnnnnnnnnnnnnnnnnnnnnnnnnnnnnnnnnnnnnnnnnnnnnnagtgtgaacctaatgggatgagtaagggagagctgtgaggcatcaccctgcagccaacagcacaagcggttcagaagagaggtattagcagcacagatgggagctggtttgtacgcacttatctgctctctcttctcatttatcttcacacctctaatggatgctgactggcckctccggcttccccacgctgccttcctccctggattcccccttcaataattaatcaggagatgctgctcagatttttttagggctgtgattgacgagggaagctccaggtatgggaaaactagcacaagtgacaccttccagtcactgctccaaaggcaaattgcatttgggtgctgccttcctccttccagctgtaacaaaactgaagctttgctgcactcctcaatgactctgtccccatccaggtgcacttccagactctgcagcccacttactgcatgcaccagacggacaaagcc

SEQ ID NO: 59729 - DNA, 599 bp, Chicken  19866894318298_1
  misc_feature (1)..(72): n is any nucleotide
nnnnnnnnnnnnnnnnnnnnnnnnnnnnnnnnnnnnnnnnnnnnnnnnnnnnnnnnnnnnnnnnnnnnnnnntgttgtggaactcttggagtgggtccgaagagggccctaagatgatcggaggtgctggagcacctcttgtatgaggaaaagttgagggaactgggattatttagcttggagaagagaaggctgtggggagacctcactgtggccttcaaatacttgaagggagtgtctaaactggaggaggtacaactgtatacaagggtggatagtgataggacaagggggagtggwtttaaactaagacagcggaggtttaggttagatagtaggaggaagtttttcacacagaggatggtaatgcaatggaacaggttgcccatggaggttgtgcatgccccatccctggaggcattcaaggccaggctggatgtggctctgggcagcctggtctggtggttggtgaccctgcacatagcagggggtttgaagctagatgatcattgtagtccttttcaacccaggccattctatgattctatggtaagggtcatggagcactgaaactggagtctccttctgggragatattc

SEQ ID NO: 59730 - DNA, 600 bp, Chicken  19866894318298_2
gggagtggwtttaaactaagacagcggaggtttaggttagatagtaggaggaagtttttcacacagaggatggtaatgcaatggaacaggttgcccatggaggttgtgcatgccccatccctggaggcattcaaggccaggctggatgtggctctgggcagcctggtctggtggttggtgaccctgcacatagcagggggtttgaagctagatgatcattgtagtccttttcaacccaggccattctatgattctatggtaagggtcatggagcactgaaactggagtctccttctgggragatattcaagaccagtctgtacatcgacctgtgtgacttattgtagggatcctgccttagcagaggggttggactaaattatttcttggtctcttccaaccctgtgattctgtgattctgcgtgagacattagcccttatttggaggctatatctgatttactatctagttacgtctattgttcttctttttccataacaaagcttagtaaaactttcaacagagttaaaaaaaaggagaaaataatttcctttgcatgctgatccaccagagtctagatatttgagaggaagcatgaa

SEQ ID NO: 59731 - DNA, 600 bp, Chicken  19866894318301_1
gctgtacaggagccatctgcataattcagatgtgtgaaaaacaatcagcctcttatttcccttccccagcctcccatctcatcttcttgtttccctggggtgatacagccctctgttatttaagtctggagtgatggggaatgctgtgagccacccacccgttccagccccaggaggtaggctcagctttttgcaatcaggatgattaattgtggactcatataaaaacctgaggggggtaggggtgaagcctttttgcagcttccttagtagagtgtgtagttatagggcagtcttccyattctgttttgtttttgtttggtatcacctgtttatttctttgatgctccaagaataagtgatgcaaggcactctactatttgggaatcagatctgcrcttcctcaaggtgagtgccttttgctgttaccttccttgcgtctgatgtggtaatgctgagtgtttcttggcaaaaatgaaaccatcacagtagacagagctggggtgaactttagatgcaaaagtgcctataaacatcccatctgctggcagagagcagccttcatctccttgggaacagagctctggcttcccatctccg

SEQ ID NO: 59732 - DNA, 519 bp, Chicken  19866894318301_2
ggtgatacagccctctgttatttaagtctggagtgatggggaatgctgtgagccacccacccgttccagccccaggaggtaggctcagctttttgcaatcaggatgattaattgtggactcatataaaaacctgaggggggtaggggtgaagcctttttgcagcttccttagtagagtgtgtagttatagggcagtcttccyattctgttttgtttttgtttggtatcacctgtttatttctttgatgctccaagaataagtgatgcaaggcactctactatttgggaatcagatctgcrcttcctcaaggtgagtgccttttgctgttaccttccttgcgtctgatgtggtaatgctgagtgtttcttggcaaaaatgaaaccatcacagtagacagagctggggtgaactttagatgcaaaagtgcctataaacatcccatctgctggcagagagcagccttcatctccttgggaacagagctctggcttcccatctccgggtttatggcacgcatt

SEQ ID NO: 59733 - DNA, 600 bp, Chicken  19866894318310_1
agcaggcacacatgaaaacaaatacggtgtttgattatgtaagcatttgtcttcctagtgttctgtcaaatgtggagagctctaaacaggcaatgggatcctgtaacttatcaatatgaccagaatgcctgaatgctttatggatttttattatttggaaatgcccataattgctttgtattggaaaaaaacacaagcccttttccaactatgcactgcagagatttggaacaggatttcccagggctaacttttagttatatttctctgctggtgcttttgttttaaattacccattcrgtcactaccttctgcagttttttacagtaaatgcwataattacaaatggtttaattttatatttaagtattcaataaagccttccagctggccagattcctcttgagtaaacatgctgacacttttgtttaggagataaatcagcatgtgcaagtccgtggccaatgaaatctccattatctctgtttgacagggaatgctttgaaaggctgtgtattttcaatgagcaaaaaaaaatcaaagaggaaagaacatcttgcccctttatacacaacaaaaggggsatatttattgactcat

SEQ ID NO: 59734 - DNA, 600 bp, Chicken  19866894318310_2
tatgtaagcatttgtcttcctagtgttctgtcaaatgtggagagctctaaacaggcaatgggatcctgtaacttatcaatatgaccagaatgcctgaatgctttatggatttttattatttggaaatgcccataattgctttgtattggaaaaaaacacaagcccttttccaactatgcactgcagagatttggaacaggatttcccagggctaacttttagttatatttctctgctggtgcttttgttttaaattacccattcrgtcactaccttctgcagttttttacagtaaatgcwataattacaaatggtttaattttatatttaagtattcaataaagccttccagctggccagattcctcttgagtaaacatgctgacacttttgtttaggagataaatcagcatgtgcaagtccgtggccaatgaaatctccattatctctgtttgacagggaatgctttgaaaggctgtgtattttcaatgagcaaaaaaaaatcaaagaggaaagaacatcttgcccctttatacacaacaaaaggggsatatttattgactcattaatactaaatatcagtcaaatgtgttgacagttg

SEQ ID NO: 59735 - DNA, 519 bp, Chicken  19866894318310_3
ttaaattacccattcrgtcactaccttctgcagttttttacagtaaatgcwataattacaaatggtttaattttatatttaagtattcaataaagccttccagctggccagattcctcttgagtaaacatgctgacacttttgtttaggagataaatcagcatgtgcaagtccgtggccaatgaaatctccattatctctgtttgacagggaatgctttgaaaggctgtgtattttcaatgagcaaaaaaaaatcaaagaggaaagaacatcttgcccctttatacacaacaaaaggggsatatttattgactcattaatactaaatatcagtcaaatgtgttgacagttggcaatctcaagtgttctatcacctatggggagcattaaatatagaataaacagtacagcacaaactgaggggccatttttctatcagaatagtgggtgggtctgtgaagataatttattgacagtgaaactcaagtcgcagaacttcagaggaaattccaggccataa

SEQ ID NO: 59736 - DNA, 600 bp, Chicken  19866894318312_1
atgtctggggaggcagagccttcgtgccaccagacaggctctgaatttagagccgacggcagcactgacacttaccttctgcgtcacttggcccggggctgcctagcagaggccaagataggaaggaggatcaggcaatagaacatcttagagatctctccattcctggcaaggcagaaatcagtgcttggaagtacttgaacgtcagaaggtcaacttcatatctttgaagctgcgtatttttctgagcagcctccgcataccgtgcattcccagtcaacgctgttggtgtttttctarctgcagttggaagtgattgcttgaaggccgggtgaatttacattgatcccccatgtataaatgaaaaacgtaggcttaaatgtcagcgcatattatggcaggggctgggagagcagattgcggggcaggaaccttaacttgtgggtgttgtgggtttaacagggctgataaagctctctggtaagcctgtgtatggggtgctgagtgacccttccaaagcagaagtggggattgcttgccagctgctgaaacacagccattcctgcaggagagtgcatggcaccactgagtacaattcca

SEQ ID NO: 59737 - DNA, 600 bp, Chicken  19866894318316_1
ccactgaaaaaagccttttgtatcagcacacggccctagttgtacaaaatcataatctccatctccctgatccttgatttccaagagaagaaaactcaagcatcagttagattataactgagtcagttctggacctaggagttgagaatgcatgagctactcagcctaaacacaaaagctaaacatgcgtatgcagcttgacacaaagttaattaaagtgcaaggaagaaatcattggaaaaaaaagaatattcaagggaaaacaaaacaaaataattcaattgtggaacaaccaccttrtggtattttcatagcatttgttatggtatcatagtttaattggattcaaataataataataaaagaataaataaataaatcttaatatttaatctggaaattatttaagttctgtctagtgtcacacattcagcaccttttttaaagcctgacaaatgtaacactacaggaaaatccaccaattcacctacatcaaaaggcaaatatttttccagcagcatttctccaataaaacgtaaacattacagctactgtaactactgatctttgatgtttcagtatatatttctgcatgtttta

SEQ ID NO: 59738 - DNA, 355 bp, Chicken  19866894318316_2
cattcagcaccttttttaaagcctgacaaatgtaacactacaggaaaatccaccaattcacctacatcaaaaggcaaatatttttccagcagcatttctccaataaaacgtaaacattacagctactgtaactactgatctttgatgtttcagtatatatttctgcatgttttatagattttaaatgaatatttatataagaactttctttcttagtttttaaaactcttttcaatttttttgaatatttttgaataatttaggcctaagcaactatgtgcataattacagaatccaggragcaggttatattgtcagatgatgtaattagttacttaaaaataaataaataaaa

SEQ ID NO: 59739 - DNA, 599 bp, Chicken  19866894318333_1
  misc_feature (1)..(122): n is any nucleotide
nnnnnnnnnnnnnnnnnnnnnnnnnnnnnnnnnnnnnnnnnnnnnnnnnnnnnnnnnnnnnnnnnnnnnnnnnnnnnnnnnnnnnnnnnnnnnnnnnnnnnnnnnnnnnnnnnnnnnnnnnnatcttccctcttttagttttaaaccattccctcctgtcctatcactatcagaccacataaaatgttgatctccctcctgtttacaagctctctttatatactggaaggccacagtaatatctccccagaactttctcttctgtaggatgaacaagcccaactctttcaacccttcttygtaggaaagctggtccagccctttgatcatccttgtggccctcctctgtacctactccaacagctccacatctttcttgtgctgaggccccagatctggacacagtacttcagatggggcctcacaagggcagagtagagggaaacttgaagaagtccaagttgactacatcaatcgcccttcttgtgtccattgatgttgtcactccattgtagaaggtcaccagactggtcaggtataatcaccccttgctgaagctgtgctggctgtcttgaaccacctcctcatcttgcatatgc

SEQ ID NO: 59740 - DNA, 600 bp, Chicken  19866894318334_1
aaacttattttctgctaatcctttttaaggatctgagtctgctggtattttgaaggccaaatgagtgttttgtttgtttgtttgtttgtttgtttttccagaagctctgaagggagtatctccagattttccctcatccagtgacttcaaaccacaaatctttcttctgtccttgaaagtttttagaaaacactacatttatactcctgtcaatctaagttagctattgtggtgtgctactttgaggttagatgataaatatagggccacttctcttaaattagatagggtcgtctttcytctccagtgatttccttgcataataaagcagttccttctgagattcagattccaccattgggtcacctatgctagttcctacccaggcagagtgaataatcccctatacaacgcaccctatctggtataagttttctctctggatgtcttgctttactgttaatttctgatttcaaacctttaatttaatcagtgctggcctccagttcccttatctcatttattagtgaattatcttctgagactcctcttctcttgggaggaagtgctgcttcacttttccgctttatacagactaat

SEQ ID NO: 59741 - DNA, 600 bp, Chicken  19866894318341_1
gcttattatctgaagagcgtaatgtttaacgtggctttcatactcaaccagttctgaaaccattctgaattgtgacacgagtgggctgagtgctgccatgcagctcgtcgtgcttctctgctgctggtggctcataatgccgttcttcagcgagttgcttctttagagggattcttttgcatcactgtaacttctaaaggctgtggccgtgactgcagtgtggatatgcagcacgtgctaaaaccaattagaacgtggcatctctgctttaaagcctcacaagtgagcgataagaaaatrgaaagagaggagtgtcgggagagaacagattaaataggataggctattaaaygggttaartattctgatggtaatggtcggagtgcttaatgtttagaaggcttttaaatgtaaccgtatggttagaaacatttaagatagtatgaaagcagaattctattaagtgaaatagaatttgctaatgkgggtcagaggtggtttgtgactggrgaggtgttagcttcacagggccgctggtccacagtgggtggcactgctgtggtatcgtctgagcacaggaggaagaacgacttaagagac

SEQ ID NO: 59742 - DNA, 600 bp, Chicken  19866894318341_2
tctgaaaccattctgaattgtgacacgagtgggctgagtgctgccatgcagctcgtcgtgcttctctgctgctggtggctcataatgccgttcttcagcgagttgcttctttagagggattcttttgcatcactgtaacttctaaaggctgtggccgtgactgcagtgtggatatgcagcacgtgctaaaaccaattagaacgtggcatctctgctttaaagcctcacaagtgagcgataagaaaatrgaaagagaggagtgtcgggagagaacagattaaataggataggctattaaaygggttaartattctgatggtaatggtcggagtgcttaatgtttagaaggcttttaaatgtaaccgtatggttagaaacatttaagatagtatgaaagcagaattctattaagtgaaatagaatttgctaatgkgggtcagaggtggtttgtgactggrgaggtgttagcttcacagggccgctggtccacagtgggtggcactgctgtggtatcgtctgagcacaggaggaagaacgacttaagagacagattgagtgcatgagtttgtagcaaggttgtgtgaacaaaaccagcttact

SEQ ID NO: 59743 - DNA, 600 bp, Chicken  19866894318341_3
cattctgaattgtgacacgagtgggctgagtgctgccatgcagctcgtcgtgcttctctgctgctggtggctcataatgccgttcttcagcgagttgcttctttagagggattcttttgcatcactgtaacttctaaaggctgtggccgtgactgcagtgtggatatgcagcacgtgctaaaaccaattagaacgtggcatctctgctttaaagcctcacaagtgagcgataagaaaatrgaaagagaggagtgtcgggagagaacagattaaataggataggctattaaaygggttaartattctgatggtaatggtcggagtgcttaatgtttagaaggcttttaaatgtaaccgtatggttagaaacatttaagatagtatgaaagcagaattctattaagtgaaatagaatttgctaatgkgggtcagaggtggtttgtgactggrgaggtgttagcttcacagggccgctggtccacagtgggtggcactgctgtggtatcgtctgagcacaggaggaagaacgacttaagagacagattgagtgcatgagtttgtagcaaggttgtgtgaacaaaaccagcttactcctaatat

SEQ ID NO: 59744 - DNA, 600 bp, Chicken  19866894318341_4
tgtaacttctaaaggctgtggccgtgactgcagtgtggatatgcagcacgtgctaaaaccaattagaacgtggcatctctgctttaaagcctcacaagtgagcgataagaaaatrgaaagagaggagtgtcgggagagaacagattaaataggataggctattaaaygggttaartattctgatggtaatggtcggagtgcttaatgtttagaaggcttttaaatgtaaccgtatggttagaaacatttaagatagtatgaaagcagaattctattaagtgaaatagaatttgctaatgkgggtcagaggtggtttgtgactggrgaggtgttagcttcacagggccgctggtccacagtgggtggcactgctgtggtatcgtctgagcacaggaggaagaacgacttaagagacagattgagtgcatgagtttgtagcaaggttgtgtgaacaaaaccagcttactcctaatatttagatactgccaaagaaaacaagcagtggatggccttatttgaaggatgctttgcttgggattccctgagttttggtgttctgaacaaactcgtcttactcgagcatgtcagaattggccacgt

SEQ ID NO: 59745 - DNA, 600 bp, Chicken  19866894318341_5
gactgcagtgtggatatgcagcacgtgctaaaaccaattagaacgtggcatctctgctttaaagcctcacaagtgagcgataagaaaatrgaaagagaggagtgtcgggagagaacagattaaataggataggctattaaaygggttaartattctgatggtaatggtcggagtgcttaatgtttagaaggcttttaaatgtaaccgtatggttagaaacatttaagatagtatgaaagcagaattctattaagtgaaatagaatttgctaatgkgggtcagaggtggtttgtgactggrgaggtgttagcttcacagggccgctggtccacagtgggtggcactgctgtggtatcgtctgagcacaggaggaagaacgacttaagagacagattgagtgcatgagtttgtagcaaggttgtgtgaacaaaaccagcttactcctaatatttagatactgccaaagaaaacaagcagtggatggccttatttgaaggatgctttgcttgggattccctgagttttggtgttctgaacaaactcgtcttactcgagcatgtcagaattggccacgttgtctgttaaaccatgcttcagtga

SEQ ID NO: 59746 - DNA, 600 bp, Chicken  19866894318355_1
tttgctaaaaatatagaatgaaatatatgaaggcaggtgtttattatacttttgtggacaagtggccaccttttgattataccaacagggggagtgccatttagaaggggggggaaatgtagcggatggaaaatagatgtatttttccatggtctacgtagaataaagataatttcactcatatggaacagtccttaggaaatgaacagcacagagcatgggtaacgaggttgcctatgggtcgtggattttttcaacttgattcagttatctttagggcatattaaaagacagagggakcacagtaactctcctctgacatttgcacagtgtcaggaaattaaaaattgcattctgctctgaaaaacatatttggggtaggcctaaattttattacacacacagaattcagattaagcttgtaattatcataacaaattgactcatttaaatacatagttattgggattgtatggtcaatttgactatttacaagtacctgtggtcacaatttgagatgactggccagtagtgtaagaacttatttagaagttaggaaatcttgcttgtgttattggtaccacccacagatttggtagg

SEQ ID NO: 59747 - DNA, 593 bp, Chicken  19866894318357_1
ttaaaaatgagggcgacgatttccactcacactgcactacagcactttgcctttgtgcacagctgagacaagcttggctcctggtggaacacgcgctcggtgctggagcagagtgggatttgtagcgatgagtgggaagcccttactcacttctcatccacacagtgcctgtgttttccatgtcctgcttgtttgcatgttgaaatccccgcagatgtgaatatacaaatctatgcttcaaggagatggtgtacgcagggtgcattagcagagggcttatgtggatcaaacaaatccagygcacaaaaactctcccagtgctctcctctgtgcacacattgcaaggcccagcagacagcagggtacatgcagccactgtttgtttacagagatactgtcatattgacaatcttattttattactggttattattacaataattacaaccagtaatactaaagacaatttgcttgcagccttgggagcccacaccttggcctaacacgctgtcctggtttcagctgggagggagctgatttttcctttgcagtgtctggtatgatgctatgttttggctttaggagaaaaacaa

SEQ ID NO: 59748 - DNA, 599 bp, Chicken  19866894318360_1
  misc_feature (1)..(57): n is any nucleotide
nnnnnnnnnnnnnnnnnnnnnnnnnnnnnnnnnnnnnnnnnnnnnnnnnnnnnnnnnttttctggtgccctgcaggagtttgagattgagttggaaggctcacaaactctgcggattttgtgctatgaaaagtgctacaacaaaatgaagctcaccaaagaggatggagagagcacagatcgcataatgggaaaaggacagatccaggtaagactgcacttaacttgttcctgataccattactgcaaaacatgacaggttttttaaatcctggagcatcccggagaggtttttttctgycttctgattgtctcaacactgggagttttcctccagacagtgagaaatacagtgtgattcacaagtgggaagtctgcagccttttccctcttgccttgccccccttgcttactccagtgtccttattagaaaagatatttttttcagaaaaaaatkaagttttgatctcttgawttccctgttaacttcaacacttccagcagagtatacagaagctgcagtgwgccctgggtactgttgagacaaaagaggaagcagtgaaaatactacgcagaagaacactaccttccctccttccc

SEQ ID NO: 59749 - DNA, 600 bp, Chicken  19866894318360_2
aaagaggatggagagagcacagatcgcataatgggaaaaggacagatccaggtaagactgcacttaacttgttcctgataccattactgcaaaacatgacaggttttttaaatcctggagcatcccggagaggtttttttctgycttctgattgtctcaacactgggagttttcctccagacagtgagaaatacagtgtgattcacaagtgggaagtctgcagccttttccctcttgccttgccccccttgcttactccagtgtccttattagaaaagatatttttttcagaaaaaaatkaagttttgatctcttgawttccctgttaacttcaacacttccagcagagtatacagaagctgcagtgwgccctgggtactgttgagacaaaagaggaagcagtgaaaatactacgcagaagaacactaccttccctccttccctgtgtgctggaagttgaytgatgtgctaacaaggccttggaggacagcgttattgtcctgataactgccatgtccaaagtttagtgcccatgacaacagactgcatctgagataaatgggttttttgaactcttccaccactgtgaatcagcatggg

SEQ ID NO: 59750 - DNA, 600 bp, Chicken  19866894318360_3
acagatcgcataatgggaaaaggacagatccaggtaagactgcacttaacttgttcctgataccattactgcaaaacatgacaggttttttaaatcctggagcatcccggagaggtttttttctgycttctgattgtctcaacactgggagttttcctccagacagtgagaaatacagtgtgattcacaagtgggaagtctgcagccttttccctcttgccttgccccccttgcttactccagtgtccttattagaaaagatatttttttcagaaaaaaatkaagttttgatctcttgawttccctgttaacttcaacacttccagcagagtatacagaagctgcagtgwgccctgggtactgttgagacaaaagaggaagcagtgaaaatactacgcagaagaacactaccttccctccttccctgtgtgctggaagttgaytgatgtgctaacaaggccttggaggacagcgttattgtcctgataactgccatgtccaaagtttagtgcccatgacaacagactgcatctgagataaatgggttttttgaactcttccaccactgtgaatcagcatgggcgctttgtctgtgtagca

SEQ ID NO: 59751 - DNA, 600 bp, Chicken  19866894318360_4
ttgttcctgataccattactgcaaaacatgacaggttttttaaatcctggagcatcccggagaggtttttttctgycttctgattgtctcaacactgggagttttcctccagacagtgagaaatacagtgtgattcacaagtgggaagtctgcagccttttccctcttgccttgccccccttgcttactccagtgtccttattagaaaagatatttttttcagaaaaaaatkaagttttgatctcttgawttccctgttaacttcaacacttccagcagagtatacagaagctgcagtgwgccctgggtactgttgagacaaaagaggaagcagtgaaaatactacgcagaagaacactaccttccctccttccctgtgtgctggaagttgaytgatgtgctaacaaggccttggaggacagcgttattgtcctgataactgccatgtccaaagtttagtgcccatgacaacagactgcatctgagataaatgggttttttgaactcttccaccactgtgaatcagcatgggcgctttgtctgtgtagcaaatacaatagagaaggggatgattgcaggtgggtgctgctctccaggagc

SEQ ID NO: 59752 - DNA, 600 bp, Chicken  19866894318360_5
actgggagttttcctccagacagtgagaaatacagtgtgattcacaagtgggaagtctgcagccttttccctcttgccttgccccccttgcttactccagtgtccttattagaaaagatatttttttcagaaaaaaatkaagttttgatctcttgawttccctgttaacttcaacacttccagcagagtatacagaagctgcagtgwgccctgggtactgttgagacaaaagaggaagcagtgaaaatactacgcagaagaacactaccttccctccttccctgtgtgctggaagttgaytgatgtgctaacaaggccttggaggacagcgttattgtcctgataactgccatgtccaaagtttagtgcccatgacaacagactgcatctgagataaatgggttttttgaactcttccaccactgtgaatcagcatgggcgctttgtctgtgtagcaaatacaatagagaaggggatgattgcaggtgggtgctgctctccaggagctgctgtgtgataaagggctaaagatctgtgcaggagaagtctggctcctcagtgggtgctgtcatggtgaacacgtgttcctatgcttcctcc

SEQ ID NO: 59753 - DNA, 600 bp, Chicken  19866894318360_6
tgagtttgatgaggcccattcttccccccttcccccacctcacagccctgaagctcccatactattttcagggaaagctttgtcaccaaatgtacatacaaatcaataaatgctagtagaaggtgactctcaggccaagcagagatctgtgtgtcccttctgctgacaaaggctgattttctgtggagctgagcaactacaaaagagcaagttttcagccctgaaatgccctggggatttgtgtgctctcattggagaactctggaatcactgaccttctaaagtcttcgaatgtgttasatagataaaaaaaaaatgtataagatttaaatttttttgacatttttttccccataggagtaggtgtttttatgcacagcatgtgtacatggtattaaaacatcttacatgaagttaatacatataaagacttgttggtggtacttgaattcaatcacttggttcttttagagaaatctaaacagcttggaaagcttaaaaaaaatcaatagaaatgttttggctaatgcatgaatttgtgctgcgttttatcacaataagcaaactggaaacctctcattttcagtaaatccccattgc

SEQ ID NO: 59754 - DNA, 600 bp, Chicken  19866894318361_1
taatagtaaagtagctcttacttatgttaggcggaggtttatttattttcatatatggcatttgatgtattatcacgcctttaggatctgagtcaatgagatacctccacagtgggctaattttaaggcatcatctccaattaacactgatctcaatcacaagctttccaatataaggtagctgggttagaaatgataagattattaatcaaatgtttcatctcaagtttgcttttaaggatccgtgcctccaagtgggttttgtattcccctgaaggcatgagaattggaaataacttytacaagccagcaacaaggagagcagatactctacccccaagtacccctgctccacaactctgggcttttgtgaaacctggacaagatacccagaaattacaaaagcttttgaacttttccagctcactaaaaagagcacagatggggattgttttcattttctcagtctctaaaattagtgaaattagattcaattccaaacctgataagcactcttcttcagctctgatgtttttttatgactgttgtagagttgctgttctttaagaaggcaggaaattgaattgtggttggtatgtg

SEQ ID NO: 59755 - DNA, 600 bp, Chicken  19866894318362_1
tttctagaattagatttcattttgcaatatttaatattatcttctgcttgtagatggcatttttctgacaaacattccctgggtaggagtttgacatatgcttaaagcacacaaaataagttttgcatctgattttagtgctacaatgctatttcagcagcatttctgaaaaatgatttcagtttagtctttaagcaaatctttacccctgagtatattcttcctatagctgcctttacttgtttttcttattacacacaatttggtacctttcagctcatatgtcaagttgagcactgrgatacagagttcgtaaagataagccatttctcactgatactgagatatgaaaagacagacttttgccagactattcttgggaataagtttgagtgactgttcactatgaaattaaggtaggggggttttgaatctcaaacattataacagaggggtatttggaaaatgccttaattttaactgcctggcacatagagaaatcatagtactggttattaaaacagcaaatacagtaacttagttttcataaaaataatcaatgtcagagagccaaggcaattataccttttgttgttcatt

SEQ ID NO: 59756 - DNA, 600 bp, Chicken  19866894318362_2
ctactgtctaccaaaagcagagaaacaaaaaacctgcacatattagcctgtagcatgtacagttttaaagcaacacgtataaggaggagtgaccttcccaactgttctgagtgcccagtgtagaaagacttccgggttgatttctgctttagatgtgacagcctcaagctcacttctattattactggatggagaagctcagctcatgggcaaagaagcagaagctgttgaaataccggtgaatacttatgctctcagattaactgcatttctgcatcttaaatgcaagcattgaccagygatcttcattgacaaagctgcagtatttgactgcaccttgtaacatgacacagaaagaagaacacatatttcatccactgtctactctgcattttaatttatctctatctcctgcaattttatttccgtaacatactacctttttctataaagtattttagggatgccagataaggaaataaatgaaaaatacttaccttgatttagatggattttagaaaagatagaagatattttaggaatttattaatgtcacctgttgcattgttccaaaatgacttttggatcacagagaatgaa

SEQ ID NO: 59757 - DNA, 600 bp, Chicken  19866894318369_1
gccgattgttgtgcctgacagccgtgctaaaaattcattttttaacctgaaaagatggagtgctgagcatcttctccgcatccagggatgtgtggtacccaggtgctcagtgggactggagctgtgttgttctgctgctcagagctgctttttcctctccatcgtgcctgcaagtaacccaggcttgcgtgtccttaagctctcattaattcactgatatgtgcaagtggctgaacctgagtgcttcatgaggatggatcaaaacagggttgtgataccggtgaacgtacccagacttcwctgtgccccaaacctggatgcacccagggagcgagaggtaatgacctcaagttgtgctggggagggtcaggttggatgctagaaaaaaacttgttttccaaaagagtggtaatgcattggaacaggctgctcagggtgtagtggggtcaccgtccctggagttgttccakaaccatggggatgtggcactgaggaacacagtcagggggcatggtgggatgggttggggctgggcacagggatctttgtgctcttttccggcctgaatgattcatgaagtggccttggatgtctcagtgc

SEQ ID NO: 59758 - DNA, 600 bp, Chicken  19866894318369_2
caagtaacccaggcttgcgtgtccttaagctctcattaattcactgatatgtgcaagtggctgaacctgagtgcttcatgaggatggatcaaaacagggttgtgataccggtgaacgtacccagacttcwctgtgccccaaacctggatgcacccagggagcgagaggtaatgacctcaagttgtgctggggagggtcaggttggatgctagaaaaaaacttgttttccaaaagagtggtaatgcattggaacaggctgctcagggtgtagtggggtcaccgtccctggagttgttccakaaccatggggatgtggcactgaggaacacagtcagggggcatggtgggatgggttggggctgggcacagggatctttgtgctcttttccggcctgaatgattcatgaagtggccttggatgtctcagtgctgcagctgacaccttgctcatccggcttaaagttcgctgtcaaagcacgaggagcacacatgagtttgttttgcagctttcgtgctccctgcatcactgcttttgcgagcaggacgagaccggagcaaagggctcatttgtttccctgctctctccttctgctctgctaa

SEQ ID NO: 59759 - DNA, 600 bp, Chicken  19866894318382_1
tgaaacatcttgtgtggtatcatagcagaggcagccctctgctgtgcgtattagcatctgaaaaatacagcaaaggaaaagtaatcccgagggattttctaaatgtttctttctctccccgtatcccggcactcagagtgatgtgaggaggcagctgtagcccacaggttgtaacattctgctgttctctgccccctggtgtggctgctgggttggagaacccttgtgcatgcagcacaaaggtgaaaggaggaaagggtgccacagcgctccatagtccatggacagcaccaatatgcmggggtttcaaggcagtgcttctcttaaccctgtcttacccctttgtgatcttgtctggtggaaaattcctgttggctttcaatgcgtgcctccagcacccaggtgggtacagtagcatccacctccaggagctgctctgccagctgaggttggtgcagaaacgaacccggtgttggtggtgtggcgtggtgtggtgggagtgagggccgatgctccctggtgcgaccagatgctaatggctactgccgtgttgctgggcaaggaaatgggctttgttttgtttcccctaataaaggatgc

SEQ ID NO: 59760 - DNA, 600 bp, Chicken  19866894318387_1
agtttgagagccacagttatttcatactgtctggtggacctaaatgagataatagacacgcgctactaagtaccagcaggtacaccactgcctgtgctgtgcagctcacatggttagttgctaatcctcactctgggctccttgcaccatgcagcagtaagagctcagcccatgtgtaggcacactgtcctggaatagctctgagtcacgctgcccgagaagaaagctgcctttgtatacagcactgcggcagtaagagtcccatccttaccatccctatgcccccagtactgcttgcartgcctcctctctgttgagctcagcaggccagggtgaagaggtacagacagtgatctttctggctctcctgcttgttccagctgacactcaaagacaggagagacagaaaaaaaggaaccttattttgcttacccacaccacagcccactttttttatattgacagcagtaatgctacaggttactgtgggtgatgtaatttctaatagattgctgctgcaagaatccatctgcatttatatggcactcaataaagaacataacgttggctgtgtaaaatcccacggtaccatggcactat

SEQ ID NO: 59761 - DNA, 600 bp, Chicken  19866894318387_2
ctgcttgttccagctgacactcaaagacaggagagacagaaaaaaaggaaccttattttgcttacccacaccacagcccactttttttatattgacagcagtaatgctacaggttactgtgggtgatgtaatttctaatagattgctgctgcaagaatccatctgcatttatatggcactcaataaagaacataacgttggctgtgtaaaatcccacggtaccatggcactattgcatatattgccatttatttggatctgttgtttcacaaatcaaggatttttttcttcactattaaratgttttctttctgggctccaagtgtgataaaagtggagggaagcactcagcttcatattgcatcagctgtcaagttagtaggtatttacttactttgggaagtaagttagctagcatgagtcattctgaaaagtttatagatttggtttttgtcataatatggaacaggctcctactacacagtatatttgacttgtgctctgcaagtttctcagaaaacaaataataactggcctaacagattatttttatcagtgcttcataatcaatgcttttccctgtaatcagtcgagacaact

SEQ ID NO: 59762 - DNA, 468 bp, Chicken  19866894318394_1
ctcccacaccttcttcctcctgccccaaaataaaaactgaacataatcttccatttatcccaggtacttcaggaagaatatgtagaatttatacatatttgtgcgtctgtgattccatataggaaatagtatgtagcattcatagtcacctctatgaagaggtgaacaacctggggagaagaaagagtagggaaatagtcccgacagctttctccagctgtcatcatgctacagagtatcttatatctacagtaaacatccagagcagaagcacatttagatcatccctgttttactgtygcgcgtgagcacacatgcaaaattcttggacagagggcttgttaccaaactggtagtcgtgactgcagccaaatgcaataaagatggtaacatgctgaaatgataaattactaccaatcattaattatactgcatgaaaggtgaagaatcagttttcattttcacaca

SEQ ID NO: 59763 - DNA, 599 bp, Chicken  19866894318396_1
  misc_feature (1)..(155): n is any nucleotide
nnnnnnnnnnnnnnnnnnnnnnnnnnnnnnnnnnnnnnnnnnnnnnnnnnnnnnnnnnnnnnnnnnnnnnnnnnnnnnnnnnnnnnnnnnnnnnnnnnnnnnnnnnnnnnnnnnnnnnnnnnnnnnnnnnnnnnnnnnnnnnnnnnnnnnnnnnnaaacgatgagcatcagagcacagggaggaccaggtgctggaccactggcagctgctgcacgagccaggggctttcctaaaatgttggttggagatttgttgcttctaaatgaaggcacgatggagtcctcggtgagggttaagcrctgggaaaygggcagcaggatggtactggtagargagcaatcacrtccctctctaacagagactgttctccatggctatttcacaagagtaggaactcactatactatcataatagaatcagttgtctcatgtgccttgcattaacatcacatcctcattgcttgacaagcatcagtgaacgtacgcagaaggttttaaactcagctgttggtttctagagatttttaggcttcctgcaagggaaaaggacatcaaaagcctgcccttaccttccatgtgtctcaaggtttcatgtatc

SEQ ID NO: 59764 - DNA, 599 bp, Chicken  19866894318396_2
  misc_feature (1)..(146): n is any nucleotide
nnnnnnnnnnnnnnnnnnnnnnnnnnnnnnnnnnnnnnnnnnnnnnnnnnnnnnnnnnnnnnnnnnnnnnnnnnnnnnnnnnnnnnnnnnnnnnnnnnnnnnnnnnnnnnnnnnnnnnnnnnnnnnnnnnnnnnnnnnnnnnnnnnaaacgatgagcatcagagcacagggaggaccaggtgctggaccactggcagctgctgcacgagccaggggctttcctaaaatgttggttggagatttgttgcttctaaatgaaggcacgatggagtcctcggtgagggttaagcrctgggaaaygggcagcaggatggtactggtagargagcaatcacrtccctctctaacagagactgttctccatggctatttcacaagagtaggaactcactatactatcataatagaatcagttgtctcatgtgccttgcattaacatcacatcctcattgcttgacaagcatcagtgaacgtacgcagaaggttttaaactcagctgttggtttctagagatttttaggcttcctgcaagggaaaaggacatcaaaagcctgcccttaccttccatgtgtctcaaggtttcatgtatctcctggctg

SEQ ID NO: 59765 - DNA, 599 bp, Chicken  19866894318396_3
  misc_feature (1)..(121): n is any nucleotide
nnnnnnnnnnnnnnnnnnnnnnnnnnnnnnnnnnnnnnnnnnnnnnnnnnnnnnnnnnnnnnnnnnnnnnnnnnnnnnnnnnnnnnnnnnnnnnnnnnnnnnnnnnnnnnnnnnnnnnnnnaaacgatgagcatcagagcacagggaggaccaggtgctggaccactggcagctgctgcacgagccaggggctttcctaaaatgttggttggagatttgttgcttctaaatgaaggcacgatggagtcctcggtgagggttaagcrctgggaaaygggcagcaggatggtactggtagargagcaatcacrtccctctctaacagagactgttctccatggctatttcacaagagtaggaactcactatactatcataatagaatcagttgtctcatgtgccttgcattaacatcacatcctcattgcttgacaagcatcagtgaacgtacgcagaaggttttaaactcagctgttggtttctagagatttttaggcttcctgcaagggaaaaggacatcaaaagcctgcccttaccttccatgtgtctcaaggtttcatgtatctcctggctgctcaggtgaaccttgctggctgtgg

SEQ ID NO: 59766 - DNA, 599 bp, Chicken  19866894318396_4
  misc_feature (1)..(110): n is any nucleotide
nnnnnnnnnnnnnnnnnnnnnnnnnnnnnnnnnnnnnnnnnnnnnnnnnnnnnnnnnnnnnnnnnnnnnnnnnnnnnnnnnnnnnnnnnnnnnnnnnnnnnnnnnnnnnnaaacgatgagcatcagagcacagggaggaccaggtgctggaccactggcagctgctgcacgagccaggggctttcctaaaatgttggttggagatttgttgcttctaaatgaaggcacgatggagtcctcggtgagggttaagcrctgggaaaygggcagcaggatggtactggtagargagcaatcacrtccctctctaacagagactgttctccatggctatttcacaagagtaggaactcactatactatcataatagaatcagttgtctcatgtgccttgcattaacatcacatcctcattgcttgacaagcatcagtgaacgtacgcagaaggttttaaactcagctgttggtttctagagatttttaggcttcctgcaagggaaaaggacatcaaaagcctgcccttaccttccatgtgtctcaaggtttcatgtatctcctggctgctcaggtgaaccttgctggctgtggggtccaggagg

SEQ ID NO: 59767 - DNA, 600 bp, Chicken  19866894318397_1
aacaatgtttgtttgttttttttttctttttgttctgataaaatctgagtctttgtttgtggcttcaagttaagggagacaacgttgaggtcaacttttgtttccttggggatcaaagaggattcttatgtgtgtgtactggttttcaagtctgtttaagtggactcatgtttttttgttgaagttattttaagcacttcatgacatgttgggaaaaacctagtaaaaattcttttggatcctcccttttctcatatttatagctaaggcaggatgaagttatgtttttctgtatatagygtgaaagttgctttggttaacttttctgctaaaagtcacagttattcctttgtgtgctctggaagaaaatctagaatagattcctgactggagagagagagaaactcagtaaggagctggtagaggggaaagcagcagggactgtgcgwacacctctagagaaactccttgctaggctcagcttggttcttcttgctttgggtcaaagctgttccccattaaaaccttaaactgaggttaaaaaaaaccaaccctctgaaggcagacagctgatagagggataagttttgtgtgaacccc

SEQ ID NO: 59768 - DNA, 600 bp, Chicken  19866894318397_2
gtctgtttaagtggactcatgtttttttgttgaagttattttaagcacttcatgacatgttgggaaaaacctagtaaaaattcttttggatcctcccttttctcatatttatagctaaggcaggatgaagttatgtttttctgtatatagygtgaaagttgctttggttaacttttctgctaaaagtcacagttattcctttgtgtgctctggaagaaaatctagaatagattcctgactggagagagagagaaactcagtaaggagctggtagaggggaaagcagcagggactgtgcgwacacctctagagaaactccttgctaggctcagcttggttcttcttgctttgggtcaaagctgttccccattaaaaccttaaactgaggttaaaaaaaaccaaccctctgaaggcagacagctgatagagggataagttttgtgtgaacccctgacttatagcagcagcaccaactgctgtgtggatgagtgtctttgtaattttggctgctgtggttgtgggagctcttgccaacgaatggtgtgaccgtgggccctatgttttccatcacttacccaaagcttcccataattagatgtt

SEQ ID NO: 59769 - DNA, 600 bp, Chicken  19866894318402_1
ggggccgggtgaggggcatcttggcttcccccgccgcgctgtgaggttggagcctcccagagcatccattttccacaggccgggcgctgatgcttgagcccaggaaccactgatgggacccccttccgcggccccttgtgtcctcggagggaggcgtacagcaccgtgctgggcactcgggcgtcggctcggccctgtattagagattttcagccattaggagcatcgatctggccgctttcgttcgttgccgtaaatcgtagatacccgtgtgatgcttgccccgtcccatcgccattstagtcccrtagacaacctctgcacgtcaggccagaaggcacgtagcatctcttcgtttcagtgcagacaccctccacttacaataggaacagtaggtgaaatgtcacttagaaaagagcaggaagtgccatcccgttgttcttcacatttttcgtgtgcacgaggagttygttgcttgttctttgtgtgcctacgatgtgggatgaagacgagggctgccattgcatttgaataaagtgcccctcttaccccactgtatttaacccttaaactccaggagtagattgtgaccattaaaag

SEQ ID NO: 59770 - DNA, 600 bp, Chicken  19866894318402_2
gtgaggggcatcttggcttcccccgccgcgctgtgaggttggagcctcccagagcatccattttccacaggccgggcgctgatgcttgagcccaggaaccactgatgggacccccttccgcggccccttgtgtcctcggagggaggcgtacagcaccgtgctgggcactcgggcgtcggctcggccctgtattagagattttcagccattaggagcatcgatctggccgctttcgttcgttgccgtaaatcgtagatacccgtgtgatgcttgccccgtcccatcgccattstagtcccrtagacaacctctgcacgtcaggccagaaggcacgtagcatctcttcgtttcagtgcagacaccctccacttacaataggaacagtaggtgaaatgtcacttagaaaagagcaggaagtgccatcccgttgttcttcacatttttcgtgtgcacgaggagttygttgcttgttctttgtgtgcctacgatgtgggatgaagacgagggctgccattgcatttgaataaagtgcccctcttaccccactgtatttaacccttaaactccaggagtagattgtgaccattaaaagaaaaacaa

SEQ ID NO: 59771 - DNA, 600 bp, Chicken  19866894318402_3
gggcactcgggcgtcggctcggccctgtattagagattttcagccattaggagcatcgatctggccgctttcgttcgttgccgtaaatcgtagatacccgtgtgatgcttgccccgtcccatcgccattstagtcccrtagacaacctctgcacgtcaggccagaaggcacgtagcatctcttcgtttcagtgcagacaccctccacttacaataggaacagtaggtgaaatgtcacttagaaaagagcaggaagtgccatcccgttgttcttcacatttttcgtgtgcacgaggagttygttgcttgttctttgtgtgcctacgatgtgggatgaagacgagggctgccattgcatttgaataaagtgcccctcttaccccactgtatttaacccttaaactccaggagtagattgtgaccattaaaagaaaaacaacaacaacaacaataattactctgttataaatcccactcctgacaaatacgggcgtgagagcaaataactacgaggttctgaacaggaaggtcgttcagaagtatcgaatcaccataggtaacaacagccttgaattgtgratgtattgttcttgtaaattaa

SEQ ID NO: 59772 - DNA, 600 bp, Chicken  19866894318402_4
ttttcgtgtgcacgaggagttygttgcttgttctttgtgtgcctacgatgtgggatgaagacgagggctgccattgcatttgaataaagtgcccctcttaccccactgtatttaacccttaaactccaggagtagattgtgaccattaaaagaaaaacaacaacaacaacaataattactctgttataaatcccactcctgacaaatacgggcgtgagagcaaataactacgaggttctgaacaggaaggtcgttcagaagtatcgaatcaccataggtaacaacagccttgaattgtgratgtattgttcttgtaaattaacaaccatcagatgtttggagggctgcgggttgtcagaagatacaaaatattatcgggatcggctttttctataattttgcctacaactttcttaaaaacttcgggtggttcctacaaaaaatgctttaaaacyactgaatttcttacctycccttcctattactgcacttaggcgcaacaaaatgtagtttctcatttacaaccaaatgtgcccacactgctcagggaagcgatgtaaaagaggtgatattacactggaaatttggtgcgggtttggc

SEQ ID NO: 59773 - DNA, 600 bp, Chicken  19866894318402_5
aacaacaacaacaacaataattactctgttataaatcccactcctgacaaatacgggcgtgagagcaaataactacgaggttctgaacaggaaggtcgttcagaagtatcgaatcaccataggtaacaacagccttgaattgtgratgtattgttcttgtaaattaacaaccatcagatgtttggagggctgcgggttgtcagaagatacaaaatattatcgggatcggctttttctataattttgcctacaactttcttaaaaacttcgggtggttcctacaaaaaatgctttaaaacyactgaatttcttacctycccttcctattactgcacttaggcgcaacaaaatgtagtttctcatttacaaccaaatgtgcccacactgctcagggaagcgatgtaaaagaggtgatattacactggaaatttggtgcgggtttggccaataaggatgaacgttgacttgactttcagaaatgccttttttaacagacagctgcaatgctgtctacagtgctgtctactacgtgatctgtattttcgtaggtgaacagacgtgcactgaaattgttctgctttagatacagacctacactgt

SEQ ID NO: 59774 - DNA, 600 bp, Chicken  19866894318402_6
taattactctgttataaatcccactcctgacaaatacgggcgtgagagcaaataactacgaggttctgaacaggaaggtcgttcagaagtatcgaatcaccataggtaacaacagccttgaattgtgratgtattgttcttgtaaattaacaaccatcagatgtttggagggctgcgggttgtcagaagatacaaaatattatcgggatcggctttttctataattttgcctacaactttcttaaaaacttcgggtggttcctacaaaaaatgctttaaaacyactgaatttcttacctycccttcctattactgcacttaggcgcaacaaaatgtagtttctcatttacaaccaaatgtgcccacactgctcagggaagcgatgtaaaagaggtgatattacactggaaatttggtgcgggtttggccaataaggatgaacgttgacttgactttcagaaatgccttttttaacagacagctgcaatgctgtctacagtgctgtctactacgtgatctgtattttcgtaggtgaacagacgtgcactgaaattgttctgctttagatacagacctacactgtgcacgcatacgagcgat

SEQ ID NO: 59775 - DNA, 600 bp, Chicken  19866894318409_1
atgtcttgttatttcatgtctttagaatattcaccagacaaagcaattttcctgtctctgagcagtgctaagctgtcaggctccttttatctgagcaaaaggtagtgcagcacctttcccctatacagtgcttttttgggaagagaaaaatgaaaaggaaaaagaaggaaaaacacaacaacccaacacctccctctccacgttggtcacttagaggcacacagtcttccagagagagcaagaagaaaactgtggctgttcattgaaaaccctcacacctaggagctgcctgtggcaccyagcacagccagcccactgggtaacackatatcaggaggttcatttagctgctggaccaaaatsctatcctgcaaaactcaccctcatttggaatgaagcagcagtggggctgaaattgggcctcagacaggatggggggtgggatgaaggctgggggcagagcaaggagggattacccagagccctctcccacaagcagcaragacactgcctgtgttgtttcgttaattgcagaaacaatgtgctctttcacaggctgcaggtggcttggggcatggcagaaaagggacattatggctt

SEQ ID NO: 59776 - DNA, 600 bp, Chicken  19866894318409_2
tattcaccagacaaagcaattttcctgtctctgagcagtgctaagctgtcaggctccttttatctgagcaaaaggtagtgcagcacctttcccctatacagtgcttttttgggaagagaaaaatgaaaaggaaaaagaaggaaaaacacaacaacccaacacctccctctccacgttggtcacttagaggcacacagtcttccagagagagcaagaagaaaactgtggctgttcattgaaaaccctcacacctaggagctgcctgtggcaccyagcacagccagcccactgggtaacackatatcaggaggttcatttagctgctggaccaaaatsctatcctgcaaaactcaccctcatttggaatgaagcagcagtggggctgaaattgggcctcagacaggatggggggtgggatgaaggctgggggcagagcaaggagggattacccagagccctctcccacaagcagcaragacactgcctgtgttgtttcgttaattgcagaaacaatgtgctctttcacaggctgcaggtggcttggggcatggcagaaaagggacattatggcttttcaccatagcctgcttgaaaggtttg

SEQ ID NO: 59777 - DNA, 600 bp, Chicken  19866894318409_3
agtgctaagctgtcaggctccttttatctgagcaaaaggtagtgcagcacctttcccctatacagtgcttttttgggaagagaaaaatgaaaaggaaaaagaaggaaaaacacaacaacccaacacctccctctccacgttggtcacttagaggcacacagtcttccagagagagcaagaagaaaactgtggctgttcattgaaaaccctcacacctaggagctgcctgtggcaccyagcacagccagcccactgggtaacackatatcaggaggttcatttagctgctggaccaaaatsctatcctgcaaaactcaccctcatttggaatgaagcagcagtggggctgaaattgggcctcagacaggatggggggtgggatgaaggctgggggcagagcaaggagggattacccagagccctctcccacaagcagcaragacactgcctgtgttgtttcgttaattgcagaaacaatgtgctctttcacaggctgcaggtggcttggggcatggcagaaaagggacattatggcttttcaccatagcctgcttgaaaggtttggagcctgatgcacaaaaaagcctttgctgagggtat

SEQ ID NO: 59778 - DNA, 600 bp, Chicken  19866894318409_4
ttggtcacttagaggcacacagtcttccagagagagcaagaagaaaactgtggctgttcattgaaaaccctcacacctaggagctgcctgtggcaccyagcacagccagcccactgggtaacackatatcaggaggttcatttagctgctggaccaaaatsctatcctgcaaaactcaccctcatttggaatgaagcagcagtggggctgaaattgggcctcagacaggatggggggtgggatgaaggctgggggcagagcaaggagggattacccagagccctctcccacaagcagcaragacactgcctgtgttgtttcgttaattgcagaaacaatgtgctctttcacaggctgcaggtggcttggggcatggcagaaaagggacattatggcttttcaccatagcctgcttgaaaggtttggagcctgatgcacaaaaaagcctttgctgagggtatagatgctgcatygggtatcaatgaaagctgcgtagctgctgccatgaatctgatcgccatagaaaatgaatggaaagcattaagagcagcaaagagtattttgagctgcagtgaacagcatccaattcatcagcaaaca

SEQ ID NO: 59779 - DNA, 600 bp, Chicken  19866894318409_5
actcaccctcatttggaatgaagcagcagtggggctgaaattgggcctcagacaggatggggggtgggatgaaggctgggggcagagcaaggagggattacccagagccctctcccacaagcagcaragacactgcctgtgttgtttcgttaattgcagaaacaatgtgctctttcacaggctgcaggtggcttggggcatggcagaaaagggacattatggcttttcaccatagcctgcttgaaaggtttggagcctgatgcacaaaaaagcctttgctgagggtatagatgctgcatygggtatcaatgaaagctgcgtagctgctgccatgaatctgatcgccatagaaaatgaatggaaagcattaagagcagcaaagagtattttgagctgcagtgaacagcatccaattcatcagcaaacagcaggcctgggtcagcggaataatagctttgtttgaaagaagtgtggaagagtctgcagaggcagatgggcaaagaaggagccagcgatgagagcacttctggatcctagcaaarggccagagtgactgtgagcacccaagggtgctgctctgcatgtgaagagattgtgagg

SEQ ID NO: 59780 - DNA, 477 bp, Chicken  19866894318409_6
gaaaggtttggagcctgatgcacaaaaaagcctttgctgagggtatagatgctgcatygggtatcaatgaaagctgcgtagctgctgccatgaatctgatcgccatagaaaatgaatggaaagcattaagagcagcaaagagtattttgagctgcagtgaacagcatccaattcatcagcaaacagcaggcctgggtcagcggaataatagctttgtttgaaagaagtgtggaagagtctgcagaggcagatgggcaaagaaggagccagcgatgagagcacttctggatcctagcaaarggccagagtgactgtgagcacccaagggtgctgctctgcatgtgaagagattgtgagggccttctgcagccctaggcaagggagacacagaggctgggatcccaaaagaagcgtggatgcacgggatcaaagcctgctccccggcctccaccacagaggcaccactcccagcacaac

SEQ ID NO: 59781 - DNA, 599 bp, Chicken  19866894318411_1
  misc_feature (1)..(170): n is any nucleotide
nnnnnnnnnnnnnnnnnnnnnnnnnnnnnnnnnnnnnnnnnnnnnnnnnnnnnnnnnnnnnnnnnnnnnnnnnnnnnnnnnnnnnnnnnnnnnnnnnnnnnnnnnnnnnnnnnnnnnnnnnnnnnnnnnnnnnnnnnnnnnnnnnnnnnnnnnnnnnnnnnnnnnnnnnnaagatagattatgaatgcaattcagaccaattaatcagttgaacattatactgaaacttagccttgtctatcgtggccctgacttttgagcagttaggattgaccattccctcccctgtttggattgatwaaatagaaataattaacttagtgaactaatttaccttactcaagggcagctgatgttaaggagatggtagggttgcatatgtgagtgtcagggagaagagtggaaggaatgagatcatcagctagtgggttgttggactgacctaatttttgtgatattgtcttgataactgtgctgtcaccagcatgacaagaaacttagcattgattccaataattccatcaacattacaactgaaataacagtaaaattaggccccacttggctttctgaccaattgtatgtctgtgatggagcag

SEQ ID NO: 59782 - DNA, 600 bp, Chicken  19866894318411_2
ttgataactgtgctgtcaccagcatgacaagaaacttagcattgattccaataattccatcaacattacaactgaaataacagtaaaattaggccccacttggctttctgaccaattgtatgtctgtgatggagcaggaattgaatatattctgcaaaactggtgtactaatgagtcactcctaacttacacattttttcaggtattaaggtacactaaattgtaaacagttccgggagaactttatttgttcttgctttactgctgtgtttgtctaaagtaaaaatattgtataacaayataatttcagtaaaaatgcttactcaggacttatacacccaaagtatacattttactttgttgtcacaagggtttatgacatttaatttctagccaatcattaacatgtttctattctgtatttacatgcatacggtcagttaaaatactacatactatcatgggtaaaatacattatacaataacaagcagtttctatatcctggaaattttatctgcacaaatgtgagtatgtgtgcatattcacacagtaatggaaacaaaggactagaaggatattagtgatttagtgaaaaccca

SEQ ID NO: 59783 - DNA, 600 bp, Chicken  19866894318412_1
tatttagctgcttctttaaaacctgtacattgatccagtatttatctctccttatctttgaaagctactatgaaatctgaatcttccttcccgcaggttaaattcatgtcttatttttctgactatcgtgccacaggaaaaaaagttgtattttcctctgcaacagcttacaaatcaccaaagactgttactacgcttttaaaaaacacattatcatagagtcatagaatggcctgggttgaaaaggaccacaatgatcatctagtttcaacccctctgctatgtgcagggttgctaacractagatcaagctgctcagagccacatccagcctggccttgaatgcccccagggatggggcatccacaacctccttgggcaacctgttccagtgtgtcaccaccctctgtgtgaaaaacttcttcctaataatggacgcagtactcctgatggggtctcacaagagctgagtatagggggacaataacctctttctcccttctggccaccccttttttaatgcagctcagaagacagttggccttctgggctgcaagcgcacactgctggctcatgtccagcttctcatcgaccaggacc

SEQ ID NO: 59784 - DNA, 600 bp, Chicken  19866894318414_1
cgcagggctgctctcaaagagatcttcccccagtctgtatcagtacctgggattgccccgacccaattgcagcaccctgcacttggccttagtgaacctcattaggttctcatgggcccacttctgcagcctgtccaggtccctctggatggcttcccttccctccaacgtattgacagcacagctcagcttggtgtcatccgcagacttgctgagtgttgctgaattttgctgtgtgtgaaacaaaatgtggggaaatccctgtcccgctgtattcaggcctccagattttgaagtgcwgtgtcatcgatcctcaggtaatcagtgccaaagccttatggtgtgcaggagatgctgctgtggcttgaggcactgagaggtgcctctggagcctcttgttgggcttttctcagtgcagcagaagagaacccccttctcttcctgttcttattgactttcctcgctcagagtgcacacacgtgtagtccccatcacaacatgcacacttgggtgtgtctttggctgtttcccacccagcactgctctgccttcagcccctggcagtggtctgcagtgggttgggctctctctcagtttttt

SEQ ID NO: 59785 - DNA, 600 bp, Chicken  19866894318414_2
tgttgggcttttctcagtgcagcagaagagaacccccttctcttcctgttcttattgactttcctcgctcagagtgcacacacgtgtagtccccatcacaacatgcacacttgggtgtgtctttggctgtttcccacccagcactgctctgccttcagcccctggcagtggtctgcagtgggttgggctctctctcagtttttttgccaatacaaatgtgtttctatttgcttgattacatacagctgagagctacagtgggcacacctggttcatatttctcagtgccagattagtttytccattgttttggcaatgtggttggagttttaccagtgctttctgtgctgttcaggtgtctccctgggactatcaatatctacagaataaaactcagtccaagtagtggacatgtayaaagcacagcctgagcaaacagctgtttgtactgcagtgggtgcaggaatggagactatttccttcccagtttgcatctggttcatgccatgtttctgtactcaaaccttgggaaggtgaaatttctgccaagtgccacatcccatgcagcagtgcaatggatttgaggctttgctatttaga

SEQ ID NO: 59786 - DNA, 600 bp, Chicken  19866894318414_3
tgtctttggctgtttcccacccagcactgctctgccttcagcccctggcagtggtctgcagtgggttgggctctctctcagtttttttgccaatacaaatgtgtttctatttgcttgattacatacagctgagagctacagtgggcacacctggttcatatttctcagtgccagattagtttytccattgttttggcaatgtggttggagttttaccagtgctttctgtgctgttcaggtgtctccctgggactatcaatatctacagaataaaactcagtccaagtagtggacatgtayaaagcacagcctgagcaaacagctgtttgtactgcagtgggtgcaggaatggagactatttccttcccagtttgcatctggttcatgccatgtttctgtactcaaaccttgggaaggtgaaatttctgccaagtgccacatcccatgcagcagtgcaatggatttgaggctttgctatttagaaagcatagaattcagaggctgcaggtagaagagttcaaaaagattaacttaaaacaactgaaggggctgtcctctgctttgagctccagggtccagtctgtggctgtggcagagcca

SEQ ID NO: 59787 - DNA, 600 bp, Chicken  19866894318415_1
aattcagattccagaggtgagtggtgataccttcagacggtaaaatgttccgctctttgctgtttctatttgcataagataaagttggaagaataaatatgaaaaacattattttgagagtgctgtttctaccttaaaatatatgtaggttgttgggttgtttttttgggtttttttttttttttcatttgaagaacacattgtgagcaaacatatggtcctgtttcctgtcataatttgttcaaacagttttaataaaattctagtaatagtagcatctttattttaaacagctgtgargggaattcaccctttgacagctggaaatgtaggcagattttgaagatgygagcttgcttttgtcaatgctgtagtttatagaaagttagaaaaataataaattgaagcagattggtatttcatgcaaacattttgtaacttaattaagtcttctgtattgcaccctttgataaaaaaaaaaaaaataacgtgaacctaaagtatgtactgaaggatctatatttggaaagctgagaattataaaagatttttcttttgtctctgcctttaaagagggcagcagttccagatccraattga

SEQ ID NO: 59788 - DNA, 600 bp, Chicken  19866894318415_2
ccgctctttgctgtttctatttgcataagataaagttggaagaataaatatgaaaaacattattttgagagtgctgtttctaccttaaaatatatgtaggttgttgggttgtttttttgggtttttttttttttttcatttgaagaacacattgtgagcaaacatatggtcctgtttcctgtcataatttgttcaaacagttttaataaaattctagtaatagtagcatctttattttaaacagctgtgargggaattcaccctttgacagctggaaatgtaggcagattttgaagatgygagcttgcttttgtcaatgctgtagtttatagaaagttagaaaaataataaattgaagcagattggtatttcatgcaaacattttgtaacttaattaagtcttctgtattgcaccctttgataaaaaaaaaaaaaataacgtgaacctaaagtatgtactgaaggatctatatttggaaagctgagaattataaaagatttttcttttgtctctgcctttaaagagggcagcagttccagatccraattgagctttgttacctgaactgaagcagttgctgagccatctgctgagagcct

SEQ ID NO: 59789 - DNA, 557 bp, Chicken  19866894318415_3
tgtgargggaattcaccctttgacagctggaaatgtaggcagattttgaagatgygagcttgcttttgtcaatgctgtagtttatagaaagttagaaaaataataaattgaagcagattggtatttcatgcaaacattttgtaacttaattaagtcttctgtattgcaccctttgataaaaaaaaaaaaaataacgtgaacctaaagtatgtactgaaggatctatatttggaaagctgagaattataaaagatttttcttttgtctctgcctttaaagagggcagcagttccagatccraattgagctttgttacctgaactgaagcagttgctgagccatctgctgagagcctgttgtgttatcagtgtgcagacaaaggagtaatcgtcccttctcaagagagggaagaagcagccgagaacaagcacaagagtgcaccgggggttagcagcactgtgtaaaggctgcagctgtaatttcgtgtctttggagagggcagaggaagagaggaaatggtcagatgtgaaacaaaatcagcacgaggaaagtgtcaa

SEQ ID NO: 59790 - DNA, 516 bp, Chicken  19866894318416_1
ggcgagacggggcgatgttggatgaggcgggacagagtggagtgaggcggggcaaggcgaggcaaggcgaggcggggcaagacagggcggggagaggcatggcagggtgaggcagggcgaggctaggcgaggcaaggcgatgaagtgcaaaacaggcggggcaaggcgaagcgaggcggggcggggcgagacgaggtggggtgaggcggggcgaggcggggtggggctatgcattgcgaggtgggagaggcggggcgaggtgtggtgaggcatggtgaggcgaggcgtggcaggtggggraggccgggcgaggcggggcaaggcggggtggggagaggcgtggcagcacgaggcagggcaaggcaagatgaggcgaggggatgcaaggcggggctaggcggggcaaggcgatgcgtggtggggcgggtcaagacgaggcggggcgaggcggggtgaggcaaggtgtggcaggcgaggtggggccaggcagggcgaggctaggtggggtggggtgag

SEQ ID NO: 59791 - DNA, 600 bp, Chicken  19866894318423_1
acagtgataattttgctttatcagtaattctgtggtttgagtatacaagtcctgacagagctgctgaaggaaattttctcatatacttttgcaatatctgcttcattttatgacatttttttttcaagatgataaagattaataatatctaaaagattttgtaattcactgttgaaaaacttttgctgaattaaggttgctcaaagaaatgaagttccacttccacatttgtggtttacttcctgtaaagttagcagtaactatagaactaattatcattcattgtcagtagcttttcartttctcaacatatggacagcttttgaaatttcatctggaatgcagcattttggttacattttaattcttgtgttgtcttgtactggtgctttgctattaatagcaatgaaccataaggagaatgagctgttaagaatatattcctttgtttttcattgccattatggcaaagattttacacaattcaaattaacttttgagaacaggcttttctgtcttacaagtgtataaatagttgttaatgtagagaggaaagcatgaatggatttaggaaaatgtaattgattatagaagagtgta

SEQ ID NO: 59792 - DNA, 600 bp, Chicken  19866894318425_1
tggtggtgggtgcctgaaactggggcacatcaactttgaaaccactttgtccctatcctctcttcctggcttccctgatgtgatctcactctgctcctacagccacagttgctgcttaggcaacaggggattagtctgaccagtcttcagtggattggcaaaagtgtgctgggcttcatatcccagtgagtgcagtgagttttataaagatctgctctgattttttttaaattgttttgcagttctttggtgtgactcacagtgcggccccacaaacagttattctgctgttcccggagrcatggcattgcagtacaggaggagctgccaggggatggggatatcatcagccagcattgccaccaaaggctttgtgactttgtatcctgtaataacagtggccagacagacaagttcgttcagttgtaatctcaggagtggagaggtggtggtgcaaccaagttgtgatgtaaagcctggatctcaagctttcactgaggaatgaggccatgggagcaggtgagactaggatgaggaaagggctgaaatactctgtgaaatcctttctcgcatggagctgggaccctgtcttcactcgaa

SEQ ID NO: 59793 - DNA, 599 bp, Chicken  19866894318433_1
  misc_feature (1)..(54): n is any nucleotide
nnnnnnnnnnnnnnnnnnnnnnnnnnnnnnnnnnnnnnnnnnnnnnnnnnnnnntagtgtgagctgggattttcttgtattggcagctttatatggtatagataagagtacttatggtatagatactatctacaccatggcataagtgaatttgtgaatatcttaggaattatagcagtgtacatctacacagtaagtgcacttagcaaaaaaatagcaaagctttggaggatgttctgtctggcaccatcctgccttctctctctatagaaatgaaagaaatttatgattaaaaacatktgtaattaaaagctagagagagaaaaatattagtggcaaacatttgctttctcttcacagtcatttttgctttctgttacatccttacaccaaaaccgatgggagtacagtgacctaaaccaaggactgcacttaccctttgatatgacaaccaaatgcagatactgtggttatgaagcaggaaaataatgtttcaggctcagtgttaccactgattttgcagaaaactgagggggtaaggacgcaaaatgtattaagagaggrgatacgcttaagattttttatttttttaatgtcag

SEQ ID NO: 59794 - DNA, 600 bp, Chicken  19866894318433_2
ctatagaaatgaaagaaatttatgattaaaaacatktgtaattaaaagctagagagagaaaaatattagtggcaaacatttgctttctcttcacagtcatttttgctttctgttacatccttacaccaaaaccgatgggagtacagtgacctaaaccaaggactgcacttaccctttgatatgacaaccaaatgcagatactgtggttatgaagcaggaaaataatgtttcaggctcagtgttaccactgattttgcagaaaactgagggggtaaggacgcaaaatgtattaagagaggrgatacgcttaagattttttatttttttaatgtcaggaacagtttagagctgtgagtgccttaggccatgaagtaatccttgtgcccgtaatgaaaagactttgtcaaaataaggcatgtcacttgacttaaaaggaacaggagccttactcacaggcacaatgtttaacggttaaggtccaaattctgttcccattcagatcagtggcagactttgccatcaacatgaatagcaataggaacaaaatccttcaggccatattttcagtgccagcttctgaagcttaacggaacatttggc

SEQ ID NO: 59795 - DNA, 600 bp, Chicken  19866894318441_1
ctgcaaaatgctgtttacataccttagtaaattccattccacagaggtcgtgatacctcattttattttatcatatgtagcttctcaagctgggaaaattaggatccaaatacatctcagattttatgtgtagaatttgtcattccactccatttctattaatttaactaggtgccatgcttgcaaacagaatgagccaataggttccttgtaggtattttgatactacctcgggaatcagatgatgttatttgacagcctatgatgtctcaccactatcttactttttcacagccaaargaaaataaaattgttgtctttttctaaattcagatcatgtattccaaatcacataatttgcaatttggaaaatacacatttccataaactgtgtaggtgagacaatttgtagagtcatcctacaaagaacatgatcttgtatatgttgaatgccaggcagtcttcactttcttacattacttccccttccccaaaactttattagtaagacaaagaggtatctaaaattagtttcacttttatatcatctgaacattaaaaataaaattagttgtaagatcagttgcaagaaagttcaca

SEQ ID NO: 59796 - DNA, 600 bp, Chicken  19866894318447_1
agcagtattacagtttatctgaggaaaaatgcaaagagttactgcaagcaataaaaataaaattgcttataaggatgttaaatattcctcacaaatgttgattaatcccacagatatagcagatgagtcagaggaacatacaaaatgtacaagtaattgtatcctgttatctgatcctctaacccttggtagtaaataactgcaaggaatgctttgatcatctcaaacacttctttaaaaatgtgcaatggagcaattttgtaagtcacaatgtacagcaaagtacaaatcaataaccaraatgacagaggaatatcctgtacagggaacaacagttgaaaacaagggctataacatctcctcaatggcttaaataataaagaccattaagcgacctctaagttaaacattcatttaacaactctttcaatccaagagaactgaaacagatcacagattcatccttggaaatcttaagttgttttaggttactcaggttaagtcctgtgaagtaaacatgacacactacggacactgaaacaacgagcgcgtctccttgtctccattacctccaagcccccagaactacattaccattca

SEQ ID NO: 59797 - DNA, 599 bp, Chicken  19866894318448_1
  misc_feature (1)..(136): n is any nucleotide
nnnnnnnnnnnnnnnnnnnnnnnnnnnnnnnnnnnnnnnnnnnnnnnnnnnnnnnnnnnnnnnnnnnnnnnnnnnnnnnnnnnnnnnnnnnnnnnnnnnnnnnnnnnnnnnnnnnnnnnnnnnnnnnnnnnnnnnnctcatcaagaaacactgctgttgtgacagaatcattttttcccatgtatgttgaaaaaaatcctgcacacaggtatacctcctgaacagagggctaacagatttattaacttgaactacatgtcactgtcacagctaccaagagaaaaaaagaataataataawaaaacaacaaacactcataggtcttcatttctggcactttaattactaaattactaaaaggcagcttaccatggtatctgaagcctcagcttgcatatcagtgtttagcaatgtgctctcacctatagaaccagatcccacagctgaatctatagtccaaacaccatcatcctcattttctctagcctgaaatatttcagtggcataaataaaaagctatataaatggagcagtaagaatgaattatggaaggtactacatctcataaaccaacacccccagcagcaccatcaaaacag

SEQ ID NO: 59798 - DNA, 600 bp, Chicken  19866894318448_2
cttcatttctggcactttaattactaaattactaaaaggcagcttaccatggtatctgaagcctcagcttgcatatcagtgtttagcaatgtgctctcacctatagaaccagatcccacagctgaatctatagtccaaacaccatcatcctcattttctctagcctgaaatatttcagtggcataaataaaaagctatataaatggagcagtaagaatgaattatggaaggtactacatctcataaaccaacacccccagcagcaccatcaaaacagcaatagtcaacttctttaaaaawaaataaataaattgaagcttacagtgcagaaacaaatatattatgttctcaaacttacaagcatcttttgcaaaaatttcagataggatttctcytgctctttaaggtgatctataaggtgtgataaacgctcaacattggccgatctttcatttttctctacaagatcatcccgcatgtagctggccttagcaatatagtcgcgaatttgaactagtctgctgacaatctgtaaagacactgcaattactgaatgtgttcagcaatagctataaggtatttaacgcacaaaacatgtga

SEQ ID NO: 59799 - DNA, 531 bp, Chicken  19866894318448_3
ctcacctatagaaccagatcccacagctgaatctatagtccaaacaccatcatcctcattttctctagcctgaaatatttcagtggcataaataaaaagctatataaatggagcagtaagaatgaattatggaaggtactacatctcataaaccaacacccccagcagcaccatcaaaacagcaatagtcaacttctttaaaaawaaataaataaattgaagcttacagtgcagaaacaaatatattatgttctcaaacttacaagcatcttttgcaaaaatttcagataggatttctcytgctctttaaggtgatctataaggtgtgataaacgctcaacattggccgatctttcatttttctctacaagatcatcccgcatgtagctggccttagcaatatagtcgcgaatttgaactagtctgctgacaatctgtaaagacactgcaattactgaatgtgttcagcaatagctataaggtatttaacgcacaaaacatgtgaaagcaacagcgaagtagcaataataa

SEQ ID NO: 59800 - DNA, 600 bp, Chicken  19866894318449_1
tatgtatataacatgtgatatagcatgtgataactttctgcctatcagacctcacttcaacactcattcatgcacttgcaaaaccaggagctttgccgcagcttaggcaggaatgcaagtgctctgacaagtctgtgctgcacagaaaggttagaaaagcaggatgaagcattcataaaggtttaggagctgtagatcagttataactttaagtcataagaattacaagttgaagcaaaactaaataaaaggggagaactagcctcttcagacatggagaaggctgaagtgcttaatgamttctttgctttagtcttcactctcagccaggtttcccacacctctcatgcctgtgtacatctgaacaggggtttggagagcaaaatccctcccagtgtaagagtagagcaagtccaaaaccactttatgaggctggctgcataaaagtctatgtggccagaaaatatccattccaggaatggactgatgtcattgaaaagcagttctccatcatatttgaaaaatcatggctgccaagcaaagtcctcagtgactcccatattaaagaaagggagaaaggaagacttagggaactacagg

SEQ ID NO: 59801 - DNA, 600 bp, Chicken  19866894318452_1
agatgaataataaacttcactacacacaggttacagacccaccatgctgatgcaaatatcagtctaaggcttgctgcagatgtatgaagccacttagtactgtacctgtgattagttatgctgttcatctaggtaagtcttctatccccagtcacgtataattctggtcagttattttccttaataactaccaaatattatatacccattaactccaccagtattcaacacaagtcagatagaagtaaatgatgcagcagctccaacagcaaagttacttctgaagtcattgatagcctrtgtggtcttccttatgctttaggtgtacaaacgagagtcacagcacacaacrtgaccatttgttcagcaaagaggcttctgagtggcacatgcatgcagaaattttctatcaaactgcctcctgcattctgctgaaatagctattattcaagagggaaaacttcatctcagtgtgttgctaatgacctgatacaacacaaggactgacaagtcaagtaatcaggacagccaaaactgacaatactaaaacctggctctgtactcatcagggagaaaaaataacacagactatttaaaaca

SEQ ID NO: 59802 - DNA, 600 bp, Chicken  19866894318452_2
caaatatcagtctaaggcttgctgcagatgtatgaagccacttagtactgtacctgtgattagttatgctgttcatctaggtaagtcttctatccccagtcacgtataattctggtcagttattttccttaataactaccaaatattatatacccattaactccaccagtattcaacacaagtcagatagaagtaaatgatgcagcagctccaacagcaaagttacttctgaagtcattgatagcctrtgtggtcttccttatgctttaggtgtacaaacgagagtcacagcacacaacrtgaccatttgttcagcaaagaggcttctgagtggcacatgcatgcagaaattttctatcaaactgcctcctgcattctgctgaaatagctattattcaagagggaaaacttcatctcagtgtgttgctaatgacctgatacaacacaaggactgacaagtcaagtaatcaggacagccaaaactgacaatactaaaacctggctctgtactcatcagggagaaaaaataacacagactatttaaaacatatacacacagcccatcaactccagtacagcaagttgttaagtgtcgggctg

SEQ ID NO: 59803 - DNA, 600 bp, Chicken  19866894318452_3
ttacttctgaagtcattgatagcctrtgtggtcttccttatgctttaggtgtacaaacgagagtcacagcacacaacrtgaccatttgttcagcaaagaggcttctgagtggcacatgcatgcagaaattttctatcaaactgcctcctgcattctgctgaaatagctattattcaagagggaaaacttcatctcagtgtgttgctaatgacctgatacaacacaaggactgacaagtcaagtaatcaggacagccaaaactgacaatactaaaacctggctctgtactcatcagggagraaaaataacacagactatttaaaacatatacacacagcccatcaactccagtacagcaagttgttaagtgtcgggctggtgatgtttcatccttcaggaatagcatcaggtcttcggtacttgcccagatcggtttcagcaagtagcaagtcagctactctgaatggagggcagagcaaccgaaagaaaactatctgcactgcagcagacaaatgcaattgctactgtatgaatcacaccagaaggatagtttcacaagagaagaaaaaacaacaaatatagaaaatgttagctttaatt

SEQ ID NO: 59804 - DNA, 600 bp, Chicken  19866894318461_1
ttcttgcttctgttgtcctaaccattaaagcatatgagtataataaaataatatctttgggggttaatattcactacggaaacatcattgcttcacaacttgagagtagaaaacatattgaaactacatgatatttaaatgccagctcttcaaattaaatttggacttattaataaataaaaggggaaaaaatcaaacagtgcaaaaatgtttgcttaggcttctctgcagggagcagatgtataatgtgagagcaaatatggtcgagtggatgggacaaaggctgggctaggaaaatakgtgtttaagtatgctgtgagctctttctatgttttttgtggaattcctttatatctgactacccttgaagatcgttagatgagagcctagccactctgastactgctctcagttttctccaggtggcatgtcactgtcatgggcacaagtgacaaggttaatgtgggggctgcagtggtgctcagtggacagaatgtaatttgcagaaaaataaggaagtctgagacttggaagttgcatggatagggtgtccgttttaatttttcttaaatcatttgccttcctttttctcagtataca

SEQ ID NO: 59805 - DNA, 600 bp, Chicken  19866894318461_2
tatgagtataataaaataatatctttgggggttaatattcactacggaaacatcattgcttcacaacttgagagtagaaaacatattgaaactacatgatatttaaatgccagctcttcaaattaaatttggacttattaataaataaaaggggaaaaaatcaaacagtgcaaaaatgtttgcttaggcttctctgcagggagcagatgtataatgtgagagcaaatatggtcgagtggatgggacaaaggctgggctaggaaaatakgtgtttaagtatgctgtgagctctttctatgktttttgtggaattcctttatatctgactacccttgaagatcgttagatgagagcctagccactctgastactgctctcagttttctccaggtggcatgtcactgtcatgggcacaagtgacaaggttaatgtgggggctgcagtggtgctcagtggacagaatgtaatttgcagaaaaataaggaagtctgagacttggaagttgcatggatagggtgtccgttttaatttttcttaaatcatttgccttcctttttctcagtatacaaatcaatgatcagatgtgtcctggttagtaat

SEQ ID NO: 59806 - DNA, 600 bp, Chicken  19866894318461_3
tgagagtagaaaacatattgaaactacatgatatttaaatgccagctcttcaaattaaatttggacttattaataaataaaaggggaaaaaatcaaacagtgcaaaaatgtttgcttaggcttctctgcagggagcagatgtataatgtgagagcaaatatggtcgagtggatgggacaaaggctgggctaggaaaatakgtgtttaagtatgctgtgagctctttctatgttttttgtggaattcctttatatctgactacccttgaagatcgttagatgagagcctagccactctgastactgctctcagttttctccaggtggcatgtcactgtcatgggcacaagtgacaaggttaatgtgggggctgcagtggtgctcagtggacagaatgtaatttgcagaaaaataaggaagtctgagacttggaagttgcatggatagggtgtccgttttaatttttcttaaatcatttgccttcctttttctcagtatacaaatcaatgatcagatgtgtcctggttagtaataaattaagtaaaattgtaggaattgaggtcattctgcctggaaaataactctatagaagagacctgag

SEQ ID NO: 59807 - DNA, 599 bp, Chicken  19866894318463_1
  misc_feature (1)..(80): n is any nucleotide
nnnnnnnnnnnnnnnnnnnnnnnnnnnnnnnnnnnnnnnnnnnnnnnnnnnnnnnnnnnnnnnnnnnnnnnnnnnnnnnnaataaagaaacttcggttgggagtatgatattgaaaaagataggtggacattctgttacaaatattttatttatagggtatttcacaggggaaaagaaaaatatgagacattgctttagtcaggaactgatgttaacagtagcgttgttcaagagaaggaaggaatgagagttaaagaaaaaaataaaatgaagaattttattttttgttggggaaaaakgtgttacttggaggaaaaagctgtaagaagaggaatcagcctcagaatgatgggcttcaggggccttctgcacacacaggcagccaggaaggatttgcaggcatgtctgcagagggagaggaagcttctatagcagctcagccacctctgatagtccgaaactagtgcatgtgcaagtgcttggtgcattaattaaatacagcaggttattcacctgtaacacactgatcatagttccatccttcagtggaggatgaagctgaggtcctacttgcttctttgactctgtattgatgatg

SEQ ID NO: 59808 - DNA, 600 bp, Chicken  19866894318467_1
ttttaatattagtacgtgactgagatgaagaaacacaataggatgttaggctatcccacttatatttccacttctctgacaagtccagtaagaaggactagaagtaatcagagctgaggagatgacagaagcacctgacaaaaactacgcaaacctcctggcataacctgcccgtgtccctcagccccagctgacagctgtccttgccattccaggccgaactccctgtactgctctgctgctgcacccagatcctgacacccagaccttccctctcatggtacagatggcatctgacayggtttcttttatccccttaagaggacttggagaaaagcactgacaactcctgcttgctccccacaactctcccatgcagcaggagaggatgacagcagtcatctgacccatccaacaccagtggaagggcgtaaggagggacagcaggactgcctcagtgcagcccagtcaatgatgtggatgagcagtactcagttgcacacttgtactgccaagatctgtaggtgccacgggagacttacccctcaaattgttctgtgtatgcaaaacttgggagaagtacattgctaagagcggagg

SEQ ID NO: 59809 - DNA, 600 bp, Chicken  19866894318473_1
ctggagcatttgtctccaccaatcacccaggaagtcatctgaggaagcagaaatgatggcaggagacataatactattttcagactcactagtagccccttgaccagaggcaatgagccacacattcctttggagctcagcagatacctggagggatgtaatcaagccccttctacctgaagaaatgacaagtatgcagggatgcaaagtgctgtcaccacccatttgcagacatctcagcataggagcaaagttcttccttgtgtctgtttggggcacctccatcttcacaggtctccrtcctgttgcccaggagaatcaaaaagcaacggatcggcacatcctcctagaagcacggagtctgcccacaagcaatgagcgccaagctgagcaatggcgctacwaggcaggaccatggacagcagttagcatacttaccatgccctttcttttcaaacatccatcctgaaaaccacagaatacattacatggcaagtccctcattagtcctgcacgtgagaacggactcagccttatgctcagcaggtggctgagccagggaatacatcctacatagttgtcctctctcataacaagtga

SEQ ID NO: 59810 - DNA, 600 bp, Chicken  19866894318473_2
cagaggcaatgagccacacattcctttggagctcagcagatacctggagggatgtaatcaagccccttctacctgaagaaatgacaagtatgcagggatgcaaagtgctgtcaccacccatttgcagacatctcagcataggagcaaagttcttccttgtgtctgtttggggcacctccatcttcacaggtctccrtcctgttgcccaggagaatcaaaaagcaacggatcggcacatcctcctagaagcacggagtctgcccacaagcaatgagcgccaagctgagcaatggcgctacwaggcaggaccatggacagcagttagcatacttaccatgccctttcttttcaaacatccatcctgaaaaccacagaatacattacatggcaagtccctcattagtcctgcacgtgagaacggactcagccttatgctcagcaggtggctgagccagggaatacatcctacatagttgtcctctctcataacaagtgacagctctgtttgcatcagccgtggcactcagcagccttttcaccatgtgacaggctctcagaagggaccatgtagtaagaagcacagatttggcttctcctgcc

SEQ ID NO: 59811 - DNA, 600 bp, Chicken  19866894318479_1
gctgttccagctttgggggagaagggtaattgatttactgggaaccccgaacaccccaacagctatcaaaaccaacaacctacagttccttccctcttcacttgaaagatgaagctgacttggtatcttcatatgtatggctgctgtcaagtttcaaaactcagattattatggaattttcaaaattgtgcaaggatttttatgaagtctttagcaagaaccgttgggaagaaaacgcatataaaagcctgttcatcctgctcatcgctgacttaatggatgtttcacagtagttacggraagagatttaaaatactgtttgcatgtaatcattttagacctccagcactactgatgtgtctaagggaaaagtcagaatgtaaaacatggcaatgacaatgtgctgtaccaactgtgtgccaggttctttgcatgatcaatagctgaaagatggaagctgtcttctgtacagagctaaaagagtgagagtggtttgactagttcaagggttagtagacctgcaatctcaggagtcacagtcctcctaaagccaggctaagtggacagaaaggcttaacagctggatggttataggctcct

SEQ ID NO: 59812 - DNA, 599 bp, Chicken  19866894318486_1
  misc_feature (1)..(12): n is any nucleotide
nnnnnnnnnnnnaaatggactgtgtgtcattgggcatcttacacgagaggcacttaaatctgtcctgaaagcctgggcagaaaagaaggtgctgaatttgtaggcaggtaacagttcttctggctgctgaatccagctgcctcctcgttttctttgatccacttcagggctcacatatggaaaagcatatgcaagcctgctggtttagctgggctggtcctatctttccctaccaggaaaaatgaggtaatatgctgagaaagtaaggtgataacacagctgtacatttttgtgatgacrggctcttcgtgccctcaggacaccaccgcctctcacactctcctgtcctgttggaatggattttctggctttgatagtgcgtttccctgactgtactctaacagacgctatttgcagtgagattcctcccagtctgcaggagctaaggcacrgtttgaagctaacttgggaagaatggaaaatgaggccagaaatccaarctacttcccttgtatttctgctgccagggctggcctgcagcagccatgagccctcaggctgtttctccagaggacagtggccagacttctttccaacag

SEQ ID NO: 59813 - DNA, 600 bp, Chicken  19866894318486_2
tttgatccacttcagggctcacatatggaaaagcatatgcaagcctgctggtttagctgggctggtcctatctttccctaccaggaaaaatgaggtaatatgctgagaaagtaaggtgataacacagctgtacatttttgtgatgacrggctcttcgtgccctcaggacaccaccgcctctcacactctcctgtcctgttggaatggattttctggctttgatagtgcgtttccctgactgtactctaacagacgctatttgcagtgagattcctcccagtctgcaggagctaaggcacrgtttgaagctaacttgggaagaatggaaaatgaggccagaaatccaarctacttcccttgtatttctgctgccagggctggcctgcagcagccatgagccctcaggctgtttctccagaggacagtggccagacttctttccaacagtatagcctatgtccttgcttgtactccagcccattgaaacaagagacattgtgttgcccatcatcaattcacttgcaacccatccagcccttggagatagctttagtgcttctgtactcatattgtcccagaatgaatgatcttcttgacaag

SEQ ID NO: 59814 - DNA, 600 bp, Chicken  19866894318486_3
tggtttagctgggctggtcctatctttccctaccaggaaaaatgaggtaatatgctgagaaagtaaggtgataacacagctgtacatttttgtgatgacrggctcttcgtgccctcaggacaccaccgcctctcacactctcctgtcctgttggaatggattttctggctttgatagtgcgtttccctgactgtactctaacagacgctatttgcagtgagattcctcccagtctgcaggagctaaggcacrgtttgaagctaacttgggaagaatggaaaatgaggccagaaatccaarctacttcccttgtatttctgctgccagggctggcctgcagcagccatgagccctcaggctgtttctccagaggacagtggccagacttctttccaacagtatagcctatgtccttgcttgtactccagcccattgaaacaagagacattgtgttgcccatcatcaattcacttgcaacccatccagcccttggagatagctttagtgcttctgtactcatattgtcccagaatgaatgatcttcttgacaagaccttttgggactccaacaagatgttcttgctcagctacacagcccaa

SEQ ID NO: 59815 - DNA, 600 bp, Chicken  19866894318500_1
gggctgattcttccctggccctgcaggaacgcagaaggcccaggctgctgcacataccttgctgcacgttccctatggagatggggagggggagaagcttgacatttattttcctgtggactcttctgaaagtaggtgatgagcacagtgaccggggggctgaggtcatgcctgtgtgcttacctgtgctgtgctgtgctgtgcagccttcccggtctttgtctacatccatggtggatactggcagtgcttgaggtaagacagacttctgatatgggctcccttgagaagggagctccygggcctcctttacatctyccctctccagagaacaacactaaayccagacttgggtgtcctgggcccaatggccatccccagccagccccatgaggacatctgtcccctggagcttggcagcttcactctcccctccccagtaaggatgcgtcgggtttckcagcccctgcgctgctgtctcagggtgttgctgttgtggccttgggttacgacattgctcccaaaggtaggcagggcccaacaggggtcatgacttcctttggtggctcggtgcccacctggctctgcactttgcccagg

SEQ ID NO: 59816 - DNA, 600 bp, Chicken  19866894318500_2
ccctgcaggaacgcagaaggcccaggctgctgcacataccttgctgcacgttccctatggagatggggagggggagaagcttgacatttattttcctgtggactcttctgaaagtaggtgatgagcacagtgaccggggggctgaggtcatgcctgtgtgcttacctgtgctgtgctgtgctgtgcagccttcccggtctttgtctacatccatggtggatactggcagtgcttgaggtaagacagacttctgatatgggctcccttgagaagggagctccygggcctcctttacatctyccctctccagagaacaacactaaayccagacttgggtgtcctgggcccaatggccatccccagccagccccatgaggacatctgtcccctggagcttggcagcttcactctcccctccccagtaaggatgcgtcgggtttckcagcccctgcgctgctgtctcagggtgttgctgttgtggccttgggttacgacattgctcccaaaggtaggcagggcccaacaggggtcatgacttcctttggtggctcggtgcccacctggctctgcactttgcccaggccacatggatgcgatggt

SEQ ID NO: 59817 - DNA, 600 bp, Chicken  19866894318500_3
gctgctgcacataccttgctgcacgttccctatggagatggggagggggagaagcttgacatttattttcctgtggactcttctgaaagtaggtgatgagcacagtgaccggggggctgaggtcatgcctgtgtgcttacctgtgctgtgctgtgctgtgcagccttcccggtctttgtctacatccatggtggatactggcagtgcttgaggtaagacagacttctgatatgggctcccttgagaagggagctccygggcctcctttacatctyccctctccagagaacaacactaaayccagacttgggtgtcctgggcccaatggccatccccagccagccccatgaggacatctgtcccctggagcttggcagcttcactctcccctccccagtaaggatgcgtcgggtttckcagcccctgcgctgctgtctcagggtgttgctgttgtggccttgggttacgacattgctcccaaaggtaggcagggcccaacaggggtcatgacttcctttggtggctcggtgcccacctggctctgcactttgcccaggccacatggatgcgatggtgctccaggtgcggcgcagccttgcc

SEQ ID NO: 59818 - DNA, 600 bp, Chicken  19866894318500_4
tgaggtcatgcctgtgtgcttacctgtgctgtgctgtgctgtgcagccttcccggtctttgtctacatccatggtggatactggcagtgcttgaggtaagacagacttctgatatgggctcccttgagaagggagctccygggcctcctttacatctyccctctccagagaacaacactaaayccagacttgggtgtcctgggcccaatggccatccccagccagccccatgaggacatctgtcccctggagcttggcagcttcactctcccctccccagtaaggatgcgtcgggtttckcagcccctgcgctgctgtctcagggtgttgctgttgtggccttgggttacgacattgctcccaaaggtaggcagggcccaacaggggtcatgacttcctttggtggctcggtgcccacctggctctgcactttgcccaggccacatggatgcgatggtgctccaggtgcggcgcagccttgccttcctggtgaagcaataccacaggatcaggtgggcagcgcgcagtgctggtgtccctgtcccctgtgccagcagcctctactgcttctgtctggtctttcaggcagaatgtgccctt

SEQ ID NO: 59819 - DNA, 600 bp, Chicken  19866894318505_1
ggcactggaacaggctgcctagggaaatggttgtgtcactgtccctggaggtgttcaagaaacatttagatgttgtactaagggacatggtttagtgggagaatattggtggcaggtggatggttggactgactgatcttggaggtcttttccaaccttggtgattctgtgatctagctgtaggtcttcctgttcattacagaggagttggattggatgacctttaaagatcctttcaaactcaaaagattctatgattctataatttttattgtttttgcaaagcaagggaatgcaaayggaaactgtatttaccccacctgctttcttgatgctctagtcttcattgaagttacacagaacgatgggggccactgcacacttctgttgctctgttgtgctatttaagtttatataagctgaaaatctggaatgcaaaatgttcaccagttgcttttttgatcagagttgtcgtgaagagtttaaacaaagcagatctgttgaaatctgtgagcttcgttcatattcatttgtccttcagaaagtgacatcctagaaatccatgtctttaaaaagagatttggtgcagaagctggcata

SEQ ID NO: 59820 - DNA, 600 bp, Chicken  19866894318510_1
tttcttttagatattttaattaaagtatgcaaatttgattccagcatagcgtttattgatctgtttcagagtagagatctggtgctacagctgaggtaaggatcccactgtgtcaaacactggcaaaaatcaggttttgcttctttcgttgtagctccagttcacattcagtcactttggcagacttttttgcgtgtatcagggttagaaacataatgctttagatacaccacatcaatcaaaaaatagagagagaggaggagatgggttggggcttgcttggatttcctgtatataggratctggaggattttatattacatcttggagtttttctactcatataatcacaagtggaaagtatattcttgcaaacaaacgacactaatatttttctggtcacrgtgtatgccttttttgtttgcttgcttttctgatttctttttttgtttttaataaagtttctgtggctgtgcttgcaaactgtattgagctcaataacactgctatttttgtaactttgtctgaagtattagttttcccagagctcactcacagagggctgtgctttattctcaaaaactagaagacgtagtagat

SEQ ID NO: 59821 - DNA, 600 bp, Chicken  19866894318510_2
ccactgtgtcaaacactggcaaaaatcaggttttgcttctttcgttgtagctccagttcacattcagtcactttggcagacttttttgcgtgtatcagggttagaaacataatgctttagatacaccacatcaatcaaaaaatagagagagaggaggagatgggttggggcttgcttggatttcctgtatataggratctggaggattttatattacatcttggagtttttctactcatataatcacaagtggaaagtatattcttgcaaacaaacgacactaatatttttctggtcacrgtgtatgccttttttgtttgcttgcttttctgatttctttttttgtttttaataaagtttctgtggctgtgcttgcaaactgtattgagctcaataacactgctatttttgtaactttgtctgaagtattagttttcccagagctcactcacagagggctgtgctttattctcaaaaactagaagacgtagtagattcagtcctggccatttttcatgtgaagccttattcaaatggtaattgtaaaaggctttgtggactttgttctccactcaaagaaaaaacttcagctgtggacag

SEQ ID NO: 59822 - DNA, 600 bp, Chicken  19866894318519_1
ggtgggggatttggccacagaattaggcaatccaagcatctagacctctgagctcctcgcatggaaaccagcgttgtgccctgaggacagtggggtgacacggactgccaatgggaactgcctttagcttttgaaactttgcctctgttggagagctgaagtgctgtgcccgctctgctccctgcttacaggagatatctgtgctgctggaaatgtcccacgtgccatcatgggatgagccaaggtggtggtcatgggaagggcacaaagtgctacatgggctcatgggaggtgctttgstcttccttctcgccttcctttggacaccagagatgcccatctctggccttcaagtgctctgattgcttgcagaatgattcaaatactcatttatcctaaaagagacaacagattttcaaggcaaccacctcagtgcgctgcagttcccttccagcaatggctgtacgttctgaacggatccgacccatctccaaaatccagaccaaccttagcaaacaggtttggaaaacatcatcctgattattactactcgctcctccagaggaagctcagaccgaaagccatgtggttatgagatct

SEQ ID NO: 59823 - DNA, 599 bp, Chicken  19866894318522_1
  misc_feature (1)..(7): n is any nucleotide
nnnnnnnattttacccacagtacatatatggagaagagagtgacaacagaattagtgaagttacacagtaacttgtatttaattaaggctagtaaggataagtatggcttttaattatagctgaatagcaacacaagaaaatatagtagtgacaccaatcctgttgttaaggttccaataaagccacctgactttaccaagacttattaaaaactgtcaccagctcaagacaagcattcctggcatttagtttatttctgagctaaggtgaaaatccacttacttgccatctcctgaaayraaagagaacaacaacaaaactgaggaattttctttttcaaaagaaaaccccatatttaagaatctttttattctaatcaggtcagtagtaaaaaaaaattagtgagagaataattgattttcataattgtaactcatggactgtcttttgtaagagcaaacacattaaatgtggcagcgtcatttctttagcagcctcatgtctcccacgagacttcccaatccttctgtccgtagctggcacgacctgttatctcagagtttcttttctaataacagagcttccaaagaggatgagg

SEQ ID NO: 59824 - DNA, 599 bp, Chicken  19866894318522_2
  misc_feature (1)..(6): n is any nucleotide
nnnnnnattttacccacagtacatatatggagaagagagtgacaacagaattagtgaagttacacagtaacttgtatttaattaaggctagtaaggataagtatggcttttaattatagctgaatagcaacacaagaaaatatagtagtgacaccaatcctgttgttaaggttccaataaagccacctgactttaccaagacttattaaaaactgtcaccagctcaagacaagcattcctggcatttagtttatttctgagctaaggtgaaaatccacttacttgccatctcctgaaayraaagagaacaacaacaaaactgaggaattttctttttcaaaagaaaaccccatatttaagaatctttttattctaatcaggtcagtagtaaaaaaaaattagtgagagaataattgattttcataattgtaactcatggactgtcttttgtaagagcaaacacattaaatgtggcagcgtcatttctttagcagcctcatgtctcccacgagacttcccaatccttctgtccgtagctggcacgacctgttatctcagagtttcttttctaataacagagcttccaaagaggatgaggt

SEQ ID NO: 59825 - DNA, 600 bp, Chicken  19866894318525_1
cctcggcgctcacagcgctgcgcatcacgagcacagcttcccattccttgccacttctcggcatggagctcttccaaactctgagagcacgggctgcaatcttggcaggaagggacggcgcagacagaaatcagcgctgtgtcaaaacagggaaataatgcgggagctgatctgtgcacattaatccgccgcagtcaatgaggagacaatttccctggagaaagtcatacattaaaaggaaaaggggaaaaaaaaaagaaaaagaaaagatgaatgtgactttgaaatatcacgagcacmgtttatcttcctcctgccaccgcgggtttttgtcctttatttctttttaagcacaaagagtgccttaaaattcacggtgaatacagcccttctgcctcagatgtgcaaacatgggtgcattactgtgtactaaaaatacaaatacggcaccacctgccctctcagtacccaaccttcacatctttaattaatttaatcaaaaaaaacccacccataattgcttttcagaggcataacctccccattaggctcggagcagacatgggctcctcgcagctcctggttacgccggcagtgcgg

SEQ ID NO: 59826 - DNA, 599 bp, Chicken  19866894318527_1
  misc_feature (1)..(96): n is any nucleotide
nnnnnnnnnnnnnnnnnnnnnnnnnnnnnnnnnnnnnnnnnnnnnnnnnnnnnnnnnnnnnnnnnnnnnnnnnnnnnnnnnnnnnnnnnnnnnnnncacacttagcattaaagattatcttctaacattttcagggcttggagtgtggtcttaatggtgttagtgataagatcatttgataacaatcatgtatgagagcacactgtttctacaactgtctgggtaaacagaagactgagggctgaggtgccataggagaactgctgatgtaatggtatcaatcagtattcgcagcaattyttacttctcttgcactcttagtgcaggagacacacttctccaagcacatgagatttggtctcacgaactgagataggtgttaggactttccctgtttcctgctcacaagttggaagcctaacttgttttctacatcatggcacctggaaactccgaccaaagcagcatcccatggggctacttggtcatcagactcaaatggccttgaaacaggcaagccaagataacrgagtactctttgaagtgcattcaagaagaacaaaatttcttctctttgcttgttaataaataaagcacta

SEQ ID NO: 59827 - DNA, 542 bp, Chicken  19866894318527_2
gaagactgagggctgaggtgccataggagaactgctgatgtaatggtatcaatcagtattcgcagcaattyttacttctcttgcactcttagtgcaggagacacacttctccaagcacatgagatttggtctcacgaactgagataggtgttaggactttccctgtttcctgctcacaagttggaagcctaacttgttttctacatcatggcacctggaaactccgaccaaagcagcatcccatggggctacttggtcatcagactcaaatggccttgaaacaggcaagccaagataacrgagtactctttgaagtgcattcaagaagaacaaaatttcttctctttgcttgttaataaataaagcactatagatgagttgttctcttagcgttagcgctactgttctccaggaatggaaacagttttgacccacctgaacaaaacccacaaacacctacttctcacagtccacacaaggactatctgttcactgaggagagaacgttaagctgacctcttccagtagcagactggacatta

SEQ ID NO: 59828 - DNA, 600 bp, Chicken  19866894318531_1
tgctctcccagcaggcaccttgtttactaaatagaaaaacctggcaagagaatgagccttgggtacatcatcccaggcaaatggggttctcagagtactaagtgctggctttgcctacgctgtgctcagagaagcagcagtgggacatgcttctgcagggggatcaatgccagcaggatgaattgcagggacaggaaggaggggaggggtgaatggcgctcatgcttttccgctgtatgaagctttgccatgttggcctgaagatttgctagtcacccacaggaatttgttttcttaaarctaaaagaaatagactttcataattacatttaaatgtaatgcttaagcactgaagactactcgcactgcccctgctttctctccctttctcctccttgccaaaccaaacctggtgcccacgttctttcccttatgctgaatgcacctttcccccagggcttatgcaaactgcaccgtgacactttttcagcagccagccagccacgcacctgttttcaattaaaatttcttactgtagctcttgctggctcagaaaagtgttttgacaagcgtgaggtttcctgcccctggaaagaacaa

SEQ ID NO: 59829 - DNA, 600 bp, Chicken  19866894318531_2
cataaagacatttctcagcctctgcttcttgtgcttgaatatctgcctaccccagtttgagacaaaatggtatatataatatccttctcagggataatatcaggaacttcagctgagcctggtggggcacaaagctgagctgaggctacaactgccactcacccactgtcctttctgcattgccaagaaagccctcactgaaatgggaggagatctattcatgctttcacactggagaagaaatctgtgaggatggcactttctgtacaatcgcttcttcagttctcagggactcagagsatttctgcctctgctctccttgacctatgtcctgctaaaacattctgtgagttatttatcaggtaaatatgcaaaagagccatccatcccatcaacatacggtgacagtgactgagagctaccctattaattgctgaccccatttctattttggtcacttaacacatcctctaggaaacggatgggatcagtcatgataaatccaatctctgttgccccagataatctgttttcaatctggagtgggtgctgagctgtctgtcctgacagccagctgcacgacagccaaggggctgcagg

SEQ ID NO: 59830 - DNA, 600 bp, Chicken  19866894318535_1
ggagcatgattgctgtaggtactgtcatcataggacagagacaagcatctctcttggggataatcttaattctgtgatgtctttctctctccctaactgttaagtatgcttatgatttcaactgaagtacttctgctaggtatgtaaacttaggtgagatgaaccaggtaataaaaagaatagaaataattgtgtataacaagaataacagcagtaaaatatgtttctcttttatgcaaagctgatcttaaatttcttgatggtccctctgagatattaattttctagttatttcctcamtgtgtcctcaccgtgttcagcagaacaatccatacagctggctgtttttccatgtgttccaacaaaacagtcttctgctagacaaagatttttgaccaaaacatttttcttgtcaaagaacgcccacccattagagttgaaaatgatgagcttagggagakatatatatgcatatttgttayaatatgctttgacagaaatagctcaaactgcgttttgttgtaaatatctcagaggcagaccactcacccagactgtcataggcstagacacctcctcactcatgggttcaaggcttga

SEQ ID NO: 59831 - DNA, 600 bp, Chicken  19866894318535_2
aaccaggtaataaaaagaatagaaataattgtgtataacaagaataacagcagtaaaatatgtttctcttttatgcaaagctgatcttaaatttcttgatggtccctctgagatattaattttctagttatttcctcamtgtgtcctcaccgtgttcagcagaacaatccatacagctggctgtttttccatgtgttccaacaaaacagtcttctgctagacaaagatttttgaccaaaacatttttcttgtcaaagaacgcccacccattagagttgaaaatgatgagcttagggagakatatatatgcatatttgttayaatatgctttgacagaaatagctcaaactgcgttttgttgtaaatatctcagaggcagaccactcacccagactgtcataggcstagacacctcctcactcatgggttcaaggcttgagcctagggctctaaacatgggtccattttttgatttcccagactagcaaaggacagatggaaataagtctcaaattttcactcctgtatagggttccaagactcactgctttagtacaagacagaaacagcttctaagcataagtatttgcttttattgag

SEQ ID NO: 59832 - DNA, 600 bp, Chicken  19866894318535_3
gaaataattgtgtataacaagaataacagcagtaaaatatgtttctcttttatgcaaagctgatcttaaatttcttgatggtccctctgagatattaattttctagttatttcctcamtgtgtcctcaccgtgttcagcagaacaatccatacagctggctgtttttccatgtgttccaacaaaacagtcttctgctagacaaagatttttgaccaaaacatttttcttgtcaaagaacgcccacccattagagttgaaaatgatgagcttagggagakatatatatgcatatttgttayaatatgctttgacagaaatagctcaaactgcgttttgttgtaaatatctcagaggcagaccactcacccagactgtcataggcstagacacctcctcactcatgggttcaaggcttgagcctagggctctaaacatgggtccattttttgatttcccagactagcaaaggacagatggaaataagtctcaaattttcactcctgtatagggttccaagactcactgctttagtacaagacagaaacagcttctaagcataagtatttgcttttattgagagttgaacctaccgcagtatt

SEQ ID NO: 59833 - DNA, 534 bp, Chicken  19866894318535_4
ctctgagatattaattttctagttatttcctcamtgtgtcctcaccgtgttcagcagaacaatccatacagctggctgtttttccatgtgttccaacaaaacagtcttctgctagacaaagatttttgaccaaaacatttttcttgtcaaagaacgcccacccattagagttgaaaatgatgagcttagggagakatatatatgcatatttgttayaatatgctttgacagaaatagctcaaactgcgttttgttgtaaatatctcagaggcagaccactcacccagactgtcataggcstagacacctcctcactcatgggttcaaggcttgagcctagggctctaaacatgggtccattttttgatttcccagactagcaaaggacagatggaaataagtctcaaattttcactcctgtatagggttccaagactcactgctttagtacaagacagaaacagcttctaagcataagtatttgcttttattgagagttgaacctaccgcagtattaagcactagaagctcaga

SEQ ID NO: 59834 - DNA, 599 bp, Chicken  19866894318539_1
  misc_feature (1)..(57): n is any nucleotide
nnnnnnnnnnnnnnnnnnnnnnnnnnnnnnnnnnnnnnnnnnnnnnnnnnnnnnnnnacgcccctgaatgcaggaaagcaaacacgaggactggctcctgctgtaaggatggggctcatgaggtgggacggagcactgcaacccaagaatcagaggcacagagaaccgtggggctcagagcactcaaacatcacgtctgaggagacggggacggagaggggccgggagcatgtggggtgcgggggctgcaccccgagctcagccaacacagcccggctgcagcgggtgtcacaggtgtgygtgtcctctgctcactgctccagcagcaaactgtgctcaagagggaayggggaagaagtcattagccccacagtggggaggcgacagagatggatggggcagcagctgcgtgcctgagccaagcagcgaggagatcagagatgcatggagtgcctccgcgccggcaccgcgtccccattacccaatacctagcagccaggaaaattgttccgtgcccaaacggcagcaccagccgtggctgtgaggagcctctgcctgctcctcagccgggatgcagggagggagcagcccctgctttc

SEQ ID NO: 59835 - DNA, 599 bp, Chicken  19866894318539_2
  misc_feature (1)..(9): n is any nucleotide
nnnnnnnnnacgcccctgaatgcaggaaagcaaacacgaggactggctcctgctgtaaggatggggctcatgaggtgggacggagcactgcaacccaagaatcagaggcacagagaaccgtggggctcagagcactcaaacatcacgtctgaggagacggggacggagaggggccgggagcatgtggggtgcgggggctgcaccccgagctcagccaacacagcccggctgcagcgggtgtcacaggtgtgygtgtcctctgctcactgctccagcagcaaactgtgctcaagagggaayggggaagaagtcattagccccacagtggggaggcgacagagatggatggggcagcagctgcgtgcctgagccaagcagcgaggagatcagagatgcatggagtgcctccgcgccggcaccgcgtccccattacccaatacctagcagccaggaaaattgttccgtgcccaaacggcagcaccagccgtggctgtgaggagcctctgcctgctcctcagccgggatgcagggagggagcagcccctgctttcacggactggcgaagggcaacagggaacagacagatgctttaccgagca

SEQ ID NO: 59836 - DNA, 600 bp, Chicken  19866894318540_1
tggcttgactacttcctttcagagctgtggagttaaatatgctcaggcacttgaactggaagggaaggttgttctgtctcctccactgacctttgtttgggcagcggtgccttagagcaggacacacacattgagttttcaggtgctacaagaccaaacacaacacacacaggcaagttatttctttttggagtacactgacagttacttttgctaaatttggacagttacaggttgagtacaatggagtctgagataaatgaagtaaccttgactttttttttttgcaattctatactmattacctgttgacagggactttttcccaagggaaagctacttccagtgtgctttatatagcttttttgttttgcctattttgcatactcattttcaaacacttccttatcatgttgatgcctacattaaattatcatatttatattagctactcaaaatctcatttatgcttatttgagattacacagatagttatatcatggctatatttttatagtttaacctgttaactacacaaaccgaaaccaattttggcaagcaacctacaagtcctaacttaaaatatgatggttttgtttc

SEQ ID NO: 59837 - DNA, 600 bp, Chicken  19866894318544_1
atatgcagagggaggaactgtcttagaagacagttcaaaactgaaaaatgtctggagatattagccagctaaattcacagttcagttctaaaatctatcaatattttttcctcttccaagtatctgaaaagatcagatttttcaaactccctgagttgccactgaagcattgcttctgtgtgatgttttagagcactgagaaatcatgtatggagccttaccccatgactgatttcctaaccacaccctactatgaaaggtgttgtggagcacatcacaaaaacatgagcttcagttcckgaacaatgattaaatctgattagattacataaaggattgtaattaaacttcagtcaattctatgtttcacttcaaattaatcaagcaaatctttcaatgttagcattaaggaagggttagttaaggaagggtatgagtgtttactgcaggagagactacaaactagaaattcagtggattttgtttgtttggcttgcaactcctgaaaacatcctgtttgattaaagctatgttctaccatctattttaggaggtttatgttatggcagtgtttatgaagaaatgagtggattaaaataa

SEQ ID NO: 59838 - DNA, 600 bp, Chicken  19866894318544_2
ctttcagcacagcagaataagaggaatcatgacacattttaaaaatgtaatatatttgatgcagcaatcttggtacatggtgttatgaaatgcctcagggctgccacacagttccctgctttctttcttatgtagctgttatttcaagtcagtcttacgggatatgtcccatcccctaatgcatttttgaaggagacatattcatgactagctggtgttctctactgactatttctgtagtaataggaaggccagtgtttaaacttggaaatacagatctggctggccggtgcatttctycacwttgcctgtgtcagggatttgacttgtctggaaaaacaccaattgaaggtgagatttagactcaactggtacacattggagacatgaatatggggcaaatatggaggatgtttaggggggtggtagggtgatgtcttccaatcacactgtagcttctccattcctctctggttttaatttctgatatcactggatggtgccagaggaaggtcattttttttcaagttsccccatgaatgtaggaagagtttggaggaagaaaagccatttggggagaagtgtgggaagagaaagwac

SEQ ID NO: 59839 - DNA, 600 bp, Chicken  19866894318544_3
cagcacagcagaataagaggaatcatgacacattttaaaaatgtaatatatttgatgcagcaatcttggtacatggtgttatgaaatgcctcagggctgccacacagttccctgctttctttcttatgtagctgttatttcaagtcagtcttacgggatatgtcccatcccctaatgcatttttgaaggagacatattcatgactagctggtgttctctactgactatttctgtagtaataggaaggccagtgtttaaacttggaaatacagatctggctggccggtgcatttctycacwttgcctgtgtcagggatttgacttgtctggaaaaacaccaattgaaggtgagatttagactcaactggtacacattggagacatgaatatggggcaaatatggaggatgtttaggggggtggtagggtgatgtcttccaatcacactgtagcttctccattcctctctggttttaatttctgatatcactggatggtgccagaggaaggtcattttttttcaagttsccccatgaatgtaggaagagtttggaggaagaaaagccatttggggagaagtgtgggaagagaaagwacacaa

SEQ ID NO: 59840 - DNA, 600 bp, Chicken  19866894318544_4
tttctgtagtaataggaaggccagtgtttaaacttggaaatacagatctggctggccggtgcatttctycacwttgcctgtgtcagggatttgacttgtctggaaaaacaccaattgaaggtgagatttagactcaactggtacacattggagacatgaatatggggcaaatatggaggatgtttaggggggtggtagggtgatgtcttccaatcacactgtagcttctccattcctctctggttttaatttctgatatcactggatggtgccagaggaaggtcattttttttcaagttsccccatgaatgtaggaagagtttggaggaagaaaagccatttggggagaagtgtgggaagagaaagwacacaactgcttcccgtgccagctttctgtgtttcacttgttttgtctttgccatgcaagggttccaagtatacctagtcagtgtgaaatgccaaaagcaggatacagttaactccttggctccctgttatatctgtgcacaggtaaaagatcaccacctaacttttagtactgactttctaataagctgagaaatctgagctttttgtcagaatgtttcattttaagctcat

SEQ ID NO: 59841 - DNA, 600 bp, Chicken  19866894318544_5
tycacwttgcctgtgtcagggatttgacttgtctggaaaaacaccaattgaaggtgagatttagactcaactggtacacattggagacatgaatatggggcaaatatggaggatgtttaggggggtggtagggtgatgtcttccaatcacactgtagcttctccattcctctctggttttaatttctgatatcactggatggtgccagaggaaggtcattttttttcaagttsccccatgaatgtaggaagagtttggaggaagaaaagccatttggggagaagtgtgggaagagaaagwacacaactgcttcccgtgccagctttctgtgtttcacttgttttgtctttgccatgcaagggttccaagtatacctagtcagtgtgaaatgccaaaagcaggatacagttaactccttggctccctgttatatctgtgcacaggtaaaagatcaccacctaacttttagtactgactttctaataagctgagaaatctgagctttttgtcagaatgtttcattttaagctcatacaggtgcttatcacaatgtatgcacgcatatatgtgtatgggtgcatgcacacacactggtagcct

SEQ ID NO: 59842 - DNA, 600 bp, Chicken  19866894318551_1
cctgactttagactagatggttctgtcaaccccctggccaatgcaacagtgggattgcatagctgagaaaagccactctgaaaagctgacagagaagctccaggttgcttccctgtgctaaacatccaaatgcatgggttatagtgctgctcttgcggtaaagcattactgatccttcactgaaaccactgtttgtttgttacttggcactacttacatcaagcccattcatatcagccaattcatttcttccttttgctctgctccccacagggctctcaggctcagaccaagtgctcygtgcagggctgcgtggcagagcaggagggagccctgccagcatctcccgctgaaggaagagactggaggaagcccctgaaggccacatgctcagacctcatgctgtaaagccagtcagacatttccagtcagaaggaaacagttatgctgggtcttgaaactgcaccatggtgtttgagcaccacgtcatgctcagcgtgtccctggggctcagtgacagccctgctccagaggtgctccacctgcatgccaccgtcttcaaacaggagcctcaggattcagcctgtctcagtggtgcca

SEQ ID NO: 59843 - DNA, 600 bp, Chicken  19866894318551_2
aaggccacatgctcagacctcatgctgtaaagccagtcagacatttccagtcagaaggaaacagttatgctgggtcttgaaactgcaccatggtgtttgagcaccacgtcatgctcagcgtgtccctggggctcagtgacagccctgctccagaggtgctccacctgcatgccaccgtcttcaaacaggagcctcaggattcagcctgtctcagtggtgccaaaagcagactgggaagacccagccttctcactcctcactgtgagccccacaagtagcacagagccatggagcttgatyaccccaagagagtgctaagtactccccccgcggcttcccagcccaactcagctgtcctgaaagttgtgtgatgcaggcatggtgctgcctggtgtagagtcctctgacacagaatgggcacatgtctcaggctgcaaccctccatctggcccaaggagccagcacaggcttcgtaccaggaaagacaaaggccactgtggctgcgtgatggcactttgctgtgctgcaagggactcctacaaagagcagacactgcaacgcagtggggggaaggtctgcagagccccattcccctgggag

SEQ ID NO: 59844 - DNA, 600 bp, Chicken  19866894318553_1
gcagatgaaatacatatcaacaaggaagaccctaagaagttgtaccaccagagtctctctggttctgcttcaagtcactaatgaaagaaattactcactgctccttctaaacatttttattgcaagtagtaaaacaaaagaaaattgagatgatatatcactaaagctgaactagtcaaaccaatattaaaatcactaattcaggagcacaatcaacacaaatttaaaagtgaggtaaatgtaagacaaagacattagcaggattattggaattaaataattgatgcagccaaatcatcraattaatgctgaagagaatctcaggatctctgtttctggataatctaagcatattacaatgaggctacgggctatgcttttgttcctgcaaccaacaacaaaagccacataatgtacatgagaagcagccatgcaggtaaacatttacatcagtattttcttctagcaatactttggctaacacattgaaagcatcaacttctaaagcacaatagatacttgaaatttaatccttcatttccttaaacacagacactaacactatcaaatcaaaacaaaaagaaagaaaggcgatgccaa

SEQ ID NO: 59845 - DNA, 600 bp, Chicken  19866894318553_2
agccacagtgtgtggaattcatggtgcttgatcatttgcaagagcgttgatacagacttcagtggtttccttgagggaaggtctttgtctcttccaattactgaccaaggaatccagcagcaaaacaaatactcttttcaatcttccacatctaaaagtctctaaaaatgactgtagaaaatatcagaaattctttgagaaaaataattcaactaaccagttcaaaattgaacagacagcataaacagggcaattacaactggaagtattccatgcaatgctctgagtcttagcaaagaygtccacactgcagcagctgagaaaacagcagacaaaaggtcacgtattaggagatctccagttcctctcagaagatagacactgctttccaagctcagcaccacccttctcatccaccctgcccaactgtaccagaatgattctgaacaaagattcctcttgaggtcttgtcaccatcaggcaaatgctacctgcttagaacatctggcttcactggggagacactaacaccttatctgtgctcctgaaggaggactgtaacgacttggtatgaagccttgtcctcactgagctgctgca

SEQ ID NO: 59846 - DNA, 600 bp, Chicken  19866894318553_3
cacccatcagcattgtggtcagttagctgtaaaagcaccagcctgtattttgcttcagttgttattgcctcatatattccttgtaataactcacagtcccacaggcatgaagtaatacaagtgtataatttgatgaaatttagcctcggtgacaaggagaagactcagtcatcttttcctggggtgaatatgaccgccttgttctccaagctcaaaggccaggtgaaaacagctctcacttcattagaccctggggaatccctttaggccataaggcaagaaagacaattcttttcagawgtttaagacatctctttacgatgactgttccggggtttggtgagagtgaagaccaactgcaatgagtgraatgggctgaagctcttggaagcaatcgcttggggctaacgcttttcagaagcagtgttgagatgtaatttgtaagcaatttggggtaccttgcagtgtcctcagaatccatgatgcatgccagcaggaatatttaaatccaacttccttcagagtaagaggctccaataaaaagctcctttttaatcctctaaaccgcaggaagagcatgacagcattcaggaaaggcaa

SEQ ID NO: 59847 - DNA, 600 bp, Chicken  19866894318553_4
tcatatattccttgtaataactcacagtcccacaggcatgaagtaatacaagtgtataatttgatgaaatttagcctcggtgacaaggagaagactcagtcatcttttcctggggtgaatatgaccgccttgttctccaagctcaaaggccaggtgaaaacagctctcacttcattagaccctggggaatccctttaggccataaggcaagaaagacaattcttttcagawgtttaagacatctctttacgatgactgttccggggtttggtgagagtgaagaccaactgcaatgagtgraatgggctgaagctcttggaagcaatcgcttggggctaacgcttttcagaagcagtgttgagatgtaatttgtaagcaatttggggtaccttgcagtgtcctcagaatccatgatgcatgccagcaggaatatttaaatccaacttccttcagagtaagaggctccaataaaaagctcctttttaatcctctaaaccgcaggaagagcatgacagcattcaggaaaggcaaagcttcaagaccatgatttctatctagacactgtrctctcycagrgagtgctaaggctgccatacctct

SEQ ID NO: 59848 - DNA, 600 bp, Chicken  19866894318553_5
tttggtgagagtgaagaccaactgcaatgagtgraatgggctgaagctcttggaagcaatcgcttggggctaacgcttttcagaagcagtgttgagatgtaatttgtaagcaatttggggtaccttgcagtgtcctcagaatccatgatgcatgccagcaggaatatttaaatccaacttccttcagagtaagaggctccaataaaaagctcctttttaatcctctaaaccgcaggaagagcatgacagcattcaggaaaggcaaagcttcaagaccatgatttctatctagacactgtrctctcycagrgagtgctaaggctgccatacctctgcctggaggcagaagactacaggacrgtccctaattaaggctcacatatcagatgcttgtatgggcctttactttgaaagttacagactgaaagccgatctagaaatctcttccacaaacaccttaggatagctcagcagccaggcaataaatcagagtcaaaaggcactttccatagctcaagcaaaagtggctatgaagcatactgggaattcacaatgttttgcaaaaacagaaaatgtaacctctttttttttttttttccc

SEQ ID NO: 59849 - DNA, 600 bp, Chicken  19866894318553_6
gagagtgaagaccaactgcaatgagtgraatgggctgaagctcttggaagcaatcgcttggggctaacgcttttcagaagcagtgttgagatgtaatttgtaagcaatttggggtaccttgcagtgtcctcagaatccatgatgcatgccagcaggaatatttaaatccaacttccttcagagtaagaggctccaataaaaagctcctttttaatcctctaaaccgcaggaagagcatgacagcattcaggaaaggcaaagcttcaagaccatgatttctatctagacactgtrctctcycagrgagtgctaaggctgccatacctctgcctggaggcagaagactacaggacrgtccctaattaaggctcacatatcagatgcttgtatgggcctttactttgaaagttacagactgaaagccgatctagaaatctcttccacaaacaccttaggatagctcagcagccaggcaataaatcagagtcaaaaggcactttccatagctcaagcaaaagtggctatgaagcatactgggaattcacaatgttttgcaaaaacagaaaatgtaacctctttttttttttttttcccaagcgt

SEQ ID NO: 59850 - DNA, 600 bp, Chicken  19866894318553_7
gtgaagaccaactgcaatgagtgraatgggctgaagctcttggaagcaatcgcttggggctaacgcttttcagaagcagtgttgagatgtaatttgtaagcaatttggggtaccttgcagtgtcctcagaatccatgatgcatgccagcaggaatatttaaatccaacttccttcagagtaagaggctccaataaaaagctcctttttaatcctctaaaccgcaggaagagcatgacagcattcaggaaaggcaaagcttcaagaccatgatttctatctagacactgtrctctcycagrgagtgctaaggctgccatacctctgcctggaggcagaagactacaggacrgtccctaattaaggctcacatatcagatgcttgtatgggcctttactttgaaagttacagactgaaagccgatctagaaatctcttccacaaacaccttaggatagctcagcagccaggcaataaatcagagtcaaaaggcactttccatagctcaagcaaaagtggctatgaagcatactgggaattcacaatgttttgcaaaaacagaaaatgtaacctctttttttttttttttcccaagcgttgac

SEQ ID NO: 59851 - DNA, 584 bp, Chicken  19866894318553_8
cgcttggggctaacgcttttcagaagcagtgttgagatgtaatttgtaagcaatttggggtaccttgcagtgtcctcagaatccatgatgcatgccagcaggaatatttaaatccaacttccttcagagtaagaggctccaataaaaagctcctttttaatcctctaaaccgcaggaagagcatgacagcattcaggaaaggcaaagcttcaagaccatgatttctatctagacactgtrctctcycagrgagtgctaaggctgccatacctctgcctggaggcagaagactacaggacrgtccctaattaaggctcacatatcagatgcttgtatgggcctttactttgaaagttacagactgaaagccgatctagaaatctcttccacaaacaccttaggatagctcagcagccaggcaataaatcagagtcaaaaggcactttccatagctcaagcaaaagtggctatgaagcatactgggaattcacaatgttttgcaaaaacagaaaatgtaacctctttttttttttttttcccaagcgttgacaattgaacttcaagctgatcaaaatcagctcttc

SEQ ID NO: 59852 - DNA, 600 bp, Chicken  19866894318559_1
aaacatctgcttattgaagaatgaaggagctcagtgctaagcagctgtttaattatcctgcgctctgtgctctaacaatgtacacactgtgcttataaatctggaatcagctcagggagacaggtttctgttaggagctaaggaacaaaactaccacagacacgtcttgaattgtcagctttaacacacacaaatccagagaacatcaacattttcttcctaccttccaagtaagacactcatcccaagagctcaaacatacagcatttttcctcaagctagtccaacaaaaacagcatyatctttgggatgcaaacttgcagrgaacatatttagcataacataatgaaggctatggcattaaacaaccactctcaaagttcatcaaagtaattgcactaggtctagccttttaattagccttttgttcattgataaatgatccatggaacttccaagaagaaacaaatagtagaaatcacagtattttttcctcattttttgaaataacttcttgaatttcagtgacagtaaatggtaaataagtggaaattttctgctgaattcctgtccgtacagcattccttatggagctggagt

SEQ ID NO: 59853 - DNA, 600 bp, Chicken  19866894318559_2
aggagctcagtgctaagcagctgtttaattatcctgcgctctgtgctctaacaatgtacacactgtgcttataaatctggaatcagctcagggagacaggtttctgttaggagctaaggaacaaaactaccacagacacgtcttgaattgtcagctttaacacacacaaatccagagaacatcaacattttcttcctaccttccaagtaagacactcatcccaagagctcaaacatacagcatttttcctcaagctagtccaacaaaaacagcatyatctttgggatgcaaacttgcagrgaacatatttagcataacataatgaaggctatggcattaaacaaccactctcaaagttcatcaaagtaattgcactaggtctagccttttaattagccttttgttcattgataaatgatccatggaacttccaagaagaaacaaatagtagaaatcacagtattttttcctcattttttgaaataacttcttgaatttcagtgacagtaaatggtaaataagtggaaattttctgctgaattcctgtccgtacagcattccttatggagctggagtaaatgtaaaataggtatctctcac

SEQ ID NO: 59854 - DNA, 600 bp, Chicken  19866894318560_1
ctgttgtacctctggaagctataatctaagcaaacttcaattacttacacatctgtcatgccattaatgtaacttgtccatccacctgaataactcttcgcatgagattatatggacctatctcctccagaaacagcgtaggatctaccccatgccagtagtaaatccttgcaaacttcccatgagcaattagtaggcacgataaagaaaagtcacacacgactaacaaggtgagactgttatagaaatagacacgtaggagtttggttcctttatctattgattttcttatttctctcygaaagtaatttattttctgcaaatcattatgatcaccaatgtttttgctgaaaaacggcatgtcttgttagagaaactagtaagtacatgttgccctttcaagtctctgctttgacttgagaagttatctatcagaacatgagattttttttcttccaataggaaaggattaaagtatcatcatttcaagtctcagaatcaagtgtctcactattstctgttctcccttccctaaatccccaggtttgctgggaaagccatcgttcacaggatctttgctcacctgaactatctcaccat

SEQ ID NO: 59855 - DNA, 600 bp, Chicken  19866894318560_2
acacgactaacaaggtgagactgttatagaaatagacacgtaggagtttggttcctttatctattgattttcttatttctctcygaaagtaatttattttctgcaaatcattatgatcaccaatgtttttgctgaaaaacggcatgtcttgttagagaaactagtaagtacatgttgccctttcaagtctctgctttgacttgagaagttatctatcagaacatgagattttttttcttccaataggaaaggattaaagtatcatcatttcaagtctcagaatcaagtgtctcactattstctgttctcccttccctaaatccccaggtttgctgggaaagccatcgttcacaggatctttgctcacctgaactatctcaccattggaaagcatgggtataaaggctaaatcttctatcagagaggggcatttccttctgtttaccaactacaagttggatccagatcacaaaacgcttactaccagtacacgcaatatgttttttgcgctttctatgtgtggatgcatggatagatgggggccggggcagggggaatggtcagtaccaaccagccaagcactgcagaggcagccctacc

SEQ ID NO: 59856 - DNA, 600 bp, Chicken  19866894318560_3
catttccttctgtttaccaactacaagttggatccagatcacaaaacgcttactaccagtacacgcaatatgttttttgcgctttctatgtgtggatgcatggatagatgggggccggggcagggggaatggtcagtaccaaccagccaagcactgcagaggcagccctaccagctgaatactaatcaaagaaacaagctcccaccatttccacgtttacaaactccagaatatccttgacataagaggaggacagctctgggaaataactccgaagatttcacggcctcctgaatctcytgctctgtagcwtcagcgttgaactcggagctccagcaagacaacggcttcggcaaaggaccgaggacttagtgcttagtgttgactacgctgtgcagaagtctatagtcctcccttcccccactctatctcccccctttccgtgagacttctccaaagagtcagtaaatgccattgttcccttattcttttcaggaggagcgcacacatcagcgctcgcacttcccgaccgcagcccgtttccaatgttcccgctgccccttccccgccgtccccccgcaccgcggagtggaaacttgc

SEQ ID NO: 59857 - DNA, 600 bp, Chicken  19866894318560_4
tttaccaactacaagttggatccagatcacaaaacgcttactaccagtacacgcaatatgttttttgcgctttctatgtgtggatgcatggatagatgggggccggggcagggggaatggtcagtaccaaccagccaagcactgcagaggcagccctaccagctgaatactaatcaaagaaacaagctcccaccatttccacgtttacaaactccagaatatccttgacataagaggaggacagctctgggaaataactccgaagatttcacggcctcctgaatctcytgctctgtagcwtcagcgttgaactcggagctccagcaagacaacggcttcggcaaaggaccgaggacttagtgcttagtgttgactacgctgtgcagaagtctatagtcctcccttcccccactctatctcccccctttccgtgagacttctccaaagagtcagtaaatgccattgttcccttattcttttcaggaggagcgcacacatcagcgctcgcacttcccgaccgcagcccgtttccaatgttcccgctgccccttccccgccgtccccccgcaccgcggagtggaaacttgccgcggaaagccg

SEQ ID NO: 59858 - DNA, 599 bp, Chicken  19866894318563_1
  misc_feature (1)..(200): n is any nucleotide
nnnnnnnnnnnnnnnnnnnnnnnnnnnnnnnnnnnnnnnnnnnnnnnnnnnnnnnnnnnnnnnnnnnnnnnnnnnnnnnnnnnnnnnnnnnnnnnnnnnnnnnnnnnnnnnnnnnnnnnnnnnnnnnnnnnnnnnnnnnnnnnnnnnnnnnnnnnnnnnnnnnnnnnnnnnnnnnnnnnnnnnnnnnnnnnnnnnnnnnntgtgattttctgttccagtaattgtctccttccactgctgctttgcagtggaagttggttggagcttctcaagaggccacgtgcccaaggtgtaaatgtrtgcttattaatgggtgccttatctgtaagagacactgggtgcagaggtgcctatcttagagtctgtgctggaccctatcagagcattttaggtgtgtgagtgctggatggtccatacgtacacaaggactgagttctacatatcctaaaataatgagttttgcaccagttctgcccttgggaacttggtgctgcctgctgctgaaaccagcacgttgaatttagtgcaggttttttggaaaacttggtccttttctgtaagtatcctctttcacccttacatccttctcccttttaccc

SEQ ID NO: 59859 - DNA, 600 bp, Chicken  19866894318563_2
gcctatcttagagtctgtgctggaccctatcagagcattttaggtgtgtgagtgctggatggtccatacgtacacaaggactgagttctacatatcctaaaataatgagttttgcaccagttctgcccttgggaacttggtgctgcctgctgctgaaaccagcacgttgaatttagtgcaggttttttggaaaacttggtccttttctgtaagtatcctctttcacccttacatccttctcccttttaccctccaccagaaccaaacaactcagctctgtatttagtttcaggtgaggcyctttaccactgcatttgtttgtttgtttgacagcttcctattgtcagagaaggtgttcagatcctccatacccacttcttttcattaagtgtagccaggttgttactaaatagcccaagtatattcagccagagccaggctgctgtacacagactattatcttgcaccttctgtgaatttcagggcagccacttggaatccattacatactttaacaaaacatcaygctttgtaatttaattacacagtgcaaagaatgtaagtctgacctcagcaagacttccccagccaaacatactt

SEQ ID NO: 59860 - DNA, 600 bp, Chicken  19866894318563_3
ccttacatccttctcccttttaccctccaccagaaccaaacaactcagctctgtatttagtttcaggtgaggcyctttaccactgcatttgtttgtttgtttgacagcttcctattgtcagagaaggtgttcagatcctccatacccacttcttttcattaagtgtagccaggttgttactaaatagcccaagtatattcagccagagccaggctgctgtacacagactattatcttgcaccttctgtgaatttcagggcagccacttggaatccattacatactttaacaaaacatcaygctttgtaatttaattacacagtgcaaagaatgtaagtctgacctcagcaagacttccccagccaaacatacttctctgcactcctgtgttttgtctcaatgctgttgggttatttgagatgtcattcaactgtctttaggttttgtgaagcagatttgacacctcagcccagtggccatcataaccatcgctctgaggagtccatttggttgtctcctccacttggtgctgtctgcatgcttagcccatgtagtttcccccaggaagtcaaagacttgagcagtaactgcttttccata

SEQ ID NO: 59861 - DNA, 600 bp, Chicken  19866894318567_1
tatatgcattgtggaatgatgatgtgagattctcaggctagctttaatgaagcagaatgttttatccctggtcagaaaatctgactttacagtgccaggccttggaaccacccgccatcaggattaagataagagtaaatatgtaagtacagaatagttagggaaggtatttattgtcttgatttctcaccatcatcctcaggctttctacaaagacaaataatgaccccatatctggaaatggcctggtccctcgtgtgctgtgagcaagctgtgaatgtggtttgtgtatcagaggcwctaagtgttggtctcactctctgagtctgtgagcatcatccatctgctggttagctagataaacgtcagggatttgttggcaggacaattttcctcagttaagcatattgttttgcattaggatttccactttctggattaattaaatgtcttttgggtctagactaagtaccttggatgtggatgggggtttctgggcactttgagaaggacaggatgaaaagttcaaatccagcttgggtgctctgtagttctcctgagggagctgggttacattttcccagcatttcccagtcatca

SEQ ID NO: 59862 - DNA, 600 bp, Chicken  19866894318571_1
cctaagtaagagcaaacagaatcttctttttttttttttttttatgtttctcagaatttatgagctaatggtattcatgtggtttctttttgattcctgggtctttaaacatcaggtgagatacttttttttttcttcttcttcttttttctttttctggttattcctgttcttttttcatggattaatattctacaggatgtggtcttatacacagaaatttctgctattcactacttttatttatacatgcatatacatgactgtgtgtgtgcccaagtatctgtttgctttagttgmaagtgtgttatacttaacatcaggaatgcattgcaaggagagactgaatcatgtggcactgaatatcaagagatcacctgtggtttttaccttacagctgaaacctctgtcttttccttcctgtacataaagctctattttgtcttccaaattgcattttgaataggctactgtgtaacaaactggctgctttctgtttgatgactgcattcttagtaaatcatttttgaggtgccaaaatagttatgagtaagaacattgatatccgttcacttcctgcagcagtcttaaatattgttt

SEQ ID NO: 59863 - DNA, 600 bp, Chicken  19866894318578_1
gatttatgagcctccttattttctaggcctgattgttgtttgtgcaggtggagatttaaatggctgcatccactgcagagatttatagtccaagtgactgatgttataaataagctagaggattcttattgaagcaaggatgacagaaaaccgagttgaagtttcttgtgtctctaagcatgaatgaccagaacgtgaatgactagggagcacaaaaccccatccaagtttcagcgtcagaaactcccagaagaacaaaagaaaataaaaaagcacatattcatgtaatacctgtcacaygttttttactttattttagtaatttttgattttgttgttgtaaaaaccaggaggaactgtgtcttcttaaaagtgcctttagtgttcaactgcatgtgcattctgtacacaacatatgcatacctgtcttttacaagcctttataagtgctgcacatctgtagcttttactgacttaggtacattttgaatcattagagctggtaaaattgaactgatacagacaatccattgttgtgaagacaatgcttttttcatttgttttgtggagattataatctgtgtgtggtacacacttgtg

SEQ ID NO: 59864 - DNA, 600 bp, Chicken  19866894318582_1
tccgctcatgtggctgtgtaagtggtaatggggccagaacttctactaagggtcagactagccaacttccttcccttagcatcccctcccatatctaaaagtcacaagaccaggacctcaaagtaaactttgggtgcttcaggcatttaagaacctatcccaacagctctcctgccactggtcagcagaaccccgcagtacatcgtggagatgcaaaatccagtaggaagtgtcccatcacaaggcatggagacaaaaggctgctgtgtggctttggctatgagtctttaatcaacctayacataataacagcaaaggctaccataatgctatactgcagtagaaagcacagcaatgacagcagaatagcaaagtccaaggctgcagcaggtgatgatgtgctcaaacacagcagcagctatggatgcagaaacaaagggaaaaaattctgcttacccttagaaagtctccaccaggcagagatctccagcaagacactcttgcctccactgccaacccttaaatgaggtctgggaaggggtgaatcctggctccaccctttctggttactcaggtgtattgcatgcagctgagttcccc

SEQ ID NO: 59865 - DNA, 600 bp, Chicken  19866894318583_1
aaacacatcagtaactcttgctgagactttaagagtgcttctttggccttctattaaaaaaaaataaacatatagtaacatttacattagattgtacattaaacaaaatccaacccattagaagtccatatgaacaaacatatctctaccacaaaaggtggtagagataaaaacaaggtcacaggaacacaaaacaaatggcagatcctagaaagcccagtcactggaagaagctgagaaactggcttgtgagcataggcagaatgtgatagacacctttgaagtcaacatttaggaacwgacatttcagtagaaaaaagaaaacatttagtactatgtagaaaatgcagatatctgctacattgtctcctatgcaaatgcacacaaacgggaaacaattctttcctcaaagcatttcaaaatggatacgctgcagtcactgcagtagtcaataactcaagttcagcactgcgtgatgcagacatttctccttacttttcattgattttcactccaactttgtccaaaccaatttttcttgtacacgcatctcttccaattgctagcagcacctgcaaaacagaaatgcacgagttactg

SEQ ID NO: 59866 - DNA, 600 bp, Chicken  19866894318586_1
tttctcacctgctgtagtaccacagcatgaggacattcagcagcagtaaactcttcattgtcatgctttcccctactgttcctctcatctcctccttcccctcccatacccactcttttcctagttaaatagatgtagcctacacacaatctgccttttcctaaaatcatctgctagtaatgttcaattaaaaccacacttgttgccataaggcttgctggccaaagaaatgcaggcaataactggggtattgcccacccactttgcagagcaggtttcaagcgttctctccaacacgcrtgctgtatgccatacactgatctacacctgcacacagggtgatgcagctgttcaacatactactttctatttgtgatgcactatgaaagaggactgtgaacaaagcggcttactcaacagacttcaaagcaggtaacaactgggatttttgagtacaaatctatgaaatgcaaacaaacccagcaacagacaacttaaaagttactaccaagcagaagttccctgtttccacatagccttccccaagtaatatctgctcaagcgttcgatacagagtaacagagcccaygtgcccgcctc

SEQ ID NO: 59867 - DNA, 600 bp, Chicken  19866894318586_2
tccaacacgcrtgctgtatgccatacactgatctacacctgcacacagggtgatgcagctgttcaacatactactttctatttgtgatgcactatgaaagaggactgtgaacaaagcggcttactcaacagacttcaaagcaggtaacaactgggatttttgagtacaaatctatgaaatgcaaacaaacccagcaacagacaacttaaaagttactaccaagcagaagttccctgtttccacatagccttccccaagtaatatctgctcaagcgttcgatacagagtaacagagcccaygtgcccgcctcagaacaccacacctaggggaaggttttcaaactggtggatgtaagtcacaggattctcaattcttagactaaaaactgccatcttctgtgacaccacatccagcaatttaaacagatgggacctaaagagcaaaactgcattgaactacagaccttgtgtccaaatgtagcatcctcggaggccaagacttcaacctgcaattataaggagaaagatcatttcaaacgtagccactaccagcaaccactcctgagcacagcaccacggtccaggcagagcagagttttc

SEQ ID NO: 59868 - DNA, 600 bp, Chicken  19866894318586_3
ccgcctcagaacaccacacctaggggaaggttttcaaactggtggatgtaagtcacaggattctcaattcttagactaaaaactgccatcttctgtgacaccacatccagcaatttaaacagatgggacctaaagagcaaaactgcattgaactacagaccttgtgtccaaatgtagcatcctcggaggccaagacttcaacctgcaattataaggagaaagatcatttcaaacgtagccactaccagcaaccactcctgagcacagcaccacggtccaggcagagcagagttttccacraagkacatcagcgtggaccagcccaaggaaagtctatgtacaacgggacgtgctgaattagcagctgccaacaaaatctcacaagagaagaaacacagaaactcaacctaaatggtgtaaaaagcatcgatccgtcagtaccccaacgtgtaatggagtacaactggaacgcttctctccaagtgccttctggttacaccaaaaagctgcctgagcacaacctacatcacctgtgctgacaactccccctaaaattaaagactggcaacagctgaactcttccctttgcattaccgcctg

SEQ ID NO: 59869 - DNA, 600 bp, Chicken  19866894318586_4
ctcagaacaccacacctaggggaaggttttcaaactggtggatgtaagtcacaggattctcaattcttagactaaaaactgccatcttctgtgacaccacatccagcaatttaaacagatgggacctaaagagcaaaactgcattgaactacagaccttgtgtccaaatgtagcatcctcggaggccaagacttcaacctgcaattataaggagaaagatcatttcaaacgtagccactaccagcaaccactcctgagcacagcaccacggtccaggcagagcagagttttccacraagkacatcagcgtggaccagcccaaggaaagtctatgtacaacgggacgtgctgaattagcagctgccaacaaaatctcacaagagaagaaacacagaaactcaacctaaatggtgtaaaaagcatcgatccgtcagtaccccaacgtgtaatggagtacaactggaacgcttctctccaagtgccttctggttacaccaaaaagctgcctgagcacaacctacatcacctgtgctgacaactccccctaaaattaaagactggcaacagctgaactcttccctttgcattaccgcctgacga

SEQ ID NO: 59870 - DNA, 600 bp, Chicken  19866894318593_1
ctgtttgtacccaagtctgcaacagaagcggaccaatgaaacagtatttcacatgcaagcaacactgccatgactgcataggctatagaggaagttattaacaacacagctataaacatcatctagttaacagctgtagcactgagcacaacgctgcccagaaggagctggaggctgcccatcatgcactcctgaaaggacaaatggagagattgttttattactcctagaagcatcccatcatagcaattcctgaccaagaagtcggcagcaggtgcacacctattgccagatgctaayctcatcctgagatatttatcattcagtggcacagtgcaaaattttggacatggatatactattctgcctcagaatgttgtctctcagctactgactgtggaaccaacagtttcagatcaagtgatctgataccagcatggtgctgaaagaggcagagaacctccagtcaaatcaagtgatcacatcaagcagtttttggtttggtttaatgtaaacgatccaccagtttcataggatctttcactcagagtattcaaatattatttgcaggagaacagcccagaatattaactggattca

SEQ ID NO: 59871 - DNA, 599 bp, Chicken  19866894318595_1
  misc_feature (1)..(16): n is any nucleotide
nnnnnnnnnnnnnnnngaaagggaatgaaggaaaataaaacaacaacaacacaaaaccaaaggtaaaaaaaagggatgcacaatgcaattgctctccactagccaactgatgcctagtcagtccctgaacaatgtcagtaacgcctagccaacttcttcagttttactgttgagtatgacatcacgtggtatgaaatatccctttggttactcttggtcaactgttctggttgtgtccactcccagcttctccgagcactccagcctactcactagcaggcagtctgagaaaagcacttsactctgcataaacactgttcagtaacaactaaaacatcattgtgtttacaatatggttttcaccacaaatccaaggccacctctgaatccttgtccttcctcctgagaacacaaacagatttctttttcagattcatcagactcagagatgaaaaaactgtcaattagagctacctttcrccaacctctgtactgaagattggcacttttagtgatcggtytagttggcctagccactgcataaagtaacctggattatcacagctaaagcaggctagagagcagtatcaaaaatatgt

SEQ ID NO: 59872 - DNA, 600 bp, Chicken  19866894318595_2
atcacgtggtatgaaatatccctttggttactcttggtcaactgttctggttgtgtccactcccagcttctccgagcactccagcctactcactagcaggcagtctgagaaaagcacttsactctgcataaacactgttcagtaacaactaaaacatcattgtgtttacaatatggttttcaccacaaatccaaggccacctctgaatccttgtccttcctcctgagaacacaaacagatttctttttcagattcatcagactcagagatgaaaaaactgtcaattagagctacctttcrccaacctctgtactgaagattggcacttttagtgatcggtytagttggcctagccactgcataaagtaacctggattatcacagctaaagcaggctagagagcagtatcaaaaatatgtaacagtaggttaatctttcccatttgtacagctaatatggaaggagacatctgctaatgtgttaatgtagtaaaggaccaaactcatcttcagaggattgtaaaggaaaaccatttatatctattctgtcaacatcatttttgggaaatatgactcagcaactgacagttttctgtgacgg

SEQ ID NO: 59873 - DNA, 581 bp, Chicken  19866894318595_3
ctgttctggttgtgtccactcccagcttctccgagcactccagcctactcactagcaggcagtctgagaaaagcacttsactctgcataaacactgttcagtaacaactaaaacatcattgtgtttacaatatggttttcaccacaaatccaaggccacctctgaatccttgtccttcctcctgagaacacaaacagatttctttttcagattcatcagactcagagatgaaaaaactgtcaattagagctacctttcrccaacctctgtactgaagattggcacttttagtgatcggtytagttggcctagccactgcataaagtaacctggattatcacagctaaagcaggctagagagcagtatcaaaaatatgtaacagtaggttaatctttcccatttgtacagctaatatggaaggagacatctgctaatgtgttaatgtagtaaaggaccaaactcatcttcagaggattgtaaaggaaaaccatttatatctattctgtcaacatcatttttgggaaatatgactcagcaactgacagttttctgtgacggttctattcatcactctcatagg

SEQ ID NO: 59874 - DNA, 600 bp, Chicken  19866894318603_1
ggaaaacccgttaatatcatattttaatattttaatgtctttgatttcattgcctctttgtacaaggaaagaatttgtgctgtgtgtgaattatatcccacttgctctttctcaatctatatttgaatgtccctccagtaggctgttcaagtactggtcctccaggcttactgatgtgtgtgtgaaacaatcaaaattcaaattgattctttcagcatattctgtcacttttcagtttaaattgctcgcaactgctgctcttagttaagctccctatatgcatgtctatattcaaatgcrtgagctgaactcttcttttgctataagccaatggtaggaaccacaaactactgaaasagagagggcacggaactggctccccagagcagtggtcacaacactgagctgccggaatgcaagaagcattcagacaacactcccagacattaggtttgaattctgtgtgcagccagggattggaccctgttgggccccttccaattcrggatagtctacacctttatgctttgattaaattaatagaatttctctgtacagctgtacattcagtaagcactagatggcagtataataattggt

SEQ ID NO: 59875 - DNA, 600 bp, Chicken  19866894318603_2
ttgtacaaggaaagaatttgtgctgtgtgtgaattatatcccacttgctctttctcaatctatatttgaatgtccctccagtaggctgttcaagtactggtcctccaggcttactgatgtgtgtgtgaaacaatcaaaattcaaattgattctttcagcatattctgtcacttttcagtttaaattgctcgcaactgctgctcttagttaagctccctatatgcatgtctatattcaaatgcrtgagctgaactcttcttttgctataagccaatggtaggaaccacaaactactgaaasagagagggcacggaactggctccccagagcagtggtcacaacactgagctgccggaatgcaagaagcattcagacaacactcccagacattaggtttgaattctgtgtgcagccagggattggaccctgttgggccccttccaattcrggatagtctacacctttatgctttgattaaattaatagaatttctctgtacagctgtacattcagtaagcactagatggcagtataataattggttgaatgtaatttctttcattagctgtacatgttttcttctaaacaagctgtgtaata

SEQ ID NO: 59876 - DNA, 562 bp, Chicken  19866894318603_3
attctttcagcatattctgtcacttttcagtttaaattgctcgcaactgctgctcttagttaagctccctatatgcatgtctatattcaaatgcrtgagctgaactcttcttttgctataagccaatggtaggaaccacaaactactgaaasagagagggcacggaactggctccccagagcagtggtcacaacactgagctgccggaatgcaagaagcattcagacaacactcccagacattaggtttgaattctgtgtgcagccagggattggaccctgttgggccccttccaattcrggatagtctacacctttatgctttgattaaattaatagaatttctctgtacagctgtacattcagtaagcactagatggcagtataataattggttgaatgtaatttctttcattagctgtacatgttttcttctaaacaagctgtgtaatagttgaattggtttgaattactttacaacattgctgcaatagtatattggcttagatggacttatatcagctaaataaaataccttacagctattatctatgtagaaaatg

SEQ ID NO: 59877 - DNA, 600 bp, Chicken  19866894318605_1
ggaagcgcttggcccattaggctgacctgcagtatgccaggtcccggtccagggttgggctcctcctacggacccattccttctctcgcatctatcagaccaaggatggggtttcgggctgagccacaggagactcacctgactccagggctgctgctccacgacgctccttactctggtttctgggcagatgcagcaggacaggctgccctgctccaccagctcctccaggtccctcaaggcaatcacccagaattcaggacctggtgttgccacgtgcttcggcagcaccgatagcaycagctgctgcagctccagctcagcattcctacagcagttgtagctggagcaggagcaagatggccggttgtcccacgcgctggtggcagcragcaggagcagatcccgtgaggctgcctttgggcacctctgtctgctttggagccccacatctctttctcagcatgcctggggggcgactgcacgtgccgctgcatctttctcatgctgtgctgctctggcttctgtgcatccctctgggatcccgctgtctcacagcactcacaaagcattcggcaggacacaggcaatgcagaaggc

SEQ ID NO: 59878 - DNA, 600 bp, Chicken  19866894318605_2
ctatcagaccaaggatggggtttcgggctgagccacaggagactcacctgactccagggctgctgctccacgacgctccttactctggtttctgggcagatgcagcaggacaggctgccctgctccaccagctcctccaggtccctcaaggcaatcacccagaattcaggacctggtgttgccacgtgcttcggcagcaccgatagcaycagctgctgcagctccagctcagcattcctacagcagttgtagctggagcaggagcaagatggccggttgtcccacgcgctggtggcagcragcaggagcagatcccgtgaggctgcctttgggcacctctgtctgctttggagccccacatctctttctcagcatgcctggggggcgactgcacgtgccgctgcatctttctcatgctgtgctgctctggcttctgtgcatccctctgggatcccgctgtctcacagcactcacaaagcattcggcaggacacaggcaatgcagaaggctcctgggccttgttgtcccagcgacgttgtccctggtttggtcgctgaactccctcatgcgcagctggacgcatgcaggtgcaggtgcagg

SEQ ID NO: 59879 - DNA, 486 bp, Chicken  19866894318605_3
gggcacctctgtctgctttggagccccacatctctttctcagcatgcctggggggcgactgcacgtgccgctgcatctttctcatgctgtgctgctctggcttctgtgcatccctctgggatcccgctgtctcacagcactcacaaagcattcggcaggacacaggcaatgcagaaggctcctgggccttgttgtcccagcgacgttgtccctggtttggtcgctgaactccctcatgcgcagctggacgcatgcaggtgcaggtgcaggtctgtgggggctgctctgcggctcccctgyckggcttggagccctgacaatttgtccggtgggctgtgggggccacccgctaccacgagtgccagctattcacgctctgcctgcctgcctgctctgcacgtctcctgccacagacggcacagctcagacgctggctggctgcactgctgcagtcctcttctttagccaggcgtgaaagtgctgctg

SEQ ID NO: 59880 - DNA, 484 bp, Chicken  19866894318605_4
gcacctctgtctgctttggagccccacatctctttctcagcatgcctggggggcgactgcacgtgccgctgcatctttctcatgctgtgctgctctggcttctgtgcatccctctgggatcccgctgtctcacagcactcacaaagcattcggcaggacacaggcaatgcagaaggctcctgggccttgttgtcccagcgacgttgtccctggtttggtcgctgaactccctcatgcgcagctggacgcatgcaggtgcaggtgcaggtctgtgggggctgctctgcggctcccctgyckggcttggagccctgacaatttgtccggtgggctgtgggggccacccgctaccacgagtgccagctattcacgctctgcctgcctgcctgctctgcacgtctcctgccacagacggcacagctcagacgctggctggctgcactgctgcagtcctcttctttagccaggcgtgaaagtgctgctg

SEQ ID NO: 59881 - DNA, 600 bp, Chicken  19866894318607_1
tattttgctctttgaaaaagatgcttgagatgtgctctctgccattaagagcataaaggtctactgtcagtgcaagtctactcactgacactgatcaagggacactgcagccagagaccatcatgcaagctatctgaagacagattttaaacatcagagaggctttgaactcctctagcccatagtaaactggaggctggaagatgtcagtgagagaagattaggtaaattctgcttcatagatcagctacctgctgcagaggcatactaaaggcaaaatgaacactaggaaaggaatcwattttcacttttccttatagcaatgcatctttcaaataaatacacagtattacttacatgggtgattattataacttcatctctattccttcactgctgtatctggaagtgctgatcatggagcagawctgcacaaaattattaccagtaaacatagcagagagagcgtgcaccaccaaaatcctctatttgtaagttatctgggggcatttgaagccatggacagactcaggctgtgtatgaaacagtttagggttatatgaaagtttcattccaaggtgccacatgaacacacaaact

SEQ ID NO: 59882 - DNA, 600 bp, Chicken  19866894318607_2
gctatctgaagacagattttaaacatcagagaggctttgaactcctctagcccatagtaaactggaggctggaagatgtcagtgagagaagattaggtaaattctgcttcatagatcagctacctgctgcagaggcatactaaaggcaaaatgaacactaggaaaggaatcwattttcacttttccttatagcaatgcatctttcaaataaatacacagtattacttacatgggtgattattataacttcatctctattccttcactgctgtatctggaagtgctgatcatggagcagawctgcacaaaattattaccagtaaacatagcagagagagcgtgcaccaccaaaatcctctatttgtaagttatctgggggcatttgaagccatggacagactcaggctgtgtatgaaacagtttagggttatatgaaagtttcattccaaggtgccacatgaacacacaaactagaattgctccctgaatctacatataactgcaaaatttgaagactatcccattgttttctccataccacaagcagtgcaacagcactaattctgtataatgcatttgtcaaatcatggtatgcagctc

SEQ ID NO: 59883 - DNA, 599 bp, Chicken  19866894318608_1
  misc_feature (1)..(62): n is any nucleotide
nnnnnnnnnnnnnnnnnnnnnnnnnnnnnnnnnnnnnnnnnnnnnnnnnnnnnnnnnnnnnntgggctgtgtggacttttggggatggatatttgcccatggagaacactaccctgctcagtacagacaagggtagcatcctcatggcagtatatgggcaaacttcagagggcaaggagtccccatatattacacaaagaagaaatgggatatgagctttctcctggtcctagcttttaattattagtaattagtgccaggtttgctgacttttttattttttaaccttcttgtccccakctgtccaagctcctccagccccatgaaatctttttttcctacaagattcagctgtgactgctgtctgtctctgagcttttctttttccttccaatatgaagaaaagaatcaagagccttctcattaagctctgtttgtatgttttgccactgctttattttgcttcagtcaaaatcctccttaaaaatacaagcactgctgyctttccatttcggggcaggaagcagcagctgcctggccctgggcacaattacactccaatagttgaagatgggagtcactggcagcctcatttcccc

SEQ ID NO: 59884 - DNA, 600 bp, Chicken  19866894318608_2
aaatgggatatgagctttctcctggtcctagcttttaattattagtaattagtgccaggtttgctgacttttttattttttaaccttcttgtccccakctgtccaagctcctccagccccatgaaatctttttttcctacaagattcagctgtgactgctgtctgtctctgagcttttctttttccttccaatatgaagaaaagaatcaagagccttctcattaagctctgtttgtatgttttgccactgctttattttgcttcagtcaaaatcctccttaaaaatacaagcactgctgyctttccatttcggggcaggaagcagcagctgcctggccctgggcacaattacactccaatagttgaagatgggagtcactggcagcctcatttcccccccagccttcatgaagaaaaattcatttagcagctcagcatggaaggctctgcacagtcctccccttcactgtgaagaaagaagcatttgaaatggcagagggcggaatatacagatgcaattcagctgtttctcctttttgttgctgctgagttttcctatgccctctgcaaacacagtcttccttccttggcatgcaccct

SEQ ID NO: 59885 - DNA, 600 bp, Chicken  19866894318612_1
ataatcaatatcaatgtagtaagctgaaaaatgtcacttgtactcacgttcttctgacactgttggcactaacacaatgtggtactgaataggaattcacatttgaaagcttttatgtatttatgagtaattaatatttgggatatagctaatgctttctatctgaagctaataaatataataattgtttattgcaactcaattaattaattcttttcagtattgaattgcaaatccgttactgttttttactgtgggactctgccatgaatgctattagtacatgttggtcttctgctsagttacgttgcttagtggcaatcctatatagcctrtgaattttgtgcttcatccaatgaaatattagaaagcttttagctgttaaatgatatttgtrtatgtacagcatgcaaagcatgtcatactgtgaactaaacaaattctttcactgtttttgtaactagaattttaaaataaataataggttgatttgtaagccatttgtaggtctatttagcataaaggttctgttcataaggaagaaagaataatttcaaagaatgctattctttctgaagataaaagactagtagcacacta

SEQ ID NO: 59886 - DNA, 600 bp, Chicken  19866894318612_2
acttgtactcacgttcttctgacactgttggcactaacacaatgtggtactgaataggaattcacatttgaaagcttttatgtatttatgagtaattaatatttgggatatagctaatgctttctatctgaagctaataaatataataattgtttattgcaactcaattaattaattcttttcagtattgaattgcaaatccgttactgttttttactgtgggactctgccatgaatgctattagtacatgttggtcttctgctsagttacgttgcttagtggcaatcctatatagcctrtgaattttgtgcttcatccaatgaaatattagaaagcttttagctgttaaatgatatttgtrtatgtacagcatgcaaagcatgtcatactgtgaactaaacaaattctttcactgtttttgtaactagaattttaaaataaataataggttgatttgtaagccatttgtaggtctatttagcataaaggttctgttcataaggaagaaagaataatttcaaagaatgctattctttctgaagataaaagactagtagcacactatgttaacatatttttaaagtacttctttagaaaac

SEQ ID NO: 59887 - DNA, 600 bp, Chicken  19866894318612_3
cacatttgaaagcttttatgtatttatgagtaattaatatttgggatatagctaatgctttctatctgaagctaataaatataataattgtttattgcaactcaattaattaattcttttcagtattgaattgcaaatccgttactgttttttactgtgggactctgccatgaatgctattagtacatgttggtcttctgctsagttacgttgcttagtggcaatcctatatagcctrtgaattttgtgcttcatccaatgaaatattagaaagcttttagctgttaaatgatatttgtrtatgtacagcatgcaaagcatgtcatactgtgaactaaacaaattctttcactgtttttgtaactagaattttaaaataaataataggttgatttgtaagccatttgtaggtctatttagcataaaggttctgttcataaggaagaaagaataatttcaaagaatgctattctttctgaagataaaagactagtagcacactatgttaacatatttttaaagtacttctttagaaaacacagaaggaaacaaatgggaaggaacaaagaagttaattagccatagtgtccctttgaataa

SEQ ID NO: 59888 - DNA, 527 bp, Chicken  19866894318633_1
gcaattcaagatacaatctctgtgagtgttgctactttgtccgtgtagacagcctatctttaaagctttatttgcctttcatgttcttgtgcagtagctctttttttttcttttctttaaacaaataacacaattctgtcgttctaagctactgattttcattgtttgcacaaactgagggaacaattgcagtattgtaggcatagcgagcgcagcctacctgaagtcttcttaggaattggaggtgtgcttcttatggtgttattttgatctacaaaggaaaaccacgagtggtttttygtgagtaaatgtgtccatagtggcactgcagctgggtggatgtcacctgttttgcagcagttcaaccatgaacaaaatgatcaggtttcaagcagtgctcagcacggccaccaggcatcttccaaggaggaagaagagtttctccatcaagacctgtcccagaggatgcagatccaggaggttgctttctgcagctgcctggatccaaactaccctgcctcagtttc

SEQ ID NO: 59889 - DNA, 476 bp, Chicken  19866894318639_1
cttccccaccagccctgggctgtgctgctgctgcctgcgtctgcactttggctgtgggtgaaaccccaactgctgcctctcggtttcaattcctgtgaagctgaagaaggaggaagcgagccgggcagcgctggctgtggggaagtcccccatccatggggaaattaccccctgcgggcacccaccgcctgtgcacacctcattgcttcgtgccccagctgcgggctgctctccctgcgccgccgttgggctttcggggctgttttgggccggctgtgccatggcaacatgcaaagggcygcggccacctgcgcttcctggaagccgcggtgctgataaggcgcggccgctggggcagctgatagggctcagcttcctcctccgagcggcttttcgaagaagcggcgccgcgttccgcgaagcaacagcggaagtcacggccgtgtggggcccggggggaggatggggggcaggga

SEQ ID NO: 59890 - DNA, 600 bp, Chicken  19866894318640_1
aactggaggtaatactccatgcacaatctcacaaatgtcaacaagaaggaaataatcactcctgctgtctaagtttctgttcacgtagccatttacgtagttttcactgctgacctatagccatttcattgctagaccaaaagtcctctctgcaaagctgctcccaaagcaatctgttccctccccattctttgctgcatttgcatttccctttgctgagcatcatgaggcccctgctacctcagtcctctggctcactggggttccagtgagtggcaggctgactctccaacacactamaaggtctctcacggttagtgttaactcagaccctgacaytggttcattccatcccaacagtcagtttgctgttacaaattactgtctccraagcccactcctgaggaagaccactcaaaaccagccaccacctgaacttggaagtattaagccctattgatcttgaaggccacctctgtctccccagtgtggctataatgatgcagtaatgggtgtgcaaaaacctttaaaatcttttctgaaaccatgataaacaatacccattgctctccctcatccccactaccagtatactcatca

SEQ ID NO: 59891 - DNA, 600 bp, Chicken  19866894318640_2
aacaagaaggaaataatcactcctgctgtctaagtttctgttcacgtagccatttacgtagttttcactgctgacctatagccatttcattgctagaccaaaagtcctctctgcaaagctgctcccaaagcaatctgttccctccccattctttgctgcatttgcatttccctttgctgagcatcatgaggcccctgctacctcagtcctctggctcactggggttccagtgagtggcaggctgactctccaacacactamaaggtctctcacggttagtgttaactcagaccctgacaytggttcattccatcccaacagtcagtttgctgttacaaattactgtctccraagcccactcctgaggaagaccactcaaaaccagccaccacctgaacttggaagtattaagccctattgatcttgaaggccacctctgtctccccagtgtggctataatgatgcagtaatgggtgtgcaaaaacctttaaaatcttttctgaaaccatgataaacaatacccattgctctccctcatccccactaccagtatactcatcacgaaagtaactgggtagaagcaatggtaccaagagttct

SEQ ID NO: 59892 - DNA, 600 bp, Chicken  19866894318640_3
atttacgtagttttcactgctgacctatagccatttcattgctagaccaaaagtcctctctgcaaagctgctcccaaagcaatctgttccctccccattctttgctgcatttgcatttccctttgctgagcatcatgaggcccctgctacctcagtcctctggctcactggggttccagtgagtggcaggctgactctccaacacactamaaggtctctcacggttagtgttaactcagaccctgacaytggttcattccatcccaacagtcagtttgctgttacaaattactgtctccraagcccactcctgaggaagaccactcaaaaccagccaccacctgaacttggaagtattaagccctattgatcttgaaggccacctctgtctccccagtgtggctataatgatgcagtaatgggtgtgcaaaaacctttaaaatcttttctgaaaccatgataaacaatacccattgctctccctcatccccactaccagtatactcatcacgaaagtaactgggtagaagcaatggtaccaagagttcttgtatgaaacatttgagcagttaaaaattaatccagacggacttccagttt

SEQ ID NO: 59893 - DNA, 599 bp, Chicken  19866894318641_1
  misc_feature (1)..(244): n is any nucleotide
nnnnnnnnnnnnnnnnnnnnnnnnnnnnnnnnnnnnnnnnnnnnnnnnnnnnnnnnnnnnnnnnnnnnnnnnnnnnnnnnnnnnnnnnnnnnnnnnnnnnnnnnnnnnnnnnnnnnnnnnnnnnnnnnnnnnnnnnnnnnnnnnnnnnnnnnnnnnnnnnnnnnnnnnnnnnnnnnnnnnnnnnnnnnnnnnnnnnnnnnnnnnnnnnnnnnnnnnnnnnnnnnnnnnnnnnnnnnnnnnnnnnccaccgtgctgacacttcccacttctctcccttgaccagctaccagccaggcatcrctgccctcggctggatgaaggacagagcacggccacatacagcactgcctgmctctgaaatgaaacaatccctccatcacactcacaccttgctgcacaccactgtaaaattgccatggtgaacytctctctttttttttttttttttaaagaaaaaaccaacaactattttctggcaccaactatcccttgtgactggacttagccatgggctgtgacaaaggctgtgacaaaggctgctttcttaccatgtttatgtactgtcagaattgcacaggcagtcctgtccccagcatttc

SEQ ID NO: 59894 - DNA, 599 bp, Chicken  19866894318641_2
  misc_feature (1)..(192): n is any nucleotide
nnnnnnnnnnnnnnnnnnnnnnnnnnnnnnnnnnnnnnnnnnnnnnnnnnnnnnnnnnnnnnnnnnnnnnnnnnnnnnnnnnnnnnnnnnnnnnnnnnnnnnnnnnnnnnnnnnnnnnnnnnnnnnnnnnnnnnnnnnnnnnnnnnnnnnnnnnnnnnnnnnnnnnnnnnnnnnnnnnnnnnnnnnnnnnnnccaccgtgctgacacttcccacttctctcccttgaccagctaccagccaggcatcrctgccctcggctggatgaaggacagagcacggccacatacagcactgcctgmctctgaaatgaaacaatccctccatcacactcacaccttgctgcacaccactgtaaaattgccatggtgaacytctctctttttttttttttttttaaagaaaaaaccaacaactattttctggcaccaactatcccttgtgactggacttagccatgggctgtgacaaaggctgtgacaaaggctgctttcttaccatgtttatgtactgtcagaattgcacaggcagtcctgtccccagcatttcctagtggctccaggcttggttttccatccttaataataatctttcagcgtgt

SEQ ID NO: 59895 - DNA, 599 bp, Chicken  19866894318641_3
  misc_feature (1)..(119): n is any nucleotide
nnnnnnnnnnnnnnnnnnnnnnnnnnnnnnnnnnnnnnnnnnnnnnnnnnnnnnnnnnnnnnnnnnnnnnnnnnnnnnnnnnnnnnnnnnnnnnnnnnnnnnnnnnnnnnnnnnnnnnnccaccgtgctgacacttcccacttctctcccttgaccagctaccagccaggcatcrctgccctcggctggatgaaggacagagcacggccacatacagcactgcctgmctctgaaatgaaacaatccctccatcacactcacaccttgctgcacaccactgtaaaattgccatggtgaacytctctctttttttttttttttttaaagaaaaaaccaacaactattttctggcaccaactatcccttgtgactggacttagccatgggctgtgacaaaggctgtgacaaaggctgctttcttaccatgtttatgtactgtcagaattgcacaggcagtcctgtccccagcatttcctagtggctccaggcttggttttccatccttaataataatctttcagcgtgtttttaaaattctgcacagaatgacaatagaataacagcagggctgcaagatgaatcacccagaggttacaccc

SEQ ID NO: 59896 - DNA, 599 bp, Chicken  19866894318641_4
  misc_feature (1)..(112): n is any nucleotide
nnnnnnnnnnnnnnnnnnnnnnnnnnnnnnnnnnnnnnnnnnnnnnnnnnnnnnnnnnnnnnnnnnnnnnnnnnnnnnnnnnnnnnnnnnnnnnnnnnnnnnnnnnnnnnnnccaccgtgctgacacttcccacttctctcccttgaccagctaccagccaggcatcrctgccctcggctggatgaaggacagagcacggccacatacagcactgcctgmctctgaaatgaaacaatccctccatcacactcacaccttgctgcacaccactgtaaaattgccatggtgaacytctctcyttttttttttttttttaaagaaaaaaccaacaactattttctggcaccaactatcccttgtgactggacttagccatgggctgtgacaaaggctgtgacaaaggctgctttcttaccatgtttatgtactgtcagaattgcacaggcagtcctgtccccagcatttcctagtggctccaggcttggttttccatccttaataataatctttcagcgtgtttttaaaattctgcacagaatgacaatagaataacagcagggctgcaagatgaatcacccagaggttacacccacagcat

SEQ ID NO: 59897 - DNA, 599 bp, Chicken  19866894318641_5
  misc_feature (1)..(111): n is any nucleotide
nnnnnnnnnnnnnnnnnnnnnnnnnnnnnnnnnnnnnnnnnnnnnnnnnnnnnnnnnnnnnnnnnnnnnnnnnnnnnnnnnnnnnnnnnnnnnnnnnnnnnnnnnnnnnnnccaccgtgctgacacttcccacttctctcccttgaccagctaccagccaggcatcrctgccctcggctggatgaaggacagagcacggccacatacagcactgcctgmctctgaaatgaaacaatccctccatcacactcacaccttgctgcacaccactgtaaaattgccatggtgaacytctctctytttttttttttttttaaagaaaaaaccaacaactattttctggcaccaactatcccttgtgactggacttagccatgggctgtgacaaaggctgtgacaaaggctgctttcttaccatgtttatgtactgtcagaattgcacaggcagtcctgtccccagcatttcctagtggctccaggcttggttttccatccttaataataatctttcagcgtgtttttaaaattctgcacagaatgacaatagaataacagcagggctgcaagatgaatcacccagaggttacacccacagcatc

SEQ ID NO: 59898 - DNA, 600 bp, Chicken  19866894318646_1
ttcctttccctttattccagaagcagattttcactgtaaaccacagaaaagcagactctactatgccttctttccttccacagacattttcatttcaagcctcagctcacggaaatatttttcagtaaaaaaattcaacttttcccagtgcattttttccagttgattgctattccttggcaccaattacaagtaactgcttcacagctgaaccaaagcagcacagtcagcaaaatcacagccactccattcttgagcaatcagagaggctgcatgtgaaggagtaaagatgaggcagayactagcctaacaggccaacaaggaatatgcctgtagttttcccaagtccaggcagcckggattgtcagaatgtaaatttctgataacagtttcactgccagttggataaagaactacaaactcagtagacagtgcaaaaccactgagacaagggaattgcagttcctcccatactacaaatataagcatgtaagaactcactgcccagctggagtcaagctcctctgatcactggtcaacagtgactgaggtaatggaaagccaaggcmattctcagtgtatttacttaatgacatgaga

SEQ ID NO: 59899 - DNA, 600 bp, Chicken  19866894318646_2
tactatgccttctttccttccacagacattttcatttcaagcctcagctcacggaaatatttttcagtaaaaaaattcaacttttcccagtgcattttttccagttgattgctattccttggcaccaattacaagtaactgcttcacagctgaaccaaagcagcacagtcagcaaaatcacagccactccattcttgagcaatcagagaggctgcatgtgaaggagtaaagatgaggcagayactagcctaacaggccaacaaggaatatgcctgtagttttcccaagtccaggcagcckggattgtcagaatgtaaatttctgataacagtttcactgccagttggataaagaactacaaactcagtagacagtgcaaaaccactgagacaagggaattgcagttcctcccatactacaaatataagcatgtaagaactcactgcccagctggagtcaagctcctctgatcactggtcaacagtgactgaggtaatggaaagccaaggcmattctcagtgtatttacttaatgacatgagacattaaacagctctctgtacaagcacctctgtggaaatttgcagcctcaatatcatgc

SEQ ID NO: 59900 - DNA, 600 bp, Chicken  19866894318646_3
ctgcatgtgaaggagtaaagatgaggcagayactagcctaacaggccaacaaggaatatgcctgtagttttcccaagtccaggcagcckggattgtcagaatgtaaatttctgataacagtttcactgccagttggataaagaactacaaactcagtagacagtgcaaaaccactgagacaagggaattgcagttcctcccatactacaaatataagcatgtaagaactcactgcccagctggagtcaagctcctctgatcactggtcaacagtgactgaggtaatggaaagccaaggcmattctcagtgtatttacttaatgacatgagacattaaacagctctctgtacaagcacctctgtggaaatttgcagcctcaatatcatgcttcacaccttgattcctcattgtgatcctcggtcctgcttcctatctgctcagccctcctgcattttcttactcctgtcctctcctgtctctgcactgtagctttcctgactagccccaccaccgcctgctgactcctacctcactgcttgtagtcctcagcaggccctccrgcttaaatgattccctcagcacagagtttatgatttttt

SEQ ID NO: 59901 - DNA, 423 bp, Chicken  19866894318646_4
actggtcaacagtgactgaggtaatggaaagccaaggcmattctcagtgtatttacttaatgacatgagacattaaacagctctctgtacaagcacctctgtggaaatttgcagcctcaatatcatgcttcacaccttgattcctcattgtgatcctcggtcctgcttcctatctgctcagccctcctgcattttcttactcctgtcctctcctgtctctgcactgtagctttcctgactagccccaccaccgcctgctgactcctacctcactgcttgtagtcctcagcaggccctccrgcttaaatgattccctcagcacagagtttatgatttttttatttactataggaccctaattatgaaaccagcagtgatttgttatagtgtcatctgcccggtctaccccagaagaccaatcat

SEQ ID NO: 59902 - DNA, 600 bp, Chicken  19866894318652_1
tgggactctgcaagtccctgtgctagacgggtccagttgtgctcctctgctgtagccacacacgtgttgagcccattgaaccacagcacaccagtttttgggtaacacctacattaaaaccaatcttctcgtgtctcaaaggctactggcataatctgaacggtacctttgttttctgcccccaccagaagactgctggcagagcttgggctagagagggtctgactgccacctggcatggggtctgatgggaaactggccttgatatcctccgaattccaggctgggagcagggagtgmagcttggccggcgctcctgcagctgtgcgtgaggcgggggccaggctgtccctcctggtaggaactcacaaccacgagccgcttccccttcctgttgtgactgaatgcagcttgatgggtgcttggaggcccgttcatcaatgtcttggacggcttcccccatctgtcaaaccaggagcccgggcccaggatgatagccaagtgtgcatctcatggtgtgcaggctgctctccggactgcatactgctcttgtatgtgtgtgcagattgctccaggtcatcttctctcccctgggcggac

SEQ ID NO: 59903 - DNA, 600 bp, Chicken  19866894318654_1
gtatgcccaagtttttaaattgatgttaggtctggcataagttgtttactgattccagtttttattttacactttatggatgtatttaattacatccgaggctttacccaaacagtctgcaggaaatcataaatcttaatgatttttttgctaattttttttcaagaacgtgggggaggtgcattagaattatatgaatgagaaggaaatattgatttctcctccccgtggagtaactgcagaattatggcagctatcaaattatgtagaaactgcagattaacagtgaagccattaggrttaatagaagtcgtatttagcctcaagaacatttctcattttctgccatctcacaatggcagagatgacttttgctccttaatttaggtataaacttctacttagggctgttaataccactgaaaagaagatcagaatgttcctcttatgtgggaagtattaggtaagagttagcacagatcagagcagaacaagacaaaggtttctgacctaaataatgattctgtggctctgaagtggcagtttatggagcctgaggttgtgttgtgatcacctttgctctttgttctttgtctaagg

SEQ ID NO: 59904 - DNA, 600 bp, Chicken  19866894318656_1
attgtagatatttgagggaaaccagttccacagaagctgcagtgtgtgctagcgcttctgctcagtcccctcccttttgtagctgctcagatgtagcactgctggccaggtgtccacagggacagattcagtatgtgggcctgtaaagagttactgcgcctatcatctttgttcaaatgaaaaatcacctgcattaatatgcactttgcccttcctgttgcaattagcagtttagcagacggagtagcgtgatagcttgaggaataacaagggcttcatggctggatgtttctttttcarttaaaaaaaaatacraacatgttttcacttgtcttttaatctttggaggttaagtgtcttgccaacttggagtccaagttcaaactgcttttataagctgcagtaaaatccattcagcttctctaggatcaggcagcatggaagtaagtgtgtgtgtgccttaagagaggaactttgctcttgacatagtgtaagcaaagttgttcaagttgactaattattctgaggtgatcaaatagcaagccagaaataaaagtagtgatttactatatgtatttacagaattgaagttacagtatg

SEQ ID NO: 59905 - DNA, 600 bp, Chicken  19866894318656_2
gggaaaccagttccacagaagctgcagtgtgtgctagcgcttctgctcagtcccctcccttttgtagctgctcagatgtagcactgctggccaggtgtccacagggacagattcagtatgtgggcctgtaaagagttactgcgcctatcatctttgttcaaatgaaaaatcacctgcattaatatgcactttgcccttcctgttgcaattagcagtttagcagacggagtagcgtgatagcttgaggaataacaagggcttcatggctggatgtttctttttcarttaaaaaaaaatacraacatgttttcacttgtcttttaatctttggaggttaagtgtcttgccaacttggagtccaagttcaaactgcttttataagctgcagtaaaatccattcagcttctctaggatcaggcagcatggaagtaagtgtgtgtgtgccttaagagaggaactttgctcttgacatagtgtaagcaaagttgttcaagttgactaattattctgaggtgatcaaatagcaagccagaaataaaagtagtgatttactatatgtatttacagaattgaagttacagtatgagatcataacagtgt

SEQ ID NO: 59906 - DNA, 600 bp, Chicken  19866894318661_1
ctctttgcagtgggtccagaggagagccacgatcagaggcctggagcacctctcctacaaataaaggctgtgagctgggcttgttcattctggagaaggatccagggagacataattgcagattttcagaatttaaagggaggttatagacaagacggagatcaactttttacatagcctgatagtgatagcacaagggagaacagttttaaactagaagagacaaacttaagttagattttaggaggaaattttttactctgagggtggtaaagcaccagaacaagcatccagagaagytgtgtacgttccatccctggaggcattcaagatcaggttagatgcatcattgracagcctgatctggtgtgtggcaaccctgcccacggtagggggtttaaaagtagatgatctttacagaccyttccaactcatatcattccatgattctakgacaaaatgtttaaaatctaagtactktatcacyagtgtcattaggacttcaagcatgcagtrctgtggctctcctatttctgatagccatatgaaatcatagatgtttctgcatgatattgatttatgagtcctaactacaaaata

SEQ ID NO: 59907 - DNA, 600 bp, Chicken  19866894318661_2
cctacaaataaaggctgtgagctgggcttgttcattctggagaaggatccagggagacataattgcagattttcagaatttaaagggaggttatagacaagacggagatcaactttttacatagcctgatagtgatagcacaagggagaacagttttaaactagaagagacaaacttaagttagattttaggaggaaattttttactctgagggtggtaaagcaccagaacaagcatccagagaagytgtgtacgttccatccctggaggcattcaagatcaggttagatgcatcattgracagcctgatctggtgtgtggcaaccctgcccacggtagggggtttaaaagtagatgatctttacagaccyttccaactcatatcattccatgattctakgacaaaatgtttaaaatctaagtactktatcacyagtgtcattaggacttcaagcatgcagtrctgtggctctcctatttctgatagccatatgaaatcatagatgtttctgcatgatattgatttatgagtcctaactacaaaataacacatgcagatggtttctaaaatgcacttggagcaccttagaaagattatca

SEQ ID NO: 59908 - DNA, 600 bp, Chicken  19866894318661_3
ttcagaatttaaagggaggttatagacaagacggagatcaactttttacatagcctgatagtgatagcacaagggagaacagttttaaactagaagagacaaacttaagttagattttaggaggaaattttttactctgagggtggtaaagcaccagaacaagcatccagagaagytgtgtacgttccatccctggaggcattcaagatcaggttagatgcatcattgracagcctgatctggtgtgtggcaaccctgcccacggtagggggtttaaaagtagatgatctttacagaccyttccaactcatatcattccatgattctakgacaaaatgtttaaaatctaagtactktatcacyagtgtcattaggacttcaagcatgcagtrctgtggctctcctatttctgatagccatatgaaatcatagatgtttctgcatgatattgatttatgagtcctaactacaaaataacacatgcagatggtttctaaaatgcacttggagcaccttagaaagattatcacagtttccagcacctttgcacagtgagataaactctaggaacaagtatgctacattagtatcagtgtcaag

SEQ ID NO: 59909 - DNA, 600 bp, Chicken  19866894318661_4
gacggagatcaactttttacatagcctgatagtgatagcacaagggagaacagttttaaactagaagagacaaacttaagttagattttaggaggaaattttttactctgagggtggtaaagcaccagaacaagcatccagagaagytgtgtacgttccatccctggaggcattcaagatcaggttagatgcatcattgracagcctgatctggtgtgtggcaaccctgcccacggtagggggtttaaaagtagatgatctttacagaccyttccaactcatatcattccatgattctakgacaaaatgtttaaaatctaagtactktatcacyagtgtcattaggacttcaagcatgcagtrctgtggctctcctatttctgatagccatatgaaatcatagatgtttctgcatgatattgatttatgagtcctaactacaaaataacacatgcagatggtttctaaaatgcacttggagcaccttagaaagattatcacagtttccagcacctttgcacagtgagataaactctaggaacaagtatgctacattagtatcagtgtcaagcagacattgcagggtcagtgaacaaatac

SEQ ID NO: 59910 - DNA, 600 bp, Chicken  19866894318661_5
gatagtgatagcacaagggagaacagttttaaactagaagagacaaacttaagttagattttaggaggaaattttttactctgagggtggtaaagcaccagaacaagcatccagagaagytgtgtacgttccatccctggaggcattcaagatcaggttagatgcatcattgracagcctgatctggtgtgtggcaaccctgcccacggtagggggtttaaaagtagatgatctttacagaccyttccaactcatatcattccatgattctakgacaaaatgtttaaaatctaagtactktatcacyagtgtcattaggacttcaagcatgcagtrctgtggctctcctatttctgatagccatatgaaatcatagatgtttctgcatgatattgatttatgagtcctaactacaaaataacacatgcagatggtttctaaaatgcacttggagcaccttagaaagattatcacagtttccagcacctttgcacagtgagataaactctaggaacaagtatgctacattagtatcagtgtcaagcagacattgcagggtcagtgaacaaataccctaaagcccaagtgtttattttagag

SEQ ID NO: 59911 - DNA, 600 bp, Chicken  19866894318661_6
atagcacaagggagaacagttttaaactagaagagacaaacttaagttagattttaggaggaaattttttactctgagggtggtaaagcaccagaacaagcatccagagaagytgtgtacgttccatccctggaggcattcaagatcaggttagatgcatcattgracagcctgatctggtgtgtggcaaccctgcccacggtagggggtttaaaagtagatgatctttacagaccyttccaactcatatcattccatgattctakgacaaaatgtttaaaatctaagtactktatcacyagtgtcattaggacttcaagcatgcagtrctgtggctctcctatttctgatagccatatgaaatcatagatgtttctgcatgatattgatttatgagtcctaactacaaaataacacatgcagatggtttctaaaatgcacttggagcaccttagaaagattatcacagtttccagcacctttgcacagtgagataaactctaggaacaagtatgctacattagtatcagtgtcaagcagacattgcagggtcagtgaacaaataccctaaagcccaagtgtttattttagagaaattcy

SEQ ID NO: 59912 - DNA, 600 bp, Chicken  19866894318661_7
gaagagacaaacttaagttagattttaggaggaaattttttactctgagggtggtaaagcaccagaacaagcatccagagaagytgtgtacgttccatccctggaggcattcaagatcaggttagatgcatcattgracagcctgatctggtgtgtggcaaccctgcccacggtagggggtttaaaagtagatgatctttacagaccyttccaactcatatcattccatgattctakgacaaaatgtttaaaatctaagtactktatcacyagtgtcattaggacttcaagcatgcagtrctgtggctctcctatttctgatagccatatgaaatcatagatgtttctgcatgatattgatttatgagtcctaactacaaaataacacatgcagatggtttctaaaatgcacttggagcaccttagaaagattatcacagtttccagcacctttgcacagtgagataaactctaggaacaagtatgctacattagtatcagtgtcaagcagacattgcagggtcagtgaacaaataccctaaagcccaagtgtttattttagagaaattcyatatataatggccttgacattaaatgttt

SEQ ID NO: 59913 - DNA, 600 bp, Chicken  19866894318661_8
agtgtcattaggacttcaagcatgcagtrctgtggctctcctatttctgatagccatatgaaatcatagatgtttctgcatgatattgatttatgagtcctaactacaaaataacacatgcagatggtttctaaaatgcacttggagcaccttagaaagattatcacagtttccagcacctttgcacagtgagataaactctaggaacaagtatgctacattagtatcagtgtcaagcagacattgcagggtcagtgaacaaataccctaaagcccaagtgtttattttagagaaattcyatatataatggccttgacattaaatgttttttatgcatgcgtatgatctctatccaaatcacaggttgctgtaatttacttcaggattattattgctgctctatgaaaaagcttggtgcaggttttttgttgttgttgttgctgttgtttttcctttttttttcttttctttccttttgtgctcttactctttatcatctattgatggattagagaaaggactttgaattattaaagcatattcacccagacagatacacacacatatacacacacacatatatatctgggatttatttc

SEQ ID NO: 59914 - DNA, 599 bp, Chicken  19866894318662_1
  misc_feature (1)..(209): n is any nucleotide
nnnnnnnnnnnnnnnnnnnnnnnnnnnnnnnnnnnnnnnnnnnnnnnnnnnnnnnnnnnnnnnnnnnnnnnnnnnnnnnnnnnnnnnnnnnnnnnnnnnnnnnnnnnnnnnnnnnnnnnnnnnnnnnnnnnnnnnnnnnnnnnnnnnnnnnnnnnnnnnnnnnnnnnnnnnnnnnnnnnnnnnnnnnnnnnnnnnnnnnnnnnnnnnnnatttgttggtttttttctgtccatggttttaatatggctttttaaataatttttttgtgtgtatgcagtatttcccatgctgaaaaatgtygaataacactttcrttctatgaacatttactagaatagtaaaataatattcacttaatatccttcttatattgagattaaaaaaaaaaacacatgcatatctgctcacttcaaaggaggattggggaaaaaaaataggtggtaactaatttgaattatggaatttcacaagcagtttaaaatctgtattttctttggatgtgtagcttttttgttgtttatgtgtttttaatttaaggctacagaaacttcagaagcaggcctgcagtcaaaactgaaacaactggctcgccaagcatt

SEQ ID NO: 59915 - DNA, 599 bp, Chicken  19866894318662_2
  misc_feature (1)..(195): n is any nucleotide
nnnnnnnnnnnnnnnnnnnnnnnnnnnnnnnnnnnnnnnnnnnnnnnnnnnnnnnnnnnnnnnnnnnnnnnnnnnnnnnnnnnnnnnnnnnnnnnnnnnnnnnnnnnnnnnnnnnnnnnnnnnnnnnnnnnnnnnnnnnnnnnnnnnnnnnnnnnnnnnnnnnnnnnnnnnnnnnnnnnnnnnnnnnnnnnnnnnatttgttggtttttttctgtccatggttttaatatggctttttaaataatttttttgtgtgtatgcagtatttcccatgctgaaaaatgtygaataacactttcrttctatgaacatttactagaatagtaaaataatattcacttaatatccttcttatattgagattaaaaaaaaaaacacatgcatatctgctcacttcaaaggaggattggggaaaaaaaataggtggtaactaatttgaattatggaatttcacaagcagtttaaaatctgtattttctttggatgtgtagcttttttgttgtttatgtgtttttaatttaaggctacagaaacttcagaagcaggcctgcagtcaaaactgaaacaactggctcgccaagcattagataggtgagtat

SEQ ID NO: 59916 - DNA, 600 bp, Chicken  19866894318667_1
agagatgggtatcattcaacacacctctatcaggaacaaattactgttaatgattctaatttacctctgggagaaggtgtcaaatgcagagtggacaagacgccaagagacagtttccaaaactttgctaaattctcaggccagatgagcagcatggtctagctggactactaaaaggatgaatatttgtaggttgctccaaaaataatgcctcctgtttgtttccatggacaccacagtagatacaaagagtgcagcaacactgtttgatagactaaattctcagctactaaacactayttctcaactcaaacactatcattagctgtgcatttttaccagcaatgaacaagagcctgagtgctacacttaaaaaaaatctgcatggctgtctggaacacagcttgtctttcacatcaytgtcgccagtgctgaaatgtaccactgcctcactgaactcacatccactgattggtcactacaaatgtccagcaaacgtcaatgaatgtcaatgggtgccattttttctgcacagagaaattcaattccacccctttgctttgtacgcacttccatgacagacgccattttgccacactg

SEQ ID NO: 59917 - DNA, 600 bp, Chicken  19866894318667_2
aactttgctaaattctcaggccagatgagcagcatggtctagctggactactaaaaggatgaatatttgtaggttgctccaaaaataatgcctcctgtttgtttccatggacaccacagtagatacaaagagtgcagcaacactgtttgatagactaaattctcagctactaaacactayttctcaactcaaacactatcattagctgtgcatttttaccagcaatgaacaagagcctgagtgctacacttaaaaaaaatctgcatggctgtctggaacacagcttgtctttcacatcaytgtcgccagtgctgaaatgtaccactgcctcactgaactcacatccactgattggtcactacaaatgtccagcaaacgtcaatgaatgtcaatgggtgccattttttctgcacagagaaattcaattccacccctttgctttgtacgcacttccatgacagacgccattttgccacactgcccctctgctgccatctgtcacacagcaacaacatggaaaggaatcctggtggggaaggttcaaactctactgccataccaccaccatctgcctctgacatcctgaaccaacataataaa

SEQ ID NO: 59918 - DNA, 599 bp, Chicken  19866894318673_1
  misc_feature (1)..(49): n is any nucleotide
nnnnnnnnnnnnnnnnnnnnnnnnnnnnnnnnnnnnnnnnnnnnnnnnntcagcaagcatgggatggctgctgagctccgtgttttggggttttggatgctttttcagcaccatcctttaatacttatgtcttcagtttattgtatgctctttttgcatcgggctcagaggttacttctgcagcccttatgggaagattttggggtgctcagaggatggctggctgatggtccttagagcaggagcccggctctgccctcctgggagcagagctgctgatgtctgcagtgcagcaaagcrgctcctcgaggatctgtacctacacatccctccttccttgctccgccgatggaaccgtrctgccttgcttatgcaagctggcagcagaacaagaaataagttataacagaaagcagaagaatttcgagccgagatcgaactcccgcagtgtttacagggtggaaatttacccagaaacgcagttttccaaatgcctcttactgtcaaagcttttttgctgctggctacttactaattcggtgtgagcagctctgcaccagctttcctgagcgtgctccccccatttgtgccctgtatgc

SEQ ID NO: 59919 - DNA, 600 bp, Chicken  19866894318673_2
tgggatggctgctgagctccgtgttttggggttttggatgctttttcagcaccatcctttaatacttatgtcttcagtttattgtatgctctttttgcatcgggctcagaggttacttctgcagcccttatgggaagattttggggtgctcagaggatggctggctgatggtccttagagcaggagcccggctctgccctcctgggagcagagctgctgatgtctgcagtgcagcaaagcrgctcctcgaggatctgtacctacacatccctccttccttgctccgccgatggaaccgtrctgccttgcttatgcaagctggcagcagaacaagaaataagttataacagaaagcagaagaatttcgagccgagatcgaactcccgcagtgtttacagggtggaaatttacccagaaacgcagttttccaaatgcctcttactgtcaaagcttttttgctgctggctacttactaattcggtgtgagcagctctgcaccagctttcctgagcgtgctccccccatttgtgccctgtatgcacatacccatcagccaaaggctcagctcttctgcagggctctcagggagcaatactcttg

SEQ ID NO: 59920 - DNA, 600 bp, Chicken  19866894318675_1
cattgataaacaaggcgtacagcttatagaatggaggatgtttcagggtaaatgtcttcaaaaagctaagcgcttatcaacattctgagtttcctatggctgacagacggttgaaaatttgcagaggctgcttgtggttaagattttagtgaaagcttttcacaggtatttcacagtttatacgtatataaagtatttaactttacagctgtcagacccaatactttcagcctcacccagtatttcagatctaaatttctaaatgtgatgtatgtgactggaattgttttaacactctawttttctcttttcattcacttctttcctttgtgggtgtgggtgggacattgaaggtcagactggtgatgaaagtgaagagttacaactcattattcatatgacctgatactgtgaatctggtcaaaaatgtaggctgtcattatgctgcattgcagttcacctccactcttttctcctggtaacacctgtcctaaggataagagatgtcacagcctgtgagtctccctttgctaataactgctgatcattccgaaatgtgtggtgatcagcttgctgatgggaactacaattgcagagcag

SEQ ID NO: 59921 - DNA, 600 bp, Chicken  19866894318678_1
aacatggagtagcataaaagaaaatatgtctggaagggagctagacaggtattcttggtcattctgctgcccgggagtaggatcagctataccaaagccttttgcaaggggatgcctctccagcctagtcttaaaagcatgaagtcttcataaacttcaaagcagacagcctttcctgtgtcagtgacttcagtgaatctcaaagagttgtgtctcaaagaaaaggccaagatttagagatgaaacatgcagccaaatttgagttttcagtgtcagctgctccactgcttcagaataccyaaaratatagagatcattgattgtctcaaagcacattagtgtcagtgaacctgagaatctagagtgccattagaactagctttttcattacatgaaaattttaacatttatgcttcaattttttacctaagccaggcactgaccaaaatttgtagccaaagcaaactaataccccaaatactttagttttcagtactaagatatccacatgtctacaattaacaagcatgttaaccctgttcttgaatattaataatttttgccattgtggctactgcgttcatatctgaactttatgag

SEQ ID NO: 59922 - DNA, 600 bp, Chicken  19866894318678_2
tggagtagcataaaagaaaatatgtctggaagggagctagacaggtattcttggtcattctgctgcccgggagtaggatcagctataccaaagccttttgcaaggggatgcctctccagcctagtcttaaaagcatgaagtcttcataaacttcaaagcagacagcctttcctgtgtcagtgacttcagtgaatctcaaagagttgtgtctcaaagaaaaggccaagatttagagatgaaacatgcagccaaatttgagttttcagtgtcagctgctccactgcttcagaataccyaaaratatagagatcattgattgtctcaaagcacattagtgtcagtgaacctgagaatctagagtgccattagaactagctttttcattacatgaaaattttaacatttatgcttcaattttttacctaagccaggcactgaccaaaatttgtagccaaagcaaactaataccccaaatactttagttttcagtactaagatatccacatgtctacaattaacaagcatgttaaccctgttcttgaatattaataatttttgccattgtggctactgcgttcatatctgaactttatgagacaa

SEQ ID NO: 59923 - DNA, 600 bp, Chicken  19866894318684_1
aagaggagagatttagactggatatagaaatgtttttttttacagtaagggtggtgaagtcctggaacaggttgcccagagatgtgtcagatgccccatccctggagatgttcaaggtcaagctggctgaggctctgagcaacctaatctaggtgtcagtgtccctgtttaatgcaggggaactggactagatgacccttaagggtcccttccaactcaaacaattctatgacccctttaaattactaagcagggctcaatcctctgtttgaaaatgtgcccaggagagcatactagagwttttaaggaaaactgcctcgagcttctgtctcctaggtgaaggctttgatcgctagggaacagattaagctgatcaacagcactttccaatgtgcataagacaatgaaagtattctaagtgaaattcagtcctttcaatgtcaattaacttttgctacaatcttcacactttactgactaatactgtaatatattattttatttatttaattataaataacagtgccttctttgtaggaaaaaaaaagaggtatgccatagaagttgaggtcaggattggcataaaccaggccagaactt

SEQ ID NO: 59924 - DNA, 599 bp, Chicken  19866894318690_1
  misc_feature (1)..(66): n is any nucleotide
nnnnnnnnnnnnnnnnnnnnnnnnnnnnnnnnnnnnnnnnnnnnnnnnnnnnnnnnnnnnnnnnnnctgcttgctcagcctgcaggccacaattagatgccatcagcaaattcgggcagcttgcctgggctgcagtctttcatctctggaagactgacaggcatctctcggatccgcaggcagaggaaggagctgggatccgtttgaaggacttggctcgtggggaaggaacacatggttcaaaaccacagaaaaatgaaagttatgttttatataacactaaaggaagccctgtgctgraggagcggacattaaccctgcagctgagggctgtagtgccaaggtctccagtcccctctctgtcaccatctcagggcactgccctggtccatgcagtaccagcttagcttgtcttgccaagaggacaaggtggttaaaccaccaggaaatgatgagatgtgtcagttctatatccctatagatatatagcagctttagcaaggtcattgcatgcctgtgcatgatcctgacttttggttggaagcgtctatcttcctcttcctcytgggactgtcccacagactttcttcccatcaaca

SEQ ID NO: 59925 - DNA, 600 bp, Chicken  19866894318690_2
tgttttatataacactaaaggaagccctgtgctgraggagcggacattaaccctgcagctgagggctgtagtgccaaggtctccagtcccctctctgtcaccatctcagggcactgccctggtccatgcagtaccagcttagcttgtcttgccaagaggacaaggtggttaaaccaccaggaaatgatgagatgtgtcagttctatatccctatagatatatagcagctttagcaaggtcattgcatgcctgtgcatgatcctgacttttggttggaagcgtctatcttcctcttcctcytgggactgtcccacagactttcttcccatcaacaaagagtgggacctgcgcccagtgactcaggctgacttggtatccttggtactggtgttggggaagggtatttgcagagcaggaccagcgatgaggggaaaaggatgtgatgcaggcagggaggctgccagggtggcaaggtcaggatgcctggcccagccccaggagggggacaggaaggggtgtggggcaggactgagcaaggggctggacacccaggctccatagctaggagtcccagggaggcagggctcattactgctgcaa

SEQ ID NO: 59926 - DNA, 600 bp, Chicken  19866894318694_1
ttattggctgggaaactacttccttcctcagtgcttttttttgcaaatgcagttccaagaaatcctctcattaagttgctgttagctatgcagtgacattctcaggaaatctggtttacttgttactgctgaaactttctgagttcaggttttccaaacattttacccaatgcataattggaagacaatgattattccaccagggtgaaaaatttcataaattatttaaaaatatatatatattcaacagtatcactgtgcatttaatcacaacacaagtagaaacgtttgaagaacaaygtgtgtttagaacaataattgaatactaggtgaaaactgagtcctgacagcttcttcctaggccatgttttaaacaaaaatggttagtgctctaaaagacaggctgtggtgttaatgcagggcagttaaacaaaaatgaccttttagattttgcatttctctctctttaacatgagtgattcaactctgagaatttgggttttaaaagtttgtatagaattaaatgaacaggtgctacttttaacagtcttattatttagtttttcatgttatttattacttagtatttaatattttttt

SEQ ID NO: 59927 - DNA, 600 bp, Chicken  19866894318694_2
cttcttcctaggccatgttttaaacaaaaatggttagtgctctaaaagacaggctgtggtgttaatgcagggcagttaaacaaaaatgaccttttagattttgcatttctctctctttaacatgagtgattcaactctgagaatttgggttttaaaagtttgtatagaattaaatgaacaggtgctacttttaacagtcttattatttagtttttcatgttatttattacttagtatttaatatttttttagcttcaacaaatttgttttgatgattatgactgagaatcaatttttttyttttagctgcattgaagcatgggaggtacagatcagtgctatgtactgcctggtgcaacatgctgttctcagcagttgttttgatcctgtggaactatttccaaaggttaacaatgagtgtaaggccccattgaagcacagtaactagcacaacttcttccccttctttgtgtatctctcttgtggtatatcaagccaacccatttgtgtacatcataaaagtcctccctggtttggtcccactcaggcttccctttggcaatgtgatgtggagtcctgccctcttatggcaatgatgtc

SEQ ID NO: 59928 - DNA, 465 bp, Chicken  19866894318694_3
gtggagtcctgccctcttatggcaatgatgtcagccctggtcatatctgtgtgtgtgtgaacatctgtatacattgtgctgtgctgtctctgcgcttgaagaagaaaactctcattgacatattctctcttgtccgtgacagacaatctcaatttctcacctgtttatgcctgagagtgttacgattgtttattgctaaggcttaaatctatgtgacaggcttgagccagtctagaggtttggttatacctccaaggcagttccactctcccattttgccccattttcttctcttcaacyctttgccttgcaatcttgacctctctgttgagctggctctgtgctttctctgatcttgctccaagccaatgcaaacttgctcaaatagtagaaaatcaatctagtggaacaggaaaaacactttttttttttttttttcccttctgtgttaaacgttggttactg

SEQ ID NO: 59929 - DNA, 600 bp, Chicken  19866894318697_1
agaaaaaacggaaagctgaatccttttgacataggccagaccactattctgttcactacccaagttaatctagttcaaacttctgacggggcacggatttagggctttttgctagtttgtttgtatttaagactgaaaggggatctccaacatctcattttaactacttttctagtcattcccacatttttagatgttttgtgaaaaactgaaagaaaaaaagcatgatcttatttgtacttttttaaatgggtattcagaacatttttttaagtctatttattatatgtattactatayatactgaccttcttatacttccaaatgtctgtgcgtgacctaaaaatcttccaaaatcaatgtgaaacatgtgtccagaattcgtcaacattatattgtcattgtgtcggtcacaaactcctaaaatgaaggtgacaacacaccagccagcacaggaatgaaagaaattccttattgcctagttaattaaacaaaagcatttattagaaatacagagacactttctttttttcttttttctttttttctttttttttttttccaatgctaaaagcaaataaatgtggttctacaaatgtt

SEQ ID NO: 59930 - DNA, 599 bp, Chicken  19866894318698_1
  misc_feature (1)..(134): n is any nucleotide
nnnnnnnnnnnnnnnnnnnnnnnnnnnnnnnnnnnnnnnnnnnnnnnnnnnnnnnnnnnnnnnnnnnnnnnnnnnnnnnnnnnnnnnnnnnnnnnnnnnnnnnnnnnnnnnnnnnnnnnnnnnnnnnnnnnnnnactgactgagatttgactcccaactggttaatttcccctgtaatatggtaaacaaagtcactttaaaaaacaaacaaaaaacatcacttggtaattatttctgcagcatgatggtaacatttactaatactttattgttaagatcatggattgaagaaggctgtgmagaaaatactctgctttgaataaaatccactgatactgcagtaattgctgagcacatggaaggaattggtgaatgtcagcaggatagcaatcattcgggtgggatatctggaggtttgacagcagcttactgtgagtagatggaaagagtgaaaaatagatgctcagtaggtgtaggaccttycctaccaaccctgtttcacagagccacttaaaactggaagtgtatgaatttaaaaggatgaaaactttattttttttccacaatctatggcactggatgtgagaagaactagtttt

SEQ ID NO: 59931 - DNA, 600 bp, Chicken  19866894318698_2
aaacaaagtcactttaaaaaacaaacaaaaaacatcacttggtaattatttctgcagcatgatggtaacatttactaatactttattgttaagatcatggattgaagaaggctgtgmagaaaatactctgctttgaataaaatccactgatactgcagtaattgctgagcacatggaaggaattggtgaatgtcagcaggatagcaatcattcgggtgggatatctggaggtttgacagcagcttactgtgagtagatggaaagagtgaaaaatagatgctcagtaggtgtaggaccttycctaccaaccctgtttcacagagccacttaaaactggaagtgtatgaatttaaaaggatgaaaactttattttttttccacaatctatggcactggatgtgagaagaactagttttggtagttcaaagtacctggtacacttaatactttgagatatttatggaaataccatcaggcagtttgataacatcccatatggatttgtagtctgattagtagatccatatggggttgaactcaatgatcaccagaggtcccttccagcccctacaattctgtgactctgtgataaggtatcag

SEQ ID NO: 59932 - DNA, 600 bp, Chicken  19866894318698_3
tttactaatactttattgttaagatcatggattgaagaaggctgtgmagaaaatactctgctttgaataaaatccactgatactgcagtaattgctgagcacatggaaggaattggtgaatgtcagcaggatagcaatcattcgggtgggatatctggaggtttgacagcagcttactgtgagtagatggaaagagtgaaaaatagatgctcagtaggtgtaggaccttycctaccaaccctgtttcacagagccacttaaaactggaagtgtatgaatttaaaaggatgaaaactttaytttttttccacaatctatggcactggatgtgagaagaactagttttggtagttcaaagtacctggtacacttaatactttgagatatttatggaaataccatcaggcagtttgataacatcccatatggatttgtagtctgattagtagatccatatggggttgaactcaatgatcaccagaggtcccttccagcccctacaattctgtgactctgtgataaggtatcagtcatacgtagagattgtgttataggtgaattcttattgtttctaatatgactatttaaccttacacctag

SEQ ID NO: 59933 - DNA, 600 bp, Chicken  19866894318700_1
atccccattgcatcctacagcagagggaaggcttcatccctccccgtggctctgctgggggctccctggggagaaatcggtctttcccactgccctggatttgcaggcaggtttgtaccccataaacagggacacaccaaccctgggccgtgctgttccttgcaagctggctttgttcattgcccctgtggcactgggatcccggtgggacgggctgtggctgcaggctcagagctgctgcagggtcatagggtgggtgctgcagctgaagatgagcgcaaccgcgctgtgccctttgayggctgattttgggtctgcatccatccctgcagccgggccggggagagatgcggggccaaccgtgcttccctccccccacccccaaacgccaccgtatattaaatttcacaaataaaaccgcgagtgaagagcgccgcggagggaactgctaaaaatatccccgaggctgaagccgggattgtgcgggcgaattcctcgcagccatcccggccctttcccagcagcgttccctgcggggccgggaagcggtgcccgggggtggtgggaggtgggcggcgcctgcaggggcgcggagtgttt

SEQ ID NO: 59934 - DNA, 599 bp, Chicken  19866894318702_1
  misc_feature (1)..(166): n is any nucleotide
nnnnnnnnnnnnnnnnnnnnnnnnnnnnnnnnnnnnnnnnnnnnnnnnnnnnnnnnnnnnnnnnnnnnnnnnnnnnnnnnnnnnnnnnnnnnnnnnnnnnnnnnnnnnnnnnnnnnnnnnnnnnnnnnnnnnnnnnnnnnnnnnnnnnnnnnnnnnnnnnnnnnnngagccttcctctccctcctcctcctcctcaggtcctgctgcagccgcagcatccccacggggctccccccagcgcctcacaaacctccttggagggagcagtctggctcagcatggggtgggctgggaggttgygggggttccccccagcygggctgcaggcactgagggtgcagygctgctgctgacagggctgggtgagtgctggccctcgtcccgtccggctgccggtgggtcgcccgggcccatcgctgacgcatatcccttcctttgggtggtggtttttgtttttcccttccccaggagctctgataaacatccccaagctgtctgatatccgggccggtgctgacccttgcggtgccaggatcaccgagccccggcacgcgctgcagggacgagcaaagccccacactgaggctgcagyggggaca

SEQ ID NO: 59935 - DNA, 599 bp, Chicken  19866894318702_2
  misc_feature (1)..(149): n is any nucleotide
nnnnnnnnnnnnnnnnnnnnnnnnnnnnnnnnnnnnnnnnnnnnnnnnnnnnnnnnnnnnnnnnnnnnnnnnnnnnnnnnnnnnnnnnnnnnnnnnnnnnnnnnnnnnnnnnnnnnnnnnnnnnnnnnnnnnnnnnnnnnnnnnnnnnngagccttcctctccctcctcctcctcctcaggtcctgctgcagccgcagcatccccacggggctccccccagcgcctcacaaacctccttggagggagcagtctggctcagcatggggtgggctgggaggttgygggggttccccccagcygggctgcaggcactgagggtgcagygctgctgctgacagggctgggtgagtgctggccctcgtcccgtccggctgccggtgggtcgcccgggcccatcgctgacgcatatcccttcctttgggtggtggtttttgtttttcccttccccaggagctctgataaacatccccaagctgtctgatatccgggccggtgctgacccttgcggtgccaggatcaccgagccccggcacgcgctgcagggacgagcaaagccccacactgaggctgcagyggggacagtccccgttacccaggg

SEQ ID NO: 59936 - DNA, 599 bp, Chicken  19866894318702_3
  misc_feature (1)..(124): n is any nucleotide
nnnnnnnnnnnnnnnnnnnnnnnnnnnnnnnnnnnnnnnnnnnnnnnnnnnnnnnnnnnnnnnnnnnnnnnnnnnnnnnnnnnnnnnnnnnnnnnnnnnnnnnnnnnnnnnnnnnnnnnnnnnngagccttcctctccctcctcctcctcctcaggtcctgctgcagccgcagcatccccacggggctccccccagcgcctcacaaacctccttggagggagcagtctggctcagcatggggtgggctgggaggttgygggggttccccccagcygggctgcaggcactgagggtgcagygctgctgctgacagggctgggtgagtgctggccctcgtcccgtccggctgccggtgggtcgcccgggcccatcgctgacgcatatcccttcctttgggtggtggtttttgtttttcccttccccaggagctctgataaacatccccaagctgtctgatatccgggccggtgctgacccttgcggtgccaggatcaccgagccccggcacgcgctgcagggacgagcaaagccccacactgaggctgcagyggggacagtccccgttacccagggatgcagagcccatcacagcttggca

SEQ ID NO: 59937 - DNA, 538 bp, Chicken  19866894318702_4
gaggttgygggggttccccccagcygggctgcaggcactgagggtgcagygctgctgctgacagggctgggtgagtgctggccctcgtcccgtccggctgccggtgggtcgcccgggcccatcgctgacgcatatcccttcctttgggtggtggtttttgtttttcccttccccaggagctctgataaacatccccaagctgtctgatatccgggccggtgctgacccttgcggtgccaggatcaccgagccccggcacgcgctgcagggacgagcaaagccccacactgaggctgcagyggggacagtccccgttacccagggatgcagagcccatcacagcttggcagtgggcgggaggatgcckaagaggacggtgactcagtgacttgctcactgtcccacaggacagtgctggggtggcaccggaggcagctgagtggagattccgcgtcagcccagctgtctccttgcgctcagggccgtgcatcaccgcgcattccagctgtgcatcacctccagaagcacaaggctgggt

SEQ ID NO: 59938 - DNA, 471 bp, Chicken  19866894318702_5
tgggtgagtgctggccctcgtcccgtccggctgccggtgggtcgcccgggcccatcgctgacgcatatcccttcctttgggtggtggtttttgtttttcccttccccaggagctctgataaacatccccaagctgtctgatatccgggccggtgctgacccttgcggtgccaggatcaccgagccccggcacgcgctgcagggacgagcaaagccccacactgaggctgcagyggggacagtccccgttacccagggatgcagagcccatcacagcttggcagtgggcgggaggatgcckaagaggacggtgactcagtgacttgctcactgtcccacaggacagtgctggggtggcaccggaggcagctgagtggagattccgcgtcagcccagctgtctccttgcgctcagggccgtgcatcaccgcgcattccagctgtgcatcacctccagaagcacaaggctgggt

SEQ ID NO: 59939 - DNA, 600 bp, Chicken  19866894318705_1
acaaaatgtggtagaggtgaatgtgttcatttgatctagaagtgaaagtggcatttaaaaatagttgagtggcacctgggaagtctgcctctgtttttaatgtcaggataataattgcaagatgaacgggagataccaatcccaggggaatgataggaagtaatatgcttagagtcaattttgaattaaaatgaagaacctgaagaatgcaggtgaatatgttcataaattttgcctcatatatttatgtattttccattggcagatgaaacagtcgtccatgataggaaaaacataaamatttgtatgtcatcttcttattgacagtcgaaactgtattttcaactttggtgcaaaaatcatcaaaacccttaacaaagggaaaagggtttcaaaaatacatttgttttttttttttttaatcatgtgtataaaggtagcattttattcctgcaagaaaatgcctgtataggcacagcttccgttttgtttccaaaatggattggaggaagcctcaacacagtttcctgcccaggacttgaggactgttaggtacagctcaggtgagatgtgctggtaatgagctgcagctctgcagac

SEQ ID NO: 59940 - DNA, 599 bp, Chicken  19866894318713_1
  misc_feature (1)..(176): n is any nucleotide
nnnnnnnnnnnnnnnnnnnnnnnnnnnnnnnnnnnnnnnnnnnnnnnnnnnnnnnnnnnnnnnnnnnnnnnnnnnnnnnnnnnnnnnnnnnnnnnnnnnnnnnnnnnnnnnnnnnnnnnnnnnnnnnnnnnnnnnnnnnnnnnnnnnnnnnnnnnnnnnnnnnnnnnnnnnnnnnnagaaaatcaggtgttcccaacatggaggccctactccgagcactcagcaaaagcctgctgcctctgacaagacctggtgtctccttttagatcaacaactatgcccaagcttgtccagaaatcsccagcactatcctgttccatcaggcactcatggtattcccatctcaagagtatcaatcagtggaattggttgtccaagaggctgagcaggcttcatccttggggattctcaagmcccaacgagataagaccctgagaaaccttgcctgatctaacagctgattttgctttgaacagtattaaaagcttcttgatgtccttcccaacctgagttactctattttatgaactaggagccttctgtgatgaagttacaagtttcctgttacttcatgctgtcacgtctaatttttccatctt

SEQ ID NO: 59941 - DNA, 599 bp, Chicken  19866894318713_2
  misc_feature (1)..(62): n is any nucleotide
nnnnnnnnnnnnnnnnnnnnnnnnnnnnnnnnnnnnnnnnnnnnnnnnnnnnnnnnnnnnnnagaaaatcaggtgttcccaacatggaggccctactccgagcactcagcaaaagcctgctgcctctgacaagacctggtgtctccttttagatcaacaactatgcccaagcttgtccagaaatcsccagcactatcctgttccatcaggcactcatggtattcccatctcaagagtatcaatcagtggaattggttgtccaagaggctgagcaggcttcatccttggggattctcaagmcccaacgagataagaccctgagaaaccttgcctgatctaacagctgattttgctttgaacagtattaaaagcttcttgatgtccttcccaacctgagttactctattttatgaactaggagccttctgtgatgaagttacaagtttcctgttacttcatgctgtcacgtctaatttttccatcttggttcttcaatctacacctgtcctttggcaggcatatcggtatatatgctgcacaagatccataccaacacaaagagataaatataaaatcatatgatgctactttagctgtga

SEQ ID NO: 59942 - DNA, 599 bp, Chicken  19866894318714_1
  misc_feature (1)..(250): n is any nucleotide
nnnnnnnnnnnnnnnnnnnnnnnnnnnnnnnnnnnnnnnnnnnnnnnnnnnnnnnnnnnnnnnnnnnnnnnnnnnnnnnnnnnnnnnnnnnnnnnnnnnnnnnnnnnnnnnnnnnnnnnnnnnnnnnnnnnnnnnnnnnnnnnnnnnnnnnnnnnnnnnnnnnnnnnnnnnnnnnnnnnnnnnnnnnnnnnnnnnnnnnnnnnnnnnnnnnnnnnnnnnnnnnnnnnnnnnnnnnnnnnnnnnnnnnnnngggaatagcgtgcagcagagatagcaaactgctggtatgctgggagagasaggagctctgtgagctccgtgcaaatgcctccagcacaggctggcatctgttcctaaagatccaggcaccagtcaccgatttccatgtcgagcaggggcatgacacccagcagccagacctcagctggtaccaatragtccgtcccttctgcttcaaggagtttgtccttcatactgcctgtgcagcacaacrtgtgggttggatactcagccacgcaggagagaaacagaactgctgcctgcactggaagctgtccttgctggtagcgactgcagctctgcaggatgctattttcatt

SEQ ID NO: 59943 - DNA, 599 bp, Chicken  19866894318714_2
  misc_feature (1)..(114): n is any nucleotide
nnnnnnnnnnnnnnnnnnnnnnnnnnnnnnnnnnnnnnnnnnnnnnnnnnnnnnnnnnnnnnnnnnnnnnnnnnnnnnnnnnnnnnnnnnnnnnnnnnnnnnnnnnnnnnnnnngggaatagcgtgcagcagagatagcaaactgctggtatgctgggagagasaggagctctgtgagctccgtgcaaatgcctccagcacaggctggcatctgttcctaaagatccaggcaccagtcaccgatttccatgtcgagcaggggcatgacacccagcagccagacctcagctggtaccaatragtccgtcccttctgcttcaaggagtttgtccttcatactgcctgtgcagcacaacrtgtgggttggatactcagccacgcaggagagaaacagaactgctgcctgcactggaagctgtccttgctggtagcgactgcagctctgcaggatgctattttcattactatgtgtgaggctcgtgataattgaaagctgttccactcagtcctgcagactccccagactgcaggcgcctctcgcaagcagctcctccgccaacccaaagcctgggagggctgtggcagtgccagcaagcagc

SEQ ID NO: 59944 - DNA, 599 bp, Chicken  19866894318714_3
  misc_feature (1)..(57): n is any nucleotide
nnnnnnnnnnnnnnnnnnnnnnnnnnnnnnnnnnnnnnnnnnnnnnnnnnnnnnnnngggaatagcgtgcagcagagatagcaaactgctggtatgctgggagagasaggagctctgtgagctccgtgcaaatgcctccagcacaggctggcatctgttcctaaagatccaggcaccagtcaccgatttccatgtcgagcaggggcatgacacccagcagccagacctcagctggtaccaatragtccgtcccttctgcttcaaggagtttgtccttcatactgcctgtgcagcacaacrtgtgggttggatactcagccacgcaggagagaaacagaactgctgcctgcactggaagctgtccttgctggtagcgactgcagctctgcaggatgctattttcattactatgtgtgaggctcgtgataattgaaagctgttccactcagtcctgcagactccccagactgcaggcgcctctcgcaagcagctcctccgccaacccaaagcctgggagggctgtggcagtgccagcaagcagcagttyggtgtctcccattgcaccccatgtgagaggagggggaggaatggggggggct

SEQ ID NO: 59945 - DNA, 600 bp, Chicken  19866894318714_4
cgtcccttctgcttcaaggagtttgtccttcatactgcctgtgcagcacaacrtgtgggttggatactcagccacgcaggagagaaacagaactgctgcctgcactggaagctgtccttgctggtagcgactgcagctctgcaggatgctattttcattactatgtgtgaggctcgtgataattgaaagctgttccactcagtcctgcagactccccagactgcaggcgcctctcgcaagcagctcctccgccaacccaaagcctgggagggctgtggcagtgccagcaagcagcagttyggtgtctcccattgcaccccatgtgagaggagggggaggaatggggggggctcgtgtccctggcagagcaagaaccccgatgggctctgtgtaatcttccccaaaactcagagagaagatgagaaatgaggatttgggttggtttgaaatggaaattaaacccctgagttgtttcatctccttgcactgaaaggcacaggaattccaaaggcggtttggaggcagatgctgctcctttaatctggtgttttggccagttatacacgcgtgtactcgtcctgcttggattacacttttgca

SEQ ID NO: 59946 - DNA, 599 bp, Chicken  19866894318716_1
  misc_feature (1)..(15): n is any nucleotide
nnnnnnnnnnnnnnnccttgctcagtttttctggctcatctgatgcatctaggcacatatgcttcccataaattccttctgtcttttgtcccagttcttaatctcttctggttgcagccttgacagtctccttgtactgatcttcctctctcactcagcacagggaccaggtttatgttcatgtgtagggtgctggctaccatgggagctgtgggaagagcccaggaactctgttctgatgtgtagccctattgcaggagtgaaatgggtttcatgaaaagtctggctttgttcctgtcrtccccctgaattatgggtatcagaacatcgytggtaactagaccttttgagtagctatggctccactgaatttaaggcttgtggcacaactaagcttgtgtaatcttgcatggaaggaaaagacacctctycagaaagcactattccttcttttctccagccaaactgcaagtcagatccagagcaagcagaagggtgacaataacatagagcaaagcagcccccctcccctcctcgtctccttggaaatggctgacaagcttctagcgtaacatcagtctatgttcagatgtccagaa

SEQ ID NO: 59947 - DNA, 600 bp, Chicken  19866894318716_2
tggctcatctgatgcatctaggcacatatgcttcccataaattccttctgtcttttgtcccagttcttaatctcttctggttgcagccttgacagtctccttgtactgatcttcctctctcactcagcacagggaccaggtttatgttcatgtgtagggtgctggctaccatgggagctgtgggaagagcccaggaactctgttctgatgtgtagccctattgcaggagtgaaatgggtttcatgaaaagtctggctttgttcctgtcrtccccctgaattatgggtatcagaacatcgytggtaactagaccttttgagtagctatggctccactgaatttaaggcttgtggcacaactaagcttgtgtaatcttgcatggaaggaaaagacacctctycagaaagcactattccttcttttctccagccaaactgcaagtcagatccagagcaagcagaagggtgacaataacatagagcaaagcagcccccctcccctcctcgtctccttggaaatggctgacaagcttctagcgtaacatcagtctatgttcagatgtccagaagagagaacttttggccaaatggtcgcacttcc

SEQ ID NO: 59948 - DNA, 600 bp, Chicken  19866894318716_3
ttgtactgatcttcctctctcactcagcacagggaccaggtttatgttcatgtgtagggtgctggctaccatgggagctgtgggaagagcccaggaactctgttctgatgtgtagccctattgcaggagtgaaatgggtttcatgaaaagtctggctttgttcctgtcrtccccctgaattatgggtatcagaacatcgytggtaactagaccttttgagtagctatggctccactgaatttaaggcttgtggcacaactaagcttgtgtaatcttgcatggaaggaaaagacacctctycagaaagcactattccttcttttctccagccaaactgcaagtcagatccagagcaagcagaagggtgacaataacatagagcaaagcagcccccctcccctcctcgtctccttggaaatggctgacaagcttctagcgtaacatcagtctatgttcagatgtccagaagagagaacttttggccaaatggtcgcacttcctgaaagttatgcttgattcaatggcttttacagtgcatagtgcattgctggataacctaacaggcagggtgacagcactgcccatggtactgacagatga

SEQ ID NO: 59949 - DNA, 600 bp, Chicken  19866894318726_1
tgtgtgttctgttctgttttcatcataaatatcgagctatagaggctatagtggtgcagccggcaccggggtcgccccggctcggagggatggggcagcagacgggctccatgcacgttgcatgcactgagtatttgctggcgagggtttagtttggtgtgcgtctctgagtcagtgcgtcctgcaggcggccctgcgagctccacctcaccccgccgggctcctctctccatccccggggtgtttcctggcgggtctgctcgcagcgggcgggtgtcccatacacacacggacaccccrtacccacacggacaccccgcatccgcgctacttcatgccgctgcgcagcacctggttggcggcgatgagcatcacgctgatgatgaaggcgatggcgaaggcgcagatgaggcttttccgcacgcacgtctgccggatctgctggctggagcaggctgtgggggcggccccgctcagcccacgtcccccccctcgccccccgccgcgtccccccgcgccccactcactctccacctcgacggggcactcctcggccgtgcccatgtggctctcctcctccgtcatgatgatgttctcgat

SEQ ID NO: 59950 - DNA, 575 bp, Chicken  19866894318737_1
atgtaaaactacgctcttccaccttcgtaatttctcctttttagccaaaacacctttgaaatagagtcaaatgtctaaagaaaatgaattttgaggactcagtccaggtcataggaaataagccacataaaaaatccacaaataaatcacctctaatttaagcaaaacagtaccggagactaaagacaaaccagtcctttcagctctcagaagggaaattagcaccaaaagaaggcaaagtagaagtccaaaagtgtaatttttttggtcttttcacactgaaaatttcactttaaaaawwtttttttccatttcatttcacaaaagaagaatgtggtcagacttgagtcaggcaatgtcttcacagaaagtctgagggagctggggttgttcagcctgaagacggttccagggagacctcactgcagcctgtcagtatttcaaagggagcttattaaaaagattgagaacaacttattacacaggcagattgtgataggacaagagggaacgcttttaaactaaaagaggaaagatttaaattagatattaggaggaaaatcttcactagaaga

SEQ ID NO: 59951 - DNA, 574 bp, Chicken  19866894318737_2
tgtaaaactacgctcttccaccttcgtaatttctcctttttagccaaaacacctttgaaatagagtcaaatgtctaaagaaaatgaattttgaggactcagtccaggtcataggaaataagccacataaaaaatccacaaataaatcacctctaatttaagcaaaacagtaccggagactaaagacaaaccagtcctttcagctctcagaagggaaattagcaccaaaagaaggcaaagtagaagtccaaaagtgtaatttttttggtcttttcacactgaaaatttcactttaaaaawwtttttttccatttcatttcacaaaagaagaatgtggtcagacttgagtcaggcaatgtcttcacagaaagtctgagggagctggggttgttcagcctgaagacggttccagggagacctcactgcagcctgtcagtatttcaaagggagcttattaaaaagattgagaacaacttattacacaggcagattgtgataggacaagagggaacgcttttaaactaaaagaggaaagatttaaattagatattaggaggaaaatcttcactagaaga

SEQ ID NO: 59952 - DNA, 600 bp, Chicken  19866894318739_1
tttgcgtgtaacatcagatatagacatgaccttcagaaattgccttaatttccaaaatcacattttgctggataaatctagtatgcaatcaaatatgctgcgtttgcactctctgcagtttgaaatgcacacagccaacactgtccaattaaccgtgaaggaggctgaaggtttgaacctagttctaaggaatggccattagcaaattatactgtttgatttcttatgttaagatatattaaaaatgtgacgcttaaggattacacacagaggactttctgaaaattacagaaaaaaaartggtgttttttttttaactggacatctggcacttccagatgatgtcatcttattcagaagcgttggccggataagtagtaaatggttgacttaatttatactgtagtctggttgttctgttatgaatagaaactaaagctactgaaaaaatayttagtttgcttttttgctttgaaataccaaagaataagggtgaccaataaaaaggaggttttatgtttcagacaaatttcatagatttttacaagaaaattttgagatattttgtctttttgccaccttggattccctgttttttca

SEQ ID NO: 59953 - DNA, 600 bp, Chicken  19866894318739_2
cgtgaaggaggctgaaggtttgaacctagttctaaggaatggccattagcaaattatactgtttgatttcttatgttaagatatattaaaaatgtgacgcttaaggattacacacagaggactttctgaaaattacagaaaaaaaartggtgttttttttttaactggacatctggcacttccagatgatgtcatcttattcagaagcgttggccggataagtagtaaatggttgacttaatttatactgtagtctggttgttctgttatgaatagaaactaaagctactgaaaaaatayttagtttgcttttttgctttgaaataccaaagaataagggtgaccaataaaaaggaggttttatgtttcagacaaatttcatagatttttacaagaaaattttgagatattttgtctttttgccaccttggattccctgttttttcatatgtaaaactcttccatcctgtatttcctgttgtaagtattttgtgcaggacttgtgcacccagatatttctacacaattacagctgaaagtatttcttttcagtattttaaaccaaaaaaaggcatttttttcctctgattttttctttac

SEQ ID NO: 59954 - DNA, 600 bp, Chicken  19866894318741_1
agttctgattgtttattaaaaggaaagtatcccacagaaaagaatccctctttgcattcacattttaggaatgtgtaattggacagcaatataaaatgtttgatggttactgaatcacaacacagttttcttggaactgtcttttgtatcccaccattaccctcatatcacttccctcttctctcactgtggctgtacacaacagtcttttgcttatttctgctctagcctggttttcttccaggcactacagtaaatgcagacaactgttgcagctcctttctctgttagcatggaacrtgctaaagaagcctagatctgagctgggaatagcctagacctgaaaataattgcttgacaagactgcataccagacaatactgatactttgtctcatttaaataatgataaaaactcttgtttccttacaactgatgagaaaagactccatcaaatcttgttcttttataacactgaaagtaagtgtgagaactgctgattatctgataagaacacaattaatttgtactcatactcattaatctttcttaatgcatgtcagcccattccatttgatccatgacctctgtccccagtctt

SEQ ID NO: 59955 - DNA, 599 bp, Chicken  19866894318742_1
  misc_feature (1)..(33): n is any nucleotide
nnnnnnnnnnnnnnnnnnnnnnnnnnnnnnnnnccccaaaaattccccacctcggatttgagaccccaaaaggagacagaagtctcaaaatagagctgaaacgggcaccatcagcgtgcaaacgatcctgtttatagaaatgggaacagggtcaggccgtcggattggcagttgctgcctggtggaagcacgagccgagcatgactgaatttcctcaacatttttatatgcgtgttaagatttattttaagaattcaccatagcaattccgtgctctcgtattagtttgtaatatatggmaggaaaaaagaccacctcaatttaaaatgaaatcacaaactaggacttatccatgctattaagccttacatgaagatccttcagagagaccctgacattttaagctaacatcaatattttagaatagaaactatactctgaagatataaatattaagacagaacagaagcctttctcttaattagctagaaaaaattagcatgcaccttaatcactgtgcagtgtgttattccagatttatcggtaaggttgggaatttttctggttcagggggagaaaggaaaacatgtggcgatggc

SEQ ID NO: 59956 - DNA, 600 bp, Chicken  19866894318743_1
cagagcgggatggtcggccgccggcgctgccatgtcgtccctgacgaccttccaagtagggagagaaccccacctgcccggtttgtggttggttcccgggacgatgagacagactgcctgggatcaaacatgaagatggatgagacagatttctttgaagatgaagaagaggaggagtcggtaaggagctcccggcatccggggctgtgtctgcacggctcctgaggctgtgggggctgcagggccgtggccctgggcagcgtggcagagccatgcagaggtgcagtgccatttctggcrtactgtcgtgctgctggacctggtgcctcttgctgcagtaaatcccagcctgttggcttgcaggtctcctctagctacagtagcggatttccttctcctagcagcttaaccccagcattgctgtaaacctttctacttcaccagggatttttttttgaggaaaactgtgggaactatgagcagggcaaagagatttctgcagaggaagcatttgctcttttctgtagcctccaggaacaggctgcaaaaaaggagaaccttttccagctcctgactgcttttggcttctgttcagcccac

SEQ ID NO: 59957 - DNA, 600 bp, Chicken  19866894318747_1
agaattatttattgttgtcctgcaccttagaggtcaagttcatttttagctgggctttgacttttctcattttctccctgcacagcttcactacgtacttgtagtcaccataagtagtttgtccactcttccagagaccataaactttacttttgttcttgagttccagccaaaggtctctgttcagccagtccagcctccttgcccattggctcgtcttccgtgacttggggatgttcagctcctgcacctttaaaattacttctttaaagtattcccagccttcctgggttcccatgmcctccagaactgcctcccaagggaccctctcaaccatgttcctaaagaggctaaagtctgccctctggaagtccaaagtgacagttctgctgtctcccctctgtgattcatcaaggatcgagaaatctagcatctcgtgatcactacaccccagatggcctacagcctttacttcccctacaagaccttctctgttaacaaacagcaggtcctggatttttcttccccttcttggctccttcaccagctgtcaggaagttatctcccacacactctaggaacctccgggactgttccctc

SEQ ID NO: 59958 - DNA, 600 bp, Chicken  19866894318750_1
ataagttacaatttaagacagaaataaattatattgcataaattgccctatgtttgtccagctaagatctcaccttagtgcaattaattacaatgcttttgaaggtaggaagaggccttctaggaaaagaagcatgtatgacaaatatttaggcttgtactgccctttagggcattcctgctcataaaacatttaaattacacattataaaatgcttaaagcaagtgcgataaagcaatggaataacgtctttgtaatttcatttttgtgctctaattcaaaaatgcttaagttgcttayatttggaaattgtttgccgaatttgaagatacaaagccatacttgtttttaaagttcaggagtacacggtatttgcctcaattactgtaaagtgataatagaaacaggccgttgaacactgatgttcccactgccctgcaaggtacctgcacacctaagcagctctcagtctgccaggaaagtgttggccttgatcgctgtgtggcagtgtctgattctctccatctcactaagctgttgtcctttctacttcccctcatcaggctttttatctagtggtgtcatgactttctcagctgc

SEQ ID NO: 59959 - DNA, 600 bp, Chicken  19866894318757_1
tgttaccatctctttctccaaaaagcactgttttctttagcttttcctttcatatatatatttcctgctctgctgaagctgcaactaaagtggaaaatatgaaagtattacatcagtattaaataatttatagctttactcactacagcactggtcttattggagggaaagggaattgttttacaatcatttacgttcaaagcacttccttgcttaaatatttcagattttaaaaaataacaataaaatcttaaatactgccccaaggagatggagactgcatgcagtaatggctctgamaactttatataaattatcataatcttcgctcagcgttgttgtgagcttaaaagtactgtgggcatttggaggaggatggggggggtcctatctcagtgcagtgcaataacccctcctcttttgtgctccacagcagccgaagagtggcacaggatgggcggtgagccctggcagctgatcgagccagtggatggcttccaccccagccaggtaaaatccttgaggcgatggcagcgagaggtgtggagagtgggatgccagtgtctgcctgcggtgtctggttgtcctgcagaggggatg

SEQ ID NO: 59960 - DNA, 599 bp, Chicken  19866894318758_1
  misc_feature (1)..(60): n is any nucleotide
nnnnnnnnnnnnnnnnnnnnnnnnnnnnnnnnnnnnnnnnnnnnnnnnnnnnnnnnnnnnactggcagcattcctgctttaactataggaatgtaatgatgatgcttcattcaacaccaaagtgacttgttttggagaacagggctcagaggtttatttcaaaactgtagtatgttgggcataatgaaatgttcatcctatgttacaccagggactgggctcacacacgacacacatggcgtgagcttgcccaagccctatagatgatgtcttacattgggtatgaggctgtgttttgtkttttactttaggcagactccctttccagtgccagaaacaacaggtaagtaaggtgagcaaaatttctggcaacaaaggtcagtttggtctattattatatttgacctccaaaaatcctagagctgttcttggacaaataggtaccaactgagagcatccagcgattgccttagaagtgtctatttcttaggctaggctaggccagagcttgctcacatccacacctggagaagtcaaaaccagaccgtgttactgcaccacttctttacataaccactgagttcttaagccaaaggcaa

SEQ ID NO: 59961 - DNA, 446 bp, Chicken  19866894318758_2
tctattattatatttgacctccaaaaatcctagagctgttcttggacaaataggtaccaactgagagcatccagcgattgccttagaagtgtctatttcttaggctaggctaggccagagcttgctcacatccacacctggagaagtcaaaaccagaccgtgttactgcaccacttctttacataaccactgagttcttaagccaaaggcaacatctcaacttgaatgtccacctaaatcccaaataaatactatatacccaagaaggctccatccaagaaagctgggagtggctgtgtrcattctggcacatgcccacatagaactattgtcctcaccacagcatgcaaccactgctaaatatttgatgtctggggagtccaggggaggatttgcgtttgcttcaagaggagagcagaaagtaggtcagcagcctcagctcgctt

SEQ ID NO: 59962 - DNA, 600 bp, Chicken  19866894318762_1
gcataagaataagacacatcaagttatttttagtagaaaggtacaagtggttatctgaggacagcatgacacaggctcttacttcagcacagcaccaaggagagctcttgcacgtgcgcttcatgtgaccttcctcatctccaactatgcacgtggaccaagctctgtgctgtgtgccacgatgctggagaaataggaatgttctgctactggttttacatgggctggctgcataggctgtgctgagctttcatattcatatcttcttccttggaagaggtgggtggaaaaacagcataygtgaaaacgctgccagcaagctctcagtaatttccagggtggaggtgtctaagcatcctccacacttgaaaaatactacataatgcatgaatgctttctctggctttacacacactcttctgaagcactagtgaggctgttttagaaacacaccaggtcaaacctgccatgtatctgttttttctcgtattccatacattccggccactgtgattcttggtcaattttttttttattttatttttggcaggcctttgtaaaaggactcactcaaaatcttactgccaaacaagcagtttc

SEQ ID NO: 59963 - DNA, 599 bp, Chicken  19866894318768_1
  misc_feature (1)..(145): n is any nucleotide
nnnnnnnnnnnnnnnnnnnnnnnnnnnnnnnnnnnnnnnnnnnnnnnnnnnnnnnnnnnnnnnnnnnnnnnnnnnnnnnnnnnnnnnnnnnnnnnnnnnnnnnnnnnnnnnnnnnnnnnnnnnnnnnnnnnnnnnnnnnnnnnnncaaatcccccagtcttgattcgggatgggaatcaaaaagtaaagagccctggctctgctttttgtaggaaacccaaaaattattagtgggcttttgcattctggatcccaaatcttgcaaaaatgcctgggtctgtgagccctgccctgggatgkgtgccctcctgatgcccaggtcggggtcctgcacccggggaggtygggttttggtgttcctgagcccagccctggctgcaggtctcacccatgcattgctttcctgcagcaagtgaagctggaggagtttgggaggccgaagatagacggtgagctgaaggtccgctccattgtgaaccacaccaagcaggacaggtgagagagcagcagcattctcctgagagagaaacgtgctaggtacattaatccccaacaaagcacgtccctgctagggtgacggccagaggagctggcttgca

SEQ ID NO: 59964 - DNA, 599 bp, Chicken  19866894318768_2
  misc_feature (1)..(100): n is any nucleotide
nnnnnnnnnnnnnnnnnnnnnnnnnnnnnnnnnnnnnnnnnnnnnnnnnnnnnnnnnnnnnnnnnnnnnnnnnnnnnnnnnnnnnnnnnnnnnnnnnnnncaaatcccccagtcttgattcgggatgggaatcaaaaagtaaagagccctggctctgctttttgtaggaaacccaaaaattattagtgggcttttgcattctggatcccaaatcttgcaaaaatgcctgggtctgtgagccctgccctgggatgkgtgccctcctgatgcccaggtcggggtcctgcacccggggaggtygggttttggtgttcctgagcccagccctggctgcaggtctcacccatgcattgctttcctgcagcaagtgaagctggaggagtttgggaggccgaagatagacggtgagctgaaggtccgctccattgtgaaccacaccaagcaggacaggtgagagagcagcagcattctcctgagagagaaacgtgctaggtacattaatccccaacaaagcacgtccctgctagggtgacggccagaggagctggcttgcaactgctgctctgtgttggaagtcgtaggagtgcacastgacagca

SEQ ID NO: 59965 - DNA, 600 bp, Chicken  19866894318768_3
ggggaggtygggttttggtgttcctgagcccagccctggctgcaggtctcacccatgcattgctttcctgcagcaagtgaagctggaggagtttgggaggccgaagatagacggtgagctgaaggtccgctccattgtgaaccacaccaagcaggacaggtgagagagcagcagcattctcctgagagagaaacgtgctaggtacattaatccccaacaaagcacgtccctgctagggtgacggccagaggagctggcttgcaactgctgctctgtgttggaagtcgtaggagtgcacastgacagcaarcaccatcagtgtgaaatcacagcacacagagctgccccagctggggatgctctgcaacrctctccaagtgctcccccagaatggggacctcagtttgcttgcttaaccagcttgcttgtttgcttgctttgggcaggtatttatttttatttgataaagtggtgatcgtctgcaaaaggaaaggatacaattatgagctgaaagaaataatcgagctgctcttccacaagatgaccgatgaccctatgaacaacaaggacattaagaaggtaggtggagcagagatcagc

SEQ ID NO: 59966 - DNA, 600 bp, Chicken  19866894318768_4
ggttttggtgttcctgagcccagccctggctgcaggtctcacccatgcattgctttcctgcagcaagtgaagctggaggagtttgggaggccgaagatagacggtgagctgaaggtccgctccattgtgaaccacaccaagcaggacaggtgagagagcagcagcattctcctgagagagaaacgtgctaggtacattaatccccaacaaagcacgtccctgctagggtgacggccagaggagctggcttgcaactgctgctctgtgttggaagtcgtaggagtgcacastgacagcaarcaccatcagtgtgaaatcacagcacacagagctgccccagctggggatgctctgcaacrctctccaagtgctcccccagaatggggacctcagtttgcttgcttaaccagcttgcttgtttgcttgctttgggcaggtatttatttttatttgataaagtggtgatcgtctgcaaaaggaaaggatacaattatgagctgaaagaaataatcgagctgctcttccacaagatgaccgatgaccctatgaacaacaaggacattaagaaggtaggtggagcagagatcagctctgccagag

SEQ ID NO: 59967 - DNA, 600 bp, Chicken  19866894318768_5
gcagcaagtgaagctggaggagtttgggaggccgaagatagacggtgagctgaaggtccgctccattgtgaaccacaccaagcaggacaggtgagagagcagcagcattctcctgagagagaaacgtgctaggtacattaatccccaacaaagcacgtccctgctagggtgacggccagaggagctggcttgcaactgctgctctgtgttggaagtcgtaggagtgcacastgacagcaarcaccatcagtgtgaaatcacagcacacagagctgccccagctggggatgctctgcaacrctctccaagtgctcccccagaatggggacctcagtttgcttgcttaaccagcttgcttgtttgcttgctttgggcaggtatttatttttatttgataaagtggtgatcgtctgcaaaaggaaaggatacaattatgagctgaaagaaataatcgagctgctcttccacaagatgaccgatgaccctatgaacaacaaggacattaagaaggtaggtggagcagagatcagctctgccagagagcattctggagctgctctggccagtccttgggtagcacattcccagcagcctttttaa

SEQ ID NO: 59968 - DNA, 600 bp, Chicken  19866894318768_6
ggggacctcagtttgcttgcttaaccagcttgcttgtttgcttgctttgggcaggtatttatttttatttgataaagtggtgatcgtctgcaaaaggaaaggatacaattatgagctgaaagaaataatcgagctgctcttccacaagatgaccgatgaccctatgaacaacaaggacattaagaaggtaggtggagcagagatcagctctgccagagagcattctggagctgctctggccagtccttgggtagcacattcccagcagcctttttaaatagaaacagagcttgcaaaatrctggaacacaaacactgagctggcagggcagccttacagagagttgggaaatgcttaggtgtacagggctgggcttgatcctctgacctccgtctgtgcaaaacagccctggagaggatggatgggagggaggagggagagggaggcaaggggatgtcagccctgctgccagcttgccaaaatcagctcaatgagtgcasctgccccygaagaagcagcattttgctggtgtccagctagcagagaggcagggacttgtgtgcaggtagatgttgtatggatggggcacatgacactggg

SEQ ID NO: 59969 - DNA, 458 bp, Chicken  19866894318768_7
agatcagctctgccagagagcattctggagctgctctggccagtccttgggtagcacattcccagcagcctttttaaatagaaacagagcttgcaaaatrctggaacacaaacactgagctggcagggcagccttacagagagttgggaaatgcttaggtgtacagggctgggcttgatcctctgacctccgtctgtgcaaaacagccctggagaggatggatgggagggaggagggagagggaggcaaggggatgtcagccctgctgccagcttgccaaaatcagctcaatgagtgcasctgccccygaagaagcagcattttgctggtgtccagctagcagagaggcagggacttgtgtgcaggtagatgttgtatggatggggcacatgacactgggtgtgaaaagccagttttgccacttggatgctgaagaaatgctgctagctttgtgtttt

SEQ ID NO: 59970 - DNA, 450 bp, Chicken  19866894318768_8
tctgccagagagcattctggagctgctctggccagtccttgggtagcacattcccagcagcctttttaaatagaaacagagcttgcaaaatrctggaacacaaacactgagctggcagggcagccttacagagagttgggaaatgcttaggtgtacagggctgggcttgatcctctgacctccgtctgtgcaaaacagccctggagaggatggatgggagggaggagggagagggaggcaaggggatgtcagccctgctgccagcttgccaaaatcagctcaatgagtgcasctgccccygaagaagcagcattttgctggtgtccagctagcagagaggcagggacttgtgtgcaggtagatgttgtatggatggggcacatgacactgggtgtgaaaagccagttttgccacttggatgctgaagaaatgctgctagctttgtgtttt

SEQ ID NO: 59971 - DNA, 599 bp, Chicken  19866894318770_1
  misc_feature (1)..(111): n is any nucleotide
nnnnnnnnnnnnnnnnnnnnnnnnnnnnnnnnnnnnnnnnnnnnnnnnnnnnnnnnnnnnnnnnnnnnnnnnnnnnnnnnnnnnnnnnnnnnnnnnnnnnnnnnnnnnnnncgcttacacagcacaggtgcccaccacacatcacaccgctgtcccgacccgtccgagctccggcctcagcccagctcccgcaggatgctgttcacagagcccagcagctcctggaagtacccgtccccatcgccgtccctgcgctcagcggccgccagctcctcgtactcactgcgcagcagccccagygtggcacccagggctgcgtccccrcggaagcgctccctgcagaactccatcagcacagccactgccttcagtactttctcacgtgcgtcgtgctcgggcaaagccagcagccccggcactgccacgcaccagtcctgttccagcacggccggcaccagctgcacycgccggtactgctgcaccttctcctccgcgtggtcgccgtgctgagagtcctccagcagcatctgtggagggcagagggcaggtgatgacccatagcagggagctgctgcctgcaggtgacacatcacaaagtg

SEQ ID NO: 59972 - DNA, 599 bp, Chicken  19866894318770_2
  misc_feature (1)..(87): n is any nucleotide
nnnnnnnnnnnnnnnnnnnnnnnnnnnnnnnnnnnnnnnnnnnnnnnnnnnnnnnnnnnnnnnnnnnnnnnnnnnnnnnnnnnnnnncgcttacacagcacaggtgcccaccacacatcacaccgctgtcccgacccgtccgagctccggcctcagcccagctcccgcaggatgctgttcacagagcccagcagctcctggaagtacccgtccccatcgccgtccctgcgctcagcggccgccagctcctcgtactcactgcgcagcagccccagygtggcacccagggctgcgtccccrcggaagcgctccctgcagaactccatcagcacagccactgccttcagtactttctcacgtgcgtcgtgctcgggcaaagccagcagccccggcactgccacgcaccagtcctgttccagcacggccggcaccagctgcacycgccggtactgctgcaccttctcctccgcgtggtcgccgtgctgagagtcctccagcagcatctgtggagggcagagggcaggtgatgacccatagcagggagctgctgcctgcaggtgacacatcacaaagtgcacacagcagctcctgccatgcac

SEQ ID NO: 59973 - DNA, 600 bp, Chicken  19866894318770_3
gagctccggcctcagcccagctcccgcaggatgctgttcacagagcccagcagctcctggaagtacccgtccccatcgccgtccctgcgctcagcggccgccagctcctcgtactcactgcgcagcagccccagygtggcacccagggctgcgtccccrcggaagcgctccctgcagaactccatcagcacagccactgccttcagtactttctcacgtgcgtcgtgctcgggcaaagccagcagccccggcactgccacgcaccagtcctgttccagcacggccggcaccagctgcacycgccggtactgctgcaccttctcctccgcgtggtcgccgtgctgagagtcctccagcagcatctgtggagggcagagggcaggtgatgacccatagcagggagctgctgcctgcaggtgacacatcacaaagtgcacacagcagctcctgccatgcacggggatgtgtgatgcactgttgcacatacagctcagtgccagggatctcagcaccccgtggcacagggaggggaaggaggattcaggcttccgtggggccaaggagcagaaacccagagccagaggagcagagggagagccg

SEQ ID NO: 59974 - DNA, 600 bp, Chicken  19866894318770_4
tccgtggggccaaggagcagaaacccagagccagaggagcagagggagagccgtgagaggcaccggatggtgctgtccccagggatgccccgggtgcccccccagccttccttctgccagccctggagcagctgctccatcacagcactctgtgccactgagctgctgggcatagagacaaggagggatgatgccaccacaaccctggttcccaggagggctgctgctgaacgcccatttgtactctggtcattcaggattcagggtggaaaaaaaagaggaggcagcgaacactgtccrgacactgctttgtacttcagtgcagagctggcactgactgaggctgctactcatgtatggttttaggagcacatttccacacaggcaaccccaaacctgctggctgcgtttggcccagccmtgctgcccaccaggttccaggatgctcccactttccctgcagactctgggaggggctgtgcctggcaggctgcaggcagcaacatctgcatgtgggcacacacctgaggctctgcagggcctcatggacctcctccagccagagcaaagctggtgcaggtggggctgcatgaggtgcag

SEQ ID NO: 59975 - DNA, 600 bp, Chicken  19866894318770_5
cctggagcagctgctccatcacagcactctgtgccactgagctgctgggcatagagacaaggagggatgatgccaccacaaccctggttcccaggagggctgctgctgaacgcccatttgtactctggtcattcaggattcagggtggaaaaaaaagaggaggcagcgaacactgtccrgacactgctttgtacttcagtgcagagctggcactgactgaggctgctactcatgtatggttttaggagcacatttccacacaggcaaccccaaacctgctggctgcgtttggcccagccmtgctgcccaccaggttccaggatgctcccactttccctgcagactctgggaggggctgtgcctggcaggctgcaggcagcaacatctgcatgtgggcacacacctgaggctctgcagggcctcatggacctcctccagccagagcaaagctggtgcaggtggggctgcatgaggtgcagcatgaagtgtggcacacaggtaggcaggagccaggcctacggaccctcctgctgtgtgcaaaggggtagggcagcacacgtgttaccatcagaaaggcaaatgcagtggaagggcgataga

SEQ ID NO: 59976 - DNA, 600 bp, Chicken  19866894318780_1
aaataaattgtttctttctctcctcgtctcctaccaggttccatttaaagaaaaaggtgaaagtgtggagagactcattcctagtggagagagggtaaggaaagtgttaatcacaaagttcaatctttttagatagaagaatactgagtagctagagccaaagcagcactctatggcagacctaaagccatccactctgccagcaggaacacagctgcagtatgcttaatggtagtgattgttcgataggagggaatgtatggcctttgcctatggcctgcataaatatgcatttggagwggggggagaggaggtttacttggactgggagatggaaaggcatctcattttcctttttaactgctacccccaccctcctccttaaatcatggaagtaagaataaccttttgtctctacgtgcttgtctgctggccattccctctgtgcctctgcctttataagtaacacttgacatgaaggttttgcaaagtgcagccatgcaatagtgaggaggatgtgatggactcttgttattgccctgtcagtcagatgtgcaactcactgtcccagttctgtgtggttttgtatgctccctgagg

SEQ ID NO: 59977 - DNA, 599 bp, Chicken  19866894318781_1
  misc_feature (1)..(22): n is any nucleotide
nnnnnnnnnnnnnnnnnnnnnnctcttcctattttagtccctgtccaaacacattcctgaggtctgcagttatttaactgctgcagaaatgcaaaagtgaagctttctaaaatgggcaattggccagcagtaatcagccgtgttcagaaattctgcctgctgctctgcctctgtctcatgattttacagatcactaatctgcaggatccttcttaatccattcctgctggctttcatttctaaacatttattataatgttatacctcatataaagaccttgaactttctataatgtttgyaaagaacatttttatacatttaatattgtgacatacaatttctactatttttaacgtcaggattggtatatgctctatgtattatatacactcttcaacagtagtgatactgcatagaaagtctaatgaaggatgaggtcccattgttgcagggagaatagaaatgtaggcatggctccaaagactgtaatgtgtaacaatttgatacacaaaattaagaggctggaaaagagatgtaaaagcaaaaagaccaatacactactacataaggcatgtaatacttactgtacttgcaagta

SEQ ID NO: 59978 - DNA, 600 bp, Chicken  19866894318790_1
gtaatacaagaactgggatttgtgaaaacacgtgacgaagatgaaacagctaatcttatttggagtgattctgctgtgcaacaagaaaagattgctgaacttcggaactatcaggtaatattgtattataataacttcggaactatcagccataatttgtactgctgacatgttccagtaaaccgctttccttggagtccttcagtaataccaaatagcttttggtcagttgcatgtatatggagagtaaaaaacaacaaaacagcaaaacaatactaggcagactgtaacaaggctccrccactgtatgtcttgaaaaatctattctcttttccatagttatttgttcataccatttgggatctggtgtttaaatgtttggagctattctttcatgcttttgtctgctcatgagatgttatgaatggtcacagttaacagaagatatattctcttgaatgatttagatgtaatagtgattacgtttgcctgagcatggagttgtatgttttaaatgattattggtattggttttaccagaagagctaaaaagtatccatttactttctcttcttacttctccctcagagaatcaaccat

SEQ ID NO: 59979 - DNA, 600 bp, Chicken  19866894318794_1
gatgctattttgttattcaaatgaacttctgataaatgatgaatataagccagcatttagatctgattaattctttggggtaatcagatatgactgaatgactgcatggtgtctataaagcttatatatatgtatattgtttttcagatttaaatgtgtatacaatatacagaagagggctcaattgaaatatgaagccataaataaagatctcagtaattatctgatacagagaatgagacatctgatattccatagatatccgtggctttttgcactgttttttattgttgttgttgyttgtttgtttttgtttcttttcccattcagaatggagcatttggaaaccacattaaaaactaatatagaaaattgacatacatcractctcatttattatatttcagtaagtgagaacagatctataggacttcttcacaagtctaattagatttgcttttggcaatgtgtgcggtgtgtgtctagaacattaaatgaacagctgccatcaagcttcattagcaggatactagtgctttattcgatgcattttcatgttcaaatttcagtttcatattagattgagttctagtataagca

SEQ ID NO: 59980 - DNA, 600 bp, Chicken  19866894318794_2
agatatgactgaatgactgcatggtgtctataaagcttatatatatgtatattgtttttcagatttaaatgtgtatacaatatacagaagagggctcaattgaaatatgaagccataaataaagatctcagtaattatctgatacagagaatgagacatctgatattccatagatatccgtggctttttgcactgttttttattgttgttgttgyttgtttgtttttgtttcttttcccattcagaatggagcatttggaaaccacattaaaaactaatatagaaaattgacatacatcractctcatttattatatttcagtaagtgagaacagatctataggacttcttcacaagtctaattagatttgcttttggcaatgtgtgcggtgtgtgtctagaacattaaatgaacagctgccatcaagcttcattagcaggatactagtgctttattcgatgcattttcatgttcaaatttcagtttcatattagattgagttctagtataagcagattcagcttaattttgttcagcagagttctagccaatacttcartcatgaatgtggtctttgagtgccatttgaggttagatwt

SEQ ID NO: 59981 - DNA, 555 bp, Chicken  19866894318794_3
aaccacattaaaaactaatatagaaaattgacatacatcractctcatttattatatttcagtaagtgagaacagatctataggacttcttcacaagtctaattagatttgcttttggcaatgtgtgcggtgtgtgtctagaacattaaatgaacagctgccatcaagcttcattagcaggatactagtgctttattcgatgcattttcatgttcaaatttcagtttcatattagattgagttctagtataagcagattcagcttaattttgttcagcagagttctagccaatacttcartcatgaatgtggtctttgagtgccatttgaggttagatwttatattaaagttcaagtataattttcacaaaactaactttgtaattaatgttttgagatattaattcttgtttataataaatcctcaacatttgatctaaatataaagaggcagaattcttgatgtattgtttggaagttccatgagagaagacattagtaacatggcattgagatgcatgaaagagtaataagaagatctctcagaataatttg

SEQ ID NO: 59982 - DNA, 516 bp, Chicken  19866894318794_4
ractctcatttattatatttcagtaagtgagaacagatctataggacttcttcacaagtctaattagatttgcttttggcaatgtgtgcggtgtgtgtctagaacattaaatgaacagctgccatcaagcttcattagcaggatactagtgctttattcgatgcattttcatgttcaaatttcagtttcatattagattgagttctagtataagcagattcagcttaattttgttcagcagagttctagccaatacttcartcatgaatgtggtctttgagtgccatttgaggttagatwttatattaaagttcaagtataattttcacaaaactaactttgtaattaatgttttgagatattaattcttgtttataataaatcctcaacatttgatctaaatataaagaggcagaattcttgatgtattgtttggaagttccatgagagaagacattagtaacatggcattgagatgcatgaaagagtaataagaagatctctcagaataatttg

SEQ ID NO: 59983 - DNA, 599 bp, Chicken  19866894318809_1
  misc_feature (1)..(117): n is any nucleotide
nnnnnnnnnnnnnnnnnnnnnnnnnnnnnnnnnnnnnnnnnnnnnnnnnnnnnnnnnnnnnnnnnnnnnnnnnnnnnnnnnnnnnnnnnnnnnnnnnnnnnnnnnnnnnnnnnnnnntgctctctcacataaagggcagctcctccacctcgcttccccagcctgtctttcctagaagcacacagccctccatggctgcactgcagtcacacgagctttcccaccacgtctgcgtgactgcaatgagatcgtggccctgtgaccacacacagatctccagctcaccctgcttatgtcccrtgctgtgcgcgttggtatacaggcactttagggaagccgcaggtgcagctgcccctctagggacacgagaaggttttggacggggtatctgcaacgtgaccttctctttgcacgatcctatggggcaactctgaggtttgtccctgcagtctccaacagtgacaacttccctcagcccttctctgtcacatcaaactgccmtcccttccyccttyggaccttgttagttagagagagcaataaggtctcccctgagcctcctcttctccagactgaacaatcccagctccttcggccgc

SEQ ID NO: 59984 - DNA, 600 bp, Chicken  19866894318809_2
tgcagtcacacgagctttcccaccacgtctgcgtgactgcaatgagatcgtggccctgtgaccacacacagatctccagctcaccctgcttatgtcccrtgctgtgcgcgttggtatacaggcactttagggaagccgcaggtgcagctgcccctctagggacacgagaaggttttggacggggtatctgcaacgtgaccttctctttgcacgatcctatggggcaactctgaggtttgtccctgcagtctccaacagtgacaacttccctcagcccttctctgtcacatcaaactgccmtcccttccyccttyggaccttgttagttagagagagcaataaggtctcccctgagcctcctcttctccagactgaacaatcccagctccttcggccgctcctcgtaaggcctgtgctccagacccctcagcagctttgttgccctcctctggacacactccagggcctccatgtctttcttacagcgaggagcccacaactggacacagtactcgaggtgtgacctcaccagggctgagtacagggggacaattactccttcctcctcattcccatgacagagcattgggaagaaatgaa

SEQ ID NO: 59985 - DNA, 600 bp, Chicken  19866894318809_3
acgagctttcccaccacgtctgcgtgactgcaatgagatcgtggccctgtgaccacacacagatctccagctcaccctgcttatgtcccrtgctgtgcgcgttggtatacaggcactttagggaagccgcaggtgcagctgcccctctagggacacgagaaggttttggacggggtatctgcaacgtgaccttctctttgcacgatcctatggggcaactctgaggtttgtccctgcagtctccaacagtgacaacttccctcagcccttctctgtcacatcaaactgccmtcccttccyccttyggaccttgttagttagagagagcaataaggtctcccctgagcctcctcttctccagactgaacaatcccagctccttcggccgctcctcgtaaggcctgtgctccagacccctcagcagctttgttgccctcctctggacacactccagggcctccatgtctttcttacagcgaggagcccacaactggacacagtactcgaggtgtgacctcaccagggctgagtacagggggacaattactccttcctcctcattcccatgacagagcattgggaagaaatgaaaactccacc

SEQ ID NO: 59986 - DNA, 600 bp, Chicken  19866894318809_4
ctttcccaccacgtctgcgtgactgcaatgagatcgtggccctgtgaccacacacagatctccagctcaccctgcttatgtcccrtgctgtgcgcgttggtatacaggcactttagggaagccgcaggtgcagctgcccctctagggacacgagaaggttttggacggggtatctgcaacgtgaccttctctttgcacgatcctatggggcaactctgaggtttgtccctgcagtctccaacagtgacaacttccctcagcccttctctgtcacatcaaactgccmtcccttccyccttyggaccttgttagttagagagagcaataaggtctcccctgagcctcctcttctccagactgaacaatcccagctccttcggccgctcctcgtaaggcctgtgctccagacccctcagcagctttgttgccctcctctggacacactccagggcctccatgtctttcttacagcgaggagcccacaactggacacagtactcgaggtgtgacctcaccagggctgagtacagggggacaattactccttcctcctcattcccatgacagagcattgggaagaaatgaaaactccaccatctt

SEQ ID NO: 59987 - DNA, 600 bp, Chicken  19866894318810_1
cctatatcctatccccatcgcataccccacatcccatattcatatcatcccatatccatcccaaagtcatctcgtgtctacataccatatcaatatcccatgccattatagtcccagtcacatatcccatcccaaatccatcccacattcttcccattttccatcccaagtccatcccatatccagagcccatcccatgtatatctcattttgccatatcccatcccgtatcgaaatccccacacgctccccacgcagtcttccacctctcccaggtggagctcattacattccagctgytctctcacataaagggcagctcctccacctcgcttccccagcctgtctttcctagaagcrcacagccctccatggctgcactgcagtcacacgagctttcccaccacgtctgcgtgactgcaatgagatcgtggccctgtgaccacacacagatctccagctcaccctgcttatgtcccatgctgtgcgcgttggtatacaggcactttagggaagccgcaggtgcagctgcccctcttgggacacgagaaggttttggacggggtatctgcaacgtgaccttctctttgcacgatccta

SEQ ID NO: 59988 - DNA, 585 bp, Chicken  19866894318810_2
ccaaagtcatctcgtgtctacataccatatcaatatcccatgccattatagtcccagtcacatatcccatcccaaatccatcccacattcttcccattttccatcccaagtccatcccatatccagagcccatcccatgtatatctcattttgccatatcccatcccgtatcgaaatccccacacgctccccacgcagtcttccacctctcccaggtggagctcattacattccagctgytctctcacataaagggcagctcctccacctcgcttccccagcctgtctttcctagaagcrcacagccctccatggctgcactgcagtcacacgagctttcccaccacgtctgcgtgactgcaatgagatcgtggccctgtgaccacacacagatctccagctcaccctgcttatgtcccatgctgtgcgcgttggtatacaggcactttagggaagccgcaggtgcagctgcccctcttgggacacgagaaggttttggacggggtatctgcaacgtgaccttctctttgcacgatcctatggggcaactctgagggttgtccctgcagtctccaacagtgacaa

SEQ ID NO: 59989 - DNA, 599 bp, Chicken  19866894318818_1
  misc_feature (1)..(11): n is any nucleotide
nnnnnnnnnnnactaaaagaatacctgtatggcttcctgtcttcaggctggagtataaatattccaaattggtgatgacagcgaaactcaaaaagagtgtgagctgccagctgctgacagttgtgctataatggagggggaagataatgaagaagaaatagtatattctaataagcagtcactgctggggaagctcaagtccttggcaacaaaggtaagtggtaattagtactattaatactaaaaataattattaccattatttatcactggatgtgatgaggctgtgatgctaatttscacagtgctttgtgtagcctccagcacacacatcacccagtttgctctcaacctgctgaaatccacaatgtgagtaatgataaatgtttcagggaattaaagaaacgcttcttcttctgcagggagcttcctgaagcattctttattgtatgggccgtgtctaaaaagaggcatgggaaaccttctggattcctaccagatacctccactgaagcaaacacagctattatagatacaggaaataaacatcagaacagcagtcagctgcttccccctcacctgggctgacttcatggctg

SEQ ID NO: 59990 - DNA, 599 bp, Chicken  19866894318830_1
  misc_feature (1)..(72): n is any nucleotide
nnnnnnnnnnnnnnnnnnnnnnnnnnnnnnnnnnnnnnnnnnnnnnnnnnnnnnnnnnnnnnnnnnnnnnnnagctgttgcatcctttagggttcgaacctggtaccattaatgtgagtacagcttttgctgtggggtctgcagggagtgtgatacccccaagctgcccttggcagcactagggctgagccaaacatactttggcgtagctgtaactgcagcctattcataattatataatcctgatttgttttctctctgatgcacacctgtctgtgcgatatgaacagatatgattcraagcataaatctgttctggaatagctcatggcttggtgtcctgagcaagagggagctccctgtgctctgtgggtaggagaagccacgcctcaactgggagataccagcaaccttcactaaaacacggcattttgttgtaatgttkctgagtgataaagacacatcaaagcagattgttgatttgtaagatgcagttggacgcacgcacttgcctggggactgctattgctgaggggtctaagcccaatccacagcacagcggttggtttccaaccctttcmarcctgcrtgtaaatgtg

SEQ ID NO: 59991 - DNA, 600 bp, Chicken  19866894318830_2
gagtgtgatacccccaagctgcccttggcagcactagggctgagccaaacatactttggcgtagctgtaactgcagcctattcataattatataatcctgatttgttttctctctgatgcacacctgtctgtgcgatatgaacagatatgattcraagcataaatctgttctggaatagctcatggcttggtgtcctgagcaagagggagctccctgtgctctgtgggtaggagaagccacgcctcaactgggagataccagcaaccttcactaaaacacggcattttgttgtaatgttkctgagtgataaagacacatcaaagcagattgttgatttgtaagatgcagttggacgcacgcacttgcctggggactgctattgctgaggggtctaagcccaatccacagcacagcggttggtttccaaccctttcmarcctgcrtgtaaatgtggcagcaggttaascaggtgctgaatggttgggccaggagcacgaagccttgctagagctcgaacaagtaagtgagctcctgggaagtgctgggttcaccacgcrttgtcaaacagagcgatcgcactgaaggaaggacggctgtga

SEQ ID NO: 59992 - DNA, 600 bp, Chicken  19866894318830_3
tatgaacagatatgattcraagcataaatctgttctggaatagctcatggcttggtgtcctgagcaagagggagctccctgtgctctgtgggtaggagaagccacgcctcaactgggagataccagcaaccttcactaaaacacggcattttgttgtaatgttkctgagtgataaagacacatcaaagcagattgttgatttgtaagatgcagttggacgcacgcacttgcctggggactgctattgctgaggggtctaagcccaatccacagcacagcggttggtttccaaccctttcmarcctgcrtgtaaatgtggcagcaggttaascaggtgctgaatggttgggccaggagcacgaagccttgctagagctcgaacaagtaagtgagctcctgggaagtgctgggttcaccacgcrttgtcaaacagagcgatcgcactgaaggaaggacggctgtgactctgcgttttggcagaaaacattgcgtgtgccaggaagcgaatcgcaaaggttaaaaacctgatgagttgaggccatggtgccaggccacggactgagtcttcatgttcaattggtttggatttttaggcataga

SEQ ID NO: 59993 - DNA, 600 bp, Chicken  19866894318830_4
tgaacagatatgattcraagcataaatctgttctggaatagctcatggcttggtgtcctgagcaagagggagctccctgtgctctgtgggtaggagaagccacgcctcaactgggagataccagcaaccttcactaaaacacggcattttgttgtaatgttkctgagtgataaagacacatcaaagcagattgttgatttgtaagatgcagttggacgcacgcacttgcctggggactgctattgctgaggggtctaagcccaatccacagcacagcggttggtttccaaccctttcmarcctgcrtgtaaatgtggcagcaggttaascaggtgctgaatggttgggccaggagcacgaagccttgctagagctcgaacaagtaagtgagctcctgggaagtgctgggttcaccacgcrttgtcaaacagagcgatcgcactgaaggaaggacggctgtgactctgcgttttggcagaaaacattgcgtgtgccaggaagcgaatcgcaaaggttaaaaacctgatgagttgaggccatggtgccaggccacggactgagtcttcatgttcaattggtttggatttttaggcatagaca

SEQ ID NO: 59994 - DNA, 600 bp, Chicken  19866894318830_5
gatatgattcraagcataaatctgttctggaatagctcatggcttggtgtcctgagcaagagggagctccctgtgctctgtgggtaggagaagccacgcctcaactgggagataccagcaaccttcactaaaacacggcattttgttgtaatgttkctgagtgataaagacacatcaaagcagattgttgatttgtaagatgcagttggacgcacgcacttgcctggggactgctattgctgaggggtctaagcccaatccacagcacagcggttggtttccaaccctttcmarcctgcrtgtaaatgtggcagcaggttaascaggtgctgaatggttgggccaggagcacgaagccttgctagagctcgaacaagtaagtgagctcctgggaagtgctgggttcaccacgcrttgtcaaacagagcgatcgcactgaaggaaggacggctgtgactctgcgttttggcagaaaacattgcgtgtgccaggaagcgaatcgcaaaggttaaaaacctgatgagttgaggccatggtgccaggccacggactgagtcttcatgttcaattggtttggatttttaggcatagacaaatcat

SEQ ID NO: 59995 - DNA, 600 bp, Chicken  19866894318830_6
gttctggaatagctcatggcttggtgtcctgagcaagagggagctccctgtgctctgtgggtaggagaagccacgcctcaactgggagataccagcaaccttcactaaaacacggcattttgttgtaatgttkctgagtgataaagacacatcaaagcagattgttgatttgtaagatgcagttggacgcacgcacttgcctggggactgctattgctgaggggtctaagcccaatccacagcacagcggttggtttccaaccctttcmarcctgcrtgtaaatgtggcagcaggttaascaggtgctgaatggttgggccaggagcacgaagccttgctagagctcgaacaagtaagtgagctcctgggaagtgctgggttcaccacgcrttgtcaaacagagcgatcgcactgaaggaaggacggctgtgactctgcgttttggcagaaaacattgcgtgtgccaggaagcgaatcgcaaaggttaaaaacctgatgagttgaggccatggtgccaggccacggactgagtcttcatgttcaattggtttggatttttaggcatagacaaatcattactactcgttaacatgttctat

SEQ ID NO: 59996 - DNA, 600 bp, Chicken  19866894318830_7
ccagcaaccttcactaaaacacggcattttgttgtaatgttkctgagtgataaagacacatcaaagcagattgttgatttgtaagatgcagttggacgcacgcacttgcctggggactgctattgctgaggggtctaagcccaatccacagcacagcggttggtttccaaccctttcmarcctgcrtgtaaatgtggcagcaggttaascaggtgctgaatggttgggccaggagcacgaagccttgctagagctcgaacaagtaagtgagctcctgggaagtgctgggttcaccacgcrttgtcaaacagagcgatcgcactgaaggaaggacggctgtgactctgcgttttggcagaaaacattgcgtgtgccaggaagcgaatcgcaaaggttaaaaacctgatgagttgaggccatggtgccaggccacggactgagtcttcatgttcaattggtttggatttttaggcatagacaaatcattactactcgttaacatgttctatctattttttttttttttttgtatttttctaaagaaaggattaaaaccaagaaaaatgttatgagtttatggcagtccatataaataaactg

SEQ ID NO: 59997 - DNA, 600 bp, Chicken  19866894318833_1
tatgcttcttccttatccttatatcaattaaaatataactctcaattcaaataatttaaataatttccttttcaaaggaaaggtaggaactaacactcatatagttaaatctggcaattacaattaatggcattgatttgggtaggaagagctgatatcatacaatcttatatatgaacacacatataaatagtaacagaagatattgtagaatactaaagatgtattactgaaatcttaaaatactatacccagaagtactgctttgatccatttacaaatcctatgatctataatctyttttttttaatgaacaactatacaaatcaagacttttcaagagattttctctataaagatggaataaaagctcatatatttttcatctcaaaaaagacattagccaaaaaatgacattcatcaaaactgactataattttggattatatatatatcatttcctgtttccaggtaaaaaacatatcataatgatatgattaacttaacagagtagtacagccattcaacaaatcacagaatcgcgggggttggaaaggacctcaaagagatcactgagttcaacccccctgctaaagcaca

SEQ ID NO: 59998 - DNA, 600 bp, Chicken  19866894318845_1
ctctttgctccatctctcacaactgctcacgtttgaatcgggagagcattggatccttcgcgtcggaagggacctttgcgggtcagctggggcagctccctgcagcgaacagggacagcacagctccatcaggctgcccagggctgatccagcccggccttggaggtcactgcgcagcccactcagtgcctcaccacccgccccaggaagggctccttccttttatcccacctcaatctccccgcctcgagcttgaagcccctcgccccatcaccacagaccccgctcagtaggctgacycctcctytcccgcagctccccttgggatgctggcagaccgctctcaggtcccctcgcagccctctcccctccctctgcgcagcctcagcccatccccacggtggagctgttccgtcccttgggccatttccgtggccctcctctggatgcactgcagcagctccgcgtccctcctgtgctgagcgctccccgtctgcagaacggaggggcagatgccctcctttgctctgctgtgctcctttggatgcagggcaggcgttgccctgtgcagctcagcgcaccctcagcccgctgccagcc

SEQ ID NO: 59999 - DNA, 600 bp, Chicken  19866894318845_2
ctccatctctcacaactgctcacgtttgaatcgggagagcattggatccttcgcgtcggaagggacctttgcgggtcagctggggcagctccctgcagcgaacagggacagcacagctccatcaggctgcccagggctgatccagcccggccttggaggtcactgcgcagcccactcagtgcctcaccacccgccccaggaagggctccttccttttatcccacctcaatctccccgcctcgagcttgaagcccctcgccccatcaccacagaccccgctcagtaggctgacycctcctytcccgcagctccccttgggatgctggcagaccgctctcaggtcccctcgcagccctctcccctccctctgcgcagcctcagcccatccccacggtggagctgttccgtcccttgggccatttccgtggccctcctctggatgcactgcagcagctccgcgtccctcctgtgctgagcgctccccgtctgcagaacggaggggcagatgccctcctttgctctgctgtgctcctttggatgcagggcaggcgttgccctgtgcagctcagcgcaccctcagcccgctgccagccgggctgt

SEQ ID NO: 60000 - DNA, 599 bp, Chicken  19866894318846_1
  misc_feature (1)..(155): n is any nucleotide
nnnnnnnnnnnnnnnnnnnnnnnnnnnnnnnnnnnnnnnnnnnnnnnnnnnnnnnnnnnnnnnnnnnnnnnnnnnnnnnnnnnnnnnnnnnnnnnnnnnnnnnnnnnnnnnnnnnnnnnnnnnnnnnnnnnnnnnnnnnnnnnnnnnnnnnnnnnctatgattttatggtacttctgagactgatattcatctagactccactttcagtgtgggaaaaatggcagtaatttgagatgtcctgatgtgataactatggaaaattgttctgcaaaactcggtataaaatatttcttctctgyccttcaccaaagacttcacggacttcagattagagggttgacaccctctaaaatccgggtaatttctggtatggagaatcatatgcatcatactagttaaagcatatgtttttggtgtttttttaccccatcagctgtaatagcatggtagaggtgcagagaactttagtttccagcagagaaatccatataaactggcaaaccaaggtggattagaccagtagccattggcagatggctgargttgccaccaaaatagatgttggctaaacagcctgctgctctgagctacggggagg

SEQ ID NO: 60001 - DNA, 600 bp, Chicken  19866894318846_2
tgtgataactatggaaaattgttctgcaaaactcggtataaaatatttcttctctgyccttcaccaaagacttcacggacttcagattagagggttgacaccctctaaaatccgggtaatttctggtatggagaatcatatgcatcatactagttaaagcatatgtttttggtgtttttttaccccatcagctgtaatagcatggtagaggtgcagagaactttagtttccagcagagaaatccatataaactggcaaaccaaggtggattagaccagtagccattggcagatggctgargttgccaccaaaatagatgttggctaaacagcctgctgctctgagctacggggaggtctcatggcagccttccaggaaggctgttggccctggcagtccctgcccggcggagggtcaggttcctgggcagsgggggaaggaaacctttcttctgaatcaggctgtaagaagatcttgaagccaggcttcccttttcggatgtcagcatttcattgccccactgccctgttgtgcaagaggtggagtggctaacgagtggttcagtgaacgyaggggcctgagatgttgccacgtagctgt

SEQ ID NO: 60002 - DNA, 600 bp, Chicken  19866894318846_3
agaatcatatgcatcatactagttaaagcatatgtttttggtgtttttttaccccatcagctgtaatagcatggtagaggtgcagagaactttagtttccagcagagaaatccatataaactggcaaaccaaggtggattagaccagtagccattggcagatggctgargttgccaccaaaatagatgttggctaaacagcctgctgctctgagctacggggaggtctcatggcagccttccaggaaggctgttggccctggcagtccctgcccggcggagggtcaggttcctgggcagsgggggaaggaaacctttcttctgaatcaggctgtaagaagatcttgaagccaggcttcccttttcggatgtcagcatttcattgccccactgccctgttgtgcaagaggtggagtggctaacgagtggttcagtgaacgyaggggcctgagatgttgccacgtagctgtgctgctttaggacaggagttctgtttggcacagtaacacataggctttgctaagacggaggacctgagggaattcagattctgtaaatgtgcaaaacagagttgatctttttctactaagccgttccttct

SEQ ID NO: 60003 - DNA, 600 bp, Chicken  19866894318846_4
agaccagtagccattggcagatggctgargttgccaccaaaatagatgttggctaaacagcctgctgctctgagctacggggaggtctcatggcagccttccaggaaggctgttggccctggcagtccctgcccggcggagggtcaggttcctgggcagsgggggaaggaaacctttcttctgaatcaggctgtaagaagatcttgaagccaggcttcccttttcggatgtcagcatttcattgccccactgccctgttgtgcaagaggtggagtggctaacgagtggttcagtgaacgyaggggcctgagatgttgccacgtagctgtgctgctttaggacaggagttctgtttggcacagtaacacataggctttgctaagacggaggacctgagggaattcagattctgtaaatgtgcaaaacagagttgatctttttctactaagccgttccttctcagactaaaggaaagattatctatgttataagagttgttaggtgttacttctatctcaagggagaaacttcttctctattatgctttctaaaatgagcaaaggcgatgtcaccagtaacaggaaatcttagtgtgctgtg

SEQ ID NO: 60004 - DNA, 600 bp, Chicken  19866894318850_1
ctcacctggcctcgccagacctcgtctcccctggactgcacatgcctggcctggacttgccttgcattgccttgccaggcctggccattctatcgtcttgcctggccaggtctggaatgccctggcgtggccaagacttgccttgcccagcattgcgttgccttgcctggcgtggcctggcttgacctagcattgccttgcattgtctggcctgttgagactggcctggcctagcctgtcctggacttccattgcctggcattgcctggcctgaccaggactggcctggcgtggtctggwaaagcctggccggacctttcctagccttgccttgccttgccttgccttggtttgtcttgacttgctgtgccttgccttgcattgcttgccttgccttgccttgcctggccttgctttgccttgccttaccttgccttgccttgtcttgccttgtcttgacttgtcttgccttgccttgccttccctggccttgccttgccttgccttgcctggccttgcattgccttgcattgcttttccttgcctggccttgctttgcttggccttgccttgccttgcctggcctggtcagacctctcc

SEQ ID NO: 60005 - DNA, 600 bp, Chicken  19866894318853_1
aaggaacacaaagcaggagagcatattggacgcatcctgttggttccaccagcgtagaccttgatgtgggcactgtggaactgtgtacatgtagggcagtgcaccggtgacatgcacagccaacctcaaagaatgttggctgcaccaactgtggagctgtttctcctggtatattcaagatgtggcacatcagaggcacgtgcaagttctacattcaagaatcacattagagattgtgcgctattgagactattcatagaatcagtaaggttggaaaagatcaccaggatcatcaaccaycagcccatccccaccatgcccactgaccacrtcctcagtgccacatccacacggctctggagcacctccagggatggtgactccaccacctccctgtgcagcctgtgccrctgcagcaccgytctttctgagaagaaattattcctcatatccaacctgaacctcccctagcacaacttgaggctgttacctctcatcctaaaatatttgtgggaactttgtgcactcttccatctggaacaggtgatgaaccccttcctgttacctcaagaaatcccaccttagcctctctgcaggaga

SEQ ID NO: 60006 - DNA, 600 bp, Chicken  19866894318853_2
gcatcctgttggttccaccagcgtagaccttgatgtgggcactgtggaactgtgtacatgtagggcagtgcaccggtgacatgcacagccaacctcaaagaatgttggctgcaccaactgtggagctgtttctcctggtatattcaagatgtggcacatcagaggcacgtgcaagttctacattcaagaatcacattagagattgtgcgctattgagactattcatagaatcagtaaggttggaaaagatcaccaggatcatcaaccaycagcccatccccaccatgcccactgaccacrtcctcagtgccacatccacacggctctggagcacctccagggatggtgactccaccacctccctgtgcagcctgtgccrctgcagcaccgytctttctgagaagaaattattcctcatatccaacctgaacctcccctagcacaacttgaggctgttacctctcatcctaaaatatttgtgggaactttgtgcactcttccatctggaacaggtgatgaaccccttcctgttacctcaagaaatcccaccttagcctctctgcaggagaaaggaaaggcaacgtttgagatgaaagagca

SEQ ID NO: 60007 - DNA, 600 bp, Chicken  19866894318853_3
catgcacagccaacctcaaagaatgttggctgcaccaactgtggagctgtttctcctggtatattcaagatgtggcacatcagaggcacgtgcaagttctacattcaagaatcacattagagattgtgcgctattgagactattcatagaatcagtaaggttggaaaagatcaccaggatcatcaaccaycagcccatccccaccatgcccactgaccacrtcctcagtgccacatccacacggctctggagcacctccagggatggtgactccaccacctccctgtgcagcctgtgccrctgcagcaccgytctttctgagaagaaattattcctcatatccaacctgaacctcccctagcacaacttgaggctgttacctctcatcctaaaatatttgtgggaactttgtgcactcttccatctggaacaggtgatgaaccccttcctgttacctcaagaaatcccaccttagcctctctgcaggagaaaggaaaggcaacgtttgagatgaaagagcacagtgaagtgtttctcctttacctggaatgggggcatgccagatacctggcttccccttgaggaaaagagcagcattac

SEQ ID NO: 60008 - DNA, 600 bp, Chicken  19866894318853_4
acctcaaagaatgttggctgcaccaactgtggagctgtttctcctggtatattcaagatgtggcacatcagaggcacgtgcaagttctacattcaagaatcacattagagattgtgcgctattgagactattcatagaatcagtaaggttggaaaagatcaccaggatcatcaaccaycagcccatccccaccatgcccactgaccacrtcctcagtgccacatccacacggctctggagcacctccagggatggtgactccaccacctccctgtgcagcctgtgccrctgcagcaccgytctttctgagaagaaattattcctcatatccaacctgaacctcccctagcacaacttgaggctgttacctctcatcctaaaatatttgtgggaactttgtgcactcttccatctggaacaggtgatgaaccccttcctgttacctcaagaaatcccaccttagcctctctgcaggagaaaggaaaggcaacgtttgagatgaaagagcacagtgaagtgtttctcctttacctggaatgggggcatgccagatacctggcttccccttgaggaaaagagcagcattacaggtgcacgctg

SEQ ID NO: 60009 - DNA, 533 bp, Chicken  19866894318856_1
gatgcaggctttctgaggtgtgtttgatgtgtttccgacccttccattttcagtgtaacagttaaatagtagtaaaacactctccccaaatggtacgcttccgtaaatgctaactttggatgctgccatttatttatggtactgtgggtattgctgtatctcagaagttaatagtgatagatacagcaaattgtccttaggagaaaaatgctgtatgcagtcccagaagatgctgaaagtagcacacgtattcagtctcacgaagtctaggttagttgtacaacttcagtctccagtacrgcgatgcaagtgcagtttctactcacatggctgtgtcctttctcactgaaaaygcagycagtwtgagcccatgtcaacctttgggtttgaaaagctggtggctgtgtgagcctgctggcctggccactgaatgggagggtgctggggtgagagcagctggagagtaagtctgggttaggagttgcttgtgtgctttacacaggacaaaatgctctgtgtcacaagtgccactt

SEQ ID NO: 60010 - DNA, 480 bp, Chicken  19866894318856_2
tgtaacagttaaatagtagtaaaacactctccccaaatggtacgcttccgtaaatgctaactttggatgctgccatttatttatggtactgtgggtattgctgtatctcagaagttaatagtgatagatacagcaaattgtccttaggagaaaaatgctgtatgcagtcccagaagatgctgaaagtagcacacgtattcagtctcacgaagtctaggttagttgtacaacttcagtctccagtacrgcgatgcaagtgcagtttctactcacatggctgtgtcctttctcactgaaaaygcagycagtwtgagcccatgtcaacctttgggtttgaaaagctggtggctgtgtgagcctgctggcctggccactgaatgggagggtgctggggtgagagcagctggagagtaagtctgggttaggagttgcttgtgtgctttacacaggacaaaatgctctgtgtcacaagtgccactt

SEQ ID NO: 60011 - DNA, 475 bp, Chicken  19866894318856_3
cagttaaatagtagtaaaacactctccccaaatggtacgcttccgtaaatgctaactttggatgctgccatttatttatggtactgtgggtattgctgtatctcagaagttaatagtgatagatacagcaaattgtccttaggagaaaaatgctgtatgcagtcccagaagatgctgaaagtagcacacgtattcagtctcacgaagtctaggttagttgtacaacttcagtctccagtacrgcgatgcaagtgcagtttctactcacatggctgtgtcctttctcactgaaaaygcagycagtwtgagcccatgtcaacctttgggtttgaaaagctggtggctgtgtgagcctgctggcctggccactgaatgggagggtgctggggtgagagcagctggagagtaagtctgggttaggagttgcttgtgtgctttacacaggacaaaatgctctgtgtcacaagtgccactt

SEQ ID NO: 60012 - DNA, 470 bp, Chicken  19866894318856_4
aaatagtagtaaaacactctccccaaatggtacgcttccgtaaatgctaactttggatgctgccatttatttatggtactgtgggtattgctgtatctcagaagttaatagtgatagatacagcaaattgtccttaggagaaaaatgctgtatgcagtcccagaagatgctgaaagtagcacacgtattcagtctcacgaagtctaggttagttgtacaacttcagtctccagtacrgcgatgcaagtgcagtttctactcacatggctgtgtcctttctcactgaaaaygcagycagtwtgagcccatgtcaacctttgggtttgaaaagctggtggctgtgtgagcctgctggcctggccactgaatgggagggtgctggggtgagagcagctggagagtaagtctgggttaggagttgcttgtgtgctttacacaggacaaaatgctctgtgtcacaagtgccactt

SEQ ID NO: 60013 - DNA, 599 bp, Chicken  19866894318857_1
  misc_feature (1)..(153): n is any nucleotide
nnnnnnnnnnnnnnnnnnnnnnnnnnnnnnnnnnnnnnnnnnnnnnnnnnnnnnnnnnnnnnnnnnnnnnnnnnnnnnnnnnnnnnnnnnnnnnnnnnnnnnnnnnnnnnnnnnnnnnnnnnnnnnnnnnnnnnnnnnnnnnnnnnnnnnnnncgcaaccttttgttgtggcacctcatcagtgagggcacagccataatggatagcaattcagctctgagttttcctttgagacaagttggtacaatggcacaaagccatggctctgctccggaggaccccagcagaccaaacaacgcygtcctggagcacagcatcctccctccagggaatcactcagcatctgagagatgcaaygtgcccagcaggagtggtcagacctgctgggggctttgctgacctcagcaagaagcaaagccttgaaacacagctccagcagggaggtttggggttacttcaagctgttttgcacccaaagagcctggcccggcagagccaagcagtgcagcaccagccaaggggcaagtggcttcctgcatgaacgcgrctgtgagcacaaagggcagagccaggcaggagccctttccttcctctcactg

SEQ ID NO: 60014 - DNA, 599 bp, Chicken  19866894318857_2
  misc_feature (1)..(96): n is any nucleotide
nnnnnnnnnnnnnnnnnnnnnnnnnnnnnnnnnnnnnnnnnnnnnnnnnnnnnnnnnnnnnnnnnnnnnnnnnnnnnnnnnnnnnnnnnnnnnnnncgcaaccttttgttgtggcacctcatcagtgagggcacagccataatggatagcaattcagctctgagttttcctttgagacaagttggtacaatggcacaaagccatggctctgctccggaggaccccagcagaccaaacaacgcygtcctggagcacagcatcctccctccagggaatcactcagcatctgagagatgcaaygtgcccagcaggagtggtcagacctgctgggggctttgctgacctcagcaagaagcaaagccttgaaacacagctccagcagggaggtttggggttacttcaagctgttttgcacccaaagagcctggcccggcagagccaagcagtgcagcaccagccaaggggcaagtggcttcctgcatgaacgcgrctgtgagcacaaagggcagagccaggcaggagccctttccttcctctcactgctggcacagaggaggaagcagcagtggctcaggcacagaggtactgggatgcttccc

SEQ ID NO: 60015 - DNA, 600 bp, Chicken  19866894318857_3
tggcacaaagccatggctctgctccggaggaccccagcagaccaaacaacgcygtcctggagcacagcatcctccctccagggaatcactcagcatctgagagatgcaaygtgcccagcaggagtggtcagacctgctgggggctttgctgacctcagcaagaagcaaagccttgaaacacagctccagcagggaggtttggggttacttcaagctgttttgcacccaaagagcctggcccggcagagccaagcagtgcagcaccagccaaggggcaagtggcttcctgcatgaacgcgrctgtgagcacaaagggcagagccaggcaggagccctttccttcctctcactgctggcacagaggaggaagcagcagtggctcaggcacagaggtactgggatgcttccctggagatgtgctgggctggatgcacagcgagctgggagcagtgaaggtggcaggagggaaggagagaaggggtggagggaagcaccgtgccaacacaacgcagggctgagggctctgacccatttctgtgcgttctacaggaaatctgagctcaagcaaaggatgcagcaaggctgagctaacactgctct

SEQ ID NO: 60016 - DNA, 600 bp, Chicken  19866894318862_1
cccggagccggaccacctgggtgacagagggctcattctcccgcagtgcccccaagtatgcctccttctggaaggtgggcacgttgtcgttgacgtccaggacattgattctgatgcgccctgctgtctcctcaccgccaccgtcccgtgcaatgacagtcagcgtgtagcgctgcatggtctcaaagtccagtcgggccatcagcaggatcacacccgtgtccttgtccagtgagaaactggggagggacaggaaaggggtgaaaacttcggtgactgtgtgctggagatggtgaaatrttagtctccaaattttggagaagcacctttaccatcgtggttcaaccacacttaccgatcggggtcatcgctgaagaaataactgactttgccatagctgcccacatcattgtcagttgcctgaaaaaatcaagttagttaacaaatgaagctacttctgggaatcgcacacaccagtgaacccatcacaactcacagaaagctttatttacattcacatctcaggaaggttcatgccttcccaggtgacgtggctttagggcaggctggtggctgctctacccatcccctgcctcctcc

SEQ ID NO: 60017 - DNA, 600 bp, Chicken  19866894318863_1
caaaaaaaaagctattacttcccatcaacttgagttcactgcacagatatacttagcttaccagatttagacttccatttggcattagaggaggggtacgttaaatgacagactgtcccttcaaagtactgaaaatctaatgtttatcttcaagaaataaaaaatagctgaggtaggttttagaaagcttccatttgagtcacttactatttacttaaaagatcaataccacaaaccagtgggatctaataaagctgaacgaagttcagacgtaagcctgttaagaaatgaaattaaatrcttcaaaataacaggcacagtatggtaagcttttacgaagaaacagaaccatgtgaattcatgtgcattcttacaagcttttctttcttcctacatccaaaaagcactcctagtggtaagaggaattttctgtgttcttaattagtaaaggcataacatgaatgcaaaacttgaatgatctagtcttatattattaattttcattactctacctaacatatgtgactgaaaaataagaataaattccaggaatcccttaattattcttaatttcactctgtgaaatccagagtcactgtt

SEQ ID NO: 60018 - DNA, 599 bp, Chicken  19866894318870_1
  misc_feature (1)..(44): n is any nucleotide
nnnnnnnnnnnnnnnnnnnnnnnnnnnnnnnnnnnnnnnnnnnntcaggaattcagctgagttgacggtagaatcttcaggtgtctaaggcacaagtttctgacgtatagcacataaggtcaattttaaacgtggggtagttgctgcatgctacatctcactgagatgagggcctccgcacaaacaggtatttatgtggtagcccacgcattagtgagcaagacttcaaactcatgacagcatctctataactgaacaacatggggctttcacttctgactcagcatgtggaaccacagractaacaaaagggggtgctcaccaaacagctgatcaggggaggatggatgagacatctaagataggtgcctcratttagaacattccaaggtttatacagatagggccaacatatttcatcctccgtttctcaggcacacgtartgaaaacagacaaagtagtaatcacaaatccttttgcagtgtcttgagttcacctgactcacactgtaaagctgatgcaacrttctgcaaactcatctgctatgcatgcacaaagttactgcagaatctatatacrwgtctgatattttatagtg

SEQ ID NO: 60019 - DNA, 600 bp, Chicken  19866894318870_2
tcttcaggtgtctaaggcacaagtttctgacgtatagcacataaggtcaattttaaacgtggggtagttgctgcatgctacatctcactgagatgagggcctccgcacaaacaggtatttatgtggtagcccacgcattagtgagcaagacttcaaactcatgacagcatctctataactgaacaacatggggctttcacttctgactcagcatgtggaaccacagractaacaaaagggggtgctcaccaaacagctgatcaggggaggatggatgagacatctaagataggtgcctcratttagaacattccaaggtttatacagatagggccaacatatttcatcctccgtttctcaggcacacgtartgaaaacagacaaagtagtaatcacaaatccttttgcagtgtcttgagttcacctgactcacactgtaaagctgatgcaacrttctgcaaactcatctgctatgcatgcacaaagttactgcagaatctatatacrwgtctgatattttatagtgatgttgactacgcatgttctggtatcaatttgttactacctccaaggcttctgagtttaaagcagtctcatcca

SEQ ID NO: 60020 - DNA, 600 bp, Chicken  19866894318870_3
tgcatgctacatctcactgagatgagggcctccgcacaaacaggtatttatgtggtagcccacgcattagtgagcaagacttcaaactcatgacagcatctctataactgaacaacatggggctttcacttctgactcagcatgtggaaccacagractaacaaaagggggtgctcaccaaacagctgatcaggggaggatggatgagacatctaagataggtgcctcratttagaacattccaaggtttatacagatagggccaacatatttcatcctccgtttctcaggcacacgtartgaaaacagacaaagtagtaatcacaaatccttttgcagtgtcttgagttcacctgactcacactgtaaagctgatgcaacrttctgcaaactcatctgctatgcatgcacaaagttactgcagaatctatatacrwgtctgatattttatagtgatgttgactacgcatgttctggtatcaatttgttactacctccaaggcttctgagtttaaagcagtctcatccactgcttggtaatggctccatatgggctcatagataacaccaaaactcgtgaaagaagtatggagttttttt

SEQ ID NO: 60021 - DNA, 600 bp, Chicken  19866894318870_4
caaactcatgacagcatctctataactgaacaacatggggctttcacttctgactcagcatgtggaaccacagractaacaaaagggggtgctcaccaaacagctgatcaggggaggatggatgagacatctaagataggtgcctcratttagaacattccaaggtttatacagatagggccaacatatttcatcctccgtttctcaggcacacgtartgaaaacagacaaagtagtaatcacaaatccttttgcagtgtcttgagttcacctgactcacactgtaaagctgatgcaacrttctgcaaactcatctgctatgcatgcacaaagttactgcagaatctatatacrwgtctgatattttatagtgatgttgactacgcatgttctggtatcaatttgttactacctccaaggcttctgagtttaaagcagtctcatccactgcttggtaatggctccatatgggctcatagataacaccaaaactcgtgaaagaagtatggagtttttttttgtggaaagagctatgtgacagaaaacatatctggtaatcttgtgctcacaggccagaacaccaggagctccaactaccac

SEQ ID NO: 60022 - DNA, 600 bp, Chicken  19866894318870_5
tcagcatgtggaaccacagractaacaaaagggggtgctcaccaaacagctgatcaggggaggatggatgagacatctaagataggtgcctcratttagaacattccaaggtttatacagatagggccaacatatttcatcctccgtttctcaggcacacgtartgaaaacagacaaagtagtaatcacaaatccttttgcagtgtcttgagttcacctgactcacactgtaaagctgatgcaacrttctgcaaactcatctgctatgcatgcacaaagttactgcagaatctatatacrwgtctgatattttatagtgatgttgactacgcatgttctggtatcaatttgttactacctccaaggcttctgagtttaaagcagtctcatccactgcttggtaatggctccatatgggctcatagataacaccaaaactcgtgaaagaagtatggagtttttttttgtggaaagagctatgtgacagaaaacatatctggtaatcttgtgctcacaggccagaacaccaggagctccaactaccacgtaccagggactgaactattcccactggaacaagaatctacatttcagcagggt

SEQ ID NO: 60023 - DNA, 600 bp, Chicken  19866894318870_6
cagcatgtggaaccacagractaacaaaagggggtgctcaccaaacagctgatcaggggaggatggatgagacatctaagataggtgcctcratttagaacattccaaggtttatacagatagggccaacatatttcatcctccgtttctcaggcacacgtartgaaaacagacaaagtagtaatcacaaatccttttgcagtgtcttgagttcacctgactcacactgtaaagctgatgcaacrttctgcaaactcatctgctatgcatgcacaaagttactgcagaatctatatacrwgtctgatattttatagtgatgttgactacgcatgttctggtatcaatttgttactacctccaaggcttctgagtttaaagcagtctcatccactgcttggtaatggctccatatgggctcatagataacaccaaaactcgtgaaagaagtatggagtttttttttgtggaaagagctatgtgacagaaaacatatctggtaatcttgtgctcacaggccagaacaccaggagctccaactaccacgtaccagggactgaactattcccactggaacaagaatctacatttcagcagggtc

SEQ ID NO: 60024 - DNA, 600 bp, Chicken  19866894318872_1
ttaaaaactcatctgcaatatgcaatattcacaaagttcctcgaaacaaaaactccatatattttgtaatcatacacaacaaagctgaaaataggacagcctgcttccaaacgaaagtgagctcacagttcaaatccataagccaactctctagacacgtaaaaattaactctttaacattcttttattttgattcttctcaacttaaaaaataaatatatattttaaaaaaatacacaaccagaatttacagtacctgttctcatacgttcagacaaacttccaacattggcaaacttytctttataaatagctttgtagcctccaatgaaggacaggtaagattttggagtcacaaatgttcggcgtctgtatcgttcaaagtattcaacacatttttcagctacaatatcttgaaacgttcccatkgtgttaataacactttgtttcacttcatctgtgcactctacagkgtaggaaactaaaaaatgttgtgcaactgctacaagagcatctttaggccagcgctggaaccagtccatggtacagcctgaaatcagacctggaaatttgagtgcacgagttctgaacttttcccca

SEQ ID NO: 60025 - DNA, 600 bp, Chicken  19866894318872_2
tcaaatccataagccaactctctagacacgtaaaaattaactctttaacattcttttattttgattcttctcaacttaaaaaataaatatatattttaaaaaaatacacaaccagaatttacagtacctgttctcatacgttcagacaaacttccaacattggcaaacttytctttataaatagctttgtagcctccaatgaaggacaggtaagattttggagtcacaaatgttcggcgtctgtatcgttcaaagtattcaacacatttttcagctacaatatcttgaaacgttcccatkgtgttaataacactttgtttcacttcatctgtgcactctacagkgtaggaaactaaaaaatgttgtgcaactgctacaagagcatctttaggccagcgctggaaccagtccatggtacagcctgaaatcagacctggaaatttgagtgcacgagttctgaacttttccccaacaggagaaaaacaaagtaccacatgcaagttattgcgaactcgagtaagaaagtaattataaagattttcaccactgggagtacgccttggatactctttcctcattgctggtatcagatcttgtgtg

SEQ ID NO: 60026 - DNA, 600 bp, Chicken  19866894318872_3
ttaacattcttttattttgattcttctcaacttaaaaaataaatatatattttaaaaaaatacacaaccagaatttacagtacctgttctcatacgttcagacaaacttccaacattggcaaacttytctttataaatagctttgtagcctccaatgaaggacaggtaagattttggagtcacaaatgttcggcgtctgtatcgttcaaagtattcaacacatttttcagctacaatatcttgaaacgttcccatkgtgttaataacactttgtttcacttcatctgtgcactctacagkgtaggaaactaaaaaatgttgtgcaactgctacaagagcatctttaggccagcgctggaaccagtccatggtacagcctgaaatcagacctggaaatttgagtgcacgagttctgaacttttccccaacaggagaaaaacaaagtaccacatgcaagttattgcgaactcgagtaagaaagtaattataaagattttcaccactgggagtacgccttggatactctttcctcattgctggtatcagatcttgtgtgatttcacctatttcatctcgtgcaaaaagatttgagacttcacc

SEQ ID NO: 60027 - DNA, 600 bp, Chicken  19866894318873_1
gatctccttgagagcagccctgtggagaaggacttggggatctttggtggaggagaagctggacatgagccagcagtgtgtgcttgcagcctagaaggccaactgagttctgggctgcaataaaaaaggggtggccagcaaggagagggaggtgattatccccctctactcagctcttgtgaggccccatctggagtactgcatccaggcctgggacacccaatacatgaaggatgtggagctattggagcgggtccagaggaggttcactaagatcataaaaggactggagcacctctsttatgaggaaaggttgagggaactgggattgtttagctcagagaagagaaggctctgggaagacctcactgcagccttccagtagttgaagggagcatataaacaggagggggaacggctgtttatgagggtggatagtgataggacaagggggaatggttttaaactgagacaggggaggttcaggttagatattaggaggaagtttttcaccctgtatttgtatttataaacagtggctttgacagtctcattaataggtatacatatatattttttctctgtaaaatagaattgatc

SEQ ID NO: 60028 - DNA, 599 bp, Chicken  19866894318882_1
  misc_feature (1)..(31): n is any nucleotide
nnnnnnnnnnnnnnnnnnnnnnnnnnnnnnngatgtgtactgactgtcctcacaaacacaaacaccagatgagcagagcaacaagtcaaggcaatctttcagaaagaattacagctcttttacagatctttaccaaataaaggcttttgggatgcttttttttttcccctgggcaacctcatctgcagcactatacgtaattctaatgagattcagataataatccagctgggggtcgtgatagcgcttccgcctgtagcagttcctgtctctgtggcctggaggaatgtaaaggaaaaytgcattatcgtgactttcaagggcaatgaatcaaacttgtgaatagcactgtctaaaatgtgtctttaaatcatatgtttaccactaagtgatttcgagaacaccacaggtaaacgaacagaagtggttatttatatcctcagttattccttctgtttactgcagtgccagaaggacaaaggggaagaaaacagaagaaaggagacattcaaatgctgtgtgaggaatgatgctgcatggaacaaaggggcagaaaaacagcactgagcatttgtcttacatatttttttcatcttttg

SEQ ID NO: 60029 - DNA, 599 bp, Chicken  19866894318887_1
  misc_feature (1)..(151): n is any nucleotide
nnnnnnnnnnnnnnnnnnnnnnnnnnnnnnnnnnnnnnnnnnnnnnnnnnnnnnnnnnnnnnnnnnnnnnnnnnnnnnnnnnnnnnnnnnnnnnnnnnnnnnnnnnnnnnnnnnnnnnnnnnnnnnnnnnnnnnnnnnnnnnnnnnnnnnnatctgacccgaactctccttccatcttttaaaaactgagttcaaatataacattaaggaagacaaaaacgcacattcgctctcatgctccccaaaagcaccgtatatttagaaggaaaacgtcagtatcggttttgttttgttttcttmttttgctgtaagccaatcttcaactccaatattgcatctctatggtttattttggggagccgttgtacaacagcaaagcaatagcccgggtatcgatagctggcttccctggattgtttttatgttatatacatacatacatacatacacacacatayatatatatgtatttcttttagctctgagcactccggatagcactgcgaggtcagtgcaacatcatcagctcttcgactccaaacattacaatactatgcctttctctctctctctctgtctccctcttattattttttcca

SEQ ID NO: 60030 - DNA, 600 bp, Chicken  19866894318887_2
ccgaactctccttccatcttttaaaaactgagttcaaatataacattaaggaagacaaaaacgcacattcgctctcatgctccccaaaagcaccgtatatttagaaggaaaacgtcagtatcggttttgttttgttttcttmttttgctgtaagccaatcttcaactccaatattgcatctctatggtttattttggggagccgttgtacaacagcaaagcaatagcccgggtatcgatagctggcttccctggattgtttttatgttatatacatacatacatacatacacacacatayatatatatgtatttcttttagctctgagcactccggatagcactgcgaggtcagtgcaacatcatcagctcttcgactccaaacattacaatactatgcctttctctctctctctctgtctccctcttattattttttccaggccagtttcaatgaagatcttcaccacgttcgccagcctcggccggggcgcagcgagcccccagccccgcccggcccatctctacctgcccgttcccgcaggcagagcccggggcccatctccccgcccgcagtgcccggaggcgcggaggcaccgca

SEQ ID NO: 60031 - DNA, 600 bp, Chicken  19866894318893_1
cacccccaaaggcacgggacaaaaggaagaaggcagccctctgctccccagaatagaaacggagacctcccagccctcttctccttctgctttgtgtgtgtgtgtgtgtgtgtgtgtgtgtgtgtgtgtgtgtgtgtgtgtgtgtgtgtgtgtgtgcccacagatgctctggtctcactcggtggcaaacggtgctacacgagttaccggagcaacactttccaaagccgtcatcgcttctgtcatttacttcccaggctccaaattagcaagctgcccttcagcagtctgtgcatgcargagggctgctccccctctgcacgctgccgcctgcgtttgctcagcagcagccacacggccccagcatgggctgtgccgaagcacagctgagtgtggctcagcaatcatccctgcagagcagcgacagtcacagcaccctcaacaggcaccggagccccaaggctgagatgcagctaatggggttgcttgctttcaggaagcctgggcttcacacttcttgctttaaagaaacttccaaggctgaggatgctgctgggtcctgcaccggcgcttggcagcagctctcccatagaatcactt

SEQ ID NO: 60032 - DNA, 409 bp, Chicken  19866894318894_1
tttccagcagtaaaagaacaaacaagaagaatgtgaaactgctgaaattactggatgatttagggatagtagataagactgaggcttttgagcccagagacagggttcagggaggacagtaattattgctaatggaagaggtctgagtcagagatctcttgaggaaaatcttgatccgtacaagttagtgggattcatgcgaaggatgctgaaggagctggctgaggtcactggccagctgttctctatcatcttcgataggtcatggatttcatgggaggtccatgatgatggaagaawgccagatgttgcaccccttttcgaaaatggcagtacgaattttcaagaggactgtaggctgttcagactcacttttaattcctaagaatgtcatggatcaggtccaatt

SEQ ID NO: 60033 - DNA, 600 bp, Chicken  19866894318895_1
agacattcttataagaaacgaatccgctctcctcttccccataatgaaagttatgttcccacttttttaaaaaacaactctgctatgagtcatgaaaaaaatgaagtaacaattacttagatattttctgctaaccaaaaccacacttttcagtctttaagggatcgtttgtccctgagacaaccactctgctaagactagactataagttattgatgttgtttacggaggcgggggagtgattccatctgtctgtgatgggcactgtaggtttttaaaagaaaatagtcaattccaaasacttcactgatagaacactctctgaacgcttgacctgaacaaacagactactaggtaactgctacttaaaactcagtaactgatttgttcatgataatcatcttacccagatgaaccttacattgtggtttacatgtgtgtgggatctctacgttatctatgctaataaaacattaatcaagggccaaatttatagcaggcactttataagtaaggtcaggacaggtcagcctcacataataggaaacaactacaggctagatcttaacactgtaactgaacacccttgttactttacct

SEQ ID NO: 60034 - DNA, 600 bp, Chicken  19866894318901_1
tctttgaatcacagctttgtgtagcaatatgagactgagtaatagtaccctttcagaggcttgtgtctccatgccaggtaattcttttgcagcatgtaaaatgacttcggtgagatcacttaaggactgagctgaagggactaggttcgtgaagttgtctgtttgaaagatagggctctggaagtaactggaactctgaaatgctgaatctgcagactgagcagaagtactgtacaggacatgctacaaaggactggactgaaggctggtggccagaagtaaacttctcttggccttgtrtatgctcttactctttttcaatagactgaaaygttcaggggaaccagccaggcctcactagtttaagactttgtgagactttagttgttaatgtaaaatgtagatcgaaatacaccatgagtcttctgtttgtaaacagaataaggtgtctttgtttgcaaggctgaagagtagttacrgrgagcgttgttctcttagagataaacaaaactctgcttggagacaaggtttgaggtcctgcattcccttgtgagcttgaacaagagtctcctcatcagaagttaggaagaaaggctttct

SEQ ID NO: 60035 - DNA, 600 bp, Chicken  19866894318901_2
gactgagtaatagtaccctttcagaggcttgtgtctccatgccaggtaattcttttgcagcatgtaaaatgacttcggtgagatcacttaaggactgagctgaagggactaggttcgtgaagttgtctgtttgaaagatagggctctggaagtaactggaactctgaaatgctgaatctgcagactgagcagaagtactgtacaggacatgctacaaaggactggactgaaggctggtggccagaagtaaacttctcttggccttgtrtatgctcttactctttttcaatagactgaaaygttcaggggaaccagccaggcctcactagtttaagactttgtgagactttagttgttaatgtaaaatgtagatcgaaatacaccatgagtcttctgtttgtaaacagaataaggtgtctttgtttgcaaggctgaagagtagttacrgrgagcgttgttctcttagagataaacaaaactctgcttggagacaaggtttgaggtcctgcattcccttgtgagcttgaacaagagtctcctcatcagaagttaggaagaaaggctttctaactcacccacctattgaggcyggaagactaa

SEQ ID NO: 60036 - DNA, 600 bp, Chicken  19866894318901_3
ggaagtaactggaactctgaaatgctgaatctgcagactgagcagaagtactgtacaggacatgctacaaaggactggactgaaggctggtggccagaagtaaacttctcttggccttgtrtatgctcttactctttttcaatagactgaaaygttcaggggaaccagccaggcctcactagtttaagactttgtgagactttagttgttaatgtaaaatgtagatcgaaatacaccatgagtcttctgtttgtaaacagaataaggtgtctttgtttgcaaggctgaagagtagttacrgrgagcgttgttctcttagagataaacaaaactctgcttggagacaaggtttgaggtcctgcattcccttgtgagcttgaacaagagtctcctcatcagaagttaggaagaaaggctttctaactcacccacctattgaggcyggaagactaagtgtgaatacagctggaactctacaggctggaagagagttagctgtctaatgagctgttactggtcawatgtgataattgtattgttaggaaatgtgccatcaggaatgtatgaaacttagtmgtttcatctggatacctgactacc

SEQ ID NO: 60037 - DNA, 600 bp, Chicken  19866894318901_4
aagtaactggaactctgaaatgctgaatctgcagactgagcagaagtactgtacaggacatgctacaaaggactggactgaaggctggtggccagaagtaaacttctcttggccttgtrtatgctcttactctttttcaatagactgaaaygttcaggggaaccagccaggcctcactagtttaagactttgtgagactttagttgttaatgtaaaatgtagatcgaaatacaccatgagtcttctgtttgtaaacagaataaggtgtctttgtttgcaaggctgaagagtagttacrgrgagcgttgttctcttagagataaacaaaactctgcttggagacaaggtttgaggtcctgcattcccttgtgagcttgaacaagagtctcctcatcagaagttaggaagaaaggctttctaactcacccacctattgaggcyggaagactaagtgtgaatacagctggaactctacaggctggaagagagttagctgtctaatgagctgttactggtcawatgtgataattgtattgttaggaaatgtgccatcaggaatgtatgaaacttagtmgtttcatctggatacctgactaccca

SEQ ID NO: 60038 - DNA, 600 bp, Chicken  19866894318901_5
agactgaaaygttcaggggaaccagccaggcctcactagtttaagactttgtgagactttagttgttaatgtaaaatgtagatcgaaatacaccatgagtcttctgtttgtaaacagaataaggtgtctttgtttgcaaggctgaagagtagttacrgrgagcgttgttctcttagagataaacaaaactctgcttggagacaaggtttgaggtcctgcattcccttgtgagcttgaacaagagtctcctcatcagaagttaggaagaaaggctttctaactcacccacctattgaggcyggaagactaagtgtgaatacagctggaactctacaggctggaagagagttagctgtctaatgagctgttactggtcawatgtgataattgtattgttaggaaatgtgccatcaggaatgtatgaaacttagtmgtttcatctggatacctgactacccagatgatgagcttaaaatgaatcttactcttaagctttcctgcaaggtcaaatgctgattaactgccccattgatgtttaatctgatgtgatgctttgcacctggaggtaagatatattcaagcctacaactatctagactg

SEQ ID NO: 60039 - DNA, 600 bp, Chicken  19866894318901_6
tagatcgaaatacaccatgagtcttctgtttgtaaacagaataaggtgtctttgtttgcaaggctgaagagtagttacrgrgagcgttgttctcttagagataaacaaaactctgcttggagacaaggtttgaggtcctgcattcccttgtgagcttgaacaagagtctcctcatcagaagttaggaagaaaggctttctaactcacccacctattgaggcyggaagactaagtgtgaatacagctggaactctacaggctggaagagagttagctgtctaatgagctgttactggtcawatgtgataattgtattgttaggaaatgtgccatcaggaatgtatgaaacttagtmgtttcatctggatacctgactacccagatgatgagcttaaaatgaatcttactcttaagctttcctgcaaggtcaaatgctgattaactgccccattgatgtttaatctgatgtgatgctttgcacctggaggtaagatatattcaagcctacaactatctagactgcactgttaattcttttctagattaaatcaagatgtcttcaggaaaggctttcattggaaaaccagcccctgattttac

SEQ ID NO: 60040 - DNA, 600 bp, Chicken  19866894318901_7
ttgcaaggctgaagagtagttacrgrgagcgttgttctcttagagataaacaaaactctgcttggagacaaggtttgaggtcctgcattcccttgtgagcttgaacaagagtctcctcatcagaagttaggaagaaaggctttctaactcacccacctattgaggcyggaagactaagtgtgaatacagctggaactctacaggctggaagagagttagctgtctaatgagctgttactggtcawatgtgataattgtattgttaggaaatgtgccatcaggaatgtatgaaacttagtmgtttcatctggatacctgactacccagatgatgagcttaaaatgaatcttactcttaagctttcctgcaaggtcaaatgctgattaactgccccattgatgtttaatctgatgtgatgctttgcacctggaggtaagatatattcaagcctacaactatctagactgcactgttaattcttttctagattaaatcaagatgtcttcaggaaaggctttcattggaaaaccagcccctgattttactgccacagctgtaatgccagatgggcaattcaaagatatcaagctctctgactat

SEQ ID NO: 60041 - DNA, 599 bp, Chicken  19866894318902_1
  misc_feature (1)..(75): n is any nucleotide
nnnnnnnnnnnnnnnnnnnnnnnnnnnnnnnnnnnnnnnnnnnnnnnnnnnnnnnnnnnnnnnnnnnnnnnnnnnatctataaggaaatagtgtagtttattaaactagcatcatggattaagaattaaagagccgatccttttatcacttagaccagcgtgacattgatgttacccatgaggaacttaagtaatgctgagcacgtgggaagagttcctgtggactcttagaaagcaagcttctagacctctaacaagatcaggcttgattcttgaacattaattttcaactactgtgcraagaatgagctgcttttcttggagtttgagtaatggaaatagtcctatcatattgaaacgaatcttataaagaataagtttgtgtgagcaaataaaacactgaaccagtgctatgcaggaagaataactttcatttaatcagaggagaaaattaatctctagtcacattacttctcagaaaactaaaataccagcagtgtctcttccttgttctgtctttaatgtcttcttcctttttttggcaagttagattacgttcatttcagtggtgctgcttaagtagttttagtttacgtgta

SEQ ID NO: 60042 - DNA, 600 bp, Chicken  19866894318907_1
cgcaaagcaagcaacagctgaaaagcttaactagtttactcttgtaaatgaaagctgaaagaatacatcactcctggctgaaagattctttgctttacattataagaactacttgtattaaaatcagtttcagtacaagaacagttgtgcacaaacttgcggagaattgacagaatattctgattttagaattcagtagaattacaagttggaaggtgttttccaacagtcagaagggaaattttagcaagtcttttttttttttttttaatattatctctgtaaccactagagacattraaagttgtaatgtatattttatctgctttaaagatataattcaatacatttatcaaatggaattgaaaatggctgagattagagtagaagacccagaagatcccaccccacattatgttctggcttcctgtaacagctccttgtgcgctccaggaaatattccactatcatcttatcttcaaagccatccaactcttaaattatatttggcttctgttcaagttcttttatagccttttcctcaagctatacaattactcttccaagttgtctaccttgagaactttgtagtcctcctac

SEQ ID NO: 60043 - DNA, 600 bp, Chicken  19866894318911_1
aataaaattacccctgtttaataaaatgtgagtttccaaggcattgtacactttgacttcttcttacaaatacccgatgaccatgtttaaaattaaaatgtaaatattatacatcatgagcactgaagatccagttattgaaatgattgaggtgtggacaccaaagtacctctgtggtactaccgaggagtggcagaggtaaccactcctaccagcagtaactttggattaatttaatagcatataacagtcatacaagatgtactcagaaatatataggaaaattgcctaaggagacakctcatctctttttttgattatatctcaatgcaactaatgtgtgaaawtttcaatttcatcatgtaagtgttgggaagtaaagtacacaggtttatttgtctcttttatttcctaaacacagcatcaggaataaactagtgaaatctttcacagtgatagagaatgattaaataataataatacataatgcataatgtaattcracagaagtcattatccttttccacagtccctcttaggtttccgtattctactgttctccaggagcatctttttactatttgctaaaagcacaggaac

SEQ ID NO: 60044 - DNA, 600 bp, Chicken  19866894318911_2
acactttgacttcttcttacaaatacccgatgaccatgtttaaaattaaaatgtaaatattatacatcatgagcactgaagatccagttattgaaatgattgaggtgtggacaccaaagtacctctgtggtactaccgaggagtggcagaggtaaccactcctaccagcagtaactttggattaatttaatagcatataacagtcatacaagatgtactcagaaatatataggaaaattgcctaaggagacakctcatctctttttttgattatatctcaatgcaactaatgtgtgaaawtttcaatttcatcatgtaagtgttgggaagtaaagtacacaggtttatttgtctcttttatttcctaaacacagcatcaggaataaactagtgaaatctttcacagtgatagagaatgattaaataataataatacataatgcataatgtaattcracagaagtcattatccttttccacagtccctcttaggtttccgtattctactgttctccaggagcatctttttactatttgctaaaagcacaggaactagaagtaatactttagaaacaagtcttttcttaagactcacctatt

SEQ ID NO: 60045 - DNA, 600 bp, Chicken  19866894318911_3
cactcctaccagcagtaactttggattaatttaatagcatataacagtcatacaagatgtactcagaaatatataggaaaattgcctaaggagacakctcatctctttttttgattatatctcaatgcaactaatgtgtgaaawtttcaatttcatcatgtaagtgttgggaagtaaagtacacaggtttatttgtctcttttatttcctaaacacagcatcaggaataaactagtgaaatctttcacagtgatagagaatgattaaataataataatacataatgcataatgtaattcracagaagtcattatccttttccacagtccctcttaggtttccgtattctactgttctccaggagcatctttttactatttgctaaaagcacaggaactagaagtaatactttagaaacaagtcttttcttaagactcacctattgaaatcagagataaaccatgctccttagtatgtattgaaagtgggtcctgttatgacatatatcaacacacagttgtgcagagtatcatgatggaaaagacgacacagtatacagtgacagatttgggaagctcatggctgtctaacttgtcctgg

SEQ ID NO: 60046 - DNA, 600 bp, Chicken  19866894318917_1
tgtgcagggaacgtgctttgttaaatgccctactcaggagcagctgccttggcagtttccctaattctgttaggtgtgatttcgatctgcaggaactattaactgatctaattatgctggagagcatcactccgcttgctgcctcattagctcccggctctcctccatcctgctcaccggtgttgccagcagggtggcatgtctttgctgcactcacccggagcggtgaccggacccgaaccacataatggtgctgtttgcagccccaacaagacagcatttgggattcaaagcctcagmgcatcgagcagcatggcacggcacaagggaaaccacagggcaagggacatcccctcttgggtgctgctgtcctgatgcatcccagctggggaagcagcgactctgggagcgaggcagctgctcacacgccggtggagaggagaggggctttatcatgcataatttcttggtactcccgcagcgyggccgcttcggatctaatattggctggcaggatgcttgacagtgcagggaggcagggagctcgagcagagctaatgcactgcttatcactctcaaagcactgtttatttcagcatc

SEQ ID NO: 60047 - DNA, 419 bp, Chicken  19866894318917_2
gccagcagggtggcatgtctttgctgcactcacccggagcggtgaccggacccgaaccacataatggtgctgtttgcagccccaacaagacagcatttgggattcaaagcctcagmgcatcgagcagcatggcacggcacaagggaaaccacagggcaagggacatcccctcttgggtgctgctgtcctgatgcatcccagctggggaagcagcgactctgggagcgaggcagctgctcacacgccggtggagaggagaggggctttatcatgcataatttcttggtactcccgcagcgyggccgcttcggatctaatattggctggcaggatgcttgacagtgcagggaggcagggagctcgagcagagctaatgcactgcttatcactctcaaagcactgtttatttcagcatctgt

SEQ ID NO: 60048 - DNA, 600 bp, Chicken  19866894318918_1
taaatgtatatatatatatgcatgtatgtataaagatggaagcatttatttaactgatgtgcagaaagaggccctcccaggtgagggaagcatggcggggtgggctcaggctgatggtgcgtcctgctgtgcagcacagtgcctcaagtgggttcacagccccgtgcagatgttcaggaatttctcttttgtcctggccatggggttctgctgctcttcagaccataagtgcactccaggctcagcgggttcgtggctcaggagatgcttttcatcccccctggatccggctgtctgctstggagggagctgcctctygcagccatgtgtcctccttggttctgcttccacagctttgcagacccacgtgaaggctttattaaattaagcagaacgacctttaaaaatgtacatttcgagtggaagaattgctttatgtaaggcagggctatgcaaggggacctaaatacgagctttaattggctgctacaaaaataggtgtgatttttttgcgcagtgattttacagcttctgagctgagtgtcccgatgaaatcctgcaaccggtccactcattgctggggagatggggacatggggg

SEQ ID NO: 60049 - DNA, 600 bp, Chicken  19866894318918_2
tgcatgtatgtataaagatggaagcatttatttaactgatgtgcagaaagaggccctcccaggtgagggaagcatggcggggtgggctcaggctgatggtgcgtcctgctgtgcagcacagtgcctcaagtgggttcacagccccgtgcagatgttcaggaatttctcttttgtcctggccatggggttctgctgctcttcagaccataagtgcactccaggctcagcgggttcgtggctcaggagatgcttttcatcccccctggatccggctgtctgctstggagggagctgcctctygcagccatgtgtcctccttggttctgcttccacagctttgcagacccacgtgaaggctttattaaattaagcagaacgacctttaaaaatgtacatttcgagtggaagaattgctttatgtaaggcagggctatgcaaggggacctaaatacgagctttaattggctgctacaaaaataggtgtgatttttttgcgcagtgattttacagcttctgagctgagtgtcccgatgaaatcctgcaaccggtccactcattgctggggagatggggacatgggggggctgaggagcccaagga

SEQ ID NO: 60050 - DNA, 600 bp, Chicken  19866894318919_1
aagcatactatggaactatcttgttataccaggtagaagatccagacattctcatcagtctatgctgcaaatgttcagacattcagaataataggaggcagcacgtttcttacacaattttataatttttgatggcaaaccagtttaactatcccagactttgttcaatgttttattcttcttcctttattgttgagaagatgtattactgactatcattgtcataagatgattgatcaatagaatcctctcagttacaagaagtatacagctgcctgctccatctttgtgtagtactcyatacacttatgctttactgcagcaatcatctcaagttatctagttttcccatgtagaaagatttttatatttgcatgttagcaaacttgccgtgactttggatgatgccaacagtcagatgctctttaaccatttttcccagaaattcaccaggcaagtaactgctctcacatcagtgattgtatttttttgttcttttcaatctgtccaaggaggtgtatgccacagatcttgtaaattcatactagtatgtagatggaggccttacactttgatatgtttcccttacgcatttctcat

SEQ ID NO: 60051 - DNA, 600 bp, Chicken  19866894318927_1
accagaagcatctattggtggagcccactgcaaaaaggatgatgggcaagatggacggggaataatttagtgtaatggttcctaaatcatgggcttcccaacttccatgagctttggaccacgcccatgtgatttcctatttgcttctcatctccaaataccgttgtatttgggtttccaacagcaacctccactcttgcatagttaaagctgctggacttcagtcaagatctgaggctttttttgccgtgttttgtttgttcatttttatacatttatcctctgtatagagaggaaggrtttccaggagggggaaatggagacatctatttcactcacttgagctctattaatgatgcgatttgcatagtgaaatacagtgtgtaacaagtacagatacacagagacctttttatacttctcatcatcctrgagaaaaaaggaacatgcaagaaggtaaaacagaaatgtagccctaaatacgtgtgatactgcacagcacggtaataaaatattgctcacttaagcaggagcctttgaaccgctcactagagaagcccttccttctcaattggtttttataggcagcctagggagatt

SEQ ID NO: 60052 - DNA, 600 bp, Chicken  19866894318927_2
tttcctatttgcttctcatctccaaataccgttgtatttgggtttccaacagcaacctccactcttgcatagttaaagctgctggacttcagtcaagatctgaggctttttttgccgtgttttgtttgttcatttttatacatttatcctctgtatagagaggaaggrtttccaggagggggaaatggagacatctatttcactcacttgagctctattaatgatgcgatttgcatagtgaaatacagtgtgtaacaagtacagatacacagagacctttttatacttctcatcatcctrgagaaaaaaggaacatgcaagaaggtaaaacagaaatgtagccctaaatacgtgtgatactgcacagcacggtaataaaatattgctcacttaagcaggagcctttgaaccgctcactagagaagcccttccttctcaattggtttttataggcagcctagggagattatgtgcttaagttagtcatttaaatttagagagcttgaacaaacactgcaaactccccttctctctcccagaagaaatagctcatgatgacataagagcatgtcatcataccrtaagaaaatagataygata

SEQ ID NO: 60053 - DNA, 600 bp, Chicken  19866894318927_3
tatacttctcatcatcctrgagaaaaaaggaacatgcaagaaggtaaaacagaaatgtagccctaaatacgtgtgatactgcacagcacggtaataaaatattgctcacttaagcaggagcctttgaaccgctcactagagaagcccttccttctcaattggtttttataggcagcctagggagattatgtgcttaagttagtcatttaaatttagagagcttgaacaaacactgcaaactccccttctctctcccagaagaaatagctcatgatgacataagagcatgtcatcataccrtaagaaaatagataygataacrgcaaaagtattttcagtcactcttaaatctggtggttgagcttggtggggattttctttttttttcctgttgttcttcgtctaacatcaattgtgcctaataacagtatccaagcagatgatgcaaatcaagcgagtgcatttctgatcgctggtcaagcgctcgcattgtgctaatgagaaactgagctgtaaaatcaagtcaaaatattttttccgtggctcccggtggaggtcagagcaaatgcccatttgtacttcctctagctctgcaggcag

SEQ ID NO: 60054 - DNA, 600 bp, Chicken  19866894318927_4
cctrgagaaaaaaggaacatgcaagaaggtaaaacagaaatgtagccctaaatacgtgtgatactgcacagcacggtaataaaatattgctcacttaagcaggagcctttgaaccgctcactagagaagcccttccttctcaattggtttttataggcagcctagggagattatgtgcttaagttagtcatttaaatttagagagcttgaacaaacactgcaaactccccttctctctcccagaagaaatagctcatgatgacataagagcatgtcatcataccrtaagaaaatagataygataacrgcaaaagtattttcagtcactcttaaatctggtggttgagcttggtggggattttctttttttttcctgttgttcttcgtctaacatcaattgtgcctaataacagtatccaagcagatgatgcaaatcaagcgagtgcatttctgatcgctggtcaagcgctcgcattgtgctaatgagaaactgagctgtaaaatcaagtcaaaatattttttccgtggctcccggtggaggtcagagcaaatgcccatttgtacttcctctagctctgcaggcagcttggcgtcccttcc

SEQ ID NO: 60055 - DNA, 600 bp, Chicken  19866894318927_5
aaaaaaggaacatgcaagaaggtaaaacagaaatgtagccctaaatacgtgtgatactgcacagcacggtaataaaatattgctcacttaagcaggagcctttgaaccgctcactagagaagcccttccttctcaattggtttttataggcagcctagggagattatgtgcttaagttagtcatttaaatttagagagcttgaacaaacactgcaaactccccttctctctcccagaagaaatagctcatgatgacataagagcatgtcatcataccrtaagaaaatagataygataacrgcaaaagtattttcagtcactcttaaatctggtggttgagcttggtggggattttctttttttttcctgttgttcttcgtctaacatcaattgtgcctaataacagtatccaagcagatgatgcaaatcaagcgagtgcatttctgatcgctggtcaagcgctcgcattgtgctaatgagaaactgagctgtaaaatcaagtcaaaatattttttccgtggctcccggtggaggtcagagcaaatgcccatttgtacttcctctagctctgcaggcagcttggcgtcccttccatgggca

SEQ ID NO: 60056 - DNA, 599 bp, Chicken  19866894318932_1
  misc_feature (1)..(110): n is any nucleotide
nnnnnnnnnnnnnnnnnnnnnnnnnnnnnnnnnnnnnnnnnnnnnnnnnnnnnnnnnnnnnnnnnnnnnnnnnnnnnnnnnnnnnnnnnnnnnnnnnnnnnnnnnnnnnnactgacccttctgatttgagcctgtaactgtttgcatgcttctctcctgccttacagggctctctcctgcttggacaggacactgagcagctctgaataggcagtcgactggacctgttccagcatcttaacttaaaaatttcgacaatgttcactgttgatcctgcccgggaagaaatggcttcttagygctgctgttaacagtcagactagggaccaacatcaccctgaaaggcagtgtttgcaaactgctggggagaagaaaagcctctgaaatgggagctgggggagagccaaaccatggttttctggctgagattcctctagtcgctctcacagggcaaaaagaagccactcaccctggcagatcggccacatggggctgtgctctgtgtgggatgagggaaacagtgggactgggagccagagcacagggcagggaaaacccacatgggaatgaaaacccacctgcatgcggagacctaacac

SEQ ID NO: 60057 - DNA, 525 bp, Chicken  19866894318932_2
gaaaagcctctgaaatgggagctgggggagagccaaaccatggttttctggctgagattcctctagtcgctctcacagggcaaaaagaagccactcaccctggcagatcggccacatggggctgtgctctgtgtgggatgagggaaacagtgggactgggagccagagcacagggcagggaaaacccacatgggaatgaaaacccacctgcatgcggagacctaacacactttcatttatcttacagtgaactaagtgccaaatcaaaaacactgctactgcaaatagtagaagatgggraagttggatagtaagtatttaaactgaaatatttggcatgaccacctcacgaatattgctagatgtttgacgtaagtcctctttcagttctgcagtatagccacataagaacacattcagttcccaaacctggttaagtttagctgtctgatgctgcttcatcctggttgtcccatcgggtgcatcttcagaacagccctgcaagggagaacagcagaagatcag

SEQ ID NO: 60058 - DNA, 599 bp, Chicken  19866894318934_1
  misc_feature (1)..(18): n is any nucleotide
nnnnnnnnnnnnnnnnnncccccccccctgacagggctttgctgcagcgggatgggaagagagaaggcatcgggagttcaaggattgcttgtgaacttgagacaagcagagctcttgccggtgacacatgcatcaggtgttccaagatgataacataaacctgcctgaagtcatccatttaattagtaatgggttaggttaaacattacttacccgggaggagatttaacccttggtggagacgggagggagagagaaagttgcctgcaagaagagggactgttcatatttttgatattyccaaagctggcacaggggaaatgtcccccttcccaaggcacaccaccagcagatgggactgggatttggactccatggcacccagggagggcaaagagggcrttcagaggaggaggagaaggtcggratgagatggtgaarcagttgggtgtgccttaaggatgctcccactccaagaacagatctgcagccgtcaaacacggcagggaaagtctgtagcaggcaccaatagggtagggaggtgtgaagatttccattctcccaaaaacaagggcagggcaccaccggtgggtgtttta

SEQ ID NO: 60059 - DNA, 600 bp, Chicken  19866894318934_2
caagcagagctcttgccggtgacacatgcatcaggtgttccaagatgataacataaacctgcctgaagtcatccatttaattagtaatgggttaggttaaacattacttacccgggaggagatttaacccttggtggagacgggagggagagagaaagttgcctgcaagaagagggactgttcatatttttgatattyccaaagctggcacaggggaaatgtcccccttcccaaggcacaccaccagcagatgggactgggatttggactccatggcacccagggagggcaaagagggcrttcagaggaggaggagaaggtcggratgagatggtgaarcagttgggtgtgccttaaggatgctcccactccaagaacagatctgcagccgtcaaacacggcagggaaagtctgtagcaggcaccaatagggtagggaggtgtgaagatttccattctcccaaaaacaagggcagggcaccaccggtgggtgttttatcttctgccctgggggcaggtggtgacatgatttcttccacatgagcaacaccacttcccctcgcccacaggttctgaaaacagaaccagggataggaaatga

SEQ ID NO: 60060 - DNA, 600 bp, Chicken  19866894318934_3
atgcatcaggtgttccaagatgataacataaacctgcctgaagtcatccatttaattagtaatgggttaggttaaacattacttacccgggaggagatttaacccttggtggagacgggagggagagagaaagttgcctgcaagaagagggactgttcatatttttgatattyccaaagctggcacaggggaaatgtcccccttcccaaggcacaccaccagcagatgggactgggatttggactccatggcacccagggagggcaaagagggcrttcagaggaggaggagaaggtcggratgagatggtgaarcagttgggtgtgccttaaggatgctcccactccaagaacagatctgcagccgtcaaacacggcagggaaagtctgtagcaggcaccaatagggtagggaggtgtgaagatttccattctcccaaaaacaagggcagggcaccaccggtgggtgttttatcttctgccctgggggcaggtggtgacatgatttcttccacatgagcaacaccacttcccctcgcccacaggttctgaaaacagaaccagggataggaaatgaggaaatgccccatttgggggcagag

SEQ ID NO: 60061 - DNA, 600 bp, Chicken  19866894318934_4
ccaagatgataacataaacctgcctgaagtcatccatttaattagtaatgggttaggttaaacattacttacccgggaggagatttaacccttggtggagacgggagggagagagaaagttgcctgcaagaagagggactgttcatatttttgatattyccaaagctggcacaggggaaatgtcccccttcccaaggcacaccaccagcagatgggactgggatttggactccatggcacccagggagggcaaagagggcrttcagaggaggaggagaaggtcggratgagatggtgaarcagttgggtgtgccttaaggatgctcccactccaagaacagatctgcagccgtcaaacacggcagggaaagtctgtagcaggcaccaatagggtagggaggtgtgaagatttccattctcccaaaaacaagggcagggcaccaccggtgggtgttttatcttctgccctgggggcaggtggtgacatgatttcttccacatgagcaacaccacttcccctcgcccacaggttctgaaaacagaaccagggataggaaatgaggaaatgccccatttgggggcagagatggcagcaacatt

SEQ ID NO: 60062 - DNA, 600 bp, Chicken  19866894318951_1
tattttatgcacaggtaggttctccatttgtgtacatctcagttaaaaaaaaaaatctaggcattttcaattgtgagatgcaaaaccatttgaggaaaagtgggaaaatattttgaacatatcaaaacaagataagcttctttcacagtattttcaagtataattagcattcctattaaagcggatgcaaaatggacagtaaaccacatttttggcaaagtcttagtacttgcagcaataaacaagaccatctgaattctattatatctataaagtatccctatcagcacaacgtatcastgttatacctttgaggcttccaggaagggactgtggattaaggtttttcctctcattaagctcatgcttctcagcttcttctggcaccaccttcaccaagataaaaatgaacctctagctttgaacctctaacctgacgcccagatttatcccatatgttattgtggggctttttttttgatttgttttgttttgttttcctgggattatgatgaggaacaagctatctagccaaaggacaaggacatctgcttagcttcaatctttcccaaacacggaggtcagctagtggcactgccc

SEQ ID NO: 60063 - DNA, 600 bp, Chicken  19866894318953_1
caaccctgtaaacagatgatgctgttacagtatccttggcagtaacaagatcacacttcatatcaatacctactgaatgtagatttgctcattccatattagaagcctaacaccactaggtgatcagagcaatcagactactagccttcaaggaaaatttgttagaagactgtcagtgttttacagaagtaattactttggtttaccaattttttttctgtatatagttttctaaatgcacgcaaattcaagttgcattaccttcaatccttttcttcctctgaaaaaactcagttttaygaactgaaagctgtgcagtaggttttgcttcccttctttatacaacacaaagtttgcagtcagctagttcaactgttgaaatgcatctatattctgagtcaagtcactacaaggattacaaagtgtatacacaagaaattcctttatggatcttacacaggaacaaagtttaaatgggtatctaacaaaaatccggcagattagccctttagtaaagaagcttaagagtcagacaaagaggagccatgctctttactttgatgatcagagttaatttgttcatcccctttagacagccca

SEQ ID NO: 60064 - DNA, 600 bp, Chicken  19866894318956_1
caccatgggcagccaggaagactgctcttaattaagaatttcccttctctgcttgggggatgcagcaaggtctttcttcctctccttggttctagcgggtcatttaggaaagaatcctgtttgggagatttggtttgggagatgccctaagatgtagcttggagtgagttcatactgtcacaaaatcagctctgtttgagcctgcagaaatccagtccttaggaagcagctaaatatacattttgctggaatgcccattgggcaggacaggattttcagtcaaataaaattattgatgtygctatggctaatagaaaagccttcttaacaaatcctgtcattgtgatgctgcatctcatttaaatccaggcggaacttcaggcactctgaccctgccgcagtgctggaacactctttcatgtgtatgtaggacagatagttcagaagggccaagtgtgagcagctcaggaagatagagcatgttcctctgctcccctgggatgcaataaagcaatgaccttctgccacaaaatatggagtaagttatgccctgaggttgtgtcgagttatttgcttttgctggtgaggtgttgggtccgg

SEQ ID NO: 60065 - DNA, 599 bp, Chicken  19866894318968_1
  misc_feature (1)..(178): n is any nucleotide
nnnnnnnnnnnnnnnnnnnnnnnnnnnnnnnnnnnnnnnnnnnnnnnnnnnnnnnnnnnnnnnnnnnnnnnnnnnnnnnnnnnnnnnnnnnnnnnnnnnnnnnnnnnnnnnnnnnnnnnnnnnnnnnnnnnnnnnnnnnnnnnnnnnnnnnnnnnnnnnnnnnnnnnnnnnnnnnnnnaaaactaatggaaacataaggaaaaaacaacgttgtcctttctgtttccccatgtttgagatgaaagcaaaagatcaagttaaaaccaaagatcaaattaaggtagtcagtaagtgttaaawcatcctcgaagtgcaacttacctcataacggtctacagaacatttaacagaaattttccagaaagtgataaagctatccacgcatactccagaaaacagaaaattcaggactccagtagttttataacatttaagttacaccattcttcttccttcaacaagctattaaaaaagtatctacagtacatagaggtgcatcttcttgggtaaagcataacaactcccacaaatactattccatatgtaatctgggttacttttaggtaaagacatacaattacgagaacataaaaaactaa

SEQ ID NO: 60066 - DNA, 521 bp, Chicken  19866894318968_2
tccttcaacaagctattaaaaaagtatctacagtacatagaggtgcatcttcttgggtaaagcataacaactcccacaaatactattccatatgtaatctgggttacttttaggtaaagacatacaattacgagaacataaaaaactaaaaaaggaaataaaacaagtaatttaatattttatatacaggattatgccatggagaaaatcaagaaaacttacctacatctttactccacacgtccacctcacaaacaatgaaaatctagaagaacagaaaatatagacttgatgaaggtyttcagtactacaataatttgcacagaagatactcttcagtgagtataactgtgctgatgctacacttacaaagcccttacatgggtctacacagtaaaatacatcacagcttctatagagaaaacactacctctttattctactgagggaaacaaacaaacaaacaaacaaataaataatctccacgtgtttgcaatcagatggaatattacatcagttag

SEQ ID NO: 60067 - DNA, 600 bp, Chicken  19866894318970_1
tgtaggcagttggatttgatgttcttcatatgtcctttccagctgaactactctatcctatattattttccccaaggattgatttatgactgacatgtgtattagttaggaaacaaagaccagatggcttgacatcagaaaacatgatttacatctatgttagtaagatgctgcaatataaacagtttgttttttttacttgcagaggtattgttgccagtattttggttttcctgtgttttggagttacacaggctaaagatggaccattttcaagacctcatccaggtaatttaagcygcttaaattactcagatatttctgttacgttctgctgagtgtaaatatttgtgttacatgtggaggaggtaagtcataatttaaataatataggttcagtaacactacacagttatcatgtagcttcccagcttccacccagcctcctacaatgctgaggtggtcttccaagcagcataatgattatttggcattttcataggttgactatccacagtaataattatacttctgaagttttctagttggactgtaagtcctgaaatgtttgaaaccttaacaggaagcctcttccctata

SEQ ID NO: 60068 - DNA, 600 bp, Chicken  19866894318975_1
agtaagacaacggtggcttgacatatttgtttgaaagacaatagaatgaagaatgaaaaaatattctgtgctgaacatcatcagccccaagaagaggattctccccacttatcaggacagcaaaggtgaaatcacacatttttgagaaaatcacacttaataaggtaatgcatgtatgggtgactatatggctggaaaatactaattgctggcaagagcaacagtagaaaagggagtctggaaatgccactatctttttctaactacactgtgtaaaatgtgaaaaacagcattcttcaygcacaagtaagtttgaaccttgggacagaaataactcagtttctacacataatactaatgtgggaaaattaatcatagatatttgacagtgatactttcttccagctaacaggatgaaattgtttcagatgccaataacacatggtgagttcccatcatttatttgtcagccaatccagctaattagagactaattactcattgtcataccacagtaaaatcaggttctgataaaatgtcatttttgaagctgtaaagattcttcaattaagccttgttttattttctcaaattactgca

SEQ ID NO: 60069 - DNA, 547 bp, Chicken  19866894318977_1
ggtgagtataatgtttttgaacacttcatctcattggcctttttgtgcagatcatctttacagatcttttgctgcgccttattgattggccttgttcaaaatgtattggttaagtgaaacctatgagaaatattctatacatggctccatggtgaattttccaactcttagcatgtgattttagcactcgtggaaaaagctgcatgttttaaatatcatgctaattaaagaactgtgtatcgttatgatattaatgcaatcttctttcttttaggcattccctcttctgattcaaagaaygcaaatctttatttcttggatgttgtccaccaggccaatactattttccatttgtttgacaaacagttcaatgatcatctgatgccattgatcaggtacttttattttgattagcatttccattgtgaatggtaatttttggtgaacaaaggttttttttctttcttcatctctgttaagaagaagagtttattcttggagtcgttcagcttgacgttgcaggaagatgaaatactgttgtgggagg

SEQ ID NO: 60070 - DNA, 590 bp, Chicken  19866894318992_1
gcggggcagggtaccgtgactgcatagagctgctgtgggtcgtgctagaaaaaatacatatgtattaattacatccacatctgctcagtggatgcttatgtacttcattaatatatacatatatataaacagaatggtttgggtaggaaggggcctttaagaccacctcattccaaccccctgctataggcaggaacacctcacagccccatccagcctggcctgcagtgctcccagggaggggacatccacagcctcacggggcaacctgttccatgtctcaccattcccacaggaaakaattccttcctaattatctagtctaaattgaccctcttccagtttaaagccatttctccttatcctgtcactacctgcccttataaaaagggcttctgagctttcctggaggcccctttgggtcctggaaggctgctgtaaggtgttcttggagccttctctaggctgaagagccccaggtctctgtctgtccttagagggctgaagtacctcccctatgatcatcttcatggcacatttctggacctgctccaacagctccacatccctctcatattggggggcttcag

SEQ ID NO: 60071 - DNA, 600 bp, Chicken  19866894318996_1
attctagctgtgtataaatatgtatgtattccaaacatattattgtatgtattccaaacatactcctccttagaaagaattttgaacaaccaattaggggcagtttccttttttagaatctctttgaaagctcttccaagttacaagcacactgaggaagaggtaggaaatattttcattcctctgccaaaataaacttttctgcaaaatttcccttaatagtcgccttgaagtgaaagttatctcagtgcaatgtaacctctgttggagcaaagcttctgatggacaggtattgagatrctgtgcctacagcagggactgtggctttcatagagaaacagggctctggaaccaggtttgtgtatggagtagatactaatgcaaattcctcaaatgcgttttttatatttattcataacagtgagcatactggtctttgcaaagttcctctgaaagagggacttggattagtttggaaagcactgcctgcagagacaccaggtgttccatgggacttgcgtggcaggggtagtaacgcctctcctaggctttcaaggcatcagaaggtgcagatttgattcttgatcttaaatcctaatg

SEQ ID NO: 60072 - DNA, 600 bp, Chicken  19866894318998_1
ctagcacttggaccaagatttttgagctcatattttacaaatggctgtgctaatatttacagctacgagatctcttatgaccacacttatttctccatcaagtcacagtacaacataacgcccacctcactgacacaggtcacaaagacgatgggctggttaacatgcacttactttatgattggattctcaaactgcttggcacacctccactgccggatgcaggacaaacagtacgtgtgattgcagttggagaggatcccaaatctcctctctgaggctgatggcttttcgtacacyacttccatgcagatgctgcacactttgtcctgacttgcctgaaaggcaaaagccttctccatctcatgctcaaacgttgccatgcacatctgtcatgggagagatgccattggttattgaagactatatatgggaccattctttgtaaaatcaaagtgtctatgacatggatatattacaggaaaaagacaatacactgattaagagcatccctactatccttcatcatcgtcatataattttaagaactttaagggtgatcacataattccacccccccacgttctctgcagctttcta

SEQ ID NO: 60073 - DNA, 554 bp, Chicken  19866894319006_1
tccccccgtccttgcatttcagcctctccagagtctctgtgccctcggatatctcctacagctcctcgtccgacaggatcagcactctcttctcgatgtttttgctcttcctgcctcctgctccctctgccctgcaggccacgtgcccgttctcgcccggcgccttgtgctctgcctcctgcatggcctgctgggtgtactgctggtaggtgggcgagaagttgtggatggcatcctgcacgatgtcctgagggctcatcgtctccttcagcccgctcgagatgctctgcatcggggcawggtttgctgaaaaacagagcaggaggtgatggggaatcagatggccaacagcccgagtgcttcaagaccgcagtgatgaacttccctagaaattcaagatcacagcctcaccgtggaccacatctcactgcgggacaagggagcttacagtggtgagcaccaaggaggaggaaggcaaatccagctctacgttttgcagaggatggatcctctccagcagtgtgtgctgtaatgccaaaatctcctaattctgc

SEQ ID NO: 60074 - DNA, 599 bp, Chicken  19866894319008_1
  misc_feature (1)..(98): n is any nucleotide
nnnnnnnnnnnnnnnnnnnnnnnnnnnnnnnnnnnnnnnnnnnnnnnnnnnnnnnnnnnnnnnnnnnnnnnnnnnnnnnnnnnnnnnnnnnnnnnnnntttacatgtagtaattcattctgtatcgttgctcccaaaaatcttctcagagctgtatttaatttttgtggcaggcttctgtgagactgagcctatgagaaagtatttgaaaaatgaaaaccagctcagatttgttccaaaatgcactcccatgcctgccacccataggcctgccggatgggattctttgcatatttctgcygggcacygttctttaagcaaagcagatgtaccttgtacctagagcagatgcttcatatgggatatgagtgctgctaggtattcctaggagtctgagttcctcktcttctctgaaggaagaatactttgcctgtaaaacatgtttgggttttttttttttgcatatgggctttgttgatataattagttagtggctggggaatcctccttaacttggaaccgtgtgggagtacagagaatagtggtaagtcctattctgcctgctggcctgtagtaaacatgcaagacccaacatcttcg

SEQ ID NO: 60075 - DNA, 599 bp, Chicken  19866894319008_2
  misc_feature (1)..(91): n is any nucleotide
nnnnnnnnnnnnnnnnnnnnnnnnnnnnnnnnnnnnnnnnnnnnnnnnnnnnnnnnnnnnnnnnnnnnnnnnnnnnnnnnnnnnnnnnnnntttacatgtagtaattcattctgtatcgttgctcccaaaaatcttctcagagctgtatttaatttttgtggcaggcttctgtgagactgagcctatgagaaagtatttgaaaaatgaaaaccagctcagatttgttccaaaatgcactcccatgcctgccacccataggcctgccggatgggattctttgcatatttctgcygggcacygttctttaagcaaagcagatgtaccttgtacctagagcagatgcttcatatgggatatgagtgctgctaggtattcctaggagtctgagttcctcktcttctctgaaggaagaatactttgcctgtaaaacatgtttgggttttttttttttgcatatgggctttgttgatataattagttagtggctggggaatcctccttaacttggaaccgtgtgggagtacagagaatagtggtaagtcctattctgcctgctggcctgtagtaaacatgcaagacccaacatcttcgacttgaa

SEQ ID NO: 60076 - DNA, 600 bp, Chicken  19866894319008_3
atgtagtaattcattctgtatcgttgctcccaaaaatcttctcagagctgtatttaatttttgtggcaggcttctgtgagactgagcctatgagaaagtatttgaaaaatgaaaaccagctcagatttgttccaaaatgcactcccatgcctgccacccataggcctgccggatgggattctttgcatatttctgcygggcacygttctttaagcaaagcagatgtaccttgtacctagagcagatgcttcatatgggatatgagtgctgctaggtattcctaggagtctgagttcctcktcttctctgaaggaagaatactttgcctgtaaaacatgtttgggttttttttttttgcatatgggctttgttgatataattagttagtggctggggaatcctccttaacttggaaccgtgtgggagtacagagaatagtggtaagtcctattctgcctgctggcctgtagtaaacatgcaagacccaacatcttcgacttgaagcccttaaggcacgtatacctacaagcgattacacgtgcgagtgttagaggagctcttggttacgttacaggtaggtaacgcttttctctgacagtt

SEQ ID NO: 60077 - DNA, 517 bp, Chicken  19866894319014_1
cggcgcagcacagagccgatccggttgcgctctataaatacagcggggtgagcggtgggcgcacagcgcggctgcgtgggctgaaggtcagcagcagcaccgcacccacgtgggcacccatcagcgctgactcagtttactctggaaaggagaaggggacagggaagggaccgaggcaggcaggtcagggcccggtgcccgcagccgtgccaaagccgccgtgcctgccgccgcacacagtggagatgagccccagctggagcagctccctgcgcccccacgggtggggactgacccacrsagccccacagctctgctctgtgccgcgatggaggcgcgcacacccggagagccggagccgagcgctgcccgcggtgcagtgcaggcgtgggggacggctgctggttcagtgggctccagccgtttccattcacgtgctgatgaatcacttgacaaaaatgcagcccaattctaggcggatttgttctgaacagtgcggctttgtggagggggacgg

SEQ ID NO: 60078 - DNA, 516 bp, Chicken  19866894319014_2
ggcgcagcacagagccgatccggttgcgctctataaatacagcggggtgagcggtgggcgcacagcgcggctgcgtgggctgaaggtcagcagcagcaccgcacccacgtgggcacccatcagcgctgactcagtttactctggaaaggagaaggggacagggaagggaccgaggcaggcaggtcagggcccggtgcccgcagccgtgccaaagccgccgtgcctgccgccgcacacagtggagatgagccccagctggagcagctccctgcgcccccacgggtggggactgacccacrsagccccacagctctgctctgtgccgcgatggaggcgcgcacacccggagagccggagccgagcgctgcccgcggtgcagtgcaggcgtgggggacggctgctggttcagtgggctccagccgtttccattcacgtgctgatgaatcacttgacaaaaatgcagcccaattctaggcggatttgttctgaacagtgcggctttgtggagggggacgg

SEQ ID NO: 60079 - DNA, 599 bp, Chicken  19866894319024_1
  misc_feature (1)..(86): n is any nucleotide
nnnnnnnnnnnnnnnnnnnnnnnnnnnnnnnnnnnnnnnnnnnnnnnnnnnnnnnnnnnnnnnnnnnnnnnnnnnnnnnnnnnnnnagaaagtgatgatccttcctttccctcctagattaaatactcatgtcccacgtgtacatcagactcagcgctgctcgtagctggaaacaagatggtgaaacttgatttattttctatatgcactgaactctgcacctgcagttacagcaatgccagaaaggagaacttagaaagtccctaccatagatttacacaccctgacatataaaaggasatttcacctcagactatgggtgccgagtgactacttccaaacacaaagcactgtaacagagaaaagaaaaatacaacttaccttgccaccaattgctagcttaaggacttactaaaatacacacaacagaagcttgctctccactttttttttcctcctgcttatataatcaccattcagcaacaaagcgatcaatagcctctgattttacttgattacagattcagaaactccccagagatctgaataatgaagtaagttgttcccttacacatgcagcagaaactgccattgccttc

SEQ ID NO: 60080 - DNA, 600 bp, Chicken  19866894319031_1
caaaacataatggttgcaaactgatgttagggtggctaaagcagcctctctcatctgcagaagcactggtcaggtagccgagagcaggttccaagcggagctggatgtacagccagagtgggactccctgccctgataacaggtaactgagatactgaagtggtgcctgtctttgaactgttctctgatgtgggtaggagcaaattactttctctttgtgagcctaaaaagttttcaaggcactttttttcttcttttttttcctctctccgtgacagactgaagaactcattggtgctrtaatgaaaggcagactgcgttccctgtcatgtcaagaacgctgcatcgggaaagtcgacatgatttcatggctaatgattcactcgctaatatcaatgtgggctgcagtgaggataaccaagttgagctgtcttagatcaaatgattcaattaggccagctgtccctatttgtcatggctcaactcgctttcaaattacctttccaaagtgtgtacgtgccttagcatagaacttaacagctcaactgttttacaaaaaagggatatttaggcatgatgataaggggaaaggaagacatc

SEQ ID NO: 60081 - DNA, 599 bp, Chicken  19866894319038_1
  misc_feature (1)..(57): n is any nucleotide
nnnnnnnnnnnnnnnnnnnnnnnnnnnnnnnnnnnnnnnnnnnnnnnnnnnnnnnnncttatgagctccctgggagaggaacactcgagctgcacgccctgaaatcctgctctgaagccggcctcgtaaagcgtggggcttagagtgagtttcagtgaaactttgcttgttagggtgagatcaggaaaactgtgtcttttcaacaagagcaacaacaaaagatttcaggaaatatccagataatttggtttgttgtcttttctcctctcaaaagttaatttcagttgcatattctggatscttaaagaaaaatctctttaggtagmtggctattttatactttggaaaatccatttaccgatctgcagatcttaagatagaggaaaaatttgggtgtgggtctgtcagccttgaagttacatcactgaaayacatggctcgtgcccagccttgcacatgttgtgcccattaccagccagataatccagtgggtaattctgaccagtgcccacaggtaaggaagtctcagctgttctcacttagaaaatttgatttcgtacactgtctcataggatgcaaaggtgtagttttgtcatctt

SEQ ID NO: 60082 - DNA, 599 bp, Chicken  19866894319038_2
  misc_feature (1)..(31): n is any nucleotide
nnnnnnnnnnnnnnnnnnnnnnnnnnnnnnncttatgagctccctgggagaggaacactcgagctgcacgccctgaaatcctgctctgaagccggcctcgtaaagcgtggggcttagagtgagtttcagtgaaactttgcttgttagggtgagatcaggaaaactgtgtcttttcaacaagagcaacaacaaaagatttcaggaaatatccagataatttggtttgttgtcttttctcctctcaaaagttaatttcagttgcatattctggatscttaaagaaaaatctctttaggtagmtggctattttatactttggaaaatccatttaccgatctgcagatcttaagatagaggaaaaatttgggtgtgggtctgtcagccttgaagttacatcactgaaayacatggctcgtgcccagccttgcacatgttgtgcccattaccagccagataatccagtgggtaattctgaccagtgcccacaggtaaggaagtctcagctgttctcacttagaaaatttgatttcgtacactgtctcataggatgcaaaggtgtagttttgtcatcttttcaatactgagaatgaagttgtgat

SEQ ID NO: 60083 - DNA, 600 bp, Chicken  19866894319038_3
cgtggggcttagagtgagtttcagtgaaactttgcttgttagggtgagatcaggaaaactgtgtcttttcaacaagagcaacaacaaaagatttcaggaaatatccagataatttggtttgttgtcttttctcctctcaaaagttaatttcagttgcatattctggatscttaaagaaaaatctctttaggtagmtggctattttatactttggaaaatccatttaccgatctgcagatcttaagatagaggaaaaatttgggtgtgggtctgtcagccttgaagttacatcactgaaayacatggctcgtgcccagccttgcacatgttgtgcccattaccagccagataatccagtgggtaattctgaccagtgcccacaggtaaggaagtctcagctgttctcacttagaaaatttgatttcgtacactgtctcataggatgcaaaggtgtagttttgtcatcttttcaatactgagaatgaagttgtgattgcctaggagggaaggacrtgtttgttgcttgggtattgggttggcactgggctccagaagcaccggtgctgtgcagggctggggctgaagcagcctgggagcaat

SEQ ID NO: 60084 - DNA, 600 bp, Chicken  19866894319038_4
gaaaatccatttaccgatctgcagatcttaagatagaggaaaaatttgggtgtgggtctgtcagccttgaagttacatcactgaaayacatggctcgtgcccagccttgcacatgttgtgcccattaccagccagataatccagtgggtaattctgaccagtgcccacaggtaaggaagtctcagctgttctcacttagaaaatttgatttcgtacactgtctcataggatgcaaaggtgtagttttgtcatcttttcaatactgagaatgaagttgtgattgcctaggagggaaggacrtgtttgttgcttgggtattgggttggcactgggctccagaagcaccggtgctgtgcagggctggggctgaagcagcctgggagcaattgctgaggacagggctcagctgatgctccgagttctcagcaccgggttaggaaatgcaagtgtccttctagcagtttagctgcaggtcaaggggactgccttagcaggaaaggcccattttaatccacagtagtcaagcttgcttctgcttagctttagagactgctgtgccattcttaaactgtgcgtggaaaaaatatttttcagaatggc

SEQ ID NO: 60085 - DNA, 600 bp, Chicken  19866894319038_5
ttttgtttccaacgatctatgcttttcttcatgtctaaaagaaagaacgaagagtttatgcttttgttttcaactgtttgggttttttttcagctgaaatgtagcattcaaaggggtatatgtgactctaagaacacatagaagacacttcttcatctgtcctgaccatactggcttttaatcccttacgtaagtaatgtacaatgcaattctgctgctgatttctagcttgctgcatattgcactcaagagccagtcctagttgggttaattaatttgaattaactgcagggatccttyccattgatttcagtggatggaggatcgtgctggtagtataatacaaattgctgcttcttaattaacccctctactctcatctgatctcttcaggttactctccaggtgcatgaaagaatagggactgagggctcggtctcaggtagcaatgaatgtcataaagagtggtttattcagccagattttctcttgccctccagccaatttggtgcctgtgttgtttttattttttaatgcaagtggatgactgcaagagaaatggaaagagacttgctctgtagtagcatgtagtaacacgga

SEQ ID NO: 60086 - DNA, 600 bp, Chicken  19866894319039_1
gcagagggacctgctgcaatgccctgctccatctcctcgtggggctcctccggttccctcaggatgtatgcagtggggcagtgactggggcagccaggaaggacagcctctggtgtgctgggcaggtcctgtgtgttgggacttgcaggccgcgagctgagggtgactcgtggggaggctgcggggctaggagcggccgcggggctgtcctgctgctccctggacacattggcatcctggaggcccagctgcctatgggcctcctcagtgcactggcacagcacggtgtcgatgagtccstggatgagtgcctctgctctgtcctccaggataggccacacctcttggaccagggcctcgctgtccagcccgaagctgcacagagcattcaggatgatgctctctgtagacagtgtcggccaccactgtgccccaaagatgactgtcagctgttgcagtagccagggcagcacagggtccaggatctgccggtgctgcctgaatagagcagcccagacctcaggcaggagacctcccaccataggcacatcctctgcctcctcttcgtctgcctcctcagcctgctgctcctctgcctcc

SEQ ID NO: 60087 - DNA, 599 bp, Chicken  19866894319059_1
  misc_feature (1)..(201): n is any nucleotide
nnnnnnnnnnnnnnnnnnnnnnnnnnnnnnnnnnnnnnnnnnnnnnnnnnnnnnnnnnnnnnnnnnnnnnnnnnnnnnnnnnnnnnnnnnnnnnnnnnnnnnnnnnnnnnnnnnnnnnnnnnnnnnnnnnnnnnnnnnnnnnnnnnnnnnnnnnnnnnnnnnnnnnnnnnnnnnnnnnnnnnnnnnnnnnnnnnnnnnnnntgtgattaacgtttctggcactccgtgcgcagggtttcttttggggtggatttctttctggtttctgcatgcagttaatgcaagtcagaattaaatgcrcttaattgcattccaaacttcagagygtgaagcaggttggggaactgcaatgtcctcccttcygctgctactgcgcagcccacctgcacgatgctgtgagcttagcagcagcaggtgtggtcacacagtgctcccacctgrcgaagaatacaaggcatggcaatggtcatcctgctgggtcccacgagggtcacggagctcaggcactaaattgacatgggggcaactctgcggtgccctcagctggaattttgctgaaggagagacacggatctgttggagcacatccagagggggag

SEQ ID NO: 60088 - DNA, 599 bp, Chicken  19866894319059_2
  misc_feature (1)..(175): n is any nucleotide
nnnnnnnnnnnnnnnnnnnnnnnnnnnnnnnnnnnnnnnnnnnnnnnnnnnnnnnnnnnnnnnnnnnnnnnnnnnnnnnnnnnnnnnnnnnnnnnnnnnnnnnnnnnnnnnnnnnnnnnnnnnnnnnnnnnnnnnnnnnnnnnnnnnnnnnnnnnnnnnnnnnnnnnnnnnnnnntgtgattaacgtttctggcactccgtgcgcagggtttcttttggggtggatttctttctggtttctgcatgcagttaatgcaagtcagaattaaatgcrcttaattgcattccaaacttcagagygtgaagcaggttggggaactgcaatgtcctcccttcygctgctactgcgcagcccacctgcacgatgctgtgagcttagcagcagcaggtgtggtcacacagtgctcccacctgrcgaagaatacaaggcatggcaatggtcatcctgctgggtcccacgagggtcacggagctcaggcactaaattgacatgggggcaactctgcggtgccctcagctggaattttgctgaaggagagacacggatctgttggagcacatccagagggggaggacagaaatgctccaagggatggaat

SEQ ID NO: 60089 - DNA, 599 bp, Chicken  19866894319059_3
  misc_feature (1)..(138): n is any nucleotide
nnnnnnnnnnnnnnnnnnnnnnnnnnnnnnnnnnnnnnnnnnnnnnnnnnnnnnnnnnnnnnnnnnnnnnnnnnnnnnnnnnnnnnnnnnnnnnnnnnnnnnnnnnnnnnnnnnnnnnnnnnnnnnnnnnnnnnnnnntgtgattaacgtttctggcactccgtgcgcagggtttcttttggggtggatttctttctggtttctgcatgcagttaatgcaagtcagaattaaatgcrcttaattgcattccaaacttcagagygtgaagcaggttggggaactgcaatgtcctcccttcygctgctactgcgcagcccacctgcacgatgctgtgagcttagcagcagcaggtgtggtcacacagtgctcccacctgrcgaagaatacaaggcatggcaatggtcatcctgctgggtcccacgagggtcacggagctcaggcactaaattgacatgggggcaactctgcggtgccctcagctggaattttgctgaaggagagacacggatctgttggagcacatccagagggggaggacagaaatgctccaagggatggaatgcctccctttgaggacaggctgagagagctggggctg

SEQ ID NO: 60090 - DNA, 599 bp, Chicken  19866894319059_4
  misc_feature (1)..(60): n is any nucleotide
nnnnnnnnnnnnnnnnnnnnnnnnnnnnnnnnnnnnnnnnnnnnnnnnnnnnnnnnnnnntgtgattaacgtttctggcactccgtgcgcagggtttcttttggggtggatttctttctggtttctgcatgcagttaatgcaagtcagaattaaatgcrcttaattgcattccaaacttcagagygtgaagcaggttggggaactgcaatgtcctcccttcygctgctactgcgcagcccacctgcacgatgctgtgagcttagcagcagcaggtgtggtcacacagtgctcccacctgrcgaagaatacaaggcatggcaatggtcatcctgctgggtcccacgagggtcacggagctcaggcactaaattgacatgggggcaactctgcggtgccctcagctggaattttgctgaaggagagacacggatctgttggagcacatccagagggggaggacagaaatgctccaagggatggaatgcctccctttgaggacaggctgagagagctggggctgtgcagcctggagaagggaaggctctggggagacctgagagcagcccttcagtaactaatggggggctgtaagaaagaa

SEQ ID NO: 60091 - DNA, 600 bp, Chicken  19866894319065_1
gaagactgtaattcatgctgaatattctttctgttgtcagcttttctaccagtttgacgttttatgcctttttctgttattgctctgagttttttgcaaattgtcggtggcatttgaagtggcagctaatgtattccaaattgttagttcatttgttctaggttctgcactaacaaaggtctcaattagttcagggctacttgtcttggctgctttcaaacccacacagtcttgcaagtttgaaacatgatctttgaatacatatttcatttacaggatcctgtaatgtaagagcataargagttggaaaaggaaaaaatatacatttaatgagtatatacttattctatagaaaagccatcagcacattttgcattttatggggtttcttccagtgctcacagaaaagaggcttctttttttttagctggggaaagtttcagatgcccttcaaaagccttattttaaattatagggtaaaaaggtccattcacttgaactagtttgatgaatcacaggaacaaaaaatatacgtcagttcacaaaaaaatcagatatcacattcctggtctctgtgcagaaaaaaaatttcacagaaaa

SEQ ID NO: 60092 - DNA, 600 bp, Chicken  19866894319066_1
caatgatcatccactttcaacccctctgctatgtgcagggtcaccaaccactagaccaggctgcccagagccacatccagcctggtcttgaatgcatccagggatggggcatccacagcctccttgggcaacctgttccagtgtgtcaccaccctctgtgcgaaaaacttcctcctgatatctaacctaaacctcccctgcctctgtttaaaaccattcccccttgtcctatcactatgcaccctcataaacaactgttccccctcctgtttatacactcccttcaagtactgggagacygcaacgaggtctctctggagccttctcttctccaagctaaacagtcccagttccctcaacctttcctcataggagaggtgctcctgccctctgatcatcttagtggccctcctctggacctgctccaagagctccatgtccttcctgtactgagagccccaggcctggacgcagtactccagatggggcctcccaagagccgagtagaggggacaatcacttccttatccctgctggacacccctttttttaatgcagcccagaacacagttggccttccgggctgcaagcacacactga

SEQ ID NO: 60093 - DNA, 599 bp, Chicken  19866894319067_1
  misc_feature (1)..(74): n is any nucleotide
nnnnnnnnnnnnnnnnnnnnnnnnnnnnnnnnnnnnnnnnnnnnnnnnnnnnnnnnnnnnnnnnnnnnnnnnnngggagggggaagctttgttagaaacttaaaatagaatagaaaaagagttataatttttattatagttttccggggtaaaaatgcaacttttttagagtcttatgtgtatatagtagaggtggtcaattatgtcaatttgaggaaagaaggcagccagaaatggatgtacaatgcatatcaaatccttgctgcgctgttggtgcctgaatgaagatactggattttwtaccaatgggattttcaatgaagattataaactgttagggaggaatgagatccacttatcgaaaagaggcaaaggagtctttggcagcaggctggctaactwagtgaggcaggctttaaactgaaggacttggaggtaggggtccaaatcgacagtgttcaaatccttgccacaaactgagccaggacaactggaacagtgacagaagttcctcagctacctcctatgacaaaaaaacagaagcccagacagttcaagggcatgtaaagctatggggaataagcaggaagaattagaga

SEQ ID NO: 60094 - DNA, 600 bp, Chicken  19866894319067_2
aaatagaatagaaaaagagttataatttttattatagttttccggggtaaaaatgcaacttttttagagtcttatgtgtatatagtagaggtggtcaattatgtcaatttgaggaaagaaggcagccagaaatggatgtacaatgcatatcaaatccttgctgcgctgttggtgcctgaatgaagatactggattttwtaccaatgggattttcaatgaagattataaactgttagggaggaatgagatccacttatcgaaaagaggcaaaggagtctttggcagcaggctggctaactwagtgaggcaggctttaaactgaaggacttggaggtaggggtccaaatcgacagtgttcaaatccttgccacaaactgagccaggacaactggaacagtgacagaagttcctcagctacctcctatgacaaaaaaacagaagcccagacagttcaagggcatgtaaagctatggggaataagcaggaagaattagagatctgtgcgtggtcttggggtcatattattgcaatcacagagatacaatggtagagcgttgcgtgtctggaatgctgtcacagatggagatgtacattttaagg

SEQ ID NO: 60095 - DNA, 599 bp, Chicken  19866894319085_1
  misc_feature (1)..(110): n is any nucleotide
nnnnnnnnnnnnnnnnnnnnnnnnnnnnnnnnnnnnnnnnnnnnnnnnnnnnnnnnnnnnnnnnnnnnnnnnnnnnnnnnnnnnnnnnnnnnnnnnnnnnnnnnnnnnnntttcaaacttagaacggttccgccttgtcctgctgttatctaccctttcaaagagtttactcccttctggtatgtaggctcccttcgggtcctgaaaggctgcaatgaggtcaccccgcagctttctcttctccaggctgaataagcccagctccctcagcctgtcttcgtaggggaggtgctcctgccmccgatcatctctgtggctttcctctggaccctctccaacagctctctgtctttcttgtactgggggctccatacctggacacagtactgcagatggggcctcacaagagcagagtagagacggacaatcacctccttgtccctcctgaccaccctgctcatgatggagcccaggataccattggctttccgagctgcaagagcacactgctggctcatgttaagttggtcatccatcaggacccccaggtccttctctgcagagctgctctcaaggactgctccttccagtctgtatag

SEQ ID NO: 60096 - DNA, 600 bp, Chicken  19866894319094_1
aatatctcttttctgctatctgatattcacatcaagtacttgctgcaaatagtatcctttatctcaaataagatgctattcctgtgggaatagcactgacaaaacagattttttggaactagcacagatagaatttacgtcattcttgctgaattctatggagactgtgagagcttgaggtcagaacagtgccctacagacaggacatatcacgtcagatggcaactagaaaggtttagtcgttttctccatttgaggggaggctagaatgggaagggggctggtctccttgcactgttratttcaagacagaggcttaagcttgtacagctccagcagtggttccaatctcaagacatgataatagtattacaaatgtattacagttgcactgacggccacagctatggttgcacaatgttttgagcatgctataaattttatacatattttccaactcatacataaacattattttcagaagccaatagtaactgtagatgaacagtttaatttttttaaccgagaaaaaggaaagaaacctaaaccactttggctgttaatatgcagtgtctaagaagcaacacaaataaaggggat

SEQ ID NO: 60097 - DNA, 600 bp, Chicken  19866894319096_1
gtcattgcaccattttttgttcaatttcttcaaaatgttggagtagctgagctgcacagcattgactaaacattgcagtgcccaaacttctcctcaagctcctcaagcatgtgtgtaggcttgtatctactgtgcatacatagtttgatttttgtgtttgatgttgagctagagggttttgttttgttctggtaggactgttccaaactgttcttcctagaaaaatagaaacagcactgatagcctgtgtaggattaaagataaagatctctggagtgatgtaccattgtcccttactgstgcaagcagggcacactggtggacagggacactttccccttttctttgcacgtatattcatctgacttccaacagtcaactagaaaaagtgagaaatgcagtggagaagcgtggtagatttcattaacatcctttcycctcacagctttgccttaacgtcttaatgttggccctgagtatctctgtgctgtaaaggttgtctaattctgggaatatatcatggcctgtggtgattactattgatgtagtcatcagcaaaaaaactactaatacttttatagtcatagtcttgtgatgtgt

SEQ ID NO: 60098 - DNA, 513 bp, Chicken  19866894319096_2
acatagtttgatttttgtgtttgatgttgagctagagggttttgttttgttctggtaggactgttccaaactgttcttcctagaaaaatagaaacagcactgatagcctgtgtaggattaaagataaagatctctggagtgatgtaccattgtcccttactgstgcaagcagggcacactggtggacagggacactttccccttttctttgcacgtatattcatctgacttccaacagtcaactagaaaaagtgagaaatgcagtggagaagcgtggtagatttcattaacatcctttcycctcacagctttgccttaacgtcttaatgttggccctgagtatctctgtgctgtaaaggttgtctaattctgggaatatatcatggcctgtggtgattactattgatgtagtcatcagcaaaaaaactactaatacttttatagtcatagtcttgtgatgtgtaaatagaagccatgagagatgatatgcagctgcaagtacaaaagccccat

SEQ ID NO: 60099 - DNA, 600 bp, Chicken  19866894319102_1
aaaaaaataaactcacccccataaaatctcagggaagaaagaaagatacaaaatgtgctttctcaatgcaggtacattgtaacagagctcacctgctccatcaggttaagccaacacacgcggctcttcctcctctgtaagcaagctcacaaccccatatgcatgagcacgctcaaatcgctttacagcaatacttgttaattttacccattgtgagagtacctggaaggggtcgatactctccaggtagagaggaaaacacagccccacgcctgcagatggtttttgacctcgtggtarcatgttaaaccaagcattagccccaatttaaggcagttgtcaaacagaaatgcaggctctgtgcttgactggtactgacttttgcttccatagctcttaaacagcgcaggcatgtctcttcctgttcctagtgtttcatagcattccctatttrtgcgatggtctgcaagttttacctcatcaggaactcagcaggagctccatggagctgagaaacactgttatgctcctttatgcaatgcatgtctctgtgggcctttgaacatttaacacagagcaaataaattattagtgcatgtg

SEQ ID NO: 60100 - DNA, 600 bp, Chicken  19866894319102_2
ccatatgcatgagcacgctcaaatcgctttacagcaatacttgttaattttacccattgtgagagtacctggaaggggtcgatactctccaggtagagaggaaaacacagccccacgcctgcagatggtttttgacctcgtggtarcatgttaaaccaagcattagccccaatttaaggcagttgtcaaacagaaatgcaggctctgtgcttgactggtactgacttttgcttccatagctcttaaacagcgcaggcatgtctcttcctgttcctagtgtttcatagcattccctatttrtgcgatggtctgcaagttttacctcatcaggaactcagcaggagctccatggagctgagaaacactgttatgctcctttatgcaatgcatgtctctgtgggcctttgaacatttaacacagagcaaataaattattagtgcatgtgtgcatgtgcatacagatctaagatacataaaggcaagagcaaccaaaggaaacaggaatgtgcacagaacagttagttattaaagtatctactatcacaaaaatccagttgtaagaatcatttaaatgcagatctgcaaggaaaatgctgaaaa

SEQ ID NO: 60101 - DNA, 599 bp, Chicken  19866894319104_1
  misc_feature (1)..(103): n is any nucleotide
nnnnnnnnnnnnnnnnnnnnnnnnnnnnnnnnnnnnnnnnnnnnnnnnnnnnnnnnnnnnnnnnnnnnnnnnnnnnnnnnnnnnnnnnnnnnnnnnnnnnnnntatagagaactttgggattatttcataactagtaagatcaaaaagtcttttgaaaatacttacttagttattttttgctagtcagtggtaagacagtgatagtatctatctggtaagttatcagtaattcctcaaagacaactttggccaggcaactgtctggcaaagtttgattattcaacttgaaatacaggagytctccaaagcctaaaattgttaagattaaaaagtaaaaataataattcatgagctgagtctttgaatctacaagatctactgaagtaccacaagaccaaattctgtcaactttcacatcccttttgtcttcttctgctgtatttattgccattactgtgctcaagaaagatatttttcctaaaatccagccctgtttctaaaccagtagtaagtatcagtaaaaatactctgctggcgtaacracagctgggatgtcccaarcaggcagagcattttgcattgcttcatgcagtgagct

SEQ ID NO: 60102 - DNA, 600 bp, Chicken  19866894319104_2
actttggccaggcaactgtctggcaaagtttgattattcaacttgaaatacaggagytctccaaagcctaaaattgttaagattaaaaagtaaaaataataattcatgagctgagtctttgaatctacaagatctactgaagtaccacaagaccaaattctgtcaactttcacatcccttttgtcttcttctgctgtatttattgccattactgtgctcaagaaagatatttttcctaaaatccagccctgtttctaaaccagtagtaagtatcagtaaaaatactctgctggcgtaacracagctgggatgtcccaarcaggcagagcattttgcattgcttcatgcagtgagctgctattttcagagagttttccgtaaaaatggaggctaaamgtacacattaagtccttttggagtattgcataaattttttggaattactaacaggtgccttacaaagaatgcatgattaatatagttctttgctgtgtgtcacagatctctgcagctcatgcagaaatgcttgcagccaaagtacataattaatggcatcataaatacttatttggtaatatcaaaaaagtgatttattgcagc

SEQ ID NO: 60103 - DNA, 600 bp, Chicken  19866894319104_3
ctggcaaagtttgattattcaacttgaaatacaggagytctccaaagcctaaaattgttaagattaaaaagtaaaaataataattcatgagctgagtctttgaatctacaagatctactgaagtaccacaagaccaaattctgtcaactttcacatcccttttgtcttcttctgctgtatttattgccattactgtgctcaagaaagatatttttcctaaaatccagccctgtttctaaaccagtagtaagtatcagtaaaaatactctgctggcgtaacracagctgggatgtcccaarcaggcagagcattttgcattgcttcatgcagtgagctgctattttcagagagttttccgtaaaaatggaggctaaamgtacacattaagtccttttggagtattgcataaattttttggaattactaacaggtgccttacaaagaatgcatgattaatatagttctttgctgtgtgtcacagatctctgcagctcatgcagaaatgcttgcagccaaagtacataattaatggcatcataaatacttatttggtaatatcaaaaaagtgatttattgcagcagataaatgcattcatccg

SEQ ID NO: 60104 - DNA, 546 bp, Chicken  19866894319104_4
taataattcatgagctgagtctttgaatctacaagatctactgaagtaccacaagaccaaattctgtcaactttcacatcccttttgtcttcttctgctgtatttattgccattactgtgctcaagaaagatatttttcctaaaatccagccctgtttctaaaccagtagtaagtatcagtaaaaatactctgctggcgtaacracagctgggatgtcccaarcaggcagagcattttgcattgcttcatgcagtgagctgctattttcagagagttttccgtaaaaatggaggctaaamgtacacattaagtccttttggagtattgcataaattttttggaattactaacaggtgccttacaaagaatgcatgattaatatagttctttgctgtgtgtcacagatctctgcagctcatgcagaaatgcttgcagccaaagtacataattaatggcatcataaatacttatttggtaatatcaaaaaagtgatttattgcagcagataaatgcattcatccggaaaacaatgaattcttgtgttg

SEQ ID NO: 60105 - DNA, 600 bp, Chicken  19866894319110_1
tcacaattggtagtacttttatggcctctcagtcacaacacaggcagcatttagatgatagcagcatcgcaaatgcagtacaatgggttttctcattttagcttcacaggctattaatctacagccctattaaggtgccctaacagatgcagtcctggttgaggttgtgccacacgtgaaaagtcattgtctgttttgcatctgtgacacagtttttgtaaatgtttgttcttacagcttcatcttcagcatatggaaaaaagtacagcgattttatttaagcctatactaagttttgargttggagacagagggaaatcaaaccagtaaaaagctccacaaagtaaactttatttttgggaatgtactgccagcctacagcaaactggcatgtgcctgtcttttccatatatgtttgtttgaacctgcatgtracataacatttacaaagccttttgaaaggtctcgcttctcagagaaaaaggctttggrtaacagtgcttctcagtttacattgatgaggctaattgtctgtctggaaaaaagtcccagagagacttgctgaagagcagaatgtttggagagattgaaggctgtgca

SEQ ID NO: 60106 - DNA, 600 bp, Chicken  19866894319110_2
gtgccctaacagatgcagtcctggttgaggttgtgccacacgtgaaaagtcattgtctgttttgcatctgtgacacagtttttgtaaatgtttgttcttacagcttcatcttcagcatatggaaaaaagtacagcgattttatttaagcctatactaagttttgargttggagacagagggaaatcaaaccagtaaaaagctccacaaagtaaactttatttttgggaatgtactgccagcctacagcaaactggcatgtgcctgtcttttccatatatgtttgtttgaacctgcatgtracataacatttacaaagccttttgaaaggtctcgcttctcagagaaaaaggctttggrtaacagtgcttctcagtttacattgatgaggctaattgtctgtctggaaaaaagtcccagagagacttgctgaagagcagaatgtttggagagattgaaggctgtgcagtggaaaaactatttaggatgaacaaagggaatctgttagatataatgtaacttatatttgctaccaaaatgatttagaaaacaaaacccagtatattttctaaagtttcagatctacttagtctaaattgaga

SEQ ID NO: 60107 - DNA, 600 bp, Chicken  19866894319110_3
gttttgcatctgtgacacagtttttgtaaatgtttgttcttacagcttcatcttcagcatatggaaaaaagtacagcgattttatttaagcctatactaagttttgargttggagacagagggaaatcaaaccagtaaaaagctccacaaagtaaactttatttttgggaatgtactgccagcctacagcaaactggcatgtgcctgtcttttccatatatgtttgtttgaacctgcatgtracataacatttacaaagccttttgaaaggtctcgcttctcagagaaaaaggctttggrtaacagtgcttctcagtttacattgatgaggctaattgtctgtctggaaaaaagtcccagagagacttgctgaagagcagaatgtttggagagattgaaggctgtgcagtggaaaaactatttaggatgaacaaagggaatctgttagatataatgtaacttatatttgctaccaaaatgatttagaaaacaaaacccagtatattttctaaagtttcagatctacttagtctaaattgagaggatgaggcacttcagaaggcatctggtggtagaagtgatttacattatttgaacagt

SEQ ID NO: 60108 - DNA, 600 bp, Chicken  19866894319114_1
ccccatccctgccacttacccggtggccgctgccatcacacagcctccttgttccggggtggcctccacgcagcagccttggctgtcgtggctcatgccgaagttgtggccaatctcatgggccatggtggctgctgctccaatgggaagctccgagtggtcctgccaaggagtagggggctgcgtcagctctggggagcagagaggggtggcccccgcatcggtgtggggtggcagctgtgtcccaagtgaagagggtctatgggagaggggagattttgtcccctaaaagcccaccaygggacctctgggaagatcttttactggagcaaaccgctgtaaacaagggacattgaagggcatgtcccaaaaaacaggaatctgtgtgcctcaccctgcccagggaccacaggatctccagggccaccatcaccccatcaggagagggagaaagatcatctggggtggagatggccctgccaaaccagagggcacgagcagatggtgcttaagatgaaggacagaagcaatgcaggataccccaacacttctgctgggagtgtaggcagggcagaaaagctttaaaccttcccttttcca

SEQ ID NO: 60109 - DNA, 599 bp, Chicken  19866894319131_1
  misc_feature (1)..(43): n is any nucleotide
nnnnnnnnnnnnnnnnnnnnnnnnnnnnnnnnnnnnnnnnnnnaatggctgagatggtttgcagattaaaaattgtcccttcactcagtgcagcattttgatggagaaaatatttatgtgtgttataaataagccttggcctcccaatgagctgcaggaaaactgaagagttcgtgctaagaactgggtaacaacaaaggaaagctgctgcttcagagccaggaacaggatccagcaccaccagtgctgaattaagaaagccttacagaatatgcttgtgttatgatgtttggagtaatragacaatgcaaggaacagtgtgattacaaacatgtggcccttaatattgttacatccctcctccaaagtgcttcgttgacatttgacaattgtccccacgtactgctctcagtactagtgccatgctgaagtgtactatgaggaggaaaaaggatacgggatttgtttatgaagcattgtttatgaggacgaactcagcagcagggagtggatggacatgtgcttgaggtgacacagcctcaaagtaaactgaagatgaggacagtgagagcagcacgcagcggcagagcatcctgcca

SEQ ID NO: 60110 - DNA, 600 bp, Chicken  19866894319132_1
atttatcttacagtagagtcagcctacagtactccccaagctgactcttccttcactttccacctctcatctttgctaccaaacctgttcctgtgaacctctctccaaactttgatttcagaggtttgtgtagtagttatgcctgttgctctactaattctagtccctttgaatggacagcatacctttccctttccttcactgaaactagctttatcaaaatgaccaaggagacactgacagaatccaaatctcatcttcacagaatctttaatgtagcagctcctctttccacaactscatstcattgaataagctgataaaagacaaaattccttctcctgcagccttgagggaagctctgtgyctgttgtctctgtcatctaaatgacatcacatattctcaacatttccgaaagtcctatgtgtctttaggtgatctaaatctcttcttaccactggctgtactcccagtttccagtcccagcagtacaactgaaggtgggccttatcaattccagccaacaagctaaaaatacattttttcaactttgttagatgcttttctcttctttcaaactttcttctgcctatttcttc

SEQ ID NO: 60111 - DNA, 600 bp, Chicken  19866894319132_2
atcttacagtagagtcagcctacagtactccccaagctgactcttccttcactttccacctctcatctttgctaccaaacctgttcctgtgaacctctctccaaactttgatttcagaggtttgtgtagtagttatgcctgttgctctactaattctagtccctttgaatggacagcatacctttccctttccttcactgaaactagctttatcaaaatgaccaaggagacactgacagaatccaaatctcatcttcacagaatctttaatgtagcagctcctctttccacaactscatstcattgaataagctgataaaagacaaaattccttctcctgcagccttgagggaagctctgtgyctgttgtctctgtcatctaaatgacatcacatattctcaacatttccgaaagtcctatgtgtctttaggtgatctaaatctcttcttaccactggctgtactcccagtttccagtcccagcagtacaactgaaggtgggccttatcaattccagccaacaagctaaaaatacattttttcaactttgttagatgcttttctcttctttcaaactttcttctgcctatttcttcctta

SEQ ID NO: 60112 - DNA, 600 bp, Chicken  19866894319132_3
catctttgctaccaaacctgttcctgtgaacctctctccaaactttgatttcagaggtttgtgtagtagttatgcctgttgctctactaattctagtccctttgaatggacagcatacctttccctttccttcactgaaactagctttatcaaaatgaccaaggagacactgacagaatccaaatctcatcttcacagaatctttaatgtagcagctcctctttccacaactscatstcattgaataagctgataaaagacaaaattccttctcctgcagccttgagggaagctctgtgyctgttgtctctgtcatctaaatgacatcacatattctcaacatttccgaaagtcctatgtgtctttaggtgatctaaatctcttcttaccactggctgtactcccagtttccagtcccagcagtacaactgaaggtgggccttatcaattccagccaacaagctaaaaatacattttttcaactttgttagatgcttttctcttctttcaaactttcttctgcctatttcttccttagctaacctgctgccaaatctcacatttccctttcagattgttctctaaaacatccttcctctc

SEQ ID NO: 60113 - DNA, 600 bp, Chicken  19866894319135_1
gataatggtgtgtcttccctcatgcggtcagcagtgcatgcagctctgagctgtagtgccacgttcaagaaaataaatattgcaaaggcttttactccattccagataacatctgtgaaaagttactgtgcaaaatcattttctctttaatgagcatctctggtatcctggactccagctgactcctgttcagagaaagtaagagacttcaagtcccttactgatcttccttccgtgtttcactcagggctcgctgtgtgtgctgcagtagtaattaccttatggagatgatctctggargatatctatacaaagggccacagccagccaaccactggtttacagctcagaggtagttggttctggtttatgatgatgagctacaagagggagaagtgcttcactggcagagtcaacacggagcagtccagcatttgaaggatttagcatcaaggaaggaaagytgtttgaaacaaatagcagctagaattaggatttggaactcaatagtcrtgagaaacagttgggaccaactgaaccgagacacccagtacaaggaaatggacataaactcttatatcagaacagacaagtgacagt

SEQ ID NO: 60114 - DNA, 600 bp, Chicken  19866894319135_2
atcctggactccagctgactcctgttcagagaaagtaagagacttcaagtcccttactgatcttccttccgtgtttcactcagggctcgctgtgtgtgctgcagtagtaattaccttatggagatgatctctggargatatctatacaaagggccacagccagccaaccactggtttacagctcagaggtagttggttctggtttatgatgatgagctacaagagggagaagtgcttcactggcagagtcaacacggagcagtccagcatttgaaggatttagcatcaaggaaggaaagytgtttgaaacaaatagcagctagaattaggatttggaactcaatagtcrtgagaaacagttgggaccaactgaaccgagacacccagtacaaggaaatggacataaactcttatatcagaacagacaagtgacagtgcttaaaaacactggtcagccaccagatattccaggtttgatttgtagaacagtagcattgcagtctggctaatggtgtgaactaatggcacggctgcctccctcacgcagcgaagcagcacgcaggacacctcacacagggatcttcaccctctgcagtactg

SEQ ID NO: 60115 - DNA, 600 bp, Chicken  19866894319135_3
tcccttactgatcttccttccgtgtttcactcagggctcgctgtgtgtgctgcagtagtaattaccttatggagatgatctctggargatatctatacaaagggccacagccagccaaccactggtttacagctcagaggtagttggttctggtttatgatgatgagctacaagagggagaagtgcttcactggcagagtcaacacggagcagtccagcatttgaaggatttagcatcaaggaaggaaagytgtttgaaacaaatagcagctagaattaggatttggaactcaatagtcrtgagaaacagttgggaccaactgaaccgagacacccagtacaaggaaatggacataaactcttatatcagaacagacaagtgacagtgcttaaaaacactggtcagccaccagatattccaggtttgatttgtagaacagtagcattgcagtctggctaatggtgtgaactaatggcacggctgcctccctcacgcagcgaagcagcacgcaggacacctcacacagggatcttcaccctctgcagtactggcacaaccacagcttgtctccctacaggtgaactcttctgttgtgacac

SEQ ID NO: 60116 - DNA, 600 bp, Chicken  19866894319136_1
tgtaatgctggaaatctgagctcatgggtaggctgcgaggaaagggagaaaagagaaggacgtgaggctctgtctgcagggtcagcagcatgggaggcccttgggaaagttctccttcccctcccctctggcagtttccaaggtcaatccctcactttgcagaaattctcctgcagagtatgcacaccaagtaccctccagcatcagcataaaccccatccctgttcctctagggtgatgggttggaggcacattcagctcaccccaaatgtccctttatcgatcaagttcattctgaakctaggtggaagagcagcccaatgactttgccttgctgtcaaatcttgagcaaggagccattcacccttgaataaccataatcatctccggccaggcacaaagttccccacccrcagcttcaaggaggaaatcacaaaccctatctggttttcctttcatcagttactgcccacgggaggtgggcaatgccagcttcacaacacacagggaaaccacctgcagcctgttttgcagattaaatgccctgaggaacaacaaaattccccaaaagcagggagttttcagctgtgtggggactga

SEQ ID NO: 60117 - DNA, 600 bp, Chicken  19866894319136_2
ccttcccctcccctctggcagtttccaaggtcaatccctcactttgcagaaattctcctgcagagtatgcacaccaagtaccctccagcatcagcataaaccccatccctgttcctctagggtgatgggttggaggcacattcagctcaccccaaatgtccctttatcgatcaagttcattctgaakctaggtggaagagcagcccaatgactttgccttgctgtcaaatcttgagcaaggagccattcacccttgaataaccataatcatctccggccaggcacaaagttccccacccrcagcttcaaggaggaaatcacaaaccctatctggttttcctttcatcagttactgcccacgggaggtgggcaatgccagcttcacaacacacagggaaaccacctgcagcctgttttgcagattaaatgccctgaggaacaacaaaattccccaaaagcagggagttttcagctgtgtggggactgaacagctccaggttttggggaggaagtgagaatggggcaaaagcacaggatctgtgtaaggatatcctggggaatgagagctgaaaagcaccagatatgagctgcaggttgctg

SEQ ID NO: 60118 - DNA, 485 bp, Chicken  19866894319136_3
tttcctttcatcagttactgcccacgggaggtgggcaatgccagcttcacaacacacagggaaaccacctgcagcctgttttgcagattaaatgccctgaggaacaacaaaattccccaaaagcagggagttttcagctgtgtggggactgaacagctccaggttttggggaggaagtgagaatggggcaaaagcacaggatctgtgtaaggatatcctggggaatgagagctgaaaagcaccagatatgagctgcaggttgctggagtcatcatagaatcacagaatggcctgggttgraaaggaccataatgatcatctggtttcaatacccctgccatgggcagggttgctaaccaccagaccaggctgcccagagccacatccagcctggatggatggcgtggattcatcatagaatcatacgagttggaagggacctctaaaggtcatgtagtccaactcacctgcagtgaacagggact

SEQ ID NO: 60119 - DNA, 599 bp, Chicken  19866894319139_1
  misc_feature (1)..(75): n is any nucleotide
nnnnnnnnnnnnnnnnnnnnnnnnnnnnnnnnnnnnnnnnnnnnnnnnnnnnnnnnnnnnnnnnnnnnnnnnnnncagagatggggcatgaaccaggaacctattttcctgtattggcttatttttttcctgaagcagatagactgagaaagcctgtgtttcattgtataaggatgttagctgtatctgtaacagccaaagacccatgttctgaaatgacatcagagacttgggggcttggctgataagaaatgggatttcttctcatccttggataaaatttctgttaatgcagtctcygtctccttactgctgtgctgtgaactgtgtatcctttatggcttttcccacctgtgatttggctgaacatcagtgatattttagccttgttttggaaagcactgtggaatcaaattcatgcacatttgtataacgctctatatttaatccagtgagtctggatgcatgataaaatgagaatgccctgtccctttctttatctctgttgcataactcatgctgtaaaccaggtacgttatcctgtgagacactatatggcaagtttgttggaaatgctgtgtagctgtgttggtaaaaca

SEQ ID NO: 60120 - DNA, 600 bp, Chicken  19866894319141_1
gctcatttggaggctgctttttattgcaggactttccaggaagagctttttggcttccatccttttaagtagggaaggcttttctggtttgtttttgtaccgctgtcattgggcaaaggttttcctgcagatgtcagccacggagctacataattcatggatggggagtgctcacaggctgcatccactgaaagtaatgcagttgttgcccaggaatcagtccctggctgcctttgggtagctgtcctgtcctcctttaaggatgttctgtagtgtttcttttggggaaggcaggttttstttctggcagacctggaagtgctgagctgcgctctgaacaagcggatcagttgtgctctgtcctccatcaattgaaatatttctgtgtcattgccatgtttttgtaaggtgaactgtgccaggtaatcggacctgctgtcctcaccccagcccttaatgcagcactatctgaggagggagaggctgagaaggagccctcacaccactgctgtttctcatcctcaccattccccatccccaaactgcttccctcgccctcagagctctcagtgatgctgtaggtaatgtgaccaatgctga

SEQ ID NO: 60121 - DNA, 600 bp, Chicken  19866894319147_1
cagcttcatggccacagaaggcctgcacagtttgttcggaagatttggaaggaattttttcctatccagtttttaatttcttaggaactgttaatagatgagtatatactgtaattctctctcgttacagaaagagatacagagctcttctgtaagcccggctagataatgtcatctcccttcttatgatgttcataacaaagaatcccttctctactggctatctgattgatacaatttgtcaggctccccagtgctgtgactgcctttaaagattacttttactgcttgtgcacacartggagtttatcctgtcatctaatacttggggtttccagtatggctcagggtccgatgtagtagatacatgctgctttgaagagtttctgtgcttaaaaaaagaaggcaggtaaaggggaaagagggacacagtaaacagatggcttcctcggagcaggtacagagttttggcacaaatgtagatctccattattactgtccagactttcacacactggaccattctgccatgctcatgtcaaaatccctgcaggataccagccctgcacgtgtaatttctctttgaattttttgcaggac

SEQ ID NO: 60122 - DNA, 600 bp, Chicken  19866894319150_1
ctttgaccatcttttatgcacactggaaacaaggatctcatctcatgtccttcagaagaacgtgttttcaaaatgtgaagaatccagccatcccataattctgtccctctgttacctgtcgattcaagctctgtatggttaatgtaacttgaaggaggaaggcaggtcttagggctggaatacaaatttgagtattaagaaagatacttcagatttacttttaacatgatgggaattcattttctgatttgtgctaaatatcacctggctttaggtctcataatttatctcacgtatcaygtctagggtgtagcaaatgacccatctatgaccgtggaaacatttggaaagaaaaatgagtggagattttgttctatcgagacagcactgaagcacacccgttcctatcaataggatctatttctagaccattaaaatcaaatccatcccatctaaaatgtagaattttggcccctcatagaggtggagtttggtagatatggacatttatgctacggatccagtagtttcagctcttaagttttcatcagtgagttactatgtcacaacctctgaatgaccaaatgggaattgtgaaaa

SEQ ID NO: 60123 - DNA, 600 bp, Chicken  19866894319165_1
tagagatgcattggtttgggctatactgaacaaagatgcttaaaacgatgacaacagcaaaagaacataaattatcgtattaatccacataaaagggcaagtagtaaaaatgcaagctcattttgtgggacgggaagtgggagacaacctccatggggctgactggtaaagcctagatgaaaaccctcgtcctaaaagacaggcacagtaaatactctggttttcacccaaatgatgagaatgggctttgctgctcccaaggcttttgaaaggactgtgatatgctgggtcttaccactygaagcacttcagtggagaagccctgttgcctgtaagtctgaaacaccatcccaccaacaccaacccttcgggctgcagtcgcatggagatgtttcagggctgtcagccgcctcacagatctgctgcattgttctggattcagtgtttctcccttgagccttgtgcaatcctcccatacctcctaggacttggagggagaagatgtctttcacttggacatctggcactggtgccctattagacaagctttggggcattttgtgaaatagtctgcagctcccacaagcttcttcagtcaga

SEQ ID NO: 60124 - DNA, 392 bp, Chicken  19866894319165_2
gatctgctgcattgttctggattcagtgtttctcccttgagccttgtgcaatcctcccatacctcctaggacttggagggagaagatgtctttcacttggacatctggcactggtgccctattagacaagctttggggcattttgtgaaatagtctgcagctcccacaagcttcttcagtcagaaacacaaaaacatcaggcagtgcagaccattaatgaaatgactgtcagacattacttcatggtgtctctctgtgtttctgtgggaccgttatttgcaataggggcactaatctccygcatgtattttctacagcctttctcaatcttaccaataggatttttcccttagcttaactaaggtgttgttttggaaatgcatggactcccg

SEQ ID NO: 60125 - DNA, 600 bp, Chicken  19866894319168_1
atttaaatagcaaacttgtatgaagttaatagttgctatgatccttcacaccctcagaacttctaggtcttgtatttcagaggtattccatgtatataaaattaaaggaaaatttttatctattgctattgttaatttactagcttgctttgcaccaccagttttaatgataattgaaatttaaaagactgaaatatcagatcaaaaccttggtcttgaaatcaaaaagtcaagagatgagatgggagttgattaatctagctttagtgaccttgcaactcgtagagcagaaacaggagrgaattatcaggggtcagtttgtcgcaacagaaccggtaagtgtgtttcaccgcagtgttacaaagggaatttagccccttgttgcagccttagtgttgcactggactttttttcccatccttttcaccttttgagaaactaagcttttcgttttcttgatggtttgtttcggtgatagggctttaggttctgctttgaaatgtgttctagttactgaaaagtgaactggatacttcaaacacataatttctaatgcataattatgtccatttttaaagaattacctaagtaaaaatatct

SEQ ID NO: 60126 - DNA, 600 bp, Chicken  19866894319171_1
ctatcttaccctgctgctagcccagcttttgctgcatgcgtgtcaaagctgttatcaatctgttcttaagctgatgcagtccacagcactgcattgtaagacaaagtctaattggaaatgatttatgttttgatgaaaactgactgaccaggagctaattgcttagcagtgtgggcatctgcgcagcagaggtgttgaacaactcagaggagcagctttccaagtggagaatcagcataccgagtcagagtatcctaatcctgtgcaggcagctgattgctggcctctaggagaagcatrgaggaggcagctgggggcattggcttcttagttgtgaaggaatcctctagagactgtcttatcagccagtgctgataagtttttgctcatattaagttccatgaattgcctgtatgctagagctcatacctgatgtcataatggtgaatgtggttaactgaaggaaatggtgatacatggacttattgcccttttggaatgtcggttaatgacatcagcagctgctgaaaatagaacttgttaatgctgctgtcgtgttcattgatagcttccactttgaaactacctggattttagttg

SEQ ID NO: 60127 - DNA, 600 bp, Chicken  19866894319176_1
gcaacagggaaaaatttagccttccagttcatttctaaaatattgttggactttcaacagcaaattttcaagtgaagaatcagtgaatttactttcaaagtactgagggataattgccagtatcaaccacagaacgatacttcagatgtcagttttgtcatcttcctgagttggaagggacccttaaggccatctggtccaactcctctgcagtgaacaggaacacctacagctacgtcaggtgctgagagcccctccagcctgaccttgggtgtctccagggatggggcatccacaacytctctgggcaacctatgccagcacctctccacccttattgtaaaaaatttcttccttatacccagtctaagtctcccctcttttagtttgaaaccatttcccctygtgctatcacagcagactccgctgaagagtctgatcccttctttcttgcagacccctttagatactgaaaggccactatatggtctccctgggatccttctcttctccatgctgaacagcaccagttctctcaccctaggtactagaagctgtggaaaggtgctcacataggcaacacacagagaagctgtgaaa

SEQ ID NO: 60128 - DNA, 600 bp, Chicken  19866894319176_2
agggataattgccagtatcaaccacagaacgatacttcagatgtcagttttgtcatcttcctgagttggaagggacccttaaggccatctggtccaactcctctgcagtgaacaggaacacctacagctacgtcaggtgctgagagcccctccagcctgaccttgggtgtctccagggatggggcatccacaacytctctgggcaacctatgccagcacctctccacccttattgtaaaaaatttcttccttatacccagtctaagtctcccctcttttagtttgaaaccatttcccctygtgctatcacagcagactccgctgaagagtctgatcccttctttcttgcagacccctttagatactgaaaggccactatatggtctccctgggatccttctcttctccatgctgaacagcaccagttctctcaccctaggtactagaagctgtggaaaggtgctcacataggcaacacacagagaagctgtgaaaaggtccctttcattttaagcctcatagtatattatgtaaacatgcaaagaatcacttgtctcgtcacagtctttcaagtactcaggaagttaaagtaaaacgaca

SEQ ID NO: 60129 - DNA, 600 bp, Chicken  19866894319178_1
agaaacgtctgaagcagcggcctcagggaaaggctggttttgcaaaggaggaagcagaggtctatgagcagatgctcgggtggtgggaactggcagagacgcatcagctgcgccgctggtgttcacttgggtcaactttaggtgcggccccgtgccaaagaaaagtgggaatctacagcaaaatgggaaacacagagtgataaagcttccattcggcccttcttccttcgcagctgaagggaaggctgagcacagcgtctttgcagaagcctttggaggagggcacagtgcacagtaggygctctgctgcccgtctcctcatttggggctcctatttgtgccactgggaatgagaaakcaaaagcagcagagcagacaagattcctcacgcttctatggaccrctrcggagaccccaggtcataaggaggggttttttcctcccagtcaataggatacagtaccagcccaaaccaaaccaagggcccattccacccaggaggcttgcaaaacaaatcagcaggatgcttcatgcactaattggtcccagggatccctatggggcccttccaactcgggatgctctacgagggctgcagca

SEQ ID NO: 60130 - DNA, 600 bp, Chicken  19866894319178_2
ggtctatgagcagatgctcgggtggtgggaactggcagagacgcatcagctgcgccgctggtgttcacttgggtcaactttaggtgcggccccgtgccaaagaaaagtgggaatctacagcaaaatgggaaacacagagtgataaagcttccattcggcccttcttccttcgcagctgaagggaaggctgagcacagcgtctttgcagaagcctttggaggagggcacagtgcacagtaggygctctgctgcccgtctcctcatttggggctcctatttgtgccactgggaatgagaaakcaaaagcagcagagcagacaagattcctcacgcttctatggaccrctrcggagaccccaggtcataaggaggggttttttcctcccagtcaataggatacagtaccagcccaaaccaaaccaagggcccattccacccaggaggcttgcaaaacaaatcagcaggatgcttcatgcactaattggtcccagggatccctatggggcccttccaactcgggatgctctacgagggctgcagcagcggccgcgcgcaatgcaatgcgtgcagactgaactgacagcaatggtgaaacacgac

SEQ ID NO: 60131 - DNA, 600 bp, Chicken  19866894319178_3
tcagctgcgccgctggtgttcacttgggtcaactttaggtgcggccccgtgccaaagaaaagtgggaatctacagcaaaatgggaaacacagagtgataaagcttccattcggcccttcttccttcgcagctgaagggaaggctgagcacagcgtctttgcagaagcctttggaggagggcacagtgcacagtaggygctctgctgcccgtctcctcatttggggctcctatttgtgccactgggaatgagaaakcaaaagcagcagagcagacaagattcctcacgcttctatggaccrctrcggagaccccaggtcataaggaggggttttttcctcccagtcaataggatacagtaccagcccaaaccaaaccaagggcccattccacccaggaggcttgcaaaacaaatcagcaggatgcttcatgcactaattggtcccagggatccctatggggcccttccaactcgggatgctctacgagggctgcagcagcggccgcgcgcaatgcaatgcgtgcagactgaactgacagcaatggtgaaacacgacgggctggagctgaactcagcatcagaaaaaggaagccgaaggctt

SEQ ID NO: 60132 - DNA, 600 bp, Chicken  19866894319178_4
gctgcgccgctggtgttcacttgggtcaactttaggtgcggccccgtgccaaagaaaagtgggaatctacagcaaaatgggaaacacagagtgataaagcttccattcggcccttcttccttcgcagctgaagggaaggctgagcacagcgtctttgcagaagcctttggaggagggcacagtgcacagtaggygctctgctgcccgtctcctcatttggggctcctatttgtgccactgggaatgagaaakcaaaagcagcagagcagacaagattcctcacgcttctatggaccrctrcggagaccccaggtcataaggaggggttttttcctcccagtcaataggatacagtaccagcccaaaccaaaccaagggcccattccacccaggaggcttgcaaaacaaatcagcaggatgcttcatgcactaattggtcccagggatccctatggggcccttccaactcgggatgctctacgagggctgcagcagcggccgcgcgcaatgcaatgcgtgcagactgaactgacagcaatggtgaaacacgacgggctggagctgaactcagcatcagaaaaaggaagccgaaggctttca

SEQ ID NO: 60133 - DNA, 600 bp, Chicken  19866894319178_5
gaggcttgcaaaacaaatcagcaggatgcttcatgcactaattggtcccagggatccctatggggcccttccaactcgggatgctctacgagggctgcagcagcggccgcgcgcaatgcaatgcgtgcagactgaactgacagcaatggtgaaacacgacgggctggagctgaactcagcatcagaaaaaggaagccgaaggctttcaaaaacatttgcattaacgttctgaatcacagcatgacctctgaggtccgactcccagccaacagattcagcaccgaaaggtgctcagacaaygtgagctggggctgcttcacctctgtgctaaaaggtgacatctaaaatgcacactgagatgtctgaataaacgtgagcaacctttacaaatgctgaaagcccwgtgctaacccctgaccttaaccctgaccctgaccttaaccctaaccctaaccctgaccttacccatccgtagctatagagctcctaagccggctctctgtttagcacatgagaagtgcatcttcctttcccaaaatgaaatgaaattaacaacatgagacagccaaggggatcgctgacacaacctgccagacctgc

SEQ ID NO: 60134 - DNA, 565 bp, Chicken  19866894319178_6
cggccgcgcgcaatgcaatgcgtgcagactgaactgacagcaatggtgaaacacgacgggctggagctgaactcagcatcagaaaaaggaagccgaaggctttcaaaaacatttgcattaacgttctgaatcacagcatgacctctgaggtccgactcccagccaacagattcagcaccgaaaggtgctcagacaaygtgagctggggctgcttcacctctgtgctaaaaggtgacatctaaaatgcacactgagatgtctgaataaacgtgagcaacctttacaaatgctgaaagcccwgtgctaacccctgaccttaaccctgaccctgaccttaaccctaaccctaaccctgaccttacccatccgtagctatagagctcctaagccggctctctgtttagcacatgagaagtgcatcttcctttcccaaaatgaaatgaaattaacaacatgagacagccaaggggatcgctgacacaacctgccagacctgcattccagatcccaggctgcaagyctgattgcataaagttaaatgcaaagagaacgctgtggaaacatc

SEQ ID NO: 60135 - DNA, 345 bp, Chicken  19866894319178_7
tgtgctaaaaggtgacatctaaaatgcacactgagatgtctgaataaacgtgagcaacctttacaaatgctgaaagcccwgtgctaacccctgaccttaaccctgaccctgaccttaaccctaaccctaaccctgaccttacccatccgtagctatagagctcctaagccggctctctgtttagcacatgagaagtgcatcttcctttcccaaaatgaaatgaaattaacaacatgagacagccaaggggatcgctgacacaacctgccagacctgcattccagatcccaggctgcaagyctgattgcataaagttaaatgcaaagagaacgctgtggaaacatc

SEQ ID NO: 60136 - DNA, 599 bp, Chicken  19866894319179_1
  misc_feature (1)..(53): n is any nucleotide
nnnnnnnnnnnnnnnnnnnnnnnnnnnnnnnnnnnnnnnnnnnnnnnnnnnnncagtcatcatataaagcagtcttcgtttatattatgtgcagaatcgtatttttgacaagttcttgatctaatttgctgacgtctgtttctcagaacagctgatacacccaccatgctctgccctgtgagaggtttactcttgattcaagtccagcagtctaatctgaaatgaaagaaatcattactgtgggagaaaactccctacactttccaataaaaccatgttacagatgcacctctctgtacrgacgtatatgttaaaatgtagctttgtgttacatcgcttgtgttgaaagcagtccttgacwgttctgttttcccagatagaagtatgcgagtgcagccgtagtgttgtggcagcccagaacttgtggcctcgatgcggyagatgtgcagattgtgccgtatggtctccttaagcacagtctttactcttcccccgtttgtcctcagatttgtttttaagctgccagaactcaggggagtgaacaggtttgtgtgaggtcaggtctataaagtagcccatatccttaacgcgtaggctga

SEQ ID NO: 60137 - DNA, 600 bp, Chicken  19866894319179_2
atataaagcagtcttcgtttatattatgtgcagaatcgtatttttgacaagttcttgatctaatttgctgacgtctgtttctcagaacagctgatacacccaccatgctctgccctgtgagaggtttactcttgattcaagtccagcagtctaatctgaaatgaaagaaatcattactgtgggagaaaactccctacactttccaataaaaccatgttacagatgcacctctctgtacrgacgtatatgttaaaatgtagctttgtgttacatcgcttgtgttgaaagcagtccttgacwgttctgttttcccagatagaagtatgcgagtgcagccgtagtgttgtggcagcccagaacttgtggcctcgatgcggyagatgtgcagattgtgccgtatggtctccttaagcacagtctttactcttcccccgtttgtcctcagatttgtttttaagctgccagaactcaggggagtgaacaggtttgtgtgaggtcaggtctataaagtagcccatatccttaacgcgtaggctgatgaacccccttttgtttgtcccatttcaaagtgccgagtgaccctttttactgaagcaaaca

SEQ ID NO: 60138 - DNA, 600 bp, Chicken  19866894319179_3
ttctcagaacagctgatacacccaccatgctctgccctgtgagaggtttactcttgattcaagtccagcagtctaatctgaaatgaaagaaatcattactgtgggagaaaactccctacactttccaataaaaccatgttacagatgcacctctctgtacrgacgtatatgttaaaatgtagctttgtgttacatcgcttgtgttgaaagcagtccttgacwgttctgttttcccagatagaagtatgcgagtgcagccgtagtgttgtggcagcccagaacttgtggcctcgatgcggyagatgtgcagattgtgccgtatggtctccttaagcacagtctttactcttcccccgtttgtcctcagatttgtttttaagctgccagaactcaggggagtgaacaggtttgtgtgaggtcaggtctataaagtagcccatatccttaacgcgtaggctgatgaacccccttttgtttgtcccatttcaaagtgccgagtgaccctttttactgaagcaaacacaaacaggaacaaaggagctttctaacgctggcaatggaaaagcaatgtttttaattaaacttctgctattaatctag

SEQ ID NO: 60139 - DNA, 599 bp, Chicken  19866894319181_1
  misc_feature (1)..(32): n is any nucleotide
nnnnnnnnnnnnnnnnnnnnnnnnnnnnnnnncagtacatcactatgtaggaggaatacattactatttaggaggaagcttttcccccagaggtgacgcactgaacaggttgcccaaggaggctgtggatgccccatccctgcaggcattcaaggccaggctggatgtggctctgggcagcctgggctgctggttggggaccctgcacatagcagggggttggaactgggtgagcattgtgggccttttcaacccaggccattctgtgaccagactattcacctggtggggaaaaaaaayaaactgccacaaaatatacctgcagagcctccagtttgcttttcacaggaacaaaaggtcactctagggcagcagacatgaaatacccaaagaagaagtggggtgaggttgtgttccagctggcagtccactgttagaagtgccagatcagatcacaagagttgcttctcaaagacatcrtgggatgtcacctgggctgaacgtgcccttgcagccagggggacatgccctrttggaatcccatcctcagctcccagacaagctctctcagaagggccccagggtctcagcagcagctg

SEQ ID NO: 60140 - DNA, 600 bp, Chicken  19866894319181_2
cctgggctgctggttggggaccctgcacatagcagggggttggaactgggtgagcattgtgggccttttcaacccaggccattctgtgaccagactattcacctggtggggaaaaaaaayaaactgccacaaaatatacctgcagagcctccagtttgcttttcacaggaacaaaaggtcactctagggcagcagacatgaaatacccaaagaagaagtggggtgaggttgtgttccagctggcagtccactgttagaagtgccagatcagatcacaagagttgcttctcaaagacatcrtgggatgtcacctgggctgaacgtgcccttgcagccagggggacatgccctrttggaatcccatcctcagctcccagacaagctctctcagaagggccccagggtctcagcagcagctgtcattggggatgtaaagtggaggctctgggggagggataacatctgaaaagaacaaagtaaactatgaaatcccaaatataacaaacttcagggcctaattatgaagtctgaataaggaatgcaggagaagaattaagagtcaggcttttttcttttttactcattccaataatattttgc

SEQ ID NO: 60141 - DNA, 600 bp, Chicken  19866894319181_3
agcattgtgggccttttcaacccaggccattctgtgaccagactattcacctggtggggaaaaaaaayaaactgccacaaaatatacctgcagagcctccagtttgcttttcacaggaacaaaaggtcactctagggcagcagacatgaaatacccaaagaagaagtggggtgaggttgtgttccagctggcagtccactgttagaagtgccagatcagatcacaagagttgcttctcaaagacatcrtgggatgtcacctgggctgaacgtgcccttgcagccagggggacatgccctrttggaatcccatcctcagctcccagacaagctctctcagaagggccccagggtctcagcagcagctgtcattggggatgtaaagtggaggctctgggggagggataacatctgaaaagaacaaagtaaactatgaaatcccaaatataacaaacttcagggcctaattatgaagtctgaataaggaatgcaggagaagaattaagagtcaggcttttttcttttttactcattccaataatattttgccaaaggcttttacttagtgagacatctttccatcagaggaaagcagagaatt

SEQ ID NO: 60142 - DNA, 600 bp, Chicken  19866894319186_1
acacttgtaaaaacctgcaccagcaggagtgacccactgttgatgtcaccattgctgtaacacactacccaccacctcactgtgttcatgtccactggttgttgtccataaacattcagcaagtgtcaatgaatgtcagtgggtgccattttctccacgagttaattcaacgacacacctattcttcatatgcacttccctgtcagatggcattgtgtcagtgtgcccctctgctgccatctgtcacacagcaacaaaatgtaatgggatattgatgggaaggttcaacctctgcttccrtgccaccaacatccacctctgacgttgtggaccagcataataaaataggaggcattacttttggagcagctttcatacctgtcgtgccrgagtagtggctctcacttggtgtggcattagagcttagatgaagtygttgcgtacttcatatggtcctttcagactaggatcccagaacacaggatacttccccttaaactacactaggagttcctgctcagcccccttcctcctactgtgactgcatctgaagccacaatgctgttasactgaatggcctcaccwttctggcctctggag

SEQ ID NO: 60143 - DNA, 600 bp, Chicken  19866894319186_2
gtccactggttgttgtccataaacattcagcaagtgtcaatgaatgtcagtgggtgccattttctccacgagttaattcaacgacacacctattcttcatatgcacttccctgtcagatggcattgtgtcagtgtgcccctctgctgccatctgtcacacagcaacaaaatgtaatgggatattgatgggaaggttcaacctctgcttccrtgccaccaacatccacctctgacgttgtggaccagcataataaaataggaggcattacttttggagcagctttcatacctgtcgtgccrgagtagtggctctcacttggtgtggcattagagcttagatgaagtygttgcgtacttcatatggtcctttcagactaggatcccagaacacaggatacttccccttaaactacactaggagttcctgctcagcccccttcctcctactgtgactgcatctgaagccacaatgctgttasactgaatggcctcaccwttctggcctctggaggagaagcaaggtgaaacgtgtgaggcaaagctgtatgtcagaggcagtgtgtggagtcctccaaatacccctctcaggctgctgagatt

SEQ ID NO: 60144 - DNA, 600 bp, Chicken  19866894319186_3
tcagtgggtgccattttctccacgagttaattcaacgacacacctattcttcatatgcacttccctgtcagatggcattgtgtcagtgtgcccctctgctgccatctgtcacacagcaacaaaatgtaatgggatattgatgggaaggttcaacctctgcttccrtgccaccaacatccacctctgacgttgtggaccagcataataaaataggaggcattacttttggagcagctttcatacctgtcgtgccrgagtagtggctctcacttggtgtggcattagagcttagatgaagtygttgcgtacttcatatggtcctttcagactaggatcccagaacacaggatacttccccttaaactacactaggagttcctgctcagcccccttcctcctactgtgactgcatctgaagccacaatgctgttasactgaatggcctcaccwttctggcctctggaggagaagcaaggtgaaacgtgtgaggcaaagctgtatgtcagaggcagtgtgtggagtcctccaaatacccctctcaggctgctgagattcactgatgataacagaagtttgagaagcctgcatgactcatagtgg

SEQ ID NO: 60145 - DNA, 600 bp, Chicken  19866894319186_4
atattgatgggaaggttcaacctctgcttccrtgccaccaacatccacctctgacgttgtggaccagcataataaaataggaggcattacttttggagcagctttcatacctgtcgtgccrgagtagtggctctcacttggtgtggcattagagcttagatgaagtygttgcgtacttcatatggtcctttcagactaggatcccagaacacaggatacttccccttaaactacactaggagttcctgctcagcccccttcctcctactgtgactgcatctgaagccacaatgctgttasactgaatggcctcaccwttctggcctctggaggagaagcaaggtgaaacgtgtgaggcaaagctgtatgtcagaggcagtgtgtggagtcctccaaatacccctctcaggctgctgagattcactgatgataacagaagtttgagaagcctgcatgactcatagtggctgtttgggttcctgtctggaaatcaggaccaagaaattcagactgtgcatctgttaatgaaatgatctcttgagaacagctttgcatgtgagggatgtttattttgcgtgtataattcgtaaggccgccatt

SEQ ID NO: 60146 - DNA, 600 bp, Chicken  19866894319186_5
caacctctgcttccrtgccaccaacatccacctctgacgttgtggaccagcataataaaataggaggcattacttttggagcagctttcatacctgtcgtgccrgagtagtggctctcacttggtgtggcattagagcttagatgaagtygttgcgtacttcatatggtcctttcagactaggatcccagaacacaggatacttccccttaaactacactaggagttcctgctcagcccccttcctcctactgtgactgcatctgaagccacaatgctgttasactgaatggcctcaccwttctggcctctggaggagaagcaaggtgaaacgtgtgaggcaaagctgtatgtcagaggcagtgtgtggagtcctccaaatacccctctcaggctgctgagattcactgatgataacagaagtttgagaagcctgcatgactcatagtggctgtttgggttcctgtctggaaatcaggaccaagaaattcagactgtgcatctgttaatgaaatgatctcttgagaacagctttgcatgtgagggatgtttattttgcgtgtataattcgtaaggccgccattagcttttctcttgaccc

SEQ ID NO: 60147 - DNA, 600 bp, Chicken  19866894319192_1
atttatattgtaatataaggcaaaaatttaagctaactactgtgatcattcacttttgtcttttctattgaccactcacaaaaataagatatgacagtcatctccccgaagtacgcacaactaattacacaaacagaagctcacatagagcaggactggatataaacagaagttacagtcaggtgctgtgacacccagaagatgatccttgacattaactgaagaggcaacatttcacctaattctgtcctgaggcttcactcaggtcactgggcacctctcaaaaggtaattacaaackgacttcagccatatttgagcacaagctcttagtgctacccaatacattgctggccttgtttcttaccatatcagcaggccatggttacaatgaagatttctttacgataattagaatcagttgtgtattggcaagttgaaaataccctcagacatgtaacaaattttttaataagcttaaattaatcaacagatacactgtgcatatgtaaacaagtcagttaaagttaagcaacattttaacagtattattagcactataatttctacagtactaacaataacatagaaatgtttcata

SEQ ID NO: 60148 - DNA, 600 bp, Chicken  19866894319197_1
aagctgcttgcaataaccttttgtttaggcattacttggacttctaaaaagaaaagtaatctacttgaaaataagtaataatatacagatgtctgtgacaagacgtaaactatgatttaagaccaagcctggggcatatttcacattggctctaagcttgtgtgttcatgccatgttggttctgctctttatcaccgtacatgtacagcttcaaaccccttatgaaaaccattctttctgaacagagacagaaagcactgcgttccccacttctctgtccacttccctcacttccaaacrttgggacttataacaaagtaagcagcacacagtgatcttcacacacaaccttgcttccagtcgatagcgagagttcatctactgctttggtggcacacagcactgcaggcaagaggacccaggaacggatcatcctttctccgtaaccacagtgttcagacattactggaagcaagactctacattaaatgaaaacagaacaagttcttattttctgacatcaaagacattaaatacaaacaatgctgcacgtgctgctgaacgtggtctctccaagtacctgatacacttctggggaaa

SEQ ID NO: 60149 - DNA, 600 bp, Chicken  19866894319204_1
tttgcactcatctagcaggaaacctgcctactgcgatattgggctggcttgatgcatagcacttctcactgactgataaatggtcaggttttagacataggagacaaggagcaagaagctgtgtgaagtgattcatctccagagaagaaagaaaatgcagaaaggatacagctgctatgcgctaaggaagctgggctgcaaggggcagcacacatgggagcaacaaaaggagtttcctatcgtggaaacggagcacacaaatacaaacacgcaaacagaggagcaaactgaaccacatamgacatggttatggtacaatgcctgtccttgggagatgctggcataggaagtctcaaagcagctctgtttagtgctgtgacctctgagctacccagcagcaccagaagcagagtgcctgctggtatctgcacaccaagggtaaagcaaaacaatctcccttgagcccgtgggtcagcatggaaacttgtgcctttcttgctcccagaggtcagagcagccagagaaaggttccttctgtgtcaagaagcaacaaatctctctaggaagcctcactggtgacatgaaagggcatcagggttt

SEQ ID NO: 60150 - DNA, 599 bp, Chicken  19866894319205_1
  misc_feature (1)..(76): n is any nucleotide
nnnnnnnnnnnnnnnnnnnnnnnnnnnnnnnnnnnnnnnnnnnnnnnnnnnnnnnnnnnnnnnnnnnnnnnnnnnnggggaacaacgcgctaccttcctatagtgatactactaatacgaccagaaaaaaccaccttgttcttaactctcaccttgcttggtaatggcaccagggggtgtcagcagaatgcaacgaacacttgacacctctcagacctgctgcaaaatgataccaactcagaccaattactcttttaaagtacctccccgctcttgagagtttatcctgtaacctgcttygagtgggagtgcagccactgtaaaagagaacttcaaacattaaactcatcatctccactgtcatacaagggagaggcatgcatccaaaggaacaggagaaagtgcttggggaagtagccgtgttctggggaaaatttcattatagaaatatgaacccatactgttttcaataaattaaagtgtttagacataatagcagtcactgattcatgcaatatttgctcaaaatattaagtttgcttataattaatatagttcataattaaagaaagctatgcagtttgtcagtaaatattgcc

SEQ ID NO: 60151 - DNA, 600 bp, Chicken  19866894319220_1
caattagcttaaaaagagtggatatgatgcctgttcaacatttaactgaataccatgttaagtacagataagtttcacactgcctttactggtgctctgatgaaaagcttccctctctgctgttgacataaaccctttctcacaccagaaacaaggacaaattgaattgcaaggcagtgagaagcaggcatggtgctcctttcccgttgtgtgaaaatgagaggattggatgcatcagcatagcacaggaaaggagaccaaagaaagatgtgttgacctcaaatcctacatcctgaaaasaaagtaaggtcaaacatgtctggagtccaagcaatagcatcacgtgagggtactggtaagagaaataactcagttgcagaggaagcctgaggtctgtgcatagacaagaagtgctgttggctacccacagtcttccattactcaaaaagaaaaaggtctgcatctgcaaagttccctcttctaatccctggagcaggtaagtcttatactatcacagaagacaaaaagaagaaaattttgagatacaaaagcttgcttttgtttccatcatttggcaagctgaaggaaccaaaaaaacgt

SEQ ID NO: 60152 - DNA, 600 bp, Chicken  19866894319220_2
acagcacagtgagacactacgtgttctgtattcctcggatattgactccaagaacatccttctgtctcgccaaacacttgctgaatgcttaagtattttaacatacctgatttattagatcactgtttggaaatctttccaagaaaactgatctggtaaagtaatcactgcttcagggagcatagctgatccgcagaaagccacatgtgctagaaaagcttgatttctttttaagcagtcattggcagagcaggatggaagaagaggacagaaacaatttccactaagatttggatttgrggaaatcacgagagaagaaaagacattcaggaatgcatatcagatctaataaaattagattacacaagacgagtcatgtgctaatcattcatatggatactgtagataaaagccattcattgcaaccacagcagactttccagtgcaacgcagcgtttccagatccttacacccctctcagcgttttgcttttctgactcaagtgaggttggcttttttcttcgacaggaacatttagaaatattttttaaaatatttataccaaaaagctaatctgtgcccatacagaagtgaaacgta

SEQ ID NO: 60153 - DNA, 600 bp, Chicken  19866894319236_1
atgatgtgccatagcacagtgtaacgtcaataatttaaaatagcgtagtgtacaaattaattgtgtggcagtttaagttaaaaagtcaaggcaggttttcctgtctcaatttacgttggctgtcaagctgtccagtcggggcatgttggtaataatttgccttttaatcactaccatactatcaactttgcattataatggggcacacatttgcgtggcattactatgaataacacgaggatagagggaggataagagatcaatgaatgttctaattcccttccatatttcaatttcaamgagagccagggaatatgactagataccatattcgcatcattctagctacaaaataaccaaagtaaacgcaatcaagcaacaataagaccacattacacaaatggaacatcatgctctcatctggtttaactattacatcaagttttaactgggatgttggtcaactttaaaaactgtggtaagtgtgaatatgcagttgcaataggttttttaatttttaattttattttttactctatgctggatattagaagttggagctatacttgttacaatacagtgtcgcacatctttctacta

SEQ ID NO: 60154 - DNA, 600 bp, Chicken  19866894319239_1
gaatgtgcaggttttcttgttgttcatttctcacaaaggaactttactccactgggataaagagtacctgtagaaagaaacctcctttaagaaattttcattgttgcacttatgaatgaattaacaaacgaacaaaaaaatgctgaaaataatgtatgtaagaacttcaaagccctggatgaagcatacttacctgactcttccccaagtccctctaagcttttaaatagaagaggcaaaatgtttcttcttagggcagctcaaatacgtgagaaaccatgaactaagaaatatgtcctstctttgtattttaattttgggctttgtatatatatacatatatgtttctatttccaattcagtaaagaacttttagatcatatttatttgaagtaacagtaagattcagaaaggaagagataaagaaaatacttctgggatcaatgtgatacatatatcatgagtttcagactgctgtgctcagaactaacaattttacagatactaatgaaaaaagagattatttctttggtagatttcttcaaaatgaagtaacaaaaatatctggacaataacatcaagtgttcattattttactaa

SEQ ID NO: 60155 - DNA, 600 bp, Chicken  19866894319247_1
atcttttaaactctacctgttaagatgaaaggagtaggaattaaaaagaatgagaaataaatggaaaagaaaggtaataatgtaacaccagcagtgggtagactcatcatctgtataggtcaaaggagtcagtactgaatgtggagaattattattatcttgaattaagtaagatattaagatctaaaaatgatcagaatataggcagaagcctttgctgcataattatatataaacattttaaacggaatggtaattagactgtcaatgaatatgacactgaaactaagaacacaatawtgctcaatactgtcctacatatttatcaaagatacaagaaatggtactaccaagaatsgtgttcaaaagcttgcctttttttccagtacaataagagatcgtgtctttcactgcaatgcctttcttatcttcctaggccaaacttctaacaaaacacttacttttaaaacaaaaatataattttaaaggcaaggcaatgtagtgaggacatacattatcccgaggaaagtagttctgtatccaaggatggcaatgtatgcttcatcattgatttaaatgggactaaattcaagtgtgtat

SEQ ID NO: 60156 - DNA, 600 bp, Chicken  19866894319247_2
aaatggaaaagaaaggtaataatgtaacaccagcagtgggtagactcatcatctgtataggtcaaaggagtcagtactgaatgtggagaattattattatcttgaattaagtaagatattaagatctaaaaatgatcagaatataggcagaagcctttgctgcataattatatataaacattttaaacggaatggtaattagactgtcaatgaatatgacactgaaactaagaacacaatawtgctcaatactgtcctacatatttatcaaagatacaagaaatggtactaccaagaatsgtgttcaaaagcttgcctttttttccagtacaataagagatcgtgtctttcactgcaatgcctttcttatcttcctaggccaaacttctaacaaaacacttacttttaaaacaaaaatataattttaaaggcaaggcaatgtagtgaggacatacattatcccgaggaaagtagttctgtatccaaggatggcaatgtatgcttcatcattgatttaaatgggactaaattcaagtgtgtattctattttgcatggttttctagtccctaaaggttaattgaagcatagcattaaaattt

SEQ ID NO: 60157 - DNA, 600 bp, Chicken  19866894319252_1
aaaggccaattactggtaactaatggcagtgaaaagtgaagggaggcagattttaattctggcagttttgcttgattaagcacactgattcattcatttgtcaaggtttatactttcccattctcacaagttttgtgagaaaggcacaagatttttttaataaaagatcagtttacaatagttctttggattaatccccttccaagatctggtggcttattttttattcttagaccccctgaggctttctcatctctttacagcattttgcctgttgtactctcagcctccctatagccyctgaataccttctctccagaatgcagtaatgctatagtatttatcctttcagcaggcttgtctctgtctccagcaatccctatgtctttctctcacctttctccatccctttacaacatataaaaatccatgtgttttttcccattgaaagccgtgtcacttctatcacaggatccatcattctttttgctcagatattcatgagcatcgggatcagttctggacagaaatatccagccactgactggagtgtttagggagtcctcagctgcatggatagagaagtaggaacttaaagct

SEQ ID NO: 60158 - DNA, 600 bp, Chicken  19866894319256_1
tctctgaagcttttcagtaactgcctagacgctttcctgctcaacctactgtagggaacctactttagcagggggttggactcagtgatctccggaggtcctttctaacccctgtgattctatgccctgtaggtacatgatcatgcgggagtgctggcacgctgtcccctcgcagcgacccacattcaagcagctggtggaagacctggacagagtcctcaccatgacatccactgatgtgagtgtggtgttggtgtggaaatacagggaggggtggcttgtccctaagcatgctaacgkgtctgtcccctttcaggagtacctggacctctcggtgccctttgagcaatactcacccgctggccaggacacccacagcacctgctcctcaggggacgactcggtttttgcacatgacctgctgcctgatgagccctgcctgcccaagcacgtgccctgtaatggcgtcatccgcacgtgacggccccccaggacagacrgatggacagacaggcagtgttcccaccctggcgcaagcgcagagcgccgaagacaaacccatagtgaaggatgtttccatgaaactgctcggtgatgccg

SEQ ID NO: 60159 - DNA, 600 bp, Chicken  19866894319256_2
aagacctggacagagtcctcaccatgacatccactgatgtgagtgtggtgttggtgtggaaatacagggaggggtggcttgtccctaagcatgctaacgkgtctgtcccctttcaggagtacctggacctctcggtgccctttgagcaatactcacccgctggccaggacacccacagcacctgctcctcaggggacgactcggtttttgcacatgacctgctgcctgatgagccctgcctgcccaagcacgtgccctgtaatggcgtcatccgcacgtgacggccccccaggacagacrgatggacagacaggcagtgttcccaccctggcgcaagcgcagagcgccgaagacaaacccatagtgaaggatgtttccatgaaactgctcggtgatgccggaggatttttgttgtcragtttttttttgttttgtttgkttggtttttttcccatttgctgtataaaaagtcaagaagcactgtttggcctgaaggaactcatctcttgccaagatgatctatcrtgtatgattttttattattattattattattatttttcttttttcctaagcagaatgttaaacctgagggtactg

SEQ ID NO: 60160 - DNA, 600 bp, Chicken  19866894319256_3
agtacctggacctctcggtgccctttgagcaatactcacccgctggccaggacacccacagcacctgctcctcaggggacgactcggtttttgcacatgacctgctgcctgatgagccctgcctgcccaagcacgtgccctgtaatggcgtcatccgcacgtgacggccccccaggacagacrgatggacagacaggcagtgttcccaccctggcgcaagcgcagagcgccgaagacaaacccatagtgaaggatgtttccatgaaactgctcggtgatgccggaggatttttgttgtcragtttttttttgttttgtttgkttggtttttttcccatttgctgtataaaaagtcaagaagcactgtttggcctgaaggaactcatctcttgccaagatgatctatcrtgtatgattttttattattattattattattatttttcttttttcctaagcagaatgttaaacctgagggtactgccctcccgcctgcgcttgccgagcgcctgagtagccaatctgtgcctacwatatgaaaaagaggaaaaaaatcttcctagaagaagaaaagctaatgaaaaaaaaaatgtaaagaat

SEQ ID NO: 60161 - DNA, 600 bp, Chicken  19866894319256_4
ctttgagcaatactcacccgctggccaggacacccacagcacctgctcctcaggggacgactcggtttttgcacatgacctgctgcctgatgagccctgcctgcccaagcacgtgccctgtaatggcgtcatccgcacgtgacggccccccaggacagacrgatggacagacaggcagtgttcccaccctggcgcaagcgcagagcgccgaagacaaacccatagtgaaggatgtttccatgaaactgctcggtgatgccggaggatttttgttgtcragtttttttttgttttgtttgkttggtttttttcccatttgctgtataaaaagtcaagaagcactgtttggcctgaaggaactcatctcttgccaagatgatctatcrtgtatgattttttattattattattattattatttttcttttttcctaagcagaatgttaaacctgagggtactgccctcccgcctgcgcttgccgagcgcctgagtagccaatctgtgcctacwatatgaaaaagaggaaaaaaatcttcctagaagaagaaaagctaatgaaaaaaaaaatgtaaagaatgtagaaattctttgcttatgca

SEQ ID NO: 60162 - DNA, 599 bp, Chicken  19866894319256_5
ctgatgagccctgcctgcccaagcacgtgccctgtaatggcgtcatccgcacgtgacggccccccaggacagacrgatggacagacaggcagtgttcccaccctggcgcaagcgcagagcgccgaagacaaacccatagtgaaggatgtttccatgaaactgctcggtgatgccggaggatttttgttgtcragtttttttttgttttgtttgkttggtttttttcccatttgctgtataaaaagtcaagaagcactgtttggcctgaaggaactcatctcttgccaagatgatctatcrtgtatgattttttattattattattattattatttttcttttttcctaagcagaatgttaaacctgagggtactgccctcccgcctgcgcttgccgagcgcctgagtagccaatctgtgcctacwatatgaaaaagaggaaaaaaatcttcctagaagaagaaaagctaatgaaaaaaaaaatgtaaagaatgtagaaattctttgcttatgcaatctgtacatgaaccttttttggtggagctgaaaagccacgttgcctgcagggattcatatatttatagaaatatctatattttt

SEQ ID NO: 60163 - DNA, 474 bp, Chicken  19866894319256_6
agacaaacccatagtgaaggatgtttccatgaaactgctcggtgatgccggaggatttttgttgtcragtttttttttgttttgtttgkttggtttttttcccatttgctgtataaaaagtcaagaagcactgtttggcctgaaggaactcatctcttgccaagatgatctatcrtgtatgattttttattattattattattattatttttcttttttcctaagcagaatgttaaacctgagggtactgccctcccgcctgcgcttgccgagcgcctgagtagccaatctgtgcctacwatatgaaaaagaggaaaaaaatcttcctagaagaagaaaagctaatgaaaaaaaaaatgtaaagaatgtagaaattctttgcttatgcaatctgtacatgaaccttttttggtggagctgaaaagccacgttgcctgcagggattcatatatttatagaaatatctatattttt

SEQ ID NO: 60164 - DNA, 600 bp, Chicken  19866894319259_1
cttctcttcctgctgttaagagagccccttccttttatagactgcctactgtccctgaaggctttttctgatagaaatatagggatgcatctagttttctgttgctgaggaacttgaataaaagaagagagaaaaagaagggtatcaaagaggttgcccatgcttaaatctcattaaagttcggcctgtggcatgtgtcagctgactgggcacatgacttattctttgtctaataggtattttagttttatatgttttaacaggctggattaacttctgtgacctgtttttccagggtgracataaatgtgattgaaacaatattaggcctaatcaagattagctcaattgttgattttgccaggaagattaactaaggtgatttatctctggtagatgggataaaagacagtaggtcaaatttgcccagttcaatctagatacttgtttgagcaatgcagaaatttgtcatttagttgaatctgaagtattcacactgtgcagaagaaaatgagaattgatctcccatctctgcccatgcaaaggctattcatatgcttttgggtttgagatatgcatattaacacctttggcaagacc

SEQ ID NO: 60165 - DNA, 600 bp, Chicken  19866894319264_1
tggggtgtatacagactatttgatctcttatgcaacaaaaattagaagaaaataaccaagtgacatgaaaaatgttgctctatgcattttaaaagtagacaaacattaaagcttatcagctgaaaacgtgctacccaagctaaaaacatgtacagcattctcaaagcagcccattttaatgaggtctctactacagcagtacatgcctactgcccagccaacagcaaaaagccatcttttccatcacagagtacacctgtgacaagaaaactaggaccaaacctatttttagctaatagytcttttcatccttctgttcaactcaacagatgcatccataatcacatacctctccacattatattaccttagtatgtttttcactgcttcctgctctcaggtttttaagataacttgctacatatttatttatttatttacaggtacacaatgcattttcctaataactcatcatttctgctagttttctagatgactgtgcaagtcatttttacccagtgtgtcagcaaaattctccaaactaaaaatgtagcttgatatttaactcatcccacgtaatagccaagttcttttcttttc

SEQ ID NO: 60166 - DNA, 600 bp, Chicken  19866894319271_1
agaaaaagaaataacttctcccaataccctatttgtgagcttttaaactgtttgtgctctggtcagagcttgcgcattcacaatccagcttctctggcttagtgctgcagtgaaatcataactgtgctcttgacactgtatgctgttgccagcacagaaatgatcgtgatatcacaaatccactagggatgggcaaactactacaataaaaatagcaactgccgtgagcctgagcccaaattttgaactccctctttcccccctcttcctaaagctagcatgagttcaataagtacgtcyctgaaattaatcttgtggactctgcagtcttggctgtctttgctgatccagctgctgtcctcaagtctgacaatttccaatgcttcccttgggttagaggcagtgagtacattttggggtatacctttgacctgcggaatgcatgggatgagaagacatcagccagctgagcccagacgcaaacgtgccaaaactgaggctcccctgataaaacagtgcttggacaggggatctcttggaagtcagagggaaggaactgttttaggctggggggtgggctagaaggactctgtttatgtt

SEQ ID NO: 60167 - DNA, 600 bp, Chicken  19866894319288_1
acaaaagcaaaatgcttgtcattcggtactaatgtggtggaatagtgtggcagcaggatccctgcttttcactcagcctctcataaagattcgacttcacttcagctgtaaaaatgtgcaaattacattactactacatgactgacttttgtaattacattaagcgattgagataaatcccagtgctgggttcccaaaagaatgcttgcagctgtgtgattttcgcatctgatcctatggtttgttgtacccagccatgcctgctatttttttttttccttttttctttttttttttttycctccccctctctgtagaggagtttgtttggttaagaggtcatgttgggcacaagatggaagaataaagcaagattgctttctagggtgtaccacccagaaatttgttttgtggaaaaggttagcgggccatgatgattttcacagaaaggcaggtgcagtattgtcagtgtggcacacttgtgagcttcacatggacataatgcacatgtagtacacagaaaccatgctgagacattgctagctgggtgcctgctcatttgctggaggaaataaattgttctgaggttttaaaaatgct

SEQ ID NO: 60168 - DNA, 599 bp, Chicken  19866894319297_1
  misc_feature (1)..(69): n is any nucleotide
nnnnnnnnnnnnnnnnnnnnnnnnnnnnnnnnnnnnnnnnnnnnnnnnnnnnnnnnnnnnnnnnnnnnnttttataacatggtcatccactaataaatttttcccagttgttcatcactggacttcctgcaccttcctctcaagtacaagatatcagtcattgattgtcaaggactctgatctagtgttattgaataacatccacattttcacagctctggcaccacaagtgctgtacagaagcccctgttgtacacacagggaaacaagaacaaaggaagtctctcacacagaataccrtaagaacagagctttgacttgagcacagctgaaatcaatacctcacacctcctagaccatgtattttcttcttttggagttgtctctgaaaattcattgtccttattgctttgattgcaatttggggttcttagctggctctttamaggagtgtaaagtgttaaggagtgatttcagacacaccgtgagttttatactgtgggttttgtagtatggctggaatcagatgagtctgtgacccagagcaagagtcttcggagaagcagcattacattttcagcacaagaagtgcaacatct

SEQ ID NO: 60169 - DNA, 600 bp, Chicken  19866894319297_2
caagatatcagtcattgattgtcaaggactctgatctagtgttattgaataacatccacattttcacagctctggcaccacaagtgctgtacagaagcccctgttgtacacacagggaaacaagaacaaaggaagtctctcacacagaataccrtaagaacagagctttgacttgagcacagctgaaatcaatacctcacacctcctagaccatgtattttcttcttttggagttgtctctgaaaattcattgtccttattgctttgattgcaatttggggttcttagctggctctttamaggagtgtaaagtgttaaggagtgatttcagacacaccgtgagttttatactgtgggttttgtagtatggctggaatcagatgagtctgtgacccagagcaagagtcttcggagaagcagcattacattttcagcacaagaagtgcaacatctgctgctgcctgttggccacagttctgcagcacgccttccatgcatccagccaaaaatctatccctaggtgactgggaggggggagtgttacttgtgttttttttttctttttctgaactctggatatctggaaataagtgctgctat

SEQ ID NO: 60170 - DNA, 599 bp, Chicken  19866894319303_1
  misc_feature (1)..(35): n is any nucleotide
nnnnnnnnnnnnnnnnnnnnnnnnnnnnnnnnnnnaatgcatacaaactaataaaaatcattaaatggaccattgaatgacccactgtgcatttccttcctttgccaaatataatttttttttcccccattaggaacaaaattctgatttttattataaaagtacattttggatgttaataagtttctttggaattccgtatcaacactcctgggatctgtggtgagctcacactaggttagtatcggcatcaattttaaatactactcaagttttaagttgtgcatttttctaagcttycccctcaatgcattttcttcccctccaaaaatattcatcagaagggtttctaaaaataaattccatcttgcaatggcttaatgagcttcccactgtaaaataataagaaccaaataaaagggctcaatttgttttaaatgtgtcatttggtctaacagtttaaatgctacagaagaaactaccataataagcaagaaacctcttctctctgtagcacctcagtatctatgaaatggccttatgaaatgttaatactgctcagcctgctatgaaatataatcacacagttgaaggaaagc

SEQ ID NO: 60171 - DNA, 600 bp, Chicken  19866894319303_2
aaaataaattccatcttgcaatggcttaatgagcttcccactgtaaaataataagaaccaaataaaagggctcaatttgttttaaatgtgtcatttggtctaacagtttaaatgctacagaagaaactaccataataagcaagaaacctcttctctctgtagcacctcagtatctatgaaatggccttatgaaatgttaatactgctcagcctgctatgaaatataatcacacagttgaaggaaagcatccatacaatatacggatagcatagttcaagaaacctattgaatacagactrgccactgcaatccagttttagcaccttcttatttaagagctagatagtgatcaaaatgctagattcttagagcaaaactaacgtcaaataatttatataatamcttgtggttcccgtggcatttttgcatttaagagttttgccaacacatcagttacagtggtaccatcaagattgaggtccttagttakcttggaaagctcttgtaattgctttcacacagcagtgggagtgcatagyttacagacatgtgaatgaataatttttcctcaggtttatgagtcagaccttttccactca

SEQ ID NO: 60172 - DNA, 600 bp, Chicken  19866894319303_3
cagtttaaatgctacagaagaaactaccataataagcaagaaacctcttctctctgtagcacctcagtatctatgaaatggccttatgaaatgttaatactgctcagcctgctatgaaatataatcacacagttgaaggaaagcatccatacaatatacggatagcatagttcaagaaacctattgaatacagactrgccactgcaatccagttttagcaccttcttatttaagagctagatagtgatcaaaatgctagattcttagagcaaaactaacgtcaaataatttatataatamcttgtggttcccgtggcatttttgcatttaagagttttgccaacacatcagttacagtggtaccatcaagattgaggtccttagttakcttggaaagctcttgtaattgctttcacacagcagtgggagtgcatagyttacagacatgtgaatgaataatttttcctcaggtttatgagtcagaccttttccactcatgtttgatctgataaagttcttgatacaggaaagacccaacagatctgaagattcatgtattagagtacaaaatggtgttaaagttcccgtgaggacaatgac

SEQ ID NO: 60173 - DNA, 600 bp, Chicken  19866894319303_4
aaatgttaatactgctcagcctgctatgaaatataatcacacagttgaaggaaagcatccatacaatatacggatagcatagttcaagaaacctattgaatacagactrgccactgcaatccagttttagcaccttcttatttaagagctagatagtgatcaaaatgctagattcttagagcaaaactaacgtcaaataatttatataatamcttgtggttcccgtggcatttttgcatttaagagttttgccaacacatcagttacagtggtaccatcaagattgaggtccttagttakcttggaaagctcttgtaattgctttcacacagcagtgggagtgcatagyttacagacatgtgaatgaataatttttcctcaggtttatgagtcagaccttttccactcatgtttgatctgataaagttcttgatacaggaaagacccaacagatctgaagattcatgtattagagtacaaaatggtgttaaagttcccgtgaggacaatgacattaagtaaacaaagagtacttcttcagaccacagccttagttagcaaatctttcctcccctagaacacagaaagtgattttaagaaa

SEQ ID NO: 60174 - DNA, 581 bp, Chicken  19866894319303_5
ggaaagcatccatacaatatacggatagcatagttcaagaaacctattgaatacagactrgccactgcaatccagttttagcaccttcttatttaagagctagatagtgatcaaaatgctagattcttagagcaaaactaacgtcaaataatttatataatamcttgtggttcccgtggcatttttgcatttaagagttttgccaacacatcagttacagtggtaccatcaagattgaggtccttagttakcttggaaagctcttgtaattgctttcacacagcagtgggagtgcatagyttacagacatgtgaatgaataatttttcctcaggtttatgagtcagaccttttccactcatgtttgatctgataaagttcttgatacaggaaagacccaacagatctgaagattcatgtattagagtacaaaatggtgttaaagttcccgtgaggacaatgacattaagtaaacaaagagtacttcttcagaccacagccttagttagcaaatctttcctcccctagaacacagaaagtgattttaagaaaactctccagcttcaaactaactgataattt

SEQ ID NO: 60175 - DNA, 599 bp, Chicken  19866894319318_1
  misc_feature (1)..(48): n is any nucleotide
nnnnnnnnnnnnnnnnnnnnnnnnnnnnnnnnnnnnnnnnnnnnnnnnctgaagcatgcctgcagcttcacagggcagctgaggtacgtcccttagcccagcaccagcaaggattgatgggcatgggtgggatcttttgagcctcctccaggtgagcagccccagctctcggctctcttcacagcagcaatgctctgggccctgcagcatctaggttggtttgtgttccttccctgcagacccacatccagccagatgcccctgctgccctactgccaggactgctctttgcagttctcrttgagccacacagtgcagaccaagaagaacagcagtactgccccagccagrgcccaacgagacatcttcctccttcgtgggttgcctttttgttttctccctcagtttgtgaaacatgaggaagaaggaagttcagagccagtgttgggtggtgagccaccaagttcccaatgtggctgcttcatgtcatttcaccagggtccccttttaggggtgggatcgtaggaccatagactggtttgggttggaaggggctttgaaggccatcccgttccaagggcacatgccccgtggaacat

SEQ ID NO: 60176 - DNA, 600 bp, Chicken  19866894319318_2
aagcatgcctgcagcttcacagggcagctgaggtacgtcccttagcccagcaccagcaaggattgatgggcatgggtgggatcttttgagcctcctccaggtgagcagccccagctctcggctctcttcacagcagcaatgctctgggccctgcagcatctaggttggtttgtgttccttccctgcagacccacatccagccagatgcccctgctgccctactgccaggactgctctttgcagttctcrttgagccacacagtgcagaccaagaagaacagcagtactgccccagccagrgcccaacgagacatcttcctccttcgtgggttgcctttttgttttctccctcagtttgtgaaacatgaggaagaaggaagttcagagccagtgttgggtggtgagccaccaagttcccaatgtggctgcttcatgtcatttcaccagggtccccttttaggggtgggatcgtaggaccatagactggtttgggttggaaggggctttgaaggccatcccgttccaagggcacatgccccgtggaacatctagctggaaagcaaagggcatgcacagcccttccatctcttgtgcacccaa

SEQ ID NO: 60177 - DNA, 578 bp, Chicken  19866894319318_3
ttttctccctcagtttgtgaaacatgaggaagaaggaagttcagagccagtgttgggtggtgagccaccaagttcccaatgtggctgcttcatgtcatttcaccagggtccccttttaggggtgggatcgtaggaccatagactggtttgggttggaaggggctttgaaggccatcccgttccaagggcacatgccccgtggaacatctagctggaaagcaaagggcatgcacagcccttccatctcttgtgcacccaaagccagccaggaccagcactgggctgagggggatgtggagytgctgacagcactggtaaggtggggacagagggcaaaaagaaattaggaagtgatttaagaaaagtgagaactggtttcttgtgaggaggaggaagggagagtgaaaggagcaggaacagaaacagggaagagagggcatggagagctcaaggaaatgtccattggaaaaatgctagggtagaaacacaagcagaaagcgagagcaggagagaagcagcttcaggaaatgggaaggaaggtgccagtgactggaaatcaatggccagaaaacaacgag

SEQ ID NO: 60178 - DNA, 600 bp, Chicken  19866894319325_1
ctcacagcttgcttagattttctaggcctgtaaaggctccgttggtgtcttctattgtgcctgagatgtcattgtggtccagttccctggggagaggacaagagaaagctcataatcagtgtctaagtcctagggtcatcactgaaaacaaacataagaaagtctgagaatggcaaacaaagagcttcccactttgtcataacagttatcaaaactagttaagtcctgcagcaaagccacactaatcacttttcaacactacagagtttttccctggctgaaccccccccggttctgagscagtaagctacttttgaaacacgtggggtgtcctcttctaattttgtttatccaaacggaaaaacaaacaaaaaacatacagtcccaaaagtaaacggaaagaactaaagggaactggtagatgagatgaggcagggaatcccctcygtctgcacctaagtctctgatggtgaaatttcaccgcatttggatggtgcccactgaaggcaaaggaaagtactgctcccctttctctctcaatttaaattccgccaggacagagggtgtattaaatctgaacagccaaggtttaacagctgt

SEQ ID NO: 60179 - DNA, 600 bp, Chicken  19866894319325_2
acaaacataagaaagtctgagaatggcaaacaaagagcttcccactttgtcataacagttatcaaaactagttaagtcctgcagcaaagccacactaatcacttttcaacactacagagtttttccctggctgaaccccccccggttctgagscagtaagctacttttgaaacacgtggggtgtcctcttctaattttgtttatccaaacggaaaaacaaacaaaaaacatacagtcccaaaagtaaacggaaagaactaaagggaactggtagatgagatgaggcagggaatcccctcygtctgcacctaagtctctgatggtgaaatttcaccgcatttggatggtgcccactgaaggcaaaggaaagtactgctcccctttctctctcaatttaaattccgccaggacagagggtgtattaaatctgaacagccaaggtttaacagctgtccttaagtactgctatcacgacttcagataayttgcctgttcctatgtctacatgagtttgcctacagctttatcttaggaagacgayggtgtattttctacaaagctgcatttttttctggcaatgaacttgaaagttcaacaaag

SEQ ID NO: 60180 - DNA, 600 bp, Chicken  19866894319325_3
ctcttctaattttgtttatccaaacggaaaaacaaacaaaaaacatacagtcccaaaagtaaacggaaagaactaaagggaactggtagatgagatgaggcagggaatcccctcygtctgcacctaagtctctgatggtgaaatttcaccgcatttggatggtgcccactgaaggcaaaggaaagtactgctcccctttctctctcaatttaaattccgccaggacagagggtgtattaaatctgaacagccaaggtttaacagctgtccttaagtactgctatcacgacttcagataayttgcctgttcctatgtctacatgagtttgcctacagctttatcttaggaagacgayggtgtattttctacaaagctgcatttttttctggcaatgaacttgaaagttcaacaaaggaaagcactatcatcattgcgcaaccaaactctgtataaccattaaaaaggagaagttagaattccttttccagagttagcttcttttggctttcaaattcgccatcaattatgagagtcaaaggggtctgaagaaaaacaagcagacagaacaaacagaaagatccacaaaagctgttcaaaca

SEQ ID NO: 60181 - DNA, 600 bp, Chicken  19866894319325_4
aagtaaacggaaagaactaaagggaactggtagatgagatgaggcagggaatcccctcygtctgcacctaagtctctgatggtgaaatttcaccgcatttggatggtgcccactgaaggcaaaggaaagtactgctcccctttctctctcaatttaaattccgccaggacagagggtgtattaaatctgaacagccaaggtttaacagctgtccttaagtactgctatcacgacttcagataayttgcctgttcctatgtctacatgagtttgcctacagctttatcttaggaagacgayggtgtattttctacaaagctgcatttttttctggcaatgaacttgaaagttcaacaaaggaaagcactatcatcattgcgcaaccaaactctgtataaccattaaaaaggagaagttagaattccttttccagagttagcttcttttggctttcaaattcgccatcaattatgagagtcaaaggggtctgaagaaaaacaagcagacagaacaaacagaaagatccacaaaagctgttcaaacagtctgtttaaaaatccttccctccggtgcttcaattccagctagcactgaataccc

SEQ ID NO: 60182 - DNA, 600 bp, Chicken  19866894319327_1
tataagcagccccaggggatgggctccaagcaggaaactcaaccagaaaaccaccaaccagccaggacaccaacacagcccaggctggatctagatgttcaaccacagtgcacagctacagccatatttcacttcatctctagtttgagagatggcattctgggcttcaactcaagtggcccatgagcacaacaccctgcacacacaactccattgctgctgtacatcttctggtcatgctatggtgggatgtgggcatcagcccccagccaggagccagcccagcgcccttcaattccrtggcactgcagactaattggatgctgcaacaggaatagatgtacagctatcttaaacattcatcaaccttataaaggttaattcattagcctttctgctttgaagacaggttctgctttcacttacacctccgcagagtcatcagctcagaggaggtctcagagatgtaacctgggcaaatcttatcaatgaattcaaatcttgagctaaatcaagaggaggaatggatttagcctaatcccctccaaacatccatcagcatcacctgccagttccgtgggatttaatctccctctaatc

SEQ ID NO: 60183 - DNA, 600 bp, Chicken  19866894319328_1
atagagaacgagtgcatctcgcacagatcagccatgggagcatcgtttgccatcagccccaaaacccaaaggatgctaaaatgcagccaaaggggaatcaagcacgcagggaaggacttgaatcagctcaactggattgaaatggcaaaaggcatgagtagaacgaacgccaaggggatgctggagatccacctcctgtgagcaaattgttcgatgcagccaatggaactattgcttcttgtgcttcagttgctgctgatgtgtacataggctgtagcatatgtaaagttacacgtgtcragctgctcgcaccgcgtagagctaatatgtatcatgtatgtgggcactgaatgccaccgttggccatacccaaccgtcctaaacgattttcacgtcgctgtaacttaagtggagatacactttcagtatattcagcaaaaaagaaaaaagaaaaaagaaaaaaaaaaaaaagaaaagaaagaaagaaaagatatcgggacttggaggcaatgtgtgctttgtgagacacgactgttttgtatatttgtaacggcgcatgcactgcgttttactttccaatatttttctaattgtttgacg

SEQ ID NO: 60184 - DNA, 599 bp, Chicken  19866894319333_1
  misc_feature (1)..(91): n is any nucleotide
nnnnnnnnnnnnnnnnnnnnnnnnnnnnnnnnnnnnnnnnnnnnnnnnnnnnnnnnnnnnnnnnnnnnnnnnnnnnnnnnnnnnnnnnnnnaatcaattatgactttggactctcctataaaacaaccaccagaactaacgagataaatacatatctcaacttatgtaatgttagttgactgcatagaaacatatacaaacttaaattcttactaaaagtacttaaatttacatgttgtaattagtaatctgaatcactaaaatgtatttgtatttataatgcatgaatcaaataaactwaaaacttcctgtgattactgatttcagtaagattctatgtaaagcctctattttttattattattatatcaggactgatcaggacaggatttctcctcaggaattcctgagaccttttagacagagggtcactcacatcacttagactttcacaattcctgctacttatggctacaggcttccatagattaactatagacaacttcacgtggacccaaggactgccatccagctgtttgggaatcactgcagtaaagcattctcagcctttttataaagctcatgctgcccatgatgag

SEQ ID NO: 60185 - DNA, 599 bp, Chicken  19866894319338_1
  misc_feature (1)..(30): n is any nucleotide
nnnnnnnnnnnnnnnnnnnnnnnnnnnnnnatactaaaagctttcttgaagggatccaccattatggcaaatttccaggtgttactaaagctgactgaataaagtacatataacgatttttagttatgaaaaatactttgtttatccagatacttttttttttttaaactctattgatcggaaacatgccagaatgggacataaagggaagacatgtattaaaaaaaaagttaaaaaaaataatcacattttgcattgaactgctggaaaaattcatatggcattagaatagtaaacgaraggaagatggacattaaatatgtaggaaattcatttcctactgaaaaacgtacacaaattatagcaattacagaaaacttgaaggcaatttatgttaacttgtagtaaatgcattagagatgaagtaccactcacatcaaaaggaatgcagtgagactatagtttaatatccagcgctgttaagaaactgagttctactgaaacaaaatggaatgctaatttcataaaaatatatatacatataaaagtttctttgtatctgaattccagaacagtytccccgaagtagtgcttctaga

SEQ ID NO: 60186 - DNA, 600 bp, Chicken  19866894319338_2
atggcattagaatagtaaacgaraggaagatggacattaaatatgtaggaaattcatttcctactgaaaaacgtacacaaattatagcaattacagaaaacttgaaggcaatttatgttaacttgtagtaaatgcattagagatgaagtaccactcacatcaaaaggaatgcagtgagactatagtttaatatccagcgctgttaagaaactgagttctactgaaacaaaatggaatgctaatttcataaaaatatatatacatataaaagtttctttgtatctgaattccagaacagtytccccgaagtagtgcttctagaacttcaagttttaattatattcaaagtatttatcatttagagttggcaaattacattcttatattaacatttttacttgacaccttcctagataggaagygtcactaattcaatgatgggtcactcgtgaacggaaagctgttttgctcccccaggaaagcagcagagtattacaacttcagtattagagcaaaacccatttgttattttgtctacatctttcccatcgccttacagagtaagctagttgaaagtaatttggcagaaaagaaaaaaaa

SEQ ID NO: 60187 - DNA, 600 bp, Chicken  19866894319338_3
ttgtagtaaatgcattagagatgaagtaccactcacatcaaaaggaatgcagtgagactatagtttaatatccagcgctgttaagaaactgagttctactgaaacaaaatggaatgctaatttcataaaaatatatatacatataaaagtttctttgtatctgaattccagaacagtytccccgaagtagtgcttctagaacttcaagttttaattatattcaaagtatttatcatttagagttggcaaattacattcttatattaacatttttacttgacaccttcctagataggaagygtcactaattcaatgatgggtcactcgtgaacggaaagctgttttgctcccccaggaaagcagcagagtattacaacttcagtattagagcaaaacccatttgttattttgtctacatctttcccatcgccttacagagtaagctagttgaaagtaatttggcagaaaagaaaaaaaagtcaacaacaagacgaactaggttttcggtttccgatgggaggtttactggtatctgtttgaataaaatgatccgatctatcttcagaggctagaactcttctaacagcttcttcaaaggct

SEQ ID NO: 60188 - DNA, 599 bp, Chicken  19866894319340_1
  misc_feature (1)..(28): n is any nucleotide
nnnnnnnnnnnnnnnnnnnnnnnnnnnnaacctctgtcatcccattacacacatctctgtgttctgtcaagttaacttcaatattctgctttagtgagaagtacaggaagtcctaaagaacccaagtaattcagaacaatgtcactggatctatttgtttaagatctatatccacatacagatctatttatttatatctatttaagccagtgtctgggtgagttgattttccctgccaacctgcagcttatttccaaagagatcagcatgtctggatgacaaaaggaagcgtgaatggayggttgttaagcttgtgtcactagaattgaggtgacaggcccattggtgctgtcagctaggtatgtctatcagttaaggcctctgcagtctcagagggagtctgtcttcagagcaaaactaacagaatctgtaatgattaagcctctgygtttgtaggggttgacccaaggcaaagctccacccttacagarataaaacttcatgatgctttgcgctatgcttggctcctcagtcacaagtggcttcaccttacaaatgaatgctatcatacaacttccagctgagaaaagtaaatataa

SEQ ID NO: 60189 - DNA, 600 bp, Chicken  19866894319340_2
atctatttgtttaagatctatatccacatacagatctatttatttatatctatttaagccagtgtctgggtgagttgattttccctgccaacctgcagcttatttccaaagagatcagcatgtctggatgacaaaaggaagcgtgaatggayggttgttaagcttgtgtcactagaattgaggtgacaggcccattggtgctgtcagctaggtatgtctatcagttaaggcctctgcagtctcagagggagtctgtcttcagagcaaaactaacagaatctgtaatgattaagcctctgygtttgtaggggttgacccaaggcaaagctccacccttacagarataaaacttcatgatgctttgcgctatgcttggctcctcagtcacaagtggcttcaccttacaaatgaatgctatcatacaacttccagctgagaaaagtaaatataaacgtgggacccccttcacgtccatttcgttgccataaaagcagcaatcacacatcagagatggaatttgtgcaaagcctttctcattaacttagcaattgtagccaactgaatgccacagccggaaagaaatatttcaatgtataaaca

SEQ ID NO: 60190 - DNA, 600 bp, Chicken  19866894319340_3
ttatatctatttaagccagtgtctgggtgagttgattttccctgccaacctgcagcttatttccaaagagatcagcatgtctggatgacaaaaggaagcgtgaatggayggttgttaagcttgtgtcactagaattgaggtgacaggcccattggtgctgtcagctaggtatgtctatcagttaaggcctctgcagtctcagagggagtctgtcttcagagcaaaactaacagaatctgtaatgattaagcctctgygtttgtaggggttgacccaaggcaaagctccacccttacagarataaaacttcatgatgctttgcgctatgcttggctcctcagtcacaagtggcttcaccttacaaatgaatgctatcatacaacttccagctgagaaaagtaaatataaacgtgggacccccttcacgtccatttcgttgccataaaagcagcaatcacacatcagagatggaatttgtgcaaagcctttctcattaacttagcaattgtagccaactgaatgccacagccggaaagaaatatttcaatgtataaacaaaatgctatggaaagaatgagtgtgatactctctctctgttta

SEQ ID NO: 60191 - DNA, 600 bp, Chicken  19866894319342_1
tgtggtgcggtgtactgacacctctgccaggaaggcacagatgtgactgcgctttggcaaatcttccagctgattcttacagcttagcacaggtggttgaaagcctcgtctgcaccccacatctgtgctgtccccaggaaatggactgagatcgcccttaatcgaatctcttcccggagcagtctgttaccgcagtcgttacacagaagataaggttctaaccgagttatgcctgagagctgcacgatgtaattacggatgtaacattgcttctggaagagaagcagagatcgtttgtcygcccctcgtccctctgggtgctgcagaaagcagtgccatgcagtgccagggcaggtgggctgcagtggggcaatgacagcacctgtacctgcagcacaggcagttacagccaatccaaatgtcaagtcaaatgctagcgtcataaaaatccctagcaggagcattaggtatgatgggtaatttaaagcaggattggaatattatctgtattattatctctctggatggcacatggaagaaaatgacatttctgctgttcccagagtgagattttactctcaggacaggtaggagtttcca

SEQ ID NO: 60192 - DNA, 600 bp, Chicken  19866894319348_1
ctggctgaattcatcagtgcctcacagattagaaaagaaactgataacatttctgagctaatcagtgtgtgaaatgaaaaacttgaaggaatggcacagagtaaaaaaaaaactgctaaaattagttgggaataaatactttgtgggtagttgtcagataggggttcaacatctgtatggtgtttctccagttgtgttctgcctagaaatattcagtatctttttaagaaaatggtattacaaacaaagagtaattaatattttctacttccttaatcttatgtgtgtgggatgagaacstctgtcaggcttctctgtgccactgtgataaatatatctcaactgggataggaggccacttggattctcatgtgaaggggctgatgtgtgtaggcctcacaccaaagaatgaatagtatactgtctaaagtaaagatatagaggcctgaaaattatgaaagcatatataaattaattgttatagcaaggtaaccaacatacataagttgaaaacatcagtgataagcatgtagacaagggatcagtgagcaacatagtctacacaagacacctgctatattgtatgaaggatgcaaatct

SEQ ID NO: 60193 - DNA, 600 bp, Chicken  19866894319356_1
cacaaatgattattttcacacatctacagagtgcaactcaactctctcctgcatttaaaatactcggaaatacttcagcaggataaagtagcattaaatctatttttgtgactggcaagttctaatggcatgatttgaagaaacaagagatggcctgaaaaggtcttttaaaagttacactggaccactttaataaacagatttagaggtgctctaaattgttcaagatacctgtctattctgatacaagaacacagtattgaatttttcaatccatcagtgtttagtttctgatcgtcratttgcattaacaagctctagattgacatgttcatttctctactttatgtatctgaattttagtgtttttgcagtttttcattcattttatacgaaagtgaaatttcttgaaagatgcaataactaaggagtttactcaccatcttattggcctaaatcagtataataaagccaatggaaataaacctgcatacttttgtatcctttcagctgaattattcaatattgcagcttctctcaaactgtccattaaaagaagctctaattatgttagctattcagagctttttaatcttatta

SEQ ID NO: 60194 - DNA, 600 bp, Chicken  19866894319364_1
gtaattctctaaggataagtagtttgggcaggtgctttaccagctcacctagggaagcaatattgcatccttcaactactggattaggcagcccatacaatacagctcagctacttgtaagctttaattctgtccttcatagaatacttcagtagcgcactgaacttccccctgtgcttgaagctatctagccacaccgcatctccttgctcagccagagctaaagacaacagattctagaaaccaaaagcaatcattgagagcctttgccaccatggaactcatctccaaaaaaaaaawawgcactcttattcagtcactttcttctctttgtgactggcaatggctataagtgtggaccatccaaccttgcctgcctgtgatcttcacccacacatgctctatcctttctacagttttctatctccacctgatcttctccccagagcattacaaacaccaccaactgattcttcacttctaatgactagacacagtggatggtttccaggtcatacacagctgaagacagacaaaattaagccctgggttaattttaatttagctctatagatgtgagtactgctatggacagatgtc

SEQ ID NO: 60195 - DNA, 600 bp, Chicken  19866894319364_2
aattctctaaggataagtagtttgggcaggtgctttaccagctcacctagggaagcaatattgcatccttcaactactggattaggcagcccatacaatacagctcagctacttgtaagctttaattctgtccttcatagaatacttcagtagcgcactgaacttccccctgtgcttgaagctatctagccacaccgcatctccttgctcagccagagctaaagacaacagattctagaaaccaaaagcaatcattgagagcctttgccaccatggaactcatctccaaaaaaaaaawawgcactcttattcagtcactttcttctctttgtgactggcaatggctataagtgtggaccatccaaccttgcctgcctgtgatcttcacccacacatgctctatcctttctacagttttctatctccacctgatcttctccccagagcattacaaacaccaccaactgattcttcacttctaatgactagacacagtggatggtttccaggtcatacacagctgaagacagacaaaattaagccctgggttaattttaatttagctctatagatgtgagtactgctatggacagatgtcag

SEQ ID NO: 60196 - DNA, 600 bp, Chicken  19866894319364_3
acagaacctgtatttcatagaatattcctatgtatttactgttaatcccctggctgatcattttttcactgctttaaagtcacggaaagatttttactcagttcaccaggaagcagtgcagtgggaaaggaaagattacctctttaattgcttttattccggtgcttacatgtatgcatcatcaccacctaaaagcacgcgtataaactgcaacaacaattcaaatgctgtttcaagcagtgctaaacaatgtgcttaaatccaggccctgtgacaaacagcacacaaagcgagataacrctgaagtgtttgtgaaagcagtctgcacaggtatgcacacccaggaccctgagaaggaatgagcctttgcactgtgctgtgaagggctgtatagcagatagtaaaaggcatattttcaattacaagtgtaacagcaagctattgaggcacctggtcaacatttgcatctcctaactcagtttaaatgatttatagaagagtagaatcattacagttgcaaaagaccactgagatcatctagcccaaccatcggcccatcacctccatgctcatgttttaaactcrttgagtcaaacctca

SEQ ID NO: 60197 - DNA, 600 bp, Chicken  19866894319364_4
caaagcgagataacrctgaagtgtttgtgaaagcagtctgcacaggtatgcacacccaggaccctgagaaggaatgagcctttgcactgtgctgtgaagggctgtatagcagatagtaaaaggcatattttcaattacaagtgtaacagcaagctattgaggcacctggtcaacatttgcatctcctaactcagtttaaatgatttatagaagagtagaatcattacagttgcaaaagaccactgagatcatctagcccaaccatcggcccatcacctccatgctcatgttttaaactcrttgagtcaaacctcagttgacatcaaacattggggatggtatcaatactgtgcttctccactttgaccgctctaaaaggctgaggcagcttaatagtttgattacacaaatggcgtgcggagctttggtatgtaacgtattttagtcctgatctttgttaagatagatttatatttaggatgcatcagctgacttagaaaacatctagagtcaggcggtttcgctggcattaaccaaaatattgagtaaattatggaatcgataaaattgccaagatttgtacttttcaaaactagttgc

SEQ ID NO: 60198 - DNA, 600 bp, Chicken  19866894319376_1
cactgcttgtcgtgtcttgtaatgtttcctgagcaagatgctgcttttcatatcctaggttctggagcacgcactcctgagctgtgccctgctgggtacttctgtctgccaggtaccaacttcagtacagagcatccatgtccaaagggtacctttggccccaggactggtgccaccagcgactctgactgtgagccctgcccagcaggtaaggaaggacttggcacaaaaaaaacctgagggcatacgtggaaaggtggaggaaaacatgacttctcctttcaggttattgactccttyrcttatcttctgtgctggccatttcaatgagatcacttttctgtttgttttaggcatgtattgctcagcaccaggtctttcacagccctctggattttgctattcaggttatcattgtgccaagggagccatcagcccaacccctttcaaacacagggtgagtgagcgctggcaaacagcacagtaaaccttgcatcctgaggacaaggactggggcaatcaccatgtcatggcttctggtgtcatgttttccaagccttactgctttgcacagcattgctcttccccactgctgctgcc

SEQ ID NO: 60199 - DNA, 600 bp, Chicken  19866894319376_2
actgcttgtcgtgtcttgtaatgtttcctgagcaagatgctgcttttcatatcctaggttctggagcacgcactcctgagctgtgccctgctgggtacttctgtctgccaggtaccaacttcagtacagagcatccatgtccaaagggtacctttggccccaggactggtgccaccagcgactctgactgtgagccctgcccagcaggtaaggaaggacttggcacaaaaaaaacctgagggcatacgtggaaaggtggaggaaaacatgacttctcctttcaggttattgactccttyrcttatcttctgtgctggccatttcaatgagatcacttttctgtttgttttaggcatgtattgctcagcaccaggtctttcacagccctctggattttgctattcaggttatcattgtgccaagggagccatcagcccaacccctttcaaacacagggtgagtgagcgctggcaaacagcacagtaaaccttgcatcctgaggacaaggactggggcaatcaccatgtcatggcttctggtgtcatgttttccaagccttactgctttgcacagcattgctcttccccactgctgctgccc

SEQ ID NO: 60200 - DNA, 600 bp, Chicken  19866894319377_1
atggtttgcatactgcagtgattgagaggccaaagaatggtgagaacagttttgttatctgatgtgaaaacaaaggctttaacactcctaatccatactgaatattgcgagtggaaatatattcagctttgatctgtgacattacttcttggaaccacaaatcacatgtggacatggttattatagctggtggaaaactagcctcagattgcagtgcagtcagagatggtgatatgcaaactgtcttcaaatgaatgtaaggatattgcataatgtaataagggttgccataaaaaattstactctcaagtagaacgtgacatccatttgtcattgacaaaaagagtaaagcttccagcttccacacaacagtgctggtagttgtttaagctttctagagtctaatctccattagagtttgtggcccygttccaaagtaggtgagctgtaaaggttggccactactcatgtaaattgtgctcgtgtccgtccttgggtaaaggacagggattgttcttgagtccaaaagtgttttgtccttgctcttgcaggccagtgaactcctggtaaattggttactgtatttctttgttgagcact

SEQ ID NO: 60201 - DNA, 600 bp, Chicken  19866894319377_2
ttgatctgtgacattacttcttggaaccacaaatcacatgtggacatggttattatagctggtggaaaactagcctcagattgcagtgcagtcagagatggtgatatgcaaactgtcttcaaatgaatgtaaggatattgcataatgtaataagggttgccataaaaaattstactctcaagtagaacgtgacatccatttgtcattgacaaaaagagtaaagcttccagcttccacacaacagtgctggtagttgtttaagctttctagagtctaatctccattagagtttgtggcccygttccaaagtaggtgagctgtaaaggttggccactactcatgtaaattgtgctcgtgtccgtccttgggtaaaggacagggattgttcttgagtccaaaagtgttttgtccttgctcttgcaggccagtgaactcctggtaaattggttactgtatttctttgttgagcacttaagtcttgtgaagtgtattctcttcctcttccacatttgtaggggaaaaaagttggtctcaaaaaacataccttgcagagcatctcaggtgttacccagagttttggtgcacgtggaaaagtgactt

SEQ ID NO: 60202 - DNA, 600 bp, Chicken  19866894319378_1
ttcaccctccagcgccttccaaaggcattttcaaggaaaatctgaacgctgcagaggcttccaaagttaaacagacataagaacgtcttcattatgctgcaggagatcacaggtattttcaaagcttccaggaaacaaaagcccaaacaaaacaacacaaggctttcctccccctcctgggtgaggaagagccctgaggcacagccaggtttgctggctgctggtgacaaagccaggcaccgtggctccaattccctttgcacagtccccagcaggagatgcttcatggagggctacgcrcaaactctcaagccctcacgtcgggttgggagcccggctgcagaccagagggtgcccttaggtcagcaggcagctggacagtggcattccttcccccgtggcgcatcaccagtgcagtgcttcagacaggcacttagtgctgtttaacattttccaggaaaaaaaagaaaaaaaaaaaaaattgatcaatattctcaactggctcaagtgctcgtatcttcaagggaaggaggagaggaaatgctaagagggatgagagagggaaaaaaagtgttttcaaatgaaatgaggaacgtgagg

SEQ ID NO: 60203 - DNA, 599 bp, Chicken  19866894319380_1
  misc_feature (1)..(45): n is any nucleotide
nnnnnnnnnnnnnnnnnnnnnnnnnnnnnnnnnnnnnnnnnnnnnggtttgatctgttctggggacgactgatttgtcttgtccagcagagttctggaaaaataggttcagcaggcagtgagttctatttcttgctctaacatgtggctttatttttaaaatactgtttgttgataggaagtgtcacatccccagcgggatcgaaggcgtctctccagtgcatcctccagtggacagtggtccccaactcctgactgggtgaggaaatctgaacagatgaaataaataacaaggaagagytgtggcagaaattacttctgctccacccacaaccctcttccctgttcttttttttaatttaccttcctttttttccaaagcagagacttgccctgagtaacacatttctttgggagtatctttgacttctggtcaaagcctcagaagtgtatgatcagctgcaaagaagtattttgttttatttgtgttaagccgatgcctggtagttccattgagtggctctgaattctattgctccaggatttattgtactgctgttgcattctcaactcacccatcacctttaggatttttgtgaa

SEQ ID NO: 60204 - DNA, 600 bp, Chicken  19866894319385_1
acctacttggtgtttcttcaagaatttcctggaattttgttctttcatagtccaccaaattacgccgaaggtacggtctaaggctttgaattgtgtaatttgctacatccattttcatcaggtccaggacatggaagatttgcctgaaagaagagacagtttaaaataagacagctagaacagtccattgattttaatcagtagaagtgaggcacaccttcattagcactgtaatccccatattggtgaaggattctccttccttgttatttaaatgtagcagtcacaatgttatttttyttattctgaatacttgaagtaagcatgcaataaaaagttcaaggaagaatgaatatgccttctgtattttgagagaatgaacaagactgaaacagcagtctcagaaacattatttcaagtggtggtggtgttgctgtttaatgtttaactactcagagtcagtagttttaaatcaggcattctactcattgcattaggatagacattacattccagccacagaacgttgtagcaattgcctcttgcctttaatgcttctgctgtgcaagttttcttacaattagagaacaattaaaaaat

SEQ ID NO: 60205 - DNA, 600 bp, Chicken  19866894319389_1
agaaataccttgctttaaaccaaagttggagcaattaatgacttaggtcttacattggtcagtccagccacggatatacacaaggcaaaattgcattcatggatgtataaaaggagtaatgattattctgtgataatttagagggaaactgttgtgcagtgtaattcattaacagcagcaaacattgggctcaattgtatgctttgaattttgcacacaagattatcacaaaaatcttggatagaggtgtgcagtccactaagtctacgtcaaggatttcactgactctgaagcgctttyractcccccataagtccttctgtctctctgtggttcgacttctatggctcaaacttactgaaacttggaacttgttgaaactttgaccgtgttcaacaacatgtaaaaccaaaatactttctcccatataatcatcaagttccaaaccccagccacaggcacggccaccaacccccagatctggtactagaccaggttgcccatggctccatccaatgtctgaagcttaacacaggtagactggaaattcatggatttcaatatgtaggatttaaagccaaatttttagatcaataagct

SEQ ID NO: 60206 - DNA, 600 bp, Chicken  19866894319389_2
gaaataccttgctttaaaccaaagttggagcaattaatgacttaggtcttacattggtcagtccagccacggatatacacaaggcaaaattgcattcatggatgtataaaaggagtaatgattattctgtgataatttagagggaaactgttgtgcagtgtaattcattaacagcagcaaacattgggctcaattgtatgctttgaattttgcacacaagattatcacaaaaatcttggatagaggtgtgcagtccactaagtctacgtcaaggatttcactgactctgaagcgctttyractcccccataagtccttctgtctctctgtggttcgacttctatggctcaaacttactgaaacttggaacttgttgaaactttgaccgtgttcaacaacatgtaaaaccaaaatactttctcccatataatcatcaagttccaaaccccagccacaggcacggccaccaacccccagatctggtactagaccaggttgcccatggctccatccaatgtctgaagcttaacacaggtagactggaaattcatggatttcaatatgtaggatttaaagccaaatttttagatcaataagcta

SEQ ID NO: 60207 - DNA, 548 bp, Chicken  19866894319389_3
ccccagatctggtactagaccaggttgcccatggctccatccaatgtctgaagcttaacacaggtagactggaaattcatggatttcaatatgtaggatttaaagccaaatttttagatcaataagctaaattaatccacagggtggaaccgctaatgccagtttcttgtaagcaaagatgtgtcatgagcatctgatctcctctctgcacacctgagcggaatccagctctgcaccactgaagacttgcactcttacacagtgacacagtcccgtgtggctcagccatgctgcaggaartgcacgtgagcgattcagaaactatttctaatagtctgaaaaacagagtaaagccattttcttcccatttacttatgtgcacggctcctctcagcagcacagccctagtgcgacctgtgggatcattcacaagatcaagagcatgcaggatcgggtccaagaccacttatgagatgcagctctacatcacgcagacgtttttatcaaaacacatttctcctctttatgtgtttatgaatgcggcccat

SEQ ID NO: 60208 - DNA, 599 bp, Chicken  19866894319392_1
  misc_feature (1)..(83): n is any nucleotide
nnnnnnnnnnnnnnnnnnnnnnnnnnnnnnnnnnnnnnnnnnnnnnnnnnnnnnnnnnnnnnnnnnnnnnnnnnnnnnnnnnntgacaaaatatgataattttctctttttgtaagtgtttcctctgaagttctgaaaactatcaaagccaaatgccattacttaaaacctcatacagaagactgaaatcatttctcaacttttctgctctcatgtttttatcctcttgctttccctcagtgtattgtttcaacactcctttcttcaacatacttctccctaaatcactgtcatatcttyatgggatttcatagtgctaccaataaagaggatttggatcaatgtagtagcatagaacactacaaataagcaagaaataaaagatcaggcagaaaggctgaaacataaggtcttcccctttcttacacatcacaagctgttctgcagttccaccaggagagtacttaatatgaaaaaagagaagacttcaaaacctaaattacttaaaaatgcctgcaaacaaatgaacaaacaaaaatttaaaaaatagcccccattctattatttatcagttggttataaataaatcagtgataccc

SEQ ID NO: 60209 - DNA, 600 bp, Chicken  19866894319392_2
cttacacatcacaagctgttctgcagttccaccaggagagtacttaatatgaaaaaagagaagacttcaaaacctaaattacttaaaaatgcctgcaaacaaatgaacaaacaaaaatttaaaaaatagcccccattctattatttatcagttggttataaataaatcagtgatacccacagctctgtgggtatatcttattcttgtcacttatttgttccagatgttactgctacttaataacagatattaacgggtaaaaataacttaatcttcaaaggtcttttgtctaagtgcctyttctgcaacttgaacaagatcacactcagaaaaggactcagaaaagaaaacagtcaagtgagtaccagcataaacacttgaaatatgcatctgttactactatatcccattatttttccttttgaaaaccaatgctcataaattctgacaactgattaccttaattgctgttattagctttttagaagtttattctatgtaattttaaaattgatcttctccttagtttttgaatgctaattttgaattttgtgaaaaaaataagaagaggaatgacatttcaaatatcttgctgatgag

SEQ ID NO: 60210 - DNA, 600 bp, Chicken  19866894319394_1
cctaatgacactgtttcttcttagactttgctgccctgtgggattattactggaaacttctccagctgctaccagtatcccacctgcatccatgtgggctccatctaccaacaccattgggcaagcatggaacataaagctcctactgtcccggcaggacattcccactatacttccctttgctgatacagacatttggttgcccttcattttaggtttctaagaatctcctcttgccagaataggtcacagacaacttggaggcctggttggcagcttcactggcagatgacatctagrgtaaatcaggttctctgggtctttgccaaggagatcaaaatctagaatggttttgsagtctgttgagctgcattaagttaaccaacaaagtctggggagcaggrctatgtgcccctcttgctgggcagtggagagggtggtgatagggcagcaatagggcttgttcacatataatggatgaacagtttttccatttaaaaaaataaggcayctgtatttatctgcagcagcactttcatagggctgcctgaagcagtattaggactacatcttcgtggaatttactaatcatacataaaa

SEQ ID NO: 60211 - DNA, 600 bp, Chicken  19866894319394_2
cttctccagctgctaccagtatcccacctgcatccatgtgggctccatctaccaacaccattgggcaagcatggaacataaagctcctactgtcccggcaggacattcccactatacttccctttgctgatacagacatttggttgcccttcattttaggtttctaagaatctcctcttgccagaataggtcacagacaacttggaggcctggttggcagcttcactggcagatgacatctagrgtaaatcaggttctctgggtctttgccaaggagatcaaaatctagaatggttttgsagtctgttgagctgcattaagttaaccaacaaagtctggggagcaggrctatgtgcccctcttgctgggcagtggagagggtggtgatagggcagcaatagggcttgttcacatataatggatgaacagtttttccatttaaaaaaataaggcayctgtatttatctgcagcagcactttcatagggctgcctgaagcagtattaggactacatcttcgtggaatttactaatcatacataaaatatatacgttctcctgatactctttaacagcggtgggggcagatggggctgagact

SEQ ID NO: 60212 - DNA, 600 bp, Chicken  19866894319394_3
ctaccaacaccattgggcaagcatggaacataaagctcctactgtcccggcaggacattcccactatacttccctttgctgatacagacatttggttgcccttcattttaggtttctaagaatctcctcttgccagaataggtcacagacaacttggaggcctggttggcagcttcactggcagatgacatctagrgtaaatcaggttctctgggtctttgccaaggagatcaaaatctagaatggttttgsagtctgttgagctgcattaagttaaccaacaaagtctggggagcaggrctatgtgcccctcttgctgggcagtggagagggtggtgatagggcagcaatagggcttgttcacatataatggatgaacagtttttccatttaaaaaaataaggcayctgtatttatctgcagcagcactttcatagggctgcctgaagcagtattaggactacatcttcgtggaatttactaatcatacataaaatatatacgttctcctgatactctttaacagcggtgggggcagatggggctgagactgcacttctttacagcgaggtgggatagggagctctgcctacggaaagg

SEQ ID NO: 60213 - DNA, 517 bp, Chicken  19866894319394_4
ttaggtttctaagaatctcctcttgccagaataggtcacagacaacttggaggcctggttggcagcttcactggcagatgacatctagrgtaaatcaggttctctgggtctttgccaaggagatcaaaatctagaatggttttgsagtctgttgagctgcattaagttaaccaacaaagtctggggagcaggrctatgtgcccctcttgctgggcagtggagagggtggtgatagggcagcaatagggcttgttcacatataatggatgaacagtttttccatttaaaaaaataaggcayctgtatttatctgcagcagcactttcatagggctgcctgaagcagtattaggactacatcttcgtggaatttactaatcatacataaaatatatacgttctcctgatactctttaacagcggtgggggcagatggggctgagactgcacttctttacagcgaggtgggatagggagctctgcctacggaaaggctcaagaaccattaccataacagg

SEQ ID NO: 60214 - DNA, 525 bp, Chicken  19866894319399_1
tagaaatagacgtggccctttgctatctgtgcagataaggtgatttgtagcagctgaagtgttgtcttcaggagcagatgtacaagtgagaaggtatgttagtcatatggatttctggtagctaaagggagatacccgccatggaattcaaagggcacttcaagcattctatggctctctggagataaatgtagtttttgcatctgataagccagttctgaaactcagatttccactttggcattcattaacctacagttcagcagcttttatcatagaatggcctgggttgaaaaggascacaatgctcatccagttccaaccccctgctatgtgcagggtcrccaaccagcagcccaggctgcccagagccacatccagcctggccttgaatgccctgcaggggatggggcatccacagcctcctygggcaacctggttcagtgcgtcaccgcccttctgtgttttatatctgacccaggctataaaatgagttctttatgttacgcttcgctttcaaaaaga

SEQ ID NO: 60215 - DNA, 481 bp, Chicken  19866894319399_2
ttgtagcagctgaagtgttgtcttcaggagcagatgtacaagtgagaaggtatgttagtcatatggatttctggtagctaaagggagatacccgccatggaattcaaagggcacttcaagcattctatggctctctggagataaatgtagtttttgcatctgataagccagttctgaaactcagatttccactttggcattcattaacctacagttcagcagcttttatcatagaatggcctgggttgaaaaggascacaatgctcatccagttccaaccccctgctatgtgcagggtcrccaaccagcagcccaggctgcccagagccacatccagcctggccttgaatgccctgcaggggatggggcatccacagcctcctygggcaacctggttcagtgcgtcaccgcccttctgtgttttatatctgacccaggctataaaatgagttctttatgttacgcttcgctttcaaaaaga

SEQ ID NO: 60216 - DNA, 397 bp, Chicken  19866894319399_3
gagatacccgccatggaattcaaagggcacttcaagcattctatggctctctggagataaatgtagtttttgcatctgataagccagttctgaaactcagatttccactttggcattcattaacctacagttcagcagcttttatcatagaatggcctgggttgaaaaggascacaatgctcatccagttccaaccccctgctatgtgcagggtcrccaaccagcagcccaggctgcccagagccacatccagcctggccttgaatgccctgcaggggatggggcatccacagcctcctygggcaacctggttcagtgcgtcaccgcccttctgtgttttatatctgacccaggctataaaatgagttctttatgttacgcttcgctttcaaaaaga

SEQ ID NO: 60217 - DNA, 600 bp, Chicken  19866894319402_1
agtttccaatttagaaatacagtatggactggctgtttactttgtgcaaggtcactcaaaacctgagttggcattttgctgatttcccaggctctgcaaatatcaaggtcaggttaggcttttattactttcttggagtaatctgtgcttcctttcttgttgtgttttatgtgtgtttttacacgcccattaaaatgtacgatttgtgtgtctgagctggaagcactatgtaagctcacatctcccctagctcacactgctcttgcagtgtttcttttagaagtgtaagtagaagcagcraaagcacaagtagagaaataactgctgaaacttctggatgaccggattagaagtttgcactaggaaggtgaatttcagtttatgaatgaaaggctcgattcttcttagtaagcagaaagcaaggttaccacgtatgctgcttcaagtaaataggcttagtttcatcacaattaagtcaagctgcatccctcaagtaaaccttaagggaagttctgcctcgcttaattgaaatctaccggtgtcagggggaaatcttgtgaaggttattcatagagaaatttggagctaagtccttgtttg

SEQ ID NO: 60218 - DNA, 445 bp, Chicken  19866894319402_2
ggcttagtttcatcacaattaagtcaagctgcatccctcaagtaaaccttaagggaagttctgcctcgcttaattgaaatctaccggtgtcagggggaaatcttgtgaaggttattcatagagaaatttggagctaagtccttgtttgggtcatatgctccatgtgaaaaagccattcaagaagctcacagggcagacgccgcatggaaatccaggctgcaaaaaaacagaagcatcaaatcttttctttgcagcagatgccccagatgctcatctcttggtggtgtttgcacaaggggytgaggccactttgggagcacacatcagccctttcaggatgttgagcagtgcggccatggtttgatctcactgagaatgaagtggtggtgctgctttgggggagggctcttttggaagccagttgtagatgtgtgcaagtttctga

SEQ ID NO: 60219 - DNA, 599 bp, Chicken  19866894319417_1
  misc_feature (1)..(132): n is any nucleotide
nnnnnnnnnnnnnnnnnnnnnnnnnnnnnnnnnnnnnnnnnnnnnnnnnnnnnnnnnnnnnnnnnnnnnnnnnnnnnnnnnnnnnnnnnnnnnnnnnnnnnnnnnnnnnnnnnnnnnnnnnnnnnnnnnnnnccaccccgcttttcatgggaaataagcaatgcagccagccaggcaggtcagcaaatccaactgaggtaaggtgtgatggaggaatgaaacagaagatgcaggatgtgaaatagttccactcacctgtctcagaaaccggttattcacaaggtcaacaacaaggacctragaatgagagagaaagaatgaaagcggtacgtcactacttccgtcaacagagtttatcttcatctacaactrgtctggaggaaacacttgagccctggccctgctcctcctaaccactgcggcagytggaggcagcacccagggtgagccaagaggagcccttgttgtggctttctagcagcttcaccactaaccacaaagcagcctgggtaagaagascctgccatcccagccccrtccatcactcctcrctgcctcagctctgccatttcaagcaaaattcatacgtgctcagcagc

SEQ ID NO: 60220 - DNA, 599 bp, Chicken  19866894319417_2
  misc_feature (1)..(60): n is any nucleotide
nnnnnnnnnnnnnnnnnnnnnnnnnnnnnnnnnnnnnnnnnnnnnnnnnnnnnnnnnnnnccaccccgcttttcatgggaaataagcaatgcagccagccaggcaggtcagcaaatccaactgaggtaaggtgtgatggaggaatgaaacagaagatgcaggatgtgaaatagttccactcacctgtctcagaaaccggttattcacaaggtcaacaacaaggacctragaatgagagagaaagaatgaaagcggtacgtcactacttccgtcaacagagtttatcttcatctacaactrgtctggaggaaacacttgagccctggccctgctcctcctaaccactgcggcagytggaggcagcacccagggtgagccaagaggagcccttgttgtggctttctagcagcttcaccactaaccacaaagcagcctgggtaagaagascctgccatcccagccccrtccatcactcctcrctgcctcagctctgccatttcaagcaaaattcatacgtgctcagcagcctttctgggccagaagacagctgagcctgcgggaagaaacactgctgagcatggctcacctcctctactggg

SEQ ID NO: 60221 - DNA, 599 bp, Chicken  19866894319417_3
  misc_feature (1)..(6): n is any nucleotide
nnnnnnccaccccgcttttcatgggaaataagcaatgcagccagccaggcaggtcagcaaatccaactgaggtaaggtgtgatggaggaatgaaacagaagatgcaggatgtgaaatagttccactcacctgtctcagaaaccggttattcacaaggtcaacaacaaggacctragaatgagagagaaagaatgaaagcggtacgtcactacttccgtcaacagagtttatcttcatctacaactrgtctggaggaaacacttgagccctggccctgctcctcctaaccactgcggcagytggaggcagcacccagggtgagccaagaggagcccttgttgtggctttctagcagcttcaccactaaccacaaagcagcctgggtaagaagascctgccatcccagccccrtccatcactcctcrctgcctcagctctgccatttcaagcaaaattcatacgtgctcagcagcctttctgggccagaagacagctgagcctgcgggaagaaacactgctgagcatggctcacctcctctactgggagctccttcaggcggggcagggagctggagagcaggccgatgaggaacggggtg

SEQ ID NO: 60222 - DNA, 600 bp, Chicken  19866894319417_4
aacagaagatgcaggatgtgaaatagttccactcacctgtctcagaaaccggttattcacaaggtcaacaacaaggacctragaatgagagagaaagaatgaaagcggtacgtcactacttccgtcaacagagtttatcttcatctacaactrgtctggaggaaacacttgagccctggccctgctcctcctaaccactgcggcagytggaggcagcacccagggtgagccaagaggagcccttgttgtggctttctagcagcttcaccactaaccacaaagcagcctgggtaagaagascctgccatcccagccccrtccatcactcctcrctgcctcagctctgccatttcaagcaaaattcatacgtgctcagcagcctttctgggccagaagacagctgagcctgcgggaagaaacactgctgagcatggctcacctcctctactgggagctccttcaggcggggcagggagctggagagcaggccgatgaggaacggggtgggcgagcacacaatgtcgatcatggaaggcggcagcacagggatgttaggtgtgctgccaggtgaaggggtacaggagggccactgtagcatgg

SEQ ID NO: 60223 - DNA, 600 bp, Chicken  19866894319417_5
tgaaatagttccactcacctgtctcagaaaccggttattcacaaggtcaacaacaaggacctragaatgagagagaaagaatgaaagcggtacgtcactacttccgtcaacagagtttatcttcatctacaactrgtctggaggaaacacttgagccctggccctgctcctcctaaccactgcggcagytggaggcagcacccagggtgagccaagaggagcccttgttgtggctttctagcagcttcaccactaaccacaaagcagcctgggtaagaagascctgccatcccagccccrtccatcactcctcrctgcctcagctctgccatttcaagcaaaattcatacgtgctcagcagcctttctgggccagaagacagctgagcctgcgggaagaaacactgctgagcatggctcacctcctctactgggagctccttcaggcggggcagggagctggagagcaggccgatgaggaacggggtgggcgagcacacaatgtcgatcatggaaggcggcagcacagggatgttaggtgtgctgccaggtgaaggggtacaggagggccactgtagcatggcagcacttggaaaagggt

SEQ ID NO: 60224 - DNA, 600 bp, Chicken  19866894319417_6
tcacctgtctcagaaaccggttattcacaaggtcaacaacaaggacctragaatgagagagaaagaatgaaagcggtacgtcactacttccgtcaacagagtttatcttcatctacaactrgtctggaggaaacacttgagccctggccctgctcctcctaaccactgcggcagytggaggcagcacccagggtgagccaagaggagcccttgttgtggctttctagcagcttcaccactaaccacaaagcagcctgggtaagaagascctgccatcccagccccrtccatcactcctcrctgcctcagctctgccatttcaagcaaaattcatacgtgctcagcagcctttctgggccagaagacagctgagcctgcgggaagaaacactgctgagcatggctcacctcctctactgggagctccttcaggcggggcagggagctggagagcaggccgatgaggaacggggtgggcgagcacacaatgtcgatcatggaaggcggcagcacagggatgttaggtgtgctgccaggtgaaggggtacaggagggccactgtagcatggcagcacttggaaaagggtgctggaagacaaag

SEQ ID NO: 60225 - DNA, 600 bp, Chicken  19866894319420_1
aagctttagggatttctttcacaataattccccagatctcattcttggtcattacagtgcagctgattgccactaagcagatagttcctgctttttattctttgctttcagactcataattctgtgcttatctgcactgaacttcatttgcatttattagctgtgttggtatttaaaatatttgctctaagaccttctttatctgtctgcattgtttcttactatttgctgtctctcccaatttaactttaaacgcaaactccaaatgtttgttccaaatggttgtccaaattctctgcrtaaaacattgagtgcagatcccttcctaattcccagttaccaaattctttctatctgagagtttgtgtttttcaacttgtacttctttgtctctgtacagctccaggtggctccaacttcttgttcttcctttcctcccttcctgctggatatagatctctgttatggtgcttggcagcgtggaactgcttctcaatcctaccaacacattcactcctccctgaaaacacctgctttgtcttccccatatgtcagagtgagagtgttgtctgtgcatttgggcttcaacactgccaggag

SEQ ID NO: 60226 - DNA, 600 bp, Chicken  19866894319420_2
tgtcagagtgagagtgttgtctgtgcatttgggcttcaacactgccaggagctgatgtataccttctggagatggaaagaaacaccctgactgtgtctgggttgaggattctcacgtagtgccatcattgctccttatgtttctgtctgatctcagagggaatctgaatagtgaaagcaccccctgatatgtaggtgcagtcagaacacccagtctgcttccagcttgtggttctggcattggcttccatgatttcaagcagataaattcctgtcctctctgggaggtggccagtgccakacagaggtgccaaaatttggctatttgaggagtaataagatagctcttgcctgtagccacaactttagtatctcttgttctctttctcatcagaaatcccttattattttgagattactggtgctgtcaaacctgacagacctcctgaaatgaagtgggaaagcccagagccccaggtggtgcagggtatcagcactaatatccaggccttatggataatatccaggccttgtggaagtgcatatgtgtgcagtacttttggcaatggttatcacaagctcttttcatctgagccaatta

SEQ ID NO: 60227 - DNA, 599 bp, Chicken  19866894319427_1
  misc_feature (1)..(115): n is any nucleotide
nnnnnnnnnnnnnnnnnnnnnnnnnnnnnnnnnnnnnnnnnnnnnnnnnnnnnnnnnnnnnnnnnnnnnnnnnnnnnnnnnnnnnnnnnnnnnnnnnnnnnnnnnnnnnnnnnnngagacacagagacattgcaggacacaagggggatgagaaggggatatgggtatatggggacgtggagatatgggacatgggcttgatggaggcactggggacatgatgggcacagggacattgggactttggaggacatgggtatatgggggacatgaggacagagggatatggggatgtggagrgacacagtggcctaggggatgtggggacactgggagacrtgtaagaacatggagggacattgggatactgggggacttgggatgtgaggaacatgggggacatggagggactaacaaacttagaggatatgggaactttgaagagcatggagaacaytgggggaatgtgggaacatggagggacrtagaataatgagggacatagagactgggacagtggggwcactgggggaacatgggcagcacaccatggtgacaatgtccttgtttctcaggtagggaccatcctcaagcacctc

SEQ ID NO: 60228 - DNA, 599 bp, Chicken  19866894319427_2
  misc_feature (1)..(76): n is any nucleotide
nnnnnnnnnnnnnnnnnnnnnnnnnnnnnnnnnnnnnnnnnnnnnnnnnnnnnnnnnnnnnnnnnnnnnnnnnnnngagacacagagacattgcaggacacaagggggatgagaaggggatatgggtatatggggacgtggagatatgggacatgggcttgatggaggcactggggacatgatgggcacagggacattgggactttggaggacatgggtatatgggggacatgaggacagagggatatggggatgtggagrgacacagtggcctaggggatgtggggacactgggagacrtgtaagaacatggagggacattgggatactgggggacttgggatgtgaggaacatgggggacatggagggactaacaaacttagaggatatgggaactttgaagagcatggagaacaytgggggaatgtgggaacatggagggacrtagaataatgagggacatagagactgggacagtggggwcactgggggaacatgggcagcacaccatggtgacaatgtccttgtttctcaggtagggaccatcctcaagcacctcttccctgttccccggccccagacccgccgcgtggtgact

SEQ ID NO: 60229 - DNA, 600 bp, Chicken  19866894319427_3
gatatgggtatatggggacgtggagatatgggacatgggcttgatggaggcactggggacatgatgggcacagggacattgggactttggaggacatgggtatatgggggacatgaggacagagggatatggggatgtggagrgacacagtggcctaggggatgtggggacactgggagacrtgtaagaacatggagggacattgggatactgggggacttgggatgtgaggaacatgggggacatggagggactaacaaacttagaggatatgggaactttgaagagcatggagaacaytgggggaatgtgggaacatggagggacrtagaataatgagggacatagagactgggacagtggggwcactgggggaacatgggcagcacaccatggtgacaatgtccttgtttctcaggtagggaccatcctcaagcacctcttccctgttccccggccccagacccgccgcgtggtgacttttgccaacgaagatgacgtcatccttgtccggtgggaatgcagggtgacgtggctgggacagggacactggggaggatgtcacgtgtactttggggatgttggagkcactggggatgt

SEQ ID NO: 60230 - DNA, 600 bp, Chicken  19866894319427_4
tgggacatgggcttgatggaggcactggggacatgatgggcacagggacattgggactttggaggacatgggtatatgggggacatgaggacagagggatatggggatgtggagrgacacagtggcctaggggatgtggggacactgggagacrtgtaagaacatggagggacattgggatactgggggacttgggatgtgaggaacatgggggacatggagggactaacaaacttagaggatatgggaactttgaagagcatggagaacaytgggggaatgtgggaacatggagggacrtagaataatgagggacatagagactgggacagtggggwcactgggggaacatgggcagcacaccatggtgacaatgtccttgtttctcaggtagggaccatcctcaagcacctcttccctgttccccggccccagacccgccgcgtggtgacttttgccaacgaagatgacgtcatccttgtccggtgggaatgcagggtgacgtggctgggacagggacactggggaggatgtcacgtgtactttggggatgttggagkcactggggatgtggatggggttaaagaaccttgggaactt

SEQ ID NO: 60231 - DNA, 600 bp, Chicken  19866894319427_5
ggcacagggacattgggactttggaggacatgggtatatgggggacatgaggacagagggatatggggatgtggagrgacacagtggcctaggggatgtggggacactgggagacrtgtaagaacatggagggacattgggatactgggggacttgggatgtgaggaacatgggggacatggagggactaacaaacttagaggatatgggaactttgaagagcatggagaacaytgggggaatgtgggaacatggagggacrtagaataatgagggacatagagactgggacagtggggwcactgggggaacatgggcagcacaccatggtgacaatgtccttgtttctcaggtagggaccatcctcaagcacctcttccctgttccccggccccagacccgccgcgtggtgacttttgccaacgaagatgacgtcatccttgtccggtgggaatgcagggtgacgtggctgggacagggacactggggaggatgtcacgtgtactttggggatgttggagkcactggggatgtggatggggttaaagaaccttgggaactttttggagacagtggtgtcttcacaggaaccatgtttac

SEQ ID NO: 60232 - DNA, 496 bp, Chicken  19866894319427_6
catggagaacaytgggggaatgtgggaacatggagggacrtagaataatgagggacatagagactgggacagtggggwcactgggggaacatgggcagcacaccatggtgacaatgtccttgtttctcaggtagggaccatcctcaagcacctcttccctgttccccggccccagacccgccgcgtggtgacttttgccaacgaagatgacgtcatccttgtccggtgggaatgcagggtgacgtggctgggacagggacactggggaggatgtcacgtgtactttggggatgttggagkcactggggatgtggatggggttaaagaaccttgggaactttttggagacagtggtgtcttcacaggaaccatgtttaccgtcgccaggggaagacagtggagctagaggaggtgggaccccgcttccagctacgccgtgagttttcacacatgtgcccgtggtcttcccagacccctcagcatcttttatctctct

SEQ ID NO: 60233 - DNA, 600 bp, Chicken  19866894319435_1
cattaggagcattatcagctgaagagtcttctacagttgacagaaaaagaaatagcagcatgattcaacttactcaaaatctgaaccatcctctaacagtgattattgctcccccttgattattgaggggtctgagagtgtgatttagttgcctgagcattggtagtcaggactattttgggtgccccagagtacccacctggcctccacctgcccctttggaagagcactgatctatcatacgtcctgtagcatatctgccaggtgtctcaagtgtcctgtagggtcccagaaggctcyagacacatatgggctgcacctgaacaagttttgtgtgcttcagatagggcttaaagccataaaagatgagtctgagtctctggggcactgctgtagccataagcgaagagtaacaggagcggcaagagctaaagccatgacaaggctgaaagagagccaaacagcaagggagctatcacagagagagatgtaagtatggagctcagtttgatcttaaatgaagcactgtagtgttagcaggtaattgttcagctactggagttataaagcttaygtttcaaattatttgcctgaaatcgc

SEQ ID NO: 60234 - DNA, 600 bp, Chicken  19866894319435_2
tgtcctgtagggtcccagaaggctcyagacacatatgggctgcacctgaacaagttttgtgtgcttcagatagggcttaaagccataaaagatgagtctgagtctctggggcactgctgtagccataagcgaagagtaacaggagcggcaagagctaaagccatgacaaggctgaaagagagccaaacagcaagggagctatcacagagagagatgtaagtatggagctcagtttgatcttaaatgaagcactgtagtgttagcaggtaattgttcagctactggagttataaagcttaygtttcaaattatttgcctgaaatcgctcccaacatatatgaagtcataaagcattgcacttctrcacaaaatcctttttctgcagcatttttctttctatacctattgacatcaatagttatacagtttacacttaatggaagacaggtaaccaaaacaaaaagcagtatttgcaaaaccatcatttttggtcaccacaaaattcttctttctcaaatttttctgcccatttgatgaacttgtacttctgctgctttcttttggatagagctaaatgtttttctgtatcataaaaaattc

SEQ ID NO: 60235 - DNA, 600 bp, Chicken  19866894319435_3
ttcagatagggcttaaagccataaaagatgagtctgagtctctggggcactgctgtagccataagcgaagagtaacaggagcggcaagagctaaagccatgacaaggctgaaagagagccaaacagcaagggagctatcacagagagagatgtaagtatggagctcagtttgatcttaaatgaagcactgtagtgttagcaggtaattgttcagctactggagttataaagcttaygtttcaaattatttgcctgaaatcgctcccaacatatatgaagtcataaagcattgcacttctrcacaaaatcctttttctgcagcatttttctttctatacctattgacatcaatagttatacagtttacacttaatggaagacaggtaaccaaaacaaaaagcagtatttgcaaaaccatcatttttggtcaccacaaaattcttctttctcaaatttttctgcccatttgatgaacttgtacttctgctgctttcttttggatagagctaaatgtttttctgtatcataaaaaattcttcatttttatcattaatcacagaactaaggcattcatataaaataactcatttcatggcaaca

SEQ ID NO: 60236 - DNA, 599 bp, Chicken  19866894319441_1
  misc_feature (1)..(207): n is any nucleotide
nnnnnnnnnnnnnnnnnnnnnnnnnnnnnnnnnnnnnnnnnnnnnnnnnnnnnnnnnnnnnnnnnnnnnnnnnnnnnnnnnnnnnnnnnnnnnnnnnnnnnnnnnnnnnnnnnnnnnnnnnnnnnnnnnnnnnnnnnnnnnnnnnnnnnnnnnnnnnnnnnnnnnnnnnnnnnnnnnnnnnnnnnnnnnnnnnnnnnnnnnnnnnnncacagctgcaagagcagcaaggcaggggcgactcagactgctgcactgcagattggtgcccacttcagcaatgccctacatctcagagcaggsagccagtggcaggacstggaggttcaacactttcagacttgacttggagaccctctagttytaaacagcccatggtagaggccgattttcaggaactggccagaaatctcttgaaattctgtagaacttaaaatatgaagggaaaagtctaaaagagaactcagacatgactctccatctgtgtggagtcatgtcagactgtgacacgacaatccatccagtcagagggggtgtaaaagtgaaggaaagaggtacaaggataccactagaaacaagtaacacaatgtattgtatttatg

SEQ ID NO: 60237 - DNA, 599 bp, Chicken  19866894319441_2
  misc_feature (1)..(191): n is any nucleotide
nnnnnnnnnnnnnnnnnnnnnnnnnnnnnnnnnnnnnnnnnnnnnnnnnnnnnnnnnnnnnnnnnnnnnnnnnnnnnnnnnnnnnnnnnnnnnnnnnnnnnnnnnnnnnnnnnnnnnnnnnnnnnnnnnnnnnnnnnnnnnnnnnnnnnnnnnnnnnnnnnnnnnnnnnnnnnnnnnnnnnnnnnnnnnnncacagctgcaagagcagcaaggcaggggcgactcagactgctgcactgcagattggtgcccacttcagcaatgccctacatctcagagcaggsagccagtggcaggacstggaggttcaacactttcagacttgacttggagaccctctagttytaaacagcccatggtagaggccgattttcaggaactggccagaaatctcttgaaattctgtagaacttaaaatatgaagggaaaagtctaaaagagaactcagacatgactctccatctgtgtggagtcatgtcagactgtgacacgacaatccatccagtcagagggggtgtaaaagtgaaggaaagaggtacaaggataccactagaaacaagtaacacaatgtattgtatttatgcaactaatcttgtctg

SEQ ID NO: 60238 - DNA, 599 bp, Chicken  19866894319441_3
  misc_feature (1)..(146): n is any nucleotide
nnnnnnnnnnnnnnnnnnnnnnnnnnnnnnnnnnnnnnnnnnnnnnnnnnnnnnnnnnnnnnnnnnnnnnnnnnnnnnnnnnnnnnnnnnnnnnnnnnnnnnnnnnnnnnnnnnnnnnnnnnnnnnnnnnnnnnnnnnnnnnnnnncacagctgcaagagcagcaaggcaggggcgactcagactgctgcactgcagattggtgcccacttcagcaatgccctacatctcagagcaggsagccagtggcaggacstggaggttcaacactttcagacttgacttggagaccctctagttytaaacagcccatggtagaggccgattttcaggaactggccagaaatctcttgaaattctgtagaacttaaaatatgaagggaaaagtctaaaagagaactcagacatgactctccatctgtgtggagtcatgtcagactgtgacacgacaatccatccagtcagagggggtgtaaaagtgaaggaaagaggtacaaggataccactagaaacaagtaacacaatgtattgtatttatgcaactaatcttgtctgaaaaaaagaaatccatgacttaaacttagtatgcaacaaatgaaa

SEQ ID NO: 60239 - DNA, 600 bp, Chicken  19866894319441_4
ttcaggaactggccagaaatctcttgaaattctgtagaacttaaaatatgaagggaaaagtctaaaagagaactcagacatgactctccatctgtgtggagtcatgtcagactgtgacacgacaatccatccagtcagagggggtgtaaaagtgaaggaaagaggtacaaggataccactagaaacaagtaacacaatgtattgtatttatgcaactaatcttgtctgaaaaaaagaaatccatgacttaaacttagtatgcaacaaatgaaaatgcagtgtgcagacacagcactgagmgggttgcagacaacaggttaaaatgagaggcactgcactcctgctcagcccagctcaggaaacctactgtaccaagaaagagcagcataatggatgcagcgtaattattgcagctgtcaacatcacaaagtctttgcaatctcttggcactgccacgtgaaaaaagaaatctctaggaactttatttaattgtagatgcgcattagtcatgctgtcacaccacgcttggtatcacacaaactgcctagagacatacatttcagttctttgaggaatatgtcattagcagctaagtgaaaa

SEQ ID NO: 60240 - DNA, 600 bp, Chicken  19866894319441_5
gctcaggaaacctactgtaccaagaaagagcagcataatggatgcagcgtaattattgcagctgtcaacatcacaaagtctttgcaatctcttggcactgccacgtgaaaaaagaaatctctaggaactttatttaattgtagatgcgcattagtcatgctgtcacaccacgcttggtatcacacaaactgcctagagacatacatttcagttctttgaggaatatgtcattagcagctaagtgaaaacaacacttgagaggctactgataccatccagtgggtcccttcattgagaggragggctctaagacttacaagaattagtataaccagtctttcctgagaggcagagcgttctctgctgtgttgattcaaccttcacaccaagctgcatttgctggggattcagagaaagagtcactggcagtttagctacactttcccttacacatcagccttcagtctttgccaaccttcttccaagaaaatggggtctcaaaacaaacacaaatgaacgctcaggtaagttttgtgctgaagccaagaatagcattgctctctatttacaagatgcaatgaaaaaaataacaacaataat

SEQ ID NO: 60241 - DNA, 599 bp, Chicken  19866894319444_1
  misc_feature (1)..(194): n is any nucleotide
nnnnnnnnnnnnnnnnnnnnnnnnnnnnnnnnnnnnnnnnnnnnnnnnnnnnnnnnnnnnnnnnnnnnnnnnnnnnnnnnnnnnnnnnnnnnnnnnnnnnnnnnnnnnnnnnnnnnnnnnnnnnnnnnnnnnnnnnnnnnnnnnnnnnnnnnnnnnnnnnnnnnnnnnnnnnnnnnnnnnnnnnnnnnnnnnnngatgtttaaaacaagtattgctgctcctgtttgtattcatattgatttttttgcagttgtgataagatgccttggtttttattttcttaagttaacctgcttgacyttatctgactacygtaacttgagaaataaaattctgaattgtttccattgcagaggttgcgaactgaaaataggctcctaaaacagcgcattgaaacattagaaaaagtaagtatgctaatgaccagatttaatctattatttacattcattatatcaattagtcatcttattatatgaaatgagtctaacttactgttttttccggtttatttacaacgttcactaacagtgcttagccaaaagcgtggcaataacaaagctgttaaggtcagtgcttataaacgtttgtctggttct

SEQ ID NO: 60242 - DNA, 599 bp, Chicken  19866894319444_2
  misc_feature (1)..(181): n is any nucleotide
nnnnnnnnnnnnnnnnnnnnnnnnnnnnnnnnnnnnnnnnnnnnnnnnnnnnnnnnnnnnnnnnnnnnnnnnnnnnnnnnnnnnnnnnnnnnnnnnnnnnnnnnnnnnnnnnnnnnnnnnnnnnnnnnnnnnnnnnnnnnnnnnnnnnnnnnnnnnnnnnnnnnnnnnnnnnnnnnnnnnngatgtttaaaacaagtattgctgctcctgtttgtattcatattgatttttttgcagttgtgataagatgccttggtttttattttcttaagttaacctgcttgacyttatctgactacygtaacttgagaaataaaattctgaattgtttccattgcagaggttgcgaactgaaaataggctcctaaaacagcgcattgaaacattagaaaaagtaagtatgctaatgaccagatttaatctattatttacattcattatatcaattagtcatcttattatatgaaatgagtctaacttactgttttttccggtttatttacaacgttcactaacagtgcttagccaaaagcgtggcaataacaaagctgttaaggtcagtgcttataaacgtttgtctggttcttacttgaaattga

SEQ ID NO: 60243 - DNA, 599 bp, Chicken  19866894319446_1
  misc_feature (1)..(222): n is any nucleotide
nnnnnnnnnnnnnnnnnnnnnnnnnnnnnnnnnnnnnnnnnnnnnnnnnnnnnnnnnnnnnnnnnnnnnnnnnnnnnnnnnnnnnnnnnnnnnnnnnnnnnnnnnnnnnnnnnnnnnnnnnnnnnnnnnnnnnnnnnnnnnnnnnnnnnnnnnnnnnnnnnnnnnnnnnnnnnnnnnnnnnnnnnnnnnnnnnnnnnnnnnnnnnnnnnnnnnnnnnnnnnngatagcatgtaggcattgttctttggctttcccgcgttctgatatcatgcttcacgtgacagactgaatctaagaagktgtgctctagcatgagaacgttcttacccattttaactgcaaatagcagctgtctttcagcaaatgaagttgaatgctcatgacttacaaagagttgcttcgcagtgaggaaaaggacagactaaatttttctgaaataattgaacaatgttggatttcagatatttcttcaagaagccataatacatataacagcgtatgtcaaattgtgattagttgtgattactgaactgcggtttgggaagaaatgcacattgtgaggacatcttgtgaaatgaagttgggaccaaaaatataat

SEQ ID NO: 60244 - DNA, 600 bp, Chicken  19866894319458_1
cccagtagtctgtcactactgtctggcactgctgaattaacagtggtaacatggcagctatactcccccatttctgggaaacacaattaaattagatagaataccagctttaagtgtttcaataaatacaggaaattaaaacacaaacaaaccccttaatccaactgtgtaaattcagttagtaatagtcatcgctgagtagcaagtagacacattcctatacacacagtgcatatacaatggctgtcacagctgtacattaacatctgagctgtgtctggtggtcaaaaaagaacagtygcccaaggcctcctggtccaagaatccgaaaggaaagagaaatgaacagaaccctgctccttccagacacacatcagtgctgtgtatcacctgaaccacaagactcaactgatgcatctacgtgcacaaaggataaccaaaaagtgaccttaagtggggaaatgcttgatatcaacatttgcagaattcaatctatttaaatgctcaggaggccaggttgagagctgactcggggaattattttggctatagaactatctgcatgctttttcttcttcacctttctttgttaaagacaga

SEQ ID NO: 60245 - DNA, 600 bp, Chicken  19866894319461_1
tgcaacgagggactattttaggaggaaggaattctgaaaagagcttgggagaagtcacagtgtgttatcagcagagtcagtgcaacactgtcgagagggttaatacaatcattagatggggatatttagattttgcctctgttgtaggcatggatatggttactcttatgtcttcagttcatgtgtaagcaactcaaggatgatgaactggagaactcagaaaaggctggtggagggtatttaaagggttggacaacatgcttctagtgtcagtccaaaagttttccactttcctcttgrgaggatgacaggttgatttggtcgggctgtaaatgctgtgtgagcagagggcaaacctctgcctgttagcctccaagtgtatgacaaagtccattgtttgcaagcagaagtttgaacaaatccacgcccttgtagggagggcaattaatcattggaacaaacaggcaggaggaggaggagacttttttccattgctgacagttgtttgaacaagtttattttgagaagcgactcatctgtgctgattaaaataatttggagagggtctgtagtaagtgttttgtgggatgtcagactagg

SEQ ID NO: 60246 - DNA, 599 bp, Chicken  19866894319467_1
  misc_feature (1)..(147): n is any nucleotide
nnnnnnnnnnnnnnnnnnnnnnnnnnnnnnnnnnnnnnnnnnnnnnnnnnnnnnnnnnnnnnnnnnnnnnnnnnnnnnnnnnnnnnnnnnnnnnnnnnnnnnnnnnnnnnnnnnnnnnnnnnnnnnnnnnnnnnnnnnnnnnnnnnnctttcccaggaaaggaatggaacttgaacagataaaccatcttttggggtggagttccaactcgcacagaaaagtttgctgcagtgtttaacccaggctgaagttcatcgtgtctatcttaaagcagaagcaaaaatggaaattaagaaatgyactctacattctttcaagttaagaaatggcaacttgttcaaaaactagcaaaggcctatttcatttcttactggaagaaaaaactgtctttatttcctcatcagctgaaaagagcaaaagggaaagtgacaggagataggggtttacatacacttccctttatgmtgagataaatgcattgacaaactttagccagcacatttctggcaagatttcttgcttgaattsaraatgtattttctattttaaaaggataggcagggaagttttgattgagtgcagtactcacatacctttta

SEQ ID NO: 60247 - DNA, 600 bp, Chicken  19866894319467_2
ggaacttgaacagataaaccatcttttggggtggagttccaactcgcacagaaaagtttgctgcagtgtttaacccaggctgaagttcatcgtgtctatcttaaagcagaagcaaaaatggaaattaagaaatgyactctacattctttcaagttaagaaatggcaacttgttcaaaaactagcaaaggcctatttcatttcttactggaagaaaaaactgtctttatttcctcatcagctgaaaagagcaaaagggaaagtgacaggagataggggtttacatacacttccctttatgmtgagataaatgcattgacaaactttagccagcacatttctggcaagatttcttgcttgaattsaraatgtattttctattttaaaaggataggcagggaagttttgattgagtgcagtactcacataccttttagaaactgctacaagctgaatgcgtaatttcaaatccctctggaatagtcctacaaaattattatcaaataaatagaattgtgtagtaatgacaagaaatcatctgtgaaattgactagagaattagttccctgatagagaatacatatagtaaggcaaaaagtgct

SEQ ID NO: 60248 - DNA, 600 bp, Chicken  19866894319467_3
cagtgtttaacccaggctgaagttcatcgtgtctatcttaaagcagaagcaaaaatggaaattaagaaatgyactctacattctttcaagttaagaaatggcaacttgttcaaaaactagcaaaggcctatttcatttcttactggaagaaaaaactgtctttatttcctcatcagctgaaaagagcaaaagggaaagtgacaggagataggggtttacatacacttccctttatgmtgagataaatgcattgacaaactttagccagcacatttctggcaagatttcttgcttgaattsaraatgtattttctattttaaaaggataggcagggaagttttgattgagtgcagtactcacataccttttagaaactgctacaagctgaatgcgtaatttcaaatccctctggaatagtcctacaaaattattatcaaataaatagaattgtgtagtaatgacaagaaatcatctgtgaaattgactagagaattagttccctgatagagaatacatatagtaaggcaaaaagtgctgttccagtttgctccctccaaaatgtgaatatttttaatcattcagtgaaagatttccttctg

SEQ ID NO: 60249 - DNA, 600 bp, Chicken  19866894319467_4
gtgtttaacccaggctgaagttcatcgtgtctatcttaaagcagaagcaaaaatggaaattaagaaatgyactctacattctttcaagttaagaaatggcaacttgttcaaaaactagcaaaggcctatttcatttcttactggaagaaaaaactgtctttatttcctcatcagctgaaaagagcaaaagggaaagtgacaggagataggggtttacatacacttccctttatgmtgagataaatgcattgacaaactttagccagcacatttctggcaagatttcttgcttgaattsaraatgtattttctattttaaaaggataggcagggaagttttgattgagtgcagtactcacataccttttagaaactgctacaagctgaatgcgtaatttcaaatccctctggaatagtcctacaaaattattatcaaataaatagaattgtgtagtaatgacaagaaatcatctgtgaaattgactagagaattagttccctgatagagaatacatatagtaaggcaaaaagtgctgttccagtttgctccctccaaaatgtgaatatttttaatcattcagtgaaagatttccttctgta

SEQ ID NO: 60250 - DNA, 600 bp, Chicken  19866894319468_1
ggtgcccggcttctgtgccaacacaagctgcagctccctatgctcactggtttattgctaatgcaacaaatagccttgggtgtgcagtatttgttgtgacaagctggaagaagttcatgcatcggatgatgaagttgttcttgctactagcaggtacaattgtcttttccactgaactagtagtgcaattcctcctccttttgctctcaaatttttcccctttttgattttttttttttttaatatttcacagacattttgctctactttcagcagttttgttgagtctccattttcagrgtttatatggggttagggtcagtgttagaaccactcatgctgaaatactttgaatgctctgttattcctacagcatggcctcaatatgcatggcaaactccttgcagagcaaaagctggacaggaccccagtagaagtccattttgaggactggaaagtagcacagatcttggctgaaaaactcagctttcctgaagacaacagcttgattgygtttgatcactgaagcactacatttaaccatcctatctagcaaagcacacggtgagaacaaggctgctctaagttgataggaaatgc

SEQ ID NO: 60251 - DNA, 600 bp, Chicken  19866894319468_2
tttcccctttttgattttttttttttttaatatttcacagacattttgctctactttcagcagttttgttgagtctccattttcagrgtttatatggggttagggtcagtgttagaaccactcatgctgaaatactttgaatgctctgttattcctacagcatggcctcaatatgcatggcaaactccttgcagagcaaaagctggacaggaccccagtagaagtccattttgaggactggaaagtagcacagatcttggctgaaaaactcagctttcctgaagacaacagcttgattgygtttgatcactgaagcactacatttaaccatcctatctagcaaagcacacggtgagaacaaggctgctctaagttgataggaaatgcaygcagagacagagggacctccaggcaatgtccaggatcacacaagagccaaattccccttctctctatatctgattagctgtgtaaggcatgcatttgctctgctcttgatagctaaaagcttgcatccagtgctgtctggtggggtgagaagtggccctacttggaaggaagcaaaagcaaggttctggaggaaaagaaagaaaaaaaaga

SEQ ID NO: 60252 - DNA, 600 bp, Chicken  19866894319468_3
ttatatggggttagggtcagtgttagaaccactcatgctgaaatactttgaatgctctgttattcctacagcatggcctcaatatgcatggcaaactccttgcagagcaaaagctggacaggaccccagtagaagtccattttgaggactggaaagtagcacagatcttggctgaaaaactcagctttcctgaagacaacagcttgattgygtttgatcactgaagcactacatttaaccatcctatctagcaaagcacacggtgagaacaaggctgctctaagttgataggaaatgcaygcagagacagagggacctccaggcaatgtccaggatcacacaagagccaaattccccttctctctatatctgattagctgtgtaaggcatgcatttgctctgctcttgatagctaaaagcttgcatccagtgctgtctggtggggtgagaagtggccctacttggaaggaagcaaaagcaaggttctggaggaaaagaaagaaaaaaaagaatggtggtgaagacaaaaactctgtagaactgtcggtggaaggatcctttatcaggcccctgggactgaagggagcattctggggctat

SEQ ID NO: 60253 - DNA, 600 bp, Chicken  19866894319472_1
tttccaacagaaaaagagctttctttctctagtgtttatgatgtccctagatgcaaggcatcatatcaatatgaattgtgatcaagaacagcgtaaacatttaatcaggaccctgagatttgaatgttcactgttgaattttttttctgctgcagaaccagattccagagtatcaacatccagcccagagtcaaatgaacaaccttgtaagcaggagcagagtacaagtatataactacaggcctgcaaacagcttaatatagtaactacactctactcatatcaatagaagtaatcccytgaaacaaaaatacctaccatttgtcaccccagctttycccacagattaccagcctcttagaaagggcctcaacagccacactgcaataacccatctgtcatcacatggaggaatatctgtccaggtccacagctgcctcaccctccagaaacctcactagacaacaggttgacatggtatattctggcaagccaaacttaaggtggagtttgcttgttctcaggcaagttgtaaacagttagcagaaatactacatcattttgaaaggtctgcaaagaaaactacttctttcccaaact

SEQ ID NO: 60254 - DNA, 600 bp, Chicken  19866894319472_2
tgatgtccctagatgcaaggcatcatatcaatatgaattgtgatcaagaacagcgtaaacatttaatcaggaccctgagatttgaatgttcactgttgaattttttttctgctgcagaaccagattccagagtatcaacatccagcccagagtcaaatgaacaaccttgtaagcaggagcagagtacaagtatataactacaggcctgcaaacagcttaatatagtaactacactctactcatatcaatagaagtaatcccytgaaacaaaaatacctaccatttgtcaccccagctttycccacagattaccagcctcttagaaagggcctcaacagccacactgcaataacccatctgtcatcacatggaggaatatctgtccaggtccacagctgcctcaccctccagaaacctcactagacaacaggttgacatggtatattctggcaagccaaacttaaggtggagtttgcttgttctcaggcaagttgtaaacagttagcagaaatactacatcattttgaaaggtctgcaaagaaaactacttctttcccaaactgtaattacagcacagagggagatccctcaattacacag

SEQ ID NO: 60255 - DNA, 600 bp, Chicken  19866894319475_1
ctcctggagcatctgcactaaaaaaaaaaatgtcgccagccaaaaattgtgtctttgatggctctacaggcaagacatcaacaatctctacaactgctgatccccttgtgtgattttaatttgctgccctctcagcttgtgcctgtgatacagtgtttcaaagtctgcttttcttagctcatccccactttggtcctccttaggaaagcaccctgtaagactggaataaatacctcactaaagatacaggtgaaggatgctagcaccctgttaatgctgctttcattcccttttgttttyttgctgagataaactgggaaaatttgctgtctgctcaccttgtctctggggaggttgggtggtagtgcacaagagagagtggcctgggagttatggacgagcacccagtgaatcggggtacctgctgacaagggagtgtccctgcatctctgtgagctgcatactctacctatcccattctccccctgttccctagtatatttgcatctatacctatttaggataaaaattaggaggcataattttatctgactgtgcaagccatgtcgtcaaaattcagatcttttgctctactataat

SEQ ID NO: 60256 - DNA, 600 bp, Chicken  19866894319476_1
gaagcaggttcccagcccttcaggggaggaaggaatgcctggagttgggcaacagggtgcctgggttgagcagagcagggtccatcagcacagaagctgggacactatggtagacttctttttgaagcagtgtgccggagccaacggcatccctttggtgtgataacctgacatacagagaatcgttaaggttggaaagaccactgagatctggtccaaccacacctgggagaaaaagcagacaaggcatgggacccaggggagttgccaagaggggctgaaggctgctctgcccatgarggtgtttgttcagtgctaatccctgctctctccctgtctgcaggtgtatgaggaagcctaccacgcrctgcacaaagagctgcctgaggtcaccacctccgtcttcacagaaatactgacgtgggtcagccagaaggtttcagcagctggagaaaccagccagacctaagagcaatcctttctgcagctcttactggggttttctgggaatagaagctttctgtaatagaattctctctggaaaagatctagcgtggagggactcgtgggatattttgccatgcacagtgtaaggggtgg

SEQ ID NO: 60257 - DNA, 600 bp, Chicken  19866894319476_2
gagcagagcagggtccatcagcacagaagctgggacactatggtagacttctttttgaagcagtgtgccggagccaacggcatccctttggtgtgataacctgacatacagagaatcgttaaggttggaaagaccactgagatctggtccaaccacacctgggagaaaaagcagacaaggcatgggacccaggggagttgccaagaggggctgaaggctgctctgcccatgarggtgtttgttcagtgctaatccctgctctctccctgtctgcaggtgtatgaggaagcctaccacgcrctgcacaaagagctgcctgaggtcaccacctccgtcttcacagaaatactgacgtgggtcagccagaaggtttcagcagctggagaaaccagccagacctaagagcaatcctttctgcagctcttactggggttttctgggaatagaagctttctgtaatagaattctctctggaaaagatctagcgtggagggactcgtgggatattttgccatgcacagtgtaaggggtgggggaagaggcacagggtgggtgttactcactggtgtagatgacccttgtcataatctgaggaagcac

SEQ ID NO: 60258 - DNA, 600 bp, Chicken  19866894319479_1
agcctgattttagacagctaaaattgtgtgagattaatcataatttctgtccccagcctggcttcttgaatccttccattgcagaaggaagtctctatagatacgtattccgtaaaagaaaatgatggaacaatcttagcaagtcctttcattaatttgtcttccaagatactaataaatggcaacctgtaaattacattaatactaatcctttggaaacacagatgaaaagtgttggttcacttctggtcttcttttatgtgctcccttcagctaaccatctccacagtccttgccagmccactcactcaaccctttccatctacagcaaaataaatagrcccagacttaaacaatagacaatgatacctaagctagagcagatggtgataatttactcagatatcacatcccttctctgcatcctctcctgctggagactccttaaggcatcccctgttggactcgtttgcacagagaccagcataacaggaccttgatgttgatgtgaagagtgattaatgctaacatgagtttggcagcactgattttaaatcttatacagttttggatctttcatgttgaaaaagcctttgacac

SEQ ID NO: 60259 - DNA, 600 bp, Chicken  19866894319479_2
aatttctgtccccagcctggcttcttgaatccttccattgcagaaggaagtctctatagatacgtattccgtaaaagaaaatgatggaacaatcttagcaagtcctttcattaatttgtcttccaagatactaataaatggcaacctgtaaattacattaatactaatcctttggaaacacagatgaaaagtgttggttcacttctggtcttcttttatgtgctcccttcagctaaccatctccacagtccttgccagmccactcactcaaccctttccatctacagcaaaataaatagrcccagacttaaacaatagacaatgatacctaagctagagcagatggtgataatttactcagatatcacatcccttctctgcatcctctcctgctggagactccttaaggcatcccctgttggactcgtttgcacagagaccagcataacaggaccttgatgttgatgtgaagagtgattaatgctaacatgagtttggcagcactgattttaaatcttatacagttttggatctttcatgttgaaaaagcctttgacacaagcagccctggggagaagcctggtgttgagcactggagac

SEQ ID NO: 60260 - DNA, 600 bp, Chicken  19866894319502_1
tactaagaggagccaaggtcttttatttcagcagccacacaatcccactacatgctggaagcagcatggtcagctctgctgagacaaagcagggcgctcagcagctgcactgcctccaaaagggaagccaggctgcttctcagggagatgagagcttttcagggaagagagtaattagaggaaaaacttgagattacagagcagtacccacagtttgtaatattttccctgactttgggaagcatgtattttaattccaattgccacaaggcaacacgttaatagcagttaggagaaggraaaaaaamagcattcccttgggggagcactgcaaagccagatgatttaggaaatgcaggaggatatacaatagagctggcctgactgcatgcagcaagaaaaaaaaatcatactctgcagcccagtgtgtatacatgagcagcagttgtaatgttaattagtgcctactgctgaaacctccttagtcagcagctcagagatgttagtacacagcacagaactggacaaagttattacttcatcagtgaagtctgtaaattctgactttatcaaactagccacctgcaagaaaaggtttct

SEQ ID NO: 60261 - DNA, 600 bp, Chicken  19866894319502_2
ggagccaaggtcttttatttcagcagccacacaatcccactacatgctggaagcagcatggtcagctctgctgagacaaagcagggcgctcagcagctgcactgcctccaaaagggaagccaggctgcttctcagggagatgagagcttttcagggaagagagtaattagaggaaaaacttgagattacagagcagtacccacagtttgtaatattttccctgactttgggaagcatgtattttaattccaattgccacaaggcaacacgttaatagcagttaggagaaggaaaaaaaamagcattcccttgggggagcactgcaaagccagatgatttaggaaatgcaggaggatatacaatagagctggcctgactgcatgcagcaagaaaaaaaaatcatactctgcagcccagtgtgtatacatgagcagcagttgtaatgttaattagtgcctactgctgaaacctccttagtcagcagctcagagatgttagtacacagcacagaactggacaaagttattacttcatcagtgaagtctgtaaattctgactttatcaaactagccacctgcaagaaaaggtttctgtgctctc

SEQ ID NO: 60262 - DNA, 599 bp, Chicken  19866894319506_1
  misc_feature (1)..(25): n is any nucleotide
nnnnnnnnnnnnnnnnnnnnnnnnncttatattaaatgtaattaatagcctgagcccctctttaccaacacctttttctccttgactcctttggaaatccaagacaatacactgacaagccagattatctcttacaaagatgccacagcacctgatattttaccctgtcacagatcaaaaagattaaaaacaacattaaaaagcacgttatgatactgagtccagtaactctatcctgccttctcagttcaggcttggaaacagagcaaagatgaatgtttagaatggtatctgaattartgttctgttaaccagctgcagggatgggggttgctgttttccatttgtttgtatgggtttggtttcaatcayccaggcaagtttcaatcactgtttgcagcatcaggaaggctgtgctgaatctgcagtcctgggctctgttaaaacgaatatttccagcctcactcaaggtgggagccacgggtcattggttcaacaggttaacgtgactgacatagatctcactaactcaaagaatgattacatctatgtgctgacctagatcttttgtagattaagacatactccttccttcacct

SEQ ID NO: 60263 - DNA, 600 bp, Chicken  19866894319506_2
tttttctccttgactcctttggaaatccaagacaatacactgacaagccagattatctcttacaaagatgccacagcacctgatattttaccctgtcacagatcaaaaagattaaaaacaacattaaaaagcacgttatgatactgagtccagtaactctatcctgccttctcagttcaggcttggaaacagagcaaagatgaatgtttagaatggtatctgaattartgttctgttaaccagctgcagggatgggggttgctgttttccatttgtttgtatgggtttggtttcaatcayccaggcaagtttcaatcactgtttgcagcatcaggaaggctgtgctgaatctgcagtcctgggctctgttaaaacgaatatttccagcctcactcaaggtgggagccacgggtcattggttcaacaggttaacgtgactgacatagatctcactaactcaaagaatgattacatctatgtgctgacctagatcttttgtagattaagacatactccttccttcaccttctataccctcccatttcctcgaccttaaaagaaataaattggttaacagatgtaggcaactggaaggcttca

SEQ ID NO: 60264 - DNA, 600 bp, Chicken  19866894319511_1
cagtttcaggaatggacaattctgggctcattacaaatgaagaaaaggatgtagtgccattatcttttcctccaatgacaagcaacatttcccttattgtcactttaagataatctccaaagaatttggcattaattatgaagacaataaaatcaactctctattgagctaactaaatgagaaatgaaagtttcataattgtttctgtatccaatcagcctatgatggatggcccacgaagatttctgttctaaaatctgagcaagacaaacaaactgatcttagatcagttctatccarttcagtgacaggatgagaaaaacttgcatagccagttggactacatagtgaggctgaagggagctttaacaaaagatgtgtgtgaaaattcaggtgattgtgtggtacgaatggtatcatgcagaaatgcatgaccagtaactatcgataaggtagatttctgttgaaaaggccacttaaacgctgtgtgtttttcgttgttgttaggttcttgtgggtttttttttgtttgtttgtttgttttttagcttagctaagcattttatcttcatttgccttgcaattgccttggaatggagt

SEQ ID NO: 60265 - DNA, 600 bp, Chicken  19866894319511_2
gtgtgtgaaaattcaggtgattgtgtggtacgaatggtatcatgcagaaatgcatgaccagtaactatcgataaggtagatttctgttgaaaaggccacttaaacgctgtgtgtttttcgttgttgttaggttcttgtgggtttttttttgtttgtttgtttgttttttagcttagctaagcattttatcttcatttgccttgcaattgccttggaatggagtttttaaattgttttatttaactgccacttgcttgaaatttggttgttttgttgtgttgctagttttatttatttatytatttatttaatttattttcaagatttttggactagccaaggtaatagaaatgaaagaagaatacttcagttcacatttacatggttcccagggttgtgaattgaagaaattatccaaaatgtttcagacttgcaatacattttttagtttttgcaataaatgtttcgattatagtaatttacatgtgtataataaatatattacacttgcgcacacaatttctacatatagcaaataggataaatacaaatatagatgcaaatattaatgtattaccattacatagcactattagaata

SEQ ID NO: 60266 - DNA, 600 bp, Chicken  19866894319512_1
gggaacctccatcaatggaaccaccatcaatgggaacctctatgaatggggaacctccaccaatgggaacatccaccaatgggaacctccaccaatgcgaacatccatcagtggggaacctccatcaatgggaaccatcatcaatgggaacctccatcaatgggaccttccaccaatgggaccttccaccaatgggaacctcagtcagtgggaactgcgcttatggggagcacctccatcaatgggggaacctccatcagtggagcctccatcatgggaggaagctccgttaaggggacyctccatcaatgggatcctccattgcagagaaacctcagtgacggggaaacatccctaatggggaaacctccaccataggggaaccccggttatgggaaacctctgtcacggggaaaccgatgggggacctccatctcggtgggaccctactgtgaagaagcctccatcstgggggagcctcaataatgggggaacgtccatcagcggggaaggctccatcaaggaggaaagctccactgtaggacaaacctccgctgtggggacacctccagcagggaggaacctccgcgattggggaga

SEQ ID NO: 60267 - DNA, 600 bp, Chicken  19866894319512_2
ccaccaatgggaccttccaccaatgggaacctcagtcagtgggaactgcgcttatggggagcacctccatcaatgggggaacctccatcagtggagcctccatcatgggaggaagctccgttaaggggacyctccatcaatgggatcctccattgcagagaaacctcagtgacggggaaacatccctaatggggaaacctccaccataggggaaccccggttatgggaaacctctgtcacggggaaaccgatgggggacctccatctcggtgggaccctactgtgaagaagcctccatcstgggggagcctcaataatgggggaacgtccatcagcggggaaggctccatcaaggaggaaagctccactgtaggacaaacctccgctgtggggacacctccagcagggaggaacctccgcgattggggagaccttcaccaggaggatatttccaccatctgccgtgcgggagtgcccagaacgggggaacctctgccatagagggaaccccaccgtgggggaacctcagtgatggggaaacctccgtcacggggacggctccataacgggggaaacctccactgcgggggaacctctgca

SEQ ID NO: 60268 - DNA, 524 bp, Chicken  19866894319515_1
ccatgacaacaagtataatctatttttttatatcttgcagctgaaacttatcaacacagaggcaatgaactgttctgttaaatggcaataataaatttcagaatgcttgaatttatataatcatagaatcatagaatccttagagctggaagggacctctcatctagtccaactcccctgcaatgagcagagacagcacagccagatcaggttgcccagggcctgatccaccctcaccttgaaagtctccacggatggggcattaaccagatatctgggcaaccagttccagtgcctcaycgctctcactgtaaaagattttttttcctaatatctaacctaaatctaccctctatgaacttgaaacaattttgccttgttctatcaccacagaccctgctaaagagtctgtcctcttctttcttgtggcctccttttagatactgaaaggccgctatcaggtcaccttgcagccttctcttctccaggctgaacagccccagctctctcagcctgtccttgga

SEQ ID NO: 60269 - DNA, 599 bp, Chicken  19866894319523_1
  misc_feature (1)..(208): n is any nucleotide
nnnnnnnnnnnnnnnnnnnnnnnnnnnnnnnnnnnnnnnnnnnnnnnnnnnnnnnnnnnnnnnnnnnnnnnnnnnnnnnnnnnnnnnnnnnnnnnnnnnnnnnnnnnnnnnnnnnnnnnnnnnnnnnnnnnnnnnnnnnnnnnnnnnnnnnnnnnnnnnnnnnnnnnnnnnnnnnnnnnnnnnnnnnnnnnnnnnnnnnnnnnnnnnnttttctggtatagtaacttaatctatttgacacaaagtatgttcagtaaatggttgaatgaaacagccactaatggatgcctgttctatcayaaggctactggtgattaacagtgaatgtaaggctatgtgtatgcagtagggtaactcacctttatctatcagccactccttatgtgatatagcctctcatggaccatcccctctcatttatattaaaaatcagaggagaataatgcactaatgcaagcatttggggccagtggacttttattttcctttaaactgaaatgtgtagttagttgctgtatcttaatacagttgcttttcagtcatttttcatgtccatcctttaaagttaataacagggtgcatttgaggaaaaacccatg

SEQ ID NO: 60270 - DNA, 600 bp, Chicken  19866894319524_1
acttactgtatttaatgtggtggtgcaggacaccaaatatacacacctagcttccctgcttggttagcctcagccatatccctgccttgttctccacctttcctgtccccattatattttcctctctttggaatctccagagtgtttcccagtaaagctgaagccagtacgaatcgtcccaagaaattctgactcacagaatccatccttcttccaggcctcctctagaaaccaagaacatcccacctcctggggcatgcctcccatttcccagccctgctgctgaaccaaggctgccawtgagcatcctcctcggctgctaacatggcagccttacctttcccatccacagccagagtcacggggtgccatggagtgccatggagactggggtggcctctygctaagggtaaaacctgtgttacaggtgtttggtggcactgatgttttggtgttcctgaggagggtctgcaggtgaggatagcaggactcggcactaagcatgtcgccatttgcttccctttcagcccgagccaccctcatctaacaagtggcagctggacaagtggctgaataaagttaccccacacaaagcaccca

SEQ ID NO: 60271 - DNA, 546 bp, Chicken  19866894319524_2
ctgtccccattatattttcctctctttggaatctccagagtgtttcccagtaaagctgaagccagtacgaatcgtcccaagaaattctgactcacagaatccatccttcttccaggcctcctctagaaaccaagaacatcccacctcctggggcatgcctcccatttcccagccctgctgctgaaccaaggctgccawtgagcatcctcctcggctgctaacatggcagccttacctttcccatccacagccagagtcacggggtgccatggagtgccatggagactggggtggcctctygctaagggtaaaacctgtgttacaggtgtttggtggcactgatgttttggtgttcctgaggagggtctgcaggtgaggatagcaggactcggcactaagcatgtcgccatttgcttccctttcagcccgagccaccctcatctaacaagtggcagctggacaagtggctgaataaagttaccccacacaaagcacccatcctgacccaccatgacgcctcggccctagaagcccacccctactacg

SEQ ID NO: 60272 - DNA, 600 bp, Chicken  19866894319526_1
ttccgaaaagcttatgtaagtataaaacgttttactaagagtaacattttgttggttcatggtgattctataaggatcggacaacatacctgctgtttctagagcgctgtgcaacccatcccaccttgagctgtgcccctgccctgaatgcaagtacagtgcctgggacatgacctcctcactggtgctcttatcctttgtatccacctcactggcctccccttaaaaagctttataaataaatcttcacttgagtacttaacagatgactttttttgaaagcctttgtgtggctgcccyagagtgctggtaagctgcaaactgcaggcgctgcagcatggggctggccttctcagcaagggacagatgagatggcaaaatgaaagatccttgccccttccctccagatgatttacctacaaaagagcaaagcaaaatcctatttatagtcaatagctgcaattctaacactcctaaatctgaattaaaacagtagggggtgaaaatgactggactaaacgcaggtgagccaggccactggagaactgtgctgagggaagggcgagaaaatcaatatgtgccatgggatagtgcagtgcc

SEQ ID NO: 60273 - DNA, 600 bp, Chicken  19866894319527_1
aaggtcagtgtttctgtacgtagggtgggacaaagctcctcccagcactgagccatatacactactcttgatgagatgaggaagtgctgatgcagagaactcagcgaatgtacccctcattgttgtggctgtctctccgtgtcctggtgaccttgtgctctacctggaaccaggctgtgcttcctgcagtgacccgctgacgtgactagccctgcctcagatacagcatcacctcctctctgcctgtgctgcctgccagcctgcaattcccaagacacctcatgtgagccccaagactcrcgtgcaggcctccttgttctgtatctaccatttcgaactgcagatgcacggtgtgcctggctgccttcttttgccttctttcttgcatcctctgcactgaacagagcattgcttagagaaggaaaaaaactgtttagttccctgcttacagcagaacgctgaactgatgtctggtgctccctgctgtggacctctttgctctgggcttcacaggcaaataagtcaccttgatgccaatatttgtccctgtttcctgatgcaatgaataaatcacgctgctgttccttatctgctcatagc

SEQ ID NO: 60274 - DNA, 600 bp, Chicken  19866894319530_1
gtaagaatgctaatggatccaaagtcattgcacacacaactcgcatctgaaagaaagtttgtctgacagccaggcacttcatttcattccttcttaattctcttcttaataacctaaaatgcttaatacttagtaaatggaccagaacagcaattatacgtgtacaggattggctgagaaattgatgggattttctaaaattaaccataacattatttgctctcttctgatctataaataaatgacaacatggcttctcctgtgattatttaaaacttcagagggaatactctgaaatartggttgtcaagggcaagaaaagacagggaacttttaattaagatcataaaaccacagaaggcagggaaagactgatgtggtaacttcacttgcatcaaggtgttggtcttgaattcacatgaagtatatagaaattcaagctactttctatagagcagtatgaaaaaaaataaattcaaatttcatataaaatcttcatcaccattgtgccttactccttttcttataagggtgcctaaatggaaaaggccagacacaaactgaagatggaaaaccagataaagcactgcttagccagat

SEQ ID NO: 60275 - DNA, 600 bp, Chicken  19866894319530_2; identical to SEQ ID NO: 60274

SEQ ID NO: 60276 - DNA, 600 bp, Chicken  19866894319530_3
tggtaacaaatcaaacttccaaaatatttgcttagattagttacagattgagcactggaaacattctatgcaatcgcagatgctatgcactagccaagtgtatgaatgagatgctttccaaattgtggatcattagctgtgaagaactattgctttttgaaaacaaaaccagaagtctccaaaagccctggttcctgctgggttcctgccattgtctgtaagctcttactgcttgttgtctcctgtgtataatggatttcttcattcgaaaacatgatcttgcaaggtacatgagcattytctgccaggtgcagggagtgtawctctaaaatactccagattgagggttcctgttacttcacaaattgggtttttgcaggaaagtgagatcatcttctcctactccaaagtctgcaattttcttcttgggagaacagtcataatgaattactatattattccaactgttatttagtaacttgggatttacttgtccatgttgtggggttattttattagcaagacaagtacgtatatggagagatgtaaggaatttatatatgccttctgtccatatttgaacaaatgcttttcagttgc

SEQ ID NO: 60277 - DNA, 600 bp, Chicken  19866894319530_4
atatttgcttagattagttacagattgagcactggaaacattctatgcaatcgcagatgctatgcactagccaagtgtatgaatgagatgctttccaaattgtggatcattagctgtgaagaactattgctttttgaaaacaaaaccagaagtctccaaaagccctggttcctgctgggttcctgccattgtctgtaagctcttactgcttgttgtctcctgtgtataatggatttcttcattcgaaaacatgatcttgcaaggtacatgagcattytctgccaggtgcagggagtgtawctctaaaatactccagattgagggttcctgttacttcacaaattgggtttttgcaggaaagtgagatcatcttctcctactccaaagtctgcaattttcttcttgggagaacagtcataatgaattactatattattccaactgttatttagtaacttgggatttacttgtccatgttgtggggttattttattagcaagacaagtacgtatatggagagatgtaaggaatttatatatgccttctgtccatatttgaacaaatgcttttcagttgcaaactagagtcactgttctttac

SEQ ID NO: 60278 - DNA, 600 bp, Chicken  19866894319541_1
gggctgtcttgcagtatgctcatagcacaggaggctgtggcttttttccacttacatttaagaaccgctaataaagatgacaaaagtctagaactcctgaagttcagacctgcctccttgataatcttctcaaatcctcacttttcatgccacaataggacgaaaggaactgtattttactttctaacaaaagcaacaatcaatttaacaagctttgtaaggaagtaataccagctttacagctggtaactttattataaagcagaaaaattagtctactcaagctcaagtatatagtcygaatatctgtttttctctaatacttcagttcaacctacctgttttgctgttaaccactcggaatgttgttacctgaactgcctgtttctacttgggtatgcctgtgctgaataagaacattccaaattcaagaagcaggaggaaagatgcccattctacttattgtcatttttacaatccactaagctgtttcttcttgtgtcttttctactaagaaatttgcatagagatttcactgtatcttgttttgaggagccttctttaatctgcagaggatatatatttctagtaaagaagaga

SEQ ID NO: 60279 - DNA, 600 bp, Chicken  19866894319544_1
gaaacaaaattaatccagagtttctttacagtttgaaagcagcagtaaattaaatgctatcttctctatcatgctgccagtgctgctaagaaatacagcattagaaataagaaaccacagtagctctcttgtactttaatttctgcaaggtttctagcatttgtttctctgtaatctaagatttctttagcacagtaagaagcagagagcgtacggagagggcaaaggacaatttctaacatgctacttgacccattccacaactaataagatcagtcctacccctaaatgtcatggagrgttaaatcagtatcacttctggtcttcacacagttcccatcaagcttactgcacaacaggttccttcaaactaaaatcttttctcaagcttacaccgcctgtcccctctctgttacgctgctcaattgtttccttatgcgtggtagcgctgcatcacacacggcagtgggcccaacactaagtaacttaacacagtagcagcctacggaaatgcagattttaaaaggtgattttgaatagctgtgttgctcatttgaatgactgataacctggaatcatctagactggtcagcttaggga

SEQ ID NO: 60280 - DNA, 600 bp, Chicken  19866894319544_2
acttctggtcttcacacagttcccatcaagcttactgcacaacaggttccttcaaactaaaatcttttctcaagcttacaccgcctgtcccctctctgttacgctgctcaattgtttccttatgcgtggtagcgctgcatcacacacggcagtgggcccaacactaagtaacttaacacagtagcagcctacggaaatgcagattttaaaaggtgattttgaatagctgtgttgctcatttgaatgactgataacctggaatcatctagactggtcagcttagggataaatattttaccrtttttttttttttttaagattttctgaaccccaaatcagaccttcwgtatcctttaaaaaacaaaaagcagcaaaatcttccgtgttcatttccactagtttcatctgcagtatctgcagttgctctgtgtgttcctcagttctccatttcccagcagtttttattggcacccgttgcacacaagtgagcactgaccaatgccagtgaggtctgacagagcaaggtcaatgcggagatgttaggtgtgatcagcaggtgtgaccttgtttgaaattcaactcttcttyccacacaaatgg

SEQ ID NO: 60281 - DNA, 600 bp, Chicken  19866894319544_3
ttccttcaaactaaaatcttttctcaagcttacaccgcctgtcccctctctgttacgctgctcaattgtttccttatgcgtggtagcgctgcatcacacacggcagtgggcccaacactaagtaacttaacacagtagcagcctacggaaatgcagattttaaaaggtgattttgaatagctgtgttgctcatttgaatgactgataacctggaatcatctagactggtcagcttagggataaatattttaccttttttttttttttttaagattttctgaaccccaaatcagaccttcwgtatcctttaaaaaacaaaaagcagcaaaatcttccgtgttcatttccactagtttcatctgcagtatctgcagttgctctgtgtgttcctcagttctccatttcccagcagtttttattggcacccgttgcacacaagtgagcactgaccaatgccagtgaggtctgacagagcaaggtcaatgcggagatgttaggtgtgatcagcaggtgtgaccttgtttgaaattcaactcttcttyccacacaaatggctttgggatgaaatttcatcttcagcatttgaggaggagagagtat

SEQ ID NO: 60282 - DNA, 600 bp, Chicken  19866894319544_4
aatattttaccttttttttttttttttaagattttctgaaccccaaatcagaccttcwgtatcctttaaaaaacaaaaagcagcaaaatcttccgtgttcatttccactagtttcatctgcagtatctgcagttgctctgtgtgttcctcagttctccatttcccagcagtttttattggcacccgttgcacacaagtgagcactgaccaatgccagtgaggtctgacagagcaaggtcaatgcggagatgttaggtgtgatcagcaggtgtgaccttgtttgaaattcaactcttcttyccacacaaatggctttgggatgaaatttcatcttcagcatttgaggaggagagagtatcacagcagtttgtgagctccattattttcccaactaatataacatcaagaaaatgggaaaaagtgaaatcttgatttgtattcatttttggatgcaggcactttgaatgtttttctagcttgtagtggtattgcattgatgcctgtaaataaatactcagtacaagctgccaaagttaccagcagaacgcaaccaccaacaaaaagaaaacagagatgaatgtgaaatgaaaccttgcttct

SEQ ID NO: 60283 - DNA, 600 bp, Chicken  19866894319551_1
gatctggaggaaggcagagtcatgcaggggatggagcaatgattcaggctttttgtacgtgtggcatatttgggtgaactcacacgttagacaacaccttaaatttcaccgctgacatctgaccaagcaatactcagcctaggccagaaattgtggttaaccctgcatgtgatggattccaaaacaggcaggtcaccaaggcgtcatctctcctgggcaaagatctgagacaaggctgtgaatagaggctgcaaagtcaagcaacatcatggttgctgggcctacagcaggtcctccaakmctactgatgtgccctggcaaccayggtgaaaacagggaagagcaaaatgtctcaaaaaagaccaagcagatgttggtctgaagagggtttctttgggctcctgcagagctacgtgcccttgtgctttgtcttcataatgcaccagcttatcttgttctctattcaaaggatggccaaggatgtaatactctcctctgtgtgtccctccttgccacacagtgttctagcacttacctcacgttgtttgcccatctcctgggggtgtgtacagtttttgaccatttctctgcatcccaccc

SEQ ID NO: 60284 - DNA, 600 bp, Chicken  19866894319551_2
atctggaggaaggcagagtcatgcaggggatggagcaatgattcaggctttttgtacgtgtggcatatttgggtgaactcacacgttagacaacaccttaaatttcaccgctgacatctgaccaagcaatactcagcctaggccagaaattgtggttaaccctgcatgtgatggattccaaaacaggcaggtcaccaaggcgtcatctctcctgggcaaagatctgagacaaggctgtgaatagaggctgcaaagtcaagcaacatcatggttgctgggcctacagcaggtcctccaakmctactgatgtgccctggcaaccayggtgaaaacagggaagagcaaaatgtctcaaaaaagaccaagcagatgttggtctgaagagggtttctttgggctcctgcagagctacgtgcccttgtgctttgtcttcataatgcaccagcttatcttgttctctattcaaaggatggccaaggatgtaatactctcctctgtgtgtccctccttgccacacagtgttctagcacttacctcacgttgtttgcccatctcctgggggtgtgtacagtttttgaccatttctctgcatcccaccca

SEQ ID NO: 60285 - DNA, 600 bp, Chicken  19866894319551_3
aggggatggagcaatgattcaggctttttgtacgtgtggcatatttgggtgaactcacacgttagacaacaccttaaatttcaccgctgacatctgaccaagcaatactcagcctaggccagaaattgtggttaaccctgcatgtgatggattccaaaacaggcaggtcaccaaggcgtcatctctcctgggcaaagatctgagacaaggctgtgaatagaggctgcaaagtcaagcaacatcatggttgctgggcctacagcaggtcctccaakmctactgatgtgccctggcaaccayggtgaaaacagggaagagcaaaatgtctcaaaaaagaccaagcagatgttggtctgaagagggtttctttgggctcctgcagagctacgtgcccttgtgctttgtcttcataatgcaccagcttatcttgttctctattcaaaggatggccaaggatgtaatactctcctctgtgtgtccctccttgccacacagtgttctagcacttacctcacgttgtttgcccatctcctgggggtgtgtacagtttttgaccatttctctgcatcccacccagtgtcagtactattccatggcagt

SEQ ID NO: 60286 - DNA, 599 bp, Chicken  19866894319552_1
  misc_feature (1)..(196): n is any nucleotide
nnnnnnnnnnnnnnnnnnnnnnnnnnnnnnnnnnnnnnnnnnnnnnnnnnnnnnnnnnnnnnnnnnnnnnnnnnnnnnnnnnnnnnnnnnnnnnnnnnnnnnnnnnnnnnnnnnnnnnnnnnnnnnnnnnnnnnnnnnnnnnnnnnnnnnnnnnnnnnnnnnnnnnnnnnnnnnnnnnnnnnnnnnnnnnnnnnnncgaaggatgactcttaggctttcaggcaaatgttgttcctgtaaaaatgttaactagacatctcaaagaaacagcttcttaggagaggcaaggtaaatgaagtrcagtacacctcatgaaggacatgaagaagctacgtgcattgaaacagcctttaaaagcaaagcgatgtctaaaacgtgtattaattcctttacatggagtcaaccaactcgggatacctgcttacggtcacgttcccagtccactaaacgacagcaatgtaaaaacgtgcacacctggtgttgtgcccttgttgaactggccgtcatggagctctcctcccgtgtccccaggggtttgggctgcctgacttccctgtctggctgcaccttgcgacactttatgctgtggatgttctgaa

SEQ ID NO: 60287 - DNA, 600 bp, Chicken  19866894319553_1
acacagccccatggcatggcaatggccacggtctggtggtgcccacggctcgatcctgctgaaatctggagacctgccacgttggtgatgcctgtcccagggtctgcgcatccctcttggggaaggagcacgtccgacatcccaactaatggctctgatgatcattaaatccatcttaaagaattaaagtagcggttaaggctggtggaggagaaagactggtgtcctttggggacgttctccgagatccccatggtagtcatgacagcacccgaaaacacccatgggatactcttctgrtcttgctccatggtgctggtgtgtctctggccgaggaacctgtcctgatggctgtccctgctgttgtcccacaggttgtcacccgtctcatccacctcctgagccagaagatcttgggaaacctccagcagctccgcggccccttcgcaggtgggtcccaaagggacgggggacaacgaggacaaggtgatgagggggtgagacaccacaccactgcatcttcttgcaggctctggtttgggcatggcctccagctcggagcccaccaaccccaccagcaacctgtcaacggtggcggtg

SEQ ID NO: 60288 - DNA, 600 bp, Chicken  19866894319553_2
cttgggaaacctccagcagctccgcggccccttcgcaggtgggtcccaaagggacgggggacaacgaggacaaggtgatgagggggtgagacaccacaccactgcatcttcttgcaggctctggtttgggcatggcctccagctcggagcccaccaaccccaccagcaacctgtcaacggtggcggtgctgccagtgtgtgacgacgtgcccacggctgccttcaccttggagctcaagcacgcgctgaatgccatcggtgagcgctggcatggcggtgaccgcagcaccgtggtgaccwtgaggtggaggtgaccatggtgtggtggtgaccacagcctcgtgactcagcggtggccatggagtggaggtggttctgtgtcatggtggtgacygtggcacagcagtgaccacagccctgtgagtcagtggtcatggcttgtggtgaccagaagcccaaggcactgtggtggccacgcagcagtggcagccgtgtcttggtggtgaccacacaataatggtgagcatggcttggaggtggtgatggttaccatgtggcgttgtggtggccatgcgatggcgttgaccgtggtgactggaa

SEQ ID NO: 60289 - DNA, 600 bp, Chicken  19866894319553_3
cacaccactgcatcttcttgcaggctctggtttgggcatggcctccagctcggagcccaccaaccccaccagcaacctgtcaacggtggcggtgctgccagtgtgtgacgacgtgcccacggctgccttcaccttggagctcaagcacgcgctgaatgccatcggtgagcgctggcatggcggtgaccgcagcaccgtggtgaccwtgaggtggaggtgaccatggtgtggtggtgaccacagcctcgtgactcagcggtggccatggagtggaggtggttctgtgtcatggtggtgacygtggcacagcagtgaccacagccctgtgagtcagtggtcatggcttgtggtgaccagaagcccaaggcactgtggtggccacgcagcagtggcagccgtgtcttggtggtgaccacacaataatggtgagcatggcttggaggtggtgatggttaccatgtggcgttgtggtggccatgcgatggcgttgaccgtggtgactggaatgccatggcatgcttagtggccacacagcagtggtgaccatggcttggtggtgtctggagccccatggcatgctggtgatcatagatgatggca

SEQ ID NO: 60290 - DNA, 600 bp, Chicken  19866894319554_1
ctcatttcttgtatcaccagtaatcaaaatacctgagccagattttgccctcggctgcactgtgcgttccaaacaaaagcaaccccaactcccagcagtctgcacagcagcaccgtccgttctcattttgtgctcacgtactgcggagaggataaagaattgcgcatgctgcacagaaatgggagaaattactgctctgttaagtatttgccagggttactacagcaaacatttttgtgggcagaggagaaaaatacaaagcggatccaagtaatgaggatatatcttcatacaggaacrctyaccgtggagtttgccatttcatcataccgctayagaaacacacggttatgaagggggtgcaaagaaatcgctttatccatcgctggaatgcagcagctatttagcaattcatgggaaaacgaccctttgaggagcaactggatcatctctgcttgaaattgaaaggacaattcgagtaagcggaataatataattatgtaacttgggattttgccatagcatcgagcttaatacttcatcaagcttctcagaacgctgaaatggatctctaatgcccagaaagctgcggccctttgt

SEQ ID NO: 60291 - DNA, 600 bp, Chicken  19866894319554_2
atttcttgtatcaccagtaatcaaaatacctgagccagattttgccctcggctgcactgtgcgttccaaacaaaagcaaccccaactcccagcagtctgcacagcagcaccgtccgttctcattttgtgctcacgtactgcggagaggataaagaattgcgcatgctgcacagaaatgggagaaattactgctctgttaagtatttgccagggttactacagcaaacatttttgtgggcagaggagaaaaatacaaagcggatccaagtaatgaggatatatcttcatacaggaacrctyaccgtggagtttgccatttcatcataccgctayagaaacacacggttatgaagggggtgcaaagaaatcgctttatccatcgctggaatgcagcagctatttagcaattcatgggaaaacgaccctttgaggagcaactggatcatctctgcttgaaattgaaaggacaattcgagtaagcggaataatataattatgtaacttgggattttgccatagcatcgagcttaatacttcatcaagcttctcagaacgctgaaatggatctctaatgcccagaaagctgcggccctttgttta

SEQ ID NO: 60292 - DNA, 600 bp, Chicken  19866894319554_3
gccagattttgccctcggctgcactgtgcgttccaaacaaaagcaaccccaactcccagcagtctgcacagcagcaccgtccgttctcattttgtgctcacgtactgcggagaggataaagaattgcgcatgctgcacagaaatgggagaaattactgctctgttaagtatttgccagggttactacagcaaacatttttgtgggcagaggagaaaaatacaaagcggatccaagtaatgaggatatatcttcatacaggaacrctyaccgtggagtttgccatttcatcataccgctayagaaacacacggttatgaagggggtgcaaagaaatcgctttatccatcgctggaatgcagcagctatttagcaattcatgggaaaacgaccctttgaggagcaactggatcatctctgcttgaaattgaaaggacaattcgagtaagcggaataatataattatgtaacttgggattttgccatagcatcgagcttaatacttcatcaagcttctcagaacgctgaaatggatctctaatgcccagaaagctgcggccctttgtttacagatctcagccgtccccttcgggccggcgctg

SEQ ID NO: 60293 - DNA, 600 bp, Chicken  19866894319565_1
aagaatgtcagagggctataaatatatcatatggcagagaacagcctacaggtagcagtcagtaaataaccagtgaatataaacagtttgtaaaatagaataaacaaagaagtttggaagaaaacaaatacaaaaatatactgaaacccatatctaatcatacctgatctaaaaataaaaatagaaaataactaaacacagttaaaaaatatctacatgagaggataaatgaattaaagatcactctaaaaagatcaaagttaaaagcacggtagaactgaacactagttatcttgtgcrttctggtgttttgtcttctgatatgcgtacttcaagagcaaagaaacctttgctccaaacccccattaatactttgcgatacaaactcagctagtcccgtactcctctactctgctagtcactagtcccatccaaaactgcaagcagaaaacaaaggcataggaaccatatgcacacagtacctcttgtcccacgagccccagggcgacccgggatgccagtcagacctggaacaccgtcattccctggcaaaccaggaaaccctcttggaccttctgggcctcttggacctggtggtcc

SEQ ID NO: 60294 - DNA, 442 bp, Chicken  19866894319568_1
taatctcagctcttttgtgtcaaaaatgttctgaattctctctcaagcacatttccttctgcattttgaaagctcagtttctgaaacttgtccaaagtctaattccaagagaatcactcattgttccatttttgccagtggcaatttgtcagcccctccacctaacagttatcaggaaatgacagacaaaatcctacaacagagttgctcatcagaagtcagtgaatgtatctttcattatctgttagttatcagtcattatgtcatcagtatgttgatctattaggttagcgtgctctsagaccacaaactgaagggtatggcagttcttatgccaagccaggtgttctgtgacaaaggttttgtcttctttctatcatattattttttaaaatgcacttttcagtttctctccatgtcttctgacttcatcctgaacatg

SEQ ID NO: 60295 - DNA, 599 bp, Chicken  19866894319589_1
  misc_feature (1)..(72): n is any nucleotide
nnnnnnnnnnnnnnnnnnnnnnnnnnnnnnnnnnnnnnnnnnnnnnnnnnnnnnnnnnnnnnnnnnnnnnnngctctgtgatagaggtggcagaggtccatggtttgtagccgggcaaagggggagggagtggagggaacagctatgtaacagactgaggaagtgagtcacttctctgtgaaacacaggcctatggttccactagaactggagccaagcctggcctccaagggtggaagttgcgtaagttaatttaaaccctttgtcttttcctcctcatcacactatcaactctgccayagtactaaaacctgcactgtagccatatccrtttagaggaaactcaagttgcagaacttcagtgtgctgtatatttctgttttattatttttcattttatatagagagactaaaggatttatttcaggttttggtggagtgtgtgtgttaatcttaccagctttgtgcagatttgtgaaatgtaagggcagtttttatgagaagtggccttgttctttcttgaaaaktcctttgagtacgttcagtacaaatagggaaactgccttttcatataaagaaagaagagatttctcttgcag

SEQ ID NO: 60296 - DNA, 599 bp, Chicken  19866894319589_2
  misc_feature (1)..(41): n is any nucleotide
nnnnnnnnnnnnnnnnnnnnnnnnnnnnnnnnnnnnnnnnngctctgtgatagaggtggcagaggtccatggtttgtagccgggcaaagggggagggagtggagggaacagctatgtaacagactgaggaagtgagtcacttctctgtgaaacacaggcctatggttccactagaactggagccaagcctggcctccaagggtggaagttgcgtaagttaatttaaaccctttgtcttttcctcctcatcacactatcaactctgccayagtactaaaacctgcactgtagccatatccrtttagaggaaactcaagttgcagaacttcagtgtgctgtatatttctgttttattatttttcattttatatagagagactaaaggatttatttcaggttttggtggagtgtgtgtgttaatcttaccagctttgtgcagatttgtgaaatgtaagggcagtttttatgagaagtggccttgttctttcttgaaaaktcctttgagtacgttcagtacaaatagggaaactgccttttcatataaagaaagaagagatttctcttgcagttgatccctaaattgcatatttstttctaaa

SEQ ID NO: 60297 - DNA, 600 bp, Chicken  19866894319589_3
caagggtggaagttgcgtaagttaatttaaaccctttgtcttttcctcctcatcacactatcaactctgccayagtactaaaacctgcactgtagccatatccrtttagaggaaactcaagttgcagaacttcagtgtgctgtatatttctgttttattatttttcattttatatagagagactaaaggatttatttcaggttttggtggagtgtgtgtgttaatcttaccagctttgtgcagatttgtgaaatgtaagggcagtttttatgagaagtggccttgttctttcttgaaaaktcctttgagtacgttcagtacaaatagggaaactgccttttcatataaagaaagaagagatttctcttgcagttgatccctaaattgcatatttstttctaaagcactttgtgactctggaatgaagtgtactattttagtaataggtattaktgaatttgcaaatctgttttcattagttaagaaaaatgtttctcttgcatgctttcaggtctctgagatttaaggccatttagttgatacctgcaaatggtgctttactgaaggtttgccccataattcttgmtgaccagctcagct

SEQ ID NO: 60298 - DNA, 600 bp, Chicken  19866894319589_4
ccatatccrtttagaggaaactcaagttgcagaacttcagtgtgctgtatatttctgttttattatttttcattttatatagagagactaaaggatttatttcaggttttggtggagtgtgtgtgttaatcttaccagctttgtgcagatttgtgaaatgtaagggcagtttttatgagaagtggccttgttctttcttgaaaaktcctttgagtacgttcagtacaaatagggaaactgccttttcatataaagaaagaagagatttctcttgcagttgatccctaaattgcatatttstttctaaagcactttgtgactctggaatgaagtgtactattttagtaataggtattaktgaatttgcaaatctgttttcattagttaagaaaaatgtttctcttgcatgctttcaggtctctgagatttaaggccatttagttgatacctgcaaatggtgctttactgaaggtttgccccataattcttgmtgaccagctcagctcaggtgggaaagtcccaaatgttttgcaaaatccttgatgaagtacagagctataattgttgtttatgcctgtgcctctgaggcctgagaattaa

SEQ ID NO: 60299 - DNA, 600 bp, Chicken  19866894319589_5
tttattatttttcattttatatagagagactaaaggatttatttcaggttttggtggagtgtgtgtgttaatcttaccagctttgtgcagatttgtgaaatgtaagggcagtttttatgagaagtggccttgttctttcttgaaaaktcctttgagtacgttcagtacaaatagggaaactgccttttcatataaagaaagaagagatttctcttgcagttgatccctaaattgcatatttstttctaaagcactttgtgactctggaatgaagtgtactattttagtaataggtattaktgaatttgcaaatctgttttcattagttaagaaaaatgtttctcttgcatgctttcaggtctctgagatttaaggccatttagttgatacctgcaaatggtgctttactgaaggtttgccccataattcttgmtgaccagctcagctcaggtgggaaagtcccaaatgttttgcaaaatccttgatgaagtacagagctataattgttgtttatgcctgtgcctctgaggcctgagaattaagtccattcatcaaaggaaactagattttatggcaaaaagaatgcaataaatatcttaa

SEQ ID NO: 60300 - DNA, 600 bp, Chicken  19866894319589_6
tctttcttgaaaaktcctttgagtacgttcagtacaaatagggaaactgccttttcatataaagaaagaagagatttctcttgcagttgatccctaaattgcatatttstttctaaagcactttgtgactctggaatgaagtgtactattttagtaataggtattaktgaatttgcaaatctgttttcattagttaagaaaaatgtttctcttgcatgctttcaggtctctgagatttaaggccatttagttgatacctgcaaatggtgctttactgaaggtttgccccataattcttgmtgaccagctcagctcaggtgggaaagtcccaaatgttttgcaaaatccttgatgaagtacagagctataattgttgtttatgcctgtgcctctgaggcctgagaattaagtccattcatcaaaggaaactagattttatggcaaaaagaatgcaataaatatcttaatatcttacatcaatcttaaaatatcttacaatctatcagaattatattgacacaatctggccttgatgtgtatcaagaagagatagtaatagagacttgcctatcattacttgtttgttattagtttaaccat

SEQ ID NO: 60301 - DNA, 600 bp, Chicken  19866894319605_1
gatttgaaaggtggattatttggtggataagcaattgcttggaaggttgcagtcagagggttgtggtcaatggctctgtgtccaggtggaagctggtcacaagtggtgtgcctcagggtctgtcttgagaccagtactctttaacatctttattaatgacataaatgatggaattgagtgctccctcagcaagtttgctgatgacactgagttgagcaatgcggttgatatggaagaaaaaagggatgccacgcagaggaaccttgataaactcgaaagatgggcccttgtgaacctaaygaggttcaacaaagcaaagtgcaaggttttgcacttgggtctaggtaatcccagatatgtatacaaactaggagaagaactcctggagagcagccctgctgagaaggacttaggggtcctggtctatttaaaacttaacataaaccagcagtgagcacttgcagcctggaaggccaacagtatcctgggttccatcagaagtggggtggccagaagaggagactgtcccatctgcatccaggactagggcacccaacacaggaaagatgtggagattttggacagggtccagaggaggac

SEQ ID NO: 60302 - DNA, 600 bp, Chicken  19866894319605_2
atgtatacaaactaggagaagaactcctggagagcagccctgctgagaaggacttaggggtcctggtctatttaaaacttaacataaaccagcagtgagcacttgcagcctggaaggccaacagtatcctgggttccatcagaagtggggtggccagaagaggagactgtcccatctgcatccaggactagggcacccaacacaggaaagatgtggagattttggacagggtccagaggaggaccatgaagatgcccagagggctggagcacctctcctatgaagacaggctgagggagmtgggcttgttcagtcaggggaagagacctcattgtagccttctaacctttaaagggagattataaacaggagggaaatcaacttattacacaatctgatagtgataggamaaggaagggaatggttttaaactaaagggaggaagactaagattagttatcagagggaagcttttcactgaggggagcgagcagcttgaacaggctgcccagggaggctgcggctgccccgtgcctggaggtgattaaggccatgttggatggggccctgggcaatctgatctagtgcttcatctagcag

SEQ ID NO: 60303 - DNA, 600 bp, Chicken  19866894319605_3
tggaaggccaacagtatcctgggttccatcagaagtggggtggccagaagaggagactgtcccatctgcatccaggactagggcacccaacacaggaaagatgtggagattttggacagggtccagaggaggaccatgaagatgcccagagggctggagcacctctcctatgaagacaggctgagggagmtgggcttgttcagtcaggggaagagacctcattgtagccttctaacctttaaagggagattataaacaggagggaaatcaacttattacacaatctgatagtgataggamaaggaagggaatggttttaaactaaagggaggaagactaagattagttatcagagggaagcttttcactgaggggagcgagcagcttgaacaggctgcccagggaggctgcggctgccccgtgcctggaggtgattaaggccatgttggatggggccctgggcaatctgatctagtgcttcatctagcagctggcagcctgcctgtggcaggggtttggaatttgatgatacttgaggtcccttccaattcaagccactctatgattctatgattcagtgactgtcaaaagtgaattctt

SEQ ID NO: 60304 - DNA, 600 bp, Chicken  19866894319609_1
aactcgtgttgcatgctctagggcaacagaaatgcctccaaaccccttggcaaccatcaggctgctggaatgcaaaggaagtccttaaataccccatcctctgcaagggagtctggcagcctgctcagagtctcattgtcctcctttggcccagtatttccctcaaggatccctcagtcctttttattcaaatgagcatttcagactattaattattttacataggagaaaaaaaaaatcacaagccagtagagtgtagaagaaaaatattcatggaaaggaatcttctcatttcatgtwttagaaaaatgtattgataggtaactcacataaattatctagcatgcgtattgtagaagatgagctatatgcttttcttcccgaccaagtgttctgtaacttacttgataaattactcggaggtgtctgccttcctttaagctattagctgagtattgaattacctgtttcctgtttggaacacaatccactaagtgtctgacactaatgggtttactcttatgctttcccataatgaaattaaagtgtgctttttaaaaaaataggcccagtagtttttttcacagcatttttatgcta

SEQ ID NO: 60305 - DNA, 600 bp, Chicken  19866894319614_1
gcagattaaatttcttcaagaaatggttttcttgacacagggcaaaaacaattactatcagtctagatttgctccatttaaagcttacaaaagttcagagcaaatctttcaagtacttcacagaacattagctctcaaaagccccagactcatctacctactgtcatgctttcacaggtcagcagcacctctccaatatacagcagctcaaggcacaattagtaagaaaaattgaattgaacagtacgagtacaaaacaatggaggggagtttgaagagagcacatggacctgaaccctrtgtgcaaaaccttctatgcttcttcttcactgttatgccatagacaagaggagaaggatctcagccagattcctttagagaaacaaacatgctaactttcaaccagtgcagaatgatccagaaaaatgctctttttaatgtaagtgtgaatatccacagaaaatttctgttgttccgttcatcttttggaactagcaaagtaaatatatgggtatatgaagttctgaaacctcacatattatgtaatcttttaagagagctcacgtcctgtactcaacattgcagcagaagtgccatagt

SEQ ID NO: 60306 - DNA, 600 bp, Chicken  19866894319619_1
tacacctcaaggatcaccatcctgctattcaaggtcaaaaaaccaatgctggtctgcagtttaaggcacaccaaggccctgatcttaacacaggaattacagagcactaattaagaagcactccccaaccccaaataatgcaaagtttgaggttagttttattttttatttttaaatacttcaggagaaaaaaagtctcaggttcacacaacagaagatagtgagaagttaccctggcagtctcaagtcaaattaaaaagtacatttcaccacaatctccaatgcactgcagtactcatygctttaaacttcctcatctgtgtcttcattcccttagtgaaaggtaaaytgtagctttcaaaagaaaaaagccaccatacaattattggattattcaccacccttcctatacaaaagttatattcctctttaaaaagtgctacaaccctgtgcttctccctgaaagccatctctccttccagattaattacaagtatccaaagatgcaactctgactaaaagagggaagagcatttcagatatttaaagtcatgtaaatgttaagcctagacatatggccattttcaactctctctttgc

SEQ ID NO: 60307 - DNA, 600 bp, Chicken  19866894319619_2
tggtctgcagtttaaggcacaccaaggccctgatcttaacacaggaattacagagcactaattaagaagcactccccaaccccaaataatgcaaagtttgaggttagttttattttttatttttaaatacttcaggagaaaaaaagtctcaggttcacacaacagaagatagtgagaagttaccctggcagtctcaagtcaaattaaaaagtacatttcaccacaatctccaatgcactgcagtactcatygctttaaacttcctcatctgtgtcttcattcccttagtgaaaggtaaaytgtagctttcaaaagaaaaaagccaccatacaattattggattattcaccacccttcctatacaaaagttatattcctctttaaaaagtgctacaaccctgtgcttctccctgaaagccatctctccttccagattaattacaagtatccaaagatgcaactctgactaaaagagggaagagcatttcagatatttaaagtcatgtaaatgttaagcctagacatatggccattttcaactctctctttgctctggcgctaggtactatggtgctggaacaatcctaaaatccaatttat

SEQ ID NO: 60308 - DNA, 600 bp, Chicken  19866894319620_1
aaaacttcatccagaaatagcggtgacccctagaataggcagcccagggagatggtggtggtaccaccattcctggaggtgtttgacaaatgtgtagatgtggcattaatgacatagttttagtggtatgatgctgaaagtttcacggtcggacttgataatcttagcggtcttttccaaacttcatgattctctgattctatgaatatggttgagttatcaaatataacatttcaacattgttgatttacctaaaatatatacctagctaaaattaccatatagctttgcccttaaaaygtgctgcttctgaaacatcacttttccttgttttgaaggagaggatctcatcttcgccctgcagccactgacaacctgacaagtctgttctgcatttaaggcataccagagaatcagacagccattttgctaccgtttcctgccctcttttcatacaatgaatgtcccagaatgtctgatcagcttatgtatttttgagctgatttgttttcctcatctcagagaaaagagagcaggtggctgcgtctctgcttgcattttaagagagggtttagctttaaaggaaagtgagaataggat

SEQ ID NO: 60309 - DNA, 600 bp, Chicken  19866894319621_1
agagggtaggtagactttttgctgtgtaggaagtcaagtcctggtgggaactgtctcagttcttctgtcagtcatgcatgaatatttcaagaagcatcaggatgaattttttaaaagtaaagaggtaatatgctctgacttctgtacagctagaggtgttccagtgaataatttcatgtgaatcccactgtgtgactgttgtgcacttcttcaaggtccttacctttttatcttttactttccgttacttgatgaattccaagaaccacctgtgcagaaaacaatcctcagctgaatccrtactgattttgaagtatttggaaaaaaaagcagaggtagtttatcatgtgtgagttgttcttattttgttttgtttttaattaaatttggagtatagttaacacagagcatgtaagattatcatccctctgttgcaactaaacagctgggtggygtaaggaacgcttcctgcaatggttaagggattcattctcactgacacagccatcatcttggatgacgttctcaaagagaaagctgggagtactgcctggccttattgtgctgaatgacagtgtgaaaataggtggccagggagtc

SEQ ID NO: 60310 - DNA, 600 bp, Chicken  19866894319621_2
ggtgttccagtgaataatttcatgtgaatcccactgtgtgactgttgtgcacttcttcaaggtccttacctttttatcttttactttccgttacttgatgaattccaagaaccacctgtgcagaaaacaatcctcagctgaatccrtactgattttgaagtatttggaaaaaaaagcagaggtagtttatcatgtgtgagttgttcttattttgttttgtttttaattaaatttggagtatagttaacacagagcatgtaagattatcatccctctgttgcaactaaacagctgggtggygtaaggaacgcttcctgcaatggttaagggattcattctcactgacacagccatcatcttggatgacgttctcaaagagaaagctgggagtactgcctggccttattgtgctgaatgacagtgtgaaaataggtggccagggagtcttgattttatacatgaagattgaaccaagtggaatgaggctggtctctaaaaagtacttcgattcttcagagttggtaactaatcttttagtattgatacatagcttagttctgagaaatgacaaaataaatgatctcttaaggctggcctgtg

SEQ ID NO: 60311 - DNA, 600 bp, Chicken  19866894319629_1
ttataagcagcataaagtgtgggcattttaccacttatttgtattgctacattgcagtgtactgacaacagtgaagaatgaattcctttggataaagtaagagcaccaacagaaaaccaaaacactttacactttttcgaacccatatgacattcagggatcattacagatttggaactagatggtctttaatgtcctctccaacctaagccattctatgaatctatgataactcttctccttgtctctcagtgccctgaaatataggaagaatatctttaagagtctagatttggagaragggtcttcactacgtatcagaatacactcaattggtaatctgtcaaaggtgcttcctttgttaatcaatctcgtacagaaagtcttacagttgaataagtcattcagcagaactctgcatgaacttgttaaaacatatcagtcacactactaattcattttgtttcataccacatcattcttttgraagaaaaggtgtttctttaaacttgagagttaatatttggtttccgtgataatcctcgagagatgaagatcgaatttaatttatctgaatgaaatgtggtttattctgctttt

SEQ ID NO: 60312 - DNA, 600 bp, Chicken  19866894319629_2
tttaatgtcctctccaacctaagccattctatgaatctatgataactcttctccttgtctctcagtgccctgaaatataggaagaatatctttaagagtctagatttggagaragggtcttcactacgtatcagaatacactcaattggtaatctgtcaaaggtgcttcctttgttaatcaatctcgtacagaaagtcttacagttgaataagtcattcagcagaactctgcatgaacttgttaaaacatatcagtcacactactaattcattttgtttcataccacatcattcttttgraagaaaaggtgtttctttaaacttgagagttaatatttggtttccgtgataatcctcgagagatgaagatcgaatttaatttatctgaatgaaatgtggtttattctgctttttctctgaatagttgtaaacactctttatttcaggttgaaatttactgcctttcattttataaaatttatataaaatactttcttccagtatcaccaaaattgctagctctgacttacctttctgtatcattcattgtctttattcctctgtcatgtttcttctctaaacctgcagtccaggtctttt

SEQ ID NO: 60313 - DNA, 600 bp, Chicken  19866894319637_1
ttcacaatattaatcaaatattttattctctcctcatatttgttgtaacaccagtgatattataactacttcaattggttaaatcaagaatctataaacaatcacaatgcacttagtatcatgactgtcaatgcatatcattatattggagagggctggtggtagctagcaaatctgactttgatctgtgggcaatcacagacctctctgaagttgccattcattcaacataagcatcaaaaccaattgtactgcattataaattgtgatcattgaaaccatggaagccactggccaaarcacagagcagattcaaagttatgattaggtgcaaagaaattaaattatctgtttagaaataaaaacacaggctatacctacagaacaaggactgatatagcagtaaaaattaactaaaaatttggtaggcataaatgaaaaaaatccaatcaagtaccttcaagataacacgcaaacatcaaggggcatgaagcttaataaaatcactttatagatatttcagtaagagggagatcaaggaaaggattagtccactacttaagtaaggaatgaaatatattagatgatgccaaaaagact

SEQ ID NO: 60314 - DNA, 599 bp, Chicken  19866894319649_1
  misc_feature (1)..(57): n is any nucleotide
nnnnnnnnnnnnnnnnnnnnnnnnnnnnnnnnnnnnnnnnnnnnnnnnnnnnnnnnnatacctttttcttgcctaatagagaaacagagacaacaacaacaaaaaagtcaccataggggaaagtgtgcaaacatactcctgaggcatgcctggacctgctgcacgtcttaatatgattcagagagatcaatacactgaggtaatatgctctggtcttgcatggaaccaatattcagagaggaaagcaggaatggggtggctgtggtctcttcctgcctccttatcaccactaccctttgycgagaacacgcacrtggaaaatgcyttttttatttaagatgcatttcatttaaatcaattgagatacaacaaagcaggtaacatatgaaactagaggaagaaaccaccacttttggagtctggcagtagacaggactgtaggaaggggtttctgctgttgcatataattgttgctacttacaggacagactgcaaaaaacagcttttcagcccagaaaacagagctcacccactgcagcctcagcactgcaatggctcttcctctcacagatgcactgctcccaggcccccttgttcag

SEQ ID NO: 60315 - DNA, 599 bp, Chicken  19866894319649_2
  misc_feature (1)..(43): n is any nucleotide
nnnnnnnnnnnnnnnnnnnnnnnnnnnnnnnnnnnnnnnnnnnatacctttttcttgcctaatagagaaacagagacaacaacaacaaaaaagtcaccataggggaaagtgtgcaaacatactcctgaggcatgcctggacctgctgcacgtcttaatatgattcagagagatcaatacactgaggtaatatgctctggtcttgcatggaaccaatattcagagaggaaagcaggaatggggtggctgtggtctcttcctgcctccttatcaccactaccctttgycgagaacacgcacrtggaaaatgcyttttttatttaagatgcatttcatttaaatcaattgagatacaacaaagcaggtaacatatgaaactagaggaagaaaccaccacttttggagtctggcagtagacaggactgtaggaaggggtttctgctgttgcatataattgttgctacttacaggacagactgcaaaaaacagcttttcagcccagaaaacagagctcacccactgcagcctcagcactgcaatggctcttcctctcacagatgcactgctcccaggcccccttgttcagggctttggacacag

SEQ ID NO: 60316 - DNA, 599 bp, Chicken  19866894319649_3
  misc_feature (1)..(32): n is any nucleotide
nnnnnnnnnnnnnnnnnnnnnnnnnnnnnnnnatacctttttcttgcctaatagagaaacagagacaacaacaacaaaaaagtcaccataggggaaagtgtgcaaacatactcctgaggcatgcctggacctgctgcacgtcttaatatgattcagagagatcaatacactgaggtaatatgctctggtcttgcatggaaccaatattcagagaggaaagcaggaatggggtggctgtggtctcttcctgcctccttatcaccactaccctttgycgagaacacgcacrtggaaaatgcyttttttatttaagatgcatttcatttaaatcaattgagatacaacaaagcaggtaacatatgaaactagaggaagaaaccaccacttttggagtctggcagtagacaggactgtaggaaggggtttctgctgttgcatataattgttgctacttacaggacagactgcaaaaaacagcttttcagcccagaaaacagagctcacccactgcagcctcagcactgcaatggctcttcctctcacagatgcactgctcccaggcccccttgttcagggctttggacacagccaaaataatt

SEQ ID NO: 60317 - DNA, 600 bp, Chicken  19866894319650_1
ttcactttgcatctggtaagggtcaaatcttccctcctctttccttgtacagctgaagtcaaagatgacaggattttcagttgtctcatctaaggccaccaagatgattagggcctggagcatttcctgcaagacaaaaggctgagagatctgggactgttcagcctggagaagagaagactgaggggggatttcatcattgtttataaatatctacaggataggagtcaagtggatggggccaggctcttttccttggtgtgcaggggcaatgggcacaaacaggaacacaagaagttycacctgaacatgaggaaatcaacactgcagatggagaaractgcctttcaaggtatcccttactctttttrctgtgagggtgactgagcactggagccagtcactcagaaaggctgtggagccttcctccttggagatcttcaagcatcatctggaaatggtcctgggtaaccagctttaggtctccctgtttgagcaagcggattgcaccaggtgacctcaacatcatgtggaaaggaagaaaagtgatttctcccacattattttatccttttcattcaggcactcagacartattta

SEQ ID NO: 60318 - DNA, 600 bp, Chicken  19866894319650_2
tttccttgtacagctgaagtcaaagatgacaggattttcagttgtctcatctaaggccaccaagatgattagggcctggagcatttcctgcaagacaaaaggctgagagatctgggactgttcagcctggagaagagaagactgaggggggatttcatcattgtttataaatatctacaggataggagtcaagtggatggggccaggctcttttccttggtgtgcaggggcaatgggcacaaacaggaacacaagaagttycacctgaacatgaggaaatcaacactgcagatggagaaractgcctttcaaggtatcccttactctttttrctgtgagggtgactgagcactggagccagtcactcagaaaggctgtggagccttcctccttggagatcttcaagcatcatctggaaatggtcctgggtaaccagctttaggtctccctgtttgagcaagcggattgcaccaggtgacctcaacatcatgtggaaaggaagaaaagtgatttctcccacattattttatccttttcattcaggcactcagacartatttatgaacatagcatccccaggctgaaggcaacaccttctta

SEQ ID NO: 60319 - DNA, 600 bp, Chicken  19866894319650_3
gattttcagttgtctcatctaaggccaccaagatgattagggcctggagcatttcctgcaagacaaaaggctgagagatctgggactgttcagcctggagaagagaagactgaggggggatttcatcattgtttataaatatctacaggataggagtcaagtggatggggccaggctcttttccttggtgtgcaggggcaatgggcacaaacaggaacacaagaagttycacctgaacatgaggaaatcaacactgcagatggagaaractgcctttcaaggtatcccttactctttttrctgtgagggtgactgagcactggagccagtcactcagaaaggctgtggagccttcctccttggagatcttcaagcatcatctggaaatggtcctgggtaaccagctttaggtctccctgtttgagcaagcggattgcaccaggtgacctcaacatcatgtggaaaggaagaaaagtgatttctcccacattattttatccttttcattcaggcactcagacartatttatgaacatagcatccccaggctgaaggcaacaccttcttaagaaaagggaaggcaaggcacaaattgtacga

SEQ ID NO: 60320 - DNA, 475 bp, Chicken  19866894319650_4
aagttycacctgaacatgaggaaatcaacactgcagatggagaaractgcctttcaaggtatcccttactctttttrctgtgagggtgactgagcactggagccagtcactcagaaaggctgtggagccttcctccttggagatcttcaagcatcatctggaaatggtcctgggtaaccagctttaggtctccctgtttgagcaagcggattgcaccaggtgacctcaacatcatgtggaaaggaagaaaagtgatttctcccacattattttatccttttcattcaggcactcagacartatttatgaacatagcatccccaggctgaaggcaacaccttcttaagaaaagggaaggcaaggcacaaattgtacgaaataatgtatccaaatcagataaaagatgggtgctcaagaaaggctctgaaaaaattcaccaaattcctgttttggtgctgcctggatccaattattg

SEQ ID NO: 60321 - DNA, 476 bp, Chicken  19866894319655_1
tcatgccttgacccataccaggcctaaagaccctgttatgtctcttcctctgctgtgcctgaagatttcttcagagctccttctgtgcctgtcttctgatttttacagataactttagcagttatgcattctcttctttttcatcttaggttacaatttccgctttataatgtcactctgtataaagtctattttggacttcccttctttcgcagtttaacaatactgtttgctttctttccccccttataatagatggtagatatttactctaatatttaatacggtagctctcaataygctaaaagctttattattttagctgttccttttaactatttcctaaccagcttcctcattcaggtgtcatctctccataaaatgttattgcaatgtattttagacttcctcttaggtaacagagaaatcatgattggtatgggtactcttgaagggaagctcagcagtaatttcat

SEQ ID NO: 60322 - DNA, 599 bp, Chicken  19866894319656_1
  misc_feature (1)..(171): n is any nucleotide
nnnnnnnnnnnnnnnnnnnnnnnnnnnnnnnnnnnnnnnnnnnnnnnnnnnnnnnnnnnnnnnnnnnnnnnnnnnnnnnnnnnnnnnnnnnnnnnnnnnnnnnnnnnnnnnnnnnnnnnnnnnnnnnnnnnnnnnnnnnnnnnnnnnnnnnnnnnnnnnnnnnnnnnnnnnaaataggaggtaaaaaatcaaggccacaatgaggagtcttcttactcaaaaattctatcccaaaaaagtaataaaaatgagttatatttgtatgactcccatataaatctcattttcttacattatgtrmatgattttcagtatttggaactgttctgcaacttacatatgacattgggccaaaaactgaaaatgtgagaaaaagccccagcagaagggctcaggttactggaaaacatataaattaaaataataataattaaacaaacagataaaattaaccaggaaggaaccatcagcaacaacactgctccagcctaacatgtctgtatctgcagacgcacactggccagccacatgacacccagaggacctgaagtgcctttcctctctgctcagccaagcccatagtgctccctcctactaag

SEQ ID NO: 60323 - DNA, 599 bp, Chicken  19866894319656_2
  misc_feature (1)..(170): n is any nucleotide
nnnnnnnnnnnnnnnnnnnnnnnnnnnnnnnnnnnnnnnnnnnnnnnnnnnnnnnnnnnnnnnnnnnnnnnnnnnnnnnnnnnnnnnnnnnnnnnnnnnnnnnnnnnnnnnnnnnnnnnnnnnnnnnnnnnnnnnnnnnnnnnnnnnnnnnnnnnnnnnnnnnnnnnnnnaaataggaggtaaaaaatcaaggccacaatgaggagtcttcttactcaaaaattctatcccaaaaaagtaataaaaatgagttatatttgtatgactcccatataaatctcattttcttacattatgtrmatgattttcagtatttggaactgttctgcaacttacatatgacattgggccaaaaactgaaaatgtgagaaaaagccccagcagaagggctcaggttactggaaaacatataaattaaaataataataattaaacaaacagataaaattaaccaggaaggaaccatcagcaacaacactgctccagcctaacatgtctgtatctgcagacgcacactggccagccacatgacacccagaggacctgaagtgcctttcctctctgctcagccaagcccatagtgctccctcctactaagg

SEQ ID NO: 60324 - DNA, 599 bp, Chicken  19866894319666_1
  misc_feature (1)..(150): n is any nucleotide
nnnnnnnnnnnnnnnnnnnnnnnnnnnnnnnnnnnnnnnnnnnnnnnnnnnnnnnnnnnnnnnnnnnnnnnnnnnnnnnnnnnnnnnnnnnnnnnnnnnnnnnnnnnnnnnnnnnnnnnnnnnnnnnnnnnnnnnnnnnnnnnnnnnnnnaaacctttcttaaagagagcttctgatgcctttttgctttaatctgatatcaggatcgcctctcagtgcgtgccatgagagcagtggttcaggctgtacaaggatggcgctgacagcaaagacaaaatggagacagaagcaaacttctgratttctgtttggcatctctttaacccagggcgttctactggaatggctgatcagtaatgagaggcgagcccaagttttcacctgtgcagcccacttggcaaaccaagggctcgcagtcggagcagcctcaatgcggctctgcctgcacttgtgtctgcayggtgctgggtcrtgccaaaccttgcaagggacgctcagcaaaagtttgccttggggtctgcatgtaaatcctgtaacttcatcacttcatcagttcagccctttccctgctgttggaaaataataccaagcggagtttg

SEQ ID NO: 60325 - DNA, 600 bp, Chicken  19866894319666_2
taaagagagcttctgatgcctttttgctttaatctgatatcaggatcgcctctcagtgcgtgccatgagagcagtggttcaggctgtacaaggatggcgctgacagcaaagacaaaatggagacagaagcaaacttctgratttctgtttggcatctctttaacccagggcgttctactggaatggctgatcagtaatgagaggcgagcccaagttttcacctgtgcagcccacttggcaaaccaagggctcgcagtcggagcagcctcaatgcggctctgcctgcacttgtgtctgcayggtgctgggtcrtgccaaaccttgcaagggacgctcagcaaaagtttgccttggggtctgcatgtaaatcctgtaacttcatcacttcatcagttcagccctttccctgctgttggaaaataataccaagcggagtttgggaaatggagtgttttctgcaaaccacattgctattggtgctttttaatgactaggcattggaaacacagtaactgctctaatcaagatcaacattaatttcttcctagctttcaaatgttataactacatttctctcagtatgttggcatctgtgctggt

SEQ ID NO: 60326 - DNA, 600 bp, Chicken  19866894319666_3
ctgatgcctttttgctttaatctgatatcaggatcgcctctcagtgcgtgccatgagagcagtggttcaggctgtacaaggatggcgctgacagcaaagacaaaatggagacagaagcaaacttctgratttctgtttggcatctctttaacccagggcgttctactggaatggctgatcagtaatgagaggcgagcccaagttttcacctgtgcagcccacttggcaaaccaagggctcgcagtcggagcagcctcaatgcggctctgcctgcacttgtgtctgcayggtgctgggtcrtgccaaaccttgcaagggacgctcagcaaaagtttgccttggggtctgcatgtaaatcctgtaacttcatcacttcatcagttcagccctttccctgctgttggaaaataataccaagcggagtttgggaaatggagtgttttctgcaaaccacattgctattggtgctttttaatgactaggcattggaaacacagtaactgctctaatcaagatcaacattaatttcttcctagctttcaaatgttataactacatttctctcagtatgttggcatctgtgctggtatttatgaagtt

SEQ ID NO: 60327 - DNA, 600 bp, Chicken  19866894319676_1
acataagatcattgggcttctggaagtgtgagagctctgtggtcactcctgatcccaatcaactcactgctgtgacagtacttggcctatttccaggccagaaggcattggtgtgagcggctgccaaccctctgcatttcacagaaataacccaaaccatgctgtttatttctgcagcacagtgaggtagaggaacctcttatttttttgatcagctgatgtcttgtctatctccccgacaaagtgggaaagcacctcagctctggtattacaagcctcctccagtgaaacaaaattttytccaaacacatctgacgataacctgcctcagaaatggtagagctctcgtgtttctgttgtatatgttctcttcctacccagggatttgaagggctttgctcttgggatggggccaggagtgtgctggccatagcattttagcagtgtatcagatggcagatggcttgtccttgatatggcctactgaagcacttgtcttctgtggtacggtcatggagccacaacagtaagagctgcttttctgggaagtgtgtttcttccacaggtcacacaggaggcatcattctgctcagcactaca

SEQ ID NO: 60328 - DNA, 600 bp, Chicken  19866894319678_1
aaaaaaccatgggagccgaaaatcatgaatagctccataacaattcaactgttagaggcacgtgcctgccaaacagaatccccagatttgccctaacttgtacagggcagtaattcaggctcagcagatgcaagcacttcaacagataatttttaacacacctactccaacaaggagtggaatcctaggaatggctatgccaaatccagggcagtgaatggttcttgtgataaggagagctagcataatataatacgtaaaataaaaacttgggatacttttaattgcctaggttacacrgaaccatttaaygatgtcatatttcagtgaacgtactgagagagctgtgaatcagtgcatgtttttatactaacaccgaccattaaataaatgtttttctgacaagaaaaggcattgaagatttcagattcgctattccagggagttgtaggatggctttttgtgcatgatccaacattttggaatgattgctattaaaatgcttaaaattacaccagtgtgcctgcgtgcaaccacatacgkcagaaccataaacaccaagcagataaagaaacagcaccackgggggagaaaacrcaa

SEQ ID NO: 60329 - DNA, 574 bp, Chicken  19866894319678_10
actgcataactataatgctgtyttattyattacaataacttattttccaaaaagattaacctggaggtggcttctcccccagcactatacatctgggcatctccatcatytgaggaaaattaagaacaggtaaaaagaataagataagaataccctgaaataggcatttgcaaacaagtgaaaggaaaatatatcagtaggtaaatcagaaaacaaggtaccctccccaccagtccagttttctcaggagaatggcagtggaatccttcccaaagagctccatgtaaaaaggagtcacartttcacaggaactttgaatttcccattcagcttctcttcyctgaaatgcacattttttcttccttatttatgtccactgccctcaatcatccagtctctaaaatgcttttccatcaagcttctggctctccagtcaccgacatttacagtggggataatcttctgtggcttcaaccattgaacaaaacgtttcatttccaggtaactgctgtgttcactgtaaggaattcctaaaatgaaacaaatcagagagatctgttactcttcctagttt

SEQ ID NO: 60330 - DNA, 534 bp, Chicken  19866894319678_11
tattttccaaaaagattaacctggaggtggcttctcccccagcactatacatctgggcatctccatcatytgaggaaaattaagaacaggtaaaaagaataagataagaataccctgaaataggcatttgcaaacaagtgaaaggaaaatatatcagtaggtaaatcagaaaacaaggtaccctccccaccagtccagttttctcaggagaatggcagtggaatccttcccaaagagctccatgtaaaaaggagtcacartttcacaggaactttgaatttcccattcagcttctcttcyctgaaatgcacattttttcttccttatttatgtccactgccctcaatcatccagtctctaaaatgcttttccatcaagcttctggctctccagtcaccgacatttacagtggggataatcttctgtggcttcaaccattgaacaaaacgtttcatttccaggtaactgctgtgttcactgtaaggaattcctaaaatgaaacaaatcagagagatctgttactcttcctagttt

SEQ ID NO: 60331 - DNA, 600 bp, Chicken  19866894319678_2
gagccgaaaatcatgaatagctccataacaattcaactgttagaggcacgtgcctgccaaacagaatccccagatttgccctaacttgtacagggcagtaattcaggctcagcagatgcaagcacttcaacagataatttttaacacacctactccaacaaggagtggaatcctaggaatggctatgccaaatccagggcagtgaatggttcttgtgataaggagagctagcataatataatacgtaaaataaaaacttgggatacttttaattgcctaggttacacrgaaccatttaaygatgtcatatttcagtgaacgtactgagagagctgtgaatcagtgcatgtttttatactaacaccgaccattaaataaatgtttttctgacaagaaaaggcattgaagatttcagattcgctattccagggagttgtaggatggctttttgtgcatgatccaacattttggaatgattgctattaaaatgcttaaaattacaccagtgtgcctgcgtgcaaccacatacgkcagaaccataaacaccaagcagataaagaaacagcaccackgggggagaaaacrcaaagtgaaacttac

SEQ ID NO: 60332 - DNA, 600 bp, Chicken  19866894319678_3
cataatataatacgtaaaataaaaacttgggatacttttaattgcctaggttacacrgaaccatttaaygatgtcatatttcagtgaacgtactgagagagctgtgaatcagtgcatgtttttatactaacaccgaccattaaataaatgtttttctgacaagaaaaggcattgaagatttcagattcgctattccagggagttgtaggatggctttttgtgcatgatccaacattttggaatgattgctattaaaatgcttaaaattacaccagtgtgcctgcgtgcaaccacatacgkcagaaccataaacaccaagcagataaagaaacagcaccackgggggagaaaacrcaaagtgaaacttacctttgtgttgctggcttacttttctttttttccagagttcaagggacaaacctgtgcaaacaaccctgcaaacacaaatgcattgcaccacrtggagaagaagcacttgtgttctttggctgtgcgtcgagaatttgcactacaagggcacaggcctaacctcacacaagcaaaatatacggaacattcactggaagtatagagaggtttctcagatgaccaactatcata

SEQ ID NO: 60333 - DNA, 600 bp, Chicken  19866894319678_4
ttgcctaggttacacrgaaccatttaaygatgtcatatttcagtgaacgtactgagagagctgtgaatcagtgcatgtttttatactaacaccgaccattaaataaatgtttttctgacaagaaaaggcattgaagatttcagattcgctattccagggagttgtaggatggctttttgtgcatgatccaacattttggaatgattgctattaaaatgcttaaaattacaccagtgtgcctgcgtgcaaccacatacgkcagaaccataaacaccaagcagataaagaaacagcaccackgggggagaaaacrcaaagtgaaacttacctttgtgttgctggcttacttttctttttttccagagttcaagggacaaacctgtgcaaacaaccctgcaaacacaaatgcattgcaccacrtggagaagaagcacttgtgttctttggctgtgcgtcgagaatttgcactacaagggcacaggcctaacctcacacaagcaaaatatacggaacattcactggaagtatagagaggtttctcagatgaccaactatcatactacaaataaaagcactctgattttaggaaaaactcacatg

SEQ ID NO: 60334 - DNA, 600 bp, Chicken  19866894319678_5
acrgaaccatttaaygatgtcatatttcagtgaacgtactgagagagctgtgaatcagtgcatgtttttatactaacaccgaccattaaataaatgtttttctgacaagaaaaggcattgaagatttcagattcgctattccagggagttgtaggatggctttttgtgcatgatccaacattttggaatgattgctattaaaatgcttaaaattacaccagtgtgcctgcgtgcaaccacatacgkcagaaccataaacaccaagcagataaagaaacagcaccackgggggagaaaacrcaaagtgaaacttacctttgtgttgctggcttacttttctttttttccagagttcaagggacaaacctgtgcaaacaaccctgcaaacacaaatgcattgcaccacrtggagaagaagcacttgtgttctttggctgtgcgtcgagaatttgcactacaagggcacaggcctaacctcacacaagcaaaatatacggaacattcactggaagtatagagaggtttctcagatgaccaactatcatactacaaataaaagcactctgattttaggaaaaactcacatgcttcatgtaggtt

SEQ ID NO: 60335 - DNA, 600 bp, Chicken  19866894319678_6
agaaaaggcattgaagatttcagattcgctattccagggagttgtaggatggctttttgtgcatgatccaacattttggaatgattgctattaaaatgcttaaaattacaccagtgtgcctgcgtgcaaccacatacgkcagaaccataaacaccaagcagataaagaaacagcaccackgggggagaaaacrcaaagtgaaacttacctttgtgttgctggcttacttttctttttttccagagttcaagggacaaacctgtgcaaacaaccctgcaaacacaaatgcattgcaccacrtggagaagaagcacttgtgttctttggctgtgcgtcgagaatttgcactacaagggcacaggcctaacctcacacaagcaaaatatacggaacattcactggaagtatagagaggtttctcagatgaccaactatcatactacaaataaaagcactctgattttaggaaaaactcacatgcttcatgtaggttctttattttttaaaaaatcttgaccataatatagttagcaatgtctcctataaaactcattcttgcaagcgtgtatactgcagaagctacaccaatagtctcccatc

SEQ ID NO: 60336 - DNA, 600 bp, Chicken  19866894319678_7
agaggtttctcagatgaccaactatcatactacaaataaaagcactctgattttaggaaaaactcacatgcttcatgtaggttctttattttttaaaaaatcttgaccataatatagttagcaatgtctcctataaaactcattcttgcaagcgtgtatactgcagaagctacaccaatagtctcccatcaagtaaactttgtaaacaaagttataatcaaaggtagttccagcttatgaaaaaaaatgagctcctctgaagcctgagttggtagcccactgcataactataatgctgtyttattyattacaataacttattttccaaaaagattaacctggaggtggcttctcccccagcactatacatctgggcatctccatcatytgaggaaaattaagaacaggtaaaaagaataagataagaataccctgaaataggcatttgcaaacaagtgaaaggaaaatatatcagtaggtaaatcagaaaacaaggtaccctccccaccagtccagttttctcaggagaatggcagtggaatccttcccaaagagctccatgtaaaaaggagtcacartttcacaggaactttgaatttc

SEQ ID NO: 60337 - DNA, 600 bp, Chicken  19866894319678_8
ttctcagatgaccaactatcatactacaaataaaagcactctgattttaggaaaaactcacatgcttcatgtaggttctttattttttaaaaaatcttgaccataatatagttagcaatgtctcctataaaactcattcttgcaagcgtgtatactgcagaagctacaccaatagtctcccatcaagtaaactttgtaaacaaagttataatcaaaggtagttccagcttatgaaaaaaaatgagctcctctgaagcctgagttggtagcccactgcataactataatgctgtyttattyattacaataacttattttccaaaaagattaacctggaggtggcttctcccccagcactatacatctgggcatctccatcatytgaggaaaattaagaacaggtaaaaagaataagataagaataccctgaaataggcatttgcaaacaagtgaaaggaaaatatatcagtaggtaaatcagaaaacaaggtaccctccccaccagtccagttttctcaggagaatggcagtggaatccttcccaaagagctccatgtaaaaaggagtcacartttcacaggaactttgaatttcccattc

SEQ ID NO: 60338 - DNA, 600 bp, Chicken  19866894319678_9
ttttttaaaaaatcttgaccataatatagttagcaatgtctcctataaaactcattcttgcaagcgtgtatactgcagaagctacaccaatagtctcccatcaagtaaactttgtaaacaaagttataatcaaaggtagttccagcttatgaaaaaaaatgagctcctctgaagcctgagttggtagcccactgcataactataatgctgtyttattyattacaataacttattttccaaaaagattaacctggaggtggcttctcccccagcactatacatctgggcatctccatcatytgaggaaaattaagaacaggtaaaaagaataagataagaataccctgaaataggcatttgcaaacaagtgaaaggaaaatatatcagtaggtaaatcagaaaacaaggtaccctccccaccagtccagttttctcaggagaatggcagtggaatccttcccaaagagctccatgtaaaaaggagtcacartttcacaggaactttgaatttcccattcagcttctcttcyctgaaatgcacattttttcttccttatttatgtccactgccctcaatcatccagtctctaaaatgctttt

SEQ ID NO: 60339 - DNA, 599 bp, Chicken  19866894319679_1
  misc_feature (1)..(29): n is any nucleotide
nnnnnnnnnnnnnnnnnnnnnnnnnnnnnccccacctactgcttccttgtgtttgcatttaagaaactaacacgagagagatgattgcaccttccttcatctgacctgctcagtggccatcaaaaagaggtctcaggtgtctccaccattccagttctcctctttactgaatgtatctttattttggttcacttttcacttcagctttttaatcaagctgagcgtttgcagacaacttctttccgcttcttctgtgctcttcgtaaaattgtctgcttctattgtcatctttaactgtawgttttacaattccaaaaacrcagtctgtctttaaaatcagtgaaagtatggagttgaattgcccatawtttaggcaacaactaatagttgaattcagctgtttcttattgcttcggcatcctccccacacacacacctctacatccacatattttttgttttctacaagaggtctctggtgctaagtcaccatgccttaatttttatagaaaacacaaaaataaagagcgcaggtagagaggatttgctgtatgatattagtccttgacaaggaaagatgactcatttctcttctgtcc

SEQ ID NO: 60340 - DNA, 599 bp, Chicken  19866894319679_2
  misc_feature (1)..(9): n is any nucleotide
nnnnnnnnnccccacctactgcttccttgtgtttgcatttaagaaactaacacgagagagatgattgcaccttccttcatctgacctgctcagtggccatcaaaaagaggtctcaggtgtctccaccattccagttctcctctttactgaatgtatctttattttggttcacttttcacttcagctttttaatcaagctgagcgtttgcagacaacttctttccgcttcttctgtgctcttcgtaaaattgtctgcttctattgtcatctttaactgtawgttttacaattccaaaaacrcagtctgtctttaaaatcagtgaaagtatggagttgaattgcccatawtttaggcaacaactaatagttgaattcagctgtttcttattgcttcggcatcctccccacacacacacctctacatccacatattttttgttttctacaagaggtctctggtgctaagtcaccatgccttaatttttatagaaaacacaaaaataaagagcgcaggtagagaggatttgctgtatgatattagtccttgacaaggaaagatgactcatttctcttctgtccttcatcttcaatcaaaatgc

SEQ ID NO: 60341 - DNA, 600 bp, Chicken  19866894319679_3
aacacgagagagatgattgcaccttccttcatctgacctgctcagtggccatcaaaaagaggtctcaggtgtctccaccattccagttctcctctttactgaatgtatctttattttggttcacttttcacttcagctttttaatcaagctgagcgtttgcagacaacttctttccgcttcttctgtgctcttcgtaaaattgtctgcttctattgtcatctttaactgtawgttttacaattccaaaaacrcagtctgtctttaaaatcagtgaaagtatggagttgaattgcccatawtttaggcaacaactaatagttgaattcagctgtttcttattgcttcggcatcctccccacacacacacctctacatccacatattttttgttttctacaagaggtctctggtgctaagtcaccatgccttaatttttatagaaaacacaaaaataaagagcgcaggtagagaggatttgctgtatgatattagtccttgacaaggaaagatgactcatttctcttctgtccttcatcttcaatcaaaatgcaaatttgttatttacaacaatgtgagagcttatcacgttgtcctctgca

SEQ ID NO: 60342 - DNA, 349 bp, Chicken  19866894319679_4
ctacatccacatattttttgttttctacaagaggtctctggtgctaagtcaccatgccttaatttttatagaaaacacaaaaataaagagcgcaggtagagaggatttgctgtatgatattagtccttgacaaggaaagatgactcatttctcttctgtccttcatcttcaatcaaaatgcaaatttgttatttacaacaatgtgagagcttatcacgttgtcctctgcattttgaagccatgagaagcggtctagaaaaggcagagttagatttgtgggagactgattacaaagcaagyatacatctttcgggtatatacagctcagacccagcagatttccccaaag

SEQ ID NO: 60343 - DNA, 600 bp, Chicken  19866894319683_1
tggcacattcttttctctcaaattgtgagtttaggatgttaccagccaattgagaccaagatttcttgattctaattcctagctttgccagtggttttcttgtcttgagtggctctgggaaagttactcctgcccatgacatccttcagtaattgaaaataggaattttactcatagggtgatgtgaacttaaaccaatgtttttacactgcagtcaaaccaatgcttatacttcatgggcaaatggagatcactattaagcataacaggaggcacagagataagcataggaaaaatctsgctatgtctaacaggcaattaagtattgagcctatattgatgcttaaatgttgcaatgggcacaaacggaaagagaggacattccgttaaaagataagaaaactatcttttctttgaaggtagatgcacactgtcacaactactaagagtgattgtaaagtcttcagtcctggagatactccaaatttgacagaacacagtcctgggcaacttgctgtagctgacagttctggacagggagtgggattcaccagctcccagagatgccttccagccttgtctatgccatcatcttatgat

SEQ ID NO: 60344 - DNA, 600 bp, Chicken  19866894319685_1
aatgtttgtgcttacccattaggttgcatattaggccaccaaaatgaataggttaatcttttcattactgtgagtcatacaaagtccctgcattcctcaaggaagtcaaactagcttgacagtggtgaagagcagcaaaaaagtatcactgccttacccacccttgctccacgtgcctcgttttaccccaccctgctctatgccaccacacactttagttcaaaccatctctaactcagcctttctcagacctagaacagcaaaatagtccaatccggtggctcacaaagcagccagacsctggagatgccaccggccaggagttcgggccatcccctcggagctctttgagcctgtttacatccatgggtctgctcctcatgttcctgctacctcwttccaaagcagcctcctccggtcctccacaattgccttaccatgcattcattccccaccaggtggagcaataaacaaagaatattgctgctgagattattttcctttttattttctttctttctttgttttttttttttttctggacatgtattcgtgcatgcatttgtgtatctctacgtgtgtgtgcccgtgcgcgtattt

SEQ ID NO: 60345 - DNA, 600 bp, Chicken  19866894319685_2
caaggaagtcaaactagcttgacagtggtgaagagcagcaaaaaagtatcactgccttacccacccttgctccacgtgcctcgttttaccccaccctgctctatgccaccacacactttagttcaaaccatctctaactcagcctttctcagacctagaacagcaaaatagtccaatccggtggctcacaaagcagccagacsctggagatgccaccggccaggagttcgggccatcccctcggagctctttgagcctgtttacatccatgggtctgctcctcatgttcctgctacctcwttccaaagcagcctcctccggtcctccacaattgccttaccatgcattcattccccaccaggtggagcaataaacaaagaatattgctgctgagattattttcctttttattttctttctttctttgttttttttttttttctggacatgtattcgtgcatgcatttgtgtatctctacgtgtgtgtgcccgtgcgcgtatttaaacctcaattttccctatcctcaatcctaacttttaatataataatgagacaaatcagtagcacagtatttccttctcatttagataactgcaaaa

SEQ ID NO: 60346 - DNA, 600 bp, Chicken  19866894319686_1
cggcagccgtggagttggcggcgctggaaattgcattttgtctgctgctgggctgcaagaaggggtgaattactgatttcaggagtgctgaatcaccagagccaggctgtaggcacagggctcagcagaggatctcacaccacctcggtgttcaggataaagtttccctgaggggccctgggaccccatcagacccctcagcagggctgtgccttccccagccctcgttgcctgctggatccaggctgtccccctgctctcccccctgccctcccacgcagccctccgtgctgctcctcrtcctgcctgcgatgatggaacgagaggtttactctccagccataaaacactgcctcattctcactctccagcatcgtttcatcgatccctggatacaaaccaaagcacacaaattaccctggctttcgagtctctgctgttgatacatagccctgtgtttaagtgcttcttcacgttttctagaaaatgaagggaaaaagcctgtcctttaaagcaggccgggtgtctcccagggtgctgcagatgcatcgggtccccagagacctcatgctgacagagtgcctgtccccatggcaggat

SEQ ID NO: 60347 - DNA, 599 bp, Chicken  19866894319688_1
  misc_feature (1)..(116): n is any nucleotide
nnnnnnnnnnnnnnnnnnnnnnnnnnnnnnnnnnnnnnnnnnnnnnnnnnnnnnnnnnnnnnnnnnnnnnnnnnnnnnnnnnnnnnnnnnnnnnnnnnnnnnnnnnnnnnnnnnnngattaacaacatggtggagattctgtagatgttatttcagcaagagcacccttccccaaagaaacgacagctttgtactaaacgccaaagctacgacacatctttactatttaccttcacaagttagtcagtgaggaaggggttataaattcatgccacatgcagcacacatagctgcatcttrcagttccttgcttaaatggcaagaagatctgggttgcctttaaagacacttgcttattaaatattccatacgcacctgcaaaagctctattatctacagcctgagttaattcttcctaaagtgacgtttgaagttatagtcttcaacaggctaaattggacacttaaaattacaactgatgagctatcttagcgcaggttgcttccacttgactttacactacagaaattatttgacaatacatttgcacttcacaatgacacacccagcacatcttcacctttaataccttcccatta

SEQ ID NO: 60348 - DNA, 600 bp, Chicken  19866894319692_1
ggcagtgggatgacctccgagtggttggcaaagggaactgtccctgtgcatacagacagagccacagacacccttcagaccggggcgtcccaggggggctccgtcccctctgtgcacggaggggctgacagataaaagtgcccccgtttgtttggagcgatgtcgttaaccattagcacagccggctggcacagctcataattcatcgccacggggtctggtgtggcccttctgttccgggggatgacgggaaggtgtttgtttccaatcacaaaaagacttattttctgggagacaaayaaggaccacatggccatctgcaccccgggtcaccaaagtggtcccatggaggacctgcagaagcgaagcgggagggctgcgtgattcccatccattaatctcagcctgacgcagcggccgcccatcgatctgctcattcatcaataccccactcacaccggagccatgtaagcargccattcaaattaacacagacagatctctaatagtcaccgctgctctcggaaggaacaacgcagctttctttccaaatgctgaggcagtcaattaaaaggatcagtttcttgattggacttttcc

SEQ ID NO: 60349 - DNA, 600 bp, Chicken  19866894319692_2
gcacagccggctggcacagctcataattcatcgccacggggtctggtgtggcccttctgttccgggggatgacgggaaggtgtttgtttccaatcacaaaaagacttattttctgggagacaaayaaggaccacatggccatctgcaccccgggtcaccaaagtggtcccatggaggacctgcagaagcgaagcgggagggctgcgtgattcccatccattaatctcagcctgacgcagcggccgcccatcgatctgctcattcatcaataccccactcacaccggagccatgtaagcargccattcaaattaacacagacagatctctaatagtcaccgctgctctcggaaggaacaacgcagctttctttccaaatgctgaggcagtcaattaaaaggatcagtttcttgattggacttttcctgcagctgcgggggcagcagcccatgcagggataggggaaccactgggagcatccttcccacggcaatgagatccaagctccccttgggagcaatgggagctatcggtgcgccacaggggatgacctgcagccgcattctgagcactgctgctgggaatgaacccctcaccctgc

SEQ ID NO: 60350 - DNA, 599 bp, Chicken  19866894319693_1
  misc_feature (1)..(161): n is any nucleotide
nnnnnnnnnnnnnnnnnnnnnnnnnnnnnnnnnnnnnnnnnnnnnnnnnnnnnnnnnnnnnnnnnnnnnnnnnnnnnnnnnnnnnnnnnnnnnnnnnnnnnnnnnnnnnnnnnnnnnnnnnnnnnnnnnnnnnnnnnnnnnnnnnnnnnnnnnnnnnnnnnttgtgctgataaatagataaactatgccgctttaggctattttaattgatgtgaagtacacacaggttttactgcagttgcatttttcttagcctaggaatatctgagctacatcatgcatacagtgtttcatacatayaaaacaaattatttacaccaaggttaaagcggtgatgaatcagaccatgctggtgcattgggatgaacaacacatgctggcatcctgtaacagcttcctgctcagggaagtagctaccacgtgtgaaaaagcagtcactgggcactgtcacacttgttattaaatggaggactgaacagatttgagaaaacagctgacagtcagtcctggatttcacgtgtcgcactgaggatgttgagacaatttcatacgcaagagaatttattactgaagtctgcagtggatggcatccattgact

SEQ ID NO: 60351 - DNA, 588 bp, Chicken  19866894319693_2
ccatgctggtgcattgggatgaacaacacatgctggcatcctgtaacagcttcctgctcagggaagtagctaccacgtgtgaaaaagcagtcactgggcactgtcacacttgttattaaatggaggactgaacagatttgagaaaacagctgacagtcagtcctggatttcacgtgtcgcactgaggatgttgagacaatttcatacgcaagagaatttattactgaagtctgcagtggatggcatccattgactcttaacaaaagttacttttgaggaaaaattaaataacaaaagagrggaaggaraggatgaggacctcaaagaactgttcattctgcagtgtctcctcaacmtaaaaagtggcaactgccagccctcagtattactgatgctaaggcacttcaggcatcacaaaacatagcaaatgaaccagacacaaagggactagtccttccgcctagcagcagaatttcactaaacgtgcaaataatgcagataagacataccttctgactaaacatcctctggaattatttcgctttatgatctacatgcaaaccacttaaccgtttaagcatgctgatg

SEQ ID NO: 60352 - DNA, 580 bp, Chicken  19866894319693_3
gtgcattgggatgaacaacacatgctggcatcctgtaacagcttcctgctcagggaagtagctaccacgtgtgaaaaagcagtcactgggcactgtcacacttgttattaaatggaggactgaacagatttgagaaaacagctgacagtcagtcctggatttcacgtgtcgcactgaggatgttgagacaatttcatacgcaagagaatttattactgaagtctgcagtggatggcatccattgactcttaacaaaagttacttttgaggaaaaattaaataacaaaagagrggaaggaraggatgaggacctcaaagaactgttcattctgcagtgtctcctcaacmtaaaaagtggcaactgccagccctcagtattactgatgctaaggcacttcaggcatcacaaaacatagcaaatgaaccagacacaaagggactagtccttccgcctagcagcagaatttcactaaacgtgcaaataatgcagataagacataccttctgactaaacatcctctggaattatttcgctttatgatctacatgcaaaccacttaaccgtttaagcatgctgatg

SEQ ID NO: 60353 - DNA, 532 bp, Chicken  19866894319693_4
ctcagggaagtagctaccacgtgtgaaaaagcagtcactgggcactgtcacacttgttattaaatggaggactgaacagatttgagaaaacagctgacagtcagtcctggatttcacgtgtcgcactgaggatgttgagacaatttcatacgcaagagaatttattactgaagtctgcagtggatggcatccattgactcttaacaaaagttacttttgaggaaaaattaaataacaaaagagrggaaggaraggatgaggacctcaaagaactgttcattctgcagtgtctcctcaacmtaaaaagtggcaactgccagccctcagtattactgatgctaaggcacttcaggcatcacaaaacatagcaaatgaaccagacacaaagggactagtccttccgcctagcagcagaatttcactaaacgtgcaaataatgcagataagacataccttctgactaaacatcctctggaattatttcgctttatgatctacatgcaaaccacttaaccgtttaagcatgctgatg

SEQ ID NO: 60354 - DNA, 593 bp, Chicken  19866894319694_1
gttttctacctgcaacaaaaagatgttccaggcaaaccctactagcttgctcactaaatcaaacagcaaggtaggacatattattctgacatgcattgagcctgaagggtactgaaaagtaaacctcagattttccttttaccttccaattaaattaacaggctgagggtgttttctttccatctgacaatagtgcatattttatctgacaatgtttttttgagaaaactatagggaaattccaggttggaattttgatttcttctatttgtaacggactctggctgctaccctgcctcrtaattaagtaagctgtcaacatatattgtagtcactggagaaggatactctgtcaatacttttcccagataaaaagcacattagaagcacctggttgaaaaaggtggaggtaaatgcaaagtgaatttttcagtttcctgtatgattattaacaacagaagttcatagtttttgctaaacatactcaagacttttggtactttcttcaaagcagatcagtaactgtgaagaaaatcacattaattagtagataaacttaattctgaaaagtatggtctcatatcttgggatgg

SEQ ID NO: 60355 - DNA, 593 bp, Chicken  19866894319700_1
cagttttgctacttgtcagctcacagacagaattagctgctgtcttctgaattgtgtttgatacacttgaattgtgtttctaccacttgcttcccagcatgctccctagtgacagctagaacaagtcagattggtgaaggttcatttgattttaaacacatctacatctgtgatttctcactagagaaagtgaagttagctcatttaggaaggcaagctcttgttcgattacaacacatcccaaaatgggaggagttcagttaaaaggcaaatcccaagtgctgctgtgcaactgatcaytcagaacacacattctgtattctgttcagagtggagttcaagcagtgaatgcaaacacagaatcatagaatcattggaattggaagggaccttcaaaaacaatccaactcccttgcaacgaacagagacatctgcagctagatcagcctgctcagagcctggtccagcctgatcttgaatgtctccaaggatggggcatccaccacctctctgggcaacctgttccagagcctcaccagcccttgctgtaaaaaaaaaaaaaaccttattccttttacccaaattaaatctcc

SEQ ID NO: 60356 - DNA, 600 bp, Chicken  19866894319707_1
agcagggtgggacacaaacatgtgtgatctcctcagctctgtgagcccatgtctggaacttcctgaagccccctcagtgtgtgttgccattgcctggcttgtggggacttgggcagacatgcccgcttccatcccagcatgagctcctaccaacaaccagctgctcctcggatctgcagctgctccagtgaggtattactcagggtgcacaaaccacacaacccacactgttagctgccgtctgctagctgaaactcagagctactaacttccaaggcagcacctgacacggggaacaastgggaatgaatcagatcaacttgcataggagctgctgttgaaaacccggtgccttttcaatgtgatgcaaagcattcgctacaacttcaggctgttgcccacctgaaacctgaagctcctcctgtttaagttgatggcacaactcctcaaaggtagagggacygggcccccagtgcttcttaactcttttgtgacccactggtgcgttcaacagcaggttagccaaaggggaaagagccttcatgtccatcatcccttttctgaacagcagagagagtttgcaaaaacaaagggagaacc

SEQ ID NO: 60357 - DNA, 545 bp, Chicken  19866894319707_2
ctcctcggatctgcagctgctccagtgaggtattactcagggtgcacaaaccacacaacccacactgttagctgccgtctgctagctgaaactcagagctactaacttccaaggcagcacctgacacggggaacaastgggaatgaatcagatcaacttgcataggagctgctgttgaaaacccggtgccttttcaatgtgatgcaaagcattcgctacaacttcaggctgttgcccacctgaaacctgaagctcctcctgtttaagttgatggcacaactcctcaaaggtagagggacygggcccccagtgcttcttaactcttttgtgacccactggtgcgttcaacagcaggttagccaaaggggaaagagccttcatgtccatcatcccttttctgaacagcagagagagtttgcaaaaacaaagggagaaccttttgctctatggttttaatcacagccattgcacagcaatttgccctgatgccaggagtgtgagcaaagtgccacatttcagaagtgtgctgcaaatgagatgcccta

SEQ ID NO: 60358 - DNA, 599 bp, Chicken  19866894319728_1
  misc_feature (1)..(27): n is any nucleotide
nnnnnnnnnnnnnnnnnnnnnnnnnnnacagcagctggattaggcaacgcagttccagtgtgcactaaggagcccatcagtctgtacagcagtagtatgaggaggtaggaatcatgttaaaaattaactttgtctctcatcgggtatttttgtttggttattctaaacttcagctcctattacagggcactgaaacaaatccagcgtgtaaaaagctttaaggtaaactgaatagcagtgcaggtagaagaaggtaattgtattccatttgggattcaaggttttttttgcaagtaaagygtgtgtgtgtggcctgcaaataaytgttgctttcttggatgataaaacagcactggaaatcagtagtactaacagatgtggttaagaatttcggtaagataatttactgtggaaattactgtaattgaagagtataactcwttaacatagaaatattggatcagaaagccttgagttcatttctttctgtaagtaatgtatgaatgttgggtttgtcacttaggaaatacctgagttatcagtcaggagaatgtttggctattgggccagcaccttgttcatagacgatgtggctgtcc

SEQ ID NO: 60359 - DNA, 599 bp, Chicken  19866894319728_2
  misc_feature (1)..(3): n is any nucleotide
nnnacagcagctggattaggcaacgcagttccagtgtgcactaaggagcccatcagtctgtacagcagtagtatgaggaggtaggaatcatgttaaaaattaactttgtctctcatcgggtatttttgtttggttattctaaacttcagctcctattacagggcactgaaacaaatccagcgtgtaaaaagctttaaggtaaactgaatagcagtgcaggtagaagaaggtaattgtattccatttgggattcaaggttttttttgcaagtaaagygtgtgtgtgtggcctgcaaataaytgttgctttcttggatgataaaacagcactggaaatcagtagtactaacagatgtggttaagaatttcggtaagataatttactgtggaaattactgtaattgaagagtataactcwttaacatagaaatattggatcagaaagccttgagttcatttctttctgtaagtaatgtatgaatgttgggtttgtcacttaggaaatacctgagttatcagtcaggagaatgtttggctattgggccagcaccttgttcatagacgatgtggctgtccaacctatatggattgttatttttc

SEQ ID NO: 60360 - DNA, 574 bp, Chicken  19866894319728_3
gggtatttttgtttggttattctaaacttcagctcctattacagggcactgaaacaaatccagcgtgtaaaaagctttaaggtaaactgaatagcagtgcaggtagaagaaggtaattgtattccatttgggattcaaggttttttttgcaagtaaagygtgtgtgtgtggcctgcaaataaytgttgctttcttggatgataaaacagcactggaaatcagtagtactaacagatgtggttaagaatttcggtaagataatttactgtggaaattactgtaattgaagagtataactcwttaacatagaaatattggatcagaaagccttgagttcatttctttctgtaagtaatgtatgaatgttgggtttgtcacttaggaaatacctgagttatcagtcaggagaatgtttggctattgggccagcaccttgttcatagacgatgtggctgtccaacctatatggattgttatttttcaatctggtatcccttagagactacaaaaaccaacccactatctgaggtccattgttgtagaatggattttggcatagttcaccctgataagg

SEQ ID NO: 60361 - DNA, 600 bp, Chicken  19866894319729_1
cagggattatgacagagcttcttttattaaaaaaagcgcttgtccaaacaaaaatacagtatggtgcaaattctgaattatttttgacctcctggcatccttgccttgccttgtcttgcctctcctggtgtagtaaaaaatcttggactaaatgctccctttccatcagtgagagttaatgaaggatgtcatagactgaaaacaaaacaaaataaagatgtttacctttattactcagttaacactgaaaaaacaacacaaatgttgtaaagtaaaagatgtattataaatggtttaaawttaatgrattgaaacatttttaaktttaaaaagatagaaaacatggaattttttcttttcttttttcttttgtttcttctatatattcattctgaagtatataaaacagtgcatttttttttctgaaagaaatgcttattttcctacttgaaactgtagatttgaaaatgtaaattttcacttcaaagtatgatctgcacagtgtgttgaagcacattttcacttgtttcccagcgagtacctactcctctcagtaggagggcaagatataagatactgtgtgcagaattagagggttct

SEQ ID NO: 60362 - DNA, 600 bp, Chicken  19866894319729_2
tatgacagagcttcttttattaaaaaaagcgcttgtccaaacaaaaatacagtatggtgcaaattctgaattatttttgacctcctggcatccttgccttgccttgtcttgcctctcctggtgtagtaaaaaatcttggactaaatgctccctttccatcagtgagagttaatgaaggatgtcatagactgaaaacaaaacaaaataaagatgtttacctttattactcagttaacactgaaaaaacaacacaaatgttgtaaagtaaaagatgtattataaatggtttaaawttaatgrattgaaacatttttaaktttaaaaagatagaaaacatggaattttttcttttcttttttcttttgtttcttctatatattcattctgaagtatataaaacagtgcatttttttttctgaaagaaatgcttattttcctacttgaaactgtagatttgaaaatgtaaattttcacttcaaagtatgatctgcacagtgtgttgaagcacattttcacttgtttcccagcgagtacctactcctctcagtaggagggcaagatataagatactgtgtgcagaattagagggttctacaatta

SEQ ID NO: 60363 - DNA, 600 bp, Chicken  19866894319729_3
tattaaaaaaagcgcttgtccaaacaaaaatacagtatggtgcaaattctgaattatttttgacctcctggcatccttgccttgccttgtcttgcctctcctggtgtagtaaaaaatcttggactaaatgctccctttccatcagtgagagttaatgaaggatgtcatagactgaaaacaaaacaaaataaagatgtttacctttattactcagttaacactgaaaaaacaacacaaatgttgtaaagtaaaagatgtattataaatggtttaaawttaatgrattgaaacatttttaaktttaaaaagatagaaaacatggaattttttcttttcttttttcttttgtttcttctatatattcattctgaagtatataaaacagtgcatttttttttctgaaagaaatgcttattttcctacttgaaactgtagatttgaaaatgtaaattttcacttcaaagtatgatctgcacagtgtgttgaagcacattttcacttgtttcccagcgagtacctactcctctcagtaggagggcaagatataagatactgtgtgcagaattagagggttctacaattagtatgaacgatcagtca

SEQ ID NO: 60364 - DNA, 600 bp, Chicken  19866894319739_1
gtacactaaggatgacatttctaagaacaactactgacaccattactcaaatttacatcacaataaatgttcagaattcatcttgtctaagaagcaggatggatatttttaaaggcatttctctggtattaatctccatggtacccaaactcttcagaggaagaagtgttgagagattgtttgaagtgtgtctcaggatacttacagtacatttattcattccccatacagtataggacattttctgtttaaatgaatgacagtgcaaaacccacacaactccagtctgcaattcatttmtgtttaaatagctgtctaccaattcccatatatataaattgcttcttgcaaataacaatactatgttcacagcttcttcagacctgaagaaagaatgctacatttaactcttttttttttttttttttttcagtctgtggataagataatgaaagacatgtgttatggtggcactgacatcttttgcacccagaaggaacaaaagacggtttcatctgtgctgcttaaaagagccttgttaccatatttctttgtcccttttattgcagtttcttacagtgctcccaagttaaggaaatg

SEQ ID NO: 60365 - DNA, 600 bp, Chicken  19866894319747_1
gctccagttccatggattatcatatttttctgctggttctcagaagtacctgcttctgagaagagaagaacaagtacagagcccagaagactgtcactgttccatttcaatttccattcagaggaaaggataaaacttctcaggagtcacgagtctgcccctgtcctttaccactcatctctgcagtgcgtgctccaagctgaatattggatttcatgctttgaaaacagaaatgtcaatattaacatagagaaaagttttcattagctggaaactacaaagactcacccaggaatagamagaacaatgcatgcaagtttgtcaggaacatctgaacccatacacagctcaaggtggcagtttcctgggtcacatcattaacccgtgatgagacagaccacactggttggattacagcactctgaaagacccctgaaatcaagacagaactattcacccactgctttcgtcagagaaacagattcaaagaggctgtagctgtttttggaagcaggcaattatgtagctagaagtgcccaagagctttcaagtacccaagggaagaaggaaaccaagagcaggtgcagacatgctgcaggt

SEQ ID NO: 60366 - DNA, 600 bp, Chicken  19866894319751_1
aaactgatgaatcagaactagaagtgaacctttccatccctgccctccctttgccacacaggtgctgcagtaggaggaacaggtggattccatagcagaaatgtgcaaaactggcacgtcccacatggccacgcgctcaatcaagagagagacaagggcctgaaccaccatcacggaggcattaagcctacaggaaggaggaagactttctcaccttgataaagaaagagctggtgaggaacattcccatatcttcaaccagaaaaacagcagagctctcaacgggcagaacttggcatytcacaagttaacctgagcccatttcttctgactatccacagaattaaagtttcagcaacatttcagcaactagattagcagtcttctcaacaactaacaggaggataacactactaaatgcaaagatgctgaagctccgccagcatgcactgcaagcatgagcaaaatcaatgggaatgctttactaggctgctgagatggttttcccagcatttgtagttctttctgagccaaacagccactagcaagtaaccaggttttaaatagcagtaggtgaactgaccacagctatacatccca

SEQ ID NO: 60367 - DNA, 600 bp, Chicken  19866894319758_1
agcgcataagaatttatgaacagtcagagtcagttcagccagtgacttccaaaagtcatgcatcaactgcatcatgtgaagggaaaaaaaagtgtggaaggagggggaagaaaaaaaaatcattcttaaacaagtttaacataaagttttaatgtacaccttgaaaagttttattccattcatggtatgtataaaataaattaaaaagaggaaggagaagttttgtatatgcttcaaattaacacataccagtagttccataaatgaacattttaccctcttcatggtaaaaagttgacwtaaaagctcaaaacaatacaacagttataaatagaattcaaaagatatttgttttaaaaaatggaatttatatagcttttcccctccccctacaaygcaatttggttttgcatgtcataatattaccacatttacagagtatctgaatgtcacatccacacaaaaatcagtaacgaagcaggtaaagtgctagcggtgcttaaatttaggactcttcccaaataacttcacctgcttctcagccttttccttaaatgaaggctatcaacattcatcaccccctttgaggtacgggcagaa

SEQ ID NO: 60368 - DNA, 600 bp, Chicken  19866894319758_2
gaaggagggggaagaaaaaaaaatcattcttaaacaagtttaacataaagttttaatgtacaccttgaaaagttttattccattcatggtatgtataaaataaattaaaaagaggaaggagaagttttgtatatgcttcaaattaacacataccagtagttccataaatgaacattttaccctcttcatggtaaaaagttgacwtaaaagctcaaaacaatacaacagttataaatagaattcaaaagatatttgttttaaaaaatggaatttatatagcttttcccctccccctacaaygcaatttggttttgcatgtcataatattaccacatttacagagtatctgaatgtcacatccacacaaaaatcagtaacgaagcaggtaaagtgctagcggtgcttaaatttaggactcttcccaaataacttcacctgcttctcagccttttccttaaatgaaggctatcaacattcatcaccccctttgaggtacgggcagaagaaaaagtctgtaactggtacacacccacccttgcctcttctaaaatggtaacaagctgtgtatctgtaactgtcaatggtggtgtacaattgctt

SEQ ID NO: 60369 - DNA, 600 bp, Chicken  19866894319762_1
tgtgcagctaggcagaatgggaagaaaaatcactttatgaaataaatccaaaagaatatacaggtgtttgggctgtatgtatctacaagagacatcttctcacatgtcctgtagagatgcaacctgaaacaaaatgcttcaaggctgctgtttctctctctggtgtatgttggttaaaatgcatctctgggctatcctcttcatagctagagctgaactgagaaatgttactgcttcctggggggactgtgtggtgtagtaactaaatctgtgaactgggaatcatccacttcaaatagsaatagcaatatttctcttcctttgtagagtactttgagattcacagaggaaacagagacatagagcatgattaaaggacatatttgctttgcaattattgacacattgtagaaagaggttaatgccttcataaccaggtgcaaagaaagaataagtgtaacagcatgggtttttttttttccaagtgtgactgtttctgaagaagtcctatcactgttcctcatttgctctggctttctgtctggcaagttaaaatatttttcccccaactctcctggctttcatttgttcacctgagta

SEQ ID NO: 60370 - DNA, 600 bp, Chicken  19866894319766_1
gggtgtttagtctcaacaaacccagctaattcagatttaacttagctcttaatatgctacattgctgagtcttctaattaatgccacatggttgcagtcagctgtcatactgaataaatgtttacaaagctattaatgtactgtatttgtaaaccagaccagctcctctttggaaatcatgtggtatgtgttttcccctcaaagatgaaaaaagtttttagcaataatgaatactttatttttgcagtcacagccacttcccaagaactcattgctgactttcttggaccgtgaccattytgcaggggaagtgaagggagcagagctcttttaagcagaagtgagcatggctgcacactctttttgccctggtgggacaagggagctctgtgcgtcggtggctgtcctgtctctgactgcgcaaycccaaagcatgcagggatgctgcagtccccctgctccttcatcacgtgagtggggatacccagccatagcyacagccatgaggagagagacatgtcccagcagtctgtggccatctgtcccttcctcagggccccttggagctggagaccaggctggggacctggctggctactg

SEQ ID NO: 60371 - DNA, 600 bp, Chicken  19866894319766_2
aaagctattaatgtactgtatttgtaaaccagaccagctcctctttggaaatcatgtggtatgtgttttcccctcaaagatgaaaaaagtttttagcaataatgaatactttatttttgcagtcacagccacttcccaagaactcattgctgactttcttggaccgtgaccattytgcaggggaagtgaagggagcagagctcttttaagcagaagtgagcatggctgcacactctttttgccctggtgggacaagggagctctgtgcgtcggtggctgtcctgtctctgactgcgcaaycccaaagcatgcagggatgctgcagtccccctgctccttcatcacgtgagtggggatacccagccatagcyacagccatgaggagagagacatgtcccagcagtctgtggccatctgtcccttcctcagggccccttggagctggagaccaggctggggacctggctggctactgtccccatggggcygctcatcttgaggtggcagagtggtgccagtggcacagagtgataggtctgtccagcactgctcccacactgcttgctcagcacaggtttgcattttctgtttttcaggctt

SEQ ID NO: 60372 - DNA, 600 bp, Chicken  19866894319766_3
cctcaaagatgaaaaaagtttttagcaataatgaatactttatttttgcagtcacagccacttcccaagaactcattgctgactttcttggaccgtgaccattytgcaggggaagtgaagggagcagagctcttttaagcagaagtgagcatggctgcacactctttttgccctggtgggacaagggagctctgtgcgtcggtggctgtcctgtctctgactgcgcaaycccaaagcatgcagggatgctgcagtccccctgctccttcatcacgtgagtggggatacccagccatagcyacagccatgaggagagagacatgtcccagcagtctgtggccatctgtcccttcctcagggccccttggagctggagaccaggctggggacctggctggctactgtccccatggggcygctcatcttgaggtggcagagtggtgccagtggcacagagtgataggtctgtccagcactgctcccacactgcttgctcagcacaggtttgcattttctgtttttcaggctttctggagtgtttcttcctaaggctctggggcttttctatggttgtgcacttctgtttcatctgcttcagaa

SEQ ID NO: 60373 - DNA, 600 bp, Chicken  19866894319766_4
aagggagcagagctcttttaagcagaagtgagcatggctgcacactctttttgccctggtgggacaagggagctctgtgcgtcggtggctgtcctgtctctgactgcgcaaycccaaagcatgcagggatgctgcagtccccctgctccttcatcacgtgagtggggatacccagccatagcyacagccatgaggagagagacatgtcccagcagtctgtggccatctgtcccttcctcagggccccttggagctggagaccaggctggggacctggctggctactgtccccatggggcygctcatcttgaggtggcagagtggtgccagtggcacagagtgataggtctgtccagcactgctcccacactgcttgctcagcacaggtttgcattttctgtttttcaggctttctggagtgtttcttcctaaggctctggggcttttctatggttgtgcacttctgtttcatctgcttcagaaatagcaggagatgccaaagcactctgaaagcttagagcaaggctgggagctgtgcactgccacgggccgccatgtcaccccagggcaggatgtctggcccagagcttcaggcatgtt

SEQ ID NO: 60374 - DNA, 600 bp, Chicken  19866894319769_1
tcttggcatgaacatcatactgtgcagaatctccaagaatttaattagagcttgtaatatagtaattaactactgtatattgaaaccttttgtatttttttttttcagtagcgtgtatggaaatgatcatactctaaaaaacaaaggcaccaggaaacaaaagctactgtaaatccacaggcattgaagagcatagaacaggctttgtaaactctttctcctaccactgacctcaccttgcacctgactacttacggcgccttctctgagttacataaatcatgcattaaagctgtgatytctttatgacagctctccagaaataattccaccccttttataagaagggctgcttcatgaagccagtgsggtaatttctcccagtctttaaataggtgtcttccacaacatgtggaagaataactgattctatgsagaaaataaaaatcattccaaaccttgtcccaaatataaaaacaagacactcaaaagcacagaagatatttccttatataatgtaagtttctcttagggccttgcttggtttccacaaagagcgagatagarttttgtgcagaaatttctaagtaatccagacga

SEQ ID NO: 60375 - DNA, 600 bp, Chicken  19866894319769_2
ctactgtatattgaaaccttttgtatttttttttttcagtagcgtgtatggaaatgatcatactctaaaaaacaaaggcaccaggaaacaaaagctactgtaaatccacaggcattgaagagcatagaacaggctttgtaaactctttctcctaccactgacctcaccttgcacctgactacttacggcgccttctctgagttacataaatcatgcattaaagctgtgatytctttatgacagctctccagaaataattccaccccttttataagaagggctgcttcatgaagccagtgsggtaatttctcccagtctttaaataggtgtcttccacaacatgtggaagaataactgattctatgsagaaaataaaaatcattccaaaccttgtcccaaatataaaaacaagacactcaaaagcacagaagatatttccttatataatgtaagtttctcttagggccttgcttggtttccacaaagagcgagatagarttttgtgcagaaatttctaagtaatccagacgaggtcaggaactgggaatgggcataagtagagtttctacctccaccgttttttctcaggccaaaagcaga

SEQ ID NO: 60376 - DNA, 600 bp, Chicken  19866894319769_3
aaaaaacaaaggcaccaggaaacaaaagctactgtaaatccacaggcattgaagagcatagaacaggctttgtaaactctttctcctaccactgacctcaccttgcacctgactacttacggcgccttctctgagttacataaatcatgcattaaagctgtgatytctttatgacagctctccagaaataattccaccccttttataagaagggctgcttcatgaagccagtgsggtaatttctcccagtctttaaataggtgtcttccacaacatgtggaagaataactgattctatgsagaaaataaaaatcattccaaaccttgtcccaaatataaaaacaagacactcaaaagcacagaagatatttccttatataatgtaagtttctcttagggccttgcttggtttccacaaagagcgagatagarttttgtgcagaaatttctaagtaatccagacgaggtcaggaactgggaatgggcataagtagagtttctacctccaccgttttttctcaggccaaaagcagagccaagaaaaaaggtgaaaagtggcatatgctcccacaggcatgtttcctgatgaaggagaaggaa

SEQ ID NO: 60377 - DNA, 600 bp, Chicken  19866894319769_4
gagttacataaatcatgcattaaagctgtgatytctttatgacagctctccagaaataattccaccccttttataagaagggctgcttcatgaagccagtgsggtaatttctcccagtctttaaataggtgtcttccacaacatgtggaagaataactgattctatgsagaaaataaaaatcattccaaaccttgtcccaaatataaaaacaagacactcaaaagcacagaagatatttccttatataatgtaagtttctcttagggccttgcttggtttccacaaagagcgagatagarttttgtgcagaaatttctaagtaatccagacgaggtcaggaactgggaatgggcataagtagagtttctacctccaccgttttttctcaggccaaaagcagagccaagaaaaaaggtgaaaagtggcatatgctcccacaggcatgtttcctgatgaaggagaaggaatatgggagatcggacaaggcgactggcctatccctcctgtgaatctacacttggactgtgactcttggagacccttaagttcagctctgatcctccaaacaaccagcaaatcctcaaccctctactaagaac

SEQ ID NO: 60378 - DNA, 600 bp, Chicken  19866894319776_1
tggtggcaagggctggtggcacccttcacggcgttgggttcctcgctgtctgcaggcccagggcccttcccggcggtgatcgacctgttcgggggcgcgggtggtctcattgagttccgggctgggctgctggccagccgaggctttgcggtgctggctttggctttcttcgcctacgaggacctccccaaaggcctaacccagctcgacctggactatttcgaggaggctgtcgagctgctcctgcggcaccccaaggtgagtgccgtggtgaggtgggcagccccggcaaacggggaygcgccgatgaacgaggatgtctgaagggccgggatcgtcctgggtctgccccggtgaccacggaggtcgcggtgaggagaggtgtcctggtggccatcctgggacgtcctcctggtgactgggagtgccgtagtgattggggacacgcacggagagtatcccaagttggaagtgacccactaagggtcgttgaatccaactcctgcctccgtgcagaccacccgagaatgtctgagagcaatgcyccgtgagagcagtgtcgccgtggccagggccatcctcagttcggggatgtcgtgc

SEQ ID NO: 60379 - DNA, 458 bp, Chicken  19866894319776_2
gcggcaccccaaggtgagtgccgtggtgaggtgggcagccccggcaaacggggaygcgccgatgaacgaggatgtctgaagggccgggatcgtcctgggtctgccccggtgaccacggaggtcgcggtgaggagaggtgtcctggtggccatcctgggacgtcctcctggtgactgggagtgccgtagtgattggggacacgcacggagagtatcccaagttggaagtgacccactaagggtcgttgaatccaactcctgcctccgtgcagaccacccgagaatgtctgagagcaatgcyccgtgagagcagtgtcgccgtggccagggccatcctcagttcggggatgtcgtgctgatcggggatgtctcaatgaccagagacgatgccacagagcacggggaggtcctgctgaccgagacgcctcctcacgagcactgcttccccggtgatcatgg

SEQ ID NO: 60380 - DNA, 600 bp, Chicken  19866894319790_1
atgataaagagagagttgctgctctgtgtagtgattcctgacagggtgccttatctgatttcctacccttctggcagaacaggcatgtcaagaggaaagatggcaggatcaataaccaccaggttctgccataccctagcaaatgccagcactaaaaagagcattaaatgcacagacgattcagatgagtttggcccagctttgtgtgaaagacaagtctcccatataggcagaaaaagctctgtttctctgataccactctacaaaattttaactgaactgggaaacagagcaaattaygcyaaacattttctgttttataagacacagatggtaccaacttatgtataatttcatacagaaataattaatcttaaaacaatttaggttaaaaaatagttagcaagcatatctactccaacagaatggtcttaagacttggaagaaaatgaaactttaaaaatcccactacaccaccctgcttgtccaagcacaaaccaagctcttccccaataagcccatgttgcctccagcctctcctcaggcatgcctagttcccattacttgcaccaactcacatctcctcccccttagctgcaa

SEQ ID NO: 60381 - DNA, 600 bp, Chicken  19866894319790_2
ataaagagagagttgctgctctgtgtagtgattcctgacagggtgccttatctgatttcctacccttctggcagaacaggcatgtcaagaggaaagatggcaggatcaataaccaccaggttctgccataccctagcaaatgccagcactaaaaagagcattaaatgcacagacgattcagatgagtttggcccagctttgtgtgaaagacaagtctcccatataggcagaaaaagctctgtttctctgataccactctacaaaattttaactgaactgggaaacagagcaaattaygcyaaacattttctgttttataagacacagatggtaccaacttatgtataatttcatacagaaataattaatcttaaaacaatttaggttaaaaaatagttagcaagcatatctactccaacagaatggtcttaagacttggaagaaaatgaaactttaaaaatcccactacaccaccctgcttgtccaagcacaaaccaagctcttccccaataagcccatgttgcctccagcctctcctcaggcatgcctagttcccattacttgcaccaactcacatctcctcccccttagctgcaagga

SEQ ID NO: 60382 - DNA, 600 bp, Chicken  19866894319801_1
gtttttaagagttaggcatctgcatggtttttgtgccttctgaaagcctgctttttctgtaggacaaaacatcaattgaagtcattcctataacatgtcgctagagggacatgaaaacatggaatagattagctcctgttgttcttagttattgctcttcaacgtggaaaaacacaacgggggtgatttagagctttcccttctctgactgaatgaaagagctttaaaacatgatctttgaactgcttggtgctcatataaaaagaagaaaacatacactaatgctgaagatattgaaayagtrgagtggaacaccagcaagactccgaacaaggagatacaaagaaaaagtgccttttacaattctttggaaattaacttgctagtatcaggtatttgtattaagcttccatacacatagacacatacacaattttatagggtgtacagtgttaggcctatttccaggccacagctctagctgtgaagtactcagcattacccccaggctgtatgtgggagctcagcaggaacaggaggttttcccatgggctgcctcagcaatgccatagctcacaactgggagtgagtgataaaatc

SEQ ID NO: 60383 - DNA, 600 bp, Chicken  19866894319801_2
ttaagagttaggcatctgcatggtttttgtgccttctgaaagcctgctttttctgtaggacaaaacatcaattgaagtcattcctataacatgtcgctagagggacatgaaaacatggaatagattagctcctgttgttcttagttattgctcttcaacgtggaaaaacacaacgggggtgatttagagctttcccttctctgactgaatgaaagagctttaaaacatgatctttgaactgcttggtgctcatataaaaagaagaaaacatacactaatgctgaagatattgaaayagtrgagtggaacaccagcaagactccgaacaaggagatacaaagaaaaagtgccttttacaattctttggaaattaacttgctagtatcaggtatttgtattaagcttccatacacatagacacatacacaattttatagggtgtacagtgttaggcctatttccaggccacagctctagctgtgaagtactcagcattacccccaggctgtatgtgggagctcagcaggaacaggaggttttcccatgggctgcctcagcaatgccatagctcacaactgggagtgagtgataaaatcactt

SEQ ID NO: 60384 - DNA, 599 bp, Chicken  19866894319802_1
  misc_feature (1)..(133): n is any nucleotide
nnnnnnnnnnnnnnnnnnnnnnnnnnnnnnnnnnnnnnnnnnnnnnnnnnnnnnnnnnnnnnnnnnnnnnnnnnnnnnnnnnnnnnnnnnnnnnnnnnnnnnnnnnnnnnnnnnnnnnnnnnnnnnnnnnnnnaggtcctttccttactcatgtctagtaaacaccaaggtttgaggatgtgcatgaagcaggactgccatgcctggctgggctctgcagcatctcagtgtgggagcaggcagcaggggatgctgggcacagaggggtttccctggcagtctccatggccccggtgcctrcgccttctcccagtggtgcaggaaatggaggctgttagctcggtgctgtctagacaatgtgaccagcagggcctttggaaggcttcttgaaacgtgctattataggccgctttgtgatgaaaagaggtcttacaaatatcttcaaatttaagcagcgccattgtgggatttttctttgtgtgcgggtgtgtgtttgtcagccaaatcatttgttcaaagttaatctcaattacagagtgtattgttcataatcccccacggtcccaaaacaatagcagagtggatgtctacttgaatgt

SEQ ID NO: 60385 - DNA, 600 bp, Chicken  19866894319805_1
cagcatatccaaacccatacaaattgatcaagtaccacaccacagcaatctaatcagataaatccatatctgtcagacacgagattagaagttgttaagacagatgcagccatacttctgtgcttgcacttgcttcacaacgggaacttacttgcttgtccagacaagaactgtacagcagaaacaacttaagagaattagatattcaaaactgacacagcagccttaaaaaaaaaaacacgtgaaaacaccaacagctctgctccttgctgacagagttgagtgccagtcattatgtgrtctgtaattccctgacaggtaatgggaaggggagtcccgggtctccagctgcatcaagaaatctcctaatggcataaaaaagttgataacttcacaaacatcgactcccatgcattaaacaataaatactaatgacccatgygctatcagagcaaattgacgaagtctagcaaagactgtaaacaggtaagacaaagagctcgtctggcagcaatacttttttatgtcagaagtaaacagtaaatctccagaacaggaaaacagtaacattgcatctctcaggatacaaacttcactgtt

SEQ ID NO: 60386 - DNA, 600 bp, Chicken  19866894319805_2
ggaacttacttgcttgtccagacaagaactgtacagcagaaacaacttaagagaattagatattcaaaactgacacagcagccttaaaaaaaaaaacacgtgaaaacaccaacagctctgctccttgctgacagagttgagtgccagtcattatgtgrtctgtaattccctgacaggtaatgggaaggggagtcccgggtctccagctgcatcaagaaatctcctaatggcataaaaaagttgataacttcacaaacatcgactcccatgcattaaacaataaatactaatgacccatgygctatcagagcaaattgacgaagtctagcaaagactgtaaacaggtaagacaaagagctcgtctggcagcaatacttttttatgtcagaagtaaacagtaaatctccagaacaggaaaacagtaacattgcatctctcaggatacaaacttcactgtttacctctgaagyagaatgcttagcacgtagaatttctgggaataaaatttaaaaaacagaaagccaagaacccttaggagccatttgtttcctcagtatcgtagcaaagaaaaatcctccgccaacaactcttgcagctagg

SEQ ID NO: 60387 - DNA, 460 bp, Chicken  19866894319805_3
tgacaggtaatgggaaggggagtcccgggtctccagctgcatcaagaaatctcctaatggcataaaaaagttgataacttcacaaacatcgactcccatgcattaaacaataaatactaatgacccatgygctatcagagcaaattgacgaagtctagcaaagactgtaaacaggtaagacaaagagctcgtctggcagcaatacttttttatgtcagaagtaaacagtaaatctccagaacaggaaaacagtaacattgcatctctcaggatacaaacttcactgtttacctctgaagyagaatgcttagcacgtagaatttctgggaataaaatttaaaaaacagaaagccaagaacccttaggagccatttgtttcctcagtatcgtagcaaagaaaaatcctccgccaacaactcttgcagctaggcaaataaattaccaacatttaaaacaacca

SEQ ID NO: 60388 - DNA, 600 bp, Chicken  19866894319809_1
ttccagttgttgacttcagtcatgagaaacaaacgtttcagcagattgtctcctccaacacttccagcaatattttgtcataaattttcactggtttgtatcaactaaaaatctctctcactcaagattcagcttgaaaaatgttggcttgggattaatttgaagtagatttatatccacagactgtgttagggtgcgagttcctcaaaacactgacctaagtttaccaaataagaacatgaaaaacccaaagaactgattcaaatctaactggcgaaagatggatacacaaaggcagcrggactctgccaacataaaccactgtcaggttctgtgatattggcctatgcttgtgaaaaacaagaactgtaacagctcaagggacaatacttgagaggctcccagcgccaacgcatcttgagctgcacctgggctgayacagtgctcctcagccttccccacagctttgagaaaatttatatacatatgtatttaaagcaaagctttgactttgtttaaatgaaaaaaaaaaatgttatgtggataaatattaatagagaaaaggattaagcagaagggtgaaatagcaccacgcagagc

SEQ ID NO: 60389 - DNA, 600 bp, Chicken  19866894319809_2
aaatgttggcttgggattaatttgaagtagatttatatccacagactgtgttagggtgcgagttcctcaaaacactgacctaagtttaccaaataagaacatgaaaaacccaaagaactgattcaaatctaactggcgaaagatggatacacaaaggcagcrggactctgccaacataaaccactgtcaggttctgtgatattggcctatgcttgtgaaaaacaagaactgtaacagctcaagggacaatacttgagaggctcccagcgccaacgcatcttgagctgcacctgggctgayacagtgctcctcagccttccccacagctttgagaaaatttatatacatatgtatttaaagcaaagctttgactttgtttaaatgaaaaaaaaaaatgttatgtggataaatattaatagagaaaaggattaagcagaagggtgaaatagcaccacgcagagcaccacgtctcagcctgagaacgcgtttctcttcagctcagaactttccctggttttgggcacaggacaagaaaactcacaacagctcagtgctgctcagtgagggggaaaccagagagagatccatgctgggcattgc

SEQ ID NO: 60390 - DNA, 599 bp, Chicken  19866894319811_1
  misc_feature (1)..(6): n is any nucleotide
nnnnnntgcttgacagccttgttttccgtgtcattcataacaaaagagaggcagtagtccatgggcgtccaaccttttggcttgtcaggactgcactgagagaagaggaattgtcttgaactgcatatgtcaccttgaaagtaattcctcctatgtattttcttggaaactacaacagatacaacaagcatagtaactctgatagaacatgttctcagctacaaaacacattttttcaacatgttaatcactgttagctatacatttttgtaacaatgaacaagaggctgcatgccgtgyttgtcaaaacacgtaccactggaggtgacccactgttgccactgctgaaacatagctcctactgcttcaggatgctcctgtccaaatcttgatctccaaaacattcagagtcaatgtcaaatagttccattttgtgtgtgtgtgtgtgtgaaggaattcaatgacacatcttctctttattctctctttaatgtcagacaccattttgacagactgcctgtctgctgccatcagtagcatagcaagaaaatgcaaaagaatattagtaggaagggtgcaacatctattgccattttacc

SEQ ID NO: 60391 - DNA, 600 bp, Chicken  19866894319813_1
ccattaatttccattttttgtatctttttaagaaatgcacgtttgaacttatcttctcgagaataaatttagtgtatctacttggaatgtgtactgctaagaataacagaaatggtcatagaccttttataaccattgttgaagaagctgaatatttggccattatgcagaatgcaatttaattagtctgaaacttaatatcatgtggacagtagaaaactctagtgatgctgtttaaagtagtacttgctttgcatactgaaatgtttatgaaaaacaggttgtgtgtttcagatacaraagcttagtttgtgatttaccaaactattaatggctgttcaacgtgttctggcagtttgaatactgcaagtgtcagaagcacatgcaatgtgcttgccagtagggattatatttttccaatttaaatatttactttcagaaataattgtgtccaaatactggtccccagcagggaccagagtgtccctatttttgctcataaatgatttttaacacattttgaaagcgtctaacgggtatggaaaatgttgttagacaacttttagtaatgtgaaaacctattagttcagcagcagtcta

SEQ ID NO: 60392 - DNA, 600 bp, Chicken  19866894319815_1
gatgtcctaggcaggacaaaccctgtgcagaaggttcatgttcctcctgctccaaggacagcagtaactttggaaggtgttgcttggccttgtgcctcccactgcagctcaaagcgatccctgaactgcacattttgcagtgaatccggaattggtgtttcatctatggggcaaaccccacggaggaaataaagataattcttagcatgtggaatgcattaaagagcttgacagaagtaagttggcggagtcttgcactaatcttagtgtagttaactctacaaataattttcttctgtytcgtgtgagggtaatgctaatccactgcagaacgagtgaaaggaagaagaataaacatrcactttcccaaacatacttcttgtctcagagctgagcttgctggtccaactcatttctgctctacctagttcttcctgggaaactgagttgtctttgcaaaatgtctgtactgtgcacatctcttaaatatgaagttaagattgctcagctctgtttagtttagaaagcaaatgtttgacttctctttcacgtatgaaatggcacaaacctaaataatctgataagagctcatctgcttcc

SEQ ID NO: 60393 - DNA, 600 bp, Chicken  19866894319815_2
agcagtaactttggaaggtgttgcttggccttgtgcctcccactgcagctcaaagcgatccctgaactgcacattttgcagtgaatccggaattggtgtttcatctatggggcaaaccccacggaggaaataaagataattcttagcatgtggaatgcattaaagagcttgacagaagtaagttggcggagtcttgcactaatcttagtgtagttaactctacaaataattttcttctgtytcgtgtgagggtaatgctaatccactgcagaacgagtgaaaggaagaagaataaacatrcactttcccaaacatacttcttgtctcagagctgagcttgctggtccaactcatttctgctctacctagttcttcctgggaaactgagttgtctttgcaaaatgtctgtactgtgcacatctcttaaatatgaagttaagattgctcagctctgtttagtttagaaagcaaatgtttgacttctctttcacgtatgaaatggcacaaacctaaataatctgataagagctcatctgcttcctcctgttcttttgcagaggtcatttaaattgcttatttatttttggttccttagcataa

SEQ ID NO: 60394 - DNA, 600 bp, Chicken  19866894319818_1
tttccactttgtcatctagctggaacatcttagcttagtttggttaaatttctttctacttgttctctttttaatttatatgccaatcattatactgctactaataactatggatgtaattgttctattacaaacattagcaagatgccagctgtaatgtgttctattttagtctgatactgtacttagaccttagatcctgttctaaatagttgttactataaagaaaattttctgagtatctaaattagggaacagaaagacaggcagaaaatattatttaaaaactgaaaaaaattrcattttgaagttctgcaatgctttgttatataaaagggacaagacaaggctatcattgattaactagttaatactgggaatcttactgagttatatcagaatttaggcaaactttggcttagtaagtttaagaaatgaagtaaataaagccaaacagtcttttaaatcattctcttaagtaaatacagattgattagtggaaccatatgttgccactgttactaaaaatcagcaatattgacatctcagattataaaaaaattgaagaaaagttctgagattgatgtgtataaattttca

SEQ ID NO: 60395 - DNA, 600 bp, Chicken  19866894319820_1
ctcatctgtaatttaaaacctatgagtttggaaaatgtacatatatatcatatactttttgttcagtattaaaaataaaatgtaatagcaactaattttagaaaagcatataaatcaaattttaaagagatgaaagcctaattaataacatcactttattgtaaatgaagttatgagaaattgcttacacaaatttaattactatgcatttcaataaggtgaatttacagcttcaaaattatagcttctctttccagtattcaaactgtggggatctccttcataagcacacatattttrtacagagcttctgaataatagcatttggatctggagcataaatgtttagtaatcttatttaaatgtgatttgaaggaattacttgaaataataaaaaataaatgtggctataaaacaactgactattatggtaactaaaatggctcactgatatctgattgtgaacccaaataatgatctcatttgccttgatattaaataaaagtgaaattctacatcataagtccctttcagcagctgaagggtttgattatagccataataattactataaccactctgctatacagtctgtttctg

SEQ ID NO: 60396 - DNA, 599 bp, Chicken  19866894319821_1
  misc_feature (1)..(258): n is any nucleotide
nnnnnnnnnnnnnnnnnnnnnnnnnnnnnnnnnnnnnnnnnnnnnnnnnnnnnnnnnnnnnnnnnnnnnnnnnnnnnnnnnnnnnnnnnnnnnnnnnnnnnnnnnnnnnnnnnnnnnnnnnnnnnnnnnnnnnnnnnnnnnnnnnnnnnnnnnnnnnnnnnnnnnnnnnnnnnnnnnnnnnnnnnnnnnnnnnnnnnnnnnnnnnnnnnnnnnnnnnnnnnnnnnnnnnnnnnnnnnnnnnnnnnnnnnnnnnnnnnnttggaagaaggttagactgggaggggaaaggatacatagccycacagttatagatattacttcaagtacttcaagagttgcaacaagggcatggtgtctaaacccttctttgtttcccatgtgtttcagagccaaaaacaagtgccagtattagctatagaaattcatttaccatcagatgtattaattcatctaagagaccagatgtggcatttgtgtgatcagctcaatatgctacagtcatgaagcaacaaacttgaaataatgaaagcagaacgcccactgtgaagatcactagtccrtaccacatatggtccagtatcaccagctagcacttgagg

SEQ ID NO: 60397 - DNA, 600 bp, Chicken  19866894319821_2
ggaagaaggttagactgggaggggaaaggatacatagccycacagttatagatattacttcaagtacttcaagagttgcaacaagggcatggtgtctaaacccttctttgtttcccatgtgtttcagagccaaaaacaagtgccagtattagctatagaaattcatttaccatcagatgtattaattcatctaagagaccagatgtggcatttgtgtgatcagctcaatatgctacagtcatgaagcaacaaacttgaaataatgaaagcagaacgcccactgtgaagatcactagtccrtaccacatatggtccagtatcaccagctagcacttgaggttcctatactcagccactagsaaaaccatgttcccatagaggaacacattaattaccttctaattrcatgcacagattcttctgctattgtgcatttgcttttcaaatctgtaatttctatttttttctattttttaatcttgacacttggtatgtttaaacattagtcatgtaaacatcatcgttacagcattttgaccgtaatggtcacattttggcctgtaaggctctcatatacctgtactgtataaaactgttaaa

SEQ ID NO: 60398 - DNA, 600 bp, Chicken  19866894319821_3
caagtacttcaagagttgcaacaagggcatggtgtctaaacccttctttgtttcccatgtgtttcagagccaaaaacaagtgccagtattagctatagaaattcatttaccatcagatgtattaattcatctaagagaccagatgtggcatttgtgtgatcagctcaatatgctacagtcatgaagcaacaaacttgaaataatgaaagcagaacgcccactgtgaagatcactagtccrtaccacatatggtccagtatcaccagctagcacttgaggttcctatactcagccactagsaaaaccatgttcccatagaggaacacattaattaccttctaattrcatgcacagattcttctgctattgtgcatttgcttttcaaatctgtaatttctatttttttctattttttaatcttgacacttggtatgtttaaacattagtcatgtaaacatcatcgttacagcattttgaccgtaatggtcacattttggcctgtaaggctctcatatacctgtactgtataaaactgttaaatacaacccattccacatatttcttgtaaggcaagatctgcttcactgaatccaataccaa

SEQ ID NO: 60399 - DNA, 600 bp, Chicken  19866894319821_4
ctttgtttcccatgtgtttcagagccaaaaacaagtgccagtattagctatagaaattcatttaccatcagatgtattaattcatctaagagaccagatgtggcatttgtgtgatcagctcaatatgctacagtcatgaagcaacaaacttgaaataatgaaagcagaacgcccactgtgaagatcactagtccrtaccacatatggtccagtatcaccagctagcacttgaggttcctatactcagccactagsaaaaccatgttcccatagaggaacacattaattaccttctaattrcatgcacagattcttctgctattgtgcatttgcttttcaaatctgtaatttctatttttttctattttttaatcttgacacttggtatgtttaaacattagtcatgtaaacatcatcgttacagcattttgaccgtaatggtcacattttggcctgtaaggctctcatatacctgtactgtataaaactgttaaatacaacccattccacatatttcttgtaaggcaagatctgcttcactgaatccaataccaatatttaagtcattgccaatttaaaggacatgatacatacgttccc

SEQ ID NO: 60400 - DNA, 600 bp, Chicken  19866894319824_1
gtattttaacataacgactgcagctgttgaataactgtaaggccgattagatcaataatgacaacagtcagtattagatgagtgagatactgtttccaacttacatgacacatggaatataatgacattcctattgtatatgacataccacaaagacaaacagtccatggaaatacaacaggagcactgcaacacatctaactccattcctctactgatttgattatctaataataaactgtctatcagtcaaacacccttattcacaaagaagcctgttaagcgtggttttgaacagtytgatgagaaaagttaggacaakgaagctcatagtcagtaagcttcatataagtcaatattcccaatataaagtcaaagacatacttcccactgtatttgggtcttatctttaacttcagtgaagtatatctaagcctaacagcccctaatcaaaccattactagcaggcttagggtctgttatttacatttatcttacataacccaaattcaaagttctatttgaactttaagaaaattaacttaccttgctgagctaaagtggatctcagcattccacttttagaccagattttcactt

SEQ ID NO: 60401 - DNA, 600 bp, Chicken  19866894319824_2
gctgttgaataactgtaaggccgattagatcaataatgacaacagtcagtattagatgagtgagatactgtttccaacttacatgacacatggaatataatgacattcctattgtatatgacataccacaaagacaaacagtccatggaaatacaacaggagcactgcaacacatctaactccattcctctactgatttgattatctaataataaactgtctatcagtcaaacacccttattcacaaagaagcctgttaagcgtggttttgaacagtytgatgagaaaagttaggacaakgaagctcatagtcagtaagcttcatataagtcaatattcccaatataaagtcaaagacatacttcccactgtatttgggtcttatctttaacttcagtgaagtatatctaagcctaacagcccctaatcaaaccattactagcaggcttagggtctgttatttacatttatcttacataacccaaattcaaagttctatttgaactttaagaaaattaacttaccttgctgagctaaagtggatctcagcattccacttttagaccagattttcacttggccatcttcaccaactgggaa

SEQ ID NO: 60402 - DNA, 599 bp, Chicken  19866894319830_1
  misc_feature (1)..(30): n is any nucleotide
nnnnnnnnnnnnnnnnnnnnnnnnnnnnnntagaactgcaaccctgaacacttcaaaagaagtctaaattcctgtcaacatatgggctgttggatgttccagtataccagtcttctaggcatgtggacaagactctagttttcacacttgaagtaatgcagcaaagaataatcttactgcatcaacttaaaaaccacatgaagctcagaaataagatcataataagttgcccttataccagtacatgttgcagtcaagcttctaaaacaccctaccgtatgtatagaataacagagtcaktaaggttgaaaaagccctctaaaatcatctaatccaaccatcaaacccatccccaccatgcctgttaatccgtgtccctcagtgccacatttaccattttcttgaaaatgtccagggactgtgaccccaccgcctccctgggcagcctatgcaaatgcctcaccgctcttgctgagaggaaatttttcctaacgttcaacctaaacctcccctgtrcaacttaaggccatcacctcttgtcctatcactgttacctaggagaagagggtgacaccccaaacctcctttcagggaattgc

SEQ ID NO: 60403 - DNA, 600 bp, Chicken  19866894319830_2
tcataataagttgcccttataccagtacatgttgcagtcaagcttctaaaacaccctaccgtatgtatagaataacagagtcaktaaggttgaaaaagccctctaaaatcatctaatccaaccatcaaacccatccccaccatgcctgttaatccgtgtccctcagtgccacatttaccattttcttgaaaatgtccagggactgtgaccccaccgcctccctgggcagcctatgcaaatgcctcaccgctcttgctgagaggaaatttttcctaacgttcaacctaaacctcccctgtrcaacttaaggccatcacctcttgtcctatcactgttacctaggagaagagggtgacaccccaaacctcctttcagggaattgcagagaacaataacgtctcycctgatccttgtaatttggagccagtgcaaggcctaaagtcccccttaagtcttyaacgtttgtcatgttctggctagaacctattgcataagtggaacaaactttcaagttagagctctaatacagcatcattctccctgaagcatgaaacttgcaggaaaaaagcaagcaagagaattaactccaaggttctgaac

SEQ ID NO: 60404 - DNA, 600 bp, Chicken  19866894319830_3
ctaaaatcatctaatccaaccatcaaacccatccccaccatgcctgttaatccgtgtccctcagtgccacatttaccattttcttgaaaatgtccagggactgtgaccccaccgcctccctgggcagcctatgcaaatgcctcaccgctcttgctgagaggaaatttttcctaacgttcaacctaaacctcccctgtrcaacttaaggccatcacctcttgtcctatcactgttacctaggagaagagggtgacaccccaaacctcctttcagggaattgcagagaacaataacgtctcycctgatccttgtaatttggagccagtgcaaggcctaaagtcccccttaagtcttyaacgtttgtcatgttctggctagaacctattgcataagtggaacaaactttcaagttagagctctaatacagcatcattctccctgaagcatgaaacttgcaggaaaaaagcaagcaagagaattaactccaaggttctgaacccatgatgaggtctcttgctatcttcagtgatcaagaaatagtacttccagagttgtgtgctcagtaaatgcttttcctcatctagggagaaataaatactt

SEQ ID NO: 60405 - DNA, 600 bp, Chicken  19866894319830_4
gtccctcagtgccacatttaccattttcttgaaaatgtccagggactgtgaccccaccgcctccctgggcagcctatgcaaatgcctcaccgctcttgctgagaggaaatttttcctaacgttcaacctaaacctcccctgtrcaacttaaggccatcacctcttgtcctatcactgttacctaggagaagagggtgacaccccaaacctcctttcagggaattgcagagaacaataacgtctcycctgatccttgtaatttggagccagtgcaaggcctaaagtcccccttaagtcttyaacgtttgtcatgttctggctagaacctattgcataagtggaacaaactttcaagttagagctctaatacagcatcattctccctgaagcatgaaacttgcaggaaaaaagcaagcaagagaattaactccaaggttctgaacccatgatgaggtctcttgctatcttcagtgatcaagaaatagtacttccagagttgtgtgctcagtaaatgcttttcctcatctagggagaaataaatacttgaaatattcagtggcactgacagagtttggaagttatatttgaaaaaaaaaaatt

SEQ ID NO: 60406 - DNA, 600 bp, Chicken  19866894319831_1
tgaaccgagtacttttctcttttataggggccttgattcatctagtcttctttccaactgtgcaactattcccctctgcagatgagaagaaaatgcagaatatttattatttatggaggacaaatattaatagttcatcacgagtttggtatgataaacataggatagaaacagaaaggtatctggttaagaaaatctaccttataacagacttattttcaagtgctgtcactgtttagcagtcacagtatgaattacattagatggaagatgacagtttcattctgctttgacaccaayggcgattgttagcacagtgattaacgaaaagcaatggcatcattactgagcgaatcattagcatcctcagagaaaraagaattagcaagaaggaaagaaatattccttagaagaaagtacaaaacacatgatggagtattttaatttgttcaaaaacagttactgttcccctacccccagcattaatgttttattaatttaggataggaacaggtaagagcatgaaggtctgtatgcctgcatcagattgataaacctaaagagagactccactgaatcacaggcaccacaatcacttaa

SEQ ID NO: 60407 - DNA, 600 bp, Chicken  19866894319831_2
tgcagatgagaagaaaatgcagaatatttattatttatggaggacaaatattaatagttcatcacgagtttggtatgataaacataggatagaaacagaaaggtatctggttaagaaaatctaccttataacagacttattttcaagtgctgtcactgtttagcagtcacagtatgaattacattagatggaagatgacagtttcattctgctttgacaccaayggcgattgttagcacagtgattaacgaaaagcaatggcatcattactgagcgaatcattagcatcctcagagaaaraagaattagcaagaaggaaagaaatattccttagaagaaagtacaaaacacatgatggagtattttaatttgttcaaaaacagttactgttcccctacccccagcattaatgttttattaatttaggataggaacaggtaagagcatgaaggtctgtatgcctgcatcagattgataaacctaaagagagactccactgaatcacaggcaccacaatcacttaaagcaggagaggttccttcacagtacaagttatgggagaaggaagtatcaccttcctctgtattgataccctatttc

SEQ ID NO: 60408 - DNA, 600 bp, Chicken  19866894319852_1
gagattctccttggccctcctcttgctgttaatatctctccaaaaatatttttcattatcttgaacactggtggcaagattatgttctttctggtcttttgcctttctaattttccctctgcatatcctagcaacatccttgtacatccaagttgttcgtacattctttttttttttttttttttttttacctgaagtctcaacaaaagctccctgtccagtcaggctgatcttcttccccatcaactcatcttatggcgcagggaaatgacagcctttttctgtgtctttacaattttrttcttgagggaagtccagtgctcctggacacctttgtccttcaggactgactcccaagggattctcccagccagtgttctaaacagttcaaagtctgccctccagaagtccaaggcagtgcttttgccgagcccccttctgacttcaccaagaatagagaagtcaatctttttatggctgctatgcccaagacggcttccgactaccacgtctccccctagtccttccctgtttgtaatcagcaggtctaacagggtatttccacttgtaggctctcttacccactgcttcaggatatta

SEQ ID NO: 60409 - DNA, 575 bp, Chicken  19866894319855_1
aagaaagtttttcaccatcattatccccataagtttaacgttgcccttaaaaaaataatagctaacaccttgcaaaaaaataggtgctattggggtttggatctttttttccaggcctggtgcaagaaaaaaagaatagttctctgagattccagttgctaattactgacattagaaaagataaagatgtgaaagagttgccactgcttttcctactacaagatgtatttgaacccatagtaaagtaccatgctaaagtcctataaatgattttaagcccatggaaatatattttaatawgtgaaatattcatgtctacggaatatttaactggttattacaagtggggcctaaaagcaacagccattttattaaggggagccaaagtaaataatttttaagatattttctaggcttctgtttttccttacagtgagacgtcttaccatgaatcagagttgatctaagtcttgagaaaagttctagcaaaattgttgttgagtgactttggattttgcgggagcttttcagaaatctgtaattaatacatctgtaaataatctcaagtccgtaag

SEQ ID NO: 60410 - DNA, 600 bp, Chicken  19866894319857_1
tttctcaagtatgtatgcattttttcacttttgtttctagctggttgtattgcccagaaaatgggtcttccaattcagctggttgctgcagttaacagcaatgacataattcacaggactgttaaggatggagatttctcactctcaggtcgtgtgaaggctacattagcatcagccatggatattcaggtagataatgaattggaacaaatggaagataacgagcttgcatattttgggatttttttttccttgtactttgctatacctggtttataagactgtaattctgccactggyagtgcctcttagtgatgcactgggaggtgtgagtcatactgagcatttatgctgcagactgctgagctgagatagatcaaacaccaccttctcccatactttccaaggcttgacttggtaatctctgttgctaaatgatgggtttctggagacttgccatgtgcaggcttggaaaaaagggccattttctcgaaacctctgtgacacttagaaaagtatcaatcctgtcatgtcccaacatttctgttggtgcttctggaaggctccaccaagagcaagagaagaagggaaggagctgga

SEQ ID NO: 60411 - DNA, 599 bp, Chicken  19866894319861_1
  misc_feature (1)..(174): n is any nucleotide
nnnnnnnnnnnnnnnnnnnnnnnnnnnnnnnnnnnnnnnnnnnnnnnnnnnnnnnnnnnnnnnnnnnnnnnnnnnnnnnnnnnnnnnnnnnnnnnnnnnnnnnnnnnnnnnnnnnnnnnnnnnnnnnnnnnnnnnnnnnnnnnnnnnnnnnnnnnnnnnnnnnnnnnnnnnnnntgtcccataagggaaagcctgggacatcctttccaaacagcagcagggagagcagggccagaaaatggcgttcaggttccttctagctgagagcagggcttatcctctccgacttcttagttcccrtctgccagagtaatcctacacagtaatgttttattccagaagctgttcgtgcatttaatgagaggcaaccacagtcccagtagccagggctgcctttcttaaggtgataccctggcaagtttcccacggtagttcagtagcttggctatttcttttctaaatttacaagcaatctcctgttacatagtggggccagcttctgggatatcwagtggtttttcaggtgttgtattacagtgggctggaagctcttattcaccaggctgtgcatgtaactggtgcatgttcaaatgactgcg

SEQ ID NO: 60412 - DNA, 600 bp, Chicken  19866894319861_2
acagcagcagggagagcagggccagaaaatggcgttcaggttccttctagctgagagcagggcttatcctctccgacttcttagttcccrtctgccagagtaatcctacacagtaatgttttattccagaagctgttcgtgcatttaatgagaggcaaccacagtcccagtagccagggctgcctttcttaaggtgataccctggcaagtttcccacggtagttcagtagcttggctatttcttttctaaatttacaagcaatctcctgttacatagtggggccagcttctgggatatcwagtggtttttcaggtgttgtattacagtgggctggaagctcttattcaccaggctgtgcatgtaactggtgcatgttcaaatgactgcgtctccagtgtttctgctctaattcattgcyttgcatcttccacaggaccctgtctctacttcaagtttccatctatttaaaaaaaagtctggggagagtaatgcttaggtcaaaaaagtgacatcccacttaattacaagtcccacgagctcctcagagggacagaaggttttaaaactgcattcacatccaagtttcaatttatgacaat

SEQ ID NO: 60413 - DNA, 600 bp, Chicken  19866894319861_3
tttattccagaagctgttcgtgcatttaatgagaggcaaccacagtcccagtagccagggctgcctttcttaaggtgataccctggcaagtttcccacggtagttcagtagcttggctatttcttttctaaatttacaagcaatctcctgttacatagtggggccagcttctgggatatcwagtggtttttcaggtgttgtattacagtgggctggaagctcttattcaccaggctgtgcatgtaactggtgcatgttcaaatgactgcgtctccagtgtttctgctctaattcattgcyttgcatcttccacaggaccctgtctctacttcaagtttccatctatttaaaaaaaagtctggggagagtaatgcttaggtcaaaaaagtgacatcccacttaattacaagtcccacgagctcctcagagggacagaaggttttaaaactgcattcacatccaagtttcaatttatgacaatgaaaytcgaagtggaaatgttgttcacaggaccgcacatcagtgactggtccaggatgatgaagagattctgacactaaaaagctcaggaatgttcttgtgttgttagtatctgtctaa

SEQ ID NO: 60414 - DNA, 600 bp, Chicken  19866894319861_4
agtagccagggctgcctttcttaaggtgataccctggcaagtttcccacggtagttcagtagcttggctatttcttttctaaatttacaagcaatctcctgttacatagtggggccagcttctgggatatcwagtggtttttcaggtgttgtattacagtgggctggaagctcttattcaccaggctgtgcatgtaactggtgcatgttcaaatgactgcgtctccagtgtttctgctctaattcattgcyttgcatcttccacaggaccctgtctctacttcaagtttccatctatttyaaaaaaagtctggggagagtaatgcttaggtcaaaaaagtgacatcccacttaattacaagtcccacgagctcctcagagggacagaaggttttaaaactgcattcacatccaagtttcaatttatgacaatgaaaytcgaagtggaaatgttgttcacaggaccgcacatcagtgactggtccaggatgatgaagagattctgacactaaaaagctcaggaatgttcttgtgttgttagtatctgtctaactgctcagttgaattaaacaaaacatctgaaaatgatcagtcccctcca

SEQ ID NO: 60415 - DNA, 600 bp, Chicken  19866894319861_5
tttttcaggtgttgtattacagtgggctggaagctcttattcaccaggctgtgcatgtaactggtgcatgttcaaatgactgcgtctccagtgtttctgctctaattcattgcyttgcatcttccacaggaccctgtctctacttcaagtttccatctatttaaaaaaaagtctggggagagtaatgcttaggtcaaaaaagtgacatcccacttaattacaagtcccacgagctcctcagagggacagaaggttttaaaactgcattcacatccaagtttcaatttatgacaatgaaaytcgaagtggaaatgttgttcacaggaccgcacatcagtgactggtccaggatgatgaagagattctgacactaaaaagctcaggaatgttcttgtgttgttagtatctgtctaactgctcagttgaattaaacaaaacatctgaaaatgatcagtcccctccataaatgtcactgtttcacaaaagaagatactgactaaccaaagattatagtatatacacatgtgttttatctctgcaagatgttttcaagaggttgaataagccagtctatgtgttgacgtgaactgtaagcagaag

SEQ ID NO: 60416 - DNA, 600 bp, Chicken  19866894319861_6
cataaatgtcactgtttcacaaaagaagatactgactaaccaaagattatagtatatacacatgtgttttatctctgcaagatgttttcaagaggttgaataagccagtctatgtgttgacgtgaactgtaagcagaagatcagcttgaaatattaggccaataatatggataatatacatccagttgcactgcaatctatctcacaaggtgactcaggtcatggttttgccaactgaagttaaagtgcaccatctgggataatcccacatttcacatgttctcaacatgttttctcaaygcttytggagttctcttgtaaccccaaactttgacaaamctgtaccactaccatctgtgaggggaagacatgagctgggctttgtcccagcatggtcattccagagctaacttagggtcaagaagacctgcacaaagaaaagttctccctagagctttgcctctaattgggtgctagagattcctctcctgtaagggtctactgtctatcacaatgtgatttgtatttaccaagtcattatttggatgaagacaatttgcttcaaaggacagctgttttgagacataagggtctcattcc

SEQ ID NO: 60417 - DNA, 600 bp, Chicken  19866894319861_7
atgtcactgtttcacaaaagaagatactgactaaccaaagattatagtatatacacatgtgttttatctctgcaagatgttttcaagaggttgaataagccagtctatgtgttgacgtgaactgtaagcagaagatcagcttgaaatattaggccaataatatggataatatacatccagttgcactgcaatctatctcacaaggtgactcaggtcatggttttgccaactgaagttaaagtgcaccatctgggataatcccacatttcacatgttctcaacatgttttctcaaygcttytggagttctcttgtaaccccaaactttgacaaamctgtaccactaccatctgtgaggggaagacatgagctgggctttgtcccagcatggtcattccagagctaacttagggtcaagaagacctgcacaaagaaaagttctccctagagctttgcctctaattgggtgctagagattcctctcctgtaagggtctactgtctatcacaatgtgatttgtatttaccaagtcattatttggatgaagacaatttgcttcaaaggacagctgttttgagacataagggtctcattccacacg

SEQ ID NO: 60418 - DNA, 600 bp, Chicken  19866894319861_8
ccaaagattatagtatatacacatgtgttttatctctgcaagatgttttcaagaggttgaataagccagtctatgtgttgacgtgaactgtaagcagaagatcagcttgaaatattaggccaataatatggataatatacatccagttgcactgcaatctatctcacaaggtgactcaggtcatggttttgccaactgaagttaaagtgcaccatctgggataatcccacatttcacatgttctcaacatgttttctcaaygcttytggagttctcttgtaaccccaaactttgacaaamctgtaccactaccatctgtgaggggaagacatgagctgggctttgtcccagcatggtcattccagagctaacttagggtcaagaagacctgcacaaagaaaagttctccctagagctttgcctctaattgggtgctagagattcctctcctgtaagggtctactgtctatcacaatgtgatttgtatttaccaagtcattatttggatgaagacaatttgcttcaaaggacagctgttttgagacataagggtctcattccacacgttcttgttatctgttcttgtccaactgcttttgt

SEQ ID NO: 60419 - DNA, 600 bp, Chicken  19866894319864_1
cagagcctcctgcccaggggctggacgggtcctttgcagggctcagagactcaaatcagtgtgaacagaaacatgaaagaagttgccttgtgagaggttcaaaaagtctatttacctagtaagaaaaaaataatatataaaaaatcttattttcctagtggaggggagaaaagctgtgtattaataagtttaatcaatgtcagtgttgggaatgagaatgtgttgcatgtgattttccctgatggtcagtctgtgctccaacactgcacataagatgatcctgcctccatttctgttctyaaagaaaaaacaacagaaggacagcacttcctaaatttttctgtaacacagtacaagtagctgcatgcgtgcagtttggaaacagtcacttctaggtgctgtggatatttagagaactgctttacctggtttttctgagcagaaatctatgtggagcaccttctgagacattggatcagtgccataggttttgctgtgatagagcagtggctctttgcttgtgaataattcatacctataagagggatggaacactatgaacttatctgaaggtactccagcttacatgagttgctgcac

SEQ ID NO: 60420 - DNA, 599 bp, Chicken  19866894319872_1
  misc_feature (1)..(61): n is any nucleotide
nnnnnnnnnnnnnnnnnnnnnnnnnnnnnnnnnnnnnnnnnnnnnnnnnnnnnnnnnnnnntttctctgagtgcaaacacaatatgcactagttcagggaaccaagtatttaaaaatatatatatttgtcagcaaaaccgtgcaacaaagaagaccttaagtacagagttctcaatacagctgcaaatacagttgttctggtgttgtgagtcagtgagaaatttctcagtgattagaaatacctagagaagtttgtgcattgtttttgtttgttggattaagttatttaagtgaaaaaawtatatattttctagcaaaataaggtgktgtactttgtgtgctgtgagcaratgtgctcagagtcctttggatgtgtaactaaatgatgacactgtagtagcttttagatgttgactratgatagacagaaatgtccttccttgtcctcaggagcagtgtaaatgaaatacatccctgccctgaaatgaagatggcagaagcatcagttatactctattgcatctccatcasagaaaatcagarcagcttaaagagaggattttggcatactgaccccattttcaggagtaataatgaag

SEQ ID NO: 60421 - DNA, 425 bp, Chicken  19866894319872_10
cctgccctgaaatgaagatggcagaagcatcagttatactctattgcatctccatcasagaaaatcagarcagcttaaagagaggattttggcatactgaccccattttcaggagtaataatgaagctgtgtttgatggaattgaaggaagtctctcaaatagctacttgtggctcctctctttggttgccagatgagatagcaatgagaggatttgtgtctccacaagttgtgaagtcttaaatgcctccatcttgtagtgttgcctaarctgtattggcaartgtctcctgccagcwycaagcactgagtgtaaacactaaccaaaaggcgaagtgttaaacaaggtcctgcggacaaaaatcactcacgttattcatgtgctattcaagctgagttattcctacatagttatttatggttag

SEQ ID NO: 60422 - DNA, 599 bp, Chicken  19866894319872_2
  misc_feature (1)..(34): n is any nucleotide
nnnnnnnnnnnnnnnnnnnnnnnnnnnnnnnnnntttctctgagtgcaaacacaatatgcactagttcagggaaccaagtatttaaaaatatatatatttgtcagcaaaaccgtgcaacaaagaagaccttaagtacagagttctcaatacagctgcaaatacagttgttctggtgttgtgagtcagtgagaaatttctcagtgattagaaatacctagagaagtttgtgcattgtttttgtttgttggattaagttatttaagtgaaaaaawtatatattttctagcaaaataaggtgktgtactttgtgtgctgtgagcaratgtgctcagagtcctttggatgtgtaactaaatgatgacactgtagtagcttttagatgttgactratgatagacagaaatgtccttccttgtcctcaggagcagtgtaaatgaaatacatccctgccctgaaatgaagatggcagaagcatcagttatactctattgcatctccatcasagaaaatcagarcagcttaaagagaggattttggcatactgaccccattttcaggagtaataatgaagctgtgtttgatggaattgaaggaagtc

SEQ ID NO: 60423 - DNA, 599 bp, Chicken  19866894319872_3
  misc_feature (1)..(11): n is any nucleotide
nnnnnnnnnnntttctctgagtgcaaacacaatatgcactagttcagggaaccaagtatttaaaaatatatatatttgtcagcaaaaccgtgcaacaaagaagaccttaagtacagagttctcaatacagctgcaaatacagttgttctggtgttgtgagtcagtgagaaatttctcagtgattagaaatacctagagaagtttgtgcattgtttttgtttgttggattaagttatttaagtgaaaaaawtatatattttctagcaaaataaggtgktgtactttgtgtgctgtgagcaratgtgctcagagtcctttggatgtgtaactaaatgatgacactgtagtagcttttagatgttgactratgatagacagaaatgtccttccttgtcctcaggagcagtgtaaatgaaatacatccctgccctgaaatgaagatggcagaagcatcagttatactctattgcatctccatcasagaaaatcagarcagcttaaagagaggattttggcatactgaccccattttcaggagtaataatgaagctgtgtttgatggaattgaaggaagtctctcaaatagctacttgtggctc

SEQ ID NO: 60424 - DNA, 600 bp, Chicken  19866894319872_4
atatatatttgtcagcaaaaccgtgcaacaaagaagaccttaagtacagagttctcaatacagctgcaaatacagttgttctggtgttgtgagtcagtgagaaatttctcagtgattagaaatacctagagaagtttgtgcattgtttttgtttgttggattaagttatttaagtgaaaaaawtatatattttctagcaaaataaggtgktgtactttgtgtgctgtgagcaratgtgctcagagtcctttggatgtgtaactaaatgatgacactgtagtagcttttagatgttgactratgatagacagaaatgtccttccttgtcctcaggagcagtgtaaatgaaatacatccctgccctgaaatgaagatggcagaagcatcagttatactctattgcatctccatcasagaaaatcagarcagcttaaagagaggattttggcatactgaccccattttcaggagtaataatgaagctgtgtttgatggaattgaaggaagtctctcaaatagctacttgtggctcctctctttggttgccagatgagatagcaatgagaggatttgtgtctccacaagttgtgaagtcttaaa

SEQ ID NO: 60425 - DNA, 600 bp, Chicken  19866894319872_5
attagaaatacctagagaagtttgtgcattgtttttgtttgttggattaagttatttaagtgaaaaaawtatatattttctagcaaaataaggtgktgtactttgtgtgctgtgagcaratgtgctcagagtcctttggatgtgtaactaaatgatgacactgtagtagcttttagatgttgactratgatagacagaaatgtccttccttgtcctcaggagcagtgtaaatgaaatacatccctgccctgaaatgaagatggcagaagcatcagttatactctattgcatctccatcasagaaaatcagarcagcttaaagagaggattttggcatactgaccccattttcaggagtaataatgaagctgtgtttgatggaattgaaggaagtctctcaaatagctacttgtggctcctctctttggttgccagatgagatagcaatgagaggatttgtgtctccacaagttgtgaagtcttaaatgcctccatcttgtagtgttgcctaarctgtattggcaartgtctcctgccagcwycaagcactgagtgtaaacactaaccaaaaggcgaagtgttaaacaaggtcctgcggac
